United States Patent Application Publication US 2007/0054278 A1 - sequence listing, part 122

SEQ ID NO: 227193 - DNA, 201 bp, Homo sapiens
ccacagccacatggaactgtaagtccattaaatctctttttctttttaaagtacccagtctcaggtgtgtctttatcagcagcatgaaaacagactaatayagatgtatataacctaagagcatagacaatagtaaaatgtagtgacattatgaggaattacagagtttttaatattttcttccctttgtttttaatattt

SEQ ID NO: 227194 - DNA, 201 bp, Homo sapiens
ctagttttatttcatgaactcaaatgttccctgagggccgggattcaacacaaatttgttttacatttcccacaattccctgctttgccccagacaacacrtatcataggatcttatctgttgatgtggttgtaagcaactctttgttaatgacaaacattatactaatataatgtttttattagaatgctgaacacttct

SEQ ID NO: 227195 - DNA, 201 bp, Homo sapiens
cttgtcattattgttgaattgtttcatgttgttctaagtccttgaatccctcaaatgtgctgccggaaaggtaattcctcaaaaaatgtgcagctcacagwtggtggttgcggctcataggatctctggcttaagaccctcgctgtacagtggtagtcagtgggtgggaggaggggtgacaagaaggcagggaaggagaga

SEQ ID NO: 227196 - DNA, 201 bp, Homo sapiens
ttgccttgtcattattgttgaattgtttcatgttgttctaagtccttgaatccctcaaatgtgctgccggaaaggtaattcctcaaaaaatgtgcagctcrcagatggtggttgcggctcataggatctctggcttaagaccctcgctgtacagtggtagtcagtgggtgggaggaggggtgacaagaaggcagggaagga

SEQ ID NO: 227197 - DNA, 201 bp, Homo sapiens
aataccatttaagaaaagcaagaaaaataccttggtaagggctgtctaatcgtctgtggtgtgtgtgtatacacatatatatatatatatatatatatatwtatatatatatacacattcagatacatatatataggtttgtatatgtattaatatttaatgtatgaatatagcatgacataattatgtaaaattaatgtt

SEQ ID NO: 227198 - DNA, 201 bp, Homo sapiens
taccatttaagaaaagcaagaaaaataccttggtaagggctgtctaatcgtctgtggtgtgtgtgtatacacatatatatatatatatatatatatatatwtatatatatacacattcagatacatatatataggtttgtatatgtattaatatttaatgtatgaatatagcatgacataattatgtaaaattaatgttaa

SEQ ID NO: 227199 - DNA, 201 bp, Homo sapiens
tttctattgaaacaatgacaagagtacaggaagaggaacaagtggatggtgcaataaccatggatgtttttatagatattgtgaggtgaagctgcacttcratagtcattgccttgtcattattgttgaattgtttcatgttgttctaagtccttgaatccctcaaatgtgctgccggaaaggtaattcctcaaaaaatgt

SEQ ID NO: 227200 - DNA, 201 bp, Homo sapiens
agtgtaggttggtttctttgttaggtactgctcttttgcaggtagagtactgagattagactagtgattttgacccatgtgtgctatgattatagtagtgyatacaacagaagaaattgtttagagaagaggcaagaagtggagtgtgaggtcatgccagcatgaagaaagattgctgtttaccagaagatgctcaaacct

SEQ ID NO: 227201 - DNA, 201 bp, Homo sapiens
atacttggcacataaatataacacttatgttgaggggtaattaatttgctcttacaggtgaagtgatgggtcacttgtggcccagcctcacttctttgcaytggacaagttaaatcctgaaacagacattctctgatagcatttaaaaatcttccaagccagacactcattttagaagctgttaggtagttgtaatttgga

SEQ ID NO: 227202 - DNA, 201 bp, Homo sapiens
caccagccaagagttaattagcatttggctcaagacacattttaatacatataataatgcattatcaggcagcccctcaatatccagatttttatgaatasagtcatccatcgcttgatgaaggggatatattgtgctaagtgtgtccttaggtgatttcatcattgtatgaacatcatagttacttacacaaatctagat

SEQ ID NO: 227203 - DNA, 201 bp, Homo sapiens
ggggaaaaagcaaaaaaaaattctttatatgtatccttgaatttaaactttctattttttcattttgaaataagttattgagatgtaattcacataatagraaattaatcattttaagtgaacaattctgttagatttagtacactgataatgttgtgcagctaccacctttatatagttccaaaacattcccaaagtaaa

SEQ ID NO: 227204 - DNA, 201 bp, Homo sapiens
atttaaaagttacccttcttttctacagttgcagtttattctttgaaaacttttgagtagagagaatactaccttcacagtgaagaatttgcttatctgtrtaatacattttctatgtagtttacatcagtggctacagcccaggtagagaaaatgcttgattgcctggtgcattcctatatgtgattttgtggacaatga

SEQ ID NO: 227205 - DNA, 201 bp, Homo sapiens
cggaaaaatatccatgcgggtccgttgctcattttttaattgggttattttacaggggagggtactattgagttgaatgggtttcttatgtattttggaayttaatcccctgtctgatatatggtttccaaatatgctctcccattttgtaaattgtctcttcactatgttgcttgttttctttgctcttcacaaacttct

SEQ ID NO: 227206 - DNA, 201 bp, Homo sapiens
agcaaggcctggtacgggcatcactggccaggggttcccagcttgcaaagtgactgagaagaaaaatcctacatcaaaatcatgacttcagtctacttgtytcctgattgtggggaatattgaagggaaatcccataattttgtcaactcaaatactttctccaatctgtttctgacagttgaggtggaagattttgatgc

SEQ ID NO: 227207 - DNA, 201 bp, Homo sapiens
gatggaaattttaagagaataattaatcagatacgaaaacaataggctgggaaaatcacgcaggccattgagatccatctgtaactccaccactaaatgcmtagatttccaggaaccaactccacagaagcagtatgaatttggctcatttcatgcagatttgctaaataggtttcaatgtttttaatttttaggggtcta

SEQ ID NO: 227208 - DNA, 201 bp, Homo sapiens
ggctggtcaacacacaccttcatgtatggaactgtgtctacacccaacccagagaataccaggcatttctgtgtcatcccctctacgttcaaaatgctctyacctgcattatggttccagtttacatcagagtgtgtgtgagtgtgtgtctataaaacttggacaactgatctaattaatttgaaaaatctaaacctggga

SEQ ID NO: 227209 - DNA, 201 bp, Homo sapiens
ccagtactctccaagatagacaatccaaaataggctggtcaacacacaccttcatgtatggaactgtgtctacacccaacccagagaataccaggcatttstgtgtcatcccctctacgttcaaaatgctcttacctgcattatggttccagtttacatcagagtgtgtgtgagtgtgtgtctataaaacttggacaactg

SEQ ID NO: 227210 - DNA, 201 bp, Homo sapiens
taactaggttttaccctcatggagttgacagtctggaaggggctatgtgatgttagttataaatatgataatcatatatgatttacggtaagttaccttaygagttcagcaatggaactggctttccaacatttttaaaattgtgatttctttagaaaattttgtccaagttgtgtaaaatttaaaaggaaatattgatct

SEQ ID NO: 227211 - DNA, 201 bp, Homo sapiens
attaatttcacctgtttctttgtacttgttttggtgttgctaccaaacacttttaataacatatgtatcatgcattagatttcttctggatggttttgctmtagaatgctttcaaactgcttcagcttactggcaagcagctgtttgtggagactgttatgaccttccccagatttagaataggaatttgaatgatgccag

SEQ ID NO: 227212 - DNA, 201 bp, Homo sapiens
acgtctaccattaatgttgaatttggtagcagctagccacctgtgaccagtctgaattgagatgcgttgtaaatgtaaaatccagtttggatttcaaagcyttctaccaaaaaaaaagtaaatatctcattaataatgttttataatagttacatgttgaaataatattttggtaatgttgagttaaaaattatatcacta

SEQ ID NO: 227213 - DNA, 201 bp, Homo sapiens
tcactcatttacacactcactgctgcaagaaatccattcaacctcctctacagttggtgggggtgtcttttacttataaaacacaggatttttttgtgtaygtgcctttgaaaaagaatagtgcccttttccatttttttgcctgacaaacacctctcctctcttgagatgctgttccaatacagcaccatctctgatctg

SEQ ID NO: 227214 - DNA, 201 bp, Homo sapiens
ttagaatcccggcttgagtgttcaaatgtggttatatttttgtcactgcggggtgacgtctaccattaatgttgaatttggtagcagctagccacctgtgmccagtctgaattgagatgcgttgtaaatgtaaaatccagtttggatttcaaagccttctaccaaaaaaaaagtaaatatctcattaataatgttttataa

SEQ ID NO: 227215 - DNA, 201 bp, Homo sapiens
gcatcctagctagtcactcatttacacactcactgctgcaagaaatccattcaacctcctctacagttggtgggggtgtcttttacttataaaacacaggrtttttttgtgtacgtgcctttgaaaaagaatagtgcccttttccatttttttgcctgacaaacacctctcctctcttgagatgctgttccaatacagcac

SEQ ID NO: 227216 - DNA, 201 bp, Homo sapiens
atactgtatatataggtcttagtattatatatataatgttctgtttatatgtaataatatatgagagagaacagaaccaatagaatatatatatatatattcagatagatacatacatacaaacatatatatgaaattgtttcatgtacttaaggaggccgagaagtctcatgatctattctctgaaagctggataaccaa

SEQ ID NO: 227217 - DNA, 201 bp, Homo sapiens
atatactgtatatataggtcttagtattatatatataatgttctgtttatatgtaataatatatgagagagaacagaaccaatagaatatatatatatatattcagatagatacatacatacaaacatatatatgaaattgtttcatgtacttaaggaggccgagaagtctcatgatctattctctgaaagctggataacc

SEQ ID NO: 227218 - DNA, 201 bp, Homo sapiens
attttagtggtcttagtattatatataatatagtattaaatacatatataatatatactgtatatataggtcttagtattatatatataatgttctgtttrtatgtaataatatatgagagagaacagaaccaatagaatatatatatatatattcagatagatacatacatacaaacatatatatgaaattgtttcatgt

SEQ ID NO: 227219 - DNA, 201 bp, Homo sapiens
tctgttgggaaaataaattagaattgtaatgaggtatgtacagaaagctccatttgatttatctgttagataaacattttgagctaaaaaaaaaaaaaaaaccccacaaaaatctgctaaaatgaggttaacttctcaaataatcaatcattgctctctctctttacttccccaatgtcctgctacctttgcaaatgacca

SEQ ID NO: 227220 - DNA, 201 bp, Homo sapiens
gttacattaagatgttcctatacagaatcatgaatctggcactcacaattattgaaaagcatttaaaaattgctaccgtgaaagtgttttttttggttttkgtttttgtttttttttttcaaaaggagcaaaaggaatgattcttgaagagcataaagtattttaccatttttctctccctcttctcattatcatacacca

SEQ ID NO: 227221 - DNA, 201 bp, Homo sapiens
aaaatgagtagacaaaaagcttctctgaagcctttttgatttctgacttttgcagttttagtttgagacataaagcgaggttttagtgcattctgccatcwaaatacagtttagtcttttagccgagatcacaaaatgtaacaattagtttaatgcacacagattagcagccttttataatattaattgcaacaagaggcc

SEQ ID NO: 227222 - DNA, 201 bp, Homo sapiens
gaggaaacttagtatcatggcagaaggcaaaaggggagctgggagatcccatggcaagaggcagtgagagtgacaagggacaagcttctttaaacagccakcctcttgtgtgaactaacagtgagaacccactcattaccatggggagggctccaagctattcattacagatctacccccatgacctaaaacctcctacca

SEQ ID NO: 227223 - DNA, 201 bp, Homo sapiens
tgtatagagcgaaagaaagggaaggcattgaacgtaaatttagacttctcacaataggtttttatataaatgatttctgagatttttttttttttttttttactaatgtgaaaatacctcctagctctgttcatctctcacatagtgtttctgataaagttttgtagtgtatctgttgaagagatactatgattcaaagtg

SEQ ID NO: 227224 - DNA, 201 bp, Homo sapiens
gaaagatattcccaacttttgacatcgattccccagggtagggttaatctcttagagtaatactctaaaatcttatatggaccaggcacagtggctcacayatgtcattccagcatttggggaggctgaggcaggaggatccattgagttcaggagttcaagaccagtctaggcaatgtagtaagacaccatctctaccag

SEQ ID NO: 227225 - DNA, 201 bp, Homo sapiens
tgggtggatcacttgaggtcgggagttccagaccagcctagctgacattgtgaaaccctgtctctaactaaaaatacaaaaaaattagctaggtgtggtgrcaggcacctgtaatcccagctactcaggaggctgaggcaggagaatcgcttgaacctgggaagtagaggttgcagtgagctgagatagcgctgttgcact

SEQ ID NO: 227226 - DNA, 201 bp, Homo sapiens
acctaagaacataggcctatgggcatgactacaaacctctttctgttcctcttatgaaggccagtatgtcattttagagtgccctgttcaaatttaaatgkggtgacaatacctcagacttgactgcctaggttgaattttttctcctgggttttctatgcagtgggtattttcaggtagaggctagaaagctttagcctt

SEQ ID NO: 227227 - DNA, 201 bp, Homo sapiens
ctaaatttgtttaaaaacattgatgaagaaggaggattgcttgaggctgggagcttaagaccagcctgggcttgcagggcaagaccttgtctctaaaaaakaaaataaataaacaaaaataaattttaaacatatttttctttcttcaataatctcagcttattatagcttgttcttttttgtttttgtttgcttgtttgt

SEQ ID NO: 227228 - DNA, 201 bp, Homo sapiens
tgcacagcatgttattgtactgaatattatatgcagctgtaacacaatggtaagtatttgtgtatctaaacgtagaaaaggtacagttaaaatacagtatragaagtaaaaaatggtagacctgtacagggcacttaccatggatggagcttagactggaagttgctcaggatgagtcagtacataagtgatgagtgcatg

SEQ ID NO: 227229 - DNA, 201 bp, Homo sapiens
gtagggattttttgaaaacgaaagtattctcattggttgtggaaagcaaccaatcagaagctaaagtgaatttacaaagttgcacttctgtgcaaaggcakacttggcccacaatcagtctgattggttgtggacagcaaccaagcagatgtactttcaatttcctatctgccacgcagaaaagctgggggtttgcaaagt

SEQ ID NO: 227230 - DNA, 201 bp, Homo sapiens
ggagtgtgtccaggttcttggcattttgaacaaagaattagacaaaacacacaaagcaaggaaagaatgacgcaaaaaaagtagggattttttgaaaacgraagtattctcattggttgtggaaagcaaccaatcagaagctaaagtgaatttacaaagttgcacttctgtgcaaaggcagacttggcccacaatcagtct

SEQ ID NO: 227231 - DNA, 201 bp, Homo sapiens
tgttcttgttactggtggagtgtgtccaggttcttggcattttgaacaaagaattagacaaaacacacaaagcaaggaaagaatgacgcaaaaaaagtagrgattttttgaaaacgaaagtattctcattggttgtggaaagcaaccaatcagaagctaaagtgaatttacaaagttgcacttctgtgcaaaggcagactt

SEQ ID NO: 227232 - DNA, 201 bp, Homo sapiens
acatcccgagacaactgagtagtacatactcagtgacctgaaataatagattctctgtctctttttgggtttgtttaaactgcacatttttgtttgtttttctaggtaataaatagcctcgaaatttttgtttaaaatctgacattttgaaccttctccattgttcttgttactggtggagtgtgtccaggttcttggcat

SEQ ID NO: 227233 - DNA, 201 bp, Homo sapiens
tttttccggtagaattgattccatgggaaagaggaacttctaacaaaggtagaagaggaatggcatatcaccaaaatgcttagactgtgaatttggacatsgagtgtgtggtgtgtgtatgtaggtgagcgagagaaagagagagataatcctaaagagaaatgtaaaactctagaaaagggcacaaaaacagacacagtg

SEQ ID NO: 227234 - DNA, 201 bp, Homo sapiens
gggctttatgatttttattgaaggctgaggatcgagttcaaatggtgatgcccgctatcgagaatacttagtgccactgttccatgagatggggctccagytttttcatataaaagttacacaccgccttttccaggaagcctttctggctttcaactacaatataattctcatgctttttttgtttatatttctacttta

SEQ ID NO: 227235 - DNA, 201 bp, Homo sapiens
ttctggctttcaactacaatataattctcatgctttttttgtttatatttctactttacttacattacagcctttgtaccaacatgtgtctctttctccaraagttctcctaatgtcaggaatgtctttgtatctgtctactgcttctttttctttgtcataacaccttagcatagtacactggtctatacttaacactaa

SEQ ID NO: 227236 - DNA, 201 bp, Homo sapiens
gttaccttcttcctcagaggcatgactcattcgcttttgtctctcgacttcttagattattccctttccttacatctcacttttcttttactgtggaaagraatatagtaaatgattaagagtgaaggctatggattccactttttaattcataccgcctaaaagctgggtgcctttgaacaaggattttaaactttctaa

SEQ ID NO: 227237 - DNA, 201 bp, Homo sapiens
tgagactaggtaatttataagaaaggggtttattcggctcattgttctgcaagctgtacaagaagcatagcaacaatatctgcttctggtagggcctcagraagcttctgctcatggcaggaggggaaggagaactggtatgtgcagatcacatggcaagacagagaagggtgggaggtgtcaggctccttttaaccacca

SEQ ID NO: 227238 - DNA, 201 bp, Homo sapiens
cataccacaggtatcttgaccttccccaaatttctggttctactttctggtttctttgttagcactggaaagagaattagcacaagcttgtccttcatggmtgacctctccaggtttcttatcacttttatttaaaccagatcttagaggcaaaaaccacagtagtattgcgctcagctagtgagataattaggaagtgct

SEQ ID NO: 227239 - DNA, 201 bp, Homo sapiens
gccagttgcagaggctggaaaggtttggtgtgctaggtgtcagcagtggttttagattctgtttggcctcttggtgctgagtgggaggccgagcacagtayttaatttatctatggcagctcaatactctttcattgtatatgttggagattcctacagcatgagttttgttggggaaaaacgaggaaagataccttgcta

SEQ ID NO: 227240 - DNA, 201 bp, Homo sapiens
atatggtatggtcaccttcagtggaaaaatacacatgtagctcacattcccacacagttacacacacattcaaacgtgttcaaggacatgttgattaaaaygatgaggctgttattttggaagtattaatctaatattctcatttctagttttgctgtcatgtctgagaaatatttgtttactgagtatggaaatgtctag

SEQ ID NO: 227241 - DNA, 201 bp, Homo sapiens
agctttctgaccaccttaaagttcatataggtttctgccctttttctggccaggcctttactttatcaaaaatctacagttcatattgtgaaatcatatcraaactgtatgatttcatcacctggagtggagagtcttggccccctgaccttggtagaggtgttctcagttaaggtcaatggtgggtacagcctaaagaaa

SEQ ID NO: 227242 - DNA, 201 bp, Homo sapiens
catatgtgtagttctgtaacagtgaccaagcagtggacattcctatccattcaaggctgaacatgtgatggagcaaggcatgtctgcacagggcctagcakgaaggggttgaacccttataacttggaaactaactgaatgggagaaatgagatggaataaggcactgacgttggtgcaatttctgattatattttgttgc

SEQ ID NO: 227243 - DNA, 201 bp, Homo sapiens
tcttcatatctggaacctgagtctttacactgacactgttgcgagggtgtgatggtgactttcacgtgttctctctgttctgtgactaagctgcatgtcartgtctgtggcacagatgacagctgtatcctctgccttacttctgctgttctctgcacaaagcactattgaaaccaagaaaattaaggaggcacaaagcag

SEQ ID NO: 227244 - DNA, 201 bp, Homo sapiens
gggctgctggaaacaacaaaagtcaggtgtataccccaccccaccccacaccaccccccaccatccttctctagaatttggcttctccacaaaatctgacracaactttcaaatgaaagtccatattaagattgatctttacatgaaaatgattaacttgatccacaaaacatacagtgaaagcaaacgataaagaaagga

SEQ ID NO: 227245 - DNA, 201 bp, Homo sapiens
gatgaacagaggtgagaacattcagagctcagacatacccagaccctcattgggtgggaagtttccctagctaagttggagatcgatggttctttgctgcyctagcagagcctctctcctttcgtacccacaacaatccccaccaccaccttcttatactgacccacaagaacatttgttaggcaaacactctgccatctg

SEQ ID NO: 227246 - DNA, 201 bp, Homo sapiens
caagattcagaatttagggagaaatatctaattggcctgaattgggaaatgtgcccaattttggctacgacacatctgaactaaacagttgccaacattasggaagaaggttttgggatactattaccaaaaattcatggaatggttgggctgctggaaacaacaaaagtcaggtgtataccccaccccaccccacaccac

SEQ ID NO: 227247 - DNA, 201 bp, Homo sapiens
cccaaggtgggcagatcatttgaggtcaggaatttgaggccagcctggtcaacatggtgaaaccctgtctcgactaaaaatacaaaaaatttagccaggcmtggtggcacacacttgtaatcccagctatttgggaggccgagataggaggatcgcttgaactgtggaggcgggggttgcagtgagctgagatcatgccac

SEQ ID NO: 227248 - DNA, 201 bp, Homo sapiens
tattattattttatagatgaggaaagtgaggctcagagaaatcaaatcatttacccactttcacatagctaatccatgatagagactttttttttttttttaactcaggcgtttgtcttcagtttctacccttcactgctaaacattctgtctctgagcttgatgttggatagatatgtccagtgtaatatcagtggaaaa

SEQ ID NO: 227249 - DNA, 201 bp, Homo sapiens
aatgattcaaaaatatgtaagctattatatataatatattttacactataattataattaatggaattaatgttatatataattatattgtatgtaataataatatataatagtattatataataatatcttatataaaaatcccaaagtaattattattattttatagatgaggaaagtgaggctcagagaaatcaaatc

SEQ ID NO: 227250 - DNA, 201 bp, Homo sapiens
aaatgattcaaaaatatgtaagctattatatataatatattttacactataattataattaatggaattaatgttatatataattatattgtatgtaataataatatataatagtattatataataatatcttatataaaaatcccaaagtaattattattattttatagatgaggaaagtgaggctcagagaaatcaaat

SEQ ID NO: 227251 - DNA, 201 bp, Homo sapiens
ggggttttaccatgttagccaggatggtctcgctctcctgacctcgtgatcctcccgcctcggcctcccaaagtgctgggattacaggcatcagctgccgygcccggcctgttctcagatttttaacgctacagtaaatgtctttgtccatgcctccttgtgcacatgagtaggtatcactctaaggtagcagttaataac

SEQ ID NO: 227252 - DNA, 201 bp, Homo sapiens
gagtgcagtggtgcgatctcggctcactgcaagctccgcctcccaggttcatgccattctcctgcctcagcctcccgagtagctgggactacaggcgcccrccaccacgcccggctaatttttttgtatttttttagtagagacggggttttaccatgttagccaggatggtctcgctctcctgacctcgtgatcctcccg

SEQ ID NO: 227253 - DNA, 201 bp, Homo sapiens
aatttttttttttttttttctttctgagatggagtctccctctgtcgaccaggctggagtgcagtggtgcgatctcggctcactgcaagctccgcctcccmggttcatgccattctcctgcctcagcctcccgagtagctgggactacaggcgcccgccaccacgcccggctaatttttttgtatttttttagtagagacg

SEQ ID NO: 227254 - DNA, 201 bp, Homo sapiens
agcaagaaaaataccttggtaagggctgtctaatcgtctgtggtgtgtgtgtatacacatatatatatatatatatatatatatatatatatatatacacattcagatacatatatataggtttgtatatgtattaatatttaatgtatgaatatagcatgacataattatgtaaaattaatgttaatacatatttttaaa

SEQ ID NO: 227255 - DNA, 201 bp, Homo sapiens
atttcctgcacctgatgtatatttgtacacttaacagttgtatacacaaagccatgtatactgcattttgtgggtgatttaaggcatttttaaaagttatygagtacttgagagcttaatccacagtggatgcttctccaccatagcccattagctggtggtcataacatttactgctgccttgtattttttaatctgctg

SEQ ID NO: 227256 - DNA, 201 bp, Homo sapiens
gattctagaacgtgtcaggaattcatggcactgtaaatgtatgaaagtgggaatgaaggaatattaaaagaacattgaaagaatgacaaataactgctaaycagtccccagagttcttgcccaacccgcatagcctgggaactgcctctcccaactgcctccctccctacttccccaggaggaagactggaggggttggac

SEQ ID NO: 227257 - DNA, 201 bp, Homo sapiens
agtatttagaatatataaagaattttcaaactcaacagtaaaaaaatccaagcaactcaattagaaaatacatggccagacattttactgaagaggttatrcagatggcaaataagcacatgaaaagatgttcaacattattaaccatcagggaaatgcaaatcaaaaccacaatgagttatcactatgaacatattgaaa

SEQ ID NO: 227258 - DNA, 201 bp, Homo sapiens
ggctaaaagaataatataccacgacgaaatggagtctagtccagcagtgcaaggctggttccaccactcctattcaacatagtgcaggaagttctaatcartgcaataaggcaagaaagggaaatgaaaggcatacagatggaaagaaagaaaactgttaatatttgctgatgtcatgattttctacacagaaaacactaa

SEQ ID NO: 227259 - DNA, 201 bp, Homo sapiens
tgcaaactttaatcaaaggaaaacaagagtagctggttctttgaaaaggttaataaaactgacagtctagcaagactgacaaagaaaagagaaaagacacmaattaccaatattgtaactaggcaacttaacttccaaatgcattttaaaacatttttttctcttctcttggttttcaagatacaaccttgaaaaactgca

SEQ ID NO: 227260 - DNA, 201 bp, Homo sapiens
tttttaaaagttattgagtacttgagagcttaatccacagtggatgcttctccaccatagcccattagctggtggtcataacatttactgctgccttgtaytttttaatctgctggaatagacattattatttccattgcatcttaagttgttgaatcaagtagaattcagagtgggacaccaggaatgggagaggttatg

SEQ ID NO: 227261 - DNA, 201 bp, Homo sapiens
tctgaagatatctttcctctaaagaggactgagtgctagagagctcctcacggagctgaaggaccctcgccaccgggtctaaataagatcaagtcccctcygagaggcagcatgaaggtggcatgcagttttaaaaaaaaaatagttggactgtaaaggaaataaagacgtagttaaataagcccttatgttatcacatag

SEQ ID NO: 227262 - DNA, 201 bp, Homo sapiens
gaagcctagaagttttgggaactactctctaggatgtcctaacatgcttgatgacagttgtgtaggccctcggagcgtccttggagcactggaattccctrtggtcttccaaacataaaaccagagatgtagttcgattcacatctaaaggcctcagcccatccctgagagccagaaactttcctgacatacagcctgcct

SEQ ID NO: 227263 - DNA, 201 bp, Homo sapiens
attttttctgcttagaaggccatgcctattactgtgcagttagaacaaaatgaacatattttaaaactgtatagagcgaaagaaagggaaggcattgaacrtaaatttagacttctcacaataggtttttatataaatgatttctgagatttttttttttttttttttactaatgtgaaaatacctcctagctctgttcat

SEQ ID NO: 227264 - DNA, 201 bp, Homo sapiens
atactgcaactatttctgagaggtgagtcctctcagaggactcagaattcagtggcctcttctcggtccccattgcctttgactacgttcatcctatgcaytcctgaaaactcttcctccattgccctccatcccacagtcctgtccatgaaggcatgagtcagatggtccctgagtgaggcaacatgcctttgatcccat

SEQ ID NO: 227265 - DNA, 201 bp, Homo sapiens
cttactttctgcagacagacctgatgcacagcctgctgtggaatgcctcaccacaggacactcagatgcaaataaatctttggtatatctatgatagattrtatctatctgatatatcagaaagatgcctggtagatttgaccagtctggagataagaatagtggggaaccctaagtacttaatagcacccctgacaattt

SEQ ID NO: 227266 - DNA, 201 bp, Homo sapiens
acgtgtctggacattatccaaaatattcatcttggccagctgacaggaatgtttactgagtccttaggagccacttgtttggtaccttcgaagctgcctaraaagagtttgtgttgcgtgggagtggggagtgagtgtaagctgcagcatcagctccgagttagccttcccgttcctctaagtgctagttgtgtgactgtt

SEQ ID NO: 227267 - DNA, 201 bp, Homo sapiens
tgaaggttacaaagtaaaaatatttaggagtaagtggcttttacaagatttgaccaaagaacagaatgctttgctgacactttggaaatgtaagggtggtrtatgtttaatcgggaaatactcagtttctaatgcatgcaatgtttgtctggaacctttttccttaaatgattcaaatcagttccattcaaacctgtgtac

SEQ ID NO: 227268 - DNA, 201 bp, Homo sapiens
aggtggcatttataagaaactatttatagtggtggaagtctctctctgactgtgtttttatttagcatttttctaaaagatagatttgtatcttgatattrttggaacataataaggtacttatttcacttctcttttgtgagaaaaaaacctgtcgtatgagactttccagcctctggaaccacctgaatgcctcggtca

SEQ ID NO: 227269 - DNA, 201 bp, Homo sapiens
tgttgatagagttctttcatccttgtgacctttcctttccaacttgtgtggctctttctctctgaaggcaatgtgttttgccatagccagttcacatgacraacaataacatgtctaggcaaaatgcatgtcttggaagcaccagagaaaatactaacttaagatttccattatatgataaaaatttgttgagtatctcgt

SEQ ID NO: 227270 - DNA, 201 bp, Homo sapiens
aagtctctgacataatggtgagggcaacagtttagaagtgaaagaataaaatgtttatggtctgacatatatatatgtatctagagagaaaataattgggrtagcctactttaggtggtgtggttagggaaggcctctctatggaggtgacatctaaactggtatttgaaagaagagaagaaaccaaccacgctaagaaag

SEQ ID NO: 227271 - DNA, 201 bp, Homo sapiens
gtggtttctcaataaatattgggtgattgagtaaaggaacattattttcaatgaaaatatcttcccatttatgcaatagtgaaaaaatagcttacttgaartttatctccaatgtatctaaatttctatctctttagtatttgggagatctcaaatatattaataacacatacttgaataaaatatacttactaatgacag

SEQ ID NO: 227272 - DNA, 201 bp, Homo sapiens
gaaagccagagaaaatataatactgaagactctattttaagtgtaattttatattttaagtgctttgggctggcaggtttaactgccataaatttgacttyctgataaataacacatactttgttagtgtaagttacattgcaaatattacgcgggacatacttatactaagaaaaaattatatgtgtaatatatacttat

SEQ ID NO: 227273 - DNA, 201 bp, Homo sapiens
tattttaagtgctttgggctggcaggtttaactgccataaatttgacttcctgataaataacacatactttgttagtgtaagttacattgcaaatattacrcgggacatacttatactaagaaaaaattatatgtgtaatatatacttatatattttatatactatttatattatatataatatatatttatatacactat

SEQ ID NO: 227274 - DNA, 201 bp, Homo sapiens
ttccttcacagcatttatcacaaaccataaatggcttctctttctttctctgttgccattgctttgttcaatctgaactgtaaacaaaacaaagtcagttkcttcttgttcactctctgatcttcagaattcagaacaatgtctggcccaggtggtttctcaataaatattgggtgattgagtaaaggaacattattttca

SEQ ID NO: 227275 - DNA, 201 bp, Homo sapiens
attttagacatactttttcccatcccatcctagatgggatgcccctggtggctttaaatgtggcagtacagtgatctgattcctgtttgtaaaagatcagrtggtttggtttcctgtctggctgctactttctgattcccaggaaaaggcaggagcactctagccagttcacaatgtttatgacagatcgatttctaggat

SEQ ID NO: 227276 - DNA, 201 bp, Homo sapiens
ttgcctaaaggaagttttccattcattctctatcagaaaatatttccttcacagcatttatcacaaaccataaatggcttctctttctttctctgttgccrttgctttgttcaatctgaactgtaaacaaaacaaagtcagttgcttcttgttcactctctgatcttcagaattcagaacaatgtctggcccaggtggttt

SEQ ID NO: 227277 - DNA, 201 bp, Homo sapiens
gatcaggtggtttggtttcctgtctggctgctactttctgattcccaggaaaaggcaggagcactctagccagttcacaatgtttatgacagatcgatttmtaggattccctcttttccctcctactgttttcagatgagctgcctactggtaaaagaaaaactgtagacaagtttaatttaacagagtttgaccaaagag

SEQ ID NO: 227278 - DNA, 201 bp, Homo sapiens
aggaggcccttcctgtcctctttgcctaaaggaagttttccattcattctctatcagaaaatatttccttcacagcatttatcacaaaccataaatggctyctctttctttctctgttgccattgctttgttcaatctgaactgtaaacaaaacaaagtcagttgcttcttgttcactctctgatcttcagaattcagaac

SEQ ID NO: 227279 - DNA, 201 bp, Homo sapiens
cctactggtaaaagaaaaactgtagacaagtttaatttaacagagtttgaccaaagagcagtcaactaatcgggcagccctcagaatgagttaccaagaastacatttgccaaagattctaaggactctaggattccctttagtacatgacctgtgttggtggctagggattctagagtttgagtctagtttttcagggtg

SEQ ID NO: 227280 - DNA, 201 bp, Homo sapiens
gagctaagttcagtgtcctcaccggctcttagcatactcttatctctctgcctgcagcaccctttcttcaaccctcgacatgcttgactcatttagacacmatcacctaaggaggcccttcctgtcctctttgcctaaaggaagttttccattcattctctatcagaaaatatttccttcacagcatttatcacaaaccat

SEQ ID NO: 227281 - DNA, 201 bp, Homo sapiens
ccctttagtacatgacctgtgttggtggctagggattctagagtttgagtctagtttttcagggtgtactcgtgataggcaaagctgccccaggatgccaytcgttctattgctgctctgattcctgctagaattaatgctgttgcttgtttatttctggtgttcttggttcttatgggattatagactgtgacccctaga

SEQ ID NO: 227282 - DNA, 201 bp, Homo sapiens
atggcagccaaaataaaaccaccaatctgttcatgttgttcccttgttgaagactgaatcattcaacagctttctcttgtgcttacaattaattccaaacscactctagtggtataccagacccatgaggggctggctggtttctactcacctcttccctgaagcttatactacacatgtccaccctggtcactgcaccaa

SEQ ID NO: 227283 - DNA, 201 bp, Homo sapiens
atgcactacagatatagatactcagatttccaggttcagttaatagcagttgagggtgaggggttcaggtagaatctattaagtgctggagagataaagtrgcatggcaccagtggtgggcatatcttacggaaatgtacttccactctgtccctgttctaggtagtctttgatttgatctggtgtccgagccctgcctcc

SEQ ID NO: 227284 - DNA, 201 bp, Homo sapiens
aagcaagaaaaataccttggtaagggctgtctaatcgtctgtggtgtgtgtgtatacacatatatatatatatatatatatatatatatatatatatacacattcagatacatatatataggtttgtatatgtattaatatttaatgtatgaatatagcatgacataattatgtaaaattaatgttaatacatatttttaa

SEQ ID NO: 227285 - DNA, 201 bp, Homo sapiens
atttaagaaaagcaagaaaaataccttggtaagggctgtctaatcgtctgtggtgtgtgtgtatacacatatatatatatatatatatatatatatatatwtatatacacattcagatacatatatataggtttgtatatgtattaatatttaatgtatgaatatagcatgacataattatgtaaaattaatgttaataca

SEQ ID NO: 227286 - DNA, 201 bp, Homo sapiens
ccatttaagaaaagcaagaaaaataccttggtaagggctgtctaatcgtctgtggtgtgtgtgtatacacatatatatatatatatatatatatatatatwtatatatacacattcagatacatatatataggtttgtatatgtattaatatttaatgtatgaatatagcatgacataattatgtaaaattaatgttaata

SEQ ID NO: 227287 - DNA, 201 bp, Homo sapiens
gactaaggaaacaagcacatttcaaataataactgaggcaagatgaagaaagtactagctaagaatgatagagaggtgagtgttgacgacacttgctaagrcatgtgctatacggctattaaatcacaaccctcacgaaactttatgagacgggcactgttgtgcaaatgagaaaacagcagaagtactggaaaatgtagt

SEQ ID NO: 227288 - DNA, 201 bp, Homo sapiens
atttccaaaatgccaatgaagaaaagcagtttttctagccatctcatcaaaactgtcttcggccaaagctttattctctctttagaaaaaaaaaaaaaaaagtagtgggagaaatcttagttctttacagaggtaattgtgataactggtgaggaggagataaagacgagaaagttagaatttgaaagcaagagaggccag

SEQ ID NO: 227289 - DNA, 201 bp, Homo sapiens
tgatctgtgtaatgtgtgtacagttaacaatattatctagtgcacttaaaattttcttaagagtatgtatcttaagtgttatcacagtaaaaaaaaaaaaagacaattcttctagcaaatgttttgatgtgttttaatcttataagtaaaaaacaaacacaaaaatgtgttttcaaaaaccataatcaaatataaacaagt

SEQ ID NO: 227290 - DNA, 201 bp, Homo sapiens
atgatctgtgtaatgtgtgtacagttaacaatattatctagtgcacttaaaattttcttaagagtatgtatcttaagtgttatcacagtaaaaaaaaaaaaagacaattcttctagcaaatgttttgatgtgttttaatcttataagtaaaaaacaaacacaaaaatgtgttttcaaaaaccataatcaaatataaacaag

SEQ ID NO: 227291 - DNA, 201 bp, Homo sapiens
tatacacatggaatactatgcagccataaaagagaacaagatcatgtcctttgcagggataaggatggagctggaggccattatccttagcaaacgaatgyaggaacagaaaaccaaatactatacgttttcacctgtaagtgggagctaaatgatgagaacacatggacacatagaggggaacaacacacactggggcct

SEQ ID NO: 227292 - DNA, 201 bp, Homo sapiens
tatggccacagacattacattcatgatttaataaaaaatgattttttaaaccaacaacttgatttatgaagaatggtgtacacatctgctgaaatatcaadcatttcctttacattggtgaagaaactaaaaggctaatatgtctaggacatataaaagcctagaccttctgttggtctgttttattcactgctgtgtcct

SEQ ID NO: 227293 - DNA, 201 bp, Homo sapiens
tagtcaggcatggtagcatgcacctgtagtcccaggtatatgaaagactaaggcaggaggattacttgagcccaggagtttgaggctgcagtgagccatgrtcatgccactgtactccagcctgggtgacagagcgagtccttgtctcttaaaattaaaaaaaaaaaaacacaactaaaaaaagaatgagcgggaggaaaa

SEQ ID NO: 227294 - DNA, 201 bp, Homo sapiens
ttcttttcttttcttttctttttttttttgagatggagttttgctcttgttgcccaggctggagtgcaatggcacggtctcggctcattgcaatctccacytcccaggttcaagcaattctcctgccttagccccccatgtagctgggattacaggtgcccaccaccatgcccagctaacttttgtatttttagtagagat

SEQ ID NO: 227295 - DNA, 201 bp, Homo sapiens
tgccctattttgaaatcagtggcatgtctttaagatatatatccaagctctatttttcactgctatttctccctcttgattaccagaaatacatacatgcrtgcttgccttacccctagagtgtcaggattgaggtagcctgtaaattaactttatttcttagaaatatgcagcaatcatatactctacccagagcccacc

SEQ ID NO: 227296 - DNA, 201 bp, Homo sapiens
gtctcttcatggcagcacctaatctagtgtttaattggataaccagggacaggaatctttttttttttttttttgagagggagtttcactctgtcgcccargctggagtgcaatggtgcagtcttggctcactgcaacctctgcctcccgggttcaagcaattctgctgccttagcctcccaagtagctgggattacaggc

SEQ ID NO: 227297 - DNA, 201 bp, Homo sapiens
cacagagcctcctacattttagaaccatcaatgattcatcttatctttttctttcttgtgtttggaatctgactttccctctgcagcatagctcctgcatyctcttctgctttctcactctgactgattcttccaccttccacttatgtttttacaacctcatgtgactagggtaggcatacccagataattcaagataac

SEQ ID NO: 227298 - DNA, 201 bp, Homo sapiens
cctctttctggtcctcacacagagcctcctacattttagaaccatcaatgattcatcttatctttttctttcttgtgtttggaatctgactttccctctgmagcatagctcctgcatcctcttctgctttctcactctgactgattcttccaccttccacttatgtttttacaacctcatgtgactagggtaggcataccc

SEQ ID NO: 227299 - DNA, 201 bp, Homo sapiens
gtttcttactggagactgcagaaaaaccaacttccaaactcgttcaggttattgacagaatttggttctttgtggttgtaggactgaagtccctattttcyttatgtctgttaggcagggctccacccttagctccctcaggcctctttctggtcctcacacagagcctcctacattttagaaccatcaatgattcatctt

SEQ ID NO: 227300 - DNA, 201 bp, Homo sapiens
tatgaatcatgggtctgtctctgctatggtttggctgtgtccccacccaaatctcatcttgaattgtacctaccataatccccacatgtcatgggagggasccagtgggtaggaggtaattgaatcatgggggcaggtttttcccatgctgttctcgtgattaagtctcatgagatctgatggttttataaagggcaattc

SEQ ID NO: 227301 - DNA, 201 bp, Homo sapiens
acccctccttgccaatacagagccctgttccagaatatgccacaccatccaccttcttcctgaatctctggctttaccaatgcagtttcttctactggctyctccttttcttgatgaaggtattcatcccaaatctcagcccttctgtgaggcctcctcacccttctgcaatgagagacagcacaatgaagtgtttaaaac

SEQ ID NO: 227302 - DNA, 201 bp, Homo sapiens
ccgtgttataattacttctcctttgctgtcccctctagaataggaaccctctgaggacacaaactgtggcctttcccttgattatcttccatgtagcccargacctgaaacagtggacaagctcaatgactgttgattgaatgcatgaattaatggaggcctctttagagtaatcccctgggccttacaccacattctctt

SEQ ID NO: 227303 - DNA, 201 bp, Homo sapiens
gtggctcagtctgaaaggctcaaaccagaaaagctgacagtgcaggcttcagactgtggccaaagtctgagccactgttgcaagttcctgagttccaaagrctgaagaacctggaatctgatgtccaagggcaggagggatgggaggaggcatccagcatgggagaaagaaggcagccagaagacacagcaagccagctta

SEQ ID NO: 227304 - DNA, 201 bp, Homo sapiens
attatacttgtgggctatacactgcgttcctaagagtgtccactaatatcccctgaaacaatgttaaaaatgatatgtgagttgctgaagatgatttaccktatcatgctcttgaataggttcttttgatagctttagaacgaaattcaaactgctgagaggttcaagtctttcaagtcaggacaacttaggctccaacct

SEQ ID NO: 227305 - DNA, 201 bp, Homo sapiens
gttcagattctcaaatggcaagtacctaagcctaggatgttggcaaccatctgctgctctaagtgctatagggcttcatgatggactgaagatccaaatayggaaggcgaaactataaaccaagagtagaaaagatgaaatttcttcacaatttcttactagggtagaatttcttgaaataataaaggtaaaatttaagga

SEQ ID NO: 227306 - DNA, 201 bp, Homo sapiens
taaactgtagtgagcaaacaaatataatctccattaagacaacatacagattcacttgccttttggttgaaatactatttactttatattaaaatgctatsattatttcttattttatctttaaaatgcctgttatttgtctgttttttaagctaatggtagaatttctgttaacatttgtaggctcaattcaagatgtaa

SEQ ID NO: 227307 - DNA, 201 bp, Homo sapiens
tatttgcttatgagtacactgaaaacagacaagctatattttttgcattacccatagtgctttccatattcagttagtgtgtaacaaatgtagtttatgggtaaacctgtgttcaaagggcaggaaatagataataagcaaatttgctgattttatttaatttattccacaaatacatagcagcttccttatgggagtggg

SEQ ID NO: 227308 - DNA, 201 bp, Homo sapiens
taattggtaaataaaagatgtgaattcaaaatttttaataagcaaagatataaatgggcagtttacgaaaggggaactttgaatggctaatatgtacactytcagtattctgagacatgaatatttaaataagaaacactgctctataaccaccaagttgaccaaaagcaacaagaaagatcataataagtattagtgagg

SEQ ID NO: 227309 - DNA, 201 bp, Homo sapiens
ccaggcacatgatcgtagcagacaaattaacaaattctctgaaccttgatttctttatggaggaaaatgggaaatataagttcctacttcatagaagggakgtaagaattaaataaaatattgtgagtaaagacccacaatataggcttgctgatagaaacactctgtgcatggtcatcattgtggtgtctttatcatcct

SEQ ID NO: 227310 - DNA, 201 bp, Homo sapiens
attgattcatatttaagttttataaaatgtacaactgaaaaaagaagattcatcaagatattccaaaaatatttaaaagtattctcataattaagatacargttttcaaatttaaattaaagataaattaaaattacaaatttagttttccacttgcatgagccgtatttcaaatgcccggtagctgcatgtggctagtgg

SEQ ID NO: 227311 - DNA, 201 bp, Homo sapiens
ttgattctaatctagagcttgccaaagcctctttcttatttctgttcagaagccacagatagtctgatagccatctgatcatctatcatgtgaagacaccraattttgttaatctgtttctctgctaatggacattttaaatcagttaacagtagattctctgggatatataactagaattgggagccactaggttttcag

SEQ ID NO: 227312 - DNA, 201 bp, Homo sapiens
aatgatgctggttactaccacagttaatgtcatcggagggcatcacggtgaaaaagatcaaaggacgtttacctgaaagcctttcactcttctgatgaacrtggtttccaagtatcacattctcagaacttgttgaatgtggaaagatccaaaataaggccctatacaattaagccctcataaagcagagggaagtcctac

SEQ ID NO: 227313 - DNA, 201 bp, Homo sapiens
atttttttccttcttcaggtaactacataaaaaatgccccatgaagtcttaggtttgggttaaaacagggatagccagagtaagcctaatagtacaatccygtgtaatctactttcatttgatacagacagctgctgctgagtgcacccaatgtaatagacagtggataaaacaacacccaattcaggttgggcagctcag

SEQ ID NO: 227314 - DNA, 201 bp, Homo sapiens
ttctcactgcctatactggaaaaatgaatgtccacacatagcctgtttttcctcattgctcacttccacagtgaagtcttgtgtggcctgagaagaggagrgcagaccgcatgcctgctccttagctgcaaaggatatgagttttctgaaattccctttgaaaaggaagaattcatgatgtggagcaaacattattatgag

SEQ ID NO: 227315 - DNA, 201 bp, Homo sapiens
aagaacaaccgcctctatagcactgtgtgtgaccactaacctcagaaagaaccagcattataacaatgtggatagcattctatcatatctttaatttcttyttcctgctagaatgaattgaggatggaaatagccctcacaaaccagagggcagtattgctgtgcaccgactgttacgttttgtggaacattacggcagta

SEQ ID NO: 227316 - DNA, 201 bp, Homo sapiens
aaaagagggtaaggtgacctaagatagacacttctgtttggttttgatgattcctcatttagaagaaagcttgtaacagtggaatgaggtatacaatctakatttgagtctcattttcatcatttatttaattgtgaccatgtgcaagcaaaatcctgtatcatatgagctcttgagttttgtctggtagatcaatttcta

SEQ ID NO: 227317 - DNA, 201 bp, Homo sapiens
tgtttggcatgaattaaacttataataagtcacaataatttctctgtagctatatagtctgggaaactgtaatctagttcccaagtgaataaactgtaagrccaaagggcaaatagtttaacaaaagggaatcagatgattatcttgtaagctagaagagcaaagatactgtggcttaattacatagcttggtaggaagct

SEQ ID NO: 227318 - DNA, 201 bp, Homo sapiens
ccttgccacagtagacacttcatcaaggtaacaaacagccagggaaataggtggcaatggtacctttcctctttgaaatatgtgacaatggtacctttccrctttggggcattagacattatcccagccactagcttttaaagtttttatgtttggttacttaattttttgaacattaatatcttttttttttactcatct

SEQ ID NO: 227319 - DNA, 201 bp, Homo sapiens
taatcccactctttgggaggtcaaggtgggcagatcacttgaggtcaggagttcgagaccagcctggtcaacatggtgaaaccccatctctactaaaaatrcaaaaattagccaggcgtggtggcaggtgcctgtaatcccaactactcgggaggctgaggcaggacaattgcatgaacgcgagaggcagaggttgcagtg

SEQ ID NO: 227320 - DNA, 201 bp, Homo sapiens
ttaaaggccaaggagctagtgagcagggttgtctaaagcttagacaaaggagaatgagagaaaaagggaaatgtaggaatgactgaaaaagaaagaaatgkaagttaaagaaaaggaagtagggagagaaagatgaaggaatataaagggagttgaaaatggagcatataggaaggagggaagggctggagggaggagaaa

SEQ ID NO: 227321 - DNA, 201 bp, Homo sapiens
gatgaaggtacttctgagttggtttcctctcctcaaaggtcattatcaaggcagcaaatgctccctggacatgttgaaaatgccccctgtgcaagtgagastctgaggagcagttggatctgcaagtctccttctgtcgggtcatgtcaggatcatagggtaggttgctaataggatggcttcagggttggaggtgggaga

SEQ ID NO: 227322 - DNA, 201 bp, Homo sapiens
tccccagcccatctctcactgcactgccacacttacctttcctgtgtatcaccaggccatccctccctgcctcagcagtggtggctctcttagtttctgtytcactccatgttcccagacaggtctcagggttgtactcattcagtgaagtgagacttggaaatgccacaaattttggccagaactcaacctgaagaccct

SEQ ID NO: 227323 - DNA, 201 bp, Homo sapiens
aaaacagcatggtactgttaccaaaacagagatatagaccaatgggacaggacagagccctcagaaataataccacacatctacaactatctgatcttagrcaaacctgacataaacaagaaatggggaaaggattccctatttaacaaatggtgctgggaaaactggctagccatatgtagaaagctgaaactggatccc

SEQ ID NO: 227324 - DNA, 201 bp, Homo sapiens
ccaagtcaatcctgagccaaaagaacaaagctagaggcatcacactacctgacttcaaactatactacaaggctacagtaaccaaaacagcatggtactgktaccaaaacagagatatagaccaatgggacaggacagagccctcagaaataataccacacatctacaactatctgatcttagacaaacctgacataaaca

SEQ ID NO: 227325 - DNA, 201 bp, Homo sapiens
gactttcttcacagaattggaaaaaattactttaaagttcttatgggaccaaaaaagagcccgcattgccaagtcaatcctgagccaaaagaacaaagctrgaggcatcacactacctgacttcaaactatactacaaggctacagtaaccaaaacagcatggtactgttaccaaaacagagatatagaccaatgggacag

SEQ ID NO: 227326 - DNA, 201 bp, Homo sapiens
tcaatacatgcagaaaaggcctttgataaaattcaacagcccttcatgctaaaaactctcaataaattaggtattgatgggatgtatctcaaaataataaragctgtttatgacaaacccacagccaatatcatactgaatgggcaaaaactggaagcattccctttgaaaactggcacaagacagagatgtcctctctca

SEQ ID NO: 227327 - DNA, 201 bp, Homo sapiens
aattatctcaatacatgcagaaaaggcctttgataaaattcaacagcccttcatgctaaaaactctcaataaattaggtattgatgggatgtatctcaaartaataagagctgtttatgacaaacccacagccaatatcatactgaatgggcaaaaactggaagcattccctttgaaaactggcacaagacagagatgtcc

SEQ ID NO: 227328 - DNA, 201 bp, Homo sapiens
gatttataatcctttggatatatacccagtaatgggatggctgggtcaaatggtatttctagttctagatccctgaggaaccgccacactgacttccacartggttgaagtagtttacattcccaccaacaatgtaaaagtgttcctatttctccacatcctctccagcacctgttgtttcctgactttttaatgatcacc

SEQ ID NO: 227329 - DNA, 201 bp, Homo sapiens
gcaataaacatacgtgtgcacgtgtctttatagcagcatgatttataatcctttggatatatacccagtaatgggatggctgggtcaaatggtatttctasttctagatccctgaggaaccgccacactgacttccacagtggttgaagtagtttacattcccaccaacaatgtaaaagtgttcctatttctccacatcct

SEQ ID NO: 227330 - DNA, 201 bp, Homo sapiens
tttgtccttgtgatagtttgctgagaatgatggtttctagtttcatccacatccctacaaaggacatgaactcatcatttttttatggctgcatagtattycatggtatatatatgccacattttcttaatccagtctatcattgatggacatttgggttggttccaagtctttgctattgtgagtagtgccgcaataaac

SEQ ID NO: 227331 - DNA, 201 bp, Homo sapiens
gtggctattacagtttcacattttctctctgcataggaagatgagtagagggataacagggagtcttgctataaacagaaatggatgatttttttttttttgctttaaagtttgctagtttggtgaaatcacatctgtgtctttgtctttgaattctttcttacaaagaaagaaaatcgtgtgtctacagggggaaaaata

SEQ ID NO: 227332 - DNA, 201 bp, Homo sapiens
aagacctaagagagaagatgggtgccttgggtagatttatacctgaaggctttttattattattattattattattattattattattattattattttaatgagatagggtcttgctctgctgcccaggctggattgcagtagaatgatcatagctcactgcaacctcaaactcctgggctcaagcagtcctcccacctc

SEQ ID NO: 227333 - DNA, 201 bp, Homo sapiens
ggcaagctacagactggaggaaaatacttgaaatatatatatctgacaaaagacatgtatgcagaacatatgtgtgtgtatatatgtatatatatttctamaatgcttcataataacccaatttaaggcaacataaaaggtgaaatatttcaacagagtgcccaaagaaataaatatatttatatatatgttttttcaaat

SEQ ID NO: 227334 - DNA, 201 bp, Homo sapiens
gaacttttgggggagaaagattggagaattaaacatagttttttctttgacttaagaaatgaaacatgttactttttctcgtgccccactaagtagagctrgtcacatgatcctgcccactcataagaggctgagatgtgcaggagtctctatgcttggggctaaaggagaactggatgaaacaagtagtatctgtaatag

SEQ ID NO: 227335 - DNA, 201 bp, Homo sapiens
tcagtttctttttttttttttttttaaaaagatatgttttatgattttacagttccatttcctggtatttacccctacaaaaggaaagtatgtatccacasaagttttgctacacaaatgttcatagtcactttacttgtaaagattctaaactggaaataatccgatagtccatcaaaagcatagataaaatgttggatt

SEQ ID NO: 227336 - DNA, 201 bp, Homo sapiens
tgctgcctttccaaccttcttatgtttttatttaaaaaccttcaattctattcagatatgtcataacaagctatgtcttggtgagcacacaggtttgtcaytgagaaaggtcatataagacatgacttataagctacctctactgtgctctgcttttctccatctttgggaatctctgttttagttaggagagactaagtt

SEQ ID NO: 227337 - DNA, 201 bp, Homo sapiens
gtcctctgtttgtgacactcacttccttattctcatgttgattcattcagtactttattactgagctcatactctgttccaggtaccaagaccaaacacayagcccagtctgcctcatatccaaagtacgtgcatccctatttctgtctgcactgagtctttgcttcctatggacgagacctgctcttgcacatctctttt

SEQ ID NO: 227338 - DNA, 201 bp, Homo sapiens
catctatgaatgttacatgctgcatggatcaagctgtttgttaatcaggtatattttgttgttacgtattttcatgagaggaagaaaaatgttccataatsaaatcaattgagagctaactaaagttactgaacattcagagtcaaatcatttaaaaacactagaccaggagttgactttctgagaaaccatgtcttaata

SEQ ID NO: 227339 - DNA, 201 bp, Homo sapiens
ttattttcttattttgttaatcactttctcctttggagctgcggttgaatacagcctgtccactatcgctgaagctctcaaagcttcatgagactccttcratcaatatattgtatttggcagttcacgttttactatgttatacaattatatttaacaaattactgtgatgtgaaacatttgggttagaataataaataa

SEQ ID NO: 227340 - DNA, 201 bp, Homo sapiens
tgattgtgaataatgttgctgtaaacatttgcgtacaagtttttgtgtggacatatgtcttcagttgtcttgggtatgtattaggatcagaattctgagtmacaaggtaactccatgttcaactttttgaggaactgccaaactgttttccaaagtaactgtgtgattttacatccccagtagtgtaggagggttccagct

SEQ ID NO: 227341 - DNA, 201 bp, Homo sapiens
gctaactaaagttactgaacattcagagtcaaatcatttaaaaacactagaccaggagttgactttctgagaaaccatgtcttaataataaatcttaagamgtaacactgatgttaaatcattgaaaattttcatagaaattttagatattttgatctgaaagagatggcttcctaagttctaagaacagaagtggtctat

SEQ ID NO: 227342 - DNA, 201 bp, Homo sapiens
cggggaaccagccagcaggctgtgcaggacacttaggccatgtgtcccagccccggcatggagtgaggagcagtgggcagctgctgctcgccggtccatcycaaaaaaggaaggaaaaggccacggggatgagaagactcagaagggagagggaaaaagaattattggtttgcatctcacttaccccttctcgagtcccca

SEQ ID NO: 227343 - DNA, 201 bp, Homo sapiens
aggaactttggcttttcttggttttctttctagcttgagatatatgtcttgggaacctcaaggcaatatatgataagtctggctaccttgaagccaccgtrtgggagagagcacatggaaacaccttaaggagccagagagggatgcccctaactattcaaatcctagcttaggtttcaggcatacatatagaagccactg

SEQ ID NO: 227344 - DNA, 201 bp, Homo sapiens
tggttcctccaccagggagacaaatttaagcttaattactgtctgatagagttacatcccttggccagggaaggggaaggctgggacagccaggagtgackgggaaccagccagcaggctgtgcaggacacttaggccatgtgtcccagccccggcatggagtgaggagcagtgggcagctgctgctcgccggtccatctc

SEQ ID NO: 227345 - DNA, 201 bp, Homo sapiens
ttaatgttttgtaccttaatgaaggcacaactcatgaaaacaactattgaactatcaagcgtttcatgcatattgagacagtattaaagttaaagacaaaygtacaagcaactgtctgcagttatacctgaaaatattatttaagggcacttgttttattctgacaaatttttcagagaatatttagacttgaggtaggtg

SEQ ID NO: 227346 - DNA, 201 bp, Homo sapiens
gaaaacccaaaaagcagtttgtaacctcaaaacacttagcaaaccttgcatctgacctgcattatttagcctacctatttacattttgataatacctgcawttgaccaatagtttttaagactgtttctatttcttaaagattaaagtcatgtgaactgaaaggtaccagactttatcttccctttaaaaaatattagatt

SEQ ID NO: 227347 - DNA, 201 bp, Homo sapiens
agtcagtatgttcacacagagaacctcttctgcaagattaatttccacaattcttccaccacttcttggaaccttcagctttttcctaatgtaactcaaamcaatccttaaccctaggcaaaagtttacatttccatgacttcttataaccttttactgaaaaacacattttactgttctcatacaccttgcatgtaaatc

SEQ ID NO: 227348 - DNA, 201 bp, Homo sapiens
aataagtctcagtattaggatatggcccaatgtgtctctatcttggggaagagcaaaaacaaacaaacaaacaaacaaaacctgttgactgggcagttacytctgttctatttagaattctctctttgtatgcaccctgaatacagctatgtaaaggaaatggatgccctttgaataggaccaggaggaaaagaaatgaaa

SEQ ID NO: 227349 - DNA, 201 bp, Homo sapiens
ttttgaagaagcgaaaaccttttataaccctttacaaattttgccaaagagcagattaagattagcaccttaggaaaacctcgttatgcttttacttcaaygctcaatttacagaaaaaccatataatacccttggttgaatgtagtcagtatgttcacacagagaacctcttctgcaagattaatttccacaattcttcc

SEQ ID NO: 227350 - DNA, 201 bp, Homo sapiens
agttttattgcttaccacgtattactagcctccagggtattcgaagtctttggagatgaaactctcattatacagacagccttgttcaatcattcaagcartatttatctagcaaggcattatgggaaacacggaattccaatagagacacggttctcagagagtcacgagagtcttatgaggtaaaataacatgctctgt

SEQ ID NO: 227351 - DNA, 201 bp, Homo sapiens
gcctggggagtcatggcttacaaaccataaatgttcatcagatgggttttatttaaccctgtatatcgtgacttactttccaatctgactgtggcataacraggaaaaaaatcaaaatgttttacctcaaaatatatttccttgccataccttgaagttgccctgcaacgtctcttgtgggaaaaatccacattttataga

SEQ ID NO: 227352 - DNA, 201 bp, Homo sapiens
ttatacagacagccttgttcaatcattcaagcagtatttatctagcaaggcattatgggaaacacggaattccaatagagacacggttctcagagagtcaygagagtcttatgaggtaaaataacatgctctgtatattaaccatatgaacggtttccttttagcaggaaggactgtggttttcttttaggaggaggtgga

SEQ ID NO: 227353 - DNA, 201 bp, Homo sapiens
ggaattccagattactgaggactaagctctgatttttttttaatattgcccaaattcctatctaaggagcctggggagtcatggcttacaaaccataaatkttcatcagatgggttttatttaaccctgtatatcgtgacttactttccaatctgactgtggcataacgaggaaaaaaatcaaaatgttttacctcaaaat

SEQ ID NO: 227354 - DNA, 201 bp, Homo sapiens
actagttatggcagtgaattgtgtcactttggactaagcacctaacttctggtgtaagaccctgcagttttctcttccccttgggatggttcctaacagtrtttgagctggtttttgctctcttagcctggatatcagagtgccagagatgggcagagctgatctgctggcccaccatggacaaatagcaggcaagaagta

SEQ ID NO: 227355 - DNA, 201 bp, Homo sapiens
actggcaaaaaaaactttacccttttgctggcacgttgggcttctgggtccccttcccctgagcccaatcctaagctaaccagtttaaggtttgggaaacyaactctttctagtttggaggatgcatctgaggagagtgccttgtagtatggagacacaattacctattagtgaagagagaacagaggagaagaaaggcaa

SEQ ID NO: 227356 - DNA, 201 bp, Homo sapiens
ttctgaaatgctgggactgcttgttatcatagcaacacctagcttaacctattgatagaaagtcaaaagatattcagagtagaagacaatattaactaagrcatatgaggaaatacatagcaaaaagttaattttggttggaaccttgaagtgctggcgagaatagtgagaaacaaaattggaaggacagttgggacccat

SEQ ID NO: 227357 - DNA, 201 bp, Homo sapiens
ctagcacgtgtagatgctaaagcttgaaagtcagcaacactactattttttaaagtattaaactattgaaaatgggctaacgtgtgcattctccacttatstgctttggccttctccctcctggagaatggaggtgcactggaaacaattgttagttgttggaggtgttgcaggacttttccttagttcagctaaagagag

SEQ ID NO: 227358 - DNA, 201 bp, Homo sapiens
ttaccattgctggattgagggaagctttgaaggatttcatttccattgactatttttttttttttctaaaccaaccattcgttcagcttttatttgttggkgtgaaatatgctattattttgaaaaaacacttttaacatcccaatgaagtaggtacagatattaactccaatttaggaagaggacagtaggctaggagat

SEQ ID NO: 227359 - DNA, 201 bp, Homo sapiens
ccttgagaaccagctctgagcagagtgttatcattatcttaatcacactgctctggaatttatcatattctggaaatcacatttgcttaaaattacatctrtgtcatttatggttatggttgatgaatatcccatgaaccctttattgagttactgaaatgagtatgttaatccccattgaaaaaaggtgtggcccaaaca

SEQ ID NO: 227360 - DNA, 201 bp, Homo sapiens
cacatttgcttaaaattacatctatgtcatttatggttatggttgatgaatatcccatgaaccctttattgagttactgaaatgagtatgttaatccccaytgaaaaaaggtgtggcccaaacaaagcaagatgcttcttcagaattgtatttattaatatttaagggtgatatttctgcctttctgatatgaaaatccat

SEQ ID NO: 227361 - DNA, 201 bp, Homo sapiens
agaggaaccaagacctaagagagaagatgggtgccttgggtagatttatacctgaaggctttttattattattattattattattattattattattattattattttaatgagatagggtcttgctctgctgcccaggctggattgcagtagaatgatcatagctcactgcaacctcaaactcctgggctcaagcagtcc

SEQ ID NO: 227362 - DNA, 201 bp, Homo sapiens
gtgatgttggcacaataaaatagcctaacaatgcatttcccagaacatagctccattattaagtgccacattactgcatatgtgtgtgtgtgtgtgtgtgwatgcgcatatgatgtcatatttgaataacttctaagtgctttcacttacgctacctttataagaacatcatcatcatcttcagtttattgagaaggaagc

SEQ ID NO: 227363 - DNA, 201 bp, Homo sapiens
aatttctagtcccgtaagcttcattcatgttaagtgctctatataggtctaccattttcattttctaccttttatgcctttttttttttttttttttttttgacagagtctagctctgtcgccaggctggagtgcagtgccccgatctcggtttattgcaacctctgcctcccagtttcaagtgattctcctgcctcagcc

SEQ ID NO: 227364 - DNA, 201 bp, Homo sapiens
caatttctagtcccgtaagcttcattcatgttaagtgctctatataggtctaccattttcattttctaccttttatgcctttttttttttttttttttttttgacagagtctagctctgtcgccaggctggagtgcagtgccccgatctcggtttattgcaacctctgcctcccagtttcaagtgattctcctgcctcagc

SEQ ID NO: 227365 - DNA, 201 bp, Homo sapiens
acaatttctagtcccgtaagcttcattcatgttaagtgctctatataggtctaccattttcattttctaccttttatgcctttttttttttttttttttttttgacagagtctagctctgtcgccaggctggagtgcagtgccccgatctcggtttattgcaacctctgcctcccagtttcaagtgattctcctgcctcag

SEQ ID NO: 227366 - DNA, 201 bp, Homo sapiens
tcccaaaaagcaaaagggtaaagatttctgaaccttggttattgacttcaggagcactgggcccctgataaccatttgataaaatggttaaaaaaaataaagtaaaaatattttttcaagtagtaagaaaaacatattgggcttttcattagttgttgttttaccgatgtttaattcaaactatgttaatgttgcgattgc

SEQ ID NO: 227367 - DNA, 201 bp, Homo sapiens
tgtccccagaaaattaaatagagtcagaaaatggcaaagccaagttagaagcattcaggtgtggaagttgtatagggcacttgagttaaaaaaaaaaaaaatctgctcaggcataaaataattaaactgttcatgacagcgtataattgcatcattatattcccaactctgttactgtaatttggctcataaaagagcaaa

SEQ ID NO: 227368 - DNA, 201 bp, Homo sapiens
aaggaccatccttctgtgtccccagaaaattaaatagagtcagaaaatggcaaagccaagttagaagcattcaggtgtggaagttgtatagggcacttgakttaaaaaaaaaaaaaatctgctcaggcataaaataattaaactgttcatgacagcgtataattgcatcattatattcccaactctgttactgtaatttgg

SEQ ID NO: 227369 - DNA, 201 bp, Homo sapiens
atagtattccatggtgtatatgtgccacattttcttaatccagtctatcattgatggacatttgggttggttccaagtctttgctagtgtgagtagtgccrcaataaacatacgtgtgcatgtgtctttatagcagcatgatttataatcctttgggtatatacccagtaatgggatggctgggtcaaatggtatttctag

SEQ ID NO: 227370 - DNA, 201 bp, Homo sapiens
gtgtttggttttttgtccttgccatagtttgctgagaatgatgtttccaccttcatccatgtccctacaaaggacatgaactcatcatttttatggctgcrtagtattccatggtgtatatgtgccacattttcttaatccagtctatcattgatggacatttgggttggttccaagtctttgctagtgtgagtagtgccg

SEQ ID NO: 227371 - DNA, 201 bp, Homo sapiens
gctacagagattcacaaagatcaagcaaaattataggtaatttttccttaaaacttcataggcacacacacacgtcacttggagctggggagtgattcagyggggacacaaactgggtagagcaatggtaaggactgatgtggggttgccgacctggataggagcaccacgaatttagagaagaaaaggagcttgttttct

SEQ ID NO: 227372 - DNA, 201 bp, Homo sapiens
tatcatggaccagaagatctcaaggaaagaaacgtaatttgaactagaacctgactgtattgtatggctctcctcaacaatgtggtttttcaccttattgytttaagagcttcattggttgaatttgtgctgatttcactagttgtttggtattgatctatgacatgtaaagcacctggcccagttctagccacacatttg

SEQ ID NO: 227373 - DNA, 201 bp, Homo sapiens
cttggacagccttcagaactgtgagccagataaacctcttttctttgtaaacgacccagcttcaggtgttcttttataacaacacaaacacaaagtaagayagacactcaaggggaggggaaatagactgcaactcttgatggaaagtgggggaaagccagagagcaaaacagcatgtgtaggatgggagggattcttgtg

SEQ ID NO: 227374 - DNA, 201 bp, Homo sapiens
ttctgattcatacaatttactctttcttccgtttttttttttttttttttttttgtctctgtcttcctgctatataatagcccattttgtttaattttccrtaggaaagaatagaagatttttgtcagtctcaaatcaagtatctggtattcggttttcttttggtagcttctcccgaaagcctgttaaagcttctcaata

SEQ ID NO: 227375 - DNA, 201 bp, Homo sapiens
atttctgaacaaagtgatacaagtgatttactaccattggtgtcctacctctttcatttttcagccaagtggtacttcttgttattttatttgtagaagamcttaagcttccctaaaaggcttcaaagtattttatattgtgatattttcacaatagacttagcaaagtagagagagctagcaataggatatgtactttga

SEQ ID NO: 227376 - DNA, 201 bp, Homo sapiens
ttccatggtaactaatttttgagcactgcatagactaagccctgctctaattccagggtggcagtgatatgcagcttaggttgggccttaccttttgtctstctttaattcaagatgcagagattgatcacagattagttagaagctagattcactggttgggtgtggcccactgaccagtgaagaaatcagatccccagt

SEQ ID NO: 227377 - DNA, 201 bp, Homo sapiens
taccatgagctccttcaggccctctatggaaagggctggggtatcaatgtataaagtccttcatggctctgaaattggatgactctgtaattgccctttaraaggacacactttcaaaatgtgaggactctgtactcagcctgttagttaaactgaatgtttgccattcttcctcccctccttagctctttaccatagagc

SEQ ID NO: 227378 - DNA, 201 bp, Homo sapiens
cggcttattaaaacctctgcctcccgggttcaaataatcctcccacctcaccctcctgagtaactaggactacaggcccgagccaccatgcctagctattwtttgtatttttaatagagatgaggtttcatcatgttggccaggctggtctcaaactcctgacatcaagtgatcctcctgccttggcctcttaaagtgctc

SEQ ID NO: 227379 - DNA, 201 bp, Homo sapiens
ctgacattgtgccactacacatcagcctgggcaacagggggagaccttgtcaaaacaacaacaacaaaaaacaacccagtgtgataatattaggaggtggrgcctttgaggtgattaggtcatgaggacagagccgtcatgaatgggattggtgcccttttaaaagggcttgggggaactagctaggccctttatgcctgt

SEQ ID NO: 227380 - DNA, 201 bp, Homo sapiens
cagtgagctgacattgtgccactacacatcagcctgggcaacagggggagaccttgtcaaaacaacaacaacaaaaaacaacccagtgtgataatattagraggtggagcctttgaggtgattaggtcatgaggacagagccgtcatgaatgggattggtgcccttttaaaagggcttgggggaactagctaggcccttta

SEQ ID NO: 227381 - DNA, 201 bp, Homo sapiens
caaaccttatgaaagagacaactgttgatgaaattttattttaaaaccattagtccctcttttttacacagatgaatcattaaataaccaattagttataraagtgatttatcaggaaatatagggctttttccttaaaattcatttccccacactcaggtataaacagagaattacacactgggacaatttttacaaaat

SEQ ID NO: 227382 - DNA, 201 bp, Homo sapiens
ctgacatcaagtgatcctcctgccttggcctcttaaagtgctctggaaccatttgttttagactacaccacatccttaaatacagaatggggaatgaaagmccatacaataatgtgtgccttgattgaaattgggccttttagctgaaacagatccaaatgctacaaacttttgactagtagttattaacagcaggaaata

SEQ ID NO: 227383 - DNA, 201 bp, Homo sapiens
tctatatatggcttagaaggaaggacacagataacattcttactgcctctgggtggagatagtgaggggaagcagtgcaatgtgggatgtgaattgtaccygagggtttcggctttacagtgttttatttttaaattgggtaatgtgtacatggttgttgattctattatttaaagtgcattttaaaagaaaaaccaaggg

SEQ ID NO: 227384 - DNA, 201 bp, Homo sapiens
ttctccatcagattaatccaaaacctcaggagggaagggcaacaaacaaacaaacaaacaacaacaaacaaaaaaacacacacaaacagtggtttgaaatyctaggcttattcaacataaagataatattattggattccagtaatgaaaacttccatttctttccctggtagtttattcttttaaacaagtcttcctggt

SEQ ID NO: 227385 - DNA, 201 bp, Homo sapiens
aggagagataatcatgggagacaggagttctcggagacttttcctaaggtagtcatgtaacagaagcagaacagaatattcactagagtgccaccataaakctctctatagtttcactgtgaaggcaatgttaaaatatgcaaaacgggttctaatgtaacttattataatgcttctgatataacgagaaaaaggaagata

SEQ ID NO: 227386 - DNA, 201 bp, Homo sapiens
tcgcttgagcccaggagctcgaaaccagccctagcagcatagtgagactttgtttctaaaaaaaaaaaaataagacaaattagccaggtgtggtggtgtasatttgtagtcccagcttgcttgggaggctaaggtgggaggatcccttgagcctaggagttcaaggctgcagtgagccgtgatttgtgccactgcactcca

SEQ ID NO: 227387 - DNA, 201 bp, Homo sapiens
ggatagggtggtggagttgtgatgtttccttccattctctttgtggctgtcctgagtttctgtgctcaccagggtttctgttactcctttgatgtattctrgcactctccttcagttatgtacattaaagtgtagttgtttattcattgttttggctgtcactgtggaagggatgagtgctggagtttctagtgagccatc

SEQ ID NO: 227388 - DNA, 201 bp, Homo sapiens
cccagcactttgggagaacaaggtaggaggatcgcttgagcccaggagctcgaaaccagccctagcagcatagtgagactttgtttctaaaaaaaaaaaaataagacaaattagccaggtgtggtggtgtacatttgtagtcccagcttgcttgggaggctaaggtgggaggatcccttgagcctaggagttcaaggctgc

SEQ ID NO: 227389 - DNA, 201 bp, Homo sapiens
tcccagcactttgggagaacaaggtaggaggatcgcttgagcccaggagctcgaaaccagccctagcagcatagtgagactttgtttctaaaaaaaaaaaaataagacaaattagccaggtgtggtggtgtacatttgtagtcccagcttgcttgggaggctaaggtgggaggatcccttgagcctaggagttcaaggctg

SEQ ID NO: 227390 - DNA, 201 bp, Homo sapiens
tttttttggtaatttttctaatcaaaaggaaaatcaataaggctcactactgaataacatatttaataacttgataaaataatcagagtttttggcacttmcagaattagattaaataaagattttatttttcagtgtgaagaaaaaatttttattagttaccatagtgaaatgggaagagtatttttttgccgttaacgt

SEQ ID NO: 227391 - DNA, 201 bp, Homo sapiens
tgttttattagttgcttaattttatttagctgactcacttagtatgggaatgtctctaggggctgctggagagtctctttctataaaaggagagagatccyaagaggcagatttgtttaagagtgttgcataatgtgctctacgtcttgggtttctaccattctcaggttatgaactgtagagctggatttttttggtaat

SEQ ID NO: 227392 - DNA, 201 bp, Homo sapiens
aaaattgaagaggacacaagataaatggaaagatattccatgttcatggtttggaagaatcaatactgttaaaatgcccattctatccaaagcaatctgcmgattcaatgcaatccatataaaaataccaatgacattcttcatgaaaatagaaaaaaataatcttagcatttacataataccacaaaagacccagaatag

SEQ ID NO: 227393 - DNA, 201 bp, Homo sapiens
aactacaaatcaactacctaggaataaacttaaccagagaagtgaaagatgtccacagtgaaatctataaaacattgatgtaaaaaattgaagaggacacmagataaatggaaagatattccatgttcatggtttggaagaatcaatactgttaaaatgcccattctatccaaagcaatctgcagattcaatgcaatccat

SEQ ID NO: 227394 - DNA, 201 bp, Homo sapiens
ataactacaaatcaactacctaggaataaacttaaccagagaagtgaaagatgtccacagtgaaatctataaaacattgatgtaaaaaattgaagaggacmcaagataaatggaaagatattccatgttcatggtttggaagaatcaatactgttaaaatgcccattctatccaaagcaatctgcagattcaatgcaatcc

SEQ ID NO: 227395 - DNA, 201 bp, Homo sapiens
aatcaacatacaaaaatcagtagcatttttatatgccaacagtggacaatctgaaaaataattcaagaaagtaattccatttacaataactacaaatcaastacctaggaataaacttaaccagagaagtgaaagatgtccacagtgaaatctataaaacattgatgtaaaaaattgaagaggacacaagataaatggaaa

SEQ ID NO: 227396 - DNA, 201 bp, Homo sapiens
caaggacaaaaacgatatgattatttcaatttttgctgaaaaagcatttcataaaattcaacatcctttcatgattaaaaacccacagaaactgtgtatasaaggaacataccttgacacaataaaagccatatatgacagacccacagctaatatagtgaaggggaaacacctgaaggttttctccctacaatctgaaat

SEQ ID NO: 227397 - DNA, 201 bp, Homo sapiens
aattttaacatgtgttgagttgtacaattcttagtttcgtattgttttgtatgaatcttttacctttaaaggaacctgttttaggctcaccactgacagaytgagtgcttaaaatctcctagcatatttttgtctgcatcatccaagcttattgttgcctcataattaagttgcttctcttggctcttatgcagcctctag

SEQ ID NO: 227398 - DNA, 201 bp, Homo sapiens
ctaggttttaccctcatggagttgacagtctggaaggggctatgtgatgttagttataaatatgataatcatatatgatttacggtaagttaccttatgarttcagcaatggaactggctttccaacatttttaaaattgtgatttctttagaaaattttgtccaagttgtgtaaaatttaaaaggaaatattgatctttg

SEQ ID NO: 227399 - DNA, 201 bp, Homo sapiens
cagatccggtgtctaatgagtgcccattttctggttaatagaggatgccttcttgctgtgtcctcacatggtgaaggggtagaattctggtcttttcagcyccttataagggcactaatcccattcacaagggttccaccctcatgtcctaatcacctctcaaaggccctacttcctcatgccatcacattgggattagat

SEQ ID NO: 227400 - DNA, 201 bp, Homo sapiens
tacctttgcaactgttatttctttatcccatttttcttatcaagaattctagctttagttatctgctctgtgaggaaaacacctgagtccattccagttayacctctggcttctgttcagatccccatctttctggtggacaggggctggtaggggctcttacctccctgtgtttgtccatttgggctgctaaaacaagac

SEQ ID NO: 227401 - DNA, 201 bp, Homo sapiens
tcatccactctaaaatattcagttattgttgtttcttaatatgcttaactggcagtttgagtaaacagtttctaaagtgcctctgcatatctgcaatactyatcacatgctagtgggaatctttgaatgaaagtctgtgaatcaatggccctagaagagcttaacttccaataggttccctctagtgcgtgaccacacggt

SEQ ID NO: 227402 - DNA, 201 bp, Homo sapiens
gtgaatgttggcaaaatgaatccagaggcacttctcttcgtgggagtttaatatactctttgcctgtggcatggtaaatgggcccatggacttccaccggyctgcagattctatcaccacaacagaccactcctattgttacattttctattgtcaccaaagatcttaatcaccacagccaagggctagtctcagtcatca

SEQ ID NO: 227403 - DNA, 201 bp, Homo sapiens
aattgcgaataactattggatttctaaatagtggactttgattaggtttaggtgtcagaaataaactggaaatatgggtcagtttatacttctctgagagkctgtagggaaggggacaggaaggtattcattgcaaggaatgactttctcaggtgaccttccacccttccctctgtgtccttatttcctgtgttggaataa

SEQ ID NO: 227404 - DNA, 201 bp, Homo sapiens
tattttgtgaagatctaacctgaagtcgggctgcctggtttaaatttctaacccgcagcaggctggaaaaaagcctctcatggcattgcatcatccattakccactgtagcccttcatctgcggccctggcctcagctgcactctgatgacaagcacaccggtggctagattttcaggagtcgattggctcatctttcagc

SEQ ID NO: 227405 - DNA, 201 bp, Homo sapiens
cctttctttctttttattattgtgaaccaacactttgcttctctgaaatatttaccttgtggtcctctttcagacttctctggcaatttggattgattctmtatttcttcttctacctagaaactttgtagaagttgaaagaaaatgtgttactttccctttaaagaatcatcaatgcctttggctgtgtacatggcatga

SEQ ID NO: 227406 - DNA, 201 bp, Homo sapiens
tagtgcatagacaaggtgaaaggagggcttaaaaattgcatgtcacgttctgagctttatacctccttggcccatggtgggtggacctgaaatgccatgtyttatcaatggcgaccctttgtaaccagtttgggctttggatttggtaccacacagctttatggaaagacacttggggccgtcattttacttgcaaataga

SEQ ID NO: 227407 - DNA, 201 bp, Homo sapiens
ggagctggtagtctgctgaagtgtgtcaatcctcaagtttacccacaatacctcatctggatgtttaaggtttgaactcacggaaggaatgttgtctctakgatagacaactggaaaatgtaattgataaccctgttcaactctagagtccttctttccacattactatgtgtttatgaattataaaaaattatttcctgg

SEQ ID NO: 227408 - DNA, 201 bp, Homo sapiens
gaactcacggaaggaatgttgtctctaggatagacaactggaaaatgtaattgataaccctgttcaactctagagtccttctttccacattactatgtgtktatgaattataaaaaattatttcctggaatcttttgttcttgatttatggcaaaagctctataatgactatttttaaaatgacttaatgagtgagcagtc

SEQ ID NO: 227409 - DNA, 201 bp, Homo sapiens
aatcctctttatctgtctgtctatctccgatatttgtggagaggagtatgtctttttgatataatggaatctgggcagatgaacacaatttgtttacaatsaatcaatgtggaaatttacaggggaagggaggtcagggtgatggggaggaagcttcacgttccctgagaatgactccctatgaagacacccaactcaatg

SEQ ID NO: 227410 - DNA, 201 bp, Homo sapiens
cagttttcactgtttggctccatggggaaaggcattaacagctgctggcagcttggctgtggccactggtttggggtggtttggaggcagcttagccttayggaggcaggggtgtcaagcctgctcaccctcagagaaaatcacacttcagcagtagttccagttctaagatgatatagcacagttgccatgtgggctaca

SEQ ID NO: 227411 - DNA, 201 bp, Homo sapiens
aagcaacccccatccccacaataaaaagcatgctaaatgtttgatgtagttagtgaggatgaatttagaggttgtcagaacctaagtgttgatttcagggraggccagattcagagaattcattcttggcattctgacaacagtgaacctttcccattattctagaatgggcctcactagggaaatataaattgtatacca

SEQ ID NO: 227412 - DNA, 201 bp, Homo sapiens
atgccaaagtggcatattttggggtggcatattctgccactcctcacctttatataacattttctcacttagtccctataataaccccatgggataactghcatcagtttgttgatgaataacctgggcctcagggaggttcagttaccaggttactcaatgagtaagccaggattcatttcccggtatgatcggattcca

SEQ ID NO: 227413 - DNA, 201 bp, Homo sapiens
aaaactgatgaggaaggaatacttgcagattcattctaggaggctagtatcaccctgatacaaaaaccagacaaaggcacattaaaaaaaaaaaaaaaaaactgcaggcaagtaaccctgatgaatatagatgcaaaaatcctcaacaaaatactaacaaactgaattcagcaacacattaaaaaaagcatttatcatgac

SEQ ID NO: 227414 - DNA, 201 bp, Homo sapiens
taaaactgatgaggaaggaatacttgcagattcattctaggaggctagtatcaccctgatacaaaaaccagacaaaggcacattaaaaaaaaaaaaaaaaaactgcaggcaagtaaccctgatgaatatagatgcaaaaatcctcaacaaaatactaacaaactgaattcagcaacacattaaaaaaagcatttatcatga

SEQ ID NO: 227415 - DNA, 201 bp, Homo sapiens
ataaaactgatgaggaaggaatacttgcagattcattctaggaggctagtatcaccctgatacaaaaaccagacaaaggcacattaaaaaaaaaaaaaaaaaactgcaggcaagtaaccctgatgaatatagatgcaaaaatcctcaacaaaatactaacaaactgaattcagcaacacattaaaaaaagcatttatcatg

SEQ ID NO: 227416 - DNA, 201 bp, Homo sapiens
tttcataaaactgatgaggaaggaatacttgcagattcattctaggaggctagtatcaccctgatacaaaaaccagacaaaggcacattaaaaaaaaaaamaaaaaactgcaggcaagtaaccctgatgaatatagatgcaaaaatcctcaacaaaatactaacaaactgaattcagcaacacattaaaaaaagcatttat

SEQ ID NO: 227417 - DNA, 201 bp, Homo sapiens
cttctgaatgaccagtgggtcaatgaaaaaattaagaaaattttaaaaatatattgaaacaaatgaaaatggaaacgcaatgtatcaaaacctatgagatrtggtgaaagcagtattcagaggaaagtttatagtagtaattgcctacatcaaaaagtagaaaaactaatgatacattttaaacaactagaaaagcaagtg

SEQ ID NO: 227418 - DNA, 201 bp, Homo sapiens
ccaccatggaataaaattagaaatcaataacagctgaaattttggaaattatacaaacacatggaaattaaacaatatgcttctgaatgaccagtgggtcmatgaaaaaattaagaaaattttaaaaatatattgaaacaaatgaaaatggaaacgcaatgtatcaaaacctatgagatatggtgaaagcagtattcagag

SEQ ID NO: 227419 - DNA, 201 bp, Homo sapiens
atgctaaaggattctttcttcaatctgaaagaaaaggatgttaatgagtaataaaaaactatctgaaagtagaaaacttactggtaatagtaagtacacasaaaaataaagaatatcataacactattgtagtatgtaaactactcatatcttgagtggaaagactaaacaatgaatctatcaaaaataataaccacaact

SEQ ID NO: 227420 - DNA, 201 bp, Homo sapiens
attgggcttggggcacccctaaagtagaaacgggtaaagtgaccaaaaacttagatgactacacccatgtcccttcaaatacctggaaagccttcccaagkataggcagaaacaagcccagactgaaaagactacagtgaatacctaactcttcaaaacccagacactgacaaacacccaaagcatcaagaccttccagaa

SEQ ID NO: 227421 - DNA, 201 bp, Homo sapiens
tttggagggaagtaagggatgagaacaagagtctctgcctggtaatccagggaattcttctggaagttacccaagaccaccacggtggtatctgtacaagyctgcaatagccacagtgttattgggcttggggcacccctaaagtagaaacgggtaaagtgaccaaaaacttagatgactacacccatgtcccttcaaata

SEQ ID NO: 227422 - DNA, 201 bp, Homo sapiens
aagtgatcctcctgcctcagcctcctgagtagctgggagtacaggtgtgcaccaccatgcgcagctaattttttgtattttcagtagagatagggtttcaycatgttgcccaggatggtatcgatctcttgacctcgtgatctacccgccttggcctcccaaaatgctgggattcaggcttgagccacagcacctggccaa

SEQ ID NO: 227423 - DNA, 201 bp, Homo sapiens
taggatgttcctaatcttaaataaagcatatgattttcataaagtttactttaaagcaatttatagtgtttatacaaagggaaatttgctaatgacattgycttaagtaacatctgggatttgttttgaaatagttttgtgagtgatagtggaggtataaatgattcattatatcattctatgtctttgaaattttttatg

SEQ ID NO: 227424 - DNA, 201 bp, Homo sapiens
agttagaaaacttatacacatgaataacaaaacatgcagacattggattcttctgtctttatctctgtagataatctctttgttactaatcttgaaaagtrctctctctgtgtgtgtgtgtgtgtgtgtgtgtgttttctgtttgttgcatttgagttagctttatttctagcatgaagctgtttgctcctggagggaagg

SEQ ID NO: 227425 - DNA, 201 bp, Homo sapiens
ccagaactacaggcacgtgctactggctgtttcttcacaacatttttgttaattgattaatatgtaaactttttaaatgtttacttttatttaaagatgcyttatttaacatatagctaattcattaacactgaagtcatgggacacagcctgagctgtttaacctgagcctgaatgaagcttctatcactcatgtttcct

SEQ ID NO: 227426 - DNA, 201 bp, Homo sapiens
tattcacttaggctatactgtgaatgccaacaccctgtctcctgccctggagatgcatagcacagggctgtatatatgtacatacctccctttgtggcaamcctcagcccctagtatccacgtcttccttaaatttttacaacaggtgtataacaccaaaatggttaaaaactactaaacatacatatatacacatgtgca

SEQ ID NO: 227427 - DNA, 201 bp, Homo sapiens
ttcttgtagaagggacataatgagatctgctctcttcctgttacttaggtatagattgtagaatgtgattgttttgcaaaatagaacgttctttatactgkgttttatatctcagactctaacatgcccagccctcagagaccctgtgccatggtgaggtagttatttggaaagcctcttgtcttcccatggtcacttctg

SEQ ID NO: 227428 - DNA, 201 bp, Homo sapiens
tgtgttttatatctcagactctaacatgcccagccctcagagaccctgtgccatggtgaggtagttatttggaaagcctcttgtcttcccatggtcacttytgaactcattgttggagtgaatgttaacctgagtgtgaaagagcaagcagtgtctcactttaagtagaactaaagctggggccttgctttgttccctagg

SEQ ID NO: 227429 - DNA, 201 bp, Homo sapiens
tcatttcacattaaatgttttatgtgtgtttaacttctctatttgaccatttagcattcgagagactccataagaactgttaattatcaagggcatctctstgcgttaatgtgcgggcaccgtggtatgttctttactctgaggctgaggaaatgtgggctggatgtcaggtgctgtgatgttatctataggttcggtaat

SEQ ID NO: 227430 - DNA, 201 bp, Homo sapiens
ccgttgtttctaaacttctacttagatacttgtatgggttgtttcagataacagagtagaaatgctgagaggtaaagagatggccactagctagttaattrgctgtttaactattccagcctctaatatttatagtaaggcatttaataatatttaaaatatttacatcatgggtataactaattatacatgagtgatttt

SEQ ID NO: 227431 - DNA, 201 bp, Homo sapiens
taaggcatttaataatatttaaaatatttacatcatgggtataactaattatacatgagtgattttgggactctaaagcgtagtaatattgtagatatctmatggtttattttccatttcaggaagaaataacgtactttaaattttaaataaggttgtaattggcatgtaaggtggccctctcagcacagctttatgaca

SEQ ID NO: 227432 - DNA, 201 bp, Homo sapiens
tgtagatatctcatggtttattttccatttcaggaagaaataacgtactttaaattttaaataaggttgtaattggcatgtaaggtggccctctcagcacrgctttatgacaggccttcttgaaatttgctggccaagaccacaaactttagcgagtaaaaacatacaggctttggaatttgagtccaaattgcaagttat

SEQ ID NO: 227433 - DNA, 201 bp, Homo sapiens
atagtttcaaattccgcttttaattgttagacgaaacaatgactgcaacgcggctgactctatcaaaatgtaaagttaaatcagggttacttgttcagtcytgacacaaagattcctgtcattgtgtgtgataacctcttcgaggcttgtaaacttaaatacgtttatttctcattaccctttttgctattattgtggcca

SEQ ID NO: 227434 - DNA, 201 bp, Homo sapiens
taaaggaagtggagccagataatcagaaatctaggtcatgtaggttggattcctagtccaatctgttaggtcctacctcactctttggcttactacagttygttgccagttctagatctgctataagaagtgtctattctggacctaccaggctcccacatgctcacagaacccaccttaaccaagttctccaggatgagt

SEQ ID NO: 227435 - DNA, 201 bp, Homo sapiens
gattacatccctttgcttagcaatacagtttagtcatttgtaaaaagtcaactgaatacaatttggcctcatcaatgaaatgtatcaagaaccataaagtwgtagaatgatgttaagaaaaataacctttcctttttttctttgctttctttgtattaaaaaatgaaaattatcctcttttccctttgagttcatgctacc

SEQ ID NO: 227436 - DNA, 201 bp, Homo sapiens
cttcctgtaacgcttcttactcttccttctctcctgctctctttctctaatgtttttttaaccatttgtaacattttgcaacttcaagcagaagcattctytgtaccgtcaattgtagaaagagaatgataatagttcctacctttattttaatagttaataattataaaaataatagaaagaaaataaaaataatggcta

SEQ ID NO: 227437 - DNA, 201 bp, Homo sapiens
cgtgggtctgtggaatctacatttctttgaaatatttgcacattttcccttttcagcagatgagagaaaatcttcattgaagacacattcctttgtcactytgggggctgataggggatgagagtctttgtatttcaagacatctaacctgcttacagaatttgaggttatacatcttgagtaagctttaggtctgaaaat

SEQ ID NO: 227438 - DNA, 201 bp, Homo sapiens
atgtcatataacttgcagatatcctgattcttcttaattccttcattttccattttctaagatatcttttctccattcttttttcttttatgtttcttagwctttcttcttccttctccttttcttcattttcttcactcttttcttcctttgttcatctaatcttttcttctccatcctcccctaaagcagaattatggt

SEQ ID NO: 227439 - DNA, 201 bp, Homo sapiens
tattctcctagtaggcaaaagttactgaccaaatacagccccaaatcaaagatcattcctactaagaactcttacattagcttcctttttcatgaattaaygtgggtctgtggaatctacatttctttgaaatatttgcacattttcccttttcagcagatgagagaaaatcttcattgaagacacattcctttgtcactc

SEQ ID NO: 227440 - DNA, 201 bp, Homo sapiens
agataactcaacctggttcattgtattaataacagtcagttgtatttgtgatttaagtagtactatttaaaaattggaattgtattgtgttggccaggtgyggtggctcacgcctgtaatcccagcactctgagaggctgaggtgggcagatcaggttaggtcaggagtttgagaacagcctgagcaacatggagaaacct

SEQ ID NO: 227441 - DNA, 201 bp, Homo sapiens
tgttgagctttacctgagccaagtattttggaaaatagcactaggtgaagaaatcccccaccctttgtcttctggaaaaggcttcttaaaaaaaaaaaaaatccttccccgggtgtccaggacgagaccaaatgatgctcacttaagtacctccgacaaggccagaagctgagttttcacattcccgttctgcgccttata

SEQ ID NO: 227442 - DNA, 201 bp, Homo sapiens
atgttgagctttacctgagccaagtattttggaaaatagcactaggtgaagaaatcccccaccctttgtcttctggaaaaggcttcttaaaaaaaaaaaaaatccttccccgggtgtccaggacgagaccaaatgatgctcacttaagtacctccgacaaggccagaagctgagttttcacattcccgttctgcgccttat

SEQ ID NO: 227443 - DNA, 201 bp, Homo sapiens
ccagatacattataatcttataggaccaccatcatatatccagtaaattgactaaaatgtcattacgtggtgcatgactgtatatatttatgacccttcctctccctccccaaccataggttttccatgcctcttgaccattgtgttttggatcaattggtatgatagtcatctcctaggacactcaaaactttgtttctg

SEQ ID NO: 227444 - DNA, 201 bp, Homo sapiens
tccagatacattataatcttataggaccaccatcatatatccagtaaattgactaaaatgtcattacgtggtgcatgactgtatatatttatgacccttcctctccctccccaaccataggttttccatgcctcttgaccattgtgttttggatcaattggtatgatagtcatctcctaggacactcaaaactttgtttct

SEQ ID NO: 227445 - DNA, 201 bp, Homo sapiens
ttccagatacattataatcttataggaccaccatcatatatccagtaaattgactaaaatgtcattacgtggtgcatgactgtatatatttatgacccttcctctccctccccaaccataggttttccatgcctcttgaccattgtgttttggatcaattggtatgatagtcatctcctaggacactcaaaactttgtttc

SEQ ID NO: 227446 - DNA, 201 bp, Homo sapiens
tttccagatacattataatcttataggaccaccatcatatatccagtaaattgactaaaatgtcattacgtggtgcatgactgtatatatttatgacccttcctctccctccccaaccataggttttccatgcctcttgaccattgtgttttggatcaattggtatgatagtcatctcctaggacactcaaaactttgttt

SEQ ID NO: 227447 - DNA, 201 bp, Homo sapiens
tgtccaggcggaattctactgcaggggcagagccctcatggaaaacctctgctagggcagtacaaaggggaaatgtggggttggcacccccaaacagagtscccacacagagtccccactggggcactgcctagtggagctgtgagaagagggccaccatcctctagaccccagaatggtagatccaccaacagcttgcac

SEQ ID NO: 227448 - DNA, 201 bp, Homo sapiens
taaggttcgtattgttatgtgtgaatttgatcctgtcatgatgatgctatctagttattttgcatactatttgatgcaatttcttcatagtgccattgttstttatattttggtgtgtttttgcagcagctggtacttgtttctcctttccttatttagtgcttctttcagaatctcatgcaaggcaggcctggtggtgat

SEQ ID NO: 227449 - DNA, 201 bp, Homo sapiens
agcaatacaatcccagaggcccaagtcagacagggaatcttggttttatgtcaatttcaaattttgccccctgtgcctggggaatagctcaattgctgtcyttttctctgggataaaacttagaggacaccaaggtcaactttcagacacagcagagagccaggctgcaatagtaaataaaccctctgcaagtccatggct

SEQ ID NO: 227450 - DNA, 201 bp, Homo sapiens
acctctggtagaatttggctgtgaatccatgtggccttgggctttttttggtcagtagactgttaattactgcctcaatttcagaacttattattggtctrttcaaggattcaactccttcctggtttagtcttgggagggggtatgtgtcccagaatttatccatttcttctagattttctagtttgtttgcatagaggt

SEQ ID NO: 227451 - DNA, 201 bp, Homo sapiens
aaatgccaagcagagatcttcagtttatcagctatgttacctgttgtcaactgaatttagtctaaaaccttggtcaagggggaagacaaggtacaataatrtggggatgtttataagaatatacttactgcttaaaatttttctagatatttttggtgcaattcaagttttttttaagttgtggcaacttctgaagatatt

SEQ ID NO: 227452 - DNA, 201 bp, Homo sapiens
gccattttaataggtgtgagatgaaatggataaagaaaatgtgatatatatatatacacacacacacacaatgaaatattcttcagccttaaaaatgaggraattttgccatttttgaccacatgggtggaccaagcagacattatgctaagtcagctaagctagcaaagaaaaacaaataccatatgttctcacttacaa

SEQ ID NO: 227453 - DNA, 201 bp, Homo sapiens
gtaaacaaaggttacctttggaaagaaggactaggtgaagggtgagtggaaggtgggggtgagagaagggggacttttattttttttctgcactttttgarttctccaaccttattctaccctcattttgatttttggaccatttgcttctttgctgtagcagaaggtgtcggagcactgccctggtacctttcaacatat

SEQ ID NO: 227454 - DNA, 201 bp, Homo sapiens
aaaatacgttaaagacatagttccttttgttatagatatggtcaggactggcgaattaaatgttttggttcaaaagtcttccaatggaacatctctatggkgttcatttctttaatcgaaatgaattgttttctagaatgattctgctgtattttgaggattccttgagaggctgcattgatttatttgttatatgccaga

SEQ ID NO: 227455 - DNA, 201 bp, Homo sapiens
aaaaaaactgccagtgtgtttttatgaagccaatgtaatatggattccaaagtctgagagagacagcacagaatagaaaactataaatcaaactcatttayggactcattatgaaaatttaaagttaataaacaatttatcagattattaaaatattagccccatcaaaagaggtccttattcctcaagtacgaaagtatc

SEQ ID NO: 227456 - DNA, 201 bp, Homo sapiens
tgttttccaaagtaccccttctctatctatcccaaagcctcaaccatttctagctataaaactgactgtcaagataatgtctccaccccagacctcttttytgaactcctaacatgtaaaacctaactcccttttaggccactccactaggatgcccaaaaggtattccaaagtcaacaaggccaccttgtgaagttgcca

SEQ ID NO: 227457 - DNA, 201 bp, Homo sapiens
acaaaattgcccatagcacaaataaagaaaaaaactgccagtgtgtttttatgaagccaatgtaatatggattccaaagtctgagagagacagcacagaayagaaaactataaatcaaactcatttacggactcattatgaaaatttaaagttaataaacaatttatcagattattaaaatattagccccatcaaaagagg

SEQ ID NO: 227458 - DNA, 201 bp, Homo sapiens
tttgacatattgggttgagactcttctatgacttccacatggagatctcaagcaggtagtttgatatttgagtctgacaaccagcggagaagtgggagctmgggatataaaagtgtgtgccagcaacatttggatggtgtgtaaagcggaggggctgaatgggttcaatgagaaaagtgtgtcgctggggaagataagagg

SEQ ID NO: 227459 - DNA, 201 bp, Homo sapiens
aagtgtgtgtccttgtgcatatgtgtatgtgtcatacataactaaaggaacgcaaaagcaacggattacaatgattgcatctgggggaagggactaggcasctggaagacaggtagagatacttttttactcatgcccttttgtactttttgaatttgatacacagtacatgtattacatagtcaaagaattataaaagta

SEQ ID NO: 227460 - DNA, 201 bp, Homo sapiens
ttgacatattgggttgagactcttctatgacttccacatggagatctcaagcaggtagtttgatatttgagtctgacaaccagcggagaagtgggagctakggatataaaagtgtgtgccagcaacatttggatggtgtgtaaagcggaggggctgaatgggttcaatgagaaaagtgtgtcgctggggaagataagagga

SEQ ID NO: 227461 - DNA, 201 bp, Homo sapiens
attctatttaaaaatgaaaactggtaaaattaattttatatctgcataatggaatactgtgaagtcgtcagataggatgtggaggttctgtgtatagttawggaacaatctacaaaacacatgaagtgaaaaaaaagcaagatgcagagcattgtgtctattataccgacatttgagtaaaagtgtgtgtccttgtgcata

SEQ ID NO: 227462 - DNA, 201 bp, Homo sapiens
gcttgggtttttggtttcttcgttttcaaaagaaaccagttggaataaaccatctccctggtccctcctagcattctgaaaccttcagtataagaaatttytaaaaggaagccctgaaacacctctacttctcagtgctactctggtcttgagttttctggaacatgttcaacatgcattcatttagcaaagctttgattg

SEQ ID NO: 227463 - DNA, 201 bp, Homo sapiens
aataattttgcatttcaaggaactgataatgttaattctatttaaaaatgaaaactggtaaaattaattttatatctgcataatggaatactgtgaagtcrtcagataggatgtggaggttctgtgtatagttatggaacaatctacaaaacacatgaagtgaaaaaaaagcaagatgcagagcattgtgtctattatacc

SEQ ID NO: 227464 - DNA, 201 bp, Homo sapiens
tcaattggctttcttgaccaaatgttaattccaaaggttaaaaggcatagaaaaatcattataaactattcacctcacctcacctcctgcgccgcaaattytgacccacaccttgagggagcatccatgctgaaagttcctaaaaggtctccgccactgtaaatttctgatctgtggtgagattcctggcaaattggagtt

SEQ ID NO: 227465 - DNA, 201 bp, Homo sapiens
acatgagactgttatgcacgatgaagaattgttttccccaaatgccaatagtgcccttgttatgaaatgccatgctaaccttcaaagtatgtttcacagcrtcccactctctgaccaccacttcctatcttttcagggctgctgcctcaggtgacattagcatctctactccaacagttctttgatcctgtggggcctcca

SEQ ID NO: 227466 - DNA, 201 bp, Homo sapiens
ttgtatgttagatctctagactggttcttcctacaaatctgctgcttactattctctgacctgtatctccccattctgccctcccaacctccaccgcagtytgataaccactgttttattctctatctctatatattttactttaagattccacatttaagtaagatcatgtcatatttttctttctgtgtctggtttatt

SEQ ID NO: 227467 - DNA, 201 bp, Homo sapiens
aaagattttgcctcaaggatgcagagaaattgactggagaatccactagggaatctgagcaattatagtgttgtgctgagtaaccctacagaggctttatyttaattatatattttagggtttattaaactaggaactctgtcccctctatgggctaaagagtattttgatattttgattgaaataaaatgggaactagag

SEQ ID NO: 227468 - DNA, 201 bp, Homo sapiens
atggtgggagaaggagagcttcactttggaactcttagctccttgctccaattcccacagtaaacaacagcacagttttaaaatgttgcacgtgggcccasagatatttattcacactaaagaaacacaacttctaactacaccaaaatgagtccctcctgacgatgtttaaataaattgtgccaacccaccaataaagca

SEQ ID NO: 227469 - DNA, 201 bp, Homo sapiens
acacctgtgtggtcttggataaatcacttaacctctctgatcccactgttcttctattctgtatatttctagctcatggtattgtggaaattagaaacaayatacacaagatgtttatttctgtgctagagacatattaaagactcaataagtaattcatcttttatgtattgtattcttttcaacagacttcccatataa

SEQ ID NO: 227470 - DNA, 201 bp, Homo sapiens
tagcacaagcttgtccttcatggctgacctctccaggtttcttatcacttttatttaaaccagatcttagaggcaaaaaccacagtagtattgcgctcagmtagtgagataattaggaagtgctgtctccataattactatgttactgtctctggagggacatgaaagcttgtcctgtccctttaacaggacaagttgcta

SEQ ID NO: 227471 - DNA, 201 bp, Homo sapiens
gctgtacagaagctctttagtttagttagatcccatttgtcaattttgacctttgttgcaattgcttttggcattttcgtcatgaagtctttgcccaatgstattgcctaggttttgttctacggtttttatagttttgggttttacatttaagtctttaatccatcttgagttaatttttgtataaggtgtaaggaaggg

SEQ ID NO: 227472 - DNA, 201 bp, Homo sapiens
cactctgatgatagtttctttagctgtacagaagctctttagtttagttagatcccatttgtcaattttgacctttgttgcaattgcttttggcattttcrtcatgaagtctttgcccaatggtattgcctaggttttgttctacggtttttatagttttgggttttacatttaagtctttaatccatcttgagttaattt

SEQ ID NO: 227473 - DNA, 201 bp, Homo sapiens
tgactttgagcagtaatcacacttaagaagaatgataattgtgcaactgcaggagcctgcctgagtaagtttctcattctaccttaaggagcttccgagasctgctcagtgtgttcttgcttatgctttccttcacgaggctcttacatttgtgcccacgtgctgggtacagagacagcaatgggagtgtagagcagcact

SEQ ID NO: 227474 - DNA, 201 bp, Homo sapiens
tttctgactttgagcagtaatcacacttaagaagaatgataattgtgcaactgcaggagcctgcctgagtaagtttctcattctaccttaaggagcttcckagagctgctcagtgtgttcttgcttatgctttccttcacgaggctcttacatttgtgcccacgtgctgggtacagagacagcaatgggagtgtagagcag

SEQ ID NO: 227475 - DNA, 201 bp, Homo sapiens
ataacaggggctcagtaaatatgtcgatggaccgagcatctcaaatataatcttttagctcaatcacaggagtcgagtgattgtttagcaggtccctgctrctgtggtttcctcatcatttaacaaaggtttatatttaaatcgtaagaccattgcacttccctttatgctttaagtagctgcacgggccttgtcaggatt

SEQ ID NO: 227476 - DNA, 201 bp, Homo sapiens
aaatattaaatcaaatattgttataatggaacatttcattgtgtttctgttgtaaaaaaaaatttaaggaaataaataacaacataaagacaaaattggtrgcctaccccaaatatttcagttatttgtgtaaaggttttcttatcttcactagctgatggttataaaatgaaatgcgtttaaatccatggctaaaaatga

SEQ ID NO: 227477 - DNA, 201 bp, Homo sapiens
aaattgctgtcattgggagagaggcgggtggatcacctgaggtcaggagttcaagaccagcctgaccaacatggagaaaccccgtctctactaaaaatacmaaaattagccaggcatgatggtgggcgcctgtaatctcaattacttgggagactgaggcaggcgaatcgcttgaacctgggaggtggcggttgcagtgag

SEQ ID NO: 227478 - DNA, 201 bp, Homo sapiens
gtcagtaatgatttaattgtacattttgaaataactaagagtataatttgattgtttgtaacacaaaggataaatgcttgaggggatggataccccattttacatgatgtgattattacacattgcatgtctgtatcaaaacatgtcatgtaccccataaatatatacaactatgtacctacaaaaataaaaattaaaact

SEQ ID NO: 227479 - DNA, 201 bp, Homo sapiens
gtggtgggcagggaggtgtgggtatggttaatgagtacaaaaaaatagaaaacatgaataagacctagtatttgatagcgcaacggagtgactgtagtcartaatgatttaattgtacattttgaaataactaagagtataatttgattgtttgtaacacaaaggataaatgcttgaggggatggataccccattttacat

SEQ ID NO: 227480 - DNA, 201 bp, Homo sapiens
gaagtgaaataagtcaggcctagaaagacaaatattgtatgttctcacttatttgtaggatctaaaaatcgaaacaattcaactaatagagatagtaagtrgaaggagtattaccagaagctgggaaggatagttgacaggtggtgggcagggaggtgtgggtatggttaatgagtacaaaaaaatagaaaacatgaataa

SEQ ID NO: 227481 - DNA, 201 bp, Homo sapiens
acaatagacttagcaaagtagagagagctagcaataggatatgtactttgaacatggggagattgggacctagagaggtcaagtgactataaatgtatccrattttaagttgaaaaatagtgaagaactgcaggttgatgggaccatttccagtgattcattatttctcccttttctatttttttaaaatattaacctcct

SEQ ID NO: 227482 - DNA, 201 bp, Homo sapiens
gactataaatgtatccaattttaagttgaaaaatagtgaagaactgcaggttgatgggaccatttccagtgattcattatttctcccttttctatttttttaaaatattaacctccttactaatctctttcctcaggacttgatatgccatttgtcctatattgtcaatggttttctttgggtctatagtttcttcatgag

SEQ ID NO: 227483 - DNA, 201 bp, Homo sapiens
ctctgggatcactgtggcctccccttgccctttgagggatgccatgacctcctgctcttgctcttgtctgagtgcctccacctcccttcttgtttccttcscctgccagcccctccattaataagccttttattagagtctcttcatttgaaccatctgaattgaattaggttcccactgggaccctaatataggtcattt

SEQ ID NO: 227484 - DNA, 201 bp, Homo sapiens
ggctcgcctttgtagcttcttaactgtgtggtttctccatgcttgcttggctattgtccactctctctgcagcacccagagtcactgctccaaagtttcamgtagaacatattacttctcccttgcctaaaaacttccaaaggctagccattttatagggataaaatttaaatggcttgcgtttatttctgttgatttcac

SEQ ID NO: 227485 - DNA, 201 bp, Homo sapiens
tagtttgtttcttttaaggaattgcctctgtttatctaagttatcaaatttgagatcacagagttgttcatcatatttctttatcatctttttaatatccrtgagatcagtagtgatgacccctctttcatttctaatgttagtaatctgtattgttgctctttttttcctggttagcctgactagaggtttagcaatttt

SEQ ID NO: 227486 - DNA, 201 bp, Homo sapiens
ttaggttaaaaattttgggatagggggattatctggtattattcaggtaggtccaatgtattcacaagggtccttataaatgaaagagggaggcaagcgartcagagtgagagaaggtgtgatgagggatgcagaggtctgagtgttgtggtgtgagcaggacttgacctgatgttgctggctttgaagatgtgggaaggc

SEQ ID NO: 227487 - DNA, 201 bp, Homo sapiens
aaagtcattttgaaactttcatacgttttcagatggagacattactaaggcactgtcccttcccacccagcagcaagcagaaccaattttacaagaacctytgagctcctgcatgtctaactgaacaggaagactctatcttggaatggtcttcccagggttctacctgtccataacccaaggcagtagagatgacctcat

SEQ ID NO: 227488 - DNA, 201 bp, Homo sapiens
ttaatatcgattccagagctgaaaggcttttgtgtgcatttcaggttaatttggcatatttgcctcatttcacattaaatgttttatgtgtgtttaacttstctatttgaccatttagcattcgagagactccataagaactgttaattatcaagggcatctctctgcgttaatgtgcgggcaccgtggtatgttctttac

SEQ ID NO: 227489 - DNA, 201 bp, Homo sapiens
tgagctcctgcatgtctaactgaacaggaagactctatcttggaatggtcttcccagggttctacctgtccataacccaaggcagtagagatgacctcatytgagagccctacatctggagttatcctggttttatagctgttggttaggtttgtcaacttctctagaggcagtgattataaattctactgatatggtttg

SEQ ID NO: 227490 - DNA, 201 bp, Homo sapiens
cagtgcttagtggtcaaagaatacctgttcagaaagaagtgaagtcaactgatttttaataccagatcaataattttttttttctttttgctgaccctggyagcaaaaaggagtggcagtagtgtaaactgataccttgaatcctgtgggatatttttgttctctatcataaaatataattttaaattaaccacatcagac

SEQ ID NO: 227491 - DNA, 201 bp, Homo sapiens
gttttagtaataaattctttttgcaaatgaaatcgtgcatgggatcccaacatagaaacagataaaacagagctgctctgtttgaatcacggagggggaamtgaagcctgccgccctttctggtgccccattcttacttccatcatgagctgctccttggccataccaggcttgttctggaagctctagggctttgggatt

SEQ ID NO: 227492 - DNA, 201 bp, Homo sapiens
agtgaggacaaaagttggtgtatgaatacgctagttccctcacaccttggctgggataactctgggatgcatattcttcactggttctcagagttctctakcaggttttataagctccagtcacatgaaataataactcacttgatcacacatcctatattggcctcctttcctttcttgtttccttcccttactcgtgtt

SEQ ID NO: 227493 - DNA, 201 bp, Homo sapiens
gggactggcatcccatttcctctggatactgcttataaaaccacaaattaattttttttttcttctgtgatttcacttgacactggaatctcaaaagtttmttgggggattttttgttgccccaaaagctacaattaaaagacagattttcataccttctttttccacttaaacaaccatcttcagggatgttattttgtg

SEQ ID NO: 227494 - DNA, 201 bp, Homo sapiens
cagtttagctttgaagaatatattgaattagatatgctctgagccctgattcaccatcattgcataatagcattgctatgtatattacctgggtgctttaktagactagagaaatgggctatttaaaagattaagttcgcagaatcagtgcatgtgctaatgaaacacaggagccaaagccaggcaacctcatttccggtg

SEQ ID NO: 227495 - DNA, 201 bp, Homo sapiens
tttcagagagggctgacaacctcccttagaatgaattgaaagaatggcagcaggaggggcagcaggagaggcaggttggtgtgagtaggtaacatgtcccktcttgttttttccaagttgtggggcacagctggaagtggaaccctggagacacagcctctctattttattatgcttcgggaaatctgaacaaggaagcag

SEQ ID NO: 227496 - DNA, 201 bp, Homo sapiens
tatttttgcctgcaaagtatttttggtgatttgctttattgtgactgtaaagtattttttaatgagtttgaatgctgttaggcatattgctcattctctakgcctatacagttgccacgactgccttctacctaggcttgcttcactggctaatggtgcatgcatagctcctgaaggcattggagtttaagatccttgcct

SEQ ID NO: 227497 - DNA, 201 bp, Homo sapiens
aggagataggtcctttaccttaatgggtaatgcctttgccaggtcataggctattttttctctagcattcatcactgccaaacatactgtaattaacattsatttattatgtgtactgtttctctgcttcaccagaatgtgagccacagggcaaagactttgctctgtgttgttcagtgctatttccccagtgcccaaaca

SEQ ID NO: 227498 - DNA, 201 bp, Homo sapiens
tttattgtgactgtaaagtattttttaatgagtttgaatgctgttaggcatattgctcattctctaggcctatacagttgccacgactgccttctacctakgcttgcttcactggctaatggtgcatgcatagctcctgaaggcattggagtttaagatccttgcctatttcatgggctgctcctcttctctctgctactc

SEQ ID NO: 227499 - DNA, 201 bp, Homo sapiens
aattgtaagaatgtggatttgggaattttgtacaagttaaacgaagcactgagatcttagtatagggaaatcttttcggcactgagcagaggactcataaktaacacaacacgtggagttgtatggtcaaggaaatggcagaaacaggttctttttgcaaaggaagttttccctggacattcttaggtagcagacgtttct

SEQ ID NO: 227500 - DNA, 201 bp, Homo sapiens
tattttagtaatgagaaagctgggtaagcatctggtttaccctatcctatgtcagattattactgagctaaatctctatgttcctcaaaagagagacacamaattagcagaaaagcatttatctggttaaaagttatttgtgcccatttttctcacagaaacaaatattcagataatatatgtattagtgttctctagcag

SEQ ID NO: 227501 - DNA, 201 bp, Homo sapiens
gaactcattccaattagttgttgaagtttaattacctcctcaagagactaagtttgactttaagttagagttaagacacttgagaggtgaaagctaggagwtgggattcaagggttaagtttagagttaagaaagttgaatcttcagttagattcaagagagctaagttggagatagagttagaattgaatttgaagttaa

SEQ ID NO: 227502 - DNA, 201 bp, Homo sapiens
tctttctctctctctctctctctttctctctttctctttttctttctctctttctctctcttttctttttttttcttttctttcattttccagattcccakagtctgggcaataaaaaagagagaatgttttgatattaagaatggtgcctgactagttactaaaaggccttttaaaaaagaggctgccaaagcctgtacc

SEQ ID NO: 227503 - DNA, 201 bp, Homo sapiens
tggcattgaatctataaattaccttgggcagtatggccattttcatgatattgattcttcctacccatgagcatagaatgttcttccatttgtttgtatcstcttttatttcattgagcagtggtttgtagttctccttgaagaggtccttcatgtcccttgtaagttggattcctaggagcaattgtgaatgggagttca

SEQ ID NO: 227504 - DNA, 201 bp, Homo sapiens
atcaggcttttcgtttggcatcgtatttgccagacaaatgtagacagcacttttgtgtggtgaagcactttgttagtacttcgagcttctaagggacaatktgagttggaaaaaaaaggcattgaaaccttgtacaatactcaccccattacacaagaaaaaccaaatgagtttatctgacaaaaaggtgtgggtatgtgt

SEQ ID NO: 227505 - DNA, 201 bp, Homo sapiens
gatgaaatggatttcagtttagtgtcagtccccttttaatgggcccagacttactaatgttgagcagattggtttcctaagctatctaagcaagtgagtcraatgaaatggaacgtgccgagttggttctttatgttgaagactgaggtatacccggtgctgtgtgtggtttaggtatgtgtggtttagggtgggaggagg

SEQ ID NO: 227506 - DNA, 201 bp, Homo sapiens
ccacctcaccctcctgagtaactaggactacaggcccgagccaccatgcctagctattatttgtatttttaatagagatgaggtttcatcatgttggccabgctggtctcaaactcctgacatcaagtgatcctcctgccttggcctcttaaagtgctctggaaccatttgttttagactacaccacatccttaaatacag

SEQ ID NO: 227507 - DNA, 201 bp, Homo sapiens
tcaccaaaacagcatggtactggtataaacataggcacggagacgaatggagcagaatagagaacccagaaataaagccaaatacttacagccaaccaatygtcaacaaagcaaacaaaaacacaaagtggggaacagacaccctattccacaaatggtgctgggataactggcaagccacatgtagaagaatgaaactgg

SEQ ID NO: 227508 - DNA, 201 bp, Homo sapiens
gataaggacgtttttgcaccctctagccctccaaatcctaaccaggactccaacttgtgttcaaatgcagaaccagcgcttggttccaagaaaaagaaatyagacttttcagatttgttgaaggttggtcagtttaagggatctttccagagtggtttaaccatgttttcccccttactggctaacttcagagcttaatac

SEQ ID NO: 227509 - DNA, 201 bp, Homo sapiens
cacctacacagttacacagtgtatgaagtggtgatctcagatgtgtcagagagaattgcattcagtttcagtgaacagaaacccagttagaatggtgtaayggtgtagcagtcagggttctccagagagagacagagatgatcgattttaagccgttcactcacatgattatgaaggctgagatctcagtccaaaatctgc

SEQ ID NO: 227510 - DNA, 201 bp, Homo sapiens
ccgccatcatcgtcatggcctgttctcaatgagctggtgggtacacctcccagatggattggcggccgggcagaggggctcctcacctcccaggcggggcrgctgccgggtgggggcacgcccacctcacagacggggcggctgccgggcgggggtgctccccacctcccagacggggtggcggccaggcagagacactcc

SEQ ID NO: 227511 - DNA, 201 bp, Homo sapiens
aggcattcttgcattcatttggtgctttgactgtatgcttgctacttgatactgtctgtgctaggttaataggacccagatagttcctgccctcaaggagmttacccacgccctttgattatgatcaaagcaaagccgttctttatatttcctcttttgcatactctctaatagcaaaaaggatgatatgttcagtgctgg

SEQ ID NO: 227512 - DNA, 201 bp, Homo sapiens
tggaaacatttggaaatcacttgctgctgaaagttttcactctctctttttttttttttttctggtagaattttctgcatttttattgttgtaaatgattkagcttattctttaattttgaatggatcacacaatcatctttatgtgtccagctgcctttgttggaggagacatgtcttaaattgttcactgctgaatcag

SEQ ID NO: 227513 - DNA, 201 bp, Homo sapiens
ttttttctcttgtaaactggatgtgttcagtgtagacaccttgttttccatatcagggtcgtattgtacaaggagacagaattagaatggcacttttaatyctatttgtagcaagttagagttccaaatggcaatttcacgactgtttgataaaaaatgtcactggttttgattgagttgtgttattaacctctagctaga

SEQ ID NO: 227514 - DNA, 201 bp, Homo sapiens
aaaatgtggatgatccctaaatacagagttgttttatggactaaataaattatgccaaaaccctgtgcttgggcctccaaaaacattgaataactgttttytttctccctgttcctttccacctcttggtaccttcttttcttttttcttttcttttcctttcctttcctgtcctgtcctttcttttccttttcttttatt

SEQ ID NO: 227515 - DNA, 201 bp, Homo sapiens
ctggagattctgatcaagtagattgcacagcactcaggaatcagtcattgtataaggaaatccccaggagactctgatgcatgactacctttgggaatagsctctctgggttttacaaagccattttctgtaaaactataatttgaactcattttcgttggatgtggaatgcagtttggggattgataagggcttagttca

SEQ ID NO: 227516 - DNA, 201 bp, Homo sapiens
gcactcaggaatcagtcattgtataaggaaatccccaggagactctgatgcatgactacctttgggaataggctctctgggttttacaaagccattttctrtaaaactataatttgaactcattttcgttggatgtggaatgcagtttggggattgataagggcttagttcacattggaagaaaatcagaattatagagta

SEQ ID NO: 227517 - DNA, 201 bp, Homo sapiens
agaaaccaagttgagccagtgaatgcaggagtggagacattgtgtggcctccattctgagagtgctggtgggaacacagcattgctcaagttaagacgtgwtaaatccctgtcacaaggttgacttgggtcttcctcactgggacacagggccagaaaaatgaaaccttcaggtgaaattgagaaagttgtgcctcaggca

SEQ ID NO: 227518 - DNA, 201 bp, Homo sapiens
tgattttgctcacaaaacaaaatgattgacatgaaactttaggtccacccctaggcaaaaaatgcagcaactttggtcacaacaaaatttcttttcccccstccatctctatcagcaaaaccactacgtttagtttcataaaaaagagatgaataagggaatatgctaaaaattctggcagtagttatgttttcacacact

SEQ ID NO: 227519 - DNA, 201 bp, Homo sapiens
tgtattgagtacatatactatatatataattgagattgttttctgtcttccagtgataaaattctatgtattcacaattttcttctttctgcaccctctcstttttccccatgactttgattttgctcacaaaacaaaatgattgacatgaaactttaggtccacccctaggcaaaaaatgcagcaactttggtcacaaca

SEQ ID NO: 227520 - DNA, 201 bp, Homo sapiens
aacagatccgaggaatggcaggaattagacaattccaggcagagaggagcagtgctgctagatgaaggaggaagggcattcagtgcagagagaatactcasatacacagaggggaagtagagcatttttttttttttttgtgaattccaagaaccacagaactgtgatcttagttttaaaggagaattcacaggagataaa

SEQ ID NO: 227521 - DNA, 201 bp, Homo sapiens
agaattcacaggagataaaaccagtaaggtaaactaaggctgaatcatgaagggtttttcagttctttctactgttaatcatgcctggttacagtacctayatctggtaggttcaataaatgcatgtctagcttttataaatagtgaatgtacatggttcagtcttggagcattacagtcaaggaaactccatttggcaag

SEQ ID NO: 227522 - DNA, 201 bp, Homo sapiens
agctcttctctgctatcatcccatccatcttatatagacaaaccccgtaaaattccaaagtccggttagaaactgtagaatgagggctaattataacaacytatagctaaagccagagacattataccttcaggaactgggcaaaactggggactcttgaagaacatagatacatagttttgaagtatgaagaatatagat

SEQ ID NO: 227523 - DNA, 201 bp, Homo sapiens
tccagtgttacgtttcccaccccacctccttcaattatctctcccaaatcttgaatcataaacttctggaaagccatgtgaataatttagatgcttttatkactcattgcttaactccctttgggggaaatgaagagaaacctttgtcttttgctgcttactctcctgtggaccgagaccatgtcagcttcaagcgataac

SEQ ID NO: 227524 - DNA, 201 bp, Homo sapiens
ttatctctcccaaatcttgaatcataaacttctggaaagccatgtgaataatttagatgcttttatgactcattgcttaactccctttgggggaaatgaaragaaacctttgtcttttgctgcttactctcctgtggaccgagaccatgtcagcttcaagcgataacaaagattgatgaccacaggagctgtcactgtgga

SEQ ID NO: 227525 - DNA, 201 bp, Homo sapiens
tgatctacatggtaatttgtgaattgaagagctagtagtggagcttgtactttacccaatgacccagagttaatgtgacatggtaactgaaatttaaaccrtgttgttggggaattggtgttgtttaaactggagtaactgaaatatgtgcatattggaaccatgagaaggactgcctatagttgccaaaagttaaataga

SEQ ID NO: 227526 - DNA, 201 bp, Homo sapiens
gacacaactcataggtactgctgttactacagtggttcattgcctacatctgtgatttaataagatacaaaattttagttaaaaattagtaaaaataactrtgtgtcatttttttcattcatgttcatgtgtttccttccttttatccatgcaccctctgctaagcctctgtgggacccccaggttaagaactcctgacct

SEQ ID NO: 227527 - DNA, 201 bp, Homo sapiens
cataattgtgtgatagtaattgtaatgataagtacttctagaataaatgatatttcaaggtaactgcaataactatcaagttattactttacatatttttwaaatacctgtgatttatactgtgacacaactcataggtactgctgttactacagtggttcattgcctacatctgtgatttaataagatacaaaattttag

SEQ ID NO: 227528 - DNA, 201 bp, Homo sapiens
gctggattgaaactcctagcctcgagcaaccctcccacccaataatgattttaattaaggacagttaagtatagagaagtaccaaggaaattcatgttatktaataccagttaacacagtattaacagcaaatttgtgatacagtgaattatgcatttctttattacatattaaataatgagaagtggtagcagctataat

SEQ ID NO: 227529 - DNA, 201 bp, Homo sapiens
agtagctgagaccacacgtgcacgccactatgcccagctaattttttttagatatggggtctcactactttgcccaggctggattgaaactcctagcctcragcaaccctcccacccaataatgattttaattaaggacagttaagtatagagaagtaccaaggaaattcatgttatttaataccagttaacacagtatta

SEQ ID NO: 227530 - DNA, 201 bp, Homo sapiens
tcacctaggctggagtgcagtagtatgatcatagcttactgcaactttgaactcctaggctcaagcagtcctcccatctcagtctcctgagtagctgagascacacgtgcacgccactatgcccagctaattttttttagatatggggtctcactactttgcccaggctggattgaaactcctagcctcgagcaaccctcc

SEQ ID NO: 227531 - DNA, 201 bp, Homo sapiens
ttgctccttcacctaggctggagtgcagtagtatgatcatagcttactgcaactttgaactcctaggctcaagcagtcctcccatctcagtctcctgagtmgctgagaccacacgtgcacgccactatgcccagctaattttttttagatatggggtctcactactttgcccaggctggattgaaactcctagcctcgagc

SEQ ID NO: 227532 - DNA, 201 bp, Homo sapiens
gcatgatgaaaatgagttaaggtttataaaatgtttaaagaggcattgggaaaaatatctcctgtatgaatgagatagtgataataataaaattagaaccraatcagagattggtgaaggaaatttagtttaatttgcatcaaacaaactcaatgctgtgaatggctggtaaagtgaaatcttatttctgaagttcttgaa

SEQ ID NO: 227533 - DNA, 201 bp, Homo sapiens
gggcatagagtgataacaaacaggatgacaagttagaagggacatgctggctgggatgactcagtaggtactgggctttaagcaaagagtagtgaagattkgatattcagactgctgttaagatgtgtgtataaagctacttctccttaatctggctgggtgcccaaacctcctgctagaagagtcacttttaagtgttaa

SEQ ID NO: 227534 - DNA, 201 bp, Homo sapiens
tcaaggaagagtttcagtacttggccatgggatgccccacaacccagagaaacctgaaacccacgtcagcctttcgattctgtatgttcatcagttatctrtttacttattgccactttgttgaatgctctgagatactgatgtttgtcaattacgatttgcttatgcaaagatgagaaaagatcttggctactgctttat

SEQ ID NO: 227535 - DNA, 201 bp, Homo sapiens
cctgggggaaagaatctgaatggtttgatgtaggtcaggcgcccacccttgccagagtcacctgtggcccagggcacaaggtctacctggttagctgccgkcttaattctacttaatcttgcttggcaggactgggagagactctctgggtaagtggagtacagggcaggcagctggattaatgcccctgttattaataaa

SEQ ID NO: 227536 - DNA, 201 bp, Homo sapiens
ggctagaaatcagaaggttttcctcccaccccagaatgctcttgcaaaaacaggtggattcttgaagggaggaggtttgttcattctctgttaaaaagtaygtgactttgatagtttagacccagcaacttgtcttttcccattaattctaggctaccaaaatatatatgtccctggactttttttctgggttaatattga

SEQ ID NO: 227537 - DNA, 201 bp, Homo sapiens
ggagagaaattctgcttcagaggtcttattctctcattcattcatttcacatgtgtttattatctgcatccacttggtcagatgagcaagactgcttgtcygtgaccacacagctaggtggtacagatcgagaacttgaaccaatgtctcagggatagctcttcttcaaatgcatcaaggtggcctctgacagcctattac

SEQ ID NO: 227538 - DNA, 201 bp, Homo sapiens
tgaaaggtgaggcttctacaaggccacaggatagcttactcatttgacaaaaggttagatggtgagcttcctgaagccttaggccaggaagtggttgaccstcaaaaactaaccagagtgggatgggtaaatggacaaacatatctctcagcatcccatcctaaagagcaggagactgtctcaggatcctcatagcctctc

SEQ ID NO: 227539 - DNA, 201 bp, Homo sapiens
tttttatgttaagtgcataacatgaaacttcgaatggtttttaaaaatctgagtcagtttggtaatttgacagtaaactaagtttgtcttttctcttgaagaatcttgcataagataaaaccttttaaaaaatcagactatgtttagtaagcattcatataaaaccatgaaaatatggctaaataaatttcaagatgttgg

SEQ ID NO: 227540 - DNA, 201 bp, Homo sapiens
taaatgtcaggttcttatattttacatgagatagtataatattaattttaggtagattttgataagataaggatgcatattgttagtcctagagcatgcaygcacacacacacacacacacacacacacacacacacacacacatgctacaaagaggtataattaaaaaccctaatagtggtataaagatggaaactttag

SEQ ID NO: 227541 - DNA, 201 bp, Homo sapiens
aataacacctcaaagtctgtgaaaattagagtgccactggagccacagctgataaaagtagccaagacccacatgattaatttaacagggttactgactgttacaacgaaagacttaaataggacctagtctctcctatcataataggcaaaatgcccaggattcaataaaaaattatccttcataccaagaaccaagaaa

SEQ ID NO: 227542 - DNA, 201 bp, Homo sapiens
acataatttgagaagctaatacatcttttaaaatatcagtttatattttagagcatattgcatgaagatgttaattttttgtcatcaataatttaaagaartggggacagagaagtagaggagcaatgtttttgtatgttattaaagttaagctggtataattccaaattagaatcgataactttaggatattaaatataa

SEQ ID NO: 227543 - DNA, 201 bp, Homo sapiens
catcatcatcggcggcggcagcagcagcaacagcatctttatgaatttattcattatacatttttataagtctattctttttagaagcttcaggataatayttctaaaataagcatgttgctaccaaagaagggaaaattctgcttggtccttaggaatcaaatgaaaaggtaactttcaggtaatacaggaagtgaggcc

SEQ ID NO: 227544 - DNA, 201 bp, Homo sapiens
gtgatcctccatgttctttccctttaatacatggctcactgcaatttacaggagccaagtataaaaaaaaaaaagactaacatggtgtcctcaggcttaawcctgtacaattgccttctgcctactgatgtttcgctttcccctaatttctcctcgttggctctcctttgtccatcctactttcttgatgcctgccactct

SEQ ID NO: 227545 - DNA, 201 bp, Homo sapiens
actatgagactgtgtaggaaattgctgcaggagtgattcaaacaccaagaacagcaaacgggagcctcaatcttgtctgttttggagatccagaaggagakagcaattggaaaggattttggagattaggtcatgtttccattgcagatgagactgagggatgataaaagagggatgggcaggagtgaaagaatgaaaaat

SEQ ID NO: 227546 - DNA, 201 bp, Homo sapiens
cttcactttagataaatgttttgtgtgaaaactgagaatttttctttttacggtccagtgtttcagggacactgatgatgattttcttggcttactctatctgtcttccaaattaatgcttactttgtttgcttgaacaagttccttgccttttttctcaggtattcagtgaaattattttgagtttctccatcatggtaa

SEQ ID NO: 227547 - DNA, 201 bp, Homo sapiens
tcttcactttagataaatgttttgtgtgaaaactgagaatttttctttttacggtccagtgtttcagggacactgatgatgattttcttggcttactctatctgtcttccaaattaatgcttactttgtttgcttgaacaagttccttgccttttttctcaggtattcagtgaaattattttgagtttctccatcatggta

SEQ ID NO: 227548 - DNA, 201 bp, Homo sapiens
ctctggagggacatgaaagcttgtcctgtccctttaacaggacaagttgctaattcccttaacattttttcccctttggactgatcatatttcacaaattkttgcattttgaaatgttttaaagggaggcttaagcaataatgcacagattatggaaatgatgctcattaagtagaaggcagatttctgaaaaagccacag

SEQ ID NO: 227549 - DNA, 201 bp, Homo sapiens
gatgattctgcttaatactttgtaattcaggaatgtcaagaagcaacaaagcatatgtaccaagagaaaagcaggatttggattacactaaattctatttrtgccgaatgttttattttgttgaagtcacatgtgaaaatagcaatattgaatgatgaaaaatcttaaatttagcccctgttaaggagaataatgttcctt

SEQ ID NO: 227550 - DNA, 201 bp, Homo sapiens
taagcccaggctgtcaagctgcagattctgtatattgtcatcccgtgacctaaggttaaggacctgaaccttccatgtcacttagcttaaagtgaaagctrtgcttgctgtgaaatcctgacttgctggatgtatgaccatggagcgcactttacacattcatgccagctagaggatgtctcattaactcaaccttacctg

SEQ ID NO: 227551 - DNA, 201 bp, Homo sapiens
ttatcacactttgaatgcaaagattacacagacccacaacgcaagcatcaaggcagtaaaacatcccaactctggttatataactacacagtacccacaayaggagtctatgcaatgtgtcaggataaaagagaatgtgggatatcacaaggaggccctttgcatggacagaggaaagccaagtatgagacaagagataga

SEQ ID NO: 227552 - DNA, 201 bp, Homo sapiens
ttcacttacagactgcaaccacatacaaatgaaggaaactgaacaattgcttagaatgtgattaatttgtatttttgaataatggaatggagattgccatrggaaagaaccatgagacattcttaagcaacacagtaaatatgcgtagaacagctcagatccctttggatttagatgcagaggacttctattgttgttttc

SEQ ID NO: 227553 - DNA, 201 bp, Homo sapiens
gtagttgcttcaggtatcagataactcaaaaagtcttattaatgaaagctgtatcatcgtcatgatgcatgattggttcattttgtcattcaccagaagtstggcatgctgaggtgctcagtaaatattttttgaaagaaccagtagataaaggagcagctccttattgggcaccagcaatatatcaggcactgtcagaag

SEQ ID NO: 227554 - DNA, 201 bp, Homo sapiens
ggtccacaccttgtgagggaatggaggcaatagggagcaataaaagcatgtaggggggatccctataccagcctggaatgccacctggaagaggtgacttytaagttgcaaactgaaggaccagcaaaacttgagcgagtaaagagcgaggagaaaagtgtgctagacagaagaaagtttttatatggtaaatttatatta

SEQ ID NO: 227555 - DNA, 201 bp, Homo sapiens
gcattctttgatggaatagagggatgtggagggaaacagcccagtaaaagctaaaacaatcccttcagatattgaaggaaaaaaaaagaaccatggaaaarctgtggtgtagctgtctatccccaactactgcacctttcggagatgttaggacctagccaaaaatgagagaaagaatcatattcccattactggtgactg

SEQ ID NO: 227556 - DNA, 201 bp, Homo sapiens
tttaattttggtattagctatgatctgaagctgttgggagctgtcattcttaaacatctgtacttgacttgtttaaacttagggctctggcctttccccarcagcctggcatgccaggaaaagtaaagaaaagacctcatgccattaaatagacaggtggtttccatggccaccaacacaggaagactccaacatcttagc

SEQ ID NO: 227557 - DNA, 201 bp, Homo sapiens
ttcttcactttagataaatgttttgtgtgaaaactgagaatttttctttttacggtccagtgtttcagggacactgatgatgattttcttggcttactctatctgtcttccaaattaatgcttactttgtttgcttgaacaagttccttgccttttttctcaggtattcagtgaaattattttgagtttctccatcatggt

SEQ ID NO: 227558 - DNA, 201 bp, Homo sapiens
ggtaaacggtgtagctcagggggaaggagaaatttctgatgctgtcccatagaagggacctacctcctgcattaatagtctgaaatttacatcttagcccrtaagtctgacctgttctttggtggtcatgcatcagtggtaatgcattctttgatggaatagagggatgtggagggaaacagcccagtaaaagctaaaaca

SEQ ID NO: 227559 - DNA, 201 bp, Homo sapiens
tgggcatggcagtgggcatctgtagtcccagctacttgggaggctgaggcatgagaatcacttgaatccgggaggcagaggttgcagtgagctaagattgygtcactgcactccagcctgggtgacagaacgagactccatctcaaaaaaaaaaaaaatgctattacaatgagggaatagggactgaggaaccaaaactga

SEQ ID NO: 227560 - DNA, 201 bp, Homo sapiens
agaatcacttgaacccgagaggcggagattgcagtgagctgagatggcgccactgcactccagcctgggcgacacagctagactcagtctcaaaaaaaaaataaataaaaaaggaagcaaaaggctgaactctgtgcagaagggaataggcagccttagacagtaccagaataaaggcaatgctggcagatttgttggatg

SEQ ID NO: 227561 - DNA, 201 bp, Homo sapiens
caggagaattgcttgaacctgggaggcggaggttgtagtgagccgagatcatgccactgcactccagtctggcgacagagcagggctccatctcaaaaaamaaaaaaaaaacaaaaaaaaaacaaaaaaaaaacaacttttgcaattttttacaaatcgatggctagttaagaatgactctaccaggcaccctgttacgat

SEQ ID NO: 227562 - DNA, 201 bp, Homo sapiens
aattcaaaatgaaaagataccactacattatatgactggctttcaaaaattccccagtgttctgcttaactttttaaatttactttgtatcttttttttttaactccagagtagaagagtgatgcttgatgtcctcaagttacagccagcatttactaattctttgatttgactttataaagtacttatgcttgaatccag

SEQ ID NO: 227563 - DNA, 201 bp, Homo sapiens
aatagtgtgaggtctttgtctagattcttttttttttttttttttttttttttgcatgtgggtatccatttgttctagatccatttgtggaaaagactatstgggctttctcttctgtttcactgatgtatttggtggcttttgccaataccacactgtttcaattactatagctttgttgtaactcttgaagtcggatag

SEQ ID NO: 227564 - DNA, 201 bp, Homo sapiens
cccatactatgtgactattgctgtacaatgctctggaaagccaaaagtgtgtttgtatagtgaccaccttgcacatgtattttctggagtcttttttttttcacataatgctcagtgcagtcactagtagttgctttaaggaactgtccaaatttcagaatgatatttataaaatgttccatttatgtttgaacacttttt

SEQ ID NO: 227565 - DNA, 201 bp, Homo sapiens
cacagtggacacctcattggcatactagctgtgtggatgaaaggttgattctctctagaatttaactgtcagaccatgtaattgtatttttttttttttttggagagtgtctcactctgtcacccaggctggagtccagtggcatgatcatagctccctgtacccttaatctcctgtgctccagcgatcttccctcctcag

SEQ ID NO: 227566 - DNA, 201 bp, Homo sapiens
acacagtggacacctcattggcatactagctgtgtggatgaaaggttgattctctctagaatttaactgtcagaccatgtaattgtatttttttttttttttggagagtgtctcactctgtcacccaggctggagtccagtggcatgatcatagctccctgtacccttaatctcctgtgctccagcgatcttccctcctca

SEQ ID NO: 227567 - DNA, 201 bp, Homo sapiens
tcaccgtgccccacttccaacattaaggattacaatcccacgtgaaatttgggcagggacacagattcaaaccatatcatacagtaaacccaccaaacatsccagtctcttctttataagagtggctccagagaagaatgttctgtgccagatcacatggatgacactctcttccttcctcaactccttgtcactccaggt

SEQ ID NO: 227568 - DNA, 201 bp, Homo sapiens
gttgggcggccgggcagaggcgctcctcactcccagtcagttggccagccgggcagaggggctcctcacttcccagatggttggcggctgagcagaggcgyttctcacttcccagacggctttttctctttcttttgggcttggctatatatgtgtgtgtatgtgcgtgtgtgtgtgtgtgtgtgtgtgtatctatgtgcg

SEQ ID NO: 227569 - DNA, 201 bp, Homo sapiens
agaggcgctcctcacttcccagatggttgggcagccgggcagaggcactcctcacttcccagacagggcggctgccgagcagaggcgctcctcacttcccrgacagggcagcggccaggcagaggggcccctcacttcccagatagttgggcggccgggcagaggcgctcctcactcccagtcagttggccagccgggcag

SEQ ID NO: 227570 - DNA, 201 bp, Homo sapiens
atatttttatattggctttctctctctctttttttttttttaacgaaaaagtaaactttaatgtcaaaaatgcaaacttggggaagaacagaaaagatcasacacaaggctgtcacttcacacttggaaggttgcacagcgtccgggcagaggcgctcctcacttcccagatggttgggcagccgggcagaggcactcctc

SEQ ID NO: 227571 - DNA, 201 bp, Homo sapiens
gcagtggctcacgcctataattccagccctttgggaggctgaggtgggcggatcacgtggtcaggagtatgtgactagcctggccaatatggtgacacccygtctctactaaaaatacgaaaattagccgggtgtggtggcacatgcctgtagtcccagctactcgggaagctgaggcagaagaattgcttgaacctggga

SEQ ID NO: 227572 - DNA, 201 bp, Homo sapiens
ctagataagtatattcaaggacttgacataaaatgggtgacataaaatgaagaggcgggaaatctcagagaaacaaatgtaaactataataaagaaacaartctatattatagaactgcaaataataatttccaaaatgaaaagtttactgaatggccttagcaacatattagaaactacagaaaagatcaggaaacttta

SEQ ID NO: 227573 - DNA, 201 bp, Homo sapiens
tggcgtaaggctcacatagtaggcagacactgctaagacaaatgctgggttaagtgtctcttgcatctagaacacaattagttcccagagaggcttgtggyggtggtacagtgactccttttttgtgttactattccaggaattttccagagcttctagacatggtccccttaatataggattttgattgctttggaaaga

SEQ ID NO: 227574 - DNA, 201 bp, Homo sapiens
atttaaaataactagataagtatattcaaggacttgacataaaatgggtgacataaaatgaagaggcgggaaatctcagagaaacaaatgtaaactataawaaagaaacaagtctatattatagaactgcaaataataatttccaaaatgaaaagtttactgaatggccttagcaacatattagaaactacagaaaagatc

SEQ ID NO: 227575 - DNA, 201 bp, Homo sapiens
atggcgtaaggctcacatagtaggcagacactgctaagacaaatgctgggttaagtgtctcttgcatctagaacacaattagttcccagagaggcttgtgrtggtggtacagtgactccttttttgtgttactattccaggaattttccagagcttctagacatggtccccttaatataggattttgattgctttggaaag

SEQ ID NO: 227576 - DNA, 201 bp, Homo sapiens
ggcagcttcttgctttgctcctggctaatttatgtagcggtgaattttctttcttcgtctcctagttcagtttgttagcttttgaaaagattttttttttkttgttttagagtggtgtgagagtagattggcaacccgtttaagttcaggatagcaaatgagttgagactaacagcatctatctaggcacatgtgaaacat

SEQ ID NO: 227577 - DNA, 201 bp, Homo sapiens
ctgccagaaaaaaactcagtaccctataaggaagacaatataatgcagattccctaaatgtgtcgccctgtgtttagcatacaacaaaaaaattactggaygtgtgaagaggaagctccattaatcagaaaaaagcaataaatagaaacagactttgaaataactcagacattagaattagaaaatgaggaatttaaaata

SEQ ID NO: 227578 - DNA, 201 bp, Homo sapiens
tttatatttctgactctaacaattgtattatagataataaggaacaaagaaattaatgactgcctgctgtccttttagtttgtgtccctaagatctgctgcagtattccaaaattatcctgctcttagggtgctaattggaaacatttttcaattgaaatcttttataggctgggcgcagtggggcatgcagtagctctag

SEQ ID NO: 227579 - DNA, 201 bp, Homo sapiens
ttttatatttctgactctaacaattgtattatagataataaggaacaaagaaattaatgactgcctgctgtccttttagtttgtgtccctaagatctgctgcagtattccaaaattatcctgctcttagggtgctaattggaaacatttttcaattgaaatcttttataggctgggcgcagtggggcatgcagtagctcta

SEQ ID NO: 227580 - DNA, 201 bp, Homo sapiens
aaaggtgctcaacatccttcatcatcaaagaaatgcaaatcagaactacaacgagatatcatctcactccagttaaaatggcttatatccaaaagacagayagtaacaaatgctggcggggatgtagagaaaagggaacccttgtaccctgttggtgggaatgtaaattagtacagccactaaggagaacagtttggaggt

SEQ ID NO: 227581 - DNA, 201 bp, Homo sapiens
tactgtcttgtaatgaatgaggggattctttttcagaattgttcatgatgggctgtaaaaaatgaattgtctcattcctaggtaaacagtatctcaaggasgtgagaaaagaggaaagtacataatttatggagaggcaagaaaagaggggctctgaagatgggctttatgatttttattgaaggctgaggatcgagttca

SEQ ID NO: 227582 - DNA, 201 bp, Homo sapiens
attttatatttctgactctaacaattgtattatagataataaggaacaaagaaattaatgactgcctgctgtccttttagtttgtgtccctaagatctgctgcagtattccaaaattatcctgctcttagggtgctaattggaaacatttttcaattgaaatcttttataggctgggcgcagtggggcatgcagtagctct

SEQ ID NO: 227583 - DNA, 201 bp, Homo sapiens
cctcatggattcatgtatcctgaattcctagcaaaacaaatcttgcccagtctttctgattcctagttttatttcatgaactcaaatgttccctgagggcmgggattcaacacaaatttgttttacatttcccacaattccctgctttgccccagacaacacgtatcataggatcttatctgttgatgtggttgtaagcaa

SEQ ID NO: 227584 - DNA, 201 bp, Homo sapiens
ctatcaggaatgtcaccaatagctagttattcgagagtaatttcatgtgtgaggaatgcgttggaagactattttaagtccacatatttcaagtaggtttwatttatttgaatctgggaacatagggattgaaaaattctcaaggtaagcttttggttgtgaagtcatttataaccaaatcagcagtgatcagtgaaagct

SEQ ID NO: 227585 - DNA, 201 bp, Homo sapiens
cgtgacaacctatttgtataaagtgacagggtttgaactaaatataccacatgaaatctaagttataggtgatggaatcttgtttgtagctctagtcgttwgcctgctcacactcctcccctgccagcctgctcactcagcccctgtattctgctaatgtgactgttttcaagagatccctttaatgtagacaatataaat

SEQ ID NO: 227586 - DNA, 201 bp, Homo sapiens
accatgtattacttcccatttcaggttataaccagtaggaatttgctagttcactccggtaattatctgttctcctagctgcaaacactgctaagtagccyttaaatgcagctgagatgattgttaaaagaacatttaaaatccttccattaaaaacaagtaaccaaatttggtaaagttctttctgaccatctgggctct

SEQ ID NO: 227587 - DNA, 201 bp, Homo sapiens
gcagcttttaataagctcatttacattcttggttaacaattgagcccctagtgtttaagttaattgaaatagaaacctactctccagttggtagaagtgtmtggagttaaggctttttctgacatcccccaaagacattcgtgccttctaggattggtctagatttttgccattcactgagtaatgccagggtataaaaat

SEQ ID NO: 227588 - DNA, 201 bp, Homo sapiens
ctttgtggaatataaagccatcaacccagcaccacagcagtatcactttgtcaaaagagagttgtttgcactttacgtgacaacctatttgtataaagtgmcagggtttgaactaaatataccacatgaaatctaagttataggtgatggaatcttgtttgtagctctagtcgttagcctgctcacactcctcccctgcca

SEQ ID NO: 227589 - DNA, 201 bp, Homo sapiens
ggtatcaagtagattcctatactttgaacattcatctttctctttaactctggggaattttaccatgcaatctctttgataattcactccagtttcttttyttcttattgtgaaaatttggttagtcatccttagacctcctgaattgttcatctatatattttatttttttctcacttacttctgtacttggtctatagt

SEQ ID NO: 227590 - DNA, 201 bp, Homo sapiens
acccatgtgatcatacgattgtacttattaatcttttcccagtttaacagtgcaagtgcaggtttcaaagaaaggtggctggagacattctgggtgaggtrttacaaataacacatcatatcagttgtgggagctgaattcttgtttttcttgtccggtgcccttatttaccaactgggtgaacctgtaaaagtcagtgaa

SEQ ID NO: 227591 - DNA, 201 bp, Homo sapiens
atgtgatcatacgattgtacttattaatcttttcccagtttaacagtgcaagtgcaggtttcaaagaaaggtggctggagacattctgggtgaggtgttayaaataacacatcatatcagttgtgggagctgaattcttgtttttcttgtccggtgcccttatttaccaactgggtgaacctgtaaaagtcagtgaatctc

SEQ ID NO: 227592 - DNA, 201 bp, Homo sapiens
tgcaggtttcaaagaaaggtggctggagacattctgggtgaggtgttacaaataacacatcatatcagttgtgggagctgaattcttgtttttcttgtccrgtgcccttatttaccaactgggtgaacctgtaaaagtcagtgaatctctctggaccttagacttcttgttaataaagcaaaaggattatgtaatataaag

SEQ ID NO: 227593 - DNA, 201 bp, Homo sapiens
ctgaattcttgtttttcttgtccggtgcccttatttaccaactgggtgaacctgtaaaagtcagtgaatctctctggaccttagacttcttgttaataaarcaaaaggattatgtaatataaagttggagatggcctccaaggtcaaaaagttgataattcatttgtgcctattgactcaaactgtaattgggtataataa

SEQ ID NO: 227594 - DNA, 201 bp, Homo sapiens
ccaaggtcaaaaagttgataattcatttgtgcctattgactcaaactgtaattgggtataataacaagtctttccctgtgactcttggtaagttaatgggrtgtcacatgtgatgacacatgcaaaaccaccttcacattgtagtatgtcatgtattataagtatttataaaaccaatgtgatgtactactattagaaaaa

SEQ ID NO: 227595 - DNA, 201 bp, Homo sapiens
tccaagtcctgttttcagaaatgacttctcttagctgtataaaaatgtgaaaaaaagagagcatcctttgccctgagcacagtatttcctagacagtgttsaacacggtggtcaccttggatagaaggcagcagctacaggagacaaaggcagcgttacacacctaggtgatgccactgctcctcttctctaccaccagcc

SEQ ID NO: 227596 - DNA, 201 bp, Homo sapiens
ggtcagagtctatcatagagacagatgtgatttattgcaaaagagagccgactactgcttaggtatcaggtgcaaccaatacataactaccaccaaggaarggctggttgtgatgacggtattggaagctggtgagtcagactcattacaattttcatgtaatctctaaacttccttgttaaactattttctactcttcgt

SEQ ID NO: 227597 - DNA, 201 bp, Homo sapiens
ctgaggtcagagtctatcatagagacagatgtgatttattgcaaaagagagccgactactgcttaggtatcaggtgcaaccaatacataactaccaccaasgaagggctggttgtgatgacggtattggaagctggtgagtcagactcattacaattttcatgtaatctctaaacttccttgttaaactattttctactct

SEQ ID NO: 227598 - DNA, 201 bp, Homo sapiens
ttaaaaaacatgctgttggtaggctgaggtcagagtctatcatagagacagatgtgatttattgcaaaagagagccgactactgcttaggtatcaggtgcmaccaatacataactaccaccaaggaagggctggttgtgatgacggtattggaagctggtgagtcagactcattacaattttcatgtaatctctaaacttc

SEQ ID NO: 227599 - DNA, 201 bp, Homo sapiens
aaaggaacaaactattaatacacaaaacagcttgtatggatctcaagggcattaatgttaaatgacaaaagcccactttaaaaggtcagataatataggaktcttttatatagattttcaaaaaaacaaaattggcatacacccaccattctgccactgttgccagcacatgctagtaagcatggatcctgctgccactgc

SEQ ID NO: 227600 - DNA, 201 bp, Homo sapiens
aaccaccttcacattgtagtatgtcatgtattataagtatttataaaaccaatgtgatgtactactattagaaaaagagacattttagtgctaatatactscaggatctcctgaaatacacagagcaggagttccacacattgagcaggcatcataattgcccagaaaagcataatgaaaataagctgttgggcccacggt

SEQ ID NO: 227601 - DNA, 201 bp, Homo sapiens
gatcctcagatttcagcagttctcctacaggctttggagttcctctgccccttagttctgggatcttgtgcaagttttgtaacccctcaatgcctgattaygcatctcttaagtgaagataaccttttaggtggctataagaattttttttggttttttgagacctagtcttgatctgtcaccaggctggagtacagtggt

SEQ ID NO: 227602 - DNA, 201 bp, Homo sapiens
ggttttcatgtattatttcatttaatcctctcagaagccctttgaagaatagactttattatctgcattttataaatatagaacccaaagaattaagataytcgactgccttcacaggtcacacaggaaatgaaagttggggtggggatttcatcccagctcatctgactttagagctcgatgctcttaatcaccaagctc

SEQ ID NO: 227603 - DNA, 201 bp, Homo sapiens
caccaggctggagtacagtggtgcagttgtggctctctgcagacttgacctccggagttcaaacaatactcctgtctcagcctactgagtagctgagactrcaggtgtatgccaccacgcctggctattttttgtattttagagatggggattcaccatgttgcccaggctgatcttgaactcctgagctcaagtgatctg

SEQ ID NO: 227604 - DNA, 201 bp, Homo sapiens
ccacggagactgaagttaggaagggttccattctgcactgaaaaagtttggccagcataaatcaagggcctcaatcactgatatcacccagaaaaagaaasatgatcaatttttcatgtaatttctggctggtacctatggaatcactctgtctcattgtacaacagagtatattatgagaaaaatgagggttggtgctgg

SEQ ID NO: 227605 - DNA, 201 bp, Homo sapiens
gtgatctgcctgccccagcctcccagagtactggaattgcaggcatgagccactgtacctggcctgctgtcagaatgtaatgagatactgcctgtccattmttcgcagggtgggaagcacgtagtaaatattattataactgttgcttagagttggggagtccctgagcctccacaaaggagagaaacaagcatgttttcg

SEQ ID NO: 227606 - DNA, 201 bp, Homo sapiens
gtgcaggggcagtgggcttagaacttttactaggctgtgttcaactgtaccagagtgttgatagtagtatcacacttggatgttggaatcgggcagacctmctcattccacgttcctcggccttagtttcttcatctataaattaatgatgataataatttggattatatctatcatgcagttttatgataaataattgag

SEQ ID NO: 227607 - DNA, 201 bp, Homo sapiens
cagtgtctctggaagcttccacggtgatcactttatttgtgcggtttcattgtggctgtgctgctgtttgagttgggctgtttgctgttctggtcacggayttctatgtgctcatgagacaaatttctgtatcttcctgtaaacacagttctgcacattccagaaaacctgatacatttctttggtcccaccttaatgtga

SEQ ID NO: 227608 - DNA, 201 bp, Homo sapiens
agaagaggactgaatttgggggatttatttaccagcccgtgaaagaacccacatttctctagatgcaaagcctgcctcattcacatctttcaactgacagyctcagaatagtgggtgatgcatttatttccatgtctttgttacccagattatatagttaacttactactacaggagaaaagaagcctgggacttcttttt

SEQ ID NO: 227609 - DNA, 201 bp, Homo sapiens
tttaaacaactggtttctttctgtgaaggaacatttattttttcaccccccagatgcctttctttgcaacttttgctgtcatttcatttggttgatttctrtttcactcttgattcagtgttgtttctttcacaataagataaataaaatgatcagaaatcgagcaagactttccttttgttagttctttcttttgatgtc

SEQ ID NO: 227610 - DNA, 201 bp, Homo sapiens
agaacccacatttctctagatgcaaagcctgcctcattcacatctttcaactgacagcctcagaatagtgggtgatgcatttatttccatgtctttgttamccagattatatagttaacttactactacaggagaaaagaagcctgggacttctttttgagacagccattggttttctttggtggaaataagatgtttttg

SEQ ID NO: 227611 - DNA, 201 bp, Homo sapiens
caaggagcaaaaaattagagataggagaatgggagggaagactgttaattccttatgcccagatgtttccctccacatggcagtaactactcttattcttkcctttaattcacttagtaaaggaaaatggaagaagccacttgaagtgtaatcgtctctcactgttcctgtttaggtctattacagaaacagtaggaagat

SEQ ID NO: 227612 - DNA, 201 bp, Homo sapiens
tacatttaggatttaatagtttgcattttttgcttactcacttgtcctaaatgcttaatgaataggctctaaggctttaattttcaacctatcctaagttkattactaaagtttatcaagcaataaacacactattgcacttatactgtcatgtttttataaagcagtttataaaaggtgacatctggcaaagaggcagat

SEQ ID NO: 227613 - DNA, 201 bp, Homo sapiens
cagatgcatttgcaagccagtgtcattaaaaaacatgctgttggtaggctgaggtcagagtctatcatagagacagatgtgatttattgcaaaagagagcmgactactgcttaggtatcaggtgcaaccaatacataactaccaccaaggaagggctggttgtgatgacggtattggaagctggtgagtcagactcattac

SEQ ID NO: 227614 - DNA, 201 bp, Homo sapiens
aaaaatggtacaaagaaagtttatttcaaatcagatgcatttgcaagccagtgtcattaaaaaacatgctgttggtaggctgaggtcagagtctatcatasagacagatgtgatttattgcaaaagagagccgactactgcttaggtatcaggtgcaaccaatacataactaccaccaaggaagggctggttgtgatgacg

SEQ ID NO: 227615 - DNA, 201 bp, Homo sapiens
aagtgtttcttttctcttataacccaatgaattgacctctataataacatgcagttgctaaatgaaaaaagaattgtatttaagcagaaaaaagttttagmaaatgtgattttgtatgccaaaatatgcatattagtagcttttatgagaagtgtccttgaaggaaaatatggtgaatttgtatctggttcaggtcttctt

SEQ ID NO: 227616 - DNA, 201 bp, Homo sapiens
gtcagagagaggcttctggaaacatgtcttatgacctaggtggtggttactcgtgtgtatacatatgcaaaagagcagagctatacacttaagattagccyattttattgtatgttctggctatctgttgctgtgtaacaaactactccataacacaatagctgaagacaatttattattattatgtctcccaaggttgtg

SEQ ID NO: 227617 - DNA, 201 bp, Homo sapiens
actggttttgggttagttctaatggagttctttaaaggattttaaccacagaattcagtaagaaatacattttgtggctgggtgaggtggctcatggctawggtcctggcactttggggggccaaggcaaggaggatcacttgtgctcaggagttcgagaccagcctaggcaacatagtgagaccttgtctgtacaaaaaa

SEQ ID NO: 227618 - DNA, 201 bp, Homo sapiens
aaccacagaattcagtaagaaatacattttgtggctgggtgaggtggctcatggctaaggtcctggcactttggggggccaaggcaaggaggatcacttgygctcaggagttcgagaccagcctaggcaacatagtgagaccttgtctgtacaaaaaaatttttaaaaaaaatcagccaggcatgatggtgtatgcctata

SEQ ID NO: 227619 - DNA, 201 bp, Homo sapiens
catagtagctcacacctataatctcagctacttgggaggctgaggagaggggattgcttgaggccaggagtttgagaccagactgggcaacatagtgagarctccattgctaaaaatatgaaaaaaagttagcttgatgtggtagcatgcacctgtagtcccagccatttgggaggctgaggcaggaggatctcttgagcc

SEQ ID NO: 227620 - DNA, 201 bp, Homo sapiens
atgccctcattcaaggagcttcttaatatctttattttatttttttgctggtgcagaaatcaatccctgaatgtgatgtctacttgatcttcaggtttaartttgtttttttaaataataaaactaattcttgtacagttctaggtaatgagtactaactacatgcaaagctgaatgctcagcacatggttagcagactta

SEQ ID NO: 227621 - DNA, 201 bp, Homo sapiens
tcctacacatatataattaaaggtttcaccaaacagtgtttacccttgctgtatgctaagtactcagatttttttaaaaattgtatttcagtttaaaacaygctggtcacggcccactaaattgattttataattcagtttataaagaactattatactgtattaccttaggcaagtcgtttttttcttccttaggtcttg

SEQ ID NO: 227622 - DNA, 201 bp, Homo sapiens
tgcctctctctatttaagctcttcattttcgcattcctccccacggtttgtaataaaagtggaacatagctcaagggcagaaatgaggtttaacttcagcsgaggtacaatagaggctatttggaaagtaaaactttcaaatagcagtttagctttgaagaatatattgaattagatatgctctgagccctgattcaccat

SEQ ID NO: 227623 - DNA, 201 bp, Homo sapiens
ctgaaggagcccatacaaatgatagctcacaaaccacagcctttgcataataaaagcttatagctcagaatggtagacaacacagagtgagcaattatgcrttggtcctaatgtgtcattattttagacaaacaaaatacaactgtaagcttttataaatgtgcgtactttgttagtgtataactaaaatataatgagcta

SEQ ID NO: 227624 - DNA, 201 bp, Homo sapiens
cgggatttttttttttttttttttttttttttttttgaggagtctcgctctgtcgcccaggctggagtgcagtggcgcgatctcagctcactgcaagctcygcctcctggtttcaggccattctcccacctcagcctcctaagtttttgtttttgtagttttagtagagacggagtttcaccgtgttggccaggatgatct

SEQ ID NO: 227625 - DNA, 201 bp, Homo sapiens
gattgatatatgattcttttagtcaaatgctacacttaatttttaaaacactttggaactcagcttgtctttcccaacagcatttattcaaagtgaaactktaaattatcatgagcaaaaactaggttggtttgagtaagtgtaactcacatatcataaatattaaagcagttaatttatttctaagtactcccattcaaa

SEQ ID NO: 227626 - DNA, 201 bp, Homo sapiens
ataaggtgtaaggaagggatccagtttcagctttctatatatggctaaccagttttcccagcaccatttattaaatagagaatcctttccccgtttcttttgtcaggtttgtcaaagatcagatggttgtagatatgtggcattatttctgagggctctgttctgttccattgatctatatctctgttttggtaccagtac

SEQ ID NO: 227627 - DNA, 201 bp, Homo sapiens
agcagacatgacttctacaatcataacaggtagcttcattgacctgtttctaaaatgggtagcactttttaaggattgaagttgttttgtccagttggacrgattcttatccctttgtcttttcttgtattgccaacttctgcctatacttgaaatagtagggcagatttctatatgtaagcatttaaagggtctgcaaga

SEQ ID NO: 227628 - DNA, 201 bp, Homo sapiens
aaaaatgtttttctgtaattctcaaattaggtgcagtaagcagacatgacttctacaatcataacaggtagcttcattgacctgtttctaaaatgggtagsactttttaaggattgaagttgttttgtccagttggacagattcttatccctttgtcttttcttgtattgccaacttctgcctatacttgaaatagtaggg

SEQ ID NO: 227629 - DNA, 201 bp, Homo sapiens
accttgtggagcatacagcctgtcatggatcaggctgttataaggtgatttcaatttacctgtttattgtagccaaagaggagaaagtatgtcccccacayggtagagcagattagatagcactagtgccctggagtgattggttaaatggactttgaggctgtttgtggatgcaaggaaaaatgctgtgattgattagca

SEQ ID NO: 227630 - DNA, 201 bp, Homo sapiens
aagtcatatgtagtatagacagtatccactaagggaaattgtggtacaagactatgtagagattgaagtctagaaacaggcagaagtaagttcaaatcccrgtggcatctactaaccatatgatattgtagcctgaaaggcttatttcagggcttggtacttaccaagaatttgttaatagatagtagtttctgttcttac

SEQ ID NO: 227631 - DNA, 201 bp, Homo sapiens
aacccagagaccattgtggctgtgggagcgacttgagctgatagaggaagttggagagctgcgaggatgtatccccaggatctatataaaaagccaccacrtggttctatattgaaaaaaaaagttaaacaggaaaggaagcaagcaactatggtataggatctcagatggtttgcagaagaatctgacctcagagtctgt

SEQ ID NO: 227632 - DNA, 201 bp, Homo sapiens
tctgctagttctaacataatttaaaaggagactatatattgctcttcagacggtcaattcactaactcatagccacactgggtgagacttcgacatggtgycatcagccatctgaggtgaatttaatggggcattgatggaacagaatcctttggtcagaaatcagtgtgcagaaggctacaaattgtggtactctggaaa

SEQ ID NO: 227633 - DNA, 201 bp, Homo sapiens
tgtgcagcacgattactgtccgttgttttcctcttatctgcgaagtagtgttgctgatagtacttacctccaaatgacattatgaggattcagtgagtcarcacataaggcactgtgcacagtgctcactgcatagtgatcccttggtaaatgttggctactgtcagcatcattagcaacaattatcacagtacacgtgtg

SEQ ID NO: 227634 - DNA, 201 bp, Homo sapiens
ggcaggaactgaagctgctagttttactcagcccactgctggccactccccacgggagggagcgtgcaaggaaacgggtgtgggaaccggagtgaaggaamactggaactgctggctgcttctctccagcagaagcaggccctgtgcatgccccatggcagcgtccaagtgtgttacaatgctcttttagccttgccatcc

SEQ ID NO: 227635 - DNA, 201 bp, Homo sapiens
ttcctcaaaagagagacacaaaattagcagaaaagcatttatctggttaaaagttatttgtgcccatttttctcacagaaacaaatattcagataatataygtattagtgttctctagcaggacagaactagtaggatagatgtatatatgaaggagagtttattaaggagtattgacttacatgatcacaaggtgaagcc

SEQ ID NO: 227636 - DNA, 201 bp, Homo sapiens
attagcaacaattatcacagtacacgtgtgtgccgaaccacatgtgtctcaaaaagagcagtgtcctcaccttctctaccttggccatggttgccttgagrgtctgggcacagacagcatctgagctccagggatcatcatagtagggaaacagctctctcccagtgtttgtccagggtcaacactggcttcagctgaccc

SEQ ID NO: 227637 - DNA, 201 bp, Homo sapiens
gattagatggtgcccaccaagattgagggtgggtctgcctctcccagtccactgactcaaatgttaatctcctttggcaatatcctcatagacacacccaktaacaatactttgcatccttcagtccaatcaagttgacactcaatattaactgtcacaatatatgattcaggttagtcattttattaactcttttttttt

SEQ ID NO: 227638 - DNA, 201 bp, Homo sapiens
aaaaagagcagtgtcctcaccttctctaccttggccatggttgccttgagggtctgggcacagacagcatctgagctccagggatcatcatagtagggaamcagctctctcccagtgtttgtccagggtcaacactggcttcagctgaccccaggaatagactggtctcttagtatttgagaaaatacctcttttcctggg

SEQ ID NO: 227639 - DNA, 201 bp, Homo sapiens
atgaagtattacagacatttctttgaatcttgtctattggaattagggagtgctgaactatagaaatcaaaggtcaaatgacaagatggtgtgtggcaggygaatttactgacttttctgttaagacttctctgtagatgttaagaaagtttgaagtttttgaggagatgttttactggagacagagtgctgtactgcctc

SEQ ID NO: 227640 - DNA, 201 bp, Homo sapiens
aggtctcgcaatgttgtccaggctggtctcaaactcctagcctcaagcaatcctcctggcttggcctcccaaagtactgggattataggcatgagccactrtgcccagcccaggctagagctgagcaaatgaggaatgttgagaagcatggagggctataatggtagtgatggtgagctggagcctccaaggaagatcatg

SEQ ID NO: 227641 - DNA, 201 bp, Homo sapiens
attacagacatttctttgaatcttgtctattggaattagggagtgctgaactatagaaatcaaaggtcaaatgacaagatggtgtgtggcaggcgaatttrctgacttttctgttaagacttctctgtagatgttaagaaagtttgaagtttttgaggagatgttttactggagacagagtgctgtactgcctcctcctct

SEQ ID NO: 227642 - DNA, 201 bp, Homo sapiens
cataatgtcttctagttttatcatgtttttgcgaatggcaggattttctttccttctttttaaagagtaaatcgtattccattattgatatatacatcgcrtgtctgtatttatctgtcagtggatacttaggttgatgccatgtcttggtggttttgaataatgctacgatgaacatgtgagtggagatatctcttttgg

SEQ ID NO: 227643 - DNA, 201 bp, Homo sapiens
gtgtgtggcaggcgaatttactgacttttctgttaagacttctctgtagatgttaagaaagtttgaagtttttgaggagatgttttactggagacagagtsctgtactgcctcctcctctgtgagatgagagccttattgcagtcagcgtgtctgcatttagctgcccagttgtgtccataattttatgttctcagttttg

SEQ ID NO: 227644 - DNA, 201 bp, Homo sapiens
gttgatgccatgtcttggtggttttgaataatgctacgatgaacatgtgagtggagatatctcttttggatgggggatttcagttcctttggttctatatycaggagtgggattactagatcatatggtattctatttttaatttttgaggaaactctgtactcttttccataatggctgtacaagtttacatttctacca

SEQ ID NO: 227645 - DNA, 201 bp, Homo sapiens
gcagtgcaaagagacccattttaattttgcacgtgtattgtcaagaatcattatgaagatctacaagtaagggttgaacagttgttcctgatggaaatgamgcagacagaaagaaaaaggaattgaggagcctctcagtctaaaaacaggcatataagtgatatcttagtaattcgtgtcagaatgccccaaaatctgttt

SEQ ID NO: 227646 - DNA, 201 bp, Homo sapiens
gaacagttgttcctgatggaaatgacgcagacagaaagaaaaaggaattgaggagcctctcagtctaaaaacaggcatataagtgatatcttagtaattcrtgtcagaatgccccaaaatctgttttacgttttctttgcttcatggaaaggctacagactgggttaagtatttttgcagagatttctattccacatagcc

SEQ ID NO: 227647 - DNA, 201 bp, Homo sapiens
gcacatggagtggaaagaacatgaactctggagtctggaactcctatatctggacttgacaccgtattctgctatgtggccttcggtgagtgtgccaagtwgaatattggctctgcaaacgtatccacatcaaatttctagagcttgtgaatgtgaccttgtttgcaaaaaaaatggtccttgcagatatgattaaattga

SEQ ID NO: 227648 - DNA, 201 bp, Homo sapiens
taaaaagagaggttggattgaattcctggtaatatgtgtttaaatggaatgaatactcgttcttagaatgaagagaagtgtgcagaatggaactttgcaarcccttactggcccatatgtcacggggtggagatgtcaccattttctatatggctccagatcaagcaatctcttgacaaaaagcaagctggcttcgagtaa

SEQ ID NO: 227649 - DNA, 201 bp, Homo sapiens
cacaaatgagatgagtgcttgtgatttttgtaaaagttaaatcccaaagaacaatttctgcttcccatgtagtctgtaaaccctcacaaaacacaaacagyagcaacaacaaaactctctgagggatctgaagaatgaacaaaggcagcaagattctcgaagggggttgaagacacctggaagtagtataggttaaatttc

SEQ ID NO: 227650 - DNA, 201 bp, Homo sapiens
gaaaaagcatgtggtgaaatttaataccactttgtgataaaaacagaacactataaaaggaagagaatgttttcaaattgataaagaatatctgcaaaaargtaacatacttaacattgaaagactgaatgcttttctttacggttgggaaaaagtcaaagatggtgactctcaccgctactattcaacacagtgttggaa

SEQ ID NO: 227651 - DNA, 201 bp, Homo sapiens
ttaaatttaatcaagttcaataaaaattccaaattcaaaaaccgtcttcataaaactgtgcgttatcaccaaaccattaaatagcacatcagtttaaaatwattaaaaattgctaagtatccatttagcatgagatacgtgttatgactgcagacacctccaaaacaaatcgacagtctattgcactgcattctgagaatg

SEQ ID NO: 227652 - DNA, 201 bp, Homo sapiens
gaaatttaataccactttgtgataaaaacagaacactataaaaggaagagaatgttttcaaattgataaagaatatctgcaaaaaagtaacatacttaacrttgaaagactgaatgcttttctttacggttgggaaaaagtcaaagatggtgactctcaccgctactattcaacacagtgttggaagatcgaatacttttg

SEQ ID NO: 227653 - DNA, 201 bp, Homo sapiens
gatattaacttgttggcagtaactcatggccctgcatgaaacagaacctggaagagagaagaagaatttaaaatgctgttattgagaatctctggaagtayattattccaaggtaccttagattttaaaatttggcctcaccctacacctattttatgatttgtccccactacatcaaactcagtgtatgctcttgccatg

SEQ ID NO: 227654 - DNA, 201 bp, Homo sapiens
tggcatctagtaagcaatgtgaaagtataagcttttgttcctgaggtgtggtggtcatttgctccaataagccaatacatttgctccttttctcctggtasagatctgctaaaagtaaaggaatctttctgatgcaattggcagcaattgttgatttacttgccaaaatgtaggctaacccaagtgaccccttgactgaaa

SEQ ID NO: 227655 - DNA, 201 bp, Homo sapiens
gtccagcaacgggagagggctcagattcattagtgaatgctgctttgccatactggtaaatgttgctgatagactgtgttactctcctccacaaagtccaygagcaacttcaaaattctttactgtgtcacaggcagcatttggcaatcaaactggcaagagagctgaaacccattagccttatctgagaacgaaaacaca

SEQ ID NO: 227656 - DNA, 201 bp, Homo sapiens
tgctgctttgccatactggtaaatgttgctgatagactgtgttactctcctccacaaagtccatgagcaacttcaaaattctttactgtgtcacaggcagyatttggcaatcaaactggcaagagagctgaaacccattagccttatctgagaacgaaaacacattagccgtcctgcagtcttcttctaaaccagtgaaaa

SEQ ID NO: 227657 - DNA, 201 bp, Homo sapiens
gtaactgttaaaattaggtgtaaaattttcaatgtttatcctaatcacttattttgctaaaacccgttaaagagtatcagaacaatttttagattctaagkcatgttatgagcttgctgttgcaaaggtgaaccaacaccagggaaactggggggtatgtcaaaaggaactggagaagggtaggagaaggttttgggagct

SEQ ID NO: 227658 - DNA, 201 bp, Homo sapiens
gctagtaacccttagctgacagagggcacagacaaaaggaaaggttacagcgaaagcctgctcactgtaggtgaaggactgggaaaggggcagtctagcartatagagaaaatttttagataatatctgtactactccagctaaacaccacacatacacacattgaaaaacgtgtggcctacctactcctacctccaacag

SEQ ID NO: 227659 - DNA, 201 bp, Homo sapiens
ctgtactactccagctaaacaccacacatacacacattgaaaaacgtgtggcctacctactcctacctccaacagcaaaggccaagtgggagccaaaactwctatcgtcactgggatgtaatgagccactccagcctccttgtcaggttggtattacagaaagccaagtagagagccagaattctcatatccagtgggtgg

SEQ ID NO: 227660 - DNA, 201 bp, Homo sapiens
attctaggatacccagttagcgtctgttggagaatctggtgtgagaagtgttgagtagtgtgtgagagtaggaaaacactttagtattttatgccccctasgcaagttctgatacttttaatactttcattattgatcttgccagcacagtgagccaaggaaaggaaataaaagacatacagattagaaaggaagcagtaa

SEQ ID NO: 227661 - DNA, 201 bp, Homo sapiens
tcactctacataccttctcactcagaccgggaccatgtagacatgcctcttaatctcacatgcacctttggaatgagggaggaaaccagagtgcctggagraaacccatccagacatgcagataaccatgaagatttcacacagacactggccccactcagaaataaatgagactgttaaaagtataagactgtatcttcc

SEQ ID NO: 227662 - DNA, 201 bp, Homo sapiens
ataatatttatttaatgagctagaaataggaggagcttacgcagcataatacaagatatttactggaaacctgtagcaaggtatgttatttaacgttaacrttgtaaatattactttcactgccacaaatgagatgagtgcttgtgatttttgtaaaagttaaatcccaaagaacaatttctgcttcccatgtagtctgta

SEQ ID NO: 227663 - DNA, 201 bp, Homo sapiens
ccctttgggttccatgttttccttgttcccttccatgcctagctggattgcagagttaagtttatgattatgaaataaaaactaaataacaaccacaacarcaacaaaagaattcagtaacagagaagtggctggttgttaataattaaaccaagttaacaaaaagtgagatttaagtgattgtaactttaattataatac

SEQ ID NO: 227664 - DNA, 201 bp, Homo sapiens
tgtatggaaatgtttctccaggctgagtatctaataacacagtgtccagaaagaggcatgaaaagcatgcagtaccgcacaggcattattggaatagaacktaatgtacattagaccaaatgatcttaatcagaagcgatggagtgatgagggatggcattctttatattgatgggagcacttgctctagattatgcatct

SEQ ID NO: 227665 - DNA, 201 bp, Homo sapiens
aggaaactctggccacacagcactgcattactggagagaaaatgctggtgccgttaccccaggatagaaaagaagaaaaaaggccaacgtctattgattgygatttctcaagcagagtgatgcctttaacactctgtaatgaaagtttttatatgtgagagggattaccaacactgggctgttactgtcctttgatgtgcc

SEQ ID NO: 227666 - DNA, 201 bp, Homo sapiens
attagcaaacttaattctatctgctaccttaattttcctttgccatgtaatctaacacattcacagattttagggactaggatgtagacacctttggaagrccattatcctgcttactaaatagggcagtaatatttttggaaatatgtttgtcaggatctgtcacagttaaagcactatatctatgctgaaactacgagg

SEQ ID NO: 227667 - DNA, 201 bp, Homo sapiens
gtagtttctgttcttactgttattattactatttttctttaagtagcaatggttagtaaatagagaaccagattcaaagccaggtcattggatgttcccayctaccattctttccaagggtgagattcccaattttctctttgcctttaaccattcattctcagttttatcttcctctttgtatggaaatgtttctccagg

SEQ ID NO: 227668 - DNA, 201 bp, Homo sapiens
aattgggcttcatgagagcatcactgtcaagtctaaaaatacatggggagataatcacattttttttctttcttgtacattttcagcacgttcacgtccaygttcttcccaggaaggctggagactttcacaggaatgacagcatctatgaggaggtgggtctgttctctctgatcttattgtttgatcacggggactgtc

SEQ ID NO: 227669 - DNA, 201 bp, Homo sapiens
ttaccctgaagaagtatgggaagtcgtgtctttaaaatttgaatgtactgaaattcacttttcaacgtatggagaacttcctttctagaaggaaccttaaractgatctggttaaatctgctagggaatgtgtataaaaacattcagtgttttgtaagacctgtactgatatattttatatgaggctcatacatatagagc

SEQ ID NO: 227670 - DNA, 201 bp, Homo sapiens
aagatagaaggaaagaaggaaaaaaaagaggaaaaaacaagaaaagagacaaagagtctacacataatgcagtagggcaggcaaaacagcaagtgacctcmgtgcccacactggcagaagcaaggtaagaaaccaggtggatattgtaagccagtggttctcaaagtgtggcattagaccagcatcagctgggagcttgtt

SEQ ID NO: 227671 - DNA, 201 bp, Homo sapiens
cttgatgtggtagcatgcacctgtagtcccagccatttgggaggctgaggcaggaggatctcttgagcctgggagttgaaggctgcagtgagctatgattktatcactgtactccaacctgggtgacagagtgagattctgtggggagagagaaaagaaggaaaggaagggaaaaaaataggaaggagggaaagaagaagg

SEQ ID NO: 227672 - DNA, 201 bp, Homo sapiens
ctgtttgtttgttttagtaataaattctttttgcaaatgaaatcgtgcatgggatcccaacatagaaacagataaaacagagctgctctgtttgaatcacrgagggggaactgaagcctgccgccctttctggtgccccattcttacttccatcatgagctgctccttggccataccaggcttgttctggaagctctaggg

SEQ ID NO: 227673 - DNA, 201 bp, Homo sapiens
ggttagaagattcatcatagtaaatatgtcagttctcccaagttgatacagagttttaatataattcttatgaaaatatcagcaacaatttttagtagatrtagacaagattatcctgaaattcatatgtaaaggcacaggaactagaatagctaaaacagatttgaaaaagaataaggtggtaggaattagtctatcatc

SEQ ID NO: 227674 - DNA, 201 bp, Homo sapiens
ccacaacacgtgggaatcatgggagctacaattcaagatgagatttgggtggggacacagccaaaccatatcaccctccttcctatgtatgcccagctgcsttagcaccatttgttggaaaagctatcctttctctattaaactgcttttgcatctttgctggtaagaatgtaaaatgatacagtcacgcttgatagacag

SEQ ID NO: 227675 - DNA, 201 bp, Homo sapiens
tccttcagctatgagtgggagcttcctgaggttctcatcagaagcagatgttagcatcatgctgcttgtaaaccctgcagaaccgtgagccaaataaaccwtttttctttgtaagttacccagtttcaggtcttcctttatatctattttttaagagatttctttttctgtgttgcccagggtggagtgcagtggctattc

SEQ ID NO: 227676 - DNA, 201 bp, Homo sapiens
tctgtgttgcccagggtggagtgcagtggctattcacaggtgtaatcatagcccactgtagcctcaaactcctgggctcaacagatcttttcacctcagcyttctgagtagctgggactacaggcctgtgccactgacctggctactcatgtattcctttatagcgacacaagcggactgagacaacccagcatttgtgat

SEQ ID NO: 227677 - DNA, 201 bp, Homo sapiens
ctgacctggctactcatgtattcctttatagcgacacaagcggactgagacaacccagcatttgtgatcatggtcatttatccaagaaacacaaaaacttrgatccacacaaaaaccgttacacaaatgttcctagcagctttattcataatggccaaaaactagaagcaatccagatgtccttctgcaggtgaatagtta

SEQ ID NO: 227678 - DNA, 201 bp, Homo sapiens
actgtggtacatccataccacggaggctattctgcattcagatgaactattgatacatacagcttaatctccagagaacttcactgagcgtaaaaagccartttcaaaaggttatatgttgtatgattccatttatataacatccttaaaatgacaaaagtatagaaatggagaacagatgagtggttggcagtgattaag

SEQ ID NO: 227679 - DNA, 201 bp, Homo sapiens
cctctggagggctttcaaatgattcatctctgaggtcccttccagctgtagattttgatggtttcatgtttcagtgcatcaaatgcatttcaccatctcaraagtacgcttggacatgcaagagtgaatctgttatgttatttatcttattccatcagatgtgctttgcgtggtctgttttaatgcatagaacttactggc

SEQ ID NO: 227680 - DNA, 201 bp, Homo sapiens
agggctttcaaatgattcatctctgaggtcccttccagctgtagattttgatggtttcatgtttcagtgcatcaaatgcatttcaccatctcaaaagtacrcttggacatgcaagagtgaatctgttatgttatttatcttattccatcagatgtgctttgcgtggtctgttttaatgcatagaacttactggcatctctt

SEQ ID NO: 227681 - DNA, 201 bp, Homo sapiens
ggaaccaaaatgaaatatcagtttgatttagtgttgctatggagaatgttttaatgtttcaattcaatagtttgtaatatatttaggcatgcttatacatrtatacttcagcagatttctagtttggtgaatgttttttaattgactatcaggatttaataatagccatttgaaataaagccaataaaacaaaaaaataca

SEQ ID NO: 227682 - DNA, 201 bp, Homo sapiens
cagcagctctttaaaatattctttttggctgatgaatccagtcacttttgatctgtgagcataatggataaaaaacttgtatgaaattgaatctgaaaatktcattttattgtgaatagatccaaaatgttttatttttgacagtcccagataaaggatgatataattaggcatctgacttaactatgagagaattttttt

SEQ ID NO: 227683 - DNA, 201 bp, Homo sapiens
tgtgcgtaaatgtatatatatataagtaattttttacattcttgaccatgtattacttcccatttcaggttataaccagtaggaatttgctagttcactcyggtaattatctgttctcctagctgcaaacactgctaagtagcctttaaatgcagctgagatgattgttaaaagaacatttaaaatccttccattaaaaac

SEQ ID NO: 227684 - DNA, 201 bp, Homo sapiens
cagaattgctgaatctttggggaaattgtaagaatgtggatttgggaattttgtacaagttaaacgaagcactgagatcttagtatagggaaatcttttcrgcactgagcagaggactcataagtaacacaacacgtggagttgtatggtcaaggaaatggcagaaacaggttctttttgcaaaggaagttttccctggac

SEQ ID NO: 227685 - DNA, 201 bp, Homo sapiens
tctccttgccatttctgcaggcaattcaggatattttttaaagcattgatccataattatcgctcagagtggttagcattgttagacagatgtgtaattcyttgtgtgtataagggagcaatacagcatccattttacctatttgattgtcttttcttttactgtgtaaacaaatgcacataaaaacgacacatcattgct

SEQ ID NO: 227686 - DNA, 201 bp, Homo sapiens
atgtttatactttctggtccagctatactatttctggaaagtaatactaaggaaataactgcaaagatgtgtgtatggatgctcatttcaattttgtttayagtagtggaaaaagctgtaaatctatgtactcataagtagttgggtatttaaataaattcacttaaaagttatattttacaactatacacacacagagat

SEQ ID NO: 227687 - DNA, 201 bp, Homo sapiens
ctctttaaaacaaaccaaaaaataaaaaataaaaaataacttctcctgggtttatccagtgcctatcacagcattttatgtgatccagtctttgggatgaygatgagctactcaggcttgcagtgtggaagatgggggaaattgattggcaaaatggatgcattgacacttgctcacctctgtgctcatggaggaggaatt

SEQ ID NO: 227688 - DNA, 201 bp, Homo sapiens
aaaaaaagggaggagttctctcaacacctgttttcttaattgattgtgattactttgcccccaaaagtgagtggcttttaaacgaagtgggtacattctcwtaagccacattaccgtcttataaacccatcgttaaaataggaaaggtgacagaactatgacaacagctccctttcctagtctggatgagaagcccatatg

SEQ ID NO: 227689 - DNA, 201 bp, Homo sapiens
gtgggcttagaacttttactaggctgtgttcaactgtaccagagtgttgatagtagtatcacacttggatgttggaatcgggcagacctactcattccacrttcctcggccttagtttcttcatctataaattaatgatgataataatttggattatatctatcatgcagttttatgataaataattgagatcttacaaag

SEQ ID NO: 227690 - DNA, 201 bp, Homo sapiens
tttggaagcaggaaagacgatctgcagttttctgtgttacaagtggatatttggaaagttggtttttagaaagattggtgttgaacagatttgagttaatmttgaactgtgtgtattaaaaatcaaacaaacatacagcagaagggaccaattattgctaataaggaaggtgttaaaaaaatacagcctgcttctgtaaat

SEQ ID NO: 227691 - DNA, 201 bp, Homo sapiens
tgggtatgggatatcttggccggcaatttagttacatctaattatcaagtcacagatagaataatatggctgtttcacacagttttgttctgagtattatrtgctcttatcctggcttctaaggctttcttagagcaggactaactataaatatttggttgtaaaagttaaagaaagaaaggaaaacctcaagagaaatgg

SEQ ID NO: 227692 - DNA, 201 bp, Homo sapiens
tgatatacttcaatacagtaactgaaggagtcatggaaaagtagcatatgaagtccaaggcagatgcctagatgacctggggcttgggatgggggatcccyggccacccacctgggatctagtgagctgtttgagaaaagaacccaacaggaaacctctgcagaatccataaaagcttatcaaaagagaaagtgtcagccc

SEQ ID NO: 227693 - DNA, 201 bp, Homo sapiens
aataatatggctgtttcacacagttttgttctgagtattatatgctcttatcctggcttctaaggctttcttagagcaggactaactataaatatttggtkgtaaaagttaaagaaagaaaggaaaacctcaagagaaatggacggcagctaacatccaagttaggaggacacccctgattttctcaggcttttcaacttt

SEQ ID NO: 227694 - DNA, 201 bp, Homo sapiens
ttctgtctcttagtttcttcaaccttgagaaaggcagaatgctggctaataaggtggaggggccacagggtgatctggaggctttcagtctgaagcagggmcaagctgagaaggggaaagattccatacaaaagcaacatggttgtggagtttgttttctcacctgggactgtatgtgtaacctgaagttgttttagaact

SEQ ID NO: 227695 - DNA, 201 bp, Homo sapiens
tgctcacagtatgctaatcctgagatgatatccgactacagtataatataggtcttggtttatattcaactatttcgaagcgtctcacaacagccttgctwaaaaaaagactttttaacacagtgggtttttaatattttgttttgaagatgaaggtggttttctggtgattattgcagctggtgttctcattgctagtga

SEQ ID NO: 227696 - DNA, 201 bp, Homo sapiens
aggtcttggtttatattcaactatttcgaagcgtctcacaacagccttgcttaaaaaaagactttttaacacagtgggtttttaatattttgttttgaagrtgaaggtggttttctggtgattattgcagctggtgttctcattgctagtgatttccacctgggccctaccttgagctcaataacagttcacctggcaagg

SEQ ID NO: 227697 - DNA, 201 bp, Homo sapiens
attatttttttcctaccaaagagcagcctgaaaaatcgagctgaaaacataaataagcaagctggaagcttgcacaggggaatgctggcagctgtgctaayagaaaagggctacctggggcccaggcatgtccgacatggaggctccatcttccctttttttgttgttaccatatgtacagtaaagaaacgggcaacatgg

SEQ ID NO: 227698 - DNA, 201 bp, Homo sapiens
caggggaatgctggcagctgtgctaacagaaaagggctacctggggcccaggcatgtccgacatggaggctccatcttccctttttttgttgttaccatakgtacagtaaagaaacgggcaacatggcacagctcagatagaggacgtgacagcataataaaagattagggtggaggcgaccagaaatttgcatcctatgc

SEQ ID NO: 227699 - DNA, 201 bp, Homo sapiens
tcctcagctgtgagacaatgaacctgattatcatcccagacaatgaggccgctttagtctcatctggagatttttaattaattaatccacaaagatcctartatcaagtaaaagctaactcaaatcaggaagtgattttctcagtccagcctttggacttcactcctccagcccccatgagctgcctggatcagactgcta

SEQ ID NO: 227700 - DNA, 201 bp, Homo sapiens
ttagagacattccacttccagattcactcacacggttgttggcaggactcagttcttctagggttgttgactgttggtctcagttctctgccacatgaggmtctccataggtcagcttgccttgtctcatcaagcaggaagagggcagagaaagggtgaaaaggatgaagtcacagtcatttataaacaaatcacatttct

SEQ ID NO: 227701 - DNA, 201 bp, Homo sapiens
aggcttttgaacatttttgttgccaaagtcctagggattgctggaatcttaaatagcccgttttaagctccaattcagaagctttttgtcatgtttaatamtgtggtgaataattccttttctgttagtcgtttcctcttttataatccacaaggatctttgagccatggaatggatattttctggagctataaattaaag

SEQ ID NO: 227702 - DNA, 201 bp, Homo sapiens
tataactggctcaaaggaaaagtcaaaatggcacaaatttatatggactaaaagagagttaagatgagttgcaaattgagataaaactgttttctccacartaggaagtcaattaaaatcacagcctgtaagacagaatttatatatatctatcagttatctacaacttacgaagtggtgcaaaatagctcaaagacattg

SEQ ID NO: 227703 - DNA, 201 bp, Homo sapiens
agattttattttacttatatgatttgagagaaccaggcagatgttataactggctcaaaggaaaagtcaaaatggcacaaatttatatggactaaaagagwgttaagatgagttgcaaattgagataaaactgttttctccacagtaggaagtcaattaaaatcacagcctgtaagacagaatttatatatatctatcagt

SEQ ID NO: 227704 - DNA, 201 bp, Homo sapiens
ttaatgcatatgtagtcgtgtgggaggaagatggtatgtaccctcttagcttcccttggtcaactctgccaatcaatactggtacggctagattttttttwaaaaaaaattttatagccattcactttcaaatctaggaaaatgatgattctttagaaaagtatatatacattcagtattatattattcccataggcaaaa

SEQ ID NO: 227705 - DNA, 201 bp, Homo sapiens
tttgagggcacggtagccagccttccaggtggcttccagtgatccttaccttttaaaattctcctcctagtgacatctcctcccaccttgtattatgttayctctttgaccagtagaatacagtgaaagcaacagtgtgcgtcttcagagtctaggtcataaaatcttactcattttgggaaaagctagtcaccattttgt

SEQ ID NO: 227706 - DNA, 201 bp, Homo sapiens
gccagcgccaacttccagccttgtaagtgaacctgaggtggatgcttcagcttcagccaagtctgcagattattcccaacctggtgggtgttgtgactccrgtttcccagagaccttgagtcagaaccactcagctaatcagcttccaaacttcatgacctgcagaacctgtataagatactaaatatttatggtggtttg

SEQ ID NO: 227707 - DNA, 201 bp, Homo sapiens
atttgcaactcatattatgtacatagggctaatgactctaatttattccaagtttctaaaaaccattatgaaaatgatacaatagaaaaatagtcaaagawtgttgtggcataattacattttccaaaagtggccacacctgcatttctagttcattgtggtgttccagattcttgtcatacactatcaggaggtggagtc

SEQ ID NO: 227708 - DNA, 201 bp, Homo sapiens
tcctccccctctacacccacttaccctctcctgggatgcttttctttggaatccaacagccatgctgtgagagaagccaaatcacgtggagtggctagccrtgagttataagagttctagttgatggaagaaaataattgaaatgtatctagcataaagaaaagacaaatatttaaggtgatggatatcccaatgctaagt

SEQ ID NO: 227709 - DNA, 201 bp, Homo sapiens
gtggggagggactgtagttcaccttagccaagtagacaagtgaaaaatccatcacaggctttatgaagattaagaaaatgtcataatttttaagtctgccrttcattattcattttatttatctcactcattctataatataacttaaaaatgtacttttatgggtggctggcagaccactggagagataattcatggggc

SEQ ID NO: 227710 - DNA, 201 bp, Homo sapiens
  misc_feature (1)...(201): n = A,T,C or G
tactggttatgccttacttgagttaattcacctctcaaaacattggcaaatgtttatttttttaaaaaatcttacacaggtgcttggtggagtgaaaaatnctactttctaagggttaatatgactataataaaaatacagaataaatatataccaacatttaatatgtctttaatgaagaaaccagtgcaatccaggggc

SEQ ID NO: 227711 - DNA, 201 bp, Homo sapiens
aatattttctactaaacctatctttttatgattctgaaatgccagcttcagttttttttattaattcatactgaccctgggcagagctgtctatctcaacytaatggctatttataatatatggatggcattcccctgccattaatgtttaatgaactggctcctgatccaatagagtctaataaaggtaatcactagaat

SEQ ID NO: 227712 - DNA, 201 bp, Homo sapiens
gacctagccaaaaatgagagaaagaatcatattcccattactggtgactgtagaggcaccttatgagtaagattggatgattaaagaaccagcttcacgawactgtaagttattactgttgcttttgcagatcttttgtcacattgatttgtgtgtggtcagtgcatagtatttatgttttgatcacagagagctgaagtt

SEQ ID NO: 227713 - DNA, 201 bp, Homo sapiens
tgtggcttgaaatacatttttgagaaggctgtaacaaaaaataatatagttataatatattcttattcaaaggaaggatgattttcaacctttattatacracagagaggtcacagtattaagagggtcagctaggacttgctgggatggtgtgtggaggacagctggagagatggtgggtgtgagacgcatgtgtagctt

SEQ ID NO: 227714 - DNA, 201 bp, Homo sapiens
tcagaagccaaaagataatacagaatatttgtacaagattgatctcaatttgttagaagtccattctctctaatgggcccctcttgcagaagagcttactrtcataaggttgaatagcagggggtgcaggggcagtgggcttagaacttttactaggctgtgttcaactgtaccagagtgttgatagtagtatcacacttg

SEQ ID NO: 227715 - DNA, 201 bp, Homo sapiens
ttcatggctgacctctccaggtttcttatcacttttatttaaaccagatcttagaggcaaaaaccacagtagtattgcgctcagctagtgagataattagraagtgctgtctccataattactatgttactgtctctggagggacatgaaagcttgtcctgtccctttaacaggacaagttgctaattcccttaacatttt

SEQ ID NO: 227716 - DNA, 201 bp, Homo sapiens
gaattcagttactttggggtgaccgttttaatcaaaccatttgtctgtctctacatccaggaatgtccataccacaggtatcttgaccttccccaaatttstggttctactttctggtttctttgttagcactggaaagagaattagcacaagcttgtccttcatggctgacctctccaggtttcttatcacttttattta

SEQ ID NO: 227717 - DNA, 201 bp, Homo sapiens
attctgccctcccaacctccaccgcagtctgataaccactgttttattctctatctctatatattttactttaagattccacatttaagtaagatcatgtsatatttttctttctgtgtctggtttatttcacttagtgtatgtcttccaggttcatccttgttggtgcaaatgacagaatctcttaatttttaaggccga

SEQ ID NO: 227718 - DNA, 201 bp, Homo sapiens
tatattgactccacattagtttttaggagaatggttcttctacctgttcccatttagtaaattagacttcagtagaataatttttaaaacaatggtaaagwccttaagagaaagttaaattaaaaaaataaattgtgaattttttttaactgaaagatgttgtggtcaagtagcacagattttgtggttaagtagttgtag

SEQ ID NO: 227719 - DNA, 201 bp, Homo sapiens
gggtttcttcatgcccaggataagtatattgactccacattagtttttaggagaatggttcttctacctgttcccatttagtaaattagacttcagtagartaatttttaaaacaatggtaaagaccttaagagaaagttaaattaaaaaaataaattgtgaattttttttaactgaaagatgttgtggtcaagtagcaca

SEQ ID NO: 227720 - DNA, 201 bp, Homo sapiens
tgggcctagaaattaaaaataaccatgaaaattccacctagttaaagttgtagtcatttataatttatccgtggatagattcaataaatactctgttaagktcatctctatccatgtgtaaaccccccaaataaacatttaatagacttagaggcagagagagaatatatgcctgtcagtctcctgtgtcagtggctttgc

SEQ ID NO: 227721 - DNA, 201 bp, Homo sapiens
attgctaccttgtaggcagaacttttggctgcattgactgtagatgggttccctctgattactgacatctgacatctcctggaagacagttctagagcctrgggaagtgatttgggcctagaaattaaaaataaccatgaaaattccacctagttaaagttgtagtcatttataatttatccgtggatagattcaataaat

SEQ ID NO: 227722 - DNA, 201 bp, Homo sapiens
tgactttagagctcgatgctcttaatcaccaagctccacttcctaaggatttgtaccccagtgggagaaaccctcgttctctgccttccatctccctcccyaagcaaagtttttcacactgtgttctttggaagctccagggtttcttcatgcccaggataagtatattgactccacattagtttttaggagaatggttct

SEQ ID NO: 227723 - DNA, 201 bp, Homo sapiens
tgagctggttcctgatcagcttcctgattcctattttccgttttactacctgcatcgtgcaagcacttccattgtcaggtgtaagatctcggcaaaactaygtgcttttgaggatgtgcccacagatttaatggaataccttgtttttcttcttagtaatataacaggagagcagattcatgctcaaaataatgggttcag

SEQ ID NO: 227724 - DNA, 201 bp, Homo sapiens
ttgccaattacaggatagggtttcactacattcgcctttttcagttcaataaatcagattgtttttcaggtctcaaagacaggcaaattcatgaaaaccartgatggtaaaaatatgtcatgggtgtcacatatcaatgaacttgggaagggtttctataggggctgaatacaactgactcagcaggttgctggcattact

SEQ ID NO: 227725 - DNA, 201 bp, Homo sapiens
ccattgttgttactatgccaaaccatatgaaagtggttagggccaaaacagtgaatctcagtgatttcatgtggttcatcctaatactattactgtggtcmccactagtgactcttgtcaaattgtctcatttatgggctgtagaatcctgggagctcttgagtactcagcataaggatgatggctctcaacgttggattc

SEQ ID NO: 227726 - DNA, 201 bp, Homo sapiens
agtatctattaaagccttaatacaaagcctggcatgtagcaagggctcctgctgccattgttgttactatgccaaaccatatgaaagtggttagggccaamacagtgaatctcagtgatttcatgtggttcatcctaatactattactgtggtcaccactagtgactcttgtcaaattgtctcatttatgggctgtagaat

SEQ ID NO: 227727 - DNA, 201 bp, Homo sapiens
tctcatttctggccctagcatgtaagcttgggtttttggtttcttcgttttcaaaagaaaccagttggaataaaccatctccctggtccctcctagcattytgaaaccttcagtataagaaatttctaaaaggaagccctgaaacacctctacttctcagtgctactctggtcttgagttttctggaacatgttcaacatg

SEQ ID NO: 227728 - DNA, 201 bp, Homo sapiens
ataaaagtgtgtgccagcaacatttggatggtgtgtaaagcggaggggctgaatgggttcaatgagaaaagtgtgtcgctggggaagataagaggatatakaattgagctcttgcagtttgccaacatttagaaattggatagaagaggacttggcaatggagaccgaggaacatccagaaagaaagaatagcaggaaaga

SEQ ID NO: 227729 - DNA, 201 bp, Homo sapiens
aaaaaatgccacctttttttgttcttctcctttttttttattatactttaagctctgggatacatgtgcagaatgtgcaggtttgttacataggtatacawgtgccatggtggtttgctgcacccatcaacctgtcatctacattaggtatttctcctaatgctatccttaccctagcgccccagccactgaaaggcccca

SEQ ID NO: 227730 - DNA, 201 bp, Homo sapiens
aaatgaggaataaccagcacagctgtctttcatgagcatgaaaccactttggagatcacatgtatatggaggtgaaacttggatttcacttcaaagtacakaactaaggaattcactaaaaatcttctgagcaatcactacaagcaaagcaaaaataacctttacaaatgcatagaaaatgtctttagtcatggatagatc

SEQ ID NO: 227731 - DNA, 201 bp, Homo sapiens
gtaactcaaagaccaactaaagcaatcctacctaaaagagcacttatttcactatccagagtactgccatccccatagagcacccggcttagtcattgctracttacataatgcacctcttgtgtcctcttcctgtaatagaactgactgcctcagactagttcctggaggctgggagcaagaggatactctgaattcaga

SEQ ID NO: 227732 - DNA, 201 bp, Homo sapiens
taattctgtgatatctctttctgtctctctctctctctcctcctccttctctctctcatgtaacaaaaataaaaaacaagtgaataatttgaggaactaayggtactagcatttaacctttagaattcagacttggactttaaatgaacttgagccatgagttttcgactcaatttaaaaccagaaaatatttaagactaa

SEQ ID NO: 227733 - DNA, 201 bp, Homo sapiens
attttctcctaatgttaatatgatttatgaaactggtattgaatattttccttcaaatttatggcccgatggatatcatgctgagtttaagatgctgagcytaatgatattcacattggtggcattatattgatttgttttggtttgatatatagggcttttaaaaataataacacagaataattatacaacttgcttttt

SEQ ID NO: 227734 - DNA, 201 bp, Homo sapiens
attgttttgctaactctctgatttacatgactgaaaactctcctataattagttatttcctaaaatttaaggataatagagcagagggccacaagtgtttktttgtttgtttaattcctatgaacatgattttcccttgaataagactttgtgctataatagattttctcctaatgttaatatgatttatgaaactggtat

SEQ ID NO: 227735 - DNA, 201 bp, Homo sapiens
taaaaatgcatgctattattgattgctgtcataatataaccattgttttgctaactctctgatttacatgactgaaaactctcctataattagttatttcytaaaatttaaggataatagagcagagggccacaagtgtttgtttgtttgtttaattcctatgaacatgattttcccttgaataagactttgtgctataat

SEQ ID NO: 227736 - DNA, 201 bp, Homo sapiens
ggcctttaagacggtgacatactccctagaagtctcatttcccagtctgtcttggtcatcagttctcttagcagccagtttgatttgctcttgtttgatasagccaagaggaggaaattagaagttgagttcaactttctctgtgctgatctagtttcatttgttgataaaaggattttaaatatttatagttagttttga

SEQ ID NO: 227737 - DNA, 201 bp, Homo sapiens
ctgccctttttctggccaggcctttactttatcaaaaatctacagttcatattgtgaaatcatatcgaaactgtatgatttcatcacctggagtggagagwcttggccccctgaccttggtagaggtgttctcagttaaggtcaatggtgggtacagcctaaagaaagtttgccttctaaagtcctgattatacactaaaa

SEQ ID NO: 227738 - DNA, 201 bp, Homo sapiens
gaccaccttaaagttcatataggtttctgccctttttctggccaggcctttactttatcaaaaatctacagttcatattgtgaaatcatatcgaaactgtrtgatttcatcacctggagtggagagtcttggccccctgaccttggtagaggtgttctcagttaaggtcaatggtgggtacagcctaaagaaagtttgcct

SEQ ID NO: 227739 - DNA, 201 bp, Homo sapiens
catgtgatggagcaaggcatgtctgcacagggcctagcaggaaggggttgaacccttataacttggaaactaactgaatgggagaaatgagatggaataargcactgacgttggtgcaatttctgattatattttgttgccatttaacttgtttttactgtatgccacaccctgtggtaactcgtttcatctgcacagtga

SEQ ID NO: 227740 - DNA, 201 bp, Homo sapiens
attgtacttgaagatgccacactacccctgtgaagtactgctgctctggtcctacttaatagtaccacaagaagaaataggaagcttttaaacattatacstgtattttcattggtggtgaacagttagttatggaacctctcctttgtgccagaaatcagtgggctgagaagaaaaatgaaacctggtctttggcccaaa

SEQ ID NO: 227741 - DNA, 201 bp, Homo sapiens
cctacaaatcattgtacttgaagatgccacactacccctgtgaagtactgctgctctggtcctacttaatagtaccacaagaagaaataggaagcttttamacattatacctgtattttcattggtggtgaacagttagttatggaacctctcctttgtgccagaaatcagtgggctgagaagaaaaatgaaacctggtct

SEQ ID NO: 227742 - DNA, 201 bp, Homo sapiens
ggaatgcagtggtgtgatctcagctcactgcagcctctgcctcccaagttcaagcaattctccccctcagcctcctgagtagctgggaggacaggcacccrccaccacccctggctaattttttttgtatttttagtagagacaggatttcactatgttggccaggctggtcttgaactcctgaccttgtgatccacccgc

SEQ ID NO: 227743 - DNA, 201 bp, Homo sapiens
tggagaatgagcagagttcgggcattcaaagaaagcctctctgcctggttggtgtgatggaagtcctacaccacagagagttttggctatttcttaatacygaactcatgcataggcaatcatacactcatgatacatatgcaagaatcatgccaattggttttaaaatataaaattctgattctaaaacacgttttgctc

SEQ ID NO: 227744 - DNA, 201 bp, Homo sapiens; identical to SEQ ID NO: 42198

SEQ ID NO: 227745 - DNA, 201 bp, Homo sapiens
tctcctgggttttctatgcagtgggtattttcaggtagaggctagaaagctttagcctttttcccaaggcttgctgaattgtaggagttttgtcttagaaygctttttctagacactttaagaactttaagaagattcaaacttattacccaaatttcctgtaggctttgttttgtcagtttttgcttctgtcttgcctgg

SEQ ID NO: 227746 - DNA, 201 bp, Homo sapiens
tgtactcagatccttgcattctagaaagcttatttcattctcccatgtcataagtttgtcagctctgcactcagttgcctggggggatatggcaagtgctrtaacagaggctgtctttcatattttattttgaaccttttccactgttcaccatctctctctcgttttttaaggatcaagctagtttagtttacctaagaa

SEQ ID NO: 227747 - DNA, 201 bp, Homo sapiens
gaaaaaattgtatcaaccacttagtgatcatgatttttagctagaaaacacattcattgtattctgatttcaccttgaaatgtaagtaagtctttactggrtagctttaaatatatgtgcacttggcctttctctccccagccctctttttagagtattctaaatagttaaagacccagactaccttgccccctattgttg

SEQ ID NO: 227748 - DNA, 201 bp, Homo sapiens
taacttaagggtgtgacatggcccttaggctcaagtctgtctgcaaagccctgtaaaccagctttctctgcctccctaacacgcccccgggcaaactcctstgctttcgctgagtggactcttctcttcagttgctatttggtaaattgcccttcatgtttccctttatgttcggctcctaggaagctcaggccacaggga

SEQ ID NO: 227749 - DNA, 201 bp, Homo sapiens
tacacctactggcctctaatttgcaaattttgttcagtctcccccagccccccgaaatttgttcaaggagatcccaagggcccatgaaagagcctcttccwttttttttctccaaagctccagaaacatgacaaggaggactttcctgcctcttggagatcagaggaggaaatggcagcagaagccgcagctctgcgggtc

SEQ ID NO: 227750 - DNA, 201 bp, Homo sapiens
taggaggtaaaccacaggccaccttgaaggaggggattatgggttggtggcaaactcaatgccttcaaaatccaggaagtaaaataaatgaatgatgcctrttaaacataagaaaattagaagagtgtgggggagattctgggaatggcaaatgctccccattcccccacttcatcccaatctgtgatcacctgtattagt

SEQ ID NO: 227751 - DNA, 201 bp, Homo sapiens
aaattatttttaaaggatcaacttttaaaaagtcgatattttaatcgttaagttgacctttttcaaaatggagtggaacagtatctgtgggatgctctttmgggacactgtagatccctcaggatgaataaaaaggcaaaagttgttggggataatactggcacctaccccactacctagctgggtgatctttggaccggg

SEQ ID NO: 227752 - DNA, 201 bp, Homo sapiens
tgcaataaatggggaaatttctccatctgctgcaagctgccagggtagaggcctctaggttagatttagagtttggggcctgagatagcaaaagtcatttmttagttgatagactttttgctgagttggcaaaattatttttaaaggatcaacttttaaaaagtcgatattttaatcgttaagttgacctttttcaaaatg

SEQ ID NO: 227753 - DNA, 201 bp, Homo sapiens
tgttttgccttctgtatcaatgttgagctgcaataaatggggaaatttctccatctgctgcaagctgccagggtagaggcctctaggttagatttagagtytggggcctgagatagcaaaagtcatttattagttgatagactttttgctgagttggcaaaattatttttaaaggatcaacttttaaaaagtcgatatttt

SEQ ID NO: 227754 - DNA, 201 bp, Homo sapiens
aatggggttgaaaaccaaatgcatatttcacagtatcacaaatagccaactattttctaatttcatcctttttgtaatcctttctctgtttttctgtagawtgatccatgttcctcagtttcatactaggctgttcccgaattagaaaaatgaagtagttttctagggatggtgtttcttagtcattcacaaagtgtgtct

SEQ ID NO: 227755 - DNA, 201 bp, Homo sapiens
ttttataaaagtggatagcttgccatcacagcagtgtgctttctttgatgacctttggtaagaaacgtatcataattgcttcttaaagctacagaccactrtaatccaagaacaacattttagatacagtctgtgatacaagttaccctgagtgctttggaatcccagtcctctagagtgattctcaaaatgtggtcctca

SEQ ID NO: 227756 - DNA, 201 bp, Homo sapiens
tccctcactgttttgccttctgtatcaatgttgagctgcaataaatggggaaatttctccatctgctgcaagctgccagggtagaggcctctaggttagayttagagtttggggcctgagatagcaaaagtcatttattagttgatagactttttgctgagttggcaaaattatttttaaaggatcaacttttaaaaagtc

SEQ ID NO: 227757 - DNA, 201 bp, Homo sapiens
ccatctcactaagaatcagccgtttggtgtgtaacctccctacctgggtgccccaggagaacaataaaggagtctgtctggttcagtgttccagtgctagktctggcccctggcattacagagacagagcaactgtcttgtgtgttaacaagtagtcaccgccctcccctgtgggcagccaaagtaatctagaaggcttat

SEQ ID NO: 227758 - DNA, 201 bp, Homo sapiens
gtgaaaccaaggtgatactcaaaagcctttgcaaggaggctagctctatccagcagccttcccattttgtaatcccatctcactaagaatcagccgtttgstgtgtaacctccctacctgggtgccccaggagaacaataaaggagtctgtctggttcagtgttccagtgctaggtctggcccctggcattacagagacag

SEQ ID NO: 227759 - DNA, 201 bp, Homo sapiens
aatgactgacagtagtagcagcagcagggaatattaaataccacttaactatgtgtcaggcacggcactgctcaccactctttttcctactcccattttasaaaggggaaaactgagacacaaagagattaaaggaacttttgttcttctcattgttcaagctcagacctaactaactctcgccttcttggagagccattt

SEQ ID NO: 227760 - DNA, 201 bp, Homo sapiens
ttagtgctcgctgtcattaggtcagtgttatttagcctaaaaataatgctaatgactgacagtagtagcagcagcagggaatattaaataccacttaactrtgtgtcaggcacggcactgctcaccactctttttcctactcccattttacaaaggggaaaactgagacacaaagagattaaaggaacttttgttcttctc

SEQ ID NO: 227761 - DNA, 201 bp, Homo sapiens
tgttttggatctgaattctgatcataacttttaatccttctacaaagtagttagttaggtccaaaagatacagatcactggggaaccatggagatgaaaawtacttttactcctagaaacaacctctgtggagtttttagtgctcgctgtcattaggtcagtgttatttagcctaaaaataatgctaatgactgacagtag

SEQ ID NO: 227762 - DNA, 201 bp, Homo sapiens
tcctcaggctagcatttggcatcatctgtgagtttatttgaaatgcaaattcatgagccccacccagacctagtgaatcagaatctctggagatagggcckgggaaactgtcttactctgttttccaagcaatacttacgtgcattagtatttgattaccatattttagagtacttatggtaatccacatggagttaccag

SEQ ID NO: 227763 - DNA, 201 bp, Homo sapiens
ttgtagcagtagggagggaattcgtgggaaggggaaaatgaacatgatatcatccgtcactgcttaaaccgtcctaggactttgggagactttagagcaayggagatctttctcttctttcaattgtatttcgcccatttaatacttccatggcaattattgtatgccaggccttatttgcaagcacttggcaagtattca

SEQ ID NO: 227764 - DNA, 201 bp, Homo sapiens
ttgtatttttgtttgctaaatctggcaaccatactcctggggtattgactacctttgacctccaccacattcttttaccataggaccttagcttttaccaygagaagcctcgattaataccttactcactccttaggacagctctgaggattagggattagtgagggtcattttagagctgaaggaggtacatttcctccc

SEQ ID NO: 227765 - DNA, 201 bp, Homo sapiens
acacctttttaaggggtctgctatgttgagttgtcaaataaaatacaagaatcccagttaactttgtatttcaggtaaacaacaaatcattgtttcatatmaggatgtcgtctcaatactgtatgagacatccttatcctaaaacaagtcactgagtgtcttgtatttttgtttgctaaatctggcaaccatactcctggg

SEQ ID NO: 227766 - DNA, 201 bp, Homo sapiens
cttgggcttatttatctttgtatcatctttcataagacctagaacagagcctggaatatatcatgtgttcatcaaaacttggttgaatagaaagtaataasagaggatcagatctaaaaaaacaatacagttattttccttttgagactttatataaacccctgtgtaaacagaaccgtcaacccataagaaatggtttat

SEQ ID NO: 227767 - DNA, 201 bp, Homo sapiens
gtgtttaacgaagctgttcccattgcccagaattaccctttcttcaaaatctcattaccatcttttaagcccagtccaagtccttgatttttaaaagtcartctcagacctgaattccagcaagaattattttgtctccccctgccccagatactccaagaacactttgatggaacttctagttcggtagttaggccagta

SEQ ID NO: 227768 - DNA, 201 bp, Homo sapiens
acagtggtttatatatgatgcaggaaagatacaaggagatgacagttagtcaaacacaaaatgttctgacaggtgtatagtagactcaagaataaataatraaatgacagtgattaaaatgtgtttacttaagtgaacaatggcttgaaatatggctacacggtaaagacctcattatcgaccatacttggcacataaata

SEQ ID NO: 227769 - DNA, 201 bp, Homo sapiens
agaataacctatgatggataaaatggtctaagaaatattcatctttgccttaccgggtcaaaatgctcaggggtgttagaaactggtaatgataataatcratatttggcttgcatttttaatataggtctgaaaagatggaaaatactcatgcagtgagacaactaaacttggacgtgtacggagacatgtagatattca

SEQ ID NO: 227770 - DNA, 201 bp, Homo sapiens
acatttctctgttgactcatcttgagcttattctctacaaaaatttccaagctgttttcacacatgctgctgcaaagtgaaacttctccatcttgtagttsagcaaatagtggactggaccaggggagatcacccattggaagaattctcatttttagatttatctgaggacataacttgggaaaaggaagacaacccaga

SEQ ID NO: 227771 - DNA, 201 bp, Homo sapiens
gatcagagtgagaaatcacctccctcaactcaacaccagacttgcattcacaatctgagataaaacgtgttttgtagaaacaacatttctctgttgactcwtcttgagcttattctctacaaaaatttccaagctgttttcacacatgctgctgcaaagtgaaacttctccatcttgtagttgagcaaatagtggactgga

SEQ ID NO: 227772 - DNA, 201 bp, Homo sapiens
tccaagaccattttctgcctcaagtgaaagcacctggtgattcattgggccaccaagaaagtccagcgtgggcgccagtctgctcagtaaccagcacatakacaaaggaagctccatgtctggcaggaaacatgtactgaaaggacagtgccagggaggtgccagaagcatgaaagcatccagaatcgtgaaatatgactc

SEQ ID NO: 227773 - DNA, 201 bp, Homo sapiens
tcacaggatagagaagggaagcaatgaacatatttttctactaagtaatattcaaagaacttcagcgttctaaggtatcacaagtggcaggcagaggtttrtggtccaagaccattttctgcctcaagtgaaagcacctggtgattcattgggccaccaagaaagtccagcgtgggcgccagtctgctcagtaaccagcac

SEQ ID NO: 227774 - DNA, 201 bp, Homo sapiens
acctgaaggtaatttgtttgcacatagatatctcacagtctagtgcttagtccaaggtccagttcacaggatagagaagggaagcaatgaacatatttttmtactaagtaatattcaaagaacttcagcgttctaaggtatcacaagtggcaggcagaggtttgtggtccaagaccattttctgcctcaagtgaaagcacc

SEQ ID NO: 227775 - DNA, 201 bp, Homo sapiens
tatctggtccaaattatgatgctagcaaagtctcatttgccgctttggcaatcggcttgacaatgtgatacttcaatgtataattggataagcaattgggktctgttatagtacagtggtttggcataattattttccagcactgtgattttctagttaatacttacttttgggggttacaaattcttaaacatccaacac

SEQ ID NO: 227776 - DNA, 201 bp, Homo sapiens
actttaggacattctgctgttttggtttggtttggtgtacaacagtaggctcttctaagatacattaaaaaaatcttaaatactagagatagagacatggraaagtgcaatgaatgaatccatttattcattcagctgatgtttgttgggtatcaattatttgcctggcactttgctcactgctgtgtatatggggatggt

SEQ ID NO: 227777 - DNA, 201 bp, Homo sapiens
ctaaaaagtggcaaaaatggaattggaatccagatctgagtcactccacaggtcatatgctggattcagattctgttctaccatttactagttggttcacstgcatctttcctccttcctagaatgactgcctttgcaatgctatagtcaaaggttgacccttgtttcctcatttctcttttctttgattttcttcagcca

SEQ ID NO: 227778 - DNA, 201 bp, Homo sapiens
aggttgcagtgagcaaagactgcaccactgtactacagcctcagcaacagagtgagaccctgtctcaaaataaaaaaaaaaaaaaagaagaaaaacttgcycagaatggaattttgaactagtacttcccagtactagagttctgtagcaactgtgaagctttgacagtctctcctacttgttgtcatgttggcacactga

SEQ ID NO: 227779 - DNA, 201 bp, Homo sapiens
agtactcaatgttccagttatggaaagaaaactatctctaacttcttaaacagaagtgttagtgttactaaaatatagttcccaggaaaaatcatgtaacrtattttcatatttaattaatgtttcagattatctacattaagtatctaagtattaggattaactagataattatgtcagtcatcactgactgaaagcaat

SEQ ID NO: 227780 - DNA, 201 bp, Homo sapiens
tgcattaatgcagaaattgatattatgataaaatcttgaacaattagggctaagtatctaaaacccaattaacctttagcggttctcctcatagtagtaaygtgctctcattttcactggtctgggataaaattgattcttcatcattgtgcaaccaaagacaaaagtcagagtctacaaaaccagttttagacagggcac

SEQ ID NO: 227781 - DNA, 201 bp, Homo sapiens
accagggggaactggtgctgcttcccaccacttactgacaatagtaagcaacacccttgtgtttgtgttcagtcaacaccaatcaataaacatctgttggratgagcattggtgcctctttacgattcattatgcttcattaggaattggttttgtcttcaagggaagaaaaaagaaatctcatgtaattaaagaatagtg

SEQ ID NO: 227782 - DNA, 201 bp, Homo sapiens
tctagcatctctcaaaagcatttgacagcaagcgcttttgttcacagagcgtgttttagcatctagcagcgttgagtgcttgtggaaacacactttggcamatgctgacctatactggtatcttctaggcttatgtaactaatggacttaatggggagtaatggattaaaagtgctgagatgccatttctgtgagtctctg

SEQ ID NO: 227783 - DNA, 201 bp, Homo sapiens
gattacttgctaactgcctgccttctctcctagaatgtaagcctcccaaaggcactaccttgtccagcttgattactattacactataaaatacactgaawacatgttcatatttgttgaataattgaatgaattctgcagagaaacaagctttaaatgcttggggatctggattgttcaaaggtcccagctagatcagct

SEQ ID NO: 227784 - DNA, 201 bp, Homo sapiens
ccttatacaaaaattaattcaagatggattaaagacttaaatgttagacctaaaaccataaaaaccctagaagaaaacctaggcgatagtattcaggtcayaggcatgggcaaagagtttcatgactaaaacaccaaaagcaatggcaacaaaagccaaaactgacaaatgcgatctaattaaactaaagtgcttctgcac

SEQ ID NO: 227785 - DNA, 201 bp, Homo sapiens
gcacctagcacaaagtaggtgcttgaaaagagtgatgtgactgaaagaatcattcagtctctcgtcttctagccctttcgcctccagtgctaaagggaagrgagattttcccacttctccacctcatcttctaccttctatctgagaacttcctcactcgccttcagacacttgccttcagccagtgcacagaccatacag

SEQ ID NO: 227786 - DNA, 201 bp, Homo sapiens
cagaggcagtgctgggtccagctgttctgggacggcctttctaccttcagctcactgagtttggatttattacagctttgcctgtttaatagtcttctgcrcctagcacaaagtaggtgcttgaaaagagtgatgtgactgaaagaatcattcagtctctcgtcttctagccctttcgcctccagtgctaaagggaaggga

SEQ ID NO: 227787 - DNA, 201 bp, Homo sapiens
aggatgttacattaagatgttcctatacagaatcatgaatctggcactcacaattattgaaaagcatttaaaaattgctaccgtgaaagtgttttttttgktttttgtttttgtttttttttttcaaaaggagcaaaaggaatgattcttgaagagcataaagtattttaccatttttctctccctcttctcattatcata

SEQ ID NO: 227788 - DNA, 201 bp, Homo sapiens
aaataaataaatttcatatgattttaatccaattattttgacatttttatttggtaggctctagaacagaaatgagtccttcatttgattatgaacacacyaccagtggattaaattcatctctattaacttaaatctttgtaaccagcctaagtcatttgatttccactctgaatatactgaactcaatatcaaaagaaa

SEQ ID NO: 227789 - DNA, 201 bp, Homo sapiens
gggatactgaggcaatttccttccttccttccttccttttttccttccttcctttcttttccttttgtatatgtgtttggggtaactgtggcagtggagaktatatttatatacatataactaatatcttacattaagataattttaaataattaaaattatattttatgactaacaatgcattattggagtcaatatttt

SEQ ID NO: 227790 - DNA, 201 bp, Homo sapiens
aagaaggaatcgtgaccaatccagtggactggtgagtaccgttggaatatagattttcatattagtcatttttcatctgccagcatatgagatccagtgcmaagcacctggctagatggtgctgggatagctcttttagctctgccaaacatatggtatgcattcagaaagaagtctgtgaggtcagcctgcatccttgct

SEQ ID NO: 227791 - DNA, 201 bp, Homo sapiens
  misc_feature (1)...(201): n = A,T,C or G
tattgaacgtttggagttttttaatcctgtgaacatcatgtgaggttatatgaggaaaggactctttgaaggtggtaaagtgatgagatgaagtagtaagnaatggagaggaccacaaggaggcacagccaaagtgccttaggtatgactcagatatgacttgcaggaaagcaaaaaagcgggggtgggggatgtcttcaa

SEQ ID NO: 227792 - DNA, 201 bp, Homo sapiens
  misc_feature (1)...(201): n = A,T,C or G
gacagtgtgtgaagggggcaggtcatgactattttttaaaggacgtaaatgagacttggttgtgcctgaagcacttccacaacttaaagctggtatttcangtgtctggacattatccaaaatattcatcttggccagctgacaggaatgtttactgagtccttaggagccacttgtttggtaccttcgaagctgcctaga

SEQ ID NO: 227793 - DNA, 201 bp, Homo sapiens
atgcacttgaatcaatcaaaagcgtatacttggaatctaactgctgatggtttgggtacatctaaacttgtaacacaataaggagtgcagaagagtttctsttacaaaacttactgcaaacaatagaatcgggacagggtggtgcaaatagcaaaacaaaaggagcattttattcttcccccctccccaatatattaaatg

SEQ ID NO: 227794 - DNA, 201 bp, Homo sapiens
gcccgacttttgttcttcatcttgaacataccccaggtgacctgtctggggacacactttttgctcccagagcgtatgcaaattcctgtttactgtaaaaytttctcaaattctcctcagaagcctaaagacttctgtataatctactcctgtaaaagaaaattaattgatcttaattaatctttttcccctggatggcaa

SEQ ID NO: 227795 - DNA, 201 bp, Homo sapiens
aaaaaaaatttaaggaaataaataacaacataaagacaaaattggtagcctaccccaaatatttcagttatttgtgtaaaggttttcttatcttcactagstgatggttataaaatgaaatgcgtttaaatccatggctaaaaatgattaaaatatcatacagaacgaaagcactccagctgtagatgttcattaaattga

SEQ ID NO: 227796 - DNA, 201 bp, Homo sapiens
cctccatcatcatatcttgggattaactgcttcagaacacctggagagcttctgtaaatatgactgtcagatactcacctacctggtgagtcagttcttgagggtgagtttggacccagggcactccaggtgatcctgagccctgtgacttggatgtggccaccaagttggtcattgcaaagcagcatggtccacaccttg

SEQ ID NO: 227797 - DNA, 201 bp, Homo sapiens
gacatggtccacacctccatcatcatatcttgggattaactgcttcagaacacctggagagcttctgtaaatatgactgtcagatactcacctacctggtragtcagttcttgagggtgagtttggacccagggcactccaggtgatcctgagccctgtgacttggatgtggccaccaagttggtcattgcaaagcagcat

SEQ ID NO: 227798 - DNA, 201 bp, Homo sapiens
cccaggtgacctgtctggggacacactttttgctcccagagcgtatgcaaattcctgtttactgtaaaattttctcaaattctcctcagaagcctaaagayttctgtataatctactcctgtaaaagaaaattaattgatcttaattaatctttttcccctggatggcaattttttttcttgatctcagtgttggtaatac

SEQ ID NO: 227799 - DNA, 201 bp, Homo sapiens
taaccttctgtctcatggactatatccttatattgaacagaggcaccctgcctcgcagtctgcaatgggcccactctgtttgcctgtgacctctaaacatrgctgagcagttggaacccactggtggcatcccggaagcacctaaagaatgtgacaaaagctcccaaatctttgtttgtcttccctaatctacccagcagg

SEQ ID NO: 227800 - DNA, 201 bp, Homo sapiens
gcgccagcactcaagtggattttagccgaatcccttaaaggtaagacaaatgccatccaactattttgaagaaagatattaaggaatttacctaaaaggcrtacagaataaaactggggaggaaaacccaggcaacctcattgtaataaccttctgtctcatggactatatccttatattgaacagaggcaccctgcctcg

SEQ ID NO: 227801 - DNA, 201 bp, Homo sapiens
attgctgcctgttccctgcctaggcgccagcactcaagtggattttagccgaatcccttaaaggtaagacaaatgccatccaactattttgaagaaagatrttaaggaatttacctaaaaggcgtacagaataaaactggggaggaaaacccaggcaacctcattgtaataaccttctgtctcatggactatatccttata

SEQ ID NO: 227802 - DNA, 201 bp, Homo sapiens
ggaattgctgcctgttccctgcctaggcgccagcactcaagtggattttagccgaatcccttaaaggtaagacaaatgccatccaactattttgaagaaaratattaaggaatttacctaaaaggcgtacagaataaaactggggaggaaaacccaggcaacctcattgtaataaccttctgtctcatggactatatcctt

SEQ ID NO: 227803 - DNA, 201 bp, Homo sapiens
agtttgttaaccataaactagtcttcatgtcatcaggtagatggacctgtaggaattgctgcctgttccctgcctaggcgccagcactcaagtggattttagccgaatcccttaaaggtaagacaaatgccatccaactattttgaagaaagatattaaggaatttacctaaaaggcgtacagaataaaactggggaggaa

SEQ ID NO: 227804 - DNA, 201 bp, Homo sapiens
ttggctgtgcgcttgggacccatgacaggggtgatgttacaggtcattctaggtcaggccttgctcacagtgcagggaatgcagcccaccaatgccttcawgatcctacatgcctttttctaagggaaattggcttaaccaacattagcattggttcagtgtaaggaggactttctttaaggtagtttataatacaatttt

SEQ ID NO: 227805 - DNA, 201 bp, Homo sapiens
tatactctctcattttaagtgttgtgtaaatatttactgtatcctctatcaaattgaggaaatggtgtctttttcagttcctattagagtggacagcatakattagttagtagaaataggcattgtgaggaggcttttctgtaacaggtgtgcagaagtgtcttctataatgtgccacttcatgctgatcaatatagtctt

SEQ ID NO: 227806 - DNA, 201 bp, Homo sapiens
ttcagaaatgacttctcttagctgtataaaaatgtgaaaaaaagagagcatcctttgccctgagcacagtatttcctagacagtgttcaacacggtggtcmccttggatagaaggcagcagctacaggagacaaaggcagcgttacacacctaggtgatgccactgctcctcttctctaccaccagcctctattaccttca

SEQ ID NO: 227807 - DNA, 201 bp, Homo sapiens
agaaatgacttctcttagctgtataaaaatgtgaaaaaaagagagcatcctttgccctgagcacagtatttcctagacagtgttcaacacggtggtcaccytggatagaaggcagcagctacaggagacaaaggcagcgttacacacctaggtgatgccactgctcctcttctctaccaccagcctctattaccttcaggg

SEQ ID NO: 227808 - DNA, 201 bp, Homo sapiens
gatggcgggggagaggagtaatgtgtatatttagtcactatcaatgacattttagggccaatagggccaactgaaacagagttctgcccacagttagtgtktcattggttagccttatgtgattaaatccttctaaatgcaattaaatccttatcaaccaaaagaagaaaaattatgttctctttagggaaataagtatag

SEQ ID NO: 227809 - DNA, 201 bp, Homo sapiens
ccttctaaatgcaattaaatccttatcaaccaaaagaagaaaaattatgttctctttagggaaataagtatagatatatcattttccttagatttgtgaaytatttcttcagaaaaccaaagctgattcccaagagacaagaaaaacaggatttttttttccttctcaacatttacatgaaataacacctaagtactttaa

SEQ ID NO: 227810 - DNA, 201 bp, Homo sapiens
tcttctaaagagagtgaaaaacagtttgttaaccataaactagtcttcatgtcatcaggtagatggacctgtaggaattgctgcctgttccctgcctaggsgccagcactcaagtggattttagccgaatcccttaaaggtaagacaaatgccatccaactattttgaagaaagatattaaggaatttacctaaaaggcgt

SEQ ID NO: 227811 - DNA, 201 bp, Homo sapiens
aatctgggttgtattttacacttctggtacatctcagtttgggctagccacaattcaggtgctcaggagccgcatgtggctggtggctctactctattgayacagcaggactagggcatggcaagcaaggaagacagtgctagatgagggtggaaatatagagggaggatcctataagaaggggctttgctgactacggta

SEQ ID NO: 227812 - DNA, 201 bp, Homo sapiens
atgtgacagtatactcctctcaggaataagaagtaaagagagagtgaatatttactgaacaacaatctaatttacttcagtgggaaatacagggttatttygtatatctggtgaacttgttaggaagtagcagtgtttatattgtaaaatcaagctggaggttgcaggacagaggctagaattccagctgagaataatatt

SEQ ID NO: 227813 - DNA, 201 bp, Homo sapiens
aaatgcaattaaatccttatcaaccaaaagaagaaaaattatgttctctttagggaaataagtatagatatatcattttccttagatttgtgaactatttyttcagaaaaccaaagctgattcccaagagacaagaaaaacaggatttttttttccttctcaacatttacatgaaataacacctaagtactttaaagtgtg

SEQ ID NO: 227814 - DNA, 201 bp, Homo sapiens
gttggctccaatttgtttgtgcaactcacatgggccaggttctttgaagggcgttggaatagctccatcagaacttaatggatttgtaggctgcacagggyatgtaacttccaacgggtgagtagcagcttcagagggtgcagttttgtaatcagaagcagaatgatcctattgtagaaagaaggaatcgtgaccaatcca

SEQ ID NO: 227815 - DNA, 201 bp, Homo sapiens
ggaaatctcagtttctttcaagtattctggttagaaaaaaaaagcatttgaaatcctctgtgacgatctgctgtcatgcatggtaagcatagcgtttcagmtgcattcaaggctttatgtcttcattaaagagggtttttaaatgaaatagagagaggcatttgggaaaggttggctccaatttgtttgtgcaactcacat

SEQ ID NO: 227816 - DNA, 201 bp, Homo sapiens
acccttaagtgatttttataggtttttcattcatgaagttataactctctataatatttcagctttgtgtatctctcagccatggctgtttctccagtacrtcttaagcatctcagccataaataattggaaggttaggtacatagtaggcagctgagaaaggtgagggtattgctttcctagcctgaggcttcaaaatag

SEQ ID NO: 227817 - DNA, 201 bp, Homo sapiens
gggtggtcagccgtcacacttgcctctaagtccccatgaacttgtgtagtgcttgacttcagtaagagggaaaaatgtggaggtggacagtggtttatatrtgatgcaggaaagatacaaggagatgacagttagtcaaacacaaaatgttctgacaggtgtatagtagactcaagaataaataatgaaatgacagtgatt

SEQ ID NO: 227818 - DNA, 201 bp, Homo sapiens
ttcagtttacatatgagaaagctaaagccaagctaatttaaataatttctcccgagattaccagctaattagatgcagacctagaattagacctcaggctycctgactgacatactaaggtaccatatcaattaaagttatgtgattgcaaacaacagaaactaattctgactaacttgtgcacaagagggatatatgcaa

SEQ ID NO: 227819 - DNA, 201 bp, Homo sapiens
tgcccaaggtcatacaatgagtgaatggggcaacctggacatggacttcagtcttcctgagctcagagctgaccaaagactctgtctaaacttccaagacscttttctcccattggttgatgcacatggtattgaaaaatgtcgagcattctctttctctgttgaaaagttctgcctcccattagttatgaagggaatcct

SEQ ID NO: 227820 - DNA, 201 bp, Homo sapiens
acctgttgaggctttgcaatggcacttactctaacctgtggctattttcttttatttgttgatttttttattgccagactccctcacacttccaggatggraagcaccacacctgtcttacttaagacaccacacctgtgtgcccattgcctcacatagtgcctagcaatgagtaggtgctttatgaacactcagtgctag

SEQ ID NO: 227821 - DNA, 201 bp, Homo sapiens
aacttcttttgtaaagggccagacagtaagtattttaggccttgggaccctactgattctttcacaactgctcaacaccatcttgcaatttgaaagcagcyctagacagtaggtaaatgtggctgtgtaccaatggcattttatttattggtatggaaatctgagttttataaaactttcatgtgtcatgaaacataattc

SEQ ID NO: 227822 - DNA, 201 bp, Homo sapiens
gactctctagcaggtcagctttggttggcttcagcctccccatctcaaggaagtcagtgcagttttcctgcctgtgtcttatttaatatatgtctgtatcytctggctgtcttggaatgggggtctaaggggccattcagtttgacaccagaggcactgtctgtgtatagccagtcataatgaataactgtaaacatgagt

SEQ ID NO: 227823 - DNA, 201 bp, Homo sapiens
ggtaatcactagaatacattgtctttctgcagtgccctagaaacttcttttattttccctattgtatacctttggcccatagtctcctttttttacctctktcggtgcactcttctcaacctctttttcattatttagtccaattgcatacatttttacacttaatttctttacaggtcaggaagacagtcttctgagtgg

SEQ ID NO: 227824 - DNA, 201 bp, Homo sapiens
taagtatagatatatcattttccttagatttgtgaactatttcttcagaaaaccaaagctgattcccaagagacaagaaaaacaggatttttttttccttytcaacatttacatgaaataacacctaagtactttaaagtgtgaacacatgtcccatggtactcaatgatgtgatatatctgttgccttctgccacctaca

SEQ ID NO: 227825 - DNA, 201 bp, Homo sapiens
taccagtgatttctggaactaggtcattattagaatcaccttggaaactttggtaaactataaatttctggctcaacccttaaaatatactaattcactasctctgggatgtagcttgtattttaaacattaatgtaaaagctccaagtgattttgatgaagctagaattgagtatgacatctaaacacattataaaaaat

SEQ ID NO: 227826 - DNA, 201 bp, Homo sapiens
taagcggaaaatacaatgagatagagataagcagacagactcatgacattaactctgtttttaaacataatgttctaaatagccaaattatggatgtgccrcaatcagattaaccttccaatgatgtcctatagaatgttaataagaatttccaaaggaaagaaaagagggtggtggtgaaggggtggtgctctatgctca

SEQ ID NO: 227827 - DNA, 201 bp, Homo sapiens
acaaccacaacagattttagagcaaaatagaagactcttttgctgaaggcagctgtgttttgagaatgtgtgtgtgtatgtatgtttgtgtttatgaaaartctgtggcaaccacattttaccactgatttttataatttctggtggcattttctggacttttccagaaagttcacaccttgtaaacagtattccagtctt

SEQ ID NO: 227828 - DNA, 201 bp, Homo sapiens
atttaattttaatgtaaatacctacttgtagttaccacctaccatattggacagcacagcactaggcctttgagacacattttctgagacacatgtttggrtttgggattgtttactgtgggtgttctgaacacgccatacccagagttacagagttacagagccattatcatcacactattaagcctctagtctatccat

SEQ ID NO: 227829 - DNA, 201 bp, Homo sapiens
ttgtatgcatttttttcctcttaattgtttaacaaaagtctgttgtgttagcaacgtatctcttcatttttccttgccataatatattttttctgcttagraggccatgcctattactgtgcagttagaacaaaatgaacatattttaaaactgtatagagcgaaagaaagggaaggcattgaacgtaaatttagacttct

SEQ ID NO: 227830 - DNA, 201 bp, Homo sapiens
aacatagtgtaattactgaaccaggaaattaaccttgatataaagctatttctggtctgcagaccttatggaaatgctgccattgtcttttatttgggtcyaggatccattccaggatcacacattgtgtttagttgtcctgtcttttagtgttctttaatctcaaacaattccccagactttgtctttcatgaccttgac

SEQ ID NO: 227831 - DNA, 201 bp, Homo sapiens
gtatatataatttttagtgaaatatttgaaagcaagttacatgatgcctctttgctcctttagtgtatttaaacaagacattttcttagaaaaacatagtrtaattactgaaccaggaaattaaccttgatataaagctatttctggtctgcagaccttatggaaatgctgccattgtcttttatttgggtccaggatcca

SEQ ID NO: 227832 - DNA, 201 bp, Homo sapiens
tggaactaggtcattattagaatcaccttggaaactttggtaaactataaatttctggctcaacccttaaaatatactaattcactagctctgggatgtascttgtattttaaacattaatgtaaaagctccaagtgattttgatgaagctagaattgagtatgacatctaaacacattataaaaaatgcttttctttcca

SEQ ID NO: 227833 - DNA, 201 bp, Homo sapiens
actaaaaaaagaatgagcgggaggaaaaatgacctgatatatatatatatatatatacacacacacacatatacatatatgtgtgtgtatatatatatttwtatatatataaatatatatatataaatatatatataaatacaaatatatatatatatataaatacctacagatgcatcaaatatcaattcttcaagaatg

SEQ ID NO: 227834 - DNA, 201 bp, Homo sapiens
attgaagccttgaaagcaatatggccaaagggatacaaatgtcacatggatgtttgggctagaaagttttaaagatctgtgtcaatccctgattctaggarcagtccattttcaaatatttgtgtctggacctttacatagatacctgaaattataattagttatttcaaagcatttttatcgttgtcctttaaaaaccaa

SEQ ID NO: 227835 - DNA, 201 bp, Homo sapiens
ccatcagaatcatgagccaaataaacctcttttctttataaattataccacctcaggtatttcttcacaaaaacaaaaaatggactaagactgatcatatscctaattgcaaaatctcacaggaggagccaccttaaatgacactgactgtgtgtgagggactttccaaagagtttgtcacttatcctgccagcagcactg

SEQ ID NO: 227836 - DNA, 201 bp, Homo sapiens
aagcagcaaaggaaagatctaaaggtgtaatttataattaaaagcgaagcagagtgtaaaagtttggaaaatttgcagcctggccatttggtgggaaaggraacattttcagaagaggaatccaatgctattgcccagtccagtgaaattgctaaagagattagcatgattaaaatggagccaggtgctagtagtcaagcc

SEQ ID NO: 227837 - DNA, 201 bp, Homo sapiens
agatgaaaatgaaaaacttactgggaactgtcacccttgttacatagtagcaaataacttggctgcatcgtgtccatgtcctagggctttgtggaaggtcraacttaaaagtgatgagggtggggtatctggtggatgaaaatgctaggctgcaaagacctcagttagtggcatggctacttttaacaggttatgctgaat

SEQ ID NO: 227838 - DNA, 201 bp, Homo sapiens
aatgctgcttttcaagttcttcaactttaataacactggaagagtcccagtgatgtaaataacttagttaccacctggtttatttttgagtacttataccygctacagggcattgtgtacagcagatgcttaagaagtagtgatggtgataataacaaaattgaatgtgaaatatgatgtagttctttcctaatggtgcag

SEQ ID NO: 227839 - DNA, 201 bp, Homo sapiens
aatgaaattttggggcatttacgatggccctttctccttagtgtcttctaaattgcaattttgtctccccaacccttttagactgacaaaatggctccttygtttttggtcttttagcattgatttttgcttagtttattggtctcttcatatatttgcagtttaggaatttgcaaatatctcaaggggaaattacgttag

SEQ ID NO: 227840 - DNA, 201 bp, Homo sapiens
ttcaacacggtggtcaccttggatagaaggcagcagctacaggagacaaaggcagcgttacacacctaggtgatgccactgctcctcttctctaccaccarcctctattaccttcagggtgttgctattccaaaacccaccccaggccctcattttgcctaaccgttttctgagcggtgttgggtgaccacttgtactgag

SEQ ID NO: 227841 - DNA, 201 bp, Homo sapiens
taaaaactattttcctttagtctttgggtcttcatttcggaaggctgctatgtcacataaaactttgattaaatacatttgttatgcttttctcttgctgmcctgtcttttgttataggaatgttggctgtgactcttgtgagaggtgaggaaaggtatcacacctttccatccctacagtgggaacttggcctggtattg

SEQ ID NO: 227842 - DNA, 201 bp, Homo sapiens
tacacagctgtgcattcttcactgaacctaagcataaaaactattttcctttagtctttgggtcttcatttcggaaggctgctatgtcacataaaactttrattaaatacatttgttatgcttttctcttgctgacctgtcttttgttataggaatgttggctgtgactcttgtgagaggtgaggaaaggtatcacacctt

SEQ ID NO: 227843 - DNA, 201 bp, Homo sapiens
aactgggagaagacaccagccagtctgttcacagagcctgcattcttaatcattatattacttacaaatactgtcacttcagttatcctgatggctacttraaaaaaatttctgagttctatcttcagagattcaaaatcagtggggctgaggtggagaaccaaaaatctgtattgtaaaaagctctaggggtgattccat

SEQ ID NO: 227844 - DNA, 201 bp, Homo sapiens
atttaaatcaacaggtaatatttacattatcatgattacgtaatttttttctgttgctaagccgaatggtatttgttatgttttctttaatataaaatttkttgtctttcttggaattaatatgtgcttttaaaaaaatttgcctactttaggcatctaccttataaggtaggtagtaatagcatgtcaatttcataggtg

SEQ ID NO: 227845 - DNA, 201 bp, Homo sapiens
cagcgctaatggtgtaagacagtgggtaagcctttcatccagcctataatggaatgggattatttttgttgctgttgaacttgtgttattatttaggttcmtaacccagaagcttgtatgggtgactagctggcctctttccgtccatttatccactcaaccatccatccatcatactgtatgcatatttattcatccaac

SEQ ID NO: 227846 - DNA, 201 bp, Homo sapiens
tactgggaaaccatgcagtctctttggttgggcacttagtgagaggttaagtttacttctggaattaattgtagcattgtcatgtagaccattgatgtacktggggtggggggcagatgggagagatgatcagattcccattttgatagatgcagtcttggctccagatcaagaaggaacactcacttttttgtattagga

SEQ ID NO: 227847 - DNA, 201 bp, Homo sapiens
atctgttctctagccagcaagttctagaacctgaacagcgacatttcgcttacaactctagaaagtcttttactttcttgtcaataaaccaaagacccttsctctttataaatcttcttcaaagcatttttcttccttcagataacaaactgatatgtccttgcctggatgggctttaggagagttcagaaagagtgagct

SEQ ID NO: 227848 - DNA, 201 bp, Homo sapiens
ctctcaccgtgccccacttccaacattaaggattacaatcccacgtgaaatttgggcagggacacagattcaaaccatatcatacagtaaacccaccaaayatcccagtctcttctttataagagtggctccagagaagaatgttctgtgccagatcacatggatgacactctcttccttcctcaactccttgtcactcca

SEQ ID NO: 227849 - DNA, 201 bp, Homo sapiens
tacatgaggaagttcattataatcagctattaagacccttagcactgatatttttgatttgcttacagagttcttttgctcacagtgaatgtcattattgktattatttttattattgtgctgttccagctagctcagatatcttggcccctcttgctggagctgggatgagtttaccagtgtttcactctcctttccatt

SEQ ID NO: 227850 - DNA, 201 bp, Homo sapiens
ttgctcctgtgagaaatgaatgctgctgctgatctgataggaagctaacctcaggcagtaatgcttgctcacccgccactcacctcctgctgtgtggcackgcggttggggatccctggatagaatacccccctcctaccaaagacctccatgtcgtaatccccagaaactgtggctgtgttaccttatatgcagtgggga

SEQ ID NO: 227851 - DNA, 201 bp, Homo sapiens
tggaagacaattttcccacagacccggtggtggagggagtggtttcgggatgaaactgttccaccctatatcattaggcattaaattctcataaggagccygcattctaaatccttcgcatgtgcagttcatagtagggttcttgctcctgtgagaaatgaatgctgctgctgatctgataggaagctaacctcaggcagt

SEQ ID NO: 227852 - DNA, 201 bp, Homo sapiens
aatcttcaatatttttttttaaattttggttttctggaattctgggggctctgagagcacatatagtcagctctgcctagcaaaataagataggattctcrcaccttacacatacacagtttttcacaaatgagaggcactcacttgtatttgtggtagctggacctgaacagatttttaagtaaatttgaaacattgatg

SEQ ID NO: 227853 - DNA, 201 bp, Homo sapiens
atgtatgcactgctttcaaagctatctagaatcctagaagttttgcctccgaggtaataaatgtacaaaatgcatcgttgtgcctcttggctatcaacacrccctgcttcagacctttttgagataagtctttatctcagctttttacttcctgcttcataattgcccagctaagctaatgaagcccatttggtgttgtga

SEQ ID NO: 227854 - DNA, 201 bp, Homo sapiens
aatgtacttccactctgtccctgttctaggtagtctttgatttgatctggtgtccgagccctgcctcctcagtcaaatcctgcctcctccttaagttatgkctaggtgttcaccttatttggtcatggtctgatcagttggcagcctgtgattggctgaagctcagctgctgttacaaaaaaaaaaaaaaaaaaagcatcc

SEQ ID NO: 227855 - DNA, 201 bp, Homo sapiens
ccggcctcagagatttaaataaagtgccggagggaggcaagttgtgttttaggaatgtgacaaccagggctgagatagagaaatttatgatttaatttgcygtgcagtctaattgcgaataactattggatttctaaatagtggactttgattaggtttaggtgtcagaaataaactggaaatatgggtcagtttatactt

SEQ ID NO: 227856 - DNA, 201 bp, Homo sapiens
gatctttgattcctattagtctggggaatgttccataccacatccaccaggtctgagagcttcacggtgcacagtagactattaaagttactgagaagttscatggaacagaaacctgcttaaccttctttaatctactgattcccaaactcatttgaccattgctttgagaaatatcattttaaacaaacactcgaataa

SEQ ID NO: 227857 - DNA, 201 bp, Homo sapiens
gtgtgacgcatatatgttgagcagtttctggtcataggaactttggttccaaatcttattaaggtttttgtcattccagagggtgacattttaggggggcwgaaactggctagcatgttagcctaatccttgaatccaggcaaaataaattttggttgagtttgctgtaacattcacccattcgttttcattgcttcatgt

SEQ ID NO: 227858 - DNA, 201 bp, Homo sapiens
attcaatagatttatatgctttttccttgttgatctaccttttgttataggtgcctcagccatgaacttagtggtgagtgaggaaaatatatttttcccctatactactatcacaatttaatattttaaagtaataatcttaggaagcaccatctaaaatcatggacttttcaaagaagggatgccatatgtcaaagatat

SEQ ID NO: 227859 - DNA, 201 bp, Homo sapiens
gttgctccattggcttggccagctatatggaagatctgagggaaactggaatttttagtctcttaaatgacataagcaaacctaaatttggaatccataayttcaaaacctgatagagcttgcactggaagaatcctgtctatgtgggagtttgggccccaggtttcactctagccaccctatggaggtatgtgctcaggg

SEQ ID NO: 227860 - DNA, 201 bp, Homo sapiens
gagggaaactggaatttttagtctcttaaatgacataagcaaacctaaatttggaatccataatttcaaaacctgatagagcttgcactggaagaatcctrtctatgtgggagtttgggccccaggtttcactctagccaccctatggaggtatgtgctcagggcactcccctcattcacatactggtgaaatgaaactgt

SEQ ID NO: 227861 - DNA, 201 bp, Homo sapiens
ttgcttagtgcaggggttatatttagtcgcattttaagctctccaattttctctgaaatgtacacgggagggaaatgagagaagcaattgaaaaacaataraaaaagcacttagaataaatagagaaggtttggtaaaaccttccaatgtgtgggaacgatttcaagactttctacagatctttaaacattccacctgttt

SEQ ID NO: 227862 - DNA, 201 bp, Homo sapiens
ggccaggttggccttgaactcctagcctgaaggaatcctcctgccccagtctcccaaggtgctaggattataggcacaagccactgtgcctggccgtttcyattccttttataccctaaagtcattccctcttgcatcctcctgccccttccccagcctgagcttttcctactctctggttcctaaaaccatttcctctgt

SEQ ID NO: 227863 - DNA, 201 bp, Homo sapiens
ccttgaacatcacaggggttaggggtgctgactcccaggcagtcaaaagtctacatataacttttgactctcccaaaatttgactactgtttaccagaagycttactgataacacaatcagttaacacattttgtatgttgtatgtattatatactgttttcttacaataaagtttgctagagaaaagaaaatattagtaa

SEQ ID NO: 227864 - DNA, 201 bp, Homo sapiens
atttcagatgttaaaaattcttggttggtagacggataagttatcaagaggtaaacagagcaaagggagagcctttgagttaggaagactggcatgagcaragactagtaggagacaagtatggggtatgttcaggcaacagcgcatgattactctttggctggagtgttgggttttaggcacagtgggagatggggtgaa

SEQ ID NO: 227865 - DNA, 201 bp, Homo sapiens
atcccattccatttgtgaatcatttcagatgttaaaaattcttggttggtagacggataagttatcaagaggtaaacagagcaaagggagagcctttgagktaggaagactggcatgagcaaagactagtaggagacaagtatggggtatgttcaggcaacagcgcatgattactctttggctggagtgttgggttttagg

SEQ ID NO: 227866 - DNA, 201 bp, Homo sapiens
agttcctgacaccaaattagccattattatttttatcgtttgagcccatcccattccatttgtgaatcatttcagatgttaaaaattcttggttggtagayggataagttatcaagaggtaaacagagcaaagggagagcctttgagttaggaagactggcatgagcaaagactagtaggagacaagtatggggtatgttc

SEQ ID NO: 227867 - DNA, 201 bp, Homo sapiens
aggatttttaaaaaccagttttttaaaatgacacaattctggacttggccaagagtcaaagcaagtgattttgtttgtaccatgacaccagtgaagaattyaatggtttcaaaaaatcacaatttttttttttgaggcagagtcttgctctgttgcccaggatggagtacagtggcacaatctcagctcagtgcaacctcc

SEQ ID NO: 227868 - DNA, 201 bp, Homo sapiens
gctgaaacttaacggatgagcaagagccagtcctggggagctgaaagaagagagctccaggtcaaaggagcagcaagtgctcaggtgtgagaggaagccartgagcccagggtgcaggaggtgtgagggagagtggcccgaggtggacatggccatctgtacagtgccacatcacattatgcagggccttgcaggccaggt

SEQ ID NO: 227869 - DNA, 201 bp, Homo sapiens
ttactgtccaaggttaagtggccctatgtctcacaaggccccattcagggcttatcaagcctcttgaatattccatcaagttagtctgaaactctagagtrtttactttatatgttctgaacttaacagggcacattctgtctctaatatcttggttctgagtacccatcctcactaggacactagtgccatcttgctagc

SEQ ID NO: 227870 - DNA, 201 bp, Homo sapiens
agagtgatactaaaacaaagcatgagaaatggaccaccaacttctgaatattccaaatatcactctctttcttttaatgtgtctatcatttaataggcagrgtaactagaactatcagaaatttgtccttggtttatttggcttttttgtgtttaagtcttttgtcctggagctacagatagataattataaattcattca

SEQ ID NO: 227871 - DNA, 201 bp, Homo sapiens
aggtgagttaatttagtgagttagcttcagtttctttagatagtgtcaaacttaatgtgtaagagggagagggggaaaagagcaatgtaagcttaagtggygttttagaatatcttttcactggggaaagaaaattgacaaaagattcaaatttgttaaattaggaagaaaagtcaatatggtgtatttgccatctgtcag

SEQ ID NO: 227872 - DNA, 201 bp, Homo sapiens
gagtctgtagggaaggggacaggaaggtattcattgcaaggaatgactttctcaggtgaccttccacccttccctctgtgtccttatttcctgtgttggartaattggattatacctgagactggctggctctttccagagaaccacttgttactttcttcaccaagtgtcagtttccccccatttagaaataaatcaatt

SEQ ID NO: 227873 - DNA, 201 bp, Homo sapiens
taaatttggaatccataatttcaaaacctgatagagcttgcactggaagaatcctgtctatgtgggagtttgggccccaggtttcactctagccaccctayggaggtatgtgctcagggcactcccctcattcacatactggtgaaatgaaactgtgtatatggtgagggtgctattaaattatttatgttgcatgtggtt

SEQ ID NO: 227874 - DNA, 201 bp, Homo sapiens
cataaaaaagggctagcctcctaattgctctacacacagggtatggtgatagacacagaggctttcagctttcctctgtcccactgtctcacctccatgtsaggctctaaatatacggatgcaaagaaaggatttaatacctgtggcttctttttgaaatcacttcttgaaatgcaaaacacaaatgtttaaacttggttc

SEQ ID NO: 227875 - DNA, 201 bp, Homo sapiens
tatgacccctggaagccagtcttgcagtagccagcccctctaggggacaaagcagcatctttaatattcagctgtccagttgtgaatactacaattcaagmctctgagcatttcatattttggaattcacacagttgcacattttaaggcagcatttgacaacctgccatggaaagcacagtgactgttctcttcatcttt

SEQ ID NO: 227876 - DNA, 201 bp, Homo sapiens
ttacaggggtctgagccatgaaccgggcaatgggtaaggaaatgacacagctttttctccggtttattttctatgcctcttttgtgtggggaagagaatgrtgatgataatggaactttgcttgttgcttgttggaacgaatctcataagtttctaactttagttaacatgaagtagaagacgatatgtatgtgtattcca

SEQ ID NO: 227877 - DNA, 201 bp, Homo sapiens
taattttatagtattaacgcagtgggaagtagctgttaataacttttaagatattagaaattactttttagattgctctagaagaagaagataattatttrtagaagtataattcaaaaattaaatgagataaaaaggaagctcttctgttcactgagaagtttctgtggttctagaacaaattttccacctgaaaatttg

SEQ ID NO: 227878 - DNA, 201 bp, Homo sapiens
tatcttatctgaacttataaaaatgacactttgaaaattcagaaatctgccttcttaattggggaaaataatactggccctctctgtccgaacatttttakcctctggtgtatgcacagatgatcacgagtaagtcgcggttacaaatcgatagagtacttcacagttacctgaagaaggtagccataggacagaagcctg

SEQ ID NO: 227879 - DNA, 201 bp, Homo sapiens
cactttgaaaattcagaaatctgccttcttaattggggaaaataatactggccctctctgtccgaacatttttagcctctggtgtatgcacagatgatcaygagtaagtcgcggttacaaatcgatagagtacttcacagttacctgaagaaggtagccataggacagaagcctgcctgccccatgctttgctgactcggt

SEQ ID NO: 227880 - DNA, 201 bp, Homo sapiens
tagataaattgcaattttaattgcaaacctaattgattatactcagcatgctcattaggtcaaggaagactatgagtcagctcccaaggtcattacattamtagagtaagcatgtaatttgtgataagttgatttgtgaacatcacattcttctctttaaacagaataaccaacattagtttttaaggttcacatactgac

SEQ ID NO: 227881 - DNA, 201 bp, Homo sapiens
gggagagcgctggttgataaggctggaaaggatggcaggggcccaggtaatgacagaccttggaatgtgatggaacttggcattcgttaatttattcattscacagatactgtttacatccatgtgatgtgttgcaggttaatagggggtacaatgccaaagaagataaacaagggctgtgccctcatggaattacattcc

SEQ ID NO: 227882 - DNA, 201 bp, Homo sapiens
ccatgatttctatacttctgggactcacccaccaaaaggcagcttttctgacagattgttgccacatttaactttgccttggtgcattcaaaaattctttygaaatcctagaggaagtaacaattaaactgatccttgagcagaattagacttgagtgaggaagggaagaaagacatcctagcgagaggcaacagctggta

SEQ ID NO: 227883 - DNA, 201 bp, Homo sapiens
agtgattgagatgttgttagttctcaggaagttataatttagttaaactcactcatttgcctaacacttattgaacacctattgtgtgccaggtattgtaktgaagataaaggtacgatttagccatgatttctatacttctgggactcacccaccaaaaggcagcttttctgacagattgttgccacatttaactttgcc

SEQ ID NO: 227884 - DNA, 201 bp, Homo sapiens
cagaaagtgctggcttactcgccccatgttgcatttctcgttgcttccatgtctcacctgaactttgtctttgttcctttcacacaccctcaaaactttaygcttctgcactaactggacttctgtgcaatgcagctgtagttattatatttaagcaggctttgctgctgccaacattggcggccctcagcctcaatctat

SEQ ID NO: 227885 - DNA, 201 bp, Homo sapiens
ttacagatgcttactttgtgccttcttggggagatggtgattgtgactggacatgctgaggaatgtggaggctgtcttagaaccataagtaagaacccccwgatcattctggactaaatgtttccaaagtgatagaagtgaaagcagaaagtgctggcttactcgccccatgttgcatttctcgttgcttccatgtctcac

SEQ ID NO: 227886 - DNA, 201 bp, Homo sapiens
ccttctccgtacaagggtaagagaatattccttatcagtggagactgtgattaggtgctgcaatgtgtctgagcaaataaacttcctgaaataatccttaycttctacttgttttacattcatatagctcctggtcactcccatagaaattattttccctagccagatccctttttatcctgtcatttcttcacaaattta

SEQ ID NO: 227887 - DNA, 201 bp, Homo sapiens
agccataaagattcttttgggagggctgccttctccgtacaagggtaagagaatattccttatcagtggagactgtgattaggtgctgcaatgtgtctgarcaaataaacttcctgaaataatccttatcttctacttgttttacattcatatagctcctggtcactcccatagaaattattttccctagccagatccctt

SEQ ID NO: 227888 - DNA, 201 bp, Homo sapiens
ggaaagcagataagctttctaactcagaaagtgatctgctttttagaagtggcaatattatgcacaagcgacatgtagttaaaattggttggaacttaatrtccaagtaaagcacaaaggaaaacatattcctgaagcagtgaaggacatgccatcccagaatatgcgaattggtatgttgattatttcgagctgaaaacg

SEQ ID NO: 227889 - DNA, 201 bp, Homo sapiens
gagcccatatctgataggagcataggaattacttcctttctgcttcagaagtgtctataaggagggaaagcagataagctttctaactcagaaagtgatcwgctttttagaagtggcaatattatgcacaagcgacatgtagttaaaattggttggaacttaatatccaagtaaagcacaaaggaaaacatattcctgaag

SEQ ID NO: 227890 - DNA, 201 bp, Homo sapiens
agttggtatttaatgaacactggttgattgatgatgtgttgacaaggaggtgattttcttatggctacgtgaccactcaggggtaacaactaaaggaaaasttatctttgatgctacattgtttaatttatagtatactggtttgataggactttttttcctccccaaaatgagttctgagtttttgcctgtggcatggtt

SEQ ID NO: 227891 - DNA, 201 bp, Homo sapiens
gaaataccaaacaaagaaatatcaaagagagatgcgagagtaagtcacgaagcttcctaaatttttaatcctacttttaaaaggtaaaatcagatattttmtcaggttgtttgtgcatttttaacgaagttaactttggaatattcagcactgaaggtgacctgcagtatctcttgctcaattttggaggctgcctgagaa

SEQ ID NO: 227892 - DNA, 201 bp, Homo sapiens
cagcactgaaggtgacctgcagtatctcttgctcaattttggaggctgcctgagaatttctcattctctgttgcttccagatttccaggaagagtcagagmctcacactttttacttgaaaagctgatacgcattccctataaacctcccaaatgtgtgaaataattacccaggaaacaaaagagagggacttttacagtc

SEQ ID NO: 227893 - DNA, 201 bp, Homo sapiens
tgtgaaataattacccaggaaacaaaagagagggacttttacagtcataaattcattcaaggatctacatgaggcatttttctgtagtgggtcaggttacrtcttgttccccttttcaaaatatatttcaagctatgttactaaaatgtacctaaggcttcttgatataggaaatagaaaaataagactttagatggggca

SEQ ID NO: 227894 - DNA, 201 bp, Homo sapiens
tcctatgtcgtaagtgcgaaaactcagagggtagcatgttccacgctgtcttccagagccccccccagtggatttgagccccaattgcttgaagcactaayattcttataaatgtttcttgtagtagatttcttttttcccctgtcttacttccacttctcccctaatggtgcttcctgggcccatctctcaaataatcca

SEQ ID NO: 227895 - DNA, 201 bp, Homo sapiens
attcctgaggatgtgtttatgtgaaccaataaatataccccttctttttgttccaaaagagtcctgacctgctgggagtggtggcacatacctctaatccyagcactttgggagactgaggtgggccgactgcttgagctcaggagtttgaggccagcctgggcaacgtagccaaaccccatgtctacaaaaaatacaaat

SEQ ID NO: 227896 - DNA, 201 bp, Homo sapiens
tttgatgacctaattacattgtgttaacacatttgtagttagccacaagcacttaacctagctcagaacttcatccctttctgcaagtacggcatataccrgaaattgagcacagaaatcttaaagcagattaaagagggcaaaaattcattgtgaaatattcccaaagtaaagttagttattacacttgatcttagctgg

SEQ ID NO: 227897 - DNA, 201 bp, Homo sapiens
atgacatggctttagaggggcaggagtggaagccaggagatcactcaggtctccttgtctgtgtttagcaaacagaatggtcagaacaagggtgcttataytggagatggagatggagataagattttagctttgggatatgcctggaggcagaactgacttgctgatcactactgagtctggcccaggaaacccagcgaa

SEQ ID NO: 227898 - DNA, 201 bp, Homo sapiens
tttggtaatttcagcaaaggtaagtacttgccacaggaatagtgaatcccaagttaatgcccaataatatcaccaactaaatgaaataaatggaagaaagrgtctcttctcttccctatccccctccaaaataaagtttatgggatgatttcaggatgttcatttctaggactatctagctatcatatttctttacccaat

SEQ ID NO: 227899 - DNA, 201 bp, Homo sapiens
atataaagtcacttatagttgtttggaatgatttgggtcatttcaaagataattacaatcaaagcactgaatgcacacattgaacacaaaatagaattctytataccaagcaggttctagcacagagttggtatttaatgaacactggttgattgatgatgtgttgacaaggaggtgattttcttatggctacgtgaccac

SEQ ID NO: 227900 - DNA, 201 bp, Homo sapiens
aaaaaaaagtttaattcactctctcttcaagacttttacattgtgtgttcaagtcagctttttgctattctgaatataaagtcacttatagttgtttggartgatttgggtcatttcaaagataattacaatcaaagcactgaatgcacacattgaacacaaaatagaattctttataccaagcaggttctagcacagagt

SEQ ID NO: 227901 - DNA, 201 bp, Homo sapiens
gtgctggctcggcttctagggaggcctcaggaagcttacaattatggcagaaggggaaggggaagtaggcacataatgtgacgaagacaggagcaagaggsagagagagtggggaagcgaggtgctacacaattttaaaccaccagatctcatgtgaactcagagcaatagctcacttgtcaccaaggaaatagcccaagc

SEQ ID NO: 227902 - DNA, 201 bp, Homo sapiens
gtacagagcagtcacccagccaaaggttgaagcacacaaattatgcttaattgagctccattattgttgagtttttattttattttaaaatatactaaagrcagtaagagcttcaagagaggatattaaacaaccatcattgatcttgaatttagctggtggaatttgaaagaaacactgccctcctttctgaagaggagg

SEQ ID NO: 227903 - DNA, 201 bp, Homo sapiens
aagaaaagaggtttaattggctcatggttctgcaggctttacaggaagcacggtgctggctcggcttctagggaggcctcaggaagcttacaattatggcrgaaggggaaggggaagtaggcacataatgtgacgaagacaggagcaagaggcagagagagtggggaagcgaggtgctacacaattttaaaccaccagatc

SEQ ID NO: 227904 - DNA, 201 bp, Homo sapiens
aaaacaaaaaaaactgccaaccaagaatcctacattcagcaaattgtccttcaaaagtgagtaagaaattaaggcattctcatattaaaaaaaaaaaaaaagctgaggaagtttattaccactacacatgctctgtaagaaatgctaaaatgagttctacaggttgaaatgaaaggacactaatagtaacttgaatcttag

SEQ ID NO: 227905 - DNA, 201 bp, Homo sapiens
gtaggcataaaaggttgaatgaggtcttgtcctcttacattttaaatgtaattcctagaaaagtagagaagccacacatatctcagtctcaagaaataaargtgtttctctgtgatttactaaacattctgttctttgttggcatagagcacaaaaactgtattatatgcaaaattatcgagagattttgtgtgtgagtac

SEQ ID NO: 227906 - DNA, 201 bp, Homo sapiens
aagctaattaagagaagtttctttataggtaccattagctgagtagtgacacacagctttggtgttgcaatattcttatatgtttcaccctgatcactaamgtaggcataaaaggttgaatgaggtcttgtcctcttacattttaaatgtaattcctagaaaagtagagaagccacacatatctcagtctcaagaaataaa

SEQ ID NO: 227907 - DNA, 201 bp, Homo sapiens
aggcatatttgaacaggtagaagaaagagtcagtaaacttgaagataggacaaggaaattatgagtcttaggaacagaaagaaaaaatattgaagaagaaggaacagagctgctggacaccatgaagcagaccaacatacccattgtgagagttcagaagcttaagaagagagagaaagaatagagagattatttggagac

SEQ ID NO: 227908 - DNA, 201 bp, Homo sapiens
ctaaatcaggaacttttgacttttcacttaaaagagatactttgggacttttccttggcatatccaaatttacagcatcactactcttctgtggggctatygttaagtaagagaagagttacttaaacataagcactgccataccacaacagttgatctggtaacagagatagctactaagtatctaacaggtgagtggca

SEQ ID NO: 227909 - DNA, 201 bp, Homo sapiens
aaggcatatttgaacaggtagaagaaagagtcagtaaacttgaagataggacaaggaaattatgagtcttaggaacagaaagaaaaaatattgaagaagaaggaacagagctgctggacaccatgaagcagaccaacatacccattgtgagagttcagaagcttaagaagagagagaaagaatagagagattatttggaga

SEQ ID NO: 227910 - DNA, 201 bp, Homo sapiens
tgtggttgaaacttttgcggtttgaggtgtgagagcaaaactagcatgaatttttctttttttcccaatttcatggatagaagatttattcttcctatagrtgttgccacccttagcatatgacttctctttactaaatcaggaacttttgacttttcacttaaaagagatactttgggacttttccttggcatatccaaa

SEQ ID NO: 227911 - DNA, 201 bp, Homo sapiens
aaaggcatatttgaacaggtagaagaaagagtcagtaaacttgaagataggacaaggaaattatgagtcttaggaacagaaagaaaaaatattgaagaagaaggaacagagctgctggacaccatgaagcagaccaacatacccattgtgagagttcagaagcttaagaagagagagaaagaatagagagattatttggag

SEQ ID NO: 227912 - DNA, 201 bp, Homo sapiens
tgggcacctcagattttgtttgatatacaacagtacccccttatccacaggggatacaatcaaagacccccagtgggtgcctgaaatcacagatggtaccraacctaattgccatcagtaggaacgaacacatttctgttcatgtcttcctttcacagatttaatgccttttccatcttaattaagcacttatcatgaact

SEQ ID NO: 227913 - DNA, 201 bp, Homo sapiens
gagaaggcttgggcagtaaattgcccttaactgtggttgactttagctcttagaataatatcagctactcataccccactcgcaggcatccttgcacagaktccaggagtagcctgcacacagtttatgggagccagggtgtgcaaaaaggccactgtcattcaaaaatcaggaatctgttctctgatagctaattgttgc

SEQ ID NO: 227914 - DNA, 201 bp, Homo sapiens
agacctgaaaccatacaatttctagaagataacattggaaaactcttctagatattggcttaggcaaagacttcatgactaagaaacgaaaagcaaaaacmaagataaatagatgggacttaattaaactaaaaagcttctgcacagcaaaagaaacagtcagtaaacagacaacccacagagtgggagaaaatcttcacc

SEQ ID NO: 227915 - DNA, 201 bp, Homo sapiens
acttaaatctaagacctgaaaccatacaatttctagaagataacattggaaaactcttctagatattggcttaggcaaagacttcatgactaagaaacgamaagcaaaaacaaagataaatagatgggacttaattaaactaaaaagcttctgcacagcaaaagaaacagtcagtaaacagacaacccacagagtgggaga

SEQ ID NO: 227916 - DNA, 201 bp, Homo sapiens
caaagacttaaatctaagacctgaaaccatacaatttctagaagataacattggaaaactcttctagatattggcttaggcaaagacttcatgactaagawacgaaaagcaaaaacaaagataaatagatgggacttaattaaactaaaaagcttctgcacagcaaaagaaacagtcagtaaacagacaacccacagagtg

SEQ ID NO: 227917 - DNA, 201 bp, Homo sapiens
tttttttctttttgctgaccctggcagcaaaaaggagtggcagtagtgtaaactgataccttgaatcctgtgggatatttttgttctctatcataaaatayaattttaaattaaccacatcagactttttcttgaattccagaaaatgattaatatcgattccagagctgaaaggcttttgtgtgcatttcaggttaattt

SEQ ID NO: 227918 - DNA, 201 bp, Homo sapiens
ttgcataatgaaatatttttcaaacttatttctccatggacccagtgttttttttgttggtggtgggttttttgtggttgttgtttataatagtgaataascactaaaatcttcagatgctttgtctatagatacttttgggtaacataactacaaaggttgtcaagagaaactaatgttattttcacattggcagaattt

SEQ ID NO: 227919 - DNA, 201 bp, Homo sapiens
tcaagatcaagacactggcagctttgttgtctggtgaatgcccactttctggttcatagatgctatcttctccctgtgtcctcacatggtggaagggatgrggcagtggtgggaaacagccccttgcctccttgtgggacaagctatccttggcctggccatggcttctccaggctgaacttgagtcacacttgggatgac

SEQ ID NO: 227920 - DNA, 201 bp, Homo sapiens
ctaaatactataatgagttgagtctcactattgtcaatttaacaatataaaaacaaattctttattcattgaaaattgtgcaccattcctttctctataastcatatttcattcatttgtctcacagaattttatcaatgtaatatgcttgaaatattttatgcatcatcatatagtctcagaacattaaattttttaaaa

SEQ ID NO: 227921 - DNA, 201 bp, Homo sapiens
gcagctttgttgtctggtgaatgcccactttctggttcatagatgctatcttctccctgtgtcctcacatggtggaagggatggggcagtggtgggaaacrgccccttgcctccttgtgggacaagctatccttggcctggccatggcttctccaggctgaacttgagtcacacttgggatgacttacacagctttgtgat

SEQ ID NO: 227922 - DNA, 201 bp, Homo sapiens
ataaaataaaataaaataaaataaaaatcctggtgagagataaaaaggagaataaggcacatccctgccctcatggagattatggtttgggtggacatatmatttgttgtccaaaagaggatgctttagagagggataatcagtacgtcaggcagctccggtgaactgggccttcatgggtaccctcatggatggcttagg

SEQ ID NO: 227923 - DNA, 201 bp, Homo sapiens
ctagcaacacttaaaaatcactgagtaatgaaaagaaggctcagcttgttttcagtagggtttctcaacaagcttgttacttgggaatattgaagggaagstgggtgtgtgcagtttttagattagtaaataaaataagtaaataaaagctctcggattaccaccttaggaaagaagtatattgtaaaacaaagcatggat

SEQ ID NO: 227924 - DNA, 201 bp, Homo sapiens
agaattgggaaaaaatggttgctacagataggatagtctctgaggagatcaattttaggcagaattctgaagaaggagaaggagccagtcattaaaagatstatgggaagggtattccaggctgagggtccatgaaatgctaaaagtgtggaatgactggaatgactatgagctgggattacaggtgtgcgccgtgtttca

SEQ ID NO: 227925 - DNA, 201 bp, Homo sapiens
agtcatgtttcttcaattgttttgccagacaggaccaaactttaggttaaaaaatcaaaattttgcatcatctgtttctttctatagtagaagacattctyttctaggtagactttgagaggccctcaattaccagttgaaatggagacggtttaatatacctgttctgaggcccaaaaccctccatggggttcaaaggag

SEQ ID NO: 227926 - DNA, 201 bp, Homo sapiens
ttggttgtcaaatgcatgtaaaattcagctttttaaaactgattaattcacctattataaaaccaccgtgaactatcactgatcttttcttaattatatayagacaatgggaaggcttacaataaaaaagtttcgtttccttaaagagcagttttcacaaggaagtttcacatttctaagggatgccaaattaaaaaggat

SEQ ID NO: 227927 - DNA, 201 bp, Homo sapiens
tctacctcttagtggtcttgactcagtgcaccgtgtccttaaaccattgtatctatgctaagtacaaaatgctatcacctgccttttattatttcctcctrtgaagcaattggggttcaagaaaatgctttttggtatggaagcaaaggaaatctggaaatgctgcttttaaactactggccctattattgaacaatttac

SEQ ID NO: 227928 - DNA, 201 bp, Homo sapiens
aaaaaaaaaaaaagaattaaagcttttaaaggttaaaatttatttaatcaaatgagccttttcctaggaaaatagtgcccagattggttgtcaaatgcatrtaaaattcagctttttaaaactgattaattcacctattataaaaccaccgtgaactatcactgatcttttcttaattatatatagacaatgggaaggctt

SEQ ID NO: 227929 - DNA, 201 bp, Homo sapiens
gttcaaagacttaaatctaagacctgaaaccatacaatttctagaagataacattggaaaactcttctagatattggcttaggcaaagacttcatgactamgaaacgaaaagcaaaaacaaagataaatagatgggacttaattaaactaaaaagcttctgcacagcaaaagaaacagtcagtaaacagacaacccacaga

SEQ ID NO: 227930 - DNA, 201 bp, Homo sapiens
gacatctgcatcaaactccaaagattgcatgagagattacaaggaacaatccaatgtctcctactcctgcccactccaccttcttagcctggctgaaggaygtctggcatatgagagcatgctgcaaatttaagtaactccttgtttcccaaataccaagcattaatcctggtatttgccatgtctagaaactactgctac

SEQ ID NO: 227931 - DNA, 201 bp, Homo sapiens
tctcactttgcacaaaaatcaactcaagatggttcaaagacttaaatctaagacctgaaaccatacaatttctagaagataacattggaaaactcttctasatattggcttaggcaaagacttcatgactaagaaacgaaaagcaaaaacaaagataaatagatgggacttaattaaactaaaaagcttctgcacagcaaa

SEQ ID NO: 227932 - DNA, 201 bp, Homo sapiens
tctgtattttaattttttttagttttgtttcccctagattgctcatcagaatgtatttttatgtgtaagaaaagctatctgtaacaggatagtttactgcraagttttatctatgcacatgtgctctggatgtgtaagttgatccaaccatcacaaaagagtcctttgtgtacaaaaaaaaaaaaaaaaaaaaagaattaa

SEQ ID NO: 227933 - DNA, 201 bp, Homo sapiens
ctgggtatgatgatgcacgcctgtaaacccagctactcgggaggttgaggcaggagaattgcttaaaccctggaggcagaggttgcagtgagccaagatcrtgccactgcactccagcctgggagacagagtgagatactatctcaaaaaaaaaaaaaaaggcaagattgcatcactaatcacttctggaatgttatactg

SEQ ID NO: 227934 - DNA, 201 bp, Homo sapiens
aaataacacctcaaagtctgtgaaaattagagtgccactggagccacagctgataaaagtagccaagacccacatgattaatttaacagggttactgactgttacaacgaaagacttaaataggacctagtctctcctatcataataggcaaaatgcccaggattcaataaaaaattatccttcataccaagaaccaagaa

SEQ ID NO: 227935 - DNA, 201 bp, Homo sapiens
gctgggcttggtggcgcacacctgtgatcccagctactggggaggctgaggtaggagaatcacttgaacccaggaggtggaggttgtggtgagctgaggtsaagccattggactcctgcctggacgacaaaagcgagactctgtctcaaaaaaaaaaaaaaagagaagtaactgggacaggattaaaggccaagaaatgct

SEQ ID NO: 227936 - DNA, 201 bp, Homo sapiens
gcttttatcaagggtattctgagggtaatccactctcccaatctagttaagcataatctagaaacctgaccatgtgttccttgaagacactgagtgagtgtacccaatttggcagcttttgtgagagcaaggaccatccttcatttttaattcccttcaggttcatgcctacagtgaaaagtcagtacatcttgctggatg

SEQ ID NO: 227937 - DNA, 201 bp, Homo sapiens
agcttttatcaagggtattctgagggtaatccactctcccaatctagttaagcataatctagaaacctgaccatgtgttccttgaagacactgagtgagtgtacccaatttggcagcttttgtgagagcaaggaccatccttcatttttaattcccttcaggttcatgcctacagtgaaaagtcagtacatcttgctggat

SEQ ID NO: 227938 - DNA, 201 bp, Homo sapiens
tttatgctgaagttagaaaatcaggcccattttaatatatgagatgggggagaaaaaacttcctggctgaaacagcattttcattttatcactgtaatctstctctctccctgcccctacccccgtccccctcttttacagcatctagagcagaattaactgtttgtgaggctcttttagttaggaagctcccagttagca

SEQ ID NO: 227939 - DNA, 201 bp, Homo sapiens
aaagcttttatcaagggtattctgagggtaatccactctcccaatctagttaagcataatctagaaacctgaccatgtgttccttgaagacactgagtgagtgtacccaatttggcagcttttgtgagagcaaggaccatccttcatttttaattcccttcaggttcatgcctacagtgaaaagtcagtacatcttgctgg

SEQ ID NO: 227940 - DNA, 201 bp, Homo sapiens
atttttttttccgttccctaagactcacttatagagtaaaagtgggaaatatttcacttttgggattgtgttttatggagtttaataccctctgagatgcrtgagatgacatgaaaagttcaaacacaaactctgctgataaattccttgtgtgaatgacattaactgaagagctaatatttcttactgggcttttatgct

SEQ ID NO: 227941 - DNA, 201 bp, Homo sapiens
ctgccactacacccggctaatttttgtgttttttttttttttttagtagagatggggtttcaccatgttggtcaggctggtcacgaactcctgacctcagstgatccacttgcctcagcctcccaaaatgctgggattacaggcatgagccactgcacccggccaataattctaaatgtttactcaactaaaactttaaga

SEQ ID NO: 227942 - DNA, 201 bp, Homo sapiens
attgtatttaagcagaaaaaagttttagaaaatgtgattttgtatgccaaaatatgcatattagtagcttttatgagaagtgtccttgaaggaaaatatggtgaatttgtatctggttcaggtcttcttttaataaccagaaaacaaggctgaaacaagcacaaggcagttctatctgtttgaatgatataaattggttgt

SEQ ID NO: 227943 - DNA, 201 bp, Homo sapiens
ttttgcttgtttttttttttttaaggactcaaaacagttacctttgagtactaaagtccttaagatggaaaacgagatgatatttattatgccactgatawgtttcaggaagagcttgtggagagagcagacaaaacaaatggtaaatcttgttcttagaaagaaagagctatctgtccccattacagccagctgtcatgc

SEQ ID NO: 227944 - DNA, 201 bp, Homo sapiens
acctattattattattatcattgactttactacggctttggtgttatgtcacagacaaaagtttgcaaaccacttttttttttgcttgtttttttttttttaaggactcaaaacagttacctttgagtactaaagtccttaagatggaaaacgagatgatatttattatgccactgatatgtttcaggaagagcttgtgga

SEQ ID NO: 227945 - DNA, 201 bp, Homo sapiens
gaatctaaatactataatgagttgagtctcactattgtcaatttaacaatataaaaacaaattctttattcattgaaaattgtgcaccattcctttctctmtaagtcatatttcattcatttgtctcacagaattttatcaatgtaatatgcttgaaatattttatgcatcatcatatagtctcagaacattaaatttttt

SEQ ID NO: 227946 - DNA, 201 bp, Homo sapiens
tcatatacttctttaggaatcagacagatctggtagataagtcaggttatgtaacaagtcaacttcaaaggtctgttcttcactataaattggaagtctctgtctctgtccattgctcctcttcacattttctgagtgttcctccctgagacatctctgagaggtctcctaaaagctagattttagacaaatgcaaatcta

SEQ ID NO: 227947 - DNA, 201 bp, Homo sapiens
caagtagttttttgagaagcaagtatcaaagcactcagctgaaaaatgcaagtttggattattattaacttatttaaagaaaagtgatttggggaagtacragaaatacatcattggtttaattttggctgctactgtgggtcagtagccaactaagaggagaaactgggctgtaaagaagaacttcacctgcagaaaggt

SEQ ID NO: 227948 - DNA, 201 bp, Homo sapiens
aggtagcccaaccccccgtgtcctcatatgagaggacgctgggaatagagtgatgaagaagattgtccctggaacacaggtttcctgtttcctttatagcsataacattgggctaatttaggcctaactgagtgcgtgaatcatggagtatttctgatcgaggtctcgaaaagaaaactcctttaccttccaagtagtttt

SEQ ID NO: 227949 - DNA, 201 bp, Homo sapiens
atgcttaacccaaaaattccaaattattttggaggcaaacttttattatcattctatggaggtagcccaaccccccgtgtcctcatatgagaggacgctgrgaatagagtgatgaagaagattgtccctggaacacaggtttcctgtttcctttatagccataacattgggctaatttaggcctaactgagtgcgtgaatc

SEQ ID NO: 227950 - DNA, 201 bp, Homo sapiens
tctacaattaacatgttataaaatgtttgctttgtacgtagtagctattctcacttgttttgttttcttctctacaattgtcttcagtgttttctcaacartttggggatttcaacaataagcaaaaaaagtaaaatggggaaggcactgggaaatgtgctctagtgcctggtggccaagtgtggctcacactgatggtat

SEQ ID NO: 227951 - DNA, 201 bp, Homo sapiens
gtagagaaacacttagcagagattagatggggtgtgttctgatatatatggaatagaagattttagttacataattgaaacatgaaaaattaaaggcaatyataaagtcctaaagtgggaagaaatcttgagtggtttttatgtcaaaccccttccttaactgggtaatgatgaccaggtctcaaccttaatggtaattga

SEQ ID NO: 227952 - DNA, 201 bp, Homo sapiens
agtccttactgaaggctctacctagagttgtactttcagccctccaagttatttctccagcaccaactttgctgtattaaatctcccctgcttaaaatatstagaatgggttctgattcttgtacttgaacccaactgacacattgatgctttcatgagcaaagagaaataatcccatacttagcttcactgagccactta

SEQ ID NO: 227953 - DNA, 201 bp, Homo sapiens
gcataagcacaagttgggttatttttgttgcaacagcacggtatattttttctacttttcatttaaaacttgactcactttgctgcccgtgatcttcctakttagaaatcacttcagcattatctcataaattttccattgacgagcttgtgtgctttttgtcaagtctttgtataagctgttttggtggcctaaacacca

SEQ ID NO: 227954 - DNA, 201 bp, Homo sapiens
agggaatagggaagcctgaggagagggaaaaatggctagtcagtgcagcagtcagaacacacaaacatttactgataaagttcaccatcttatattgggcyccataacacttacaataggaacatctaagatcactgatcacagatcaccacaacagacataataataatgaattagtttgaaatattgggagaattacca

SEQ ID NO: 227955 - DNA, 201 bp, Homo sapiens
tccttacaagttccatgaggtcaatgggatattgttctgggagtccttactgaaggctctacctagagttgtactttcagccctccaagttatttctccarcaccaactttgctgtattaaatctcccctgcttaaaatatctagaatgggttctgattcttgtacttgaacccaactgacacattgatgctttcatgagc

SEQ ID NO: 227956 - DNA, 201 bp, Homo sapiens
tttgctttggacctcagttctctgctgaatctaaaaaagtcattaatttccagttggttcatcttttttccttgtcgtaaatatttttcttgttgcaaatkgcagtgaagcagtgtcattggctgggataatatccgagatttgtcatctcatgccgggaaaattaaggacagggacacacacacacaaggagtgagtttg

SEQ ID NO: 227957 - DNA, 201 bp, Homo sapiens
ttgaacccgggaggcagaggttgcagtgagctgagatcgcaccattgcactccagccctagtgacagagtgagactatgtttcaaaaaaaaaaaaaaaatmtgctgtttagtgtagccaccttcattagttatcttagctagatcttctggataacttgctgcagcatctatataagcacttcctgctttgccttttatgt

SEQ ID NO: 227958 - DNA, 201 bp, Homo sapiens
gctccaagacagcttcaggaggagtggctccttacaagttccatgaggtcaatgggatattgttctgggagtccttactgaaggctctacctagagttgtrctttcagccctccaagttatttctccagcaccaactttgctgtattaaatctcccctgcttaaaatatctagaatgggttctgattcttgtacttgaacc

SEQ ID NO: 227959 - DNA, 201 bp, Homo sapiens
tttatgtaatattctaaagcttttgttgtcatttcaacgatgttcataacatcttcttcaggagtagattttacctcaagaaatccttttctttgcttacmcgtaagaagcaactcctcactcattcaagttttattgtaaaattacagtaattcagtcacatcttcaagctttacttctgattctagttgtcgctatttc

SEQ ID NO: 227960 - DNA, 201 bp, Homo sapiens
tctgtagtacatggattatagcctattcatttatgcattaaacaatttattgaatgcttggtatgtgtttcatgctgctgtaagtgttggggatacagacrtgaaaaagacaggatccttaccttcacagagcttgcgtcttagtagggaaaggagataaggagcaggcaaataagtaaattggcaagataatttcagagt

SEQ ID NO: 227961 - DNA, 201 bp, Homo sapiens
tttgagccttcagtaagtcataatctttctgctggtggagggtcttgccttgatatttatggctgccgactgatcagactggtggttgttgagggcagaartggctgtggcaatttgttaaagtaagaaaacagtaaagttttcaacatcagtggcttcttgctttcacgaatgacttctctgttgcatacagcactgttt

SEQ ID NO: 227962 - DNA, 201 bp, Homo sapiens
gtagcatgatctcagctcactgcaacctccacctgccaggctcaagtgattctcatgcctcagcctcctgagtagctgggattacagacgtgcaccacaayacctgtctaatttttgtatttttaatggagccatggggtttcaccatgttggccaggctggtctcaaactcctggcctcaagtgatctgcctgccttggc

SEQ ID NO: 227963 - DNA, 201 bp, Homo sapiens
gctaatagtagggtacagtgactggcgcatagtagatgtaacactgaatcccaaaagactaaccagttagtagattcactgtgtatggccacacacacgtygaacagctctctctttctcatccccttttaaataaactgctaagctggcctaactgggaagaacataagcattttattggtaaggtttctgtagtacatg

SEQ ID NO: 227964 - DNA, 201 bp, Homo sapiens
gcaataaaacaaggcacacaaacttttttgtttcccagtgaatataaaagttatgtttacagtctatagtagtctagtatgcaatagcattataaaaaaaatatgttatcttaatttaaaaattttttttgctaaaaatactggtgatcatttgagccttcagtaagtcataatctttctgctggtggagggtcttgcctt

SEQ ID NO: 227965 - DNA, 201 bp, Homo sapiens
gggtttcaccatgttaaccaggatggtctcgatctcctcacctcgtgatccgctcgcctcggcctcccaaagtgctgggataacaggtgtgagccaccgcrcccggcccaatgataaaatttatcattgatcatgtttaagtgtacagttgagaagtgttaagtacattcacattgttgtgcacccgtctccaaaacactt

SEQ ID NO: 227966 - DNA, 201 bp, Homo sapiens
tgaatattgcaataaaacaaggcacacaaacttttttgtttcccagtgaatataaaagttatgtttacagtctatagtagtctagtatgcaatagcattayaaaaaaaatatgttatcttaatttaaaaattttttttgctaaaaatactggtgatcatttgagccttcagtaagtcataatctttctgctggtggagggt

SEQ ID NO: 227967 - DNA, 201 bp, Homo sapiens
cccaggaggtgaagggtgcagtgagctgagattgcaccattgcattccagccggggcagtaagagcgaaactctgtctaaaaaaaaaaacaaaaaaaaaaacacaaaacataatttgaccaaatagtctatctgaatattgatgttcagcaaggggatagtatatgtttgtaaaaagccattttcttagtattatcatcct

SEQ ID NO: 227968 - DNA, 201 bp, Homo sapiens
gaatcacttgaacccaggaggtgaagggtgcagtgagctgagattgcaccattgcattccagccggggcagtaagagcgaaactctgtctaaaaaaaaaaacaaaaaaaaaaacacaaaacataatttgaccaaatagtctatctgaatattgatgttcagcaaggggatagtatatgtttgtaaaaagccattttcttag

SEQ ID NO: 227969 - DNA, 201 bp, Homo sapiens
gcctgtaatcccagctactcaagaggctgaggcgggagaatcacttgaacccaggaggtgaagggtgcagtgagctgagattgcaccattgcattccagcyggggcagtaagagcgaaactctgtctaaaaaaaaaaacaaaaaaaaaaacacaaaacataatttgaccaaatagtctatctgaatattgatgttcagcaa

SEQ ID NO: 227970 - DNA, 201 bp, Homo sapiens
taatttgttttcaagaaccaatacaaaagaaacagtgacaaaaacgatgaaaggtgaggcttctacaaggccacaggatagcttactcatttgacaaaagkttagatggtgagcttcctgaagccttaggccaggaagtggttgaccctcaaaaactaaccagagtgggatgggtaaatggacaaacatatctctcagcat

SEQ ID NO: 227971 - DNA, 201 bp, Homo sapiens
aagagagagcttgtgcagggaaactcctgtttttaaaaccatcagatcttgtgagacttattcactatcaggagaacagcatgagaaagacccaccccccmtgattcaattgtcttccaccaagtccctcctacaacacaagggaattatgggagctacaagatgagatttgggtggggacacagagccacaccatatcac

SEQ ID NO: 227972 - DNA, 201 bp, Homo sapiens
tattagtcctttttactgctgctgataaagacatacctgagactgggcaattcacaaacaaagacgtttatttgacttgcagttccacgtggctggggaggcctcacaatcatggcagaaggtgaaaggcaaggaggagcaagtcacatcttatgtggatggcagcaggcaaaaagagagagcttgtgcagggaaactcct

SEQ ID NO: 227973 - DNA, 201 bp, Homo sapiens
aaatgctatataaatagttgtattgtttagggaataatgacaataaaatgtctgtacatattcagtatagatgccatttttttttcctgagtgtattagtyctttttactgctgctgataaagacatacctgagactgggcaattcacaaacaaagacgtttatttgacttgcagttccacgtggctggggaggcctcaca

SEQ ID NO: 227974 - DNA, 201 bp, Homo sapiens
tttccttcccatttaagtagtacctcctagtccatcaagtcttcttgacttgagtcttctttgtaaactcatggggaggactccatcttgggcatgctgcrtttagtaacattcatggatattcttgatttaaggtactatggggagtgagggaaaatggttaaaaatctgggtgcccatcccaacaggacttcctggggc

SEQ ID NO: 227975 - DNA, 201 bp, Homo sapiens
agatcacctgagcctggggaggtggaggctacagtgagctgtggctgtgccattgccctccagcctggatgacagagaccctgtctcaagaaaaaaaaaaagaagaaaaagaaaaaatcaagaggggaaaaaaattgataatttctgttgaaatgaacaggtgcaataaaaattaaaataacaaaagagatgattaaaaat

SEQ ID NO: 227976 - DNA, 201 bp, Homo sapiens
atctcctaatgctatccctcccacccccacaccccacaacaggccccggtgtgtgatgttccccttcttgtgtccaagtgttttcattgttcagttcccayctgtgagtgagaacatgtggtgtttggttttttgtccttgccatagtttgctgagaatgatggtttccagcttcatccatgtccctacaaaggacatgaa

SEQ ID NO: 227977 - DNA, 201 bp, Homo sapiens
tttctcattgtgtgtgtgtatgtgtgtatgtgtgtgtgtgtgtgtgtgtatttatcttaaatcctaatggtgttgtactttaagataatgctttttttttwttaattttttttttattatactctaagttttagggtacatgtgcacattgtgcaggttagttacatatgtatacatgtgccatgctggtgcgctgcaccc

SEQ ID NO: 227978 - DNA, 201 bp, Homo sapiens
gtgtaaatttatttttaaaaaatgaaatactttaagagtttgatgataattttaatttaaaaatttatttattttaaatgacatttattgatatataggayatgttccattttcacaaataattttggggaaagaaataaaaatacttagcaaaaaatactttaaatcacatatttaagtgtgattttgtagggagaatat

SEQ ID NO: 227979 - DNA, 201 bp, Homo sapiens
actgtacctggcgtatgtgtgcatttttgtttaatttgttatgctgagtattgtttttaaaattaaaatgatttttctcattgtgtgtgtgtatgtgtgtrtgtgtgtgtgtgtgtgtgtgtatttatcttaaatcctaatggtgttgtactttaagataatgcttttttttttttaattttttttttattatactctaag

SEQ ID NO: 227980 - DNA, 201 bp, Homo sapiens
cagagtcagggaagtcgaggctgcagtgagccgaggtcactcccctgcactccagcctggacaacaaagggagatcctgtcttaaaaaaaaaaaaaaaaaagggtcttttcagttcagttgggaaatgtatgtttatctaataaaagatgctatgaaaattggcttttcatcagtaagttgtaaatgttagaccactattt

SEQ ID NO: 227981 - DNA, 201 bp, Homo sapiens
ctgtctaggcagtaggcaaggagaacccactgggcaattacagtggcacatgcctgtagtcccagctactttggaggctgaggttggaggatcaccagagycagggaagtcgaggctgcagtgagccgaggtcactcccctgcactccagcctggacaacaaagggagatcctgtcttaaaaaaaaaaaaaaaaaagggtc

SEQ ID NO: 227982 - DNA, 201 bp, Homo sapiens
atggtggataagctttttgttgtgctgttggattcagtttgccagtattttattgaggatttttgcatcaatgttcatcaaggatattggtctaaaattcycttttttggttgtgtctctgccaggctttggtatcaggatgatgctggcctcataaaatgagttagggaggattccctctttttctattgattggaatag

SEQ ID NO: 227983 - DNA, 201 bp, Homo sapiens
cctggccagaacttccaacactatattgaataggagtggtgagagagggcatccctgtcttgtgccagttttcaaagggaatgcttccggtttttgcccawtcagtatgatattggctgtgggtttgtcatagatagctcttattattttgagatatgtcccatcaatacctgatttattgagagtttttagcatgaaggg

SEQ ID NO: 227984 - DNA, 201 bp, Homo sapiens
catctgcaaacaggaacaatttgacttcctcttttcctaattgaataccctttatttcctcctcctgcctaattgccctggccagaacttccaacactatrttgaataggagtggtgagagagggcatccctgtcttgtgccagttttcaaagggaatgcttccggtttttgcccattcagtatgatattggctgtgggtt

SEQ ID NO: 227985 - DNA, 201 bp, Homo sapiens
ataaattaccttgggcagtatggccattttcatgctattgattcttcctactcatgagcatggaatgttcttccatttgtttgtatcctcttttatttcaytgagcagtggtttgtagttctccttgaagaggtccttcacgtcccttgtaagttggattcctaggtattttcttctctttgaagcagttgtgaatgggag

SEQ ID NO: 227986 - DNA, 201 bp, Homo sapiens
tggtattccatggtgtatatgtgccacaatttcttaatccagtctatcattgttggacattttggttggttccaagtctttgctattgcgaatagtgcctsatatggtatggttttaggtctaatgtttaagtctttaatccatcttgaattgatttttgtataaggtgtaagaaagggatccagtttcagctttctacct

SEQ ID NO: 227987 - DNA, 201 bp, Homo sapiens
accacacctggctaatttgtttgtatttttagtaaagacagggttttgcaatgttggtctcgaactcctgacctcaggtgatccgcctgccttggcctccygaagtgctgggattacaggcatgagccaccgtgctcagccaaggccacattttgaatctagaaccacaatgctcaaagggtgcttcacagactcctggtg

SEQ ID NO: 227988 - DNA, 201 bp, Homo sapiens
agatgctggaaaggatgtggagaaatagaaatgcttttacactattggtgggagtgtaaattagttcaaccaatgtggaagacagtgtggcaattcctcarttatctagaactagaattaccatttgacccagcaatcccattactgggtatatacccaaaggattataaatcatgctactataaagacatatgcacatgt

SEQ ID NO: 227989 - DNA, 201 bp, Homo sapiens
ccctgaggacaggtggagggaagggttggaacctgcttagagtaagattgtttcagtcctggagcactagcgattccagttcaatctcttctaggaatgaycctggcaagaaatccaagggagagcaggagaggcaagagggaggtaaaacaaatgcagagagtgtgggagaggtagaacaacaaaaaatggtggggtgga

SEQ ID NO: 227990 - DNA, 201 bp, Homo sapiens
agggagagcaggagaggcaagagggaggtaaaacaaatgcagagagtgtgggagaggtagaacaacaaaaaatggtggggtggagagagaggggaatattktgttttacagccacttgtgtaagtaaaattagtctctgcctgtcagttactacatcatcagaaagtggcaggtctgattttcactggatgtagtctacca

SEQ ID NO: 227991 - DNA, 201 bp, Homo sapiens
gaagagtgcacacaatgagaaggaactttgtagagactagcaggcgtccagccaagccttctacagggtgggatgcaggttcccaccttacccaatggagrgtgagcaggtgtcactgtggggccagcacagagagggcacgtgaccatgggttctcactgcttggcagatcacccaaaacacactccgagccacagcctg

SEQ ID NO: 227992 - DNA, 201 bp, Homo sapiens
agtagagatagggtgtcaccatgttggccaggctggtctcgaactcctgacctcaggtgatccacctgcctcagcctccgaaagtgctgggattacaggcstgagccaccgcgcccggcccagctctccatttttcatagagtagtatttgttccttgtggtttatctgcattttggctgaaggatcgagtccagaatctg

SEQ ID NO: 227993 - DNA, 201 bp, Homo sapiens
aaataatacaaatatttaaaaatataaaaaagcttatagaaaaaggatataaagaaagaaaatatttttgtgcagctgtacgatgtgtttgtgttttaaaytaagggttttttgcatgtgtgtgtgtgtgagtgtgtgtgtgtaagttttattgagacagtcttactctgttgcccaggctggagtgtagcggtgtgatct

SEQ ID NO: 227994 - DNA, 201 bp, Homo sapiens
gtaaatgtggtatagattaaatcagtgttcgttgattgttcatttcagccgtgttcttccttcttccaggaaatcactgaacagaagtaggtgaaaaaaayacaggtgtcacaaaatttgaagacagccctcaaattccaagggaaatgtaaataatgaaaacataacacacttgaatcaagctatttagctggccagatt

SEQ ID NO: 227995 - DNA, 201 bp, Homo sapiens
attactcacgtgcttgtggtgatgctggtgtaaacaaatctactgtgctgccagctgtatagcacatacaattacgtacagtacataatacttgataatgrtaacaaatgactgttactggtttatgaactatctactgtgctttttatcattattttagcatgtacttctacttattaaagaacagttaactataaaaca

SEQ ID NO: 227996 - DNA, 201 bp, Homo sapiens
gtgtgctaatatcatagcgtcacgaattactcacgtgcttgtggtgatgctggtgtaaacaaatctactgtgctgccagctgtatagcacatacaattacrtacagtacataatacttgataatggtaacaaatgactgttactggtttatgaactatctactgtgctttttatcattattttagcatgtacttctactta

SEQ ID NO: 227997 - DNA, 201 bp, Homo sapiens
tcacttgaggtcaggagttcgagaccagcgccaatgtggtgaaacccagtctctactaaaactacaaaaaattcgctggatgtggcggctcctgcctgtartctcagttacttgggaggctgaggcaggagaatcatttgaatcctggaagcagaggtggcaatgagccgagatcgcgccactgcattccactgcattcca

SEQ ID NO: 227998 - DNA, 201 bp, Homo sapiens
agcagaactgcttgaacctgggaggtggtggttgcagtgagtcaagattgcatcactgcactccagcctgggtgacaggctgtctcaaaaaaaaaaaaaamaaaaaaaaaaaacagacagttaatagtaactattagcaaggatgtggagaaattagaactctgttacactgccattggtaagtaaatggtgcagctactt

SEQ ID NO: 227999 - DNA, 201 bp, Homo sapiens
cttgggtgagaacacctatgacactttgttgatgaggtgattgtttcaccttaggacaactgttgcatgccaattgtgtgtgtgtgtgtgtgtgtgtgtgkgtatgtgtgtgtgaaaacacttcaaaattgatttaaaagatgtaaattttaaattggtcaagtatctaatatgccccagatttagtaaataaacaataaa

SEQ ID NO: 228000 - DNA, 201 bp, Homo sapiens; identical to SEQ ID NO: 27581

SEQ ID NO: 228001 - DNA, 201 bp, Homo sapiens
atagaaataaacaagatggacacgatacatctaggataccatgttaaaatggtttctaagactgcattcagccttagaagaaaagaacgttgtgatcacttaatgatgtctgtcacaggcccaggagagtgaaacaatggcgcttgcattgtatattttccatccctgcttacatcttgaaaggaagtcccaatgctgaaa

SEQ ID NO: 228002 - DNA, 201 bp, Homo sapiens
ccaaactcttctccgactgcccccagctgagttcctctcggcgttcagacattccttctcctctctctttctctgttgtgtcatttgtctgcttttctcctcttctccttgtctgctcctggagcctggggtccgggatttatatgggtacaggataagggagtgtggcatgccaaaaggcaaccgtttgggtacaaaaac

SEQ ID NO: 228003 - DNA, 201 bp, Homo sapiens
caattgctgagagatccgtgactggctttatcattgactggcgaatattctggcaaaagcgtgtcactctttgggaactgtgctcaggggctgctttgaarctcctctctgcttcattcaccttggaccacgttgcaccctgcctcggctttaatagcgtgtcactttccccctccttgtacagcgaagccacagggacac

SEQ ID NO: 228004 - DNA, 201 bp, Homo sapiens
tgtgtggcggaaccaaaggccgctgctgtcgctcctgaagccctgtgtgtggtaattgggtctacctcagaaactcatcctttcattttcaaaataaatgygttcatccagtgttacgtttcccaccccacctccttcaattatctctcccaaatcttgaatcataaacttctggaaagccatgtgaataatttagatgct

SEQ ID NO: 228005 - DNA, 201 bp, Homo sapiens
ttgggtatcaagtattgtatttttttatttattcagcaaaaatttattgggcattttgtgtttcatggtgtgctaggggctggggatacaaacatgataamgtcttagcctctgccatcagaaagcttgcacactatctaattatgattgaatgctacctagactactgttgagataagctcagtgagagccctgagaagg

SEQ ID NO: 228006 - DNA, 201 bp, Homo sapiens
ccaggtggtttctcaataaatattgggtgattgagtaaaggaacattattttcaatgaaaatatcttcccatttatgcaatagtgaaaaaatagcttacttgaagtttatctccaatgtatctaaatttctatctctttagtatttgggagatctcaaatatattaataacacatacttgaataaaatatacttactaatg

SEQ ID NO: 228007 - DNA, 201 bp, Homo sapiens
cccaggtggtttctcaataaatattgggtgattgagtaaaggaacattattttcaatgaaaatatcttcccatttatgcaatagtgaaaaaatagcttacttgaagtttatctccaatgtatctaaatttctatctctttagtatttgggagatctcaaatatattaataacacatacttgaataaaatatacttactaat

SEQ ID NO: 228008 - DNA, 201 bp, Homo sapiens
gcccaggtggtttctcaataaatattgggtgattgagtaaaggaacattattttcaatgaaaatatcttcccatttatgcaatagtgaaaaaatagcttacttgaagtttatctccaatgtatctaaatttctatctctttagtatttgggagatctcaaatatattaataacacatacttgaataaaatatacttactaa

SEQ ID NO: 228009 - DNA, 201 bp, Homo sapiens
ggcccaggtggtttctcaataaatattgggtgattgagtaaaggaacattattttcaatgaaaatatcttcccatttatgcaatagtgaaaaaatagcttacttgaagtttatctccaatgtatctaaatttctatctctttagtatttgggagatctcaaatatattaataacacatacttgaataaaatatacttacta

SEQ ID NO: 228010 - DNA, 201 bp, Homo sapiens
agataaaggaaggaagaaagaaaagaagggagaaaggcaagcaggaaggaaggaaaaaaggaaagcgggaaggaaggaagggaaaagaaaaaaagaaagargcctgcataattcattccagctcccacgtttctctgcttcccatttacagcaaagaacatcagaggagttgcctgcacatgttctctccatcccactttc

SEQ ID NO: 228011 - DNA, 201 bp, Homo sapiens
tctgcatggttatgccttgccatgggacttttgtcctcataggctacaaactgactactccatccctgggcatcacaggcagaagaaagagggaaggatcwtgggcaaaaggcaaacactaacaaactgtgttatctgagtcttcccttttcaacagacttttttggaagccctgcctatcaaattcttattgatcttatt

SEQ ID NO: 228012 - DNA, 201 bp, Homo sapiens
tgagcaagaatatccagaggatattgggcagccacgcgagacaaatttcgctctgatccctttcttggtaccaaatatcaataatactcctttttttttttctccatgtttcaactttcaagttataataccttgctctgacttaacatactctaacttacccttgaacaaacagtccatcagtaattctatccaggaaac

SEQ ID NO: 228013 - DNA, 201 bp, Homo sapiens
attatggtaggactgagtgctttgcaaaatagactttagtcttacacttggcctgattatttgcataaagtgcagcaagaataactatttctacataggcyttttggattggcactgatggaaatgttttccacaaggaatcacagataagaccttttaaagctgagcctagccatgggtttgcatcctcaaatacctgtg

SEQ ID NO: 228014 - DNA, 201 bp, Homo sapiens
tatagcatagtttttggcatatggtaagctcattggtaaaagaatagtttaatgagtcaataagtgaatctagcacgtgtagatgctaaagcttgaaagtcagcaacactactattttttaaagtattaaactattgaaaatgggctaacgtgtgcattctccacttatctgctttggccttctccctcctggagaatgga

SEQ ID NO: 228015 - DNA, 201 bp, Homo sapiens
tgccaagacttgtctttcatctttttattattgccattttaataggtgtgagatgaaatggataaagaaaatgtgatatatatatatacacacacacacamaatgaaatattcttcagccttaaaaatgagggaattttgccatttttgaccacatgggtggaccaagcagacattatgctaagtcagctaagctagcaaa

SEQ ID NO: 228016 - DNA, 201 bp, Homo sapiens
agaagctgacaaaataatatatcacacaataaggagtaaaatatttaaggatggagacaccctttctcctggccaacttctgttttgttttttttttttttctttttgtcttatttccctctttcctgcttcttttcctccctttcttcttttaatttgccttcctccctttcttcttttaatttaactcactagattgaa

SEQ ID NO: 228017 - DNA, 201 bp, Homo sapiens
gtagctagaagaagctgacaaaataatatatcacacaataaggagtaaaatatttaaggatggagacaccctttctcctggccaacttctgttttgttttktttttttttctttttgtcttatttccctctttcctgcttcttttcctccctttcttcttttaatttgccttcctccctttcttcttttaatttaactcac

SEQ ID NO: 228018 - DNA, 201 bp, Homo sapiens
aatcctcccaccttagcttcccgagaaaccagaactacaggcacgtgctactggctgtttcttcacaacatttttgttaattgattaatatgtaaactttktaaatgtttacttttatttaaagatgccttatttaacatatagctaattcattaacactgaagtcatgggacacagcctgagctgtttaacctgagcctg

SEQ ID NO: 228019 - DNA, 201 bp, Homo sapiens
cacacaaatatgtaaaatatatatacacatatacattctatgtatatatatagttgatcctgatttttcataggaaattgttgtataaagtctccacaaaygctgaattagcaaataatgaaccattgcccctaggggaaatccagggttgagttcctgagagcctctgattacaatattttttttgtttttaagagatag

SEQ ID NO: 228020 - DNA, 201 bp, Homo sapiens
gcaaatgtgtatgtgtatacatgtatttatttgcatgaagtgtcaccacactgaacaattctatggagtaggaatattcacttaggctatactgtgaatgycaacaccctgtctcctgccctggagatgcatagcacagggctgtatatatgtacatacctccctttgtggcaaccctcagcccctagtatccacgtcttc

SEQ ID NO: 228021 - DNA, 201 bp, Homo sapiens
ctctcctctgtctctctctctctctctctctctatatatatatatatatatacacacacacacactctctctctatatatacatatctatatatacatatwgatattcaactctcatctctctctctatatatgtatatattttttttcaactctcagttttctgcctgtgtttagtttaccttagggaatgtctttagcc

SEQ ID NO: 228022 - DNA, 201 bp, Homo sapiens
tctctctctcctctgtctctctctctctctctctctctatatatatatatatatatacacacacacacactctctctctatatatacatatctatatatayatatagatattcaactctcatctctctctctatatatgtatatattttttttcaactctcagttttctgcctgtgtttagtttaccttagggaatgtctt

SEQ ID NO: 228023 - DNA, 201 bp, Homo sapiens
tttattaattcatactgaccctgggcagagctgtctatctcaacttaatggctatttataatatatggatggcattcccctgccattaatgtttaatgaaytggctcctgatccaatagagtctaataaaggtaatcactagaatacattgtctttctgcagtgccctagaaacttcttttattttccctattgtatacct

SEQ ID NO: 228024 - DNA, 201 bp, Homo sapiens
ttcaggaaagtccattttactccttttcccaaagagatggatgttacctatgtgtccgtgtggtcatgcactttagaatccttctcctctcatgggatggsagtttccttacaatttgtttatccctcatgtatttatcgaacagtgctaagtgctgggagcatggcaaggcactgaactggctctgttgtctactgcatt

SEQ ID NO: 228025 - DNA, 201 bp, Homo sapiens
cattttactccttttcccaaagagatggatgttacctatgtgtccgtgtggtcatgcactttagaatccttctcctctcatgggatgggagtttccttacmatttgtttatccctcatgtatttatcgaacagtgctaagtgctgggagcatggcaaggcactgaactggctctgttgtctactgcatttcaagtcaaaat

SEQ ID NO: 228026 - DNA, 201 bp, Homo sapiens
gaaagaaagaaaaccttaaatactgacaggatgcagacttatttacatgtagagtagaagaaaaacatttttaaaaaatctaggctgcttcttacagaccrtatccctagtggatcaattctttttttgtaatctacatttgagatgtgttaaaaacaaaattgggtcctggaattagataatggtgatggatacatgttt

SEQ ID NO: 228027 - DNA, 201 bp, Homo sapiens
aaaaacatttttaaaaaatctaggctgcttcttacagaccgtatccctagtggatcaattctttttttgtaatctacatttgagatgtgttaaaaacaaarttgggtcctggaattagataatggtgatggatacatgtttttctgaatatactgaaaagcattgaattacatattttagaaggataaatgttatggtatg

SEQ ID NO: 228028 - DNA, 201 bp, Homo sapiens
tcagttctttccagatttccagtgaaaggaattttagcttgcttatgaatgccatctaattagtttatttctttgttactggagaacatgaacagaggccrctatttactcaagtgtgcactctccaaaggtctttcttcattcaggatgacttgatcctgagggttctgccatctgttacctctaaacagctagccagct

SEQ ID NO: 228029 - DNA, 201 bp, Homo sapiens
ttgtctattgaattgcctttgctcctctgtccagggcaagttgtttatgtttgtattggtctatttctggatttcctcttctgttcttttgattcacttayctattctgtcaccagtaccatgctgtcttgatcgctgtagctttgtagcaagtcttaaagttgagtagtatcactccttcaactttgttcttcaatattt

SEQ ID NO: 228030 - DNA, 201 bp, Homo sapiens
tactcgtgtttccagggatcatccaccaaataaactacttgcactctcatccttgcttcagggtttttgtctggggcaattgagactaaaaaaaaaaaaaaagcgtgtatcatatttgtatcactctacatgaagaaaaggattgttattgcttggtagtgagattaactggtgatctaaattttctcctatgtgtttttc

SEQ ID NO: 228031 - DNA, 201 bp, Homo sapiens
ttcttcaatattttattggctattctggatcttgagcccttctctatgaactttacaatcagctttttgatattcacagaataactttctgggattttgaytgaaactgcgttgaatgtataatcaagttgggaagaaccgataacagtatcaagtcttcctatccatgaacacagaatatctattcgtttatttagattt

SEQ ID NO: 228032 - DNA, 201 bp, Homo sapiens
cacctggccaaccttcgtattcttgttgtgctctctctctcctctgtctctctctctctctctctctctatatatatatatatatatacacacacacacamtctctctctatatatacatatctatatatacatatagatattcaactctcatctctctctctatatatgtatatattttttttcaactctcagttttctg

SEQ ID NO: 228033 - DNA, 201 bp, Homo sapiens
gcacctggccaaccttcgtattcttgttgtgctctctctctcctctgtctctctctctctctctctctctatatatatatatatatatacacacacacacactctctctctatatatacatatctatatatacatatagatattcaactctcatctctctctctatatatgtatatattttttttcaactctcagttttct

SEQ ID NO: 228034 - DNA, 201 bp, Homo sapiens
gcttgagccacagcacctggccaaccttcgtattcttgttgtgctctctctctcctctgtctctctctctctctctctctctatatatatatatatatatwcacacacacacactctctctctatatatacatatctatatatacatatagatattcaactctcatctctctctctatatatgtatatattttttttcaac

SEQ ID NO: 228035 - DNA, 201 bp, Homo sapiens
ggcttgagccacagcacctggccaaccttcgtattcttgttgtgctctctctctcctctgtctctctctctctctctctctctatatatatatatatatayacacacacacacactctctctctatatatacatatctatatatacatatagatattcaactctcatctctctctctatatatgtatatattttttttcaa

SEQ ID NO: 228036 - DNA, 201 bp, Homo sapiens
caggcttgagccacagcacctggccaaccttcgtattcttgttgtgctctctctctcctctgtctctctctctctctctctctctatatatatatatatayatacacacacacacactctctctctatatatacatatctatatatacatatagatattcaactctcatctctctctctatatatgtatatattttttttc

SEQ ID NO: 228037 - DNA, 201 bp, Homo sapiens
aaatgctgggattcaggcttgagccacagcacctggccaaccttcgtattcttgttgtgctctctctctcctctgtctctctctctctctctctctctatmtatatatatatatatacacacacacacactctctctctatatatacatatctatatatacatatagatattcaactctcatctctctctctatatatgta

SEQ ID NO: 228038 - DNA, 201 bp, Homo sapiens
caaaatgctgggattcaggcttgagccacagcacctggccaaccttcgtattcttgttgtgctctctctctcctctgtctctctctctctctctctctctmtatatatatatatatatacacacacacacactctctctctatatatacatatctatatatacatatagatattcaactctcatctctctctctatatatg

SEQ ID NO: 228039 - DNA, 201 bp, Homo sapiens
ccaaaatgctgggattcaggcttgagccacagcacctggccaaccttcgtattcttgttgtgctctctctctcctctgtctctctctctctctctctctctatatatatatatatatatacacacacacacactctctctctatatatacatatctatatatacatatagatattcaactctcatctctctctctatatat

SEQ ID NO: 228040 - DNA, 201 bp, Homo sapiens
cccaaaatgctgggattcaggcttgagccacagcacctggccaaccttcgtattcttgttgtgctctctctctcctctgtctctctctctctctctctctctatatatatatatatatatacacacacacacactctctctctatatatacatatctatatatacatatagatattcaactctcatctctctctctatata

SEQ ID NO: 228041 - DNA, 201 bp, Homo sapiens
tgcttaccttccacttcccctcctttttacatatgtctttttatgaggacactgtccattactgatagactatgttagcattcactttgcttttttaaagrgagaagaagatttagaaaagtggggcttaactggggattggactgttctcattcatactggccctcacattattcagagttgacaatttgttaacacctg

SEQ ID NO: 228042 - DNA, 201 bp, Homo sapiens
gctggactgtgtttaatgcttgctgtagctttaagtgccagatgcttctgtgtgctcgtattttttgtcttccctgttgtctttgggctttcctaagagcwccttattcaatagagtctgtgtgtttcacctctcagttgtaatcaccaaagccctcttcacgtggtgatgaggtctcaggaaggataattgttgtatatt

SEQ ID NO: 228043 - DNA, 201 bp, Homo sapiens
aatagagtctgtgtgtttcacctctcagttgtaatcaccaaagccctcttcacgtggtgatgaggtctcaggaaggataattgttgtatattatgattacmtctcagttttcttagtgagcctgagtttctaggctgcgatcttctgaaatgttctgagcccttttttcgtcccctgacattagacaggaaggctaaaaga

SEQ ID NO: 228044 - DNA, 201 bp, Homo sapiens
ggattaataggcaaaagaaagagaaaggagaacagctttctctcttgagagagaaaagggtgcctgaatgagacttccagcctgtggcagagtgcattggrgtttataggcaggcttgaggaggcggtgtctgatttacatagggcccaaagattggttggacgaggtgtgatgtttacataacatgcgaggaagctggat

SEQ ID NO: 228045 - DNA, 201 bp, Homo sapiens
aggaaaaccttacggaggactccataccctcactgtctgctaaataattcctttttaacgcctatatctgcagcttccaacttctttatatgtccctcacraaacatttttatgcaaatggttaaaagagaaaaccagatccagaaattaggaccattaatatgaaaattgaaattttaaatgttttcactgctttcttgc

SEQ ID NO: 228046 - DNA, 201 bp, Homo sapiens
ctcagtctgtgagttcacatgagatctggctgtttaaaagaggctgggacttcctctactctctctctttctccctctcttgccctgtgacatgctggctygcctttgttttctgccatgattgtaagctccccaaggccctcaccagaggccaaacagatgctagtgttatgcttcctatacagcctacagatccatagc

SEQ ID NO: 228047 - DNA, 201 bp, Homo sapiens
gaggcagagcttgcagtgagccgagatcatgccactgcactccagcctgggcgactgagcgagactccatctcaaaaaaaaaaaaaaaattgcaaaaacavattctcaaaactactgcttaaacttatcctattggtcagcttgaaggagagcaataattgctggatgttctttaatttgtagaaactggcttaatttgtg

SEQ ID NO: 228048 - DNA, 201 bp, Homo sapiens
tggatgttctttaatttgtagaaactggcttaatttgtgcacacataaaaagaagtctaatttcacaactacagattgcaaggcattattgtgtaggatargactgatgccgaaagaccacatgagaagatagaatatcagtttagttttagtaactgactctcctttataagaactttgaccctctgtaatactatagaa

SEQ ID NO: 228049 - DNA, 201 bp, Homo sapiens
tcaagctgaactgagagtagaaggcagagatgataatgaggcagagtgatttaagtagagaaaacagatatgtaacatccctaaggagaaagaactagaastcaaaggcttatcattactgccaaaatgtaatttgtcatagttgtgttctttcaattgtcttcgttaaatattaattattttaataaaagttatataagt

SEQ ID NO: 228050 - DNA, 201 bp, Homo sapiens
ctgtctcctctgcatctgggtctgtctttggtgctcagaaaactttatagatgtcacttaacatttgtctagcctcttttgtgttgaggcagtatgctgaytactgcgggagtgtcaaggaaggtctgtatatagacggatcacccagatggctgtgagagactcactgttcattccaggtcaggaggagatcaaaagtag

SEQ ID NO: 228051 - DNA, 201 bp, Homo sapiens
ggtcaagtgcctaatgtaggctgggcatttagaagtattcaaccaatgctcatttgtcctcattggtgcaaggctcttgttgctgtgaaaggatatgaagmcaaggaagagatggattttggatcagttgcatcttccctcgttaactatataaagacatgtttgtcatagtttcagagggaccagctccttcttaatcct

SEQ ID NO: 228052 - DNA, 201 bp, Homo sapiens
gccctcattttgcctaaccgttttctgagcggtgttgggtgaccacttgtactgagaagagctttggggttttcactaatgggtgaccttgatcaagttgsttgacttctgtgggttttgttttcctccaggtctactgtacaggctattggggtttaaatgagcaaatgcaggtcaagtgcctaatgtaggctgggcatt

SEQ ID NO: 228053 - DNA, 201 bp, Homo sapiens
atcaggagtatatgcattgttccagttaacagaatagagagacaggatgtgccgaaatcccaccttttcccgtttcccatccccaaggccaagtcttgtcrccacttttttccagatgtttcagtatcatgtccaagctaggttttcccagcttccccttcatcctttgtccattacaattctgtttacaagcgtgtgagt

SEQ ID NO: 228054 - DNA, 201 bp, Homo sapiens
gtgatgccactgctcctcttctctaccaccagcctctattaccttcagggtgttgctattccaaaacccaccccaggccctcattttgcctaaccgttttytgagcggtgttgggtgaccacttgtactgagaagagctttggggttttcactaatgggtgaccttgatcaagttgcttgacttctgtgggttttgttttc

SEQ ID NO: 228055 - DNA, 201 bp, Homo sapiens
aaaatgtgaaaaaaagagagcatcctttgccctgagcacagtatttcctagacagtgttcaacacggtggtcaccttggatagaaggcagcagctacaggrgacaaaggcagcgttacacacctaggtgatgccactgctcctcttctctaccaccagcctctattaccttcagggtgttgctattccaaaacccacccca

SEQ ID NO: 228056 - DNA, 201 bp, Homo sapiens
tgtaaacgttgacctccaagtcctgttttcagaaatgacttctcttagctgtataaaaatgtgaaaaaaagagagcatcctttgccctgagcacagtattycctagacagtgttcaacacggtggtcaccttggatagaaggcagcagctacaggagacaaaggcagcgttacacacctaggtgatgccactgctcctctt

SEQ ID NO: 228057 - DNA, 201 bp, Homo sapiens
aaatataattcttttttatatcatgcaatgaaaggtgtcaacatttggaagatctgcataatccaatgaaccactatttttgtccagagcaatgtgcactkttacaaaatttcacatggggaaaggatccattcaaaatgctacacagaccatggatttttcacataacagagcactaaaaatttcttgatgtggtttcgg

SEQ ID NO: 228058 - DNA, 201 bp, Homo sapiens
caggagatgtccttggtggcatcatatgtaaacgttgacctccaagtcctgttttcagaaatgacttctcttagctgtataaaaatgtgaaaaaaagagarcatcctttgccctgagcacagtatttcctagacagtgttcaacacggtggtcaccttggatagaaggcagcagctacaggagacaaaggcagcgttacac

SEQ ID NO: 228059 - DNA, 201 bp, Homo sapiens
attttctttaaaatgcacaaagtgagtctgttgctttaagtaaaccgttggccagtatttgttgatagtgataaaattcaagcttctaagcaaaaattcarattttgggaaacttggatatgccaccatgagcttgacagcttcccaatacttaaagactttttctaataaaaggtcaatgatgatattgcaaatataatt

SEQ ID NO: 228060 - DNA, 201 bp, Homo sapiens
caattgaatatgataaaatagtaagcactgcttaccttccacttcccctcctttttacatatgtctttttatgaggacactgtccattactgatagactaygttagcattcactttgcttttttaaagggagaagaagatttagaaaagtggggcttaactggggattggactgttctcattcatactggccctcacatta

SEQ ID NO: 228061 - DNA, 201 bp, Homo sapiens
cctgggaactaacttgttagtaactactgatagggggacaccaattttgagaggaggtgtgtatacaattgaatatgataaaatagtaagcactgcttacmttccacttcccctcctttttacatatgtctttttatgaggacactgtccattactgatagactatgttagcattcactttgcttttttaaagggagaaga

SEQ ID NO: 228062 - DNA, 201 bp, Homo sapiens
gactgcattgagagccataaattgctctagatttgagtggctgtcgacagcatgattttaactgtaacatattctctctgtgtaagtgtgtgtgtgtgtgkatacacaactatatacatggatatttatttttacacccaccaacagggtaatttatagcataacacacatacacacttacaaaaaaagccctctcctgtc

SEQ ID NO: 228063 - DNA, 201 bp, Homo sapiens
ttagttgagtgtggtggcacacacctgtaatctcagctatgaaggaggctgaggcaggggaattgcttgacccaggaagcagaggttgcagtgagccaagmttgtgccactgcactccagcctgggggacagaccaagactccatctcaaaacaaacaaacaaacaacaaccctctttgataaacaactcttaattcaaag

SEQ ID NO: 228064 - DNA, 201 bp, Homo sapiens
ccattacctgattacaatgcaataaattagaaatcagttttatcaaaaccttacaatctggatattttaaaactctttgatactctgggaggccgaggtgrgcagatcaccagaggtcaggagttcgagaccagcctggccaacatggtgaaacgttgtttctactaaaaatacaaacattagttgagtgtggtggcacac

SEQ ID NO: 228065 - DNA, 201 bp, Homo sapiens
cctgggaggaggaggttgcagtgagccaagaacatgccactgcactccagcctgggcaacagagcaagactcagtctcaaaaaaaaaaaaaaaaaaaaaaagctattgcagtagtgcatgtgagaatagatgattgactggtctaaattagagtcaatggatgtgcactagaatttactagactgtaattcaagacagtag

SEQ ID NO: 228066 - DNA, 201 bp, Homo sapiens
acctgggaggaggaggttgcagtgagccaagaacatgccactgcactccagcctgggcaacagagcaagactcagtctcaaaaaaaaaaaaaaaaaaaaaaagctattgcagtagtgcatgtgagaatagatgattgactggtctaaattagagtcaatggatgtgcactagaatttactagactgtaattcaagacagta

SEQ ID NO: 228067 - DNA, 201 bp, Homo sapiens
aaagcacttgtgagactgggtagtgaaatgaaccagctaccttttatatggaacactatttttctgcatgaaagaagcattgaaagacaaactataattaygcaaactcaagtatttaacatattttctttaaaatgcacaaagtgagtctgttgctttaagtaaaccgttggccagtatttgttgatagtgataaaattc

SEQ ID NO: 228068 - DNA, 201 bp, Homo sapiens
aacctgggaggaggaggttgcagtgagccaagaacatgccactgcactccagcctgggcaacagagcaagactcagtctcaaaaaaaaaaaaaaaaaaaaaaagctattgcagtagtgcatgtgagaatagatgattgactggtctaaattagagtcaatggatgtgcactagaatttactagactgtaattcaagacagt

SEQ ID NO: 228069 - DNA, 201 bp, Homo sapiens
gaacctgggaggaggaggttgcagtgagccaagaacatgccactgcactccagcctgggcaacagagcaagactcagtctcaaaaaaaaaaaaaaaaaaaaaaagctattgcagtagtgcatgtgagaatagatgattgactggtctaaattagagtcaatggatgtgcactagaatttactagactgtaattcaagacag

SEQ ID NO: 228070 - DNA, 201 bp, Homo sapiens
agctacttgagaggctgatgcacaagaatcacttgaacctgggaggaggaggttgcagtgagccaagaacatgccactgcactccagcctgggcaacagarcaagactcagtctcaaaaaaaaaaaaaaaaaaaaaaagctattgcagtagtgcatgtgagaatagatgattgactggtctaaattagagtcaatggatgt

SEQ ID NO: 228071 - DNA, 201 bp, Homo sapiens
taatttctgtaaatgtttcagaacattactttttctgtgattttaaatatttgtgaaaactctttcaatctgtccttcaggaagactcagctctcatctayatacttgccaatagaaatagtgttttcacgttaaagaaacaagcttagaagttaggaggtaccatcatgttaattgctgccttgtaatggttatttattg

SEQ ID NO: 228072 - DNA, 201 bp, Homo sapiens
gatcattataaaaaataatgaggcttttttcttttttttgagacgacggagtcttgcactgttgctctggctggaatgcagtggtgtgatctcagctcacygcagcctctgcctcccaagttcaagcaattctccccctcagcctcctgagtagctgggaggacaggcacccgccaccacccctggctaattttttttgta

SEQ ID NO: 228073 - DNA, 201 bp, Homo sapiens
ctttccgtgcacttgatagtgcatagagacagcagtactaacatcaagaactgaaatttttagattattttgaatctccagttcaattagttcctaacttkttaatgaacaaatccattatcagagatgctaatagggaataacataagctaaggttttactttcttgtctttctctttgtctatgctaatgggcgtttat

SEQ ID NO: 228074 - DNA, 201 bp, Homo sapiens
atctccagttcaattagttcctaacttgttaatgaacaaatccattatcagagatgctaatagggaataacataagctaaggttttactttcttgtctttstctttgtctatgctaatgggcgtttattttattttattattttttggagaccaggtttcactccctttccccaggctggagtgcagtggcgggatctcag

SEQ ID NO: 228075 - DNA, 201 bp, Homo sapiens
agatgtgagccaccatgcctggctaatttttgtagttttttttggagagacagggtttcaccatgttgaccaggctggtcttgaactcctgagctcaagasatctgcccacctttgtttcccaaagttctgggattataggtgtgagccatggagcgtggcttctgtgctaacaagctattagtgacttcaaaggtgggca

SEQ ID NO: 228076 - DNA, 201 bp, Homo sapiens
tatggctttctctggaaggataaaatccttgccggtgttcctccccatggttctttgtagattctttctctttttgccattaccttcttcgccccatccckctttcacacttggaaatggccaaagccgaactaatctctgaaactgaatattagagctctgcctagaatcttggcccatttttatttgagcttttttcct

SEQ ID NO: 228077 - DNA, 201 bp, Homo sapiens
ttttttcctacctcatttttgctggaaaatccttccatttggcttttaataggggtcatttgtgaacaatatttcataaccagttacagatttcaatcttytgcatgtgtatgataatttatagtccaagtgcttttatacttgaacatcttttatgagttctactgccttttccctgaaaggaaactgctttcctcttcc

SEQ ID NO: 228078 - DNA, 201 bp, Homo sapiens
ttgaatagacaaatgaactgctatgaatgaactatgcagtaaagtgatttcctccaacactgttagtaatctaatctgagaatgagaagtgaaaattgcawattatcccaacagtacatcatacttaacgtcctcagcctaaatgctataggagatagagattattcagcataagaatattatgctaaaaactcaaaagtt

SEQ ID NO: 228079 - DNA, 201 bp, Homo sapiens
gcttttcaaggagttgaagcagtagggtgttaatgcctgaaaagctttttgtagttaccttgtttgcccatttagacttcaagggcaagtttgaggttctwtgaatgatatccacagtttgcatttaaatttgaaggttatttattaagtgacattttcagtaagatacaaaacctacctcctggttagtgattgcacgaa

SEQ ID NO: 228080 - DNA, 201 bp, Homo sapiens
atgcttccctgttagagaacaaaggtagggcagggtctagcacacacctctgtcttctgagccccgcttccatgagctgtttctaacaggctttgcgatasacaaaggcaaagacgacacaggtagcagtcaagtgatgccaacacaactctgtcccggcaggactcttggcgtaggggtcttctaaacaagatcacttga

SEQ ID NO: 228081 - DNA, 201 bp, Homo sapiens
atgggtcagggagatgactagagattggttgacattatgcttccctgttagagaacaaaggtagggcagggtctagcacacacctctgtcttctgagcccygcttccatgagctgtttctaacaggctttgcgatacacaaaggcaaagacgacacaggtagcagtcaagtgatgccaacacaactctgtcccggcaggac

SEQ ID NO: 228082 - DNA, 201 bp, Homo sapiens
tgttatttcaatgctagaagtttgttattcatgctcctaattgaaagagtcaagattctggaagatacacgtattatcacatccttagcttgaaatggatsgaaccatctcagggctgccatgaaaagtttccctgggtcattagtctaaagccgaaaagtgaaatgagcaataggttttccatgttatgcagcaactctg

SEQ ID NO: 228083 - DNA, 201 bp, Homo sapiens
ttttgtcttatattaattccccatacagttgaaaattaatactgctgtggatttacacaatttgctaattagtaagaagcttgccatttactaacacaaawctatgaataaacccgctaatttaaaaattatatcacaatcagaatgttcccatggaagttggaagctcagagaaaaatgcggtctttagatatttattaa

SEQ ID NO: 228084 - DNA, 201 bp, Homo sapiens
gtgccacagcaaatgcatgcttcacttgttctctgtgacactgacacatcttttgtgatcttttctaaatgcaccctcaaaatgggttaatgttttcttgytttgtgctgaattttatagaaatgcatgcctctagggaaattttaattgtctccttatttattttgtcttatattaattccccatacagttgaaaattaa

SEQ ID NO: 228085 - DNA, 201 bp, Homo sapiens
ggacatgctttttctcatcttctagagctgggaggttaaacaggagcccagagatacatacgctttccatcttctcagtgggttagtgggaaaagtgaaakggatattagcaagcgcttggttagtaagagacctcttgtggggcagtttttgaggatcagaacattatactgtgcattgtcctctaaagtgagagagagc

SEQ ID NO: 228086 - DNA, 201 bp, Homo sapiens
aagtgcccgtaagagggacatgctttttctcatcttctagagctgggaggttaaacaggagcccagagatacatacgctttccatcttctcagtgggttartgggaaaagtgaaatggatattagcaagcgcttggttagtaagagacctcttgtggggcagtttttgaggatcagaacattatactgtgcattgtcctct

SEQ ID NO: 228087 - DNA, 201 bp, Homo sapiens
agtttgagaaacaatcagatttgtttaacagtgtgtgggatggcttcataagaaatggtgtaagtgcccgtaagagggacatgctttttctcatcttctakagctgggaggttaaacaggagcccagagatacatacgctttccatcttctcagtgggttagtgggaaaagtgaaatggatattagcaagcgcttggttag

SEQ ID NO: 228088 - DNA, 201 bp, Homo sapiens
gctgttgggagctgtcattcttaaacatctgtacttgacttgtttaaacttagggctctggcctttccccaacagcctggcatgccaggaaaagtaaagawaagacctcatgccattaaatagacaggtggtttccatggccaccaacacaggaagactccaacatcttagcaataagctgaagcagttaaaggggagttt

SEQ ID NO: 228089 - DNA, 201 bp, Homo sapiens
tctcaaggaaaagcacttgtgagactgggtagtgaaatgaaccagctaccttttatatggaacactatttttctgcatgaaagaagcattgaaagacaaamtataattatgcaaactcaagtatttaacatattttctttaaaatgcacaaagtgagtctgttgctttaagtaaaccgttggccagtatttgttgatagtg

SEQ ID NO: 228090 - DNA, 201 bp, Homo sapiens
aatgaaaatattatcttattcttttcacaggaagggacttttctctttagtccctggctctgtgtcccttcctactcccttcctccccacctctccttgasacacacacacacactctctctctctctgtgtgtgtgtgtgtgtgtgtgtgtgtgtgtgtgtgtgtgtgtctccttacatcagtagaaatggcaactgcct

SEQ ID NO: 228091 - DNA, 201 bp, Homo sapiens
tgttgaaaagtaaaaattattaatttaattgcattttgattgttgagtttttttttttttttttttttagcattctgtgtgctgaaatgggaagtatgcaraaagaactgctgctgtgtactgacatatcatggttgtctcaaggaaaagcacttgtgagactgggtagtgaaatgaaccagctaccttttatatggaaca

SEQ ID NO: 228092 - DNA, 201 bp, Homo sapiens
cagatcgtgccactgcacaaccagcctaggcaacagagcaagactctgtgtcagaaaaaaaaaaaaaaaaaacttctggttgctgttgctgtttctttcamttaaagtaaaatctgacattcctctgaccttcacctgccaccctctgacctacacagggtccctggttttcctcctttcaattcctgttcccttgtcatc

SEQ ID NO: 228093 - DNA, 201 bp, Homo sapiens
gctattttaaacaacaaatttatagctgttgaatagactctgtccaaatgatgcctgagtatcctaagccgtgtgtgtgttgtcttcagcttttgttgagytgatttcttgtagacagctataccatttttagtctagaaaaatggctgtcacattttggtaggtggcagagttggctaagtagttccttgaaaatacaga

SEQ ID NO: 228094 - DNA, 201 bp, Homo sapiens
tgaaaattttcattacattatgcaatttgcaagcatttcccatttattgtgtgtgtgtgtatatgtgacctcatgtagccctataaggcttgttactaaaraataattcaaaacccctacattgtccctcctccctctccctcatttcttttaaactgattattttagtatttatctctgtatctctaagtaatatgtata

SEQ ID NO: 228095 - DNA, 201 bp, Homo sapiens
cgtaaatctaaaatcttttcatttaaaaaaaaaaacactcactttctccagaccagtttcctaggagactgccaattattctagtgtgataagctagattrcaaatgaagaacttgttgaaagatgcatttaagctaaagactttatttctttagttttaattttttgatatcatttatatacagcaacacacataaaatt

SEQ ID NO: 228096 - DNA, 201 bp, Homo sapiens
ttctttagttttaattttttgatatcatttatatacagcaacacacataaaatttacatacactgtggattactgtagaatactgtcatcaaatcaataartttcttccacagttttgcattccacctcctctctaccacccctggcctcaggcatccactgatctgctttgtgatgctatagattaggtttggcttttta

SEQ ID NO: 228097 - DNA, 201 bp, Homo sapiens
ctactggttccctcattaagaaattcattttgatatgtttgctttatatttatctaaaagcaatgtttgtaactttttaaaaattatactttgacattctwtggatcttcatagatgctgtaggggacaaaagatttttcatctgtcactagactcatgactgagacactatgacaaaagacagattaaccggagaaaaac

SEQ ID NO: 228098 - DNA, 201 bp, Homo sapiens
ttgattagatgctgaacaaggggtggattattcatgactttcccgggaatggggttggcaattcccggagctgagggttgggttcctcctctttttagacyatatagtgtaacttccagactttgccatggcatttgtaaactgtcatggctctggtgggagtgtgttttagcacactgatgcattgtaattatcatataa

SEQ ID NO: 228099 - DNA, 201 bp, Homo sapiens
aatgaaaaagcaaaattaccttgaatggagccctggataatgctgttctgtaaaacccatgatggtggaagaagagtcaagacttgattcatttaaattcrtcttttatttaatgttgtataataggcatctctgctgaagttgggaagctctatttcaagactccatgagcaagaacctctcagctacagtaaagtctgg

SEQ ID NO: 228100 - DNA, 201 bp, Homo sapiens
gaaggaagatgtgcattatatacttctaaacttgttctcttacaaggttgtaccacctgtagtacactgttacgtaaaaaatgtatcagtcatgtagttaycttgtgaataacaccgttagatattagaagaatatggtagaccacttaaaataggagtaagtctatagagtacaaatgatacatagctataattgacact

SEQ ID NO: 228101 - DNA, 201 bp, Homo sapiens
tagagatattaaggagattaggagactattgcacctgaccaatcatactgaaatgtatgattagaattatgatggtgctgggatggcacagaggtgtggaygcaaggtactaaaccaaggtgggatctaccaaagttatcaattgattagaagtgggagatgagaaaggagagcctggtggctaatgcttgactggtattt

SEQ ID NO: 228102 - DNA, 201 bp, Homo sapiens
atgtatcagtcatgtagttatcttgtgaataacaccgttagatattagaagaatatggtagaccacttaaaataggagtaagtctatagagtacaaatgayacatagctataattgacactgtaattagccttatactccgttttagcaaaaacctatgagcagcattgctttgccatgaatattgccaacaattcaggag

SEQ ID NO: 228103 - DNA, 201 bp, Homo sapiens
agtggcacaatctcggctcactgcaacctccacctcccaggtccatgaacaccagttatagatatccatctaaggctgcagactaatgtctcatggttccycctggaggccactgactgttttctttagtcctcatttctttttattttatcttttctttaaaaaaatataaactagccaccgaaatttttattgggacat

SEQ ID NO: 228104 - DNA, 201 bp, Homo sapiens
gtaagtctatagagtacaaatgatacatagctataattgacactgtaattagccttatactccgttttagcaaaaacctatgagcagcattgctttgccawgaatattgccaacaattcaggagtcaaaaaatggtggaataatttctctcatatgcagaatagtaattattatgttgtattcacttatgttgggaacttt

SEQ ID NO: 228105 - DNA, 201 bp, Homo sapiens
agtaggctcttctaagatacattaaaaaaatcttaaatactagagatagagacatggaaaagtgcaatgaatgaatccatttattcattcagctgatgttkgttgggtatcaattatttgcctggcactttgctcactgctgtgtatatggggatggtaaatgaaaatattatcttattcttttcacaggaagggactttt

SEQ ID NO: 228106 - DNA, 201 bp, Homo sapiens
cgtctatctgattggtaatttgatgtgtaatttctacacatatgtcagtactttaggacattctgctgttttggtttggtttggtgtacaacagtaggctyttctaagatacattaaaaaaatcttaaatactagagatagagacatggaaaagtgcaatgaatgaatccatttattcattcagctgatgtttgttgggta

SEQ ID NO: 228107 - DNA, 201 bp, Homo sapiens
tcattttccagattcccatagtctgggcaataaaaaagagagaatgttttgatattaagaatggtgcctgactagttactaaaaggccttttaaaaaagargctgccaaagcctgtaccatttggtaggaagctgttgtctactgacacatctaagcatagtcacagacattcctgagaatgagccgtcagtccttctatc

SEQ ID NO: 228108 - DNA, 201 bp, Homo sapiens
aaagcataactttacctaggaagagtcagaattatctttctctctctctctctctctttctctctttctctttttctttctctctttctctctcttttctytttttttcttttctttcattttccagattcccatagtctgggcaataaaaaagagagaatgttttgatattaagaatggtgcctgactagttactaaaag

SEQ ID NO: 228109 - DNA, 201 bp, Homo sapiens
aatgagaactcaaacatagggaaagcatgttttcgggtaataactagtggatcaagttaactggaaagcataactttacctaggaagagtcagaattatcyttctctctctctctctctctttctctctttctctttttctttctctctttctctctcttttctttttttttcttttctttcattttccagattcccatag

SEQ ID NO: 228110 - DNA, 201 bp, Homo sapiens
cgttgtatccctagcatctaacacagggtctggcacatagtagatgttgaataaatgaatgagaactcaaacatagggaaagcatgttttcgggtaataamtagtggatcaagttaactggaaagcataactttacctaggaagagtcagaattatctttctctctctctctctctctttctctctttctctttttctttc

SEQ ID NO: 228111 - DNA, 201 bp, Homo sapiens
taagacagataaataatgagctccatgataagacattttctttttctcattaaccgttgtatccctagcatctaacacagggtctggcacatagtagatgwtgaataaatgaatgagaactcaaacatagggaaagcatgttttcgggtaataactagtggatcaagttaactggaaagcataactttacctaggaagagt

SEQ ID NO: 228112 - DNA, 201 bp, Homo sapiens
ttgttaaataaagtaatatagattaattataagacagataaataatgagctccatgataagacattttctttttctcattaaccgttgtatccctagcatmtaacacagggtctggcacatagtagatgttgaataaatgaatgagaactcaaacatagggaaagcatgttttcgggtaataactagtggatcaagttaac

SEQ ID NO: 228113 - DNA, 201 bp, Homo sapiens
ttctggcttgggtaatagatggagagtttccaccatctggctgctgtcaaggagccaggggaaatgaattgctagatttttactacatgtattcatattaytgcccctttctgtgggccacagactcatgccatgattaatgaggactcttcttgacgcccagtatgctattctctggaaggctgggagaccacagtgaga

SEQ ID NO: 228114 - DNA, 201 bp, Homo sapiens
ttctgcacaatgaatagaagactgccaggttccaaatttctgtattatatgcaacaagcctatatgtgcaaaaggtgttaggaggaggattcagcatgccrtgggaagagtgctgccttgcacacagctggcaatacaatccatgctcatctctgaggaagaagagtctagaggggagtctgccctctggattttcctccc

SEQ ID NO: 228115 - DNA, 201 bp, Homo sapiens
tgtttaccagctccaattcccagctgctaaccaaaggccaacattgcaaacaggccttctaaggataggccttctcgagcctgctctgtgttaactctttyctgcacaatgaatagaagactgccaggttccaaatttctgtattatatgcaacaagcctatatgtgcaaaaggtgttaggaggaggattcagcatgccgt

SEQ ID NO: 228116 - DNA, 201 bp, Homo sapiens; identical to SEQ ID NO: 148592

SEQ ID NO: 228117 - DNA, 201 bp, Homo sapiens
gtgatatctgtggattttttgatggtatagagactataatatagtagaaattttgattactccagaaagatacataacagtaaggtgattttcaacttctrattctcctctttaaggattgtttttgtatttaaacatgtaagttcgtctctgctattacagtccacatgaaaaacatgatttgggtttcgttttgtttgt

SEQ ID NO: 228118 - DNA, 201 bp, Homo sapiens
aagtgatctgccctcctaggcctcctaaagtgctgggattacaggtgtgagccactgtgcttggcttttccctgatattttgtacaaacacaaagctctasgccttgatgctggtgttttagatattcatcacctgtgtttggtttggaagaatcattttataaagtgacaaaagtagttctaaatgttatacatttttgt

SEQ ID NO: 228119 - DNA, 201 bp, Homo sapiens
ttattatctgtttattaaataatcattatttgctctttcccatgtacagtactagctgctggaataaaggtgtctactaccataataccctttgagcacaygtttatttccttctatttatttatttttttcttttcgaggcagagtttcactgtcgcccaggctagagtgcagtagcatgatcatgccgcagtgcagcct

SEQ ID NO: 228120 - DNA, 201 bp, Homo sapiens
atatattttttaaatatatataatttttatatataaaataaatataaaatatatatatatatatattttaaagcagtgacctctttttgcataaaaggtcyccgtcggatcaatcagtggaagaagggggttgctgattcacattacgtaaaaacacaagtcctcacttgagtcataggtaggtttcttagaaactacaac

SEQ ID NO: 228121 - DNA, 201 bp, Homo sapiens
tatgtgaaaacccacaaggaagtaatagagtttgtttgcacatctcccagggctacttacaaaccacgtgggtaaaggatgcccagcaatcataatgtcamctctttcgtttttgatcacccactcagacaatgagtttttgggattatctgtgtttggtgagggcagtgggagtttaaaaaatcttgttgaagcagctta

SEQ ID NO: 228122 - DNA, 201 bp, Homo sapiens
acaggttcctccagaaatcttcaagatgaatgggaaaatttagcagagctcttaaatgccactgtaattcagccccatgccctggaaattctaaattgtarttgaccctaattatatcaatacccgctggtgagaaaagacctgtttcttaggaagctttactgctgctgaactttgctaacaagtcacccatgacttcaa

SEQ ID NO: 228123 - DNA, 201 bp, Homo sapiens
ttacccattcattgcagttcagggtctcaggtggccagagcctgtcttggcagctcagggcccaagggaggagcccaccctggacagggcgccattccctytcaggactcactctacataccttctcactcagaccgggaccatgtagacatgcctcttaatctcacatgcacctttggaatgagggaggaaaccagagtg

SEQ ID NO: 228124 - DNA, 201 bp, Homo sapiens
gcagttcagggtctcaggtggccagagcctgtcttggcagctcagggcccaagggaggagcccaccctggacagggcgccattccctctcaggactcactytacataccttctcactcagaccgggaccatgtagacatgcctcttaatctcacatgcacctttggaatgagggaggaaaccagagtgcctggagaaaacc

SEQ ID NO: 228125 - DNA, 201 bp, Homo sapiens
aaatagatactcggtgtgtcaaatgagaacagaattttgtcttccagattttttagtaatagttcattcccccaacttttgtttataaaaattgtgaaacwtacggaaagtttcaagaatagaaaaacgaacaccttgtgaggaaggcaaaaattctacccctgccttgttagagttttttggctgggcctgagaattaaa

SEQ ID NO: 228126 - DNA, 201 bp, Homo sapiens
gggtctcaggtggccagagcctgtcttggcagctcagggcccaagggaggagcccaccctggacagggcgccattccctctcaggactcactctacatacyttctcactcagaccgggaccatgtagacatgcctcttaatctcacatgcacctttggaatgagggaggaaaccagagtgcctggagaaaacccatccaga

SEQ ID NO: 228127 - DNA, 201 bp, Homo sapiens
agttctgaattgtttatcacctcagatcaggaatattatttctgaaaacaaatttgttatcatcagcaaatcagcttttgaaggtttttgtaccaaagaayaaacctagggagtggattttgaactcttagggggaagaactaaagttactttgaggacgttttacagcttttttataacgaggcagcttcaaatgcagat

SEQ ID NO: 228128 - DNA, 201 bp, Homo sapiens
agggcccaagggaggagcccaccctggacagggcgccattccctctcaggactcactctacataccttctcactcagaccgggaccatgtagacatgcctyttaatctcacatgcacctttggaatgagggaggaaaccagagtgcctggagaaaacccatccagacatgcagataaccatgaagatttcacacagacact

SEQ ID NO: 228129 - DNA, 201 bp, Homo sapiens
cttgtagttcccttttacattaagttgtagttagtcataacaaaaagagttaacatttcttaagtctttactgtgtgctaagcccttcactgagctcctamctgcattctttcatttaattgtcacaactcagtgaagtagatatgtgaatttctctcattttagagatgaggaaactgaggcataagatgttatgaaaat

SEQ ID NO: 228130 - DNA, 201 bp, Homo sapiens
ttctgcaggtcggatctgtgttttttggcaccaggcagagatgtggctaatactcaccttgtgcctctcagccacctgttcttcctaattaaagactcccrttttctgctttgctggcctcataatttgcaaataaaatccacgggacatttgatacgaatgttaagaaacctgtgaactgtttgtttctagtttgtaaag

SEQ ID NO: 228131 - DNA, 201 bp, Homo sapiens
tacttaccaagttggcaatgaacaggctggagtaagggcttcttggccttcactatacgttaggaatagaatcaccataggaactttcaaaataaaaaccraaaaaaagcctgatatctaggtctcagccagaccaattaatttaaaatatctgggagtggggtgttggtgaggaatgtggaggacttggaaccctctttc

SEQ ID NO: 228132 - DNA, 201 bp, Homo sapiens
aaaccgtggagcttaaagcatgatggaatttggtcaaaagatgtagccatttgttgagcttaaagtcaagattttaagctcagtccctagagtgtatgcargcacaggtcaagctctccccatcgcctctccatggccagtagttcttgacaatactaatttgtcagtagtgttacattctctgaagaaaccaattgagtg

SEQ ID NO: 228133 - DNA, 201 bp, Homo sapiens
tattttttacttgaattttgccctatagacaaacacacgaagggtagttttgaaaattgatgccatctattatattattgtttaatgattcctaattttcmgattggaagtaattgacttcatatctcgatttctaatctggttctaattgacttattccatcaatcatctagtcactaatacaatttttggagtgttgac

SEQ ID NO: 228134 - DNA, 201 bp, Homo sapiens
ccactacccatctgggaaaacactcccaagatcaagttgctctatagttttagtcttttcaaagttattttttacttgaattttgccctatagacaaacayacgaagggtagttttgaaaattgatgccatctattatattattgtttaatgattcctaattttcagattggaagtaattgacttcatatctcgatttcta

SEQ ID NO: 228135 - DNA, 201 bp, Homo sapiens
gtggcaggagaccaagggtcctcggcattagaaatctatagtccaggtgtaattagagaaagataaagggctcaccaatggaccacagagcatacatactraaggctaaaagagtaaaacagtttggtaatgaggaatgaaggatagagtgatctagggaaaattatatggagaaatagtttcttcagcaacatctgaaag

SEQ ID NO: 228136 - DNA, 201 bp, Homo sapiens
ctaagtgaaataagctacacataaaaggctatatatcgtatgactccatttctatagaatgtccagaaaaggcaaatccacagagacagaaagtagaatartagttgccaggggctgtgggctagaggaaaatgtgaaatgactgctaaaggaaatggtttctcttttgggggtaaaaatgttctgaattaggtagttatg

SEQ ID NO: 228137 - DNA, 201 bp, Homo sapiens
tttctctacctaggagctaaagaacatattaaaatccttggaaacttagataaattactgtaatgaattacaaaattactagaggtgatgatgatcaagakaataataaagagtaattagagtaagctccacttcttcctcttttatagcagtccctttgtcttagagtaaaattaaaaaacagaagcaagataaactaac

SEQ ID NO: 228138 - DNA, 201 bp, Homo sapiens
accacaccaggcgtcctgagatgatttttaatgtacaatagtaaaatctttttttgaaagtcaaatttagaccctgaacactctggagcttgaatctttgwtatcacgagtttctcattaagtgaaacgccacacaagaccttgtatgatctgatccctgctcatctttcaaacccatctcctcacctctgccttgctgcc

SEQ ID NO: 228139 - DNA, 201 bp, Homo sapiens
gattttctgaagtatttagtcttcttattcattaagtgagaattgggcaaggatgagctttgtggatcattttactttaaatatagttaaatctgtgtgtktttccatgctttagggaaacttttgcttgttagaaatccagtggagatcctaggaactctaaagcctcttcacttatttttcatgcccaaaacaaaaaga

SEQ ID NO: 228140 - DNA, 201 bp, Homo sapiens
taaagcctcttcacttatttttcatgcccaaaacaaaaagattctgttttttgtttgctttttgagttgtggtctgttgcctaggctgtaatgcagtgctrtgaccatggttcactgcagccttgagctcctgggcataagccacactcctgccttagccccctgagtagctgggactacaggtatgtgccaccatgccca

SEQ ID NO: 228141 - DNA, 201 bp, Homo sapiens
gacttcttatcattcaactcgcagatcaaacgtgagattcccctttcctttgacacttaggcagccacttctgcctcctccaagtcccttcctgttcttgsattttgatcatttccttcaagtcacaatcagaatatttttccttgttgactggcttgtagtctctactgcttgcaatacgcaccctgtgcctagaatact

SEQ ID NO: 228142 - DNA, 201 bp, Homo sapiens
ccaagtcccttcctgttcttgcattttgatcatttccttcaagtcacaatcagaatatttttccttgttgactggcttgtagtctctactgcttgcaataygcaccctgtgcctagaatactacatgagagcagagggctggtctgtcatatttaccactagaatagtatttggaatatggcaagtatataatacatattt

SEQ ID NO: 228143 - DNA, 201 bp, Homo sapiens
ggggatttgaagcaaactgagagttgaagggtgctgttggcttgcttcattcatcattcctttatttatttgattctttcattcaacattttctgaggagsaagtctctggggacacagacccaaatgagatgctatctttgtcctcaagggcctcatctagtatgtgtggcaaacacatagaaagtaaattactttttat

SEQ ID NO: 228144 - DNA, 201 bp, Homo sapiens
tcaagtcacaatcagaatatttttccttgttgactggcttgtagtctctactgcttgcaatacgcaccctgtgcctagaatactacatgagagcagagggytggtctgtcatatttaccactagaatagtatttggaatatggcaagtatataatacatatttattaaatgaataggtgattagagtttgatgaggaaagg

SEQ ID NO: 228145 - DNA, 201 bp, Homo sapiens
gtgctgttggcttgcttcattcatcattcctttatttatttgattctttcattcaacattttctgaggaggaagtctctggggacacagacccaaatgagrtgctatctttgtcctcaagggcctcatctagtatgtgtggcaaacacatagaaagtaaattactttttattgttacaatcagaggaattaaagcatgaac

SEQ ID NO: 228146 - DNA, 201 bp, Homo sapiens
gcaatatgccatgttttagttgtttttggggagaggaagatgggaaaggacctttgaaatgatgtttgagtttggatgtgatttttgaatctctctcttaytccatgtaacgttgagaagttacaccttgttcgaaactgctcctgatgctcttgggtcacctacgtagccccaggataaatttgtacttgggaaagtagg

SEQ ID NO: 228147 - DNA, 201 bp, Homo sapiens
tcttctctttctctttgttcactttgttatcttcttctaggatcctcttctactgtctcctgtggaattttgacatacgcctgtagattagaatgttttayaaatcatataaacttcaatatatgtctccaaccattcatttatgtgccttgttttccaagtcatcaataaagtatgtttcagagcggggccagatcagat

SEQ ID NO: 228148 - DNA, 201 bp, Homo sapiens
accagtcagtgtcctatcactaatacttctgtgtttctcctgagacacataatgaagcaagctctgaaggtgacatccaaacaaaggctggggaatgtaarctcagtttggatctttgagattaagaagagctatctcttcttcacagccctataggtcaatgggaaaatcttcaaaatcaattctttcagcagccaggaa

SEQ ID NO: 228149 - DNA, 201 bp, Homo sapiens
ggccctcatgctctcaaaaagtttgtatttattgttctctatttgatgaaataatatgaaaatgacagatataggcttatattttaaatcagctgcttgtygtctgataacagagtactgctatgtggctttagtgcaaagggattgcctaaagtgacagagttgttattaattcagtatttcccaaatcagggccctgaa

SEQ ID NO: 228150 - DNA, 201 bp, Homo sapiens
actccccttcataaaaccatcagatcctgtgggacttactcactatcacgagaacagcatgggaaagacctgcccccatgattcaattacctgccaccggstccctcccatgacacatgggaattatgggagctacaattcaagatgagttttgagtggggacacagccaaactatatcagcttatttttcaaaaggactt

SEQ ID NO: 228151 - DNA, 201 bp, Homo sapiens
cagctcagaatgccagcaagattttttttaaattcttccctttcacaatagttccttcagtagttctcaaatcttagcattgagtagtactggactgactygaattaatgattggctccctgaatcattcatcggtgaaatacattgattggtcatttgctcattctcagtggggagtgaagttagctccatctacaccat

SEQ ID NO: 228152 - DNA, 201 bp, Homo sapiens
gttattgtctatctttttgatcatagccattctagtgagtgtgaagtggtatcattgtagagctgatttgcatttccttcttgactaatgatgttcaacakttttttcatgtgattataggccatttgtatttcttctttgtgagctaccattttaatctccattttagaaatgaggaaacaatggcactgagaggaaaca

SEQ ID NO: 228153 - DNA, 201 bp, Homo sapiens
attcctggccaggctgggggcagtggcaatatgttgcatgctgttaacctcaagagatctccgaatagcttttatgtatgcctgctatatatttgttgacmattgctggatacaaaggaagctaagtgatctgggaaaatctatttggtaattttcttttcccattctcttagcacttgctgaggccttaaaaacaatagg

SEQ ID NO: 228154 - DNA, 201 bp, Homo sapiens
tcaagatgagttttgagtggggacacagccaaactatatcagcttatttttcaaaaggacttaagagaaaagatgatttcaaaaagtgataaggattatgragaaataatgaaagaaaataggtagagtggtaagggtgcagaggggtgggcaggaggagagcggggagggaaggtgctttaggtagcatggtggaggagg

SEQ ID NO: 228155 - DNA, 201 bp, Homo sapiens
ttgcagctttaaaatgagctctctgttgtatatgacatggctttagaggggcaggagtggaagccaggagatcactcaggtctccttgtctgtgtttagcraacagaatggtcagaacaagggtgcttatactggagatggagatggagataagattttagctttgggatatgcctggaggcagaactgacttgctgatca

SEQ ID NO: 228156 - DNA, 201 bp, Homo sapiens
cactcaggtctccttgtctgtgtttagcaaacagaatggtcagaacaagggtgcttatactggagatggagatggagataagattttagctttgggatatscctggaggcagaactgacttgctgatcactactgagtctggcccaggaaacccagcgaatgtgggacgctaataattgagatggagaagacttgaggagg

SEQ ID NO: 228157 - DNA, 201 bp, Homo sapiens
atactggagatggagatggagataagattttagctttgggatatgcctggaggcagaactgacttgctgatcactactgagtctggcccaggaaacccagmgaatgtgggacgctaataattgagatggagaagacttgaggaggaagtcttgagggttggaagggaaaactaaggattccatttaatttcacctctgaaa

SEQ ID NO: 228158 - DNA, 201 bp, Homo sapiens
agttaatggatgattgttgctcatggttatctgctccagaaaaatgcccccttccctccttattttatgctccctgtctcctggaagcctcagccctatgkttaaggccttcagttgattaaatcaggtccacccaggataatctccctaacttaaagtcaaatgattagagacttgaattacatctgtaaaatcctttca

SEQ ID NO: 228159 - DNA, 201 bp, Homo sapiens
aggcaggagaattgcttgaacccaggatggggaggtcatagtcagccaagatcatgccactgcaatccatcctgagcagacagagtgagattcaatctcaraaacacaaataaacaaaaataatactattttgagaattctttggacaaaaaggcattctactcataaggctattaactcagagaccagagcaactgagtt

SEQ ID NO: 228160 - DNA, 201 bp, Homo sapiens
cccaatgtcctgaacttttcttttcaagaccagtgaattgaatccatttcaaaactgagatgcagtgagcttacatgttcattatctgtttgcctatgctrtctgcgatttttaaaaataaggagtctcggaaagtgattttttttctggaaaatctttacaccagagcaatatgatcagataatgttatttttaaagtgt

SEQ ID NO: 228161 - DNA, 201 bp, Homo sapiens
ttgtacttttggtagaggcagggtttcaccatgttgcccaggctggtctcaaactccttgcctcaagtaatctgcccaccttagcctcccaaagtactgcrattacaggcatgagccactgcaagtggccaggtaatgactttcttgagggcactgtccctgagtttctgcaacatagtaagaagtcagtaagcagttcgt

SEQ ID NO: 228162 - DNA, 201 bp, Homo sapiens
tgcccaccttagcctcccaaagtactgcgattacaggcatgagccactgcaagtggccaggtaatgactttcttgagggcactgtccctgagtttctgcarcatagtaagaagtcagtaagcagttcgtacatatgctgggttattaatatgtgggtcaggaggcagtggtgtgtcactcaagagtgtgaggttccattct

SEQ ID NO: 228163 - DNA, 201 bp, Homo sapiens
atagagataagcagacagactcatgacattaactctgtttttaaacataatgttctaaatagccaaattatggatgtgccacaatcagattaaccttccartgatgtcctatagaatgttaataagaatttccaaaggaaagaaaagagggtggtggtgaaggggtggtgctctatgctcaggtaaatttggaaggttggc

SEQ ID NO: 228164 - DNA, 201 bp, Homo sapiens
ccccagccccaagggtccaggtcttgtagaggctctgtagaaacagtgaatggggagtttttatccccttcaactccttggtcactcatggaatctcgaascaaagcaaacactatgaagcatttataggaactatagttcacatctatcacgctattgctttattcttacctttaagccaatgtcaagataacacatgaa

SEQ ID NO: 228165 - DNA, 201 bp, Homo sapiens
actttttggttgttataattgagggagtatgtgtgctactaccatcttgtaggtagaggccagggatgaacatcctgcaatgcacaggacagcctccccartaaagaatcatcccacctcaaatgtcaatagtgttgatgaaacagaagagttccctggccccactcatggggcatgcgacaggggtgcggctctctgttc

SEQ ID NO: 228166 - DNA, 201 bp, Homo sapiens
cctcccgcctctgcctccctaaaagctgggattacaggtgtgagccactgcacccagcccctctggacttctaaggacagggactatggttgttttgactyaccttgatatccccgtcactcagcacaatgcttggtgcttaaaaggtacctaataaatatggattacatgattggccaaataaataaattcaatacaagt

SEQ ID NO: 228167 - DNA, 201 bp, Homo sapiens
tagtatatgtgtgtgtgtgtgtgtgtgcattttcctacccagataggacagttttaccctgagaaattgatagcatgccccatcaactccaagcccctcargaatggtgggagtgacaggtgatggagcactacatgatggaaaacataccacgctggatgtcaggcgttaggctttccaatccccgtcgtaccactaatt

SEQ ID NO: 228168 - DNA, 201 bp, Homo sapiens
ctccccacctacccatccacctacagctgaggaaatcctatttcatgatgaaattgatcctttgggctttgtttctgaaaggcagcctgggagttttctgyatccttgactggattgttataaaaccattttggcagatgcaattacagtgtgtctagtatatgtgtgtgtgtgtgtgtgtgcattttcctacccagatag

SEQ ID NO: 228169 - DNA, 201 bp, Homo sapiens
aatgattaagttaggcatatatggaaatacttggcacacattcggtactcatgacataaaatttttccccatttattctagttggttctctttggaatgcrttttccagagttagctggaattttggccattctggaagtgcattggaaggtcttcataaactgtgaaacactattacatgcctcgtgttattatggaata

SEQ ID NO: 228170 - DNA, 201 bp, Homo sapiens
tattgttttattcaagggtctcgtaagaatatttttaaaacacgctataaattggcctttgtacctaaaagtcgtagcattatttagtcctctaatttccytgtgaggtatttgtcatttctcccattttatacatgtagaaacttaggcttagaaaagctgagaagcggtagggctgggatttgaacctggacaatctcc

SEQ ID NO: 228171 - DNA, 201 bp, Homo sapiens
tctattctggacattttacataaatgggatcatacagtatgtcagagccagtggtttcatgccttactttatactccttccaataatgagataaaggtctkccgtacagtgggagttcaaaaattaaaagcttgtattattgttgttgttgccattatgaaggacagtctggagtgatagggtcatctgtttttatgttta

SEQ ID NO: 228172 - DNA, 201 bp, Homo sapiens
ctaataatgtatgaaacaggcaaagatgttgattttattaagaatcttggtaaaagtcattttccaatgcagttctgtgaaactggtggggagagtttagkgattcctttgaatcaccggtggtcacagctcattgccccagcccatttttctaacaggtgttaggttatgtggtttaggccaggaagaaagcttactttg

SEQ ID NO: 228173 - DNA, 201 bp, Homo sapiens
tgtccacagatagatgcgtgctccaaaaccagcacttctcaaggccatagggctgtatgattatttgcttctcattcttatccctagacacatccatgtgmccccataagtccccttcctgattctccctccttcctctatatctagtctcgagagacaaccaactgttgttttccctccatgcttcctttcagcctggac

SEQ ID NO: 228174 - DNA, 201 bp, Homo sapiens
accctttctctccctgtggggctgtcccattgctgctctgctaaatagcttagtcccatgattcgtattatgttttataaacagagcgcccagcctcactrggtcccttcagcacaggcacccacagaaatgttgaaatgactgttttccctttggtatggtcacattcctggtcaggacttggtcctctgcagttctgta

SEQ ID NO: 228175 - DNA, 201 bp, Homo sapiens
atgatacttcttaatgattatgtgaattgaaggaaatgttctgttttgccgatttctttcaatgtaggaatttatcatttttacttaatttgttgggggarggaatcactgtttgccattaaaaatgttgttcagggactactttgtgctacacacatattacgatcatcaccagtatgtatatagagcctaccgtatcag

SEQ ID NO: 228176 - DNA, 201 bp, Homo sapiens
cgatttcagttgtgattcttgaaactcagccctttgcccagtaagtgctaaccggaagacttgttttcttacactttctaggtggataatctgatcaccasaaatggcaagggtgatgccatcaacagttgaaaacagaaactctcctatttatttatttatttatttatttcggtttggtttggcaaacatcccattgtc

SEQ ID NO: 228177 - DNA, 201 bp, Homo sapiens
aatgagagagtgtgaacattaggtatggacctagggactttgaggttgtggtcagaaaaagacaaggactcaggcggctggagaccagggtatgagcaaakgtcagagggcatgccatggagcctcaggccagaagggtaagtggaggccagatacccgagtgacctcaagtgctggtcctttacccactcgaaacctcac

SEQ ID NO: 228178 - DNA, 201 bp, Homo sapiens
gaaagacacatatgactataaatcatcctcctaccaggtaaaaagtgttaagtatcttaagagaaagatatgaacaaataccatgggagccattagcttayggtattgatgtgaggaatctgcctaataggaaattagtgatttaaaacaatgtgaaaaagtcaaatcagtacaaatagtgtatgctgataacagcaattt

SEQ ID NO: 228179 - DNA, 201 bp, Homo sapiens
tgacaacctcccatttgaggtcagtgtttcccaagggggatctattggcattctgggcaggaaaagtcttcgctctgtggtgctaacacactacagaactkttagcaacattttgagaactctccaaatgtcagttttgccctccaattgctgagacatcaaagaaatgtcctcacctcctccatttcctagtgcctccta

SEQ ID NO: 228180 - DNA, 201 bp, Homo sapiens
agaagtatattgtaaaacaaagcatggatcgcttacgtgttgcaaagatgatgtatgattcagcggttccaagaatggatctggtgcccagatggacctgmatttgaacacgacttctgccttttgctagctatgtgaccttgtcctattgacttaagctccctgtacctgggtcctcccctgcaaaatacattatatgaa

SEQ ID NO: 228181 - DNA, 201 bp, Homo sapiens
tcagcatagtgtctgctactgaagttatatttaaaggtggtaggaaatgttatttaaaataatattttaacccagctaatttttgtatttttagtagagayggggtttcatcatgttggccaggctggtctcgaactcctgacctcgtgatccacccgcctcaacctccgaaagtgctgggattacaggcgtgagccaccc

SEQ ID NO: 228182 - DNA, 201 bp, Homo sapiens
aatgaccagaagtttgcattttattcttagtacatattgaagccactggagtacttttagctgaagagtaatgtgatacgatctgatattttcacagatgyctgtagttgctgactggagaatgggctgtaggaggatggatagaggcaggcatctctgttaagggaacccttgtagtagcttaagcaggtggtactgggg

SEQ ID NO: 228183 - DNA, 201 bp, Homo sapiens
tgtctactattatgagttgttctgcttgtctaaaacaaaaggaaaaaaacgttctgaaaacagaactatctgttgattataacatatgccatgttagttgwtgaaaaaggaagaaaactagacatagcagttactcagaactacttttaggagatattttgctttccatttagcatttgggaccagctgaatacacagtta

SEQ ID NO: 228184 - DNA, 201 bp, Homo sapiens
tagatggaaatggcatcgactgtggcttttcttttctaatactgctgtgaagaaatgaatgtcggctctaaatgtataatctgtgcttcctcagtctgtgmtccatcctggaaaacaagatttttggtgccatgatccctgaatttttgttgccaccatgcatgaatttgagcaggtcctattttcttgtcctcctttagc

SEQ ID NO: 228185 - DNA, 201 bp, Homo sapiens
attacctattgatagaaatttagatctaaaattcatgtttagcctctatcctgacttgtaattctttgccactttcttgccaaaataagcttttgtatcarggggactgatgtccatgagccactccaaaggattttcctcggctgcaagtacagagaaacaaaaatatgagcagtaattgcaagttgactgaaatattta

SEQ ID NO: 228186 - DNA, 201 bp, Homo sapiens
ttgatcactgtggaccagagtgaaaaatactttcttattgccatcttgacctacaaagatgtgcttgatatggggtgtgttcattttactgtaattacatrtgccaaatacttggagtgtatgtctttatttatcatggtaactgactaggcctttaaaaagtcatttacttttggaaaatagattcaaaattaatccaaa

SEQ ID NO: 228187 - DNA, 201 bp, Homo sapiens
agtacctgggtaatgctaccattcatatcccaaacctcagcatgatgcaatatacccaggtaacaaacatgcaaatataccccctgaatctaaaatgaaasttgaaaaaataaacacataaaaacagatgaatgaattttttttaaaaagacctaagcccaagggctttatgaatgcaagctactttcaaatgattgacaa

SEQ ID NO: 228188 - DNA, 201 bp, Homo sapiens
gtgccacataatgtcatttcagtcaatgatggactgcaaataggaccatggttccataatattataatactatatttttaccataccttttatatgtttakatgtttagatacacaaatacttatcatcgtgttataattacttacagcatttaggacagtaacatgctttacaggtctgtaacctaggagcaataggcta

SEQ ID NO: 228189 - DNA, 201 bp, Homo sapiens
aggtaattcctcaaaaaatgtgcagctcacagatggtggttgcggctcataggatctctggcttaagaccctcgctgtacagtggtagtcagtgggtgggmggaggggtgacaagaaggcagggaaggagagagtcttccagaggcagaagagaccagtgagtagcgtctatggaaccacactgccggggctcaaatcttg

SEQ ID NO: 228190 - DNA, 201 bp, Homo sapiens
aagtcatttacttttggaaaatagattcaaaattaatccaaaaattattcttcttaagtgtaaagtctttaagtgttctctcatagattattggaaatttygtgttaccaagcccaggctctgtacatgttttgtgtacggaagggaagagtaattatgtagaataagtgttaactattatttgctcttcattctgaatgt

SEQ ID NO: 228191 - DNA, 201 bp, Homo sapiens
tagctgtgttgaaatttaaatgacagcaagtttaggatctgtatttagaaactatttcatctttagtataatgaggtgattagactaatacaatttgttgsttgtttgtaagttttttagtttggcagtacaattgctttttcaaaaaaatgaaaaatatgaaactctcaaataagaaagaggatgaaatcttggaccttc

SEQ ID NO: 228192 - DNA, 201 bp, Homo sapiens
attaaaaagatgtcatgacaataactttagaaacagaagcctggagaaccagctaaggcaacttgtaggctcatctttgggagagtggttttccccagtcmgaatgccttaccccattgatctcacatctttatttcatttcaaccatactctccttccccaacaaaacctcagcacttaatgataccatcataattcttt

SEQ ID NO: 228193 - DNA, 201 bp, Homo sapiens
agcctggagaaccagctaaggcaacttgtaggctcatctttgggagagtggttttccccagtcagaatgccttaccccattgatctcacatctttatttcrtttcaaccatactctccttccccaacaaaacctcagcacttaatgataccatcataattctttgatttattcacagtacatgcacaagagtctcagaata

SEQ ID NO: 228194 - DNA, 201 bp, Homo sapiens
ttggatagactcccagaagtgcaattctgtgtcaaaggataaatacatatgtaattttgctaggtattgatgaacacttatccatagggtttgcatatgtmtctttgtatttataccacaactatataagaattcctagttccctaagtctggccaacatactatattgttgaactttaagactttcctgtcagataggtg

SEQ ID NO: 228195 - DNA, 201 bp, Homo sapiens
gccacctagttctgtacctgaaatattgtggatgttctcttgatatttatcaaatgaatgagtgaatgaatgatatctccattttacaggtagtcatggaracttagagctaaatggctctctgatgtcattcacctacaaaaaaggtctaaaatttttgcccacacagaaatcgattgcctgtcctggtgattattttct

SEQ ID NO: 228196 - DNA, 201 bp, Homo sapiens
attactcaccatattggcctttgccttaacttcttttctcataatgtgggcatttaggattttcaacttctcagccatcctagaaaagtttgacttttatrtgatgcttaaatgtcaatatctaatttcagaaaatgaatttacaatttggggggaggtgatttcagagtacactttgcctacctctgatttggcaaagga

SEQ ID NO: 228197 - DNA, 201 bp, Homo sapiens
tagaaaagtttgacttttatatgatgcttaaatgtcaatatctaatttcagaaaatgaatttacaatttggggggaggtgatttcagagtacactttgccyacctctgatttggcaaaggatcaagaaaatttgtcgagttctgaaagcctgcatcttttaataagcttcttcaataaaaatgtgattaaaatgtttcata

SEQ ID NO: 228198 - DNA, 201 bp, Homo sapiens
ttatatgatgcttaaatgtcaatatctaatttcagaaaatgaatttacaatttggggggaggtgatttcagagtacactttgcctacctctgatttggcaraggatcaagaaaatttgtcgagttctgaaagcctgcatcttttaataagcttcttcaataaaaatgtgattaaaatgtttcataaggttaaagtgttgcc

SEQ ID NO: 228199 - DNA, 201 bp, Homo sapiens
ttaaaatgacagatttaaatgtatcccaatagtagaggaaccactggtaataggtcataagtaaagtgtttctaataaaagcattgctgtcaagtactaastgaatcaggttggttgcctcattgtttgttggatatctatactcttgtctcatgcagtttgctcttaccagctcctcaccttcctgagctgtaaaattta

SEQ ID NO: 228200 - DNA, 201 bp, Homo sapiens
ctacatgcaaagaatgaattaggacttgtacctcacaccatacacaacaattagctcaatatggatcatagacctaaatttaaaaggtaacagtataaaaycccttggcaaaaccatatgaattaatctttgtcatcttgagttaggtttcttagatacaataccaaaagcacaggtgacaaaatttaaaaaatagataat

SEQ ID NO: 228201 - DNA, 201 bp, Homo sapiens
ttgtattagtttattcaacaagtatggttgtgtgccacataatgtcatttcagtcaatgatggactgcaaataggaccatggttccataatattataataytatatttttaccataccttttatatgtttagatgtttagatacacaaatacttatcatcgtgttataattacttacagcatttaggacagtaacatgctt

SEQ ID NO: 228202 - DNA, 201 bp, Homo sapiens
acacacacacatttttagatttacacaaagatgtacacaaagatgatagaatctgcttgtattagtttattcaacaagtatggttgtgtgccacataatgwcatttcagtcaatgatggactgcaaataggaccatggttccataatattataatactatatttttaccataccttttatatgtttagatgtttagataca

SEQ ID NO: 228203 - DNA, 201 bp, Homo sapiens
aggcatgttaaagttacagattctattcatttgtgttctgtcaaatattttcaatttaatccagttaaggtctcatttttcttcccaactttcaaaaaaawatatatatttttctctatgaggccgctactttttcaagaatataaccaggcattaacaaacatgaaactactcatagcaactccataaaaattgattttt

SEQ ID NO: 228204 - DNA, 201 bp, Homo sapiens
gtactgatacatgttacaacatggatgaaccttataaacattacagtaagtgaaagaagccagtcagaaaagaccacatatggaataatggacagccagarggtcaggcctaccacagacacatttaacattattaacattgctaagtaatttcagtaatattatttattccaagtttttattctgcctttatccagtttt

SEQ ID NO: 228205 - DNA, 201 bp, Homo sapiens
tcctaactataaaatggaaaaattcttgttttctcctcctacaatcaatcaatatcaataatgcaatgatgaagacagatgatttatacacacacacacasagagagagagagagagagagagaaagagagagagagagaagcaatgaacaccttgaaatagaaagtaaaagttagggaagctgctcttactataattagc

SEQ ID NO: 228206 - DNA, 201 bp, Homo sapiens
ttcttgtgtatacaggaatctaaagatgcacatatgtggagttgggctattatagcacatttatttgcatcataatatgctatctaatgttcagcagcttkattttttccacttcatatgtcatagatgtctttccatatcagtacatgtagacattcaatatttttttttttgacagtctcactttgttccccatgctgg

SEQ ID NO: 228207 - DNA, 201 bp, Homo sapiens
tttgcatcataatatgctatctaatgttcagcagcttgattttttccacttcatatgtcatagatgtctttccatatcagtacatgtagacattcaatatwtttttttttgacagtctcactttgttccccatgctggagtgcagtagcatgaatactagatgttgcataatattccatcacacacaattgttagtggatt

SEQ ID NO: 228208 - DNA, 201 bp, Homo sapiens
cagtactggcaacagagcaagaccctgtctcaaaaaaggaaagaagtggctgggcaccgtggcttacgcctgtaatcctagcactttgggaggccgaggcrggtggattgcctgagctcaggagttcgagaccagcctgggcaacacagtgaaaccccatctctacgaaaatatattttaaaaaaattagctggtagtggt

SEQ ID NO: 228209 - DNA, 201 bp, Homo sapiens
atatatacttacataaacacaggcatacacaatgttaactgccctccataaaagttggactattaattcctccaccactgccacagctttattcctccacrtgccccttatcactgagtgaacctcagatgtttccaattgaagagagggtcaacaaactgcacctgagaagggagtctctggcttaaggcaggcgcaaac

SEQ ID NO: 228210 - DNA, 201 bp, Homo sapiens
tcatctcacattagctctcttagctctggagagttttgcagaacaagaaaagcaacaggagtgttttgcctttgctcctgcgatgcttcatcaagtaacasgtgtccagattttcactgtctactatatgtaagtgccccccttcctgtttacctggcatatggtgtttttagcaatattcaatgttttctgtttgtttcc

SEQ ID NO: 228211 - DNA, 201 bp, Homo sapiens
gtgttttgcctttgctcctgcgatgcttcatcaagtaacaggtgtccagattttcactgtctactatatgtaagtgccccccttcctgtttacctggcatrtggtgtttttagcaatattcaatgttttctgtttgtttcctttgctttaggcttctaccctcccccaaatccttcacccccaactcctagactgcccacc

SEQ ID NO: 228212 - DNA, 201 bp, Homo sapiens
attttgctaagggctagggacacaaagatgcaaaaggcagaagtctctgacataatggtgagggcaacagtttagaagtgaaagaataaaatgtttatggwctgacatatatatatgtatctagagagaaaataattgggatagcctactttaggtggtgtggttagggaaggcctctctatggaggtgacatctaaactg

SEQ ID NO: 228213 - DNA, 201 bp, Homo sapiens
attcaaagtgattaccttctggaacagttctgagttctcatctcatttctggccctagcatgtaagcttgggtttttggtttcttcgttttcaaaagaaascagttggaataaaccatctccctggtccctcctagcattctgaaaccttcagtataagaaatttctaaaaggaagccctgaaacacctctacttctcagt

SEQ ID NO: 228214 - DNA, 201 bp, Homo sapiens
aaaatgacctgatatatatatatatatatatacacacacacacatatacatatatgtgtgtgtatatatatatttatatatatataaatatatatatatawatatatatataaatacaaatatatatatatatataaatacctacagatgcatcaaatatcaattcttcaagaatgtattggcctaagatttacaacaact

SEQ ID NO: 228215 - DNA, 201 bp, Homo sapiens
gagcccaggagtttgagagcagcctggacaacatagtgagactctgtctgtacaaataatttaaaaaaatattagccaatgtggtgcatgcctgtagtccmagctttttgggagcctgaggtgggaggatcacttgagcctgggaggtagaggctgcagagagctatgattgcaccactgcactccagcctgggcaacaga

SEQ ID NO: 228216 - DNA, 201 bp, Homo sapiens
caggctgagatgatatgcagctctctgggtgctcccagcaccatcattctagacccaaaccgagatatgatttaggaggtccccataaaactggggctcaktgtcctaatcggagtcatttatcctgtcttaagctatcaaatcagagctcctgggttgtggggagttagttagggggtggtttttctagtatattttaca

SEQ ID NO: 228217 - DNA, 201 bp, Homo sapiens
gacccaaaccgagatatgatttaggaggtccccataaaactggggctcattgtcctaatcggagtcatttatcctgtcttaagctatcaaatcagagctcstgggttgtggggagttagttagggggtggtttttctagtatattttacaatgtatattttcaaacttattttgaaaagaatctcatttatgaagggaatg

SEQ ID NO: 228218 - DNA, 201 bp, Homo sapiens
ctttttagaacacaatttgcaaagattatctgaaatagattaaccttttaaagtgataatgacataaaattatgtaagtaattttcctaagaaataacacwctgaaaataatgtgtgacaccatcgacataaagctcagcataggcttttgtctgaattcagttactttggggtgaccgttttaatcaaaccatttgtctg

SEQ ID NO: 228219 - DNA, 201 bp, Homo sapiens
ggaatctgaagagggcaaaggtatagctcatcagtgattcatcgaatattggtgaatcattcagaattaggtcccttctgtgtaaaatggccttttttttwaattcttttctgtctcctgtatcaggtaaagatagtgatatcacctggttctaccttatgggactttgcaagaggtacagcagcaagttctaagaacaaa

SEQ ID NO: 228220 - DNA, 201 bp, Homo sapiens
cttgctgggttgtaatttggtagagtatcagaatcgtatgccaacataaaacccaaagcatcttaaattctaagtatcacttattgccctatgttatttgyactttggttgagttcctccaagctgagcaactggagagaggttccaggagagtgtgtgaaagagtctactttattaaaaatatactgaaatgacagattc

SEQ ID NO: 228221 - DNA, 201 bp, Homo sapiens
atgaagaatggtgtacacatctgctgaaatatcaaacatttcctttacattggtgaagaaactaaaaggctaatatgtctaggacatataaaagcctagascttctgttggtctgttttattcactgctgtgtcctcagcacctaggacagtggctggcatgatgggcacactgcatatacttgtgaaaaattgttgaata

SEQ ID NO: 228222 - DNA, 201 bp, Homo sapiens
gattagtgttaatccccttcatatatgttctgaggatttcaataactgatattcatattggtgatctggattcatcaagaatttatgagggctggtttctkcctaaaacagcattttggatcaatttttatgtgagagcaagctaaaaatgaaaggtaaattatttgatactgaaagtggtaaatctttggaatctatgtc

SEQ ID NO: 228223 - DNA, 201 bp, Homo sapiens
tgatgagaaaaagagggaaataaccttagttgaagtagagctaacatgctaagataaataatgcagttttgaggtagagaacataggcaagtatgccattyctggaaatgagtgggacttacttaaaagggtagctgcagagtcattccctatattatgaaaagggactgagtggtgttgaagaatcacaggaagaatacc

SEQ ID NO: 228224 - DNA, 201 bp, Homo sapiens
tatgaaaagggactgagtggtgttgaagaatcacaggaagaatacctctcatcttgaaatcatgtcttatgttgatgcatacatttggtctctagttcttwaaaagcacttcggtaggccacagggaatagggaatggattggaaaaagaagcagtaatataagaagccataaagaagttgtgtgggagacctctagggac

SEQ ID NO: 228225 - DNA, 201 bp, Homo sapiens
gcataatcacattgttcttagatattgggagaaaaaagataaaagatggaatttaataccaaagcttacttttgactcagcagactaaagttttagtcccygggagaaaagggaatcagaggagagagcaacctgatattttctatacttaagagtgaaaccaaaattggaaaaaagatataatcagaacccaccaccatc

SEQ ID NO: 228226 - DNA, 201 bp, Homo sapiens
cattctagctcataaggttcctccacattctaatgctttctgtcttcttcaacctggctgtatgtgtaatacgcatattttcatgattctcatttttccaracttcctagttttggtctggaaggtcttctctttttgtgagttgattgctctttgcccaatttatgtcctaaagaacagtctcagggcaaggcatgagac

SEQ ID NO: 228227 - DNA, 201 bp, Homo sapiens
gttccagactagtggaagagaaaacctgtaattacttatactttgtggtaaaaagctgtcatggacatatgtataatgaatcagaaaagcctgaaagagtytgaagagtacacaaaggaggtggcatttgagcatgctctttaaaactcagaggaagaaaaggaaagagaaaggaactccacatggaaggaagaacactta

SEQ ID NO: 228228 - DNA, 201 bp, Homo sapiens
gacctcatctgagagccctacatctggagttatcctggttttatagctgttggttaggtttgtcaacttctctagaggcagtgattataaattctactgayatggtttggctgcatccgcacccaaatctcatcttgaattgtagttcccataatccccatgtgtcatgggtgggaccaggtggagaaaattgaatcatgg

SEQ ID NO: 228229 - DNA, 201 bp, Homo sapiens
gcctctcggtgacatggttaaggtgacagttagatcatggccaggtcaggattcatcccaggagcatggctgatcccaaagacatttctttaagtactaarcattctagctcataaggttcctccacattctaatgctttctgtcttcttcaacctggctgtatgtgtaatacgcatattttcatgattctcatttttcca

SEQ ID NO: 228230 - DNA, 201 bp, Homo sapiens
gtgctctgcccacattgtgttacccccacccaccatggctgcaatgcatcctacctagcctgacttgcatctgactggccctggaaacctggcttttctcwctctccaggtgggagaaggcagaagtgctggagtattgatgtctccccaggagcagttctcaaccagtgaggacaaaagttggtgtatgaatacgctagt

SEQ ID NO: 228231 - DNA, 201 bp, Homo sapiens
cccccacccaccatggctgcaatgcatcctacctagcctgacttgcatctgactggccctggaaacctggcttttctcactctccaggtgggagaaggcaraagtgctggagtattgatgtctccccaggagcagttctcaaccagtgaggacaaaagttggtgtatgaatacgctagttccctcacaccttggctgggat

SEQ ID NO: 228232 - DNA, 201 bp, Homo sapiens
gtgtgcaccattcttcataaatcaagttgttggtaaaaaaaaaatcatttttattacgttataaagtatataattccccaatagtacatcaactcctcaaycacatcaggagagttgttaaaaacagccttgccatcatatctgaatttttcatttacaaatcaagtccaataacactaagtcatttaaaagttagactcc

SEQ ID NO: 228233 - DNA, 201 bp, Homo sapiens
aaatatgattaggtcattgcaattaagtggcagagctgagattggaaacttacatgtattggactttgagagccctcttggggttgtgccaatttcattamctttggaagacctacttgtaaatacttagagattttgaactaaggttttaataaattaggaagaaaaaggccaacctagtacctattgggaatagaaaag

SEQ ID NO: 228234 - DNA, 201 bp, Homo sapiens
gtctttatctccctgtatctaagagctttgagatgtatgtgagttcattttctaataatctcaaaacatgttctccgatattagccagtattttccccagmctgctctctgtattgagacgcagggtagtctagtggctaagagcactgaccttctgttcaaaccttggcttacagctgtgtaactttgggccaagtgatt

SEQ ID NO: 228235 - DNA, 201 bp, Homo sapiens
ataaggctagaaataggttagaggtgctaaacaattgcctgtgtattgaatatgatgttcatatgtaaacacagcccacagatcacaagttctgaaatgtrtgtgttcttaattagccaaatgtgagccccaggttggcgtaaatagaaactcctcaataaacgttagtgtgtcacagcgttagctagaagtgtggtagct

SEQ ID NO: 228236 - DNA, 201 bp, Homo sapiens
gccaaggagtagctgccctttagtaattatttaattgcttagaactttatttccccatctgcaaagtgggaggcgatagcttctacttcacaacactctayggggggtttcaccctcaaacataccccaaatgtaataggccctcaatgaacctgacctcccttctttatctggtgtcaagctttccgttggatctattcc

SEQ ID NO: 228237 - DNA, 201 bp, Homo sapiens
aaatgaaattacccgaagcattcatttttcaccatctagtaaatgaatctctctaaagaacacgaggtcctccctttttggttcaggcttcataaaatccytcttttcagtggaagtggtatagtactagtgtctctgccttttctaggcttttcctctctggtggcttactaggcaatatttgctccataaaatgtgtat

SEQ ID NO: 228238 - DNA, 201 bp, Homo sapiens
ggagtgatagagctcaagtccaggtcttctaacttcaaattcacttaacattcactttatacttgctttatgtggggcctggaatgtagattagtgaatgyagatcaacgaagcacagcagagctccccctcagtggtggaggtgggtgtgctaacatggagatacaagccagtgactgtggagggggactgtcctggtca

SEQ ID NO: 228239 - DNA, 201 bp, Homo sapiens
acttgtactcatgactctttttgtcttggaccaataatttaaaatccaagtgtgggcatgtgttggagattcaggaagaaaaagaaaccaggaagataagsggaaaatacaatgagatagagataagcagacagactcatgacattaactctgtttttaaacataatgttctaaatagccaaattatggatgtgccacaat

SEQ ID NO: 228240 - DNA, 201 bp, Homo sapiens
cactttacaggccttttgcaggtgcctgcttattttccgggtcacccaccggggctgtgagctctgggcaggcagggcttgaagctttatcatggctctgytcccagcctgcttgtcagctagtgtgctttgactgtgtgagaatgaagacaggggccttacagaataagatttccactcaagatacaactgaattgtgga

SEQ ID NO: 228241 - DNA, 201 bp, Homo sapiens
tcgattaagtgagtcaaagcatgcaaccacttaacattgagctcatgaggactcctagatttttgtgacaatacaaaggcagagaagatacgcagcttttyggaccctctagtgtctccctctccccatgctggattaggtaccccctttctgtgactcccacagttgcccatattttcctcatcacagcactttacaggc

SEQ ID NO: 228242 - DNA, 201 bp, Homo sapiens
actgattgactaagagagtagctgccttgattctgtaggctttctagctccaggatccagacctcagtgtctgcactttctaaccttgggctctgagaagkatctctatgtccttataaataaatttcccttttgtgctcaaagcagtttcaatggatgtctgttacttgcaaccaaaagagtcttgactaagtgaccaca

SEQ ID NO: 228243 - DNA, 201 bp, Homo sapiens
agtgggtcatccactggcctttgtagccccaggtatctttacattatctgtaggtagcatccaggctagtagaggagaaaggcaagtacaccagtgattgsagcatagtgagacagggctctgaaagaggtaagcgcataagttgctatagaaacttagagacgtggccaaaaattgagactgggatagggtgtggggaat

SEQ ID NO: 228244 - DNA, 201 bp, Homo sapiens
caaactattcagtgtgatggggaagaaggaaggagcagggatatgatataaaactggagttcttggggactgtgccacaaagagtctgcagtgctaagcartggagtttgaacctttgcctgtaagctatcagttcattgagtatccagttccttccctccctccaacatggaagcatctctagattctgaaattacaaag

SEQ ID NO: 228245 - DNA, 201 bp, Homo sapiens
aagcatctctagattctgaaattacaaagattatattctgacaacattaaatgcagttttagaaacaacaacaatacatgcagaatcctaacacctgacamcagtgttttcatttttgccaccttatcttctagttgtcctcaaacacacctgtttttgcacatggttgcaatccattgacatatcattttcactttccag

SEQ ID NO: 228246 - DNA, 201 bp, Homo sapiens
atgtgttaggctccggtgaagcaaaagtgaatgacttggacactcctgcctttgaggaactcaggatctggtatcccagtctctgctgaagcacttagccrtacgtattttaagcatgtggttttaatattgtcattttatttaaaaagatattcagttctttgagggtcaatttcaaatccttttcttgtatagtcactg

SEQ ID NO: 228247 - DNA, 201 bp, Homo sapiens
ctttatgatgctttttttgacttcaactagctctgtgcttttggtggtattttgtagctggtttttgctcagttttctatatctaaacatctttattttcygtatttctagtccacgtatttgatgaaaacacattgatcaattggtataaattttttaaaatttaaataaatgtattcattaaagagtctagaagtgctt

SEQ ID NO: 228248 - DNA, 201 bp, Homo sapiens
ggttaagcctctcggtgacatggttaaggtgacagttagatcatggccaggtcaggattcatcccaggagcatggctgatcccaaagacatttctttaagyactaagcattctagctcataaggttcctccacattctaatgctttctgtcttcttcaacctggctgtatgtgtaatacgcatattttcatgattctcatt

SEQ ID NO: 228249 - DNA, 201 bp, Homo sapiens
gtgcatgatcttattcaaccctcaccatgcctctgtgaagcaggcactattatgccatccattttacagatgaaagaagtaagtgcaggttaagcctctcrgtgacatggttaaggtgacagttagatcatggccaggtcaggattcatcccaggagcatggctgatcccaaagacatttctttaagtactaagcattcta

SEQ ID NO: 228250 - DNA, 201 bp, Homo sapiens
cttttccttctcctttggtcagctttggtctagatctgtttttctgatttataataggaatattcatagcccaatttgttcactgatccatggatctactstgttgctgatgtacgcaactgcaagggagaagaaaatatttttcttttccattgccaggttaatggctgaggcccctataacaaaagaaagattaataag

SEQ ID NO: 228251 - DNA, 201 bp, Homo sapiens
tgagtatatacagttgcagggatgatttatttgatgatgactataaagtgcctggcacatagtaagtgctcaataaatatcagtggttaatatgcccttgmcctagaggagtacaacgccttctctatgatcttaactttgagctattagtaagtccctaagttcatatttttatgcagaggccaaaaatcattgaaagaa

SEQ ID NO: 228252 - DNA, 201 bp, Homo sapiens
gggaataaatgccctcagaggctactctcagccactgggcatttgaacatgtgaataagtgctccggcctttgcgattcaggtgaacagttctggaggcawgctgtgtacttctctggaggttctggccaaaccagcctcttgctggtttggcaagtggtaaacttgataatgtacccttagttggcttttgctcttccct

SEQ ID NO: 228253 - DNA, 201 bp, Homo sapiens
aacacagcataattacagagagttactgggtcctaggtacttaatgtgcatgatcttattcaaccctcaccatgcctctgtgaagcaggcactattatgcyatccattttacagatgaaagaagtaagtgcaggttaagcctctcggtgacatggttaaggtgacagttagatcatggccaggtcaggattcatcccagga

SEQ ID NO: 228254 - DNA, 201 bp, Homo sapiens
gtaaaacaaagggcttgcctaggggtagtctatattttcagaagttttcctgttatagcattccagaatttctcaggtacttttataatgattaagagctytatgatctcaaacacagcataattacagagagttactgggtcctaggtacttaatgtgcatgatcttattcaaccctcaccatgcctctgtgaagcaggc

SEQ ID NO: 228255 - DNA, 201 bp, Homo sapiens
ggccaccctatttcctggaaccatgatcaaattcacggtaggaagaaagggagagaggtggcagcagcagtgttgctactggaaaatcatatgcttccccygagtattccccagcagattttcactggcttcaagatggtctgagagaatgagtagttggccatgggatgggaacaggcaggagaaaaaggtgttaggaat

SEQ ID NO: 228256 - DNA, 201 bp, Homo sapiens
ctcatgtgatctacctgcctcggcctcccaaagtgctgggattacaggtgagagccactgtgcccagcctccattcagtgttcctaataacagcttgtggytgtgccatttatttagtggagttattaagtaccccaagctttgctcttacagtgtcccttatagagtaaaattgcaggtcttgcttgccagtcttctgag

SEQ ID NO: 228257 - DNA, 201 bp, Homo sapiens
ttttttaatgtactaagtattgtttctgccttcaaagaactcttgccctggtgaaggtgaccaacttctgaagtatatgactctgggtgataattgctgtrttatgccaaacgcagagctttaagaagcatcaaactgtgacttcagtgggaaaagatttcacaaaggggtggcacttcagtggcatcctgtaaggctaac

SEQ ID NO: 228258 - DNA, 201 bp, Homo sapiens
caacgagtaaaaaaattgctattttagtcccgattataaaagttgcagtgtaattctttaaatagtctttcccattaaattcgtcctcagtatgattattstcaccaccacttctgtgcttatgttatcataggacagtctctctgctgaacatctcctctttctttatttctgtgtttattttccctgaaactctgacag

SEQ ID NO: 228259 - DNA, 201 bp, Homo sapiens
gattttaagtcaatcggtccagttctggaatgaacgttcttgactggggtctgcatactttctctaaaaagggccagatggtaaatattttaagctcttcrggctattcagtttctgtcgcaaatccttagctctgctgctgtagcccaaaagcagccaaagacagtaaatgagtgagtgtgactgtgttccaataaaagc

SEQ ID NO: 228260 - DNA, 201 bp, Homo sapiens
ttgcatgttttttagtttccttctgtgcacacctgctgttttcatcactgttttcagcttttctttgggagtttgggatctcttgctttagaaatagacaytgcctgaatcccagtgcccaccactttctgaggcttatgagccaaccccctacccttggtaatattgggccccactaagcactttctctttcttgagctc

SEQ ID NO: 228261 - DNA, 201 bp, Homo sapiens
ggcctaggatcattattttattttaataatgagaatcatgaaacccaaagggttaagtgtcttattccagttctcccagcttctcaaagacagaatcctcygtcaccactggtctcctggttcttttcgtctgtactcaacaacctccctgcctagaagagttatcgtaaatgcagatttttatatagcctcagcttttat

SEQ ID NO: 228262 - DNA, 201 bp, Homo sapiens
ctcataagtaacacaacacgtggagttgtatggtcaaggaaatggcagaaacaggttctttttgcaaaggaagttttccctggacattcttaggtagcagwcgtttctttttcttggacctcctatagcatttattcagaccttttttatgacttgcattacttcttgtactatattttagtacttttattgttatcatct

SEQ ID NO: 228263 - DNA, 201 bp, Homo sapiens
tttacaccatgaaaattggcaaacactacaattagaacacccccaccacccagttgctgaacatttattactacactaagggagtaaatgttgccattaasagagcaagcataatgtgggggatagaacaagaagaagtaggttaaagagaccctactgcatgcctacctttgatttctgcttcttctaatgtattttggt

SEQ ID NO: 228264 - DNA, 201 bp, Homo sapiens
gaaacatagtttggctggatatgaaattctgggtagaaaattctttaagaatgttaaatgttggcccccattctcttctggcttgtagggtttctgcagaragatctgctgttggtctgatgggcttccctttgtggataacccgacctttctctctgactgcccttaacatttttctttcatttcaactttggtgaatct

SEQ ID NO: 228265 - DNA, 201 bp, Homo sapiens
ttttttccccacttaatatgtggtggtcatctttcttgtcaatacataaacgtgccagttatcacagaagagaataccaaagggtgaatttgatgctgagrcaatagcttaatagcactatagcagagcatggccttgttattattagcagctccctaaattttgtctgaggatgatttgagctggggttggcaaacaaga

SEQ ID NO: 228266 - DNA, 201 bp, Homo sapiens
ctactctgggaatcttcaggaaatagagataaccaggggaaaatgaacagtaattacctggcattaagttgagaccttttgtgtgaaaggcacgtgaagayaggcctttcagcgacttaatgagccttatcacgggccttcagcttttctgaataaatttggaggtaataaaatgttggaccttgctttcaaaccaaatta

SEQ ID NO: 228267 - DNA, 201 bp, Homo sapiens
ttattaatgagaacccagagtaatttcagaagacaatgagtaaataaaagtatttaataaaatgaaatagaatctgatttgtataaatgaactcaaaagartgccccatcctgtttgccactcgcagctttgttcattcgttcggtaaatatattatagtatcttctcactatgggccagacactgagctaggcactggta

SEQ ID NO: 228268 - DNA, 201 bp, Homo sapiens
atcttttcttcctactcctgattccattttccagaggttacccctctgaacctttcagtattatcctttctgagacttatgaatccttatacaacattatktatgtacgtatagaggatcatattttgttaaaaaaagtgatattgctataaaaagtgtgattttttccccacttaatatgtggtggtcatctttcttgtc

SEQ ID NO: 228269 - DNA, 201 bp, Homo sapiens
aaataacattagaatttgctttggctctgaagcactgcagataaaaatccctactgtcaggaaagcaatattaaacatcttggaatatatacacatgcatsagttagtgatgctttaatttatatatagatgcttcagtgaaaagggaagatataatgtaagtgtagaatgatgtcatatggaaaaaaacccaagcaaagg

SEQ ID NO: 228270 - DNA, 201 bp, Homo sapiens
atattgatggtccttgggctttgcttgcctcttcacatgtgttttatttttgcctgcaaagtatttttggtgatttgctttattgtgactgtaaagtattktttaatgagtttgaatgctgttaggcatattgctcattctctaggcctatacagttgccacgactgccttctacctaggcttgcttcactggctaatggt

SEQ ID NO: 228271 - DNA, 201 bp, Homo sapiens
ttatgcagctagctgtcaaacattccccaccaaacaagagactatgtctcataaatgatgatttctgcccttgccattagcgttggggtcctccatttctktaagccccagcttccttttaacatcaagggctagattttggcaaactgaattggcctaaaagcatatacccttgaaattgttgccttacatagtctttcc

SEQ ID NO: 228272 - DNA, 201 bp, Homo sapiens
ctatgtttagtttctgttttagtgtattttataaaatccttgatttaggtgtgtgatacactttagttggtatattttcaaattaatattttagtctatamattaagattatagagataatgaaagagcttctgcataacaaaaggaactatcagcagactaaacagacaacctatagaatggaagaacatttttgcgaac

SEQ ID NO: 228273 - DNA, 201 bp, Homo sapiens
tgcttggcttaacacaattcatgagcaaaatcaacttgctaaaatgcaggccatttggccctgagggctggagagaaccattatattgctgatgatatttrttgttgaacttggatctctttcacacgccatttgacaatgggctcagagtccatgggtccctagttgacttttcaaaaaggaaggaatgtttcagtgaga

SEQ ID NO: 228274 - DNA, 201 bp, Homo sapiens
atcctgtttcacaggctgggagtagtgaggttggtggccaatagtggtgtcttttgcttatatgaaagttgaataaatagtctatgtttagtttctgtttyagtgtattttataaaatccttgatttaggtgtgtgatacactttagttggtatattttcaaattaatattttagtctataaattaagattatagagataa

SEQ ID NO: 228275 - DNA, 201 bp, Homo sapiens
agaggaatgctttgtctcttataagtaaagatgatcactgctgacctcttcataccttctacctctttaagtatgtgctcctgttaaaaataaagatcgarttcaaaaagatgagcttgactaagagctgaaagggaattcattaaaaatggccttttaaaatgcctaaaggttgagttccagtggtaggtttagttcatt

SEQ ID NO: 228276 - DNA, 201 bp, Homo sapiens
aatcaacttgctaaaatgcaggccatttggccctgagggctggagagaaccattatattgctgatgatatttgttgttgaacttggatctctttcacacgscatttgacaatgggctcagagtccatgggtccctagttgacttttcaaaaaggaaggaatgtttcagtgagacagttaattagctttttgtcttctgggt

SEQ ID NO: 228277 - DNA, 201 bp, Homo sapiens
accttcattgtactggctcagtctcccttctttccggctgttccctgaatatgtgttgtactatccctttactatactttctcctgcccctcacctcaackggagattcctccccatgcttttcatttcatctgaagtgctttgataactgtcccctgctcctagggaagaaaacaaaacaaaactctgtcctctgtttgt

SEQ ID NO: 228278 - DNA, 201 bp, Homo sapiens
attcattttcgaggtgacagcgccaaactttggctgtgttagctcacagaaacattaatgggataatgtgctccatcatggagaatgagaatcaaaaaagrctttaatggggcttcattatctccatctgtccatccatcacttcttctccatcgctcaccacttgagaaatgagaacacccccaaactaattagatttat

SEQ ID NO: 228279 - DNA, 201 bp, Homo sapiens
tgctgccaggatgggcttctcagcaggaatacagttttcaggctcatttaactcctgtggacacatgtaaggagctgggcgggcaattcgaattcattttmgaggtgacagcgccaaactttggctgtgttagctcacagaaacattaatgggataatgtgctccatcatggagaatgagaatcaaaaaagactttaatgg

SEQ ID NO: 228280 - DNA, 201 bp, Homo sapiens
gaagagaacagcagcggtctgtctcagtaccctggaaatacgtgcaagccacagcccatttcagaggaaattctagttgtagaaccccggagcagaaaagmtatgggactctggcctgagtgctgttagaaaccagccaggaggaaggcccattcccaaaggggagggcttccagcccatgctgccaggatgggcttctca

SEQ ID NO: 228281 - DNA, 201 bp, Homo sapiens
ttttcttttttcaatactcttcttcccaggccctatactttcctacaagctgcaatggccagccggagtgtttctctgaaccttatgcacaactgtatacrtgcagttgtctcatcatatcctctcaactgtctcaaggtatctttaagaataaaattaataaatggcacttccatccttttatttccacactccacaaat

SEQ ID NO: 228282 - DNA, 201 bp, Homo sapiens
cttagccctcctctgggcttttggcattttctcttccagtccaaggatggttatcttgcttttcacttatttccaattataattatccactgattatacamaatggcaccatttaattattgtctctttctttcactaggctgtggattccataaaatcaagtcttctttttcacagttatagccccaacacctagaacaa

SEQ ID NO: 228283 - DNA, 201 bp, Homo sapiens
caaaccttcacttccctggcaggataaaggtaaatgtgtgttgcatactttgccaagaccaggaagtccaccgggtccttgagagagggagggactgctcrgggatgggaacacgtaaaaaaaaattcactcactacaattgcattaacaggacagggtcaaaggtcatatttccaggttccatggccaacgctaggttct

SEQ ID NO: 228284 - DNA, 201 bp, Homo sapiens
aatgcaacttctactgcttacagcgatagcaacccagggatgtttcttcgacttgcttccttcatttattcctcaaatgtttatcgagcatccgctgtatwtcatgtgttatgttagaggctggggttacaatgggggcaaagatagacatggtcctggctctagtgactcttacagttcaattcaagagagatgtcaaat

SEQ ID NO: 228285 - DNA, 201 bp, Homo sapiens
gctttttattgaacaaaaataaaagcacccgaattattccgcataccttcagtgataagcttacatgaatgtactgcataatatatactgcttaagggcayggactttgaagtcagacagtgaaattttggccccgccacctcctagctgttaacttgaagcaagttacttaactgctctgagtctgtgtttcctgatcta

SEQ ID NO: 228286 - DNA, 201 bp, Homo sapiens
cagttacaggagacagagctcaaagcactcaaacaaagcagctgtattttgtagatgcagagccttcttccttctgtggtgtggtgctagttctcagtgayggatgagtttttagtaaagagttggtcagcctgctctgggccagatcctattctaggcagaagaatgagtagaacagaccatgcccctatgcaaatggag

SEQ ID NO: 228287 - DNA, 201 bp, Homo sapiens
gtggtaagtgctctaaagaaaataaatgtgtcatgaagtcaacaaatattaatcacttgtgtttgttaagacctctgattataggtcttcataagaagtgygcttggagtgttccctccacatccaaaatcatctcctgtggaaccgtgtggaattatgcagctagctgtcaaacattccccaccaaacaagagactatgt

SEQ ID NO: 228288 - DNA, 201 bp, Homo sapiens
aagaagagagccactatttttgagcactttatttgtgggctcaggtatgtgtttgtgtgaaagactaaggtacactaatggaggtggttccttcaagtgasagtgtgtagaaatgccttatgacattgcttatgacattgtagaaattcctaatgacactgttgtgctgaacacctatcaacttcagtggggatggcacca

SEQ ID NO: 228289 - DNA, 201 bp, Homo sapiens
acttgtgttattatttaggttcataacccagaagcttgtatgggtgactagctggcctctttccgtccatttatccactcaaccatccatccatcatactrtatgcatatttattcatccaacatttgttgagcttcatctactctgtgctgtgtagtggatgtacaacaatggacagggaatcatggttccttcccccac

SEQ ID NO: 228290 - DNA, 201 bp, Homo sapiens
ggtgtgtttgccatacacacatgttcagatacaaatgtgggtgggattataaaacctgtccttttcttcatacatgccttctgcccctcccctctatacasttaacagcatttcttcttagccattccctacctccaataaaatgttcacttggaagaagaccagtcatttaggacttagtgtgattttaagtcagtatga

SEQ ID NO: 228291 - DNA, 201 bp, Homo sapiens
gtggtttgatatgtagatgtgtcatttttttctcttttattttgaaaattatcctgcacattctctttatgttattctcccttgaatcctgtaatgatgtwagtgacaatggtctttatgagcctaggaattaaaaagatatgaagctttgcttggggagtgttattgacatgggtgaccttgattgttaagcagtgcttt

SEQ ID NO: 228292 - DNA, 201 bp, Homo sapiens
cccacacaaaatactttttgtcctatcctttccctcttggaggaagttttggcaatagcaaatagaggaaatattttccttttttactttcttgaggcccrcttgccttgtgacacagggagaccactggcccaaagatcagactgtaatatctaaaggccttgatgaattatgtgatacaaaactcaagtgctctaggag

SEQ ID NO: 228293 - DNA, 201 bp, Homo sapiens
ctaaaccttgcttggcttgcaaagcttaagtgaaacttaagctattccttgcaaatgcctatattaaaggaaaacagaacttaagcctgtccagttggaartagccaacaaacttatgtatatatatttagtgactttctaatgggatagagcaaataaggcaattatagagctataaccagtcacatactgacttgcttt

SEQ ID NO: 228294 - DNA, 201 bp, Homo sapiens
aataaaataaaataaaataaaataaaataaaataaaataaaaatcctggtgagagataaaaaggagaataaggcacatccctgccctcatggagattatgktttgggtggacatataatttgttgtccaaaagaggatgctttagagagggataatcagtacgtcaggcagctccggtgaactgggccttcatgggtaccc

SEQ ID NO: 228295 - DNA, 201 bp, Homo sapiens
tctacaataccagatatctgaagtagtttgcaatctaaactatctttgtgagatttctactacaggctttaaatatatttcaggagccttggtttagcttrtatctgcctgcatttgggggtcaggatatgggtggatatgtcttaggcagtggagttatgtttatgtgtaacaattagtatgacaggtggtactgaccaa

SEQ ID NO: 228296 - DNA, 201 bp, Homo sapiens
gcctcctctactggatccaaagaaggcaatttttcacatcactgacaacctagacccccttgattgcttctttctctgaaatcttgttgcatgtctactcrtcggtctctcagtcatgggtcattgtatcatttgtttacatcatttatgcgtatgctgcttatcaaagaaccgcctggatggcaaagatgccacatttta

SEQ ID NO: 228297 - DNA, 201 bp, Homo sapiens
ttttccattgggtcattgttttcttttgcaataattagtatttttatatattctagatttaaatcctttgtgatcatatccatcacaggacttttttttawttctcgcttggaatcttagtgggtttccatatgtgtgatggggtcgggacaggggatagtgcctttgatactaaaatgtttagtataatgaaatttaata

SEQ ID NO: 228298 - DNA, 201 bp, Homo sapiens
gtcaggcccttactttgcacatagcctgtgcaatgtcctgtattattatttatgtcacatctctgtgactgagtcatgggcctgtcttgccactttttgtytttggaccctgccctcaggtccctaatcagagtgtgatggtgagcacttgtagctgtcacctccactgaagagaacagcagcggtctgtctcagtaccct

SEQ ID NO: 228299 - DNA, 201 bp, Homo sapiens
tacttactgggccaggtcacctgtttgtgccttaatttcctcatctgtaataaaaggatgatattaataccacaaagggctgttgtgaaatgaaataatayatgcaatgtgcttggatcagcgctgagcacacataagtaagtgctcaataaatgtcagctctgattattattgaaggggagaatcatttgatctggttta

SEQ ID NO: 228300 - DNA, 201 bp, Homo sapiens
accgtgcttggagttcttgaagaatgtgacgagagcacagtgagcatgggagacactggaacaaaatgaggtcagagaggagtttagattttattccatgygtggtgggagggcatggaatgaacatggaacaggagttataggttaagaatcggagttctgaagtcaagaaacctgagcttgtcaataaattctgctact

SEQ ID NO: 228301 - DNA, 201 bp, Homo sapiens
gagaatcaagcgtgggccaccctgacatttcgaaggtggatatgggagaagggaaatcctttctaagcagacaaaggcaactacaagtgcacggggcctakacatggaccgtgcttggagttcttgaagaatgtgacgagagcacagtgagcatgggagacactggaacaaaatgaggtcagagaggagtttagattttat

SEQ ID NO: 228302 - DNA, 201 bp, Homo sapiens
acctatgttgtaaggtcaagctgagttgatagtatatgtcatgtgttcactatttaatgaagactttcctagagctcagtctggtgactttgatgggggasgtggtcaagctggcatctgggtggaagatggatgttgaaagtggcagaaatggacaaagggattttaggagagtttgtggtggctcgggagtatatttta

SEQ ID NO: 228303 - DNA, 201 bp, Homo sapiens
taaaataaatttagcagcttctgacatccctgggaagacatggcaacatctggccctgtctcctccatggtagtatttccttggagcagaatagttgctgmcctgtttcattgcaggtggaggggtaaaggctcactttgttttggctaggcctgctttactcgtttaggatacctgcctgcccctgctggccattctgac

SEQ ID NO: 228304 - DNA, 201 bp, Homo sapiens
agctgagacaggaagaggcttagtttgtgttgcagagagaactggcatcagtgggggctctcaggggttgtgtgggggcagtgaggagcattctaggcacrtggatttaagctccagtgtcagtgaattttagacacaacttctcagatctgtaactcacagaaagtgtttggacatagtcacataaccatctatgaggga

SEQ ID NO: 228305 - DNA, 201 bp, Homo sapiens
ttatcttagtaactgtattttatctactttttaggaattcttcaatgcttagattaaaatattgttttaattggataatactatcacataattcaaaagaygttaaaagatgcacagtgggatgtcagtctccttccatttctgtccctcgtgcctcagctcccctctgggcagtaaccattgtgtgtctttcttgtgtgt

SEQ ID NO: 228306 - DNA, 201 bp, Homo sapiens
aacttccttgcacagcatcatttagggtgtttctttgcaaattgcagtttgtttgagaaagatttaaagccctgagggtttggtgaaaagctcttggttaygagtgcatctactttgtctgtcagtagcaaaaagggcacctctgattaatactgactttgccctgcaagtcaggtagagtgcagatgaggtccttttttc

SEQ ID NO: 228307 - DNA, 201 bp, Homo sapiens
gaagatcatctgcctgtggcctctagaagaaggttaagtgagcgttgagccaggaatggaggcatttcttgtaatgaacttctctatagaacaagatagcraatctgttacccagaattctagagggctgcttccagaagaaaggtattcaggccaggctctctgccttgcaggagtgataccctgaagagaggggacagg

SEQ ID NO: 228308 - DNA, 201 bp, Homo sapiens
aaggcatgtctcagaattagtggatcctctggctgaactagtagtaaatggatagattaattgatgaatccctgccatttttctgatagtgtgtgccatamgtagttagagaaggctcaaaccttcaccaccatctgaatataatagtctttgcaaatacttccattgcagtatctaattcttagtcctcacatacagtgg

SEQ ID NO: 228309 - DNA, 201 bp, Homo sapiens
gtgaatattaatattttatactccctcataaggttccttcattggctcctgttggagcacagtttccaatatattttctcccagattttgatgacttgccytgcaaaattttttgaagtttacatctatactttaaaaatttcacaaaggctctttatcttcatagaaagcaagggattcagcttcgatttgctaaattgg

SEQ ID NO: 228310 - DNA, 201 bp, Homo sapiens
ctcctactagtcatgaatataactcatctcttctctcttcatatgtaggaataggcggtacctatctgggaatgggtccgcagaaacagtatatttaactmtctccaggcaattccctgacatttcagaactggtttctctaccgtttatctctctttgcctctatccccacctgcaatctgttgcttttctctttctttc

SEQ ID NO: 228311 - DNA, 201 bp, Homo sapiens
aacaaaagtagagatttttttctttatgtccatgtctaaaaatgtcattttggaaatggcaataaaatagagcattaaactgaaattaatatcatgatgtygaaggtgtgacctaattaaaatgcaaatgtaagcacacttctttaaaattgacattgcagcttatatattccccaatagtgggactattgcttgttgata

SEQ ID NO: 228312 - DNA, 201 bp, Homo sapiens
aaagagctgagaatcaagcgtgggccaccctgacatttcgaaggtggatatgggagaagggaaatcctttctaagcagacaaaggcaactacaagtgcacrgggcctagacatggaccgtgcttggagttcttgaagaatgtgacgagagcacagtgagcatgggagacactggaacaaaatgaggtcagagaggagttta

SEQ ID NO: 228313 - DNA, 201 bp, Homo sapiens
agacggtggcctagaggtcttcagggcctagcatgacattagagttagaaggtattaggcaagggaatgacatgatctgatttaacttttaaaagggtcaytccctggctggattaaagagaggtaaaagtgcaagcaaaattatcacagtggtttatatcagagatgatatagtggaggtggagagaaataggccctttg

SEQ ID NO: 228314 - DNA, 201 bp, Homo sapiens
ctcttcattcagtagatacttattgatccctgataaagttccaggcactgggggatagaggggtgaacaaaccagatcagacccagaccgccaaagagatyactctagtaggagagacagaaaaaaccaattaaacacacagacatctcagagagtgagaaggaaatgaaacttggtatgataaagaaagtatttatgcat

SEQ ID NO: 228315 - DNA, 201 bp, Homo sapiens
ttatcatctgtcttcaatcttacctcctccattagcattttgtgagcttctaaataaatggtgctcttcattcagtagatacttattgatccctgataaarttccaggcactgggggatagaggggtgaacaaaccagatcagacccagaccgccaaagagattactctagtaggagagacagaaaaaaccaattaaacac

SEQ ID NO: 228316 - DNA, 201 bp, Homo sapiens
atgaggcaggctatgcttgtggctttcacccaccttctgcctagcagttgtttcaggaaagtccattttactccttttcccaaagagatggatgttacctrtgtgtccgtgtggtcatgcactttagaatccttctcctctcatgggatgggagtttccttacaatttgtttatccctcatgtatttatcgaacagtgcta

SEQ ID NO: 228317 - DNA, 201 bp, Homo sapiens
actactatgaggcaggctatgcttgtggctttcacccaccttctgcctagcagttgtttcaggaaagtccattttactccttttcccaaagagatggatgytacctatgtgtccgtgtggtcatgcactttagaatccttctcctctcatgggatgggagtttccttacaatttgtttatccctcatgtatttatcgaaca

SEQ ID NO: 228318 - DNA, 201 bp, Homo sapiens
gggggcacacacattcagtccataccaccctggaactccagggattaaagctgagaagtcagagtggaagaaggtagagccagtgtgctctcctgattcaytcctgtacatagagaaggaaccagacacatggaatgcaaattccagttgcaacacattttgtagcttggactgttcactgtaatccactgacattctact

SEQ ID NO: 228319 - DNA, 201 bp, Homo sapiens
gctactttggaaaacaatttggcactttttgaaaaggttaaacatgtacttaccataagacttagcaattccacttcaaggtcttgaaatgaaaacttgtrgagaaatgaaatgtatgtctacatttatagcaatgttgtttgtaatggtcccaagctattatagaagcaatctaggtatctatcaattggtaaatgggta

SEQ ID NO: 228320 - DNA, 201 bp, Homo sapiens
agagatgaaatgcccatgtgagtgcagcactgtacatttagttagacaaatctccctttaatttacagcttcctagagagagttatattctgcttctggtkgcctgcggttttatttggttaccaattatggaagctagttgtgtttcaggaagccctctgaaaggtgtgcatagacaataaatcctgtgccttgctagac

SEQ ID NO: 228321 - DNA, 201 bp, Homo sapiens
tgaaaggtgtgcatagacaataaatcctgtgccttgctagacgtattgatggttctgttgatgagaggttgcacaaagtcaatagttgattctactgcgtrgtgacatttgcatttaataaaaagtcttgtttattgtagcttctgtataaacacaactggcacctactgtgtcacagtggaaaatgctaagtagaaaaga

SEQ ID NO: 228322 - DNA, 201 bp, Homo sapiens
ttctgtataaacacaactggcacctactgtgtcacagtggaaaatgctaagtagaaaagaaaatgtatggctgagaaggaaacgtaaatatgaatgattaytgttattttttgtttgttttaaaataatgtggacctcaggtcacagaggtagattaattataagtttggttcatgactcactgtcatccatggtaaattc

SEQ ID NO: 228323 - DNA, 201 bp, Homo sapiens
ttcagccaggaattcacctaaatctccttgaccagttaggaatatagcttctttttaaagcatttcagagagggctgacaacctcccttagaatgaattgraagaatggcagcaggaggggcagcaggagaggcaggttggtgtgagtaggtaacatgtcccttcttgttttttccaagttgtggggcacagctggaagtg

SEQ ID NO: 228324 - DNA, 201 bp, Homo sapiens
cttttaatcttttctgggcagtgggagatagatctttgtcagatgcttctctccaggccgccttgaaatgaagaagcaggcttgtgagctgggaggccacraagtcctactaagtttgggtatctgcctcttccgctttttgccgtgatcctttgacaagctgaccttctctgagttctctgcagatttcattcagtggca

SEQ ID NO: 228325 - DNA, 201 bp, Homo sapiens
tcttccgctttttgccgtgatcctttgacaagctgaccttctctgagttctctgcagatttcattcagtggcatgcatgtgaattggcatgaactttctcrttgtttttttttttcctgctgtgggagccaggaatgtttccccattggtgggaaatgccccactaatccatctctttcaaagctgtcagggctctttttt

SEQ ID NO: 228326 - DNA, 201 bp, Homo sapiens
gtcagagcaccccaacttcagtcattcagaagccatgtatttaccatattcatgtcctatttgtaccaacacttactattaaaaaaagcttatttttgctwatatttaagttaattgtacaaggaaattgttttgccaccttaaatggaaactactgttcttctaatatgtatttcaaaacacttgaatctattaaaatta

SEQ ID NO: 228327 - DNA, 201 bp, Homo sapiens
tgactggtatttggatttggcttctgcctagttgtgtaacctcaggcaagttacctgtcctctcttagccttagttagctcatctacaaaatggcgtaacmatagggtctgtcttctgaattaagcaagataacattttgcctcagtcagttcctgcttctataacaaaataccttagcctgggtgatttagaaacaacaa

SEQ ID NO: 228328 - DNA, 201 bp, Homo sapiens
aattctggaggcttattttctctatggggaagtgctttgcaaattcaaaagggtttaagggtctcccctctgcatcgcttgtttttggcatgcctccatcrtagctggtaggggttgatatcgcagattatctgttggcctggtgtgcagagaacaggtagtgtttaaatctcagatctttcatctgctacctttataacc

SEQ ID NO: 228329 - DNA, 201 bp, Homo sapiens
tatgcctttgagaatctttccattgtggcatgaagatccagaagaagcagtccccactggggcatataacttctttctcttcttttgaactcttcatctargagtatgagattttacaaatttatgctctgaattttgttcattacattttccttagattgaaaccaataagttatgaatttttaaatatactgttaaaat

SEQ ID NO: 228330 - DNA, 201 bp, Homo sapiens
ctttgtgttttgaaataattcaacattcacaggagttgcaaaaatgcaaagactcacacacacttcatgcaaactctctatagttagcatcttgcttaactgtagtaactatagtctcatgtaagaactagaaaattaacattggtacaatccacagagtttagtcagattttaccaattttacagacacgtgtgtgtgta

SEQ ID NO: 228331 - DNA, 201 bp, Homo sapiens
ggcacagaggtgtggatgcaaggtactaaaccaaggtgggatctaccaaagttatcaattgattagaagtgggagatgagaaaggagagcctggtggctartgcttgactggtatttggatttggcttctgcctagttgtgtaacctcaggcaagttacctgtcctctcttagccttagttagctcatctacaaaatggcg

SEQ ID NO: 228332 - DNA, 201 bp, Homo sapiens
ccccagtagctgggactacaggcgcccgccaccacgcccagctaatttttttgtatttttagtagagacggggtttcaccatgttaaccaggatggtctckatctcctcacctcgtgatccgctcgcctcggcctcccaaagtgctgggataacaggtgtgagccaccgcgcccggcccaatgataaaatttatcattgat

SEQ ID NO: 228333 - DNA, 201 bp, Homo sapiens
tgcacattttgtgaaaattatgatagagtaagaatagtcatatctaagtcatttggggaagggtagttctcttcagcagccatttcccagaaccaaaaagrgtggggatgttttgcctttaattttcaaaaggtttgtaggggtggttgttaaccatcacttttctgcaagcacagggctcaggtaaagtttgacattgtc

SEQ ID NO: 228334 - DNA, 201 bp, Homo sapiens
gatttttctttttgaataagtttagcccatcagtgcaagatttcccatgaggctgagacaggtgcattgcttgagcccaagaatttgagaccagcctggcmaagacggtgacacctcatctttagaaaaaatacaaaaattagctggacttggtggcatgaacctgtagtcccagctgctcaggaggctgaggcgggagga

SEQ ID NO: 228335 - DNA, 201 bp, Homo sapiens
ttgaatcagtacacttccaacaattgctattactcttcatttttaattttaaggaagatttttctttttgaataagtttagcccatcagtgcaagatttcycatgaggctgagacaggtgcattgcttgagcccaagaatttgagaccagcctggcaaagacggtgacacctcatctttagaaaaaatacaaaaattagct

SEQ ID NO: 228336 - DNA, 201 bp, Homo sapiens
tgttttaagatctttatacttaaaatctattttaatccagataaaagtttcttctgtgtataatatggctcaattttctgctcttattttattaataagcrtgtgattaattttaatatttgacatgagatgagaaaacaatgtaacatattttccttaaatagttagccattgtttgttgaagagctctttcttcctaga

SEQ ID NO: 228337 - DNA, 201 bp, Homo sapiens
ttgttttaagatctttatacttaaaatctattttaatccagataaaagtttcttctgtgtataatatggctcaattttctgctcttattttattaataagyatgtgattaattttaatatttgacatgagatgagaaaacaatgtaacatattttccttaaatagttagccattgtttgttgaagagctctttcttcctag

SEQ ID NO: 228338 - DNA, 201 bp, Homo sapiens
ctatggcaggaaaaaattttcatatcaacagagaaagtcatttgcgtcatggtgtgatttctcagtgccttgctcttccttcttggccaatctgccttacstgcttgcttgatccttggaattgctttaatattggggctactttttatttcaccattagaggataggtagactacatatttaattagaaatgccaggaag

SEQ ID NO: 228339 - DNA, 201 bp, Homo sapiens
ccccttgacatattccatcattcagattaaaataagagattaccaaaacgctacctatatttgaattttaaaagttaaatttaaaaaattaaaacagggcygggtgcagtggctcacacgtataatcccagcgctttgggaggcttaggcaggaggattccttgaggccaggagttcaagaccatcctggaaaagaccctg

SEQ ID NO: 228340 - DNA, 201 bp, Homo sapiens
aattttggggaagtggtgggggcacacacattcagtccataccaccctggaactccagggattaaagctgagaagtcagagtggaagaaggtagagccagwgtgctctcctgattcactcctgtacatagagaaggaaccagacacatggaatgcaaattccagttgcaacacattttgtagcttggactgttcactgtaa

SEQ ID NO: 228341 - DNA, 201 bp, Homo sapiens
ggaccctgaagttcttaatatttactaacttctagtttattgcccaagcaagtaattataggaggtatgtactttctaatattagcattcgtttcttattyttgttaattcactgtgtgaccttgggcgagtcactttacctctggggagaccaaagattctaaagtaattgaagaaagcactgtaggaagctcctgacag

SEQ ID NO: 228342 - DNA, 201 bp, Homo sapiens
tcaccttcttgaggtatcctcacatggtggagagaaagagctctggtccttcatgtccttataagggcacaaatccatcctggggctccaccttcatgacytcatctaaccctaatcacctctgcgaaggccctactaacaaatatcttaactggattgtggtgttaatgaattttggggaagtggtgggggcacacacat

SEQ ID NO: 228343 - DNA, 201 bp, Homo sapiens
ttagaggagaatttgtagccatcttgaggtatctgtgttttagatcaagctgctataagagaatataaactaaacgggttaaacagaaacatttatttctyatggctctggaggctggaagtccaatatcagggcgctaacatggtcggggtgttggttaggaccctgcttctggttcaccttcttgaggtatcctcacat

SEQ ID NO: 228344 - DNA, 201 bp, Homo sapiens
gttttgagaggtagaaaacaacaacaaaaagaacttggtactctgtgttctctctgtaaccagaagagttttgttggaagcatctttattagaggcagctrtcagtatgggatttatttccactgggtggaaacaaaaggtgctacagaggaatgtacataaagatatcacccatgaggcatttggataaataaaagtggg

SEQ ID NO: 228345 - DNA, 201 bp, Homo sapiens
gaagagtcttctggttctcttattttctatattggtggttctcaaagtgtgttccctaaccacagaatcagagtgaactgactggtgtggtaggtagaatyatgcgccctccccccaaagatatctacaccctaatctccagaacctgtgaatatactatcttacctggcaaaacagactttgcatatgtgactaagatta

SEQ ID NO: 228346 - DNA, 201 bp, Homo sapiens
tggtggttctcaaagtgtgttccctaaccacagaatcagagtgaactgactggtgtggtaggtagaatcatgcgccctccccccaaagatatctacacccyaatctccagaacctgtgaatatactatcttacctggcaaaacagactttgcatatgtgactaagattacagaccatgagatggggggattctcctgaata

SEQ ID NO: 228347 - DNA, 201 bp, Homo sapiens
ttcaaatttaactggtatcttgtatttttttctggcaaacctgttaataaactcccatggaccccagttacagatcctctcctataaatagtttctttttygtttttagaattagataattccaaattaaaattaggcaattcttcatctgacctgtgaataaatatgttcatgttataagttgcagaagtagatcagaca

SEQ ID NO: 228348 - DNA, 201 bp, Homo sapiens
tcagctgtcctgatgttgtgttgtaagaaagttctaggccgagcacagtggtgcatgcctataaccccggcactttaggaggcggaagtggctggatcacytaagcctgggaggttgaggctgcagtgagctggccactacactccagacagagtgagaccttgtctcgaaaaaaaaaaaaattacctctaaatggtggcc

SEQ ID NO: 228349 - DNA, 201 bp, Homo sapiens
cttgggcttcccagactccagaattgtaagctaataaatctctgttgtttataaattacctagtctcaggtcctgttatagcggcacaaagcagactaagrcagtcaccctctaggaatggagatacagtaagttgaaggcatctaggtctgtaatgggtctgtagaactgccatgtcagcactagactactgatctccaa

SEQ ID NO: 228350 - DNA, 201 bp, Homo sapiens
gggcttcccagactccagaattgtaagctaataaatctctgttgtttataaattacctagtctcaggtcctgttatagcggcacaaagcagactaagacaktcaccctctaggaatggagatacagtaagttgaaggcatctaggtctgtaatgggtctgtagaactgccatgtcagcactagactactgatctccaaact

SEQ ID NO: 228351 - DNA, 201 bp, Homo sapiens
ttggtggacattttggaatgggagctggattcctatcttgaggaaaactgcggtcatccgatgttgtaatcttacatgcctctcaaggatgatcatttctstttgttttccatcatagcctccttttctttagttgtgtaagtagttatgtttaatgatgttaatgagtatctgcaaacccattgcccagaacaaaaccta

SEQ ID NO: 228352 - DNA, 201 bp, Homo sapiens
ttgatttcactcataattcagcctggcccatatcagggctttgtacttgttcttccctttatttagaggatcttgaggacctccaataaatagcagccctygtctatgcctgggtcctcaaatttctcaaatgaattccaaaataaacaaaggaatgactgatagaggccaggcttggtggacatgactttaggtcttact

SEQ ID NO: 228353 - DNA, 201 bp, Homo sapiens
aaagtagagatttttttctttatgtccatgtctaaaaatgtcattttggaaatggcaataaaatagagcattaaactgaaattaatatcatgatgttgaasgtgtgacctaattaaaatgcaaatgtaagcacacttctttaaaattgacattgcagcttatatattccccaatagtgggactattgcttgttgataattt

SEQ ID NO: 228354 - DNA, 201 bp, Homo sapiens
aaattggcttaaccaacattagcattggttcagtgtaaggaggactttctttaaggtagtttataatacaattttatttgtattatattctagtttataayacaaatgattatatttatattatatcatagaggcctagcatagaaaacaaaatagatatataatttatcttctaatcctctctgaagcacttagaggaga

SEQ ID NO: 228355 - DNA, 201 bp, Homo sapiens
atattgtgggaatgctgagatgggagaaattgattttaatgagaggactggaaaaggttggtggaaggtgtgatgttcaagctgggccttgaaagtttaawctattagaaatgtggtaacagtgccgtaagcttcaggaatgttgattaggctgattttttaagcagggaagaagcagctgatgactgtgataccagaaag

SEQ ID NO: 228356 - DNA, 201 bp, Homo sapiens
tatccacaaaaaagaatgagatcatgtcatttgcaacaacatgaatggaactggaggtcattctgcgaagtgaaataagtcaggcctagaaagacaaataytgtatgttctcacttatttgtaggatctaaaaatcgaaacaattcaactaatagagatagtaagtagaaggagtattaccagaagctgggaaggatagtt

SEQ ID NO: 228357 - DNA, 201 bp, Homo sapiens
agctaaaggtcaaacaaaattctcctggaagccttaggagttgcttaaaggtgaaataaaaaattgaaatgaaaatggacttaatccctggtttatgaacygagtagcacagctaagaaagttaagggaggcactcacctcacagtgcactttgacttatctttctgaaatgcctcatccgtctgtcaagtgccatagcct

SEQ ID NO: 228358 - DNA, 201 bp, Homo sapiens
aagactacatgctcattgtgctgtatattgtgggaatgctgagatgggagaaattgattttaatgagaggactggaaaaggttggtggaaggtgtgatgtkcaagctgggccttgaaagtttaaactattagaaatgtggtaacagtgccgtaagcttcaggaatgttgattaggctgattttttaagcagggaagaagca

SEQ ID NO: 228359 - DNA, 201 bp, Homo sapiens
atcacaatggagtactatttatccacaaaaaagaatgagatcatgtcatttgcaacaacatgaatggaactggaggtcattctgcgaagtgaaataagtcrggcctagaaagacaaatattgtatgttctcacttatttgtaggatctaaaaatcgaaacaattcaactaatagagatagtaagtagaaggagtattacca

SEQ ID NO: 228360 - DNA, 201 bp, Homo sapiens
ttaaccctgcctcagaatcaattctggctttgttaaagatttcatgcttagcaaataactactacgtgcaggcactgtgctgatctctgtggaggaaactraaatgattaaggcccagtttctgctgccagagagtttactgtccagttgggtggacagacaggcatacatcaggcaagactacatgctcattgtgctgta

SEQ ID NO: 228361 - DNA, 201 bp, Homo sapiens
tagaggctctgtagaaacagtgaatggggagtttttatccccttcaactccttggtcactcatggaatctcgaagcaaagcaaacactatgaagcatttawaggaactatagttcacatctatcacgctattgctttattcttacctttaagccaatgtcaagataacacatgaagtattccagatctttgttaaaagttc

SEQ ID NO: 228362 - DNA, 201 bp, Homo sapiens
ggcaggagagtcgcgtgaacccgggaggaggagcttaaagtgagccgagatctcgccactgccctccagcctgggcgacagagcgagactccgtttcaaamacacgaagacctgtgggggtgaagcatggtgaggaagtgggaagatgctaggagtctggaaccagattaataaggccttctaaggacttcatttttgtgc

SEQ ID NO: 228363 - DNA, 201 bp, Homo sapiens
caaattactgtgatgtgaaacatttgggttagaataataaataactttaaactacttactaagcagctttgttgaaccaaaaaaaaaatttttttttttttgagacggggtctcgttctgtcgccaggctggagtgcagtggagatcttggctcactgcaacctccaactcccaggttcaagtgattctcctgcctcagcc

SEQ ID NO: 228364 - DNA, 201 bp, Homo sapiens
acaaattactgtgatgtgaaacatttgggttagaataataaataactttaaactacttactaagcagctttgttgaaccaaaaaaaaaatttttttttttttgagacggggtctcgttctgtcgccaggctggagtgcagtggagatcttggctcactgcaacctccaactcccaggttcaagtgattctcctgcctcagc

SEQ ID NO: 228365 - DNA, 201 bp, Homo sapiens
aaataaaggaaggaaaaaaagtagtgggtttcagatagatttctgcccattattttgtttttttctgtttttacagctcatgatctaaataggaaaaaaaatacatctttgacaaatgtccaaaatagttctgacaaaacttttggggtgatagtgggcagggaagcaggtattccccttgtcccctgggacctgttggtt

SEQ ID NO: 228366 - DNA, 201 bp, Homo sapiens
tatgggcacaggatagggtgcagggcaggtcagagtggttttggaaaaggcaacatctgggcacaaaaacaagcatgcctattctcatttaaggccatgggtccaggcttgagagtagaaccctcaccagggacccttccctcctgcttcctgtccatatcaccagtgtgtattgttccctgtgtccatgtgttctcattg

SEQ ID NO: 228367 - DNA, 201 bp, Homo sapiens
ctggccaaacttctccccaacctagtctccgatgtccagctgcctcttgtcctctccacgttcagacacttctctcctcttctctcctgttctctgctctkccgctctgctgctcttctgctcatggagcgtggggtttggggttcttatgggcacaggatagggtgcagggcaggtcagagtggttttggaaaaggcaac

SEQ ID NO: 228368 - DNA, 201 bp, Homo sapiens
cttctctccagcagaagcaggccctgtgcatgccccatggcagcgtccaagtgtgttacaatgctcttttagccttgccatccacagacagcttaagtgtyagccagctcagtgaagagtcagtgtgacagcctttttgggtttccacacccagtgcctcctgaattcttgtctggcatccaggaagaatcaggtcacaca

SEQ ID NO: 228369 - DNA, 201 bp, Homo sapiens
tatatcacaacaggaacacaaaaccaaccgactgaaactagcagattgggagactcaaaggaggggggaaaatgtttcataaacttcaatcatctcacttyttcccagctagtcttctaattcttcaccttatctgttctctcctgacaacaagtcctgtatttaattcagattttatctctttgtgggacagctgattcg

SEQ ID NO: 228370 - DNA, 201 bp, Homo sapiens
ccttgtggtttatctgcattttggctgaaggatcgagtccagaatctgaccccctcctgttgtaagtagatgagttttctctccacccaaggcccaaatarccatttgcaatgtgaaagaacagttaatcggggttgttttgcatctgggatgccagaaaatcacttttttcttgatttaaaagaaatttaattttggcat

SEQ ID NO: 228371 - DNA, 201 bp, Homo sapiens
caacatggcagaagactcaagcaattcactgaatctccctgggcctttgttcccttctctataaaatggggataataatattgtgcctctacctaccctakagttcatcaaataacattctgtatgcaaaagagctttaagttaagttagagcctcaatttagtctgtattgcttagcaaatgctatgtattgttatatga

SEQ ID NO: 228372 - DNA, 201 bp, Homo sapiens
atggtgacttaaaaaaaattaacttgaaactttaaacacaatttttttttttttcttgagacggagttttgctcttgttgcccaggttgctggaatgcaayggcacgatctaggctcactgcaacctctgcctcctgggttcaagtgattctcctgcctcagcctcttgagtagctgggattacagccatgcgccaccaca

SEQ ID NO: 228373 - DNA, 201 bp, Homo sapiens
gtcgaaattgcactggaccattacctagaatttctgctttttaaataagagaacccacgatataagctctgtcagttgtgatgttccaattcagagactakatgcaggccacccctgttatatttagttgagggacctttttagtagagcaacactgaggcttttagtccaacatggcagaagactcaagcaattcactga

SEQ ID NO: 228374 - DNA, 201 bp, Homo sapiens
attttgtatttttggtagagatggggtttctccatggtggtcaggctggtctcaaattcctgacctcaggtgatccacctgcctcggcctcccaaagtgtygggattacaggtgtgagccaccacacccagccgaacacaatttttttaaaaagccccaagaatcattaacttcttctcccatcctctttttctttccagg

SEQ ID NO: 228375 - DNA, 201 bp, Homo sapiens
ttgtttaaagaataactcctactcacatgagatggaaacaggacaaagggttgagagatgcaggtaaaatggtaaaggcctgctactgtgccaagaaaacyatgtccaggaccagtaagtcaggaccagagcatttgatgtcaaaggattaggagatggagtcgaaattgcactggaccattacctagaatttctgctttt

SEQ ID NO: 228376 - DNA, 201 bp, Homo sapiens
tcacctgtcttctgcgtcactcaagctgggagctgtagacaggagttgttcctattcggccatcttggaacctctccctgttgttctaaaaaaaattttgyatgttttaatttgtttctgttcttaacctttttgatgctcagatattcccttcctaggccagtgggaactccaggtatccttactttttaaaaaaaagtg

SEQ ID NO: 228377 - DNA, 201 bp, Homo sapiens
agaaataaacaagcacttgagaatttgtaaccgacccttacttctggcatttggcctatattctacctcttctgtaataaaggacttaaataggcaggtgmctatagaaaatgtacaggtttattgcaagagtaaaattaaaagatctacattggaagttattataaaatgacacaacaaaattttaaaaaatattgaaaa

SEQ ID NO: 228378 - DNA, 201 bp, Homo sapiens
ctttaaccctgcctcagaatcaattctggctttgttaaagatttcatgcttagcaaataactactacgtgcaggcactgtgctgatctctgtggaggaaamtgaaatgattaaggcccagtttctgctgccagagagtttactgtccagttgggtggacagacaggcatacatcaggcaagactacatgctcattgtgctg

SEQ ID NO: 228379 - DNA, 201 bp, Homo sapiens
tggagcaggaagattgtgcttcatcagcataataatacctaaaattatgccttccatggtgaaacctaataaaaatatgcaggtgccctgcatgggactawgaatttcagttcagtgaagttttatttataatatctttaaccctgcctcagaatcaattctggctttgttaaagatttcatgcttagcaaataactacta

SEQ ID NO: 228380 - DNA, 201 bp, Homo sapiens
gtgagcaaatggtggaaaaaaaaaatcacttagctgagatataattaaagtaagaattaataacctgagacatttaagtaactgatagtccccaggaccayctttaggatcctgcagaagagagaatgagtgagtacctgtcttgaaacttgctagtttccaaaacttgcctattgctgaagatgatattgaatattttaa

SEQ ID NO: 228381 - DNA, 201 bp, Homo sapiens
taaaactcattgcacatgatataaacctaaaggcaaaatttgggaactgctatgtgaagactgataacagtgtaaagttgttcgctgctatgtgagcaaayggtggaaaaaaaaaatcacttagctgagatataattaaagtaagaattaataacctgagacatttaagtaactgatagtccccaggaccatctttaggat

SEQ ID NO: 228382 - DNA, 201 bp, Homo sapiens
tggctttctaggccttgttaaggagttgggattttatccgaaaagaatggaaagccagggaagctagcagatggctgactagcaccctctgactagcaccrtctgatttgcatttcaaaaagaccactcaccttcagtgagagaatggatactgagaaacaaggctggtagaaggtagagaataggctcttgggagaatcc

SEQ ID NO: 228383 - DNA, 201 bp, Homo sapiens
caggaggtcaggcagagaatgaaactcttaaggctctcttatgattttgtggagaaagccttttaaaactcattgcacatgatataaacctaaaggcaaartttgggaactgctatgtgaagactgataacagtgtaaagttgttcgctgctatgtgagcaaatggtggaaaaaaaaaatcacttagctgagatataatta

SEQ ID NO: 228384 - DNA, 201 bp, Homo sapiens
actaataataatgttggacataggcttctgtcttcttacagccttgattgctgaggctagtgaaccattataggggtagtttaaattgcccacttcttaartggtttagtagaatgaagacatgatcaatgatttaaaaaaagttttttaaatgaaatcacaagaagatttcatgattctttaattatcttttgagggttt

SEQ ID NO: 228385 - DNA, 201 bp, Homo sapiens
gtgagacaccaaaggctgttgtcagtgtggctgttggtgggagagtcctcagtgtccaaagatacccttagcattttcatgtgtctgtaggaacgctttcrtgtgacttctgtgtctcctgatggatctggaaagatttctctcctctcagagacttctaggttgtcttactgacattggaggcaaaatggcttatgataa

SEQ ID NO: 228386 - DNA, 201 bp, Homo sapiens
agcagataaagggggaaactatattggattgttatatacattattatagtcatattatcgattatatatagatcacattttactttagtagcattaatatrtaacagataattactactaataataatgttggacataggcttctgtcttcttacagccttgattgctgaggctagtgaaccattataggggtagtttaaa

SEQ ID NO: 228387 - DNA, 201 bp, Homo sapiens
tgaccgttgatgaagagcaaaaaattcatagtaatatcagtgggtcagccgcctgtagttttagggaggtgggtgtagagagacagaggaagtagctacttagtatcctatgattccgatgctatctaaaagacaactcatatttgatggagggaataaaatgtcaaagaatatgtgaaaggtatagtaggatgggatgga

SEQ ID NO: 228388 - DNA, 201 bp, Homo sapiens
ggcacgcaccaccacgcctggctaatttttatgtttggtagagatgggatctcaccatgttggccaagctggtctcaaattcctgacctcaaatgatccamccacctctgcctcccaaagtgttgggattacagggatgagccactgtgcccggcctgtacacatgtattttcaaactgcagttgactgcaggtaactgaa

SEQ ID NO: 228389 - DNA, 201 bp, Homo sapiens
atattggaagcatggtataataattataacttttggccgggcacagtggctcatgcctgtaatcccagcactttgggaggccgaggtgggcggatcacgargtcagcagatcgagaccatcctggctaacacggtgaaaccccgtctctactaaaaatacaaaaaattagctgggtgtggtggcgggcacctgtagtccca

SEQ ID NO: 228390 - DNA, 201 bp, Homo sapiens
taaatttggcatattggaagcatggtataataattataacttttggccgggcacagtggctcatgcctgtaatcccagcactttgggaggccgaggtgggyggatcacgaagtcagcagatcgagaccatcctggctaacacggtgaaaccccgtctctactaaaaatacaaaaaattagctgggtgtggtggcgggcacc

SEQ ID NO: 228391 - DNA, 201 bp, Homo sapiens
agaattaaaacaaggtgatatggaagtcagaagaatgaataaatttggcatattggaagcatggtataataattataacttttggccgggcacagtggctyatgcctgtaatcccagcactttgggaggccgaggtgggcggatcacgaagtcagcagatcgagaccatcctggctaacacggtgaaaccccgtctctact

SEQ ID NO: 228392 - DNA, 201 bp, Homo sapiens
actcaggggggcagaagttgcagtgagctcagatcgtgccactgcacaaccagcctaggcaacagagcaagactctgtgtcagaaaaaaaaaaaaaaaaarcttctggttgctgttgctgtttctttcaattaaagtaaaatctgacattcctctgaccttcacctgccaccctctgacctacacagggtccctggttttc

SEQ ID NO: 228393 - DNA, 201 bp, Homo sapiens
aactcaggggggcagaagttgcagtgagctcagatcgtgccactgcacaaccagcctaggcaacagagcaagactctgtgtcagaaaaaaaaaaaaaaaaracttctggttgctgttgctgtttctttcaattaaagtaaaatctgacattcctctgaccttcacctgccaccctctgacctacacagggtccctggtttt

SEQ ID NO: 228394 - DNA, 201 bp, Homo sapiens
tggccaacatggtgaaaccctgtatctactaaaaatgcaaaacttagccaggtgtgctggtgggcacttttaatcccagcttctcaggaggctgagacacrataattgcttgaactcaggggggcagaagttgcagtgagctcagatcgtgccactgcacaaccagcctaggcaacagagcaagactctgtgtcagaaaaa

SEQ ID NO: 228395 - DNA, 201 bp, Homo sapiens
ttataaggagtttcccctttcacttggctctcatttttccttttgcctgctgccgtgtaagatgtgccttttgacttctgccatgattgtgaggcctcccyagccacgtggaactatgagtctattaaacctctttttctttataaattacccagtcttgggtgtgtctttagcagcctgaaaaccaacaaaaacagatgg

SEQ ID NO: 228396 - DNA, 201 bp, Homo sapiens
tcttagagtcagaatcttgtgtatattagatggttgataaatatttatgggataaatttaattttggttcaaaacaggatggttaggtagaggaatattcwtttaattattaaatattttctgaagatctgtatatcaggttcttctcattttcatttctaatctaaatttggcatgctcttaagccaacaaagtatcaat

SEQ ID NO: 228397 - DNA, 201 bp, Homo sapiens
ttactaacagaagcaatgtttagcatattttattttacagcatattgttaatagctatgatcatatttcattttgaagataaactttaaaatcataaaatgcgttgtcttttgaaatattttggtagcttcatttaaattacagttttgttacagtatttattcaactggcattgttagactattccatctttatatattt

SEQ ID NO: 228398 - DNA, 201 bp, Homo sapiens
caggtgaccttccacccttccctctgtgtccttatttcctgtgttggaataattggattatacctgagactggctggctctttccagagaaccacttgttmctttcttcaccaagtgtcagtttccccccatttagaaataaatcaattcaaaatgaaattacccgaagcattcatttttcaccatctagtaaatgaatct

SEQ ID NO: 228399 - DNA, 201 bp, Homo sapiens
tgcagatttaatctcagacatgttgaaacttggatggtgttcatgatgttcatccgcacagtgcttctttcttaggagggctacacttaccccatttcagrcgagtcctgcctcatccaaatggtttgaacgtagctacccccattctctctagctcccaaactgggtgatcagaatacttcattcctctgtggtaatgtt

SEQ ID NO: 228400 - DNA, 201 bp, Homo sapiens
gcgagtcctgcctcatccaaatggtttgaacgtagctacccccattctctctagctcccaaactgggtgatcagaatacttcattcctctgtggtaatgtktagttttaagagggcagatccaaagccaacctatttagagccctctgagaacattcctctgcagtcatctttgagtaaatctgtttgagaatgaaatcag

SEQ ID NO: 228401 - DNA, 201 bp, Homo sapiens
tgaagttttgagcttccttttttctagtatcagactgttactaatccatagggcatgtttgtataaaatagaaaaagatactccttttgtggagacacagytcccccacaaggtacatggcctcgtgagaggggccaggctggatagcccccaactcatttcgtgggctgatgcaatgtgcggtcttaacaactgcatgtt

SEQ ID NO: 228402 - DNA, 201 bp, Homo sapiens
tccgcctccttggttcaagggattttcctgcctcagcctcctaagcagctgggattactggcacgcaccaccacgcctggctaatttttatgtttggtagrgatgggatctcaccatgttggccaagctggtctcaaattcctgacctcaaatgatccacccacctctgcctcccaaagtgttgggattacagggatgagc

SEQ ID NO: 228403 - DNA, 201 bp, Homo sapiens
gagacagagtcttgctttgtctcacaggctggagtgcaatggcatgatctcagctcactgccacctccgcctccttggttcaagggattttcctgcctcarcctcctaagcagctgggattactggcacgcaccaccacgcctggctaatttttatgtttggtagagatgggatctcaccatgttggccaagctggtctca

SEQ ID NO: 228404 - DNA, 201 bp, Homo sapiens
ttttgtttgtttgtttgttttttgagacagagtcttgctttgtctcacaggctggagtgcaatggcatgatctcagctcactgccacctccgcctccttgrttcaagggattttcctgcctcagcctcctaagcagctgggattactggcacgcaccaccacgcctggctaatttttatgtttggtagagatgggatctca

SEQ ID NO: 228405 - DNA, 201 bp, Homo sapiens
ggcatgtttgtataaaatagaaaaagatactccttttgtggagacacagctcccccacaaggtacatggcctcgtgagaggggccaggctggatagccccyaactcatttcgtgggctgatgcaatgtgcggtcttaacaactgcatgttacatctgcgggtaatagaaatcttcaaggtcctatgtaaggtaaggtaagg

SEQ ID NO: 228406 - DNA, 201 bp, Homo sapiens
caggaacagctggagtattgagggaacctcacaagacagatgactacatggggagactgtattagtaaaaattgtgtgttgagtaaacatggcagttactktcaatggcataatctccatagtttccaacaagaggctgtgcaaattgcaaaggagggaaaagaatatctccgctttcctacattgaggttacagatgagc

SEQ ID NO: 228407 - DNA, 201 bp, Homo sapiens
tgtgtgtgtgtgtgtgtgtgtgtgtgtgtgtttgttttgtttgtttgtttgttttttgagacagagtcttgctttgtctcacaggctggagtgcaatggcrtgatctcagctcactgccacctccgcctccttggttcaagggattttcctgcctcagcctcctaagcagctgggattactggcacgcaccaccacgcctg

SEQ ID NO: 228408 - DNA, 201 bp, Homo sapiens
ctatagtgcagtggtacaaccttgactcactgcagccttgagctccaggactcaagtgatcttctcacctcagcctcctgaacagctgggactacaggtgygggccaccacgcccagctaatttttgcattttttgtagagacaaggtttcaccatgttgctcaggctgatctcaaactcctgagctcaagcaatctacct

SEQ ID NO: 228409 - DNA, 201 bp, Homo sapiens
gactctggcttgaatctgagttctgttgtgaatcaaattctgttggttgatactcatgtgggttttatatttccaaggtttggttttttgatttgaaaaayagagatgatgatagcaacctcaggtatacaacttctatagagcttgtatgggatatgtgtccaataaacggtagctgtttgttatgacagtggtagtagt

SEQ ID NO: 228410 - DNA, 201 bp, Homo sapiens
gcagactaccgtatttgcagaggctcccagcagatggaactggagctagaccagggacacttacctgtcacctgtttgtgtgtgtgtgtgtgtgtgtgtgkatgtgttgtgtgtttcattttgtgtttttgtttttgagacagggtctcactctgtcatccaagctatagtgcagtggtacaaccttgactcactgcagcc

SEQ ID NO: 228411 - DNA, 201 bp, Homo sapiens
ggacattgttgaggtaaatgtggtaatacttcagcatttatgagcgtgtgctgtggattgggttgactctggcttgaatctgagttctgttgtgaatcaarttctgttggttgatactcatgtgggttttatatttccaaggtttggttttttgatttgaaaaacagagatgatgatagcaacctcaggtatacaacttct

SEQ ID NO: 228412 - DNA, 201 bp, Homo sapiens
agttcaggagtgcagcagatgttgagtgaaacttttcatatttccgcggaataaacagctaaggcctaagcaggaatgctgacatgtggggacagatgctycccacatccacattactgagaggcagcagcagaaccattcctacctcactgaaacatacctccacgcccccaaaccgcaaagggagaggatacgtgagga

SEQ ID NO: 228413 - DNA, 201 bp, Homo sapiens
tactggctcttcatgaggacgtgacttcccattggttcatgtatcctgatagttatgggtacgtgaaaaccaacaaataatgcttaaaggccacagataawgaaagtttaaccacaactcaaagagaaaaatgctggctttagtttaacattatttgtcatggaaataattcaagatttagagtcatacagacctgggact

SEQ ID NO: 228414 - DNA, 201 bp, Homo sapiens
tgagctaatcaagagatccgtgaatgaattatcttgttccctttgtagaaaaagaaaatggcattttacttttcataaagagggagaagcctttgacgtgwgtgtgtgtgtgtgtgtgtgtgtgtgtgtgtgtgtgtgtgtgtgttttgccccttgtgcttctggtatgcatgagaaatttcacatttaggctactggctc

SEQ ID NO: 228415 - DNA, 201 bp, Homo sapiens
aacccgggaggcggagcttgcagtgagcctagatcgcaccactgcactccagcctgggcgacagagcgagactccgtctcaaaaaaaaaaaaaaaaaaaaagagttcttttcaaaccttcctgtacaagtaaaatgagcacaagcactattttaatatctttatagctaaagataggtttttgctcttaaaatttccctaa

SEQ ID NO: 228416 - DNA, 201 bp, Homo sapiens
ggcggatcacgaggtcaggagatcgagaccatcctggctaacacggtgaaaccccgtctctactaaaaatacaaaaaattagccgggcgtggtagcgggckcctgtagtcccagctactcgggaggctgaggcaggagaatggcgtgaacccgggaggcggagcttgcagtgagcctagatcgcaccactgcactccagcc

SEQ ID NO: 228417 - DNA, 201 bp, Homo sapiens
acatgttaatttgtgaatggaccaatctgtgttttaagggcagtatattggcatctttatgtaaaatggaacattttattttgtatgtttgatgacttctyaaaaatggcattcaggtgccctttggggagtgtgccattcatgagaggcttgtaaatgtcatctttgaacttgtctctcttataacattttgctgcccct

SEQ ID NO: 228418 - DNA, 201 bp, Homo sapiens
aatctcggctcactgcaagctccgcttcccgggttcacgccattctcctgcctcagcctcccgagtagctgggactacaggcgcccgccaccgcgcccggstaattttttttttttgtatttttagtagagacggggtttcaccttgttagccaggatggtctcgatctcctgacctcatgatccacccgcctcggcctcc

SEQ ID NO: 228419 - DNA, 201 bp, Homo sapiens
cagtggcgcaatctcggctcactgcaagctccgcttcccgggttcacgccattctcctgcctcagcctcccgagtagctgggactacaggcgcccgccacsgcgcccggctaattttttttttttgtatttttagtagagacggggtttcaccttgttagccaggatggtctcgatctcctgacctcatgatccacccgcc

SEQ ID NO: 228420 - DNA, 201 bp, Homo sapiens
gaatgacaactcgtttctttgtagatggcactggtgtcaccatttgggaaatgaaccctgctcagttactttatatttgagtaaataccaagggctcggaraatattttattaaaattaacacacttcagtttgtttggaaggtagcaagaaggatccaaccctctctgattataagaacaatgagaaccagagctttttt

SEQ ID NO: 228421 - DNA, 201 bp, Homo sapiens
ctcccgggttcaaccgattcttatgccacagcctcccaagtagctgggaccacaggcaggcactaccacactgagctaatttttgtatttttagtagagayggggttttgccatgttggccactttttaaaatggttaataatggaatgaactctgctttgtagtttttttactcatatcttgagagtaatttgatatttc

SEQ ID NO: 228422 - DNA, 201 bp, Homo sapiens
ttattccaagtttttattctgcctttatccagtttttcttcttggtagactccattcccacccttcttgaatattttacttttggaatcattgtcaaagcrgtcctctctcttcattcctattctcattcatgttcctatatttataaaactataaaacttgctcagattcctgtattttgctgggactctccatcagctt

SEQ ID NO: 228423 - DNA, 201 bp, Homo sapiens
ttctaaagtagagaataaaaacctgccccattggattatctttttccagatgtctctgcgactaagtgactaagtatgttacagaccataaaatgttgcarttttatttttgaacctgttttgcaaatactggaagtgtcatggatattttcctatctccaccttggcccaactccattaggcaattacttatgtttaaac

SEQ ID NO: 228424 - DNA, 201 bp, Homo sapiens
gtcccttaaaacatgaggtcttgtgagaacttactatcacaagaatagcatgagggaacagccaccatgattcagttacctcccactaagtctttcccacyacatgtggggattatgggaactacaattcaagatgagatttcagtgggaacacagccaaaccatatcagggttcaatattcaattcacttattgaagtaa

SEQ ID NO: 228425 - DNA, 201 bp, Homo sapiens
tttataaaggaaagagttttaattgactcacagttcagcatggctggagaggcctcaggaaacttatagtcatggtagaagggaaagcaaacatgtccttyttcacgtgatggcaggaaggagaagaatgagagccaagtgaaaggtcaagtcccttaaaacatgaggtcttgtgagaacttactatcacaagaatagcat

SEQ ID NO: 228426 - DNA, 201 bp, Homo sapiens
tggtgggtattgtttgctgtaatatcttgggtacttgccccagaattcagtgcatagtaagggtttgtattagtccattttcatgctgctaatagacatayccgagactggacaatttataaaggaaagagttttaattgactcacagttcagcatggctggagaggcctcaggaaacttatagtcatggtagaagggaaa

SEQ ID NO: 228427 - DNA, 201 bp, Homo sapiens
tctaggaaagttttcagtttggcttcaaaaaccctttgacatggataggtacaaaagattcatacatatatttacatgtacaggacacttgttgaattcaytcagaggaaattctttgtaggaagcagatgtagaaatgtaaattgatgtgcttttagaaagagaaagaagaggccaggcacagtggctcatgcctgtaat

SEQ ID NO: 228428 - DNA, 201 bp, Homo sapiens
ggacatcgagtgtgtggtgtgtgtatgtaggtgagcgagagaaagagagagataatcctaaagagaaatgtaaaactctagaaaagggcacaaaaacagayacagtgtggaaagggtgagaagagacaggatttttgaatggaaatctaagcatcattaagaagataaatcagataagaattaaaagttcagtatattcta

SEQ ID NO: 228429 - DNA, 201 bp, Homo sapiens
ttccttttgaggcagagtctcactctgtagcccaggctaagttgcagtggcacaatcttggctcagtacaatctctgcctcccgggttcaaccgattcttrtgccacagcctcccaagtagctgggaccacaggcaggcactaccacactgagctaatttttgtatttttagtagagatggggttttgccatgttggccac

SEQ ID NO: 228430 - DNA, 201 bp, Homo sapiens
catgggaaagaggaacttctaacaaaggtagaagaggaatggcatatcaccaaaatgcttagactgtgaatttggacatcgagtgtgtggtgtgtgtatgyaggtgagcgagagaaagagagagataatcctaaagagaaatgtaaaactctagaaaagggcacaaaaacagacacagtgtggaaagggtgagaagagaca

SEQ ID NO: 228431 - DNA, 201 bp, Homo sapiens
gtttaacaaatacataactagtgaccatctaacctgagccaagctctgagttaaatgcatgggatgtatctatcagcaaggccagctgctttccatcctcyggaggcttgtgtgatagtgagagaatatagttcacacacacacgtggagatggataacacaatgatcaatcagaattattatgaaggaaacaaatgaaga

SEQ ID NO: 228432 - DNA, 201 bp, Homo sapiens
ctctagtaaatatgtaagcttttcttaatatttaaaactcttcttttaaatgagtctaaataatattagaaaactattttcttctgtttattaaaaaaaaacactagaatgatttagaaaagccctagaaaacagcacttttaattttaataccaattgtgtattgaaatcttttaaaagacctgaatttcttgaagtaac

SEQ ID NO: 228433 - DNA, 201 bp, Homo sapiens
agatgagtagattgcaaaaattttctcccattctgtaggttgcctgttcactctgatggtagattcttttgctgtgcagaagctctttagtttaattagawcccatttgtcaattttggcttttgttgccattgcttttggtgttttagacatgaagtccttgcccatgcctatgtcctgaatggtattgcctaggttttc

SEQ ID NO: 228434 - DNA, 201 bp, Homo sapiens
ctgaggcaggagaatcgcttgaaccggggaggcggagtttgcagtgagcccagatcgtgccactgtgtccagcctggaaaacagagtgagactctgtctcaaaaaaaaaaaaaaaaaaaataggttgagaaattattggccaacttcacttatgacattcaaaaggctaagaattcaaatctagcagtatattaaaaaata

SEQ ID NO: 228435 - DNA, 201 bp, Homo sapiens
caaaataaaaactcaatagactgacttgagaagcatcttgcctctaactgattaggtctcactttcttgctgtgtaaaacaaagggcttgcctaggggtartctatattttcagaagttttcctgttatagcattccagaatttctcaggtacttttataatgattaagagctttatgatctcaaacacagcataattaca

SEQ ID NO: 228436 - DNA, 201 bp, Homo sapiens
gaaaaccttgtttcaaagaaacaataaatatgcaatacccctcccatatatcctggattttataatgctgttagttgtaagtacaccactgatttcatatwttggaaaaaatgagtgcttccatattaaacatatcaattacaagatgcatcttcatttatttatgttaaaaacataaaataggcatcttaaaattaaaga

SEQ ID NO: 228437 - DNA, 201 bp, Homo sapiens
tcaaagaaacaataaatatgcaatacccctcccatatatcctggattttataatgctgttagttgtaagtacaccactgatttcatattttggaaaaaatragtgcttccatattaaacatatcaattacaagatgcatcttcatttatttatgttaaaaacataaaataggcatcttaaaattaaagaaatataggctgg

SEQ ID NO: 228438 - DNA, 201 bp, Homo sapiens
tcccatatatcctggattttataatgctgttagttgtaagtacaccactgatttcatattttggaaaaaatgagtgcttccatattaaacatatcaattayaagatgcatcttcatttatttatgttaaaaacataaaataggcatcttaaaattaaagaaatataggctgggcatgatggcttatgcctgtaatcccagc

SEQ ID NO: 228439 - DNA, 201 bp, Homo sapiens
taaaaaagcttattggatgaattataaccattctacttgaaactatgatagggaataaatgtgaacaattttctaaagtagagaataaaaacctgccccaytggattatctttttccagatgtctctgcgactaagtgactaagtatgttacagaccataaaatgttgcaattttatttttgaacctgttttgcaaatact

SEQ ID NO: 228440 - DNA, 201 bp, Homo sapiens
tgtgaatctaggttgagcttgactgcatgtatatatgtatatgagcatgtgtgttcatgaacatagtcatcatgttgtgtgtcattcacaatctatgaccyatgtaggtataaacctatgaagttttgtaaaggcctgtgggccccacgcccagaaactgtgattccctgctttttaaaaaagcttattggatgaattata

SEQ ID NO: 228441 - DNA, 201 bp, Homo sapiens
aaccttgtaagatttgtgaatctaggttgagcttgactgcatgtatatatgtatatgagcatgtgtgttcatgaacatagtcatcatgttgtgtgtcattyacaatctatgacctatgtaggtataaacctatgaagttttgtaaaggcctgtgggccccacgcccagaaactgtgattccctgctttttaaaaaagctta

SEQ ID NO: 228442 - DNA, 201 bp, Homo sapiens
tttatttcaacggatattcatttagggtctcttatgtgtagatgttgcttaaatattcatttacactttgtgttgtcactttctttttatcatatacttaytgagtggatattcttaccctcattttacaggtgaagaggttgatccagtgctgacttgtctgaagtgatactgactgtgtgactctagcctttggcttat

SEQ ID NO: 228443 - DNA, 201 bp, Homo sapiens
gagctggtcaagataatgactaatgaggtcagtgggccacaggatatgagaagcatgtaaccattgcttttatttcaacggatattcatttagggtctctyatgtgtagatgttgcttaaatattcatttacactttgtgttgtcactttctttttatcatatacttattgagtggatattcttaccctcattttacaggt

SEQ ID NO: 228444 - DNA, 201 bp, Homo sapiens
ccagtctttcctgcggtggtgctcctccagaatccaatgttcacaaagcagaccttctgtcatgcacaacttcttgtttaaaaggtcaaccccaacttaasttaagggtgtgacatggcccttaggctcaagtctgtctgcaaagccctgtaaaccagctttctctgcctccctaacacgcccccgggcaaactcctctgc

SEQ ID NO: 228445 - DNA, 201 bp, Homo sapiens
accatcttggccaggctggtcgtgaactcctgacctcatgatccacccaccttggcctcccaaagtgctaagattacaggtgagagccattgcgtggccayagttaaccattttttttttttaataatgaaaggtacttaaggtaaagagagcattttctcctttttaagtagatgattgatagtggaaggaacctcggga

SEQ ID NO: 228446 - DNA, 201 bp, Homo sapiens
ctgggtagcacatcctctacactttttgtggaaggagactcagattaaaaataagtatcaagtacattccttccagagaaaataaagagaagaagttatasagagaggaaccctcagtgtatttgtggcaggagtttggagcctttgggaacagatgacaggcatctctgattcagggcctccatctgagcagacttcttt

SEQ ID NO: 228447 - DNA, 201 bp, Homo sapiens
ccttgagacactcttgggtccttctaatgatgccccttcaattttaacctagcctgatttggtttctgttacttagaactgaagagacttactaatacatyctgtacttcaagccaataacacatgaataattgtcctcaaaaattagaattgatcttccacagggggttaggagatttgggtgaaataggtattatcttt

SEQ ID NO: 228448 - DNA, 201 bp, Homo sapiens
tgtatggtaaacttaaaactttgaatttcttttggtgttaccagactgaaaccatcctagaccttctaagaaaaagaaaaagaaatttactgaccgatgayagctttgacaccctagatccgagtactcagtgttgttaagagtctgtgtctctcccggctgggcgcattggctcacgcctgtaatcccagcactttggaa

SEQ ID NO: 228449 - DNA, 201 bp, Homo sapiens
gacagggagagggcttattatgttttaattctcttaagaatgtccaggtgatagcctcatctcttccagttatcccccctcgaaatggctgcacagtagaygactgacagattgatgtcccccaaagctgagtttcattcttctgctatttagtcattgccatttcttcaactaatagtttatgtatggtaaacttaaaac

SEQ ID NO: 228450 - DNA, 201 bp, Homo sapiens
taccaaaagagatttcgttactttagttggatgttaacataacatttgaaagcaaatccggaaaaagaatctgccctaccctgaagtgagctattgtcagytcctgttcacagcttggagatttcccagtttggggcctgcatttgcttttgtgtcactgaaccttactctactacaagttaggttgcctatctagccctg

SEQ ID NO: 228451 - DNA, 201 bp, Homo sapiens
ttacaccctatatctttcttgactagatgagaagaacttcaggagcctctctctctctctctctctctctcctctctctctctctctatatatatatatawtttttaaatatatataatttttatatataaaataaatataaaatatatatatatatatattttaaagcagtgacctctttttgcataaaaggtctccgtc

SEQ ID NO: 228452 - DNA, 201 bp, Homo sapiens
tcctactcccttcctccccacctctccttgacacacacacacacactctctctctctctgtgtgtgtgtgtgtgtgtgtgtgtgtgtgtgtgtgtgtgtgkctccttacatcagtagaaatggcaactgccttgcctggtgacaacatgccagtggaggaaaactcacctaaaagtaaaggaccggctctattctgtcctc

SEQ ID NO: 228453 - DNA, 201 bp, Homo sapiens
tattccccagcagattttcactggcttcaagatggtctgagagaatgagtagttggccatgggatgggaacaggcaggagaaaaaggtgttaggaatgagmaatgggcaaactgagcagagtttcctgctacaggaagctctgtagatgtgtaattcagtgcaaaataaaaactcaatagactgacttgagaagcatcttg

SEQ ID NO: 228454 - DNA, 201 bp, Homo sapiens
ttcctactcccttcctccccacctctccttgacacacacacacacactctctctctctctgtgtgtgtgtgtgtgtgtgtgtgtgtgtgtgtgtgtgtgtgtctccttacatcagtagaaatggcaactgccttgcctggtgacaacatgccagtggaggaaaactcacctaaaagtaaaggaccggctctattctgtcct

SEQ ID NO: 228455 - DNA, 201 bp, Homo sapiens
gaagggacttttctctttagtccctggctctgtgtcccttcctactcccttcctccccacctctccttgacacacacacacacactctctctctctctgtstgtgtgtgtgtgtgtgtgtgtgtgtgtgtgtgtgtgtgtctccttacatcagtagaaatggcaactgccttgcctggtgacaacatgccagtggaggaaa

SEQ ID NO: 228456 - DNA, 201 bp, Homo sapiens
aagtgtgaacggtacagagcagtcacccagccaaaggttgaagcacacaaattatgcttaattgagctccattattgttgagtttttattttattttaaartatactaaagacagtaagagcttcaagagaggatattaaacaaccatcattgatcttgaatttagctggtggaatttgaaagaaacactgccctcctttc

SEQ ID NO: 228457 - DNA, 201 bp, Homo sapiens
tcttttcacaggaagggacttttctctttagtccctggctctgtgtcccttcctactcccttcctccccacctctccttgacacacacacacacactctcwctctctctgtgtgtgtgtgtgtgtgtgtgtgtgtgtgtgtgtgtgtgtgtctccttacatcagtagaaatggcaactgccttgcctggtgacaacatgcc

SEQ ID NO: 228458 - DNA, 201 bp, Homo sapiens
gatgggctgtaaaaaatgaattgtctcattcctaggtaaacagtatctcaaggaggtgagaaaagaggaaagtacataatttatggagaggcaagaaaagwggggctctgaagatgggctttatgatttttattgaaggctgaggatcgagttcaaatggtgatgcccgctatcgagaatacttagtgccactgttccatg

SEQ ID NO: 228459 - DNA, 201 bp, Homo sapiens
attcttttcacaggaagggacttttctctttagtccctggctctgtgtcccttcctactcccttcctccccacctctccttgacacacacacacacactcwctctctctctgtgtgtgtgtgtgtgtgtgtgtgtgtgtgtgtgtgtgtgtgtctccttacatcagtagaaatggcaactgccttgcctggtgacaacatg

SEQ ID NO: 228460 - DNA, 201 bp, Homo sapiens
tttcccataaaatgatctcttagaggtttaaacccctcctctgttcttgtggctagacactgtttacctaactcctagatttttaccaccacctcctgttygagttccaagacgttcatgtttcctcatggattcatgtatcctgaattcctagcaaaacaaatcttgcccagtctttctgattcctagttttatttcatg

SEQ ID NO: 228461 - DNA, 201 bp, Homo sapiens
tcttattcttttcacaggaagggacttttctctttagtccctggctctgtgtcccttcctactcccttcctccccacctctccttgacacacacacacacwctctctctctctctgtgtgtgtgtgtgtgtgtgtgtgtgtgtgtgtgtgtgtgtgtctccttacatcagtagaaatggcaactgccttgcctggtgacaa

SEQ ID NO: 228462 - DNA, 201 bp, Homo sapiens
tgaagttgggttctttgctcattgcagtgagggagaacacataccacagagaaccatagcatatctcagtaagagggtgttagaacgaatttggagttcakttgggtgatttgggggagagtctaaggaagggagggagattcattctgcatagggtgctgtcacaaagtggggataattttatgattggatatctcacat

SEQ ID NO: 228463 - DNA, 201 bp, Homo sapiens
agggtttatttgaaaatcagcaatggaatctaccgcatgtcaaccgtaaataatgaggttcaaagaatacgattaaatgtggagtttatcctagtgcagarcttgaggatcgtcacggctgactctacacaaatggatcagcagcccaatttggtgctgttgaggtttcatttacataggcagggacagagaagttccagc

SEQ ID NO: 228464 - DNA, 201 bp, Homo sapiens
acattagatcttaggaaataccaagttgataagtaaatgatacacttggcccagatgactgaccttcattttctgttgtcaattatttctcctcttaaccstcaacatttcttttctctccctgattgtctctcctaatctcctttatttttgtcttcttgagacattcactgatctttttcctttcttctttttcctcat

SEQ ID NO: 228465 - DNA, 201 bp, Homo sapiens
cataaacaagaaatggggaaaggattccctatttaacaaatggtgctgggaaaactggctagccatatgtagaaagctgaaactggatcccttccttacaycttatacaaaaattaattcaagatggattaaagacttaaatgttagatcttaaaccataaaaaccctagaagaaaacctaggcaataccattcaggacat

SEQ ID NO: 228466 - DNA, 201 bp, Homo sapiens
ttgatgggcatttgagttggttctgagtctttgctattgtaaatggcgctgcactaaacataagtgtgcatgtgtctttatagtagaatgatttatattcytttgggcatatacctggtaatgggattgctgggtcaagtggtatttctgttctagatccttgaggaatcactatactgtcttcccacagaggttgaatta

SEQ ID NO: 228467 - DNA, 201 bp, Homo sapiens
ttcttgaccagttagttatactgctttcctattgatatgctaaaagaaaaggataacaggaatggatggtaattcttttctcttttcttgtgtccttgatkcaccttttattccttgcttaccttcttttttatccccccatgtctgtcataaatatgcctaattaaaatgtcaactgctaatagcttaaaaataccattt

SEQ ID NO: 228468 - DNA, 201 bp, Homo sapiens
aaaaagaaacgcaaaaatgttagccgggcatagtggtgtgcacctatagtcccagctacttgggtggctgaggcaggaggatcactctgtgaacccaggartttgaggctatagtgagccatgatcgtgctgctgcactgcagcctggacaacagactgagaaaccctttgtaaaacaataacaacaacaaaaaattaaaa

SEQ ID NO: 228469 - DNA, 201 bp, Homo sapiens
aaatgaaaatattatcttattcttttcacaggaagggacttttctctttagtccctggctctgtgtcccttcctactcccttcctccccacctctccttgacacacacacacacactctctctctctctgtgtgtgtgtgtgtgtgtgtgtgtgtgtgtgtgtgtgtgtgtctccttacatcagtagaaatggcaactgcc

SEQ ID NO: 228470 - DNA, 201 bp, Homo sapiens
taaatgaaaatattatcttattcttttcacaggaagggacttttctctttagtccctggctctgtgtcccttcctactcccttcctccccacctctccttsacacacacacacacactctctctctctctgtgtgtgtgtgtgtgtgtgtgtgtgtgtgtgtgtgtgtgtgtctccttacatcagtagaaatggcaactgc

SEQ ID NO: 228471 - DNA, 201 bp, Homo sapiens
ctccctatcagcaataagtgttttactttcttactgtttgtgtgttcactggagtagcacttttaatttccttcaataacttgtcctttgcattcacagcktggctgtttggcccaagaggcctagcttttggcctgtctttggcttctggcatgccttctttactaagctttatcgtttctactttttgatttaaagtga

SEQ ID NO: 228472 - DNA, 201 bp, Homo sapiens
ctggattaggctttggcttaagggaatgttgtggcttgtttgatcttctatccagaccactcaaactctccctatcagcaataagtgttttactttcttamtgtttgtgtgttcactggagtagcacttttaatttccttcaataacttgtcctttgcattcacagcttggctgtttggcccaagaggcctagcttttggc

SEQ ID NO: 228473 - DNA, 201 bp, Homo sapiens
tgttttctgtagcttcctcacctctctcagacttcatagaattggagagagttaggaccttgctctggattaggctttggcttaagggaatgttgtggctkgtttgatcttctatccagaccactcaaactctccctatcagcaataagtgttttactttcttactgtttgtgtgttcactggagtagcacttttaatttc

SEQ ID NO: 228474 - DNA, 201 bp, Homo sapiens
caaattccatttgagatgtgatcataggaacagtataatgaatttattaagattatgaatgtggattcagtctaacagagatgtgaatcctaattcatctrtttattatctgtgtgattttggacaacttgtcttatctgagaatcagcttctacttatgtaatagtacacaagattggaaagctatgggaagcaggtcat

SEQ ID NO: 228475 - DNA, 201 bp, Homo sapiens
gaaatggcttctttccttgaacctcatgaccaatctctgctagcttcagacttgttttctgtagcttcctcacctctctcagacttcatagaattggagasagttaggaccttgctctggattaggctttggcttaagggaatgttgtggcttgtttgatcttctatccagaccactcaaactctccctatcagcaataag

SEQ ID NO: 228476 - DNA, 201 bp, Homo sapiens
ttatattatggaaatggcttctttccttgaacctcatgaccaatctctgctagcttcagacttgttttctgtagcttcctcacctctctcagacttcatasaattggagagagttaggaccttgctctggattaggctttggcttaagggaatgttgtggcttgtttgatcttctatccagaccactcaaactctccctat

SEQ ID NO: 228477 - DNA, 201 bp, Homo sapiens
gaaaatctattgtttaatatggtcaacttcattgattatctttgccagctcttctggaaaacttgctgcagcttctgtattagcacttgctgcttcacctygacattttatattatggaaatggcttctttccttgaacctcatgaccaatctctgctagcttcagacttgttttctgtagcttcctcacctctctcagac

SEQ ID NO: 228478 - DNA, 201 bp, Homo sapiens
tgttcattgaagctttgaagccaggcactaacttctcctctctagctaggacagtccttgatggcatcgccttccaatagaaggctgttttgtcactatckaaaatctattgtttaatatggtcaacttcattgattatctttgccagctcttctggaaaacttgctgcagcttctgtattagcacttgctgcttcacctt

SEQ ID NO: 228479 - DNA, 201 bp, Homo sapiens
tagtagaacttattttaaaattagagttaatcgtctttgacagtgctgttgttttatcaaccaagttggtataatggtccaaattctttgttgtcatttcracaatgttcacatcatcttcactaggagttgatttcatctcaagaaatcactttctttgctcacccataaaaagcaatttctcatctgttcaagtttgat

SEQ ID NO: 228480 - DNA, 201 bp, Homo sapiens
gactagtaaccttgatacatctgctaagtctcttcatggcagcacctaatctagtgtttaattggataaccagggacaggaatctttttttttttttttttgagagggagtttcactctgtcgcccaagctggagtgcaatggtgcagtcttggctcactgcaacctctgcctcccgggttcaagcaattctgctgcctta

SEQ ID NO: 228481 - DNA, 201 bp, Homo sapiens
tggtgagggcaagaatagatatagagagagcaataaaaaacctattgcaggctgggtacagtgggtacagtacacctgtaatcccaacattttgggaggcygggtgaaatcccatctatactaaaaatacaaaaactagcagggcgtggtggtgcacacctgtgatcccagctacttgagaggctgatgcacaagaatcac

SEQ ID NO: 228482 - DNA, 201 bp, Homo sapiens
ctctactaaaaatacaaaattagctgggcatggtggcacatgcccgtgatcccagctacgtgggaggctgaggcaggagaatcgcttgaacctgggaggtrgaggttgcagtgagccgagattgcgccattgcactctagcctgggcaacaagagcgaaactctgtctcaaaaataataatactaatcataaaagactttg

SEQ ID NO: 228483 - DNA, 201 bp, Homo sapiens
aggctgaggcaggtggatcacctgagggcgagagttggagaccagcctgaccaacatggagaaaccctgtctctactaaaaatacaaaattagctgggcayggtggcacatgcccgtgatcccagctacgtgggaggctgaggcaggagaatcgcttgaacctgggaggtggaggttgcagtgagccgagattgcgccatt

SEQ ID NO: 228484 - DNA, 201 bp, Homo sapiens
ttatctcataccaacgtatctatgccatagattgctgggaaacaagagttgtcctggttactaacgtagtgtacattaagtttcctggaatttttttttttaagcctgtttatttgatgctggcacctctgttcttctgaaggcagcatattaggtttactaataaatgacacccagttcctaagagactcggcctaaaag

SEQ ID NO: 228485 - DNA, 201 bp, Homo sapiens
ttgttggtgcaatgaaacaaaagtgtttttcaggctctctgctgccatggttagcctaggacagggttatgaaaggagcttttctgcctccgctgccttccggggttacattcttagtgaatctactgcctcaaaatggagcttgttagttgcgtgtcatccgagggtggcaattagttgcatgtgtttggttggatgcca

SEQ ID NO: 228486 - DNA, 201 bp, Homo sapiens
ttcagtataatattggctgttggttggtcatagatagctcttattattttgagatacgtctcatcaatacctcatttattgagagtttttagcatgaagcrttgttgaattttgtcaaaggccttttctgcatctattgagataatcatgtggtttttgtcgttggttctgtttatatgctggattacgtttattgatttg

SEQ ID NO: 228487 - DNA, 201 bp, Homo sapiens
gctctggcgtcctcccacctcagcttcataagtagttaaggccacaggcacatgccaccatacccagctaatttaatttctttttttttttctttttttttgtagagacagggtgtccctatgttgcccaggctagtctcaaactcctgggttcaagcaatcctcctgcttcagcctagaaaatattttagtacattcctt

SEQ ID NO: 228488 - DNA, 201 bp, Homo sapiens
atatacaatcatgtcatctgcaaacagggacaatttgacttcctcttttcttaactgaatgccctttatttccttctcctgcctgattgccctggccagarcttccaacactatgttgaataggagtggtgagagagggcatccctgtcttgtgccagttttcaaagggaatgcttccagtttttgcccattcagtataat

SEQ ID NO: 228489 - DNA, 201 bp, Homo sapiens
ctcctgatccatggaggatgattcctgctagtgaggtctttatcgacatcttatttaaggtacacctcccctttctttatcttagcctcttttttcctttytttattttattttttttttagtaaaatttgctgtagttgtttcatttgtctatttacctttctttttcactgtctcctctagaatgtaagctccacgaaa

SEQ ID NO: 228490 - DNA, 201 bp, Homo sapiens
tataaattaccttgggcagtatggccattttcacgatattgattcttcctacccatgagcatggaatgttcttccatttgtttgtatcctcttttatttcwttgagcagtggtttgtagttctccttgaagaggtccttcacatcccttgtaagttggattcctaggtattttattctctttgaagcaattgtgaatggga

SEQ ID NO: 228491 - DNA, 201 bp, Homo sapiens
gcaaaagaatcactggactccaggaagcagaggttgcagtgagccaagatgactccactgagcaacaacagccagactctgtctcaaaaaaaaaaaaaaaagagtctgtatttccaatagacatgtttatattaagaatttggaatttatggacaacttttccagatctccatgtactctgtgacatgagagaaagacagc

SEQ ID NO: 228492 - DNA, 201 bp, Homo sapiens
gtagccttgtagtatagttcgaagtcaggtagcgtgatgcctccagctttgttcttttggcttaggattgacttggcagtgtgggctcttttttggttccmtaagaactttaaagtagttttttccaattctgtgaagaaagtaattggtagcttgatggggatggcattgaatctataaattaccttgggcagtatggcc

SEQ ID NO: 228493 - DNA, 201 bp, Homo sapiens
gaaaaggttgaaaaaccaaatggtgagtactatgctcagtacctgggtaatgctaccattcatatcccaaacctcagcatgatgcaatatacccaggtaasaaacatgcaaatataccccctgaatctaaaatgaaacttgaaaaaataaacacataaaaacagatgaatgaattttttttaaaaagacctaagcccaagg

SEQ ID NO: 228494 - DNA, 201 bp, Homo sapiens
agggctctgttctgttccattgatctatatctctgttttggtaccagtaccatgctgttttggttactgtagccttgtagtatagttcgaagtcaggtagygtgatgcctccagctttgttcttttggcttaggattgacttggcagtgtgggctcttttttggttccataagaactttaaagtagttttttccaattctg

SEQ ID NO: 228495 - DNA, 201 bp, Homo sapiens
ttatacactgttggtgggaatgtaaattagttcggccactgtggaaagcagtttggtgatttcccaaagaacttaaaacagaactaccattcgatccagcrattccattactgtgtatagatccaaaagaaaacaaatcattctaccaaagacacatgtacttgcatgttcattgtcacagcactattcacaatagcaaag

SEQ ID NO: 228496 - DNA, 201 bp, Homo sapiens
tatatggctaaccagttttcccagcaccatttattaaatagagaatcctttccccgtttcttttgtcaggtttgtcaaagatcagatggttgtagatatgyggcattatttctgagggctctgttctgttccattgatctatatctctgttttggtaccagtaccatgctgttttggttactgtagccttgtagtatagtt

SEQ ID NO: 228497 - DNA, 201 bp, Homo sapiens
tttgtataaggtgtaaggaagggatccagtttcagctttctatatatggctaaccagttttcccagcaccatttattaaatagagaatcctttccccgttycttttgtcaggtttgtcaaagatcagatggttgtagatatgtggcattatttctgagggctctgttctgttccattgatctatatctctgttttggtacc

SEQ ID NO: 228498 - DNA, 201 bp, Homo sapiens
tctcccattctgtaggtggcctgttcactctgatggtagtttcttttgctgtgcagaagctctttagtttaattagatcccatttgtcaattttggctttkgttgccattgcttttagtgttttggacatgaagtccttgcccatacttatgtcctgaatggtattgcctaggttttcttctagggtttttatggttttag

SEQ ID NO: 228499 - DNA, 201 bp, Homo sapiens
gccagtgatgatgagcgtttttttcacgtgtcttttggctgcataaatgtcttcttttgagaagtgtctgttcatatccttcacccactttttgctgggastgtttgtttttttcttgtagatttgtttgagttcattgtagattctggatattagccctttgtcagatgggtagactgcaaaaattttctcccattctgt

SEQ ID NO: 228500 - DNA, 201 bp, Homo sapiens
gttgtttcctgactttttaatgattgccattctaactggtgagagatggtatctcattgcggatttgttttgcatttctctgatggccagtgatgatgagygtttttttcacgtgtcttttggctgcataaatgtcttcttttgagaagtgtctgttcatatccttcacccactttttgctgggactgtttgtttttttct

SEQ ID NO: 228501 - DNA, 201 bp, Homo sapiens
ccaaccccattaaaaagtgggcaaaagacatgaacagaaacttctcaaagggagacagacatacaagtggccaacaaacatgaaaaaatgctcattgtccstaatcatcagagaaatacaaatcaaaaccaccatgagataccatctcacaccagtcagaatggctaaagtaaaaaaaaaaaaaacaacaaaaacaaaaca

SEQ ID NO: 228502 - DNA, 201 bp, Homo sapiens
cagaaaatattcacaaattacacaaccactaaaggtctaatatctggagtctataaggaacttaaatgattgaacaagcaaaaaccaaccccattaaaaartgggcaaaagacatgaacagaaacttctcaaagggagacagacatacaagtggccaacaaacatgaaaaaatgctcattgtccctaatcatcagagaaat

SEQ ID NO: 228503 - DNA, 201 bp, Homo sapiens
gagaatcctagaggaaaacctaggaaacaccattctggacatcagccttgggaaagaatttatgactaagtcctcaaaagcaattgcaacaaaaccaaaawttgacaagtgagactaatcaaaccagagagcttctgcacagcaaaagaaactgtcaacagagtaaacaacctacaggatgacagaaaatattcacaaatt

SEQ ID NO: 228504 - DNA, 201 bp, Homo sapiens
aaaagaagaaatcaaactatctctctttgcagacaatatgattctattcctaaaaaactcaaagacgccaccaaaagcctcctagaactcagaaacaactwcagtaaagtttcaggtcattaaatcaatgtacagaaatcagtagcatttctgtacaccaataatgttcaacttgcgagccaaatcaagaaggaaatctca

SEQ ID NO: 228505 - DNA, 201 bp, Homo sapiens
ctccccccagcagttacacatatttaataatttttacgtgtaaaaagtaaggttaaacagttacaaagtcaggttgttatgttttgcatgactttgagaatgctagtggaatggaaataaagttaggagcagcaggaggaggctctgttgaaacagatctccttcagtggcatggtactgttcatggtcagaggaagtcct

SEQ ID NO: 228506 - DNA, 201 bp, Homo sapiens
gccgttgcactccagcctgggtgacaatagcaaaactctgtctaaaaaaaaaaaaaaaaaatatatatatatatatatatatatatatatatatatatatagtattaataaataaatatctctaaatatgaggtgactaatttgggaagtactgccattgagtataaatggggaaactgagatgtaggggagggacttgcc

SEQ ID NO: 228507 - DNA, 201 bp, Homo sapiens
catcaggcgttagggtctcatcataaggagcaggcagcctagatccctcgcatgcacagttcacactagggttcctgctcctatgagaacctaatgtcccygctgatctgacaggaggtggagctcaggcggtaatgctcgcttgcccaccactcacctcctgctgtgtggcctggtccctaacaggccacagactggtac

SEQ ID NO: 228508 - DNA, 201 bp, Homo sapiens
tgccgttgcactccagcctgggtgacaatagcaaaactctgtctaaaaaaaaaaaaaaaaaatatatatatatatatatatatatatatatatatatatatagtattaataaataaatatctctaaatatgaggtgactaatttgggaagtactgccattgagtataaatggggaaactgagatgtaggggagggacttgc

SEQ ID NO: 228509 - DNA, 201 bp, Homo sapiens
gcagtgagccgagattgtgccgttgcactccagcctgggtgacaatagcaaaactctgtctaaaaaaaaaaaaaaaaaatatatatatatatatatatatrtatatatatatatatatagtattaataaataaatatctctaaatatgaggtgactaatttgggaagtactgccattgagtataaatggggaaactgagat

SEQ ID NO: 228510 - DNA, 201 bp, Homo sapiens
atccataacaggaaacaaatgatatattggtgatatattggactatatcagaattaaaacttttgcttttgcaccgtgaaagagtttttttttttttttttcttttcttttcttttttgagacagtgtctcactcagttccccaagctggagggcagtggcacgatctcggctcactgcaacttctgcctcccaggttcaa

SEQ ID NO: 228511 - DNA, 201 bp, Homo sapiens
aggttgcagtgagccgagattgtgccgttgcactccagcctgggtgacaatagcaaaactctgtctaaaaaaaaaaaaaaaaaatatatatatatatatakatatatatatatatatatatatagtattaataaataaatatctctaaatatgaggtgactaatttgggaagtactgccattgagtataaatggggaaact

SEQ ID NO: 228512 - DNA, 201 bp, Homo sapiens
aaactaagagaatttgtgttttttgtttgtttgtttgtttgtttttgtttttgtttttgagacggagtcttgctctgtcgcccaggctggagtgcggtggygcgatctcgactcactgcaagctctgcctcccgggttcaagcgattctcctgcctcagcctcctgagtcgctgggactacaggcgcccaccaccacgccc

SEQ ID NO: 228513 - DNA, 201 bp, Homo sapiens
aacctgggaggcgaaggttgcagtgagccgagattgtgccgttgcactccagcctgggtgacaatagcaaaactctgtctaaaaaaaaaaaaaaaaaatatatatatatatatatatatatatatatatatatatatagtattaataaataaatatctctaaatatgaggtgactaatttgggaagtactgccattgagta

SEQ ID NO: 228514 - DNA, 201 bp, Homo sapiens
tcttatgtggactttcattttttaaaggcctgtctcctttgcctagcaagggaaaaaaaaaaaaaaaaaaatatatatatatatatacatatatatatatrtatatatatatacactcatttaatttctctaggttctttaataagcttaagtaactttcttatctgctatttgaatatcaaagatgttttaaatataaaa

SEQ ID NO: 228515 - DNA, 201 bp, Homo sapiens
tgaacctgggaggcgaaggttgcagtgagccgagattgtgccgttgcactccagcctgggtgacaatagcaaaactctgtctaaaaaaaaaaaaaaaaaatatatatatatatatatatatatatatatatatatatatagtattaataaataaatatctctaaatatgaggtgactaatttgggaagtactgccattgag

SEQ ID NO: 228516 - DNA, 201 bp, Homo sapiens
tatcatttgggtgaattacatcaatgggtgaattgcatgatatgtgaattacatctcaataaagcagctatatatgaggcaggagaatcacttgaacctgkgaggcgaaggttgcagtgagccgagattgtgccgttgcactccagcctgggtgacaatagcaaaactctgtctaaaaaaaaaaaaaaaaaatatatatat

SEQ ID NO: 228517 - DNA, 201 bp, Homo sapiens
gttggccaggctggtctcgaacacctgacctcatgtgatctacctgcctcggcctcccaaagtgctgggattacaggtgagagccactgtgcccagcctcyattcagtgttcctaataacagcttgtggctgtgccatttatttagtggagttattaagtaccccaagctttgctcttacagtgtcccttatagagtaaaa

SEQ ID NO: 228518 - DNA, 201 bp, Homo sapiens
cctcttctgtgcttcctgacgtttctctcatattttccacctccttatctttttgtcctaggaaatgtttggtgccttgccttccatttcttgtattttttaaaaaaattttaccaatcatattcttaatttccaatgacgctcttgcctcttaaactgattttttccttttttatacagccttgtgttgggtaatctttg

SEQ ID NO: 228519 - DNA, 201 bp, Homo sapiens
catatcagggtgaatgggaggtaaactttctgcatgcttgcaggtttagaattttttattttgccctcaaaagacaattgatagtttgggtgtagacttcyctgttgaaaatcctttttcctgtcttttagtatgcaatcctgctgctgctaagtctgatgctactctgattcttattttgtaggccaccttctttttttt

SEQ ID NO: 228520 - DNA, 201 bp, Homo sapiens
cctgtaattaaccccccttttcagccccaccaatctcttccatcctgtgttgtacctgctatttctgaggctcgattctttctggaataaccaggcaggtyggccctcctttgccgcaatccctttttaggctgtggtttcctttgctgtgtggttcagaagccaacagacttttattcaaatcatttatcttctaatggc

SEQ ID NO: 228521 - DNA, 201 bp, Homo sapiens
ggggttgctgaacacgtgcccaggacaggagcaaaccggagtatagagaaggcagcattttgggagataattttacattactacttcaaaaacaggcaaaraggcatcgaatttattgttgtgggagaactcatcggtacttggtcggactttcttacacttattttatggttgttgtttttatttttagcgtcaaagggg

SEQ ID NO: 228522 - DNA, 201 bp, Homo sapiens
atcacaccttaatcttatgtggactttcattttttaaaggcctgtctcctttgcctagcaagggaaaaaaaaaaaaaaaaaaatatatatatatatatacatatatatatatgtatatatatatacactcatttaatttctctaggttctttaataagcttaagtaactttcttatctgctatttgaatatcaaagatgtt

SEQ ID NO: 228523 - DNA, 201 bp, Homo sapiens
gatcacaccttaatcttatgtggactttcattttttaaaggcctgtctcctttgcctagcaagggaaaaaaaaaaaaaaaaaaatatatatatatatatayatatatatatatgtatatatatatacactcatttaatttctctaggttctttaataagcttaagtaactttcttatctgctatttgaatatcaaagatgt

SEQ ID NO: 228524 - DNA, 201 bp, Homo sapiens
gcccacattaacttgaatgatcacaccttaatcttatgtggactttcattttttaaaggcctgtctcctttgcctagcaagggaaaaaaaaaaaaaaaaawatatatatatatatatacatatatatatatgtatatatatatacactcatttaatttctctaggttctttaataagcttaagtaactttcttatctgcta

SEQ ID NO: 228525 - DNA, 201 bp, Homo sapiens
ttgcccacattaacttgaatgatcacaccttaatcttatgtggactttcattttttaaaggcctgtctcctttgcctagcaagggaaaaaaaaaaaaaaawaaatatatatatatatatacatatatatatatgtatatatatatacactcatttaatttctctaggttctttaataagcttaagtaactttcttatctgc

SEQ ID NO: 228526 - DNA, 201 bp, Homo sapiens
tcttgcccacattaacttgaatgatcacaccttaatcttatgtggactttcattttttaaaggcctgtctcctttgcctagcaagggaaaaaaaaaaaaawaaaaatatatatatatatatacatatatatatatgtatatatatatacactcatttaatttctctaggttctttaataagcttaagtaactttcttatct

SEQ ID NO: 228527 - DNA, 201 bp, Homo sapiens
ccttgctccccacccgccaactggccccagtgtgtgatgttcccctcccagtgttcatgtgttctcattgttcagctcccacttatgagtgagaacatgtsgtgtctggttttctgttcctgtgttagtttgctgaagatgatggtttccagcttcatccacgtccctgcaaatgacattatctcattccttttttggctg

SEQ ID NO: 228528 - DNA, 201 bp, Homo sapiens
tctttcattaacacagagaaaaagaaattcatgataggctttccttcatttcatttcaagcaagtataggatttttactatgcttgcaagaaattatatacatatttggagaagcagcctgtgatatcaataggtaagttttctagttatccaggtgtccctgctgttagccttttaaatttcactttgggagcaaatgct

SEQ ID NO: 228529 - DNA, 201 bp, Homo sapiens
gtctttcattaacacagagaaaaagaaattcatgataggctttccttcatttcatttcaagcaagtataggatttttactatgcttgcaagaaattatatacatatttggagaagcagcctgtgatatcaataggtaagttttctagttatccaggtgtccctgctgttagccttttaaatttcactttgggagcaaatgc

SEQ ID NO: 228530 - DNA, 201 bp, Homo sapiens
  misc_feature (1)...(201): n = A,T,C or G
ctcctaggaagctcaggccacagggaaaagtcaaggcttgatagaattaatctttgtcttaatgatgactaactgttgagagatcataggtttaagactcntggtagaaagatagctatagccaatttccttgtcaaaatgcttctactccaaatttttatgcagtgtctaaggagctcatgcctagatctatctggcaat

SEQ ID NO: 228531 - DNA, 201 bp, Homo sapiens
tactctgttggatcggagctaattattttcatggtttcatttagatatttggctttatttttgaaatcataataattttatatatatatatatatatatatttcatttttgtattaacaaaagtcctgtagggaaatgacaattttattctctttgggttgagaggtagatgtctcattgttcagtctgttcctatggaaa

SEQ ID NO: 228532 - DNA, 201 bp, Homo sapiens
ttactctgttggatcggagctaattattttcatggtttcatttagatatttggctttatttttgaaatcataataattttatatatatatatatatatatatttcatttttgtattaacaaaagtcctgtagggaaatgacaattttattctctttgggttgagaggtagatgtctcattgttcagtctgttcctatggaa

SEQ ID NO: 228533 - DNA, 201 bp, Homo sapiens
cggtacttggtcggactttcttacacttattttatggttgttgtttttatttttagcgtcaaaggggggaattttaaaggtatatccaagttggtggtggyggggggtaaggaggcaggttagtggaacttgagatgcatctgcagatttctctgtaggctcacattctgccctcgctgtgttaccttggaacagccactc

SEQ ID NO: 228534 - DNA, 201 bp, Homo sapiens
cagttggtttgtgtcagagattagactagaaccaagcatcttattttcaagtccagggttattttcattccaccagcagtcagctagcaggaacaccagawgtgtagctctttagataatggtttctcctctaatttgctctttcaaggccacagaccaggaccaattgttataaattatcttatttattattggtaaggt

SEQ ID NO: 228535 - DNA, 201 bp, Homo sapiens
cctcatcacccccatgcccccacccccacgctctcccaactgatagtctgatcattcagcttccaccacagtgcctgaccaccagtagacactgaaaaagwacttgtggcattgcattcataagcaccctgttcccacatctcttcattgaatctgtttactcttttaatgcagaagtgcagctttgaaatataagatgta

SEQ ID NO: 228536 - DNA, 201 bp, Homo sapiens
tggttccacctatatattaaatccttgatttaaaagcagcctgtttctgtcagtggggccttctgtccatctctagaaaggattggtcctatcccaggagsctcagggttagagtgaggcagttgtcatccagctggtgagtaatcctggggcaatgaccgtggggatgtggcagtgcttctttctaaagctgacaacttc

SEQ ID NO: 228537 - DNA, 201 bp, Homo sapiens
atgtttggaatttcttcaatcctctgtaaaagttggcgtattatggggtcggggaggagaagtatcttttcctcaccctcaggttcttggttgactccccwgtaacaaaagacagattaacgagagaaaagcacacagatttatttaacgtaagttttatgtgacacaggattcttcataatggaatgaagacccccaaaa

SEQ ID NO: 228538 - DNA, 201 bp, Homo sapiens
ttttctgaatctgctgttcttaattgccttcaactcaaataacccttatgccaaagtggcatattttggggtagcatattctgatcccctttcagaccctwtcctttggaaagttgtttttctgactcatagaaaatgcatacagttatatttgagtatttatatttatatttaaacccttatatcaacggtccaggaaca

SEQ ID NO: 228539 - DNA, 201 bp, Homo sapiens
ttagaaaccatcatagataatgttgaagtatcagtactccctcacaaggtttaatgcatgaatattttagttagaccaggctggaggagcatacaatctayagtcatttaatcactgaagtctgtggaatgtggtaagaacaagatttttattttctgagaagtcttcttcccacatcttagttttgaaaaaacaaagcaa

SEQ ID NO: 228540 - DNA, 201 bp, Homo sapiens
caaaacacaaaactcactgctgcctttggactccacattaactgaaggacggtacctgcttggttttgtcagtagatgtttaagctgtgcccagaagcacragtttacctatgcgtttggagccctgaggacaggtggagggaagggttggaacctgcttagagtaagattgtttcagtcctggagcactagcgattccag

SEQ ID NO: 228541 - DNA, 201 bp, Homo sapiens
ttgtcagtagatgtttaagctgtgcccagaagcacgagtttacctatgcgtttggagccctgaggacaggtggagggaagggttggaacctgcttagagtaagattgtttcagtcctggagcactagcgattccagttcaatctcttctaggaatgatcctggcaagaaatccaagggagagcaggagaggcaagagggag

SEQ ID NO: 228542 - DNA, 201 bp, Homo sapiens
tactttacatacagttttgttttctgttttcactcgtcaatatattgtatgcattttcccatggcattaatgtctacagagtattccactgttagaacatkacattattttttaatctatcccacttggtcaacatataggttttcctcaccattttttctgatgtatttgcacgtgtgcataatcacattcatgattttt

SEQ ID NO: 228543 - DNA, 201 bp, Homo sapiens
cttactctgttggatcggagctaattattttcatggtttcatttagatatttggctttatttttgaaatcataataattttatatatatatatatatatatatttcatttttgtattaacaaaagtcctgtagggaaatgacaattttattctctttgggttgagaggtagatgtctcattgttcagtctgttcctatgga

SEQ ID NO: 228544 - DNA, 201 bp, Homo sapiens
acttactctgttggatcggagctaattattttcatggtttcatttagatatttggctttatttttgaaatcataataattttatatatatatatatatatatatttcatttttgtattaacaaaagtcctgtagggaaatgacaattttattctctttgggttgagaggtagatgtctcattgttcagtctgttcctatgg

SEQ ID NO: 228545 - DNA, 201 bp, Homo sapiens
cttatataaagatattgtacaatacacattgttctgtaccttgctttatttggtttgactgttatataatgttccattatgtgaatattctatttatttasctgctctcctgtccagtcttatttgaagcctgtgtcttttcagccaaactgggcccaagttaaccttaatattctggccctgcacctaggcctaatagga

SEQ ID NO: 228546 - DNA, 201 bp, Homo sapiens
cacttactctgttggatcggagctaattattttcatggtttcatttagatatttggctttatttttgaaatcataataattttatatatatatatatatawatatttcatttttgtattaacaaaagtcctgtagggaaatgacaattttattctctttgggttgagaggtagatgtctcattgttcagtctgttcctatg

SEQ ID NO: 228547 - DNA, 201 bp, Homo sapiens
tgtgcacatgggtgaatactaataatctctgctagaaaaactgaaaacagcagcaaaacaatattaataccattaacatctaacatttattaagctcttctgtgcacgcatagtaatttacctgatatagctgagactcaaaaaggttgaataccttgcctaagtttatgaagaggtctatgaggagcccagagatgaaca

SEQ ID NO: 228548 - DNA, 201 bp, Homo sapiens
atggtatgaatcatgggtctgtctctgctatggtttggctgtgtccccacccaaatctcatcttgaattgtacctaccataatccccacatgtcatgggakggacccagtgggtaggaggtaattgaatcatgggggcaggtttttcccatgctgttctcgtgattaagtctcatgagatctgatggttttataaagggca

SEQ ID NO: 228549 - DNA, 201 bp, Homo sapiens
gttgtatccttttgctttcatccactttggttctgcattgcaggtttctttatgaagctcctggtagtgtgatctctcactctctctctctctctctctcyccctctccctctctccctgccttgttcccctcctccaaaaacaaaaacagacaaaaaacccaagttggttggcatgctaccctacaagttttttcatcat

SEQ ID NO: 228550 - DNA, 201 bp, Homo sapiens
ggatgtggagaaataggaacacttttacactgttggtgggaatgtaaactagttcaaccattgtggaagtcagtgtggcaattcctcagggatctagagtyagaaataccatttgacccagccatcccattactgggtatatactcaaaggattataaatcatgctgctataaagacacatgcacatgtatgtttattgcg

SEQ ID NO: 228551 - DNA, 201 bp, Homo sapiens
tgatgttgttgttgttgtttgtttttgagatgagtttcactcttgttgcccaggctggagtgcaatggcacgatctcagctcactgcaacctccacctccygggtacaagtgattctcctgcctcagcctcccaagtagctgggattacaggcatgtgccaccacacccagctaattttgtgtgttgagtagagacaggat

SEQ ID NO: 228552 - DNA, 201 bp, Homo sapiens
agcaaatccggaaaaagaatctgccctaccctgaagtgagctattgtcagttcctgttcacagcttggagatttcccagtttggggcctgcatttgctttygtgtcactgaaccttactctactacaagttaggttgcctatctagccctgtcaaaaaaatgactgaacacatccactgagtcacacacaaaaggatagta

SEQ ID NO: 228553 - DNA, 201 bp, Homo sapiens
tccttgtatttccttcttggctaatgctcactacaagtctaagggtctaaaccttggactgaggttcctaatccagtatttgcttctctggcttacagaarccaccatctccatatttgctaagaagcagttccctgaagatgattttccctggaaaattccacagaatattggtacatctagtctttatatttggtagaa

SEQ ID NO: 228554 - DNA, 201 bp, Homo sapiens
atccaagggagagcaggagaggcaagagggaggtaaaacaaatgcagagagtgtgggagaggtagaacaacaaaaaatggtggggtggagagagaggggartattttgttttacagccacttgtgtaagtaaaattagtctctgcctgtcagttactacatcatcagaaagtggcaggtctgattttcactggatgtagtc

SEQ ID NO: 228555 - DNA, 201 bp, Homo sapiens
ttccacagaatattggtacatctagtctttatatttggtagaaagattcagcaattttacttatctgaaaataaaattgctttctgccatttttatgtgaraggaaagtatttaatatttatctcagtcttggagacagtttcagatcctggagatgcacaaattttcccatcaaactctattgactcttaatctttttaa

SEQ ID NO: 228556 - DNA, 201 bp, Homo sapiens
ggagagcaggagaggcaagagggaggtaaaacaaatgcagagagtgtgggagaggtagaacaacaaaaaatggtggggtggagagagaggggaatattttrttttacagccacttgtgtaagtaaaattagtctctgcctgtcagttactacatcatcagaaagtggcaggtctgattttcactggatgtagtctaccact

SEQ ID NO: 228557 - DNA, 201 bp, Homo sapiens
ttaaaaaagaggtagacttagatttgggtagggaaagagagaaaactattagtatttaagggtacctacatcatgtggcagacaacgagacatgctttgtrtacttcattatctactattttcaaatgagatgtctgaggattagaaggttcagtgaattctggaagatcaggaagagagtggcagagctgagactcttta

SEQ ID NO: 228558 - DNA, 201 bp, Homo sapiens
tgtagtctaccactttgttggcctgcctggaagcatagactatgtagcacaccatatgccactttgggacgccttacatagatgagtagtcagagtctagygcagctgaaattgaggtaccaaggcctgtgccaccaacctttcccaatttaattgatctggacgagacatgctctagtgattctaacttgtagccagggc

SEQ ID NO: 228559 - DNA, 201 bp, Homo sapiens
atagcaaaaacatcctatatatctggatatgaaaagacatactatgaaataaccctcaggttaaataggaaataataacaagaatagcaaagttttagagyggagtgataataaaagcacagtaggtgagagatagagctaatggaatactttcacggcaatatatagcttttgttacccaagagaaaaacactaagtctg

SEQ ID NO: 228560 - DNA, 201 bp, Homo sapiens
actggttagaaagcaatcccaatgggttaaaattatgtaaagaagggggcactgtaattggctacataaatttccattagaaggcaaggtaccttaaattyccatcttaataatcagatataacatgttaccttaaagatcccagattttttccatcaagtttagagagactcaattgtatgggctgaaatatatctattt

SEQ ID NO: 228561 - DNA, 201 bp, Homo sapiens
cataatacaaaaaaaaagaagtttaaactcagccctcttaaggtcaggaacaagaaaaggatccctgtgttacttctgcttctcaatacattaccacatasctgaccaatgcagtacgacaaagaaacatgaaagtaggaaaattgccatgaaagatatgattatcattatttctaagtgaaatcatatatataaaaacaa

SEQ ID NO: 228562 - DNA, 201 bp, Homo sapiens
atatctatttgcccataatacctcaaaatttacagcagattgaaggagttctagcttgggccatatgcctaccacttggaattgtttctatagccagttgraggggtactgtgagtggccaggtgtggagcaaatgcccaccctgggagaggagagattcacccagaggaagtgggccagggctgccacattcttagcatc

SEQ ID NO: 228563 - DNA, 201 bp, Homo sapiens
agaagtttaaactcagccctcttaaggtcaggaacaagaaaaggatccctgtgttacttctgcttctcaatacattaccacatacctgaccaatgcagtaygacaaagaaacatgaaagtaggaaaattgccatgaaagatatgattatcattatttctaagtgaaatcatatatataaaaacaaagagaagtccgggcgc

SEQ ID NO: 228564 - DNA, 201 bp, Homo sapiens
agagggatgtgacactagggatacagcaaaacaggtagccactgtagtttgaaatcccatttgctgggttctgccagcctggtggataaaaacaaggccargaagcttcagaaaaatctacagctgaggccctctcttggctcctctgagcagggataaagcttcctctaaactaaggcttcctctagcctcttgaacttc

SEQ ID NO: 228565 - DNA, 201 bp, Homo sapiens
gtaactaattataaactatgacaataataagataccatttataatagtgacataaactaaaagctatctaggaataaatctaagatagaatgcataaaacrtataagggaaatttaaaactctattacaagagttttattatggtattaaagagcataaatgcagcattcataaatggcttcgttgaatattttgaagatg

SEQ ID NO: 228566 - DNA, 201 bp, Homo sapiens
ataaataagagcccattatctgaccctgaggactcacttctggctttgcctctcatttgctgtgtcatcttgagtgaagtgctcaacctctctgagcttcrctttcctgtaaaatggagatgataatactacctagctcttagagctgttgtaagaatcaagtgaaatcattgatttcaattatgttctacacagtgcctg

SEQ ID NO: 228567 - DNA, 201 bp, Homo sapiens
actctattacaagagttttattatggtattaaagagcataaatgcagcattcataaatggcttcgttgaatattttgaagatgtcacattcccctcacccrtcttacaatttaaattcagtctaatcaacatctaagaatttttttttgaaaggggcagagtggaggctaaaatttatatgggataataaatacagaaaga

SEQ ID NO: 228568 - DNA, 201 bp, Homo sapiens
taattctatttcagggggattccattggaaatgggccctaggtagatcatgtaagggcatgggtgcttcctgtcttcattgtgggttctctcctgaagagsctcttctcaagtcatgttgctgctactctgagtgggccaggaagcatatgcagcagtcccagggtcagcagggagcagagagagggaggacagtctgctg

SEQ ID NO: 228569 - DNA, 201 bp, Homo sapiens
ctgtcttcattgtgggttctctcctgaagagcctcttctcaagtcatgttgctgctactctgagtgggccaggaagcatatgcagcagtcccagggtcagsagggagcagagagagggaggacagtctgctgtcatcactctgaagctgtcagctttcccttcctgctttcacagtgcctgagatagctgactcaacatga

SEQ ID NO: 228570 - DNA, 201 bp, Homo sapiens
cccttcctgctttcacagtgcctgagatagctgactcaacatgagatggctacatcatgtcaactgggagacccaggttttagttctggctctcccactgycttatgcaagtctcttttctctgggcctccctttccacatctgtaaagtgagggcttggatctgatcattctgaagtcctattcctctccaacattctgt

SEQ ID NO: 228571 - DNA, 201 bp, Homo sapiens
aggaaggctagtggatgtttattccagcctcccaaacaatataaacatcccttttccagtatttctggaaaatgatttatctggtctctacatatatttamcagtagagagagccctactgcataaattagctgttattacacctgttgatatattgttctaaggtctacacaagcttcccagtaaatctgaatccattaa

SEQ ID NO: 228572 - DNA, 201 bp, Homo sapiens
ctgttttcagcattctacccatttcagtgtctggctcataccacatgcttactaaacatttcttgactaattggctggaggatgaaaaaagtcatgtaagrgtatatgggaacagtaattttaacaattatttgcatttgcatttgtgtatgtatggacactaaactaatagtggtgaacttttttctctttctctctctc

SEQ ID NO: 228573 - DNA, 201 bp, Homo sapiens
ggggttagactagccatggcaccttccagtcctgttggggtggcacaatttactgcttacccattgcctgggcaccaacccagccagggtcagggagccawgctccctgagatttcatggaatttgatttgtctgtgactctatgaattttcagatgctaattattggctgattggtattctgctcctcagatgtcaccta

SEQ ID NO: 228574 - DNA, 201 bp, Homo sapiens
tctttttttctgtgtatctgctctactagtgagtttgttgttgatgttgttgttgttgtttgtttttgagatgagtttcactcttgttgcccaggctggartgcaatggcacgatctcagctcactgcaacctccacctcctgggtacaagtgattctcctgcctcagcctcccaagtagctgggattacaggcatgtgcc

SEQ ID NO: 228575 - DNA, 201 bp, Homo sapiens
ttatttatcattgtggtttagtgattttctgtagtgataagttttgcttcttttctctttttttctgtgtatctgctctactagtgagtttgttgttgatgttgttgttgttgtttgtttttgagatgagtttcactcttgttgcccaggctggagtgcaatggcacgatctcagctcactgcaacctccacctcctgggt

SEQ ID NO: 228576 - DNA, 201 bp, Homo sapiens
attattattatactttaagttttagggtacatgtgcacaacgtgcaggttagtcacatatttatacatctgccatgctggtgtgctgcactcattaactcrtcatttagcattaggcatatctcctaatgctatccctcccccctccccctaccccacaacagtccccagagtgtgatattccccttcctgtgtccatgtg

SEQ ID NO: 228577 - DNA, 201 bp, Homo sapiens
attatttatcattgtggtttagtgattttctgtagtgataagttttgcttcttttctctttttttctgtgtatctgctctactagtgagtttgttgttgatgttgttgttgttgtttgtttttgagatgagtttcactcttgttgcccaggctggagtgcaatggcacgatctcagctcactgcaacctccacctcctggg

SEQ ID NO: 228578 - DNA, 201 bp, Homo sapiens
tgacatattaattatggaaaagccaagaagattgcaggcaaaaataatagtttttcaagttcttctcatgaatattggatcactttcttattagcataggygccttgccaagatttttcaatgcttgtaatttggatggcaagcatcctggggagggatcatatttgcttgtgtgctctgcttggcaattggcctattttt

SEQ ID NO: 228579 - DNA, 201 bp, Homo sapiens
gcttttaccactcttgatctcttagccttctgatgataatgacatattaattatggaaaagccaagaagattgcaggcaaaaataatagtttttcaagttsttctcatgaatattggatcactttcttattagcataggcgccttgccaagatttttcaatgcttgtaatttggatggcaagcatcctggggagggatcat

SEQ ID NO: 228580 - DNA, 201 bp, Homo sapiens
ctcgtatctgtgcattggtgctgtgcacatgacctcagtctcttcacaagtgtttatcatgtagtattctggattggccttttttttttttttttttttttacatcatggaagctaattttttggaaagtttcaaagtagaagctgccagccttgttaaggactacctggaagtagaacactgtgacatctgtgcactcaa

SEQ ID NO: 228581 - DNA, 201 bp, Homo sapiens
actcgtatctgtgcattggtgctgtgcacatgacctcagtctcttcacaagtgtttatcatgtagtattctggattggccttttttttttttttttttttttacatcatggaagctaattttttggaaagtttcaaagtagaagctgccagccttgttaaggactacctggaagtagaacactgtgacatctgtgcactca

SEQ ID NO: 228582 - DNA, 201 bp, Homo sapiens
cactcgtatctgtgcattggtgctgtgcacatgacctcagtctcttcacaagtgtttatcatgtagtattctggattggccttttttttttttttttttttttacatcatggaagctaattttttggaaagtttcaaagtagaagctgccagccttgttaaggactacctggaagtagaacactgtgacatctgtgcactc

SEQ ID NO: 228583 - DNA, 201 bp, Homo sapiens
tcactcgtatctgtgcattggtgctgtgcacatgacctcagtctcttcacaagtgtttatcatgtagtattctggattggccttttttttttttttttttttttacatcatggaagctaattttttggaaagtttcaaagtagaagctgccagccttgttaaggactacctggaagtagaacactgtgacatctgtgcact

SEQ ID NO: 228584 - DNA, 201 bp, Homo sapiens
aaagaaacttctggtacatgacttcttctggcaatgttagatccatgtgctcagacagtgtcatcaggtatgggtctctgtgtcttcactgtctttgcctyagtattggctctcacatcaagccagctcttttttaggaaaactcgtagctgtttcaggttcatagtctaccagtttggcaactcagttgaaagaaagtgg

SEQ ID NO: 228585 - DNA, 201 bp, Homo sapiens
tgtttttcttctgctttcacaccagcaacaacaatcagcaaagactactactgtgaccaaatgtgtggggtttctttccccccaacacacaaagcagcggrcaccagctggatgtcctttgattcatttcagaagaatttggatgttacgtacctggagatagcctcagattccacaggttgagggctcaatgccatgaga

SEQ ID NO: 228586 - DNA, 201 bp, Homo sapiens
gtgtataagtgtgcttggtccttcttgtgatcaaccccatcctgaagctacctagactcttagaggctgctagacaccagtcaatcattagcatacaaaamgacatcactttggagtttctaaggattttaggagttgcgtgccaggaaatggggttgaaaaccaaatgcatatttcacagtatcacaaatagccaactat

SEQ ID NO: 228587 - DNA, 201 bp, Homo sapiens
tttatttccctctgaccactgagttgtagtctttcctcctatagacttcaataggagctttattcttttgcagtgggaataacaagtattggtgaaatgcytgggaagttatctttatgttgttaaaagtttcactcctgattgtgtgcatatgaattttgtacggactcttcaggatgtttttctctttcctccttcact

SEQ ID NO: 228588 - DNA, 201 bp, Homo sapiens
ttgaaatcttttaaaagacctgaatttcttgaagtaacattttattttgctataagtttgtagtgggctttttcctttggggttttttaaagcaaaatgtstgtaaattcaggtgttaaaagaatatggtttaaatgccatctctctctaggtgccagctttaactgacttttagaaaagaaataaagggacctgggatga

SEQ ID NO: 228589 - DNA, 201 bp, Homo sapiens
ctgcttctcgctaaataaaacagatgtggcccttgatctcatggagctggtagtctgctgaagtgtgtcaatcctcaagtttacccacaatacctcatctkgatgtttaaggtttgaactcacggaaggaatgttgtctctaggatagacaactggaaaatgtaattgataaccctgttcaactctagagtccttctttcc

SEQ ID NO: 228590 - DNA, 201 bp, Homo sapiens
gctgcccctcaccaacacttatttcttatgactttgctcactgactttttcatagctttcagagaaagaaaaagaactgtcaaatcagaggccaaagataygcttttgaagcaggatcgtttgcttcattctcaaaacagccacttcagtccctccttgttcccacctgaagcaaacgcttctgttccttgccaacactgt

SEQ ID NO: 228591 - DNA, 201 bp, Homo sapiens
cttgatcttgacctgtcttccatactatgttttaccttctagccccagaccgtgctgtgcatgggatggggtgggctggcctgacctgattatgcattacrggagaaaaattcaactgtcattttgattaggacttttagcaggtacatttctcagaattgcataaaggctgtagagtcacttttgcaaccagaaatgtgt

SEQ ID NO: 228592 - DNA, 201 bp, Homo sapiens
ggttaaccttggtattttgtttgtttgtttgtttgagatggagtctcactctgtcgccaggctggagtgcagtggcacaatcttggctcactgcaacctcygtctcctgggttcaagtgatcctcctgcctcagcctcctgagtagctgggagtacaggtgtgcaccaccatgcgcagctaattttttgtattttcagtag

SEQ ID NO: 228593 - DNA, 201 bp, Homo sapiens
tccttctccctggaacctgcctccttgcccttgcttcttttgaggcaggtgagactggtgccattaaccaggacctgaagtgtaaactcatgggatctctyccttgtcatcccatagcacgttgtatctatcagtgctgtgccttttatattataggtttatgtgtttgtcctccctgctcaactgtcttggaggcaggaa

SEQ ID NO: 228594 - DNA, 201 bp, Homo sapiens
aggaaagcctctattggacctcctgagaatctgtaccatattttattctgtgggggaattaaagagatttccaagagactttctaagctctgacttaaaarctatcttcaatttaagatgccactcagctatctttggtctgggattgtggctttcttaacagtaaatgttaactactaatgttttcaagagcattataat

SEQ ID NO: 228595 - DNA, 201 bp, Homo sapiens
caatggtaaattacacctggccatttattgtatgtatgttcaggcttgttacacatcagaaagagacagacatgatccttgcctttatggatcttacaatktaaaggagaagagagtcaatcaatcacaagtgtgatgagtattataaaaaaggaagctgagtgctatggcaagtatatcacattgggaaggtaacctggt

SEQ ID NO: 228596 - DNA, 201 bp, Homo sapiens
acccaaaacacactccgagccacagcctggtgctccagcctgtcgtttctgtttcctctcaagtttccgcctcaaaagatgattagctgtgagacagccasaggtcagcttccttgttgatcttctatcctccgaaattatgaaattgacattaattatgggtcacaaatcagggtaggatgccaacctctgtgtgcaggc

SEQ ID NO: 228597 - DNA, 201 bp, Homo sapiens
gtgctcaaagacaattaccaactaaacatttcattaatgaaataatgattaattgtaattactaattaaaattcaggattatgctgttggttttgagcagyaacaggagtaatgacattaccatttttaatggaattccaggaatgaaaactataacaactcacagaaaagatatggcttgcaagcgtgattaggacttac

SEQ ID NO: 228598 - DNA, 201 bp, Homo sapiens
gtccaataatgttcacctgaaaggctttagccttttggaactaatgtatgttaacgtttatttgtatctaacaatagccttttttgatgtggttaactatrcacgaggttaagaatgaatgtcatcctttcccatcttttgtttcagatgccagataaaccaaatcaaacaaaagcaacccccatccccacaataaaaagc

SEQ ID NO: 228599 - DNA, 201 bp, Homo sapiens
ataagtcatatttcattcatttgtctcacagaattttatcaatgtaatatgcttgaaatattttatgcatcatcatatagtctcagaacattaaatttttwaaaaaaattttgaatttataatcctctacatttcaaaaattacatctggattgagcttttatcactattattagcacaagattgatcaaaacaaaaaata

SEQ ID NO: 228600 - DNA, 201 bp, Homo sapiens
tatttaaaattgtgttttcttcaccatgatttttttggtttctaaaaagattgcactgaagtattattatcttgattactgaggatttttcttttttttttcttttcttttgaaatgggcatctcactatgtagctcagactggagtacagtgactattcacaggtataatcatagtgcactatagcctcaaactcctagg

SEQ ID NO: 228601 - DNA, 201 bp, Homo sapiens
agagcacggtcttcctttctgctaaagtaaattatatgtcttatttgctgcttgtatcacagctttcttaaaaaaagacactacatttcatattgaaatayagcatacctacaaaaaaatacacaaattataagcacacagctcaatgaagttccacaaaatgatataactatacttagctccttattcttttgtgaggct

SEQ ID NO: 228602 - DNA, 201 bp, Homo sapiens
tgtgtcccaagaacctttcactcatgggttctattgtccatcgatgatttgtgcctaatgatgtttttctctttgtattattatacatttctgggctgacrttgtttcttaccaaaagaggtctccacctctgtttccatagtaggatggatgaccatcagtgtaatcagaacaatttattcatagagcacggtcttcctt

SEQ ID NO: 228603 - DNA, 201 bp, Homo sapiens
tattaacattttgttgtaattgttcattggctttttttctctcatttattatactttaaaaaatcatttgcatttcagtcatagatatcatattaccccctgacatttcaccttatacctcctaagatgaatatgtaatcataatactgttatcactctccacatgaaatttaacattgatatgtaatctaatatattcaa

SEQ ID NO: 228604 - DNA, 201 bp, Homo sapiens
gtagtagtatacatatttttcctccatgcagtataattgagttgggagatcctgacagaggtacctgaaatatgtgtgtgtacgtgtgtgtgtgtgtgtgkatgtgtgtgtgtgtgtaaggcagaggcggaaacacctttaaacccatgagatgggagatttaatttttttatagcaacattcacataattattgtcagca

SEQ ID NO: 228605 - DNA, 201 bp, Homo sapiens
gtgttagttcctacacaatgaatagtgaagtttacaagttgccatttggcaatgcctacatttctgtttgtttgttcccccaccctctctacaaggtatartaaaatttataaggttcataaaaacccttcattattaatacaaggttatattgctggtggggattccacaaatagcttatgaacatatctaaagggagaa

SEQ ID NO: 228606 - DNA, 201 bp, Homo sapiens
ggtgggctccaccgagttcgagcttccaggccgctttgtttacctactcaagcctcggcaatggcaggggcccctccccaagcctcgctgccgccttacaytttgatctcaggctgctttcctagcaatgagggaggctccatgggcgtaggaccctcctagccaggtgcaggatataatctcctgatgtgccgtttgcta

SEQ ID NO: 228607 - DNA, 201 bp, Homo sapiens
gggaggtggaggttcacgccactgcactccagcctgggcaacattgagcactgagtgagcgagactctgtctgcaatcccggcacctcgggaggccgaggygggcagatcactggaggtcaggagctggagaccagcccggccaacacggcgaaaccccgtctccaccaaaaaatacaaaaaccagtcaggcttagcagcg

SEQ ID NO: 228608 - DNA, 201 bp, Homo sapiens
ttctcaaataggattccatgggacatttttataaaagatctaatgaaaatgtttacagttggccctccatatccatgggttcaatcaatggaggattggaratatttggggggtggggggaattgtgtttgtactgaacaagtgcaggcttttctttccttgtcattattccctaaacaataaagtataactatttacgta

SEQ ID NO: 228609 - DNA, 201 bp, Homo sapiens
aatttggacttcagctgccacactaaagcagcagtccttgagcctgttcagcccatactgatttgatttctaatgacactcctaaaaaggcaaggttctgmagttccattttatatcagggacttctttggcagaaggcaaaccgcagggccaagctcatatggcatgtgcagaggtcagccttcctgtaacaggagggga

SEQ ID NO: 228610 - DNA, 201 bp, Homo sapiens
gtttccaggaactcaagagctcagtttcctcatatgctaaagtgagggcagaggagcctggcttgaaatgagaatatctgcctttcccgaaaggaaatttrtctgccattggaagccagataaaatcactgttcatctattttttccaatttccaggtacttcagattggctccccttcccagaacctctttaaagcctga

SEQ ID NO: 228611 - DNA, 201 bp, Homo sapiens
agttttaaactgtcatggttaacaatcactgaactctgttcgttatattctgggcatatttttgacctgctttccatgcaagtcatcagattttaaggaasaggaaaagactggtcatggtgttgcaggcatcgcacttgctaaggaatataattagaagtaatgaatggaataataatacatcattatttataagaagtg

SEQ ID NO: 228612 - DNA, 201 bp, Homo sapiens
gggtaactgtggcagtggagagtatatttatatacatataactaatatcttacattaagataattttaaataattaaaattatattttatgactaacaatrcattattggagtcaatattttgtttcacacaggcacagtggtgcacacctgtaatcccagagttttgggaggctgaagcagggggatcacttgagaccag

SEQ ID NO: 228613 - DNA, 201 bp, Homo sapiens
caaggttatagtaagctgtgattgcacctctgcactctagcctgggctgcagagcaagaacctttctgaaacaaaaattgttctatcctcattggcctatsagtggtttgaatggaaaagctgaggcacagaccaatggtggctctagttcatgggagtctgggctttacccaggacttttgattctcattccattgttca

SEQ ID NO: 228614 - DNA, 201 bp, Homo sapiens
tttgctctgagataaaatgggtccaggaggagctaaattcatctggctctccaatttttctcctttctgataggttttgaaatgcctgaagttatcaagarcttctttttatctttaagattaattttcagttcaagagatttacgtgctaatactttaaaagttagccatgatacccttccattcaccaaagatgattgc

SEQ ID NO: 228615 - DNA, 201 bp, Homo sapiens
atgcagaggcctagaataccagttagtattttctattctgtttagggaccaaatgactctagaagccatctctcagggagtcatatctgcagtaatgtaaytgaagttcaggagtgcagcagatgttgagtgaaacttttcatatttccgcggaataaacagctaaggcctaagcaggaatgctgacatgtggggacagat

SEQ ID NO: 228616 - DNA, 201 bp, Homo sapiens
aaagtcacatctcttgggggatgctttccacaaaatgacactggcatcttgttctttggcttgatgctacgaagctgtaggacctgcaggctgacacaggyactgtcatgatctgggagtgcagggaggtacaattgcttttggagagcttcccatgtgctctgtggagtttggaattgtacatgagcacacaagagtgct

SEQ ID NO: 228617 - DNA, 201 bp, Homo sapiens
agttgagattcttcaattattgtttacacaaagagatgacataaatcttaaaaaaaaggggttgtcagtcaataccacattaggtagggtgtgatcccttyaattcttagagtcagaatcttgtgtatattagatggttgataaatatttatgggataaatttaattttggttcaaaacaggatggttaggtagaggaata

SEQ ID NO: 228618 - DNA, 201 bp, Homo sapiens
caaactacaaaattcaagaagtagtaaaaggaaagtaagatggaccaaaagtgagattagtgcatcaaatagatataaaatatttatatacttgctagagrtagtgatatggtttggctgtgtgcccacccaaatctcatattgaattatagctcccataattcccacgtgttatgggagggagcccgtgggagataattg

SEQ ID NO: 228619 - DNA, 201 bp, Homo sapiens
aaacttcaagaattaggttttttgttttggcctaaccttttccaagttgatagattttacatatctcactgtttacattttattatctaattgctagtggwgttaacttttaaacatatatatacattacctttatcaataagttacctatgaaggtgctttgcttctttttctattgggatatttttaaaaacccaatat

SEQ ID NO: 228620 - DNA, 201 bp, Homo sapiens
aaaatccatctggagaagaaatatgaactaaagcaaacaggcaataagacagcagcattatgcactattgaaaaagaatcaaaccctctgcaaatcagcargaagggatgctgttgaggtgctagtcagaagacagtaggaggccccagagggagactgcaacacttcaaacaacaaacccaaccacacaaaatgtttgct

SEQ ID NO: 228621 - DNA, 201 bp, Homo sapiens
atggtagttgccagaagctggggggagggagaatggggagttgttatttaatgggtatagaatttcagttttacaagacgaaaaagagttctgcacatggwtggtggcaattgtagcccacaatgtaaatgtacttattgtcactggactgtacacctaaaaatagccaagatagtaaattttagattatgtgtattctac

SEQ ID NO: 228622 - DNA, 201 bp, Homo sapiens
tctttaaaactcagaggaagaaaaggaaagagaaaggaactccacatggaaggaagaacacttataattttttctaccaagcacatgtactataaactccrtgactacaacaacagctgagaagcacaagggtgacaaatcttgaaacatcctctgtatctcctaaaagtcattttgaaactttcatacgttttcagatgg

SEQ ID NO: 228623 - DNA, 201 bp, Homo sapiens
tgattatcagtaggtctgcaataataccctaagtggaaaatatggactaatgggctaatattggatcagttgagttaaatgtatttacagtttgatacaartataagatcaccccagatccaataaattcaatcagttgtttaccatttactttttttttttttggtaatcaagtgtaggaatgctttgtcatcaagtata

SEQ ID NO: 228624 - DNA, 201 bp, Homo sapiens
attgtggaaggttgtttggcaatttctcaacttaatacagaactactattcagcccagcaatcccagtgctgagtatatacacaaaggaaaataaatcatyctaccataaagacacatacatagacatattcattgcagtagttttcataatagcaaaggcatataatcaacctaaaagcccatccaaggtagactggaca

SEQ ID NO: 228625 - DNA, 201 bp, Homo sapiens
atggcaattgtttttcttctccagtgtaaaaataatgaaatcctcttaactcacagcagtgacaattcttatattttatattatgctttactttagcaaaragatttgcctctgttattgcatgtgatctttagaacatgcataccagagagaagaagagaaggatggggagccagggaggagtattcatttcctcatctc

SEQ ID NO: 228626 - DNA, 201 bp, Homo sapiens
gcaaattctgtggctggagagaggtgagccaggagaatgctgggctggtggggtgatgtaactggggacatctcaatgaagaggctttccatgagatggtkatcattgatcccagcagtggggaggcctgtgtgggatctcagatgccctaaagttctattgggaacttaggtatggtgtgagcaagaaagagtcagctca

SEQ ID NO: 228627 - DNA, 201 bp, Homo sapiens
aactacagaagcaggaacatcactctctgacctttttccatttgtctaccctcaagtgtgccataaaagaattctctgacctaacacccatgcaagtaggkcataagaccttcattccagaggagttctgccctctactcacatgccaagaagaatctgaacacacaggccttgctaagttttccccaatttattaccatc

SEQ ID NO: 228628 - DNA, 201 bp, Homo sapiens
tgctccccacctcccagacggggtggcggccaggcagagacactcctcacctcccagacagggcggccgggcagaggcgctcctcacatcccagacggggyggccgggcagaggcgctccccacatcccagatgatgggcggccaggcagagacgctcctcacttcctacacggggtgaaggccaggaagaggtgctcctc

SEQ ID NO: 228629 - DNA, 201 bp, Homo sapiens
ttattggtatataagaatgcttgtgatttttgcacattgattttgtatcctgagactttgctgaagttgcctatcagcttaaggagattttgggctgagaygatggggttttctagatacacaatcatgtcatctgcgaacagggacaattggatttcctcttttcctaattgaatgccctttacttccttctcctgccta

SEQ ID NO: 228630 - DNA, 201 bp, Homo sapiens
actctgccttaccctgccagtgcagataaaatggaattctgtggcatttggaaggcggagcattctgtgtttgtaatggagatcatttgggctctgcaggrcacatttgaagtcactgatgccagttcaatccccagatgggcaaattaactttagtcctttccatgtccagaagctgcatgccccactcaactgtcaaga

SEQ ID NO: 228631 - DNA, 201 bp, Homo sapiens
agggctctgttctgttccattggtcaatatctctgttttggtaccagtaccatgctgttttgattactgtagccttgtgtagtatagtttgaagtcaggtrgcatgatgcctccagctttgttcttttggcttaggattgacttggcaatgcaggctcttttttggttccatgtgaactttaaggtagttttttccaattc

SEQ ID NO: 228632 - DNA, 201 bp, Homo sapiens
tgatgatcagcattttttcatgtgtcttttggcttcataaatgtcttcctttgagaagtgtctgttcatatccttcacccactttttgatggggttgtttrttttttcttgtaaatctgtttgattctttgtagattctggatattagtcctttgtcagatgagtagattgcaaaaattttctcccattctgtaggttgcc

SEQ ID NO: 228633 - DNA, 201 bp, Homo sapiens
tgaacctaggaggtggaggttgcagtgagcggagacctcaccattgcactccagcctgggtgacagggtgagactccatctcaaaaaaaaaaaaaaaagaraagaaaagaaaaaagaaaaaaaaaaagcagtagaccacttctgcacctgagagaggcagacattttgtgagctcacatatttttctcatcagactctgaa

SEQ ID NO: 228634 - DNA, 201 bp, Homo sapiens
gcttgaacctaggaggtggaggttgcagtgagcggagacctcaccattgcactccagcctgggtgacagggtgagactccatctcaaaaaaaaaaaaaaaagaaaagaaaagaaaaaagaaaaaaaaaaagcagtagaccacttctgcacctgagagaggcagacattttgtgagctcacatatttttctcatcagactct

SEQ ID NO: 228635 - DNA, 201 bp, Homo sapiens
tgcttgaacctaggaggtggaggttgcagtgagcggagacctcaccattgcactccagcctgggtgacagggtgagactccatctcaaaaaaaaaaaaaaaagaaaagaaaagaaaaaagaaaaaaaaaaagcagtagaccacttctgcacctgagagaggcagacattttgtgagctcacatatttttctcatcagactc

SEQ ID NO: 228636 - DNA, 201 bp, Homo sapiens
cagctactcaggaggctgaggcaggagaattgcttgaacctaggaggtggaggttgcagtgagcggagacctcaccattgcactccagcctgggtgacagrgtgagactccatctcaaaaaaaaaaaaaaaagaaaagaaaagaaaaaagaaaaaaaaaaagcagtagaccacttctgcacctgagagaggcagacatttt

SEQ ID NO: 228637 - DNA, 201 bp, Homo sapiens
agcactttgggaggctaaggcaggcggatcacaaggtcaggagttgaagaccagcctgaacaatgtggtgaaaccccatctctactaaaaatacaaaaatkagctgggcatgatggcgtgcacctgtaatcccagctactcaggaggctgaggcaggagaattgcttgaacctaggaggtggaggttgcagtgagcggaga

SEQ ID NO: 228638 - DNA, 201 bp, Homo sapiens
gtgctcactgacacactgaaagttaaaagctgtcatttaaagtgattgtttggttccagtgatactgagaacagaacagagttgatggaggaaaaaaaaaagacaaactcaggcactgcttttggaaagcatagctcaattatcaggttgtcatttagattcttcaggacattaattggaataaaaccataaaaacctaaa

SEQ ID NO: 228639 - DNA, 201 bp, Homo sapiens
ctgcaccctttgtcactgagaatactgcagtcttggaattcatctcagggctgtgcttcagaaaaacccagaaaaacccacccagtgtgaactgacatagraattgaaccctcctttgcatccctggtgattactcacagttataaaagcatcttcatagacacatacacatgaatctcatttgctcatcaaagaaatgct

SEQ ID NO: 228640 - DNA, 201 bp, Homo sapiens
tcaagaattaggttttttgttttggcctaaccttttccaagttgatagattttacatatctcactgtttacattttattatctaattgctagtggagttamcttttaaacatatatatacattacctttatcaataagttacctatgaaggtgctttgcttctttttctattgggatatttttaaaaacccaatatgttag

SEQ ID NO: 228641 - DNA, 201 bp, Homo sapiens
aagcctgccctacccaaagttctaccatcccccataccattttttgacggagttcttataacatgaaattattttgactcccatgcatccatgaaaaatgwagctttctagaactcagcccagtagaaactgccacccacaagcattaaaggccaatgcatcaccctcacatcttgagtcaccctttcccacctcagttgt

SEQ ID NO: 228642 - DNA, 201 bp, Homo sapiens
gttctgggatacatgtgcagcatgtgtgggtttgttacataggtcaacatgtgccatggtggttgctgcatctaccaacccgtcacctggtgttaagcccygcatgcattagctatttaacctgatgctctccttctccccacctcctcgacaggccccagtgaaacgggagctcccttgaccacttcgctggcaggaact

SEQ ID NO: 228643 - DNA, 201 bp, Homo sapiens
actcagcccactgctggccactccccacgggagggagcgtgcaaggaaacgggtgtgggaaccggagtgaaggaacactggaactgctggctgcttctctscagcagaagcaggccctgtgcatgccccatggcagcgtccaagtgtgttacaatgctcttttagccttgccatccacagacagcttaagtgttagccagc

SEQ ID NO: 228644 - DNA, 201 bp, Homo sapiens
attagaagtcatgccacaaccaatataaaatgtatgtgcccatacatttatcagttatttatattactgtatattacatgcatacacactcagtaattgtwggagtgaagtattcaaagaaaactgagacatagcatctttgctatcataggccttcttggataaggtacatacacataaattatgtaaatgttatgataa

SEQ ID NO: 228645 - DNA, 201 bp, Homo sapiens
gttctaagatcttaggtcttaactgagagaagaacaaggtcctgggacacctctagagtgtgataactactatcactttttgtacttcctgcctcctctaytggatccaaagaaggcaatttttcacatcactgacaacctagacccccttgattgcttctttctctgaaatcttgttgcatgtctactcatcggtctctc

SEQ ID NO: 228646 - DNA, 201 bp, Homo sapiens
ttgaggtttttgccattacttttattgtgaaaactgcagttacttttgcaccaaccgaatatgtgccaagccctgtgttagccaccggatataatgttttyttccaaaaagaagccaatcaaggcttgtatagtacttaccaggggccaggcactgtgttagttctttatgatttcagccagctgacctaatgaatagagc

SEQ ID NO: 228647 - DNA, 201 bp, Homo sapiens
aggttactcagaaaactaaaagtagagctaacacacagtccagacatcccactgttggatatatacccaaaggaagtcagtatatcacagagcgatctgcrctcccgtgtttgttgcagcactgttcacaatagtcaagatttggaagcaacctaagtgtccatcggcagaggaatggatttaaaaaatgtggtacttaat

SEQ ID NO: 228648 - DNA, 201 bp, Homo sapiens
tcattctgcgaagtgaaataagtcaggcctagaaagacaaatattgtatgttctcacttatttgtaggatctaaaaatcgaaacaattcaactaatagagrtagtaagtagaaggagtattaccagaagctgggaaggatagttgacaggtggtgggcagggaggtgtgggtatggttaatgagtacaaaaaaatagaaaa

SEQ ID NO: 228649 - DNA, 201 bp, Homo sapiens
atggtggtgattttagtggcatccttaccctgctgctcttgaagctgtcatcatcatcatcatcaccaccatcaccatgatcgttactcttctcatacttytgccagatgcattctattgtttttttatgtaaagtgcactttctttgccgcaagaggcactaagaaatgacataatcatagttaggtctagagatggtaa

SEQ ID NO: 228650 - DNA, 201 bp, Homo sapiens
tggctgaggctggagaatcactcgaacccaggaggcagaggttgcagtgagccaagattgcaccactgcactccagtgtgggtgacagagcgagactctgtatcaaagcaaaacaaaaaacctgtagtaactccccatcatccttagaattaaattcaggctttttgctatgacctcaaggctcttcaagattcagccctc

SEQ ID NO: 228651 - DNA, 201 bp, Homo sapiens
gtggctgaggctggagaatcactcgaacccaggaggcagaggttgcagtgagccaagattgcaccactgcactccagtgtgggtgacagagcgagactctgtatcaaagcaaaacaaaaaacctgtagtaactccccatcatccttagaattaaattcaggctttttgctatgacctcaaggctcttcaagattcagccct

SEQ ID NO: 228652 - DNA, 201 bp, Homo sapiens
ctgagtttcaccttggaatattagggatagtgtgctacttagtaagaggcaagagtattattcacaggaaagttaagtaacattgatcttctaggaattckaatacaatttagacttggttataattcgtaaatatatgttctttgccctatcacttcagtacgtagaggctcttgtttttggtctatgcagcaactcttc

SEQ ID NO: 228653 - DNA, 201 bp, Homo sapiens
ctgtggggcctccaatctgttgacttacaggatttatgtacaatccgtcatcctcctgtatcctcactttcctccttgctcagctcagatgctatggttcwtctcttctttacatgcacactgaactcctttgctcatctttctctgtcattcttatctggcaaaactatgaccctcattcagctttccacctactttggg

SEQ ID NO: 228654 - DNA, 201 bp, Homo sapiens
aaatattagcctgctacacatgggtaagaaattagtgacagtaactgtgctacaaagttgaaaccgctaagtaacatgggatggtggtctctgataaaggsccatggaagtgtggggaaggaagtgaccacctgatatggggccatcagaaaggcttcctatcgaggttcaactcctgtccctgtggctaatgagactatg

SEQ ID NO: 228655 - DNA, 201 bp, Homo sapiens
tgcttttgttccttggatgatttgagactccaactcacagcctctagatttctcttgaagaatacaaaagaccctttttcttgtatccagtatttttttcytatgataaaacagtacatactatggtagaaaatataaaagccacagataagcaaaaaacaaaaacagaatctcctgtgtatcaggaatgtgttcagctgc

SEQ ID NO: 228656 - DNA, 201 bp, Homo sapiens
agatcgcgccactgcactccagcctgagcaacaaagtgagattctgtctcaaaaaaaaaaaaaaaaaaaaaagaaagaaagaaaagaagaagatggtgctbtgtttttctggctctagtttgcttttgtgtgatttctttgttttttaatgctttttactatgaacccatacaaagctacatgatgattatctctgcccgg

SEQ ID NO: 228657 - DNA, 201 bp, Homo sapiens
cctacagaatgggataaagtttttacaatgtacgcatctgacaaagggctaatatccagaatctacaaagaacttaaatttacaagaaaaaaacaaacaaccccatcaaaaagtgaacgaaggatatgaacagacacttctcaaaagaagacatttatggagccaatagacacaggaaaacatgctcatcatcactggccg

SEQ ID NO: 228658 - DNA, 201 bp, Homo sapiens
acctacagaatgggataaagtttttacaatgtacgcatctgacaaagggctaatatccagaatctacaaagaacttaaatttacaagaaaaaaacaaacaaccccatcaaaaagtgaacgaaggatatgaacagacacttctcaaaagaagacatttatggagccaatagacacaggaaaacatgctcatcatcactggcc

SEQ ID NO: 228659 - DNA, 201 bp, Homo sapiens
aacctacagaatgggataaagtttttacaatgtacgcatctgacaaagggctaatatccagaatctacaaagaacttaaatttacaagaaaaaaacaaacaaccccatcaaaaagtgaacgaaggatatgaacagacacttctcaaaagaagacatttatggagccaatagacacaggaaaacatgctcatcatcactggc

SEQ ID NO: 228660 - DNA, 201 bp, Homo sapiens
agcaaaagaaactaccatcagagtgaacaggcaacctacagaatgggataaagtttttacaatgtacgcatctgacaaagggctaatatccagaatctacraagaacttaaatttacaagaaaaaaacaaacaaccccatcaaaaagtgaacgaaggatatgaacagacacttctcaaaagaagacatttatggagccaat

SEQ ID NO: 228661 - DNA, 201 bp, Homo sapiens
ttcataaagcaagcccttagagacctacaaagagacttagactcccacacgataataatgggagactttaacactccactggcaacattagacagatcaawgagacagaaagttaacaatgatatccaggaattgaactcagctctgcagcaggtggacctaatagacatctacagaactctccaccccaaatcaacagaa

SEQ ID NO: 228662 - DNA, 201 bp, Homo sapiens
agctgtaaaatttaatctagtaagagattacattccaaattgcatgaagaaaatttcaaatttatctgcagaaatgatgcagcctctcttctaagaatacrttacccctaccatgtccttaccaaccagtatcttgagttttcatgttttgtaagcctatagatttttcacacattctcatgacaatgccctaaaacatat

SEQ ID NO: 228663 - DNA, 201 bp, Homo sapiens
attatgtgatacaatttatgtgaaatatccagaattggcaaagtcatagaggtagcagattagtggtaccaggggttaggagtgggtagtggggaatgtasaatggctgtaatggccacagagttttcttttgggatgatgaaaacattctggaaacagatatggtgaaagttgcatgacattgtgaatgtacaaaatgcc

SEQ ID NO: 228664 - DNA, 201 bp, Homo sapiens
atttgtcggcggggggactgtggggtggtgattctaaattcgctttatactcttagtgcagctggatctaagaaaaacattttaaagtttatcagaaactyagtataattcagaacaaacaggattaggtttggaaaaaaaatacagatatagtaagaaaagtgacccatatagaagcctttcgaggtctgttggaaggcc

SEQ ID NO: 228665 - DNA, 201 bp, Homo sapiens
tggacaaagatacattctgtaatttgtctacctccctcttgatctgaaaaaactacaaagcatgtctcaattctaatgcaaagtcttaaccaaaatgattktttctgagctattcatatttagcttctggtgactcacaggaacctgaattttatgttccattcaacactccattatgctcttaaatgagaatctaataat

SEQ ID NO: 228666 - DNA, 201 bp, Homo sapiens
atgtttattggtacagagacacacacacacacacgcacactgacacactccctacttatttaacacatttgaaatagcactttgctggatgaggaagtacrtatggtcttcctaggagtgttctgagacttttttcaaatggtttttcctttatcccatatctctaaagatcactttcatcccacttagttgtgtatgtat

SEQ ID NO: 228667 - DNA, 201 bp, Homo sapiens
aattttagacacagtcgtatctctcgtttgaatattccaaatattgaactttgttcaacattgtttcaatttgcaatatttatgggttgtcaaaacaaaartagagatttttttctttatgtccatgtctaaaaatgtcattttggaaatggcaataaaatagagcattaaactgaaattaatatcatgatgttgaaggtg

SEQ ID NO: 228668 - DNA, 201 bp, Homo sapiens
cccacttagttgtgtatgtatgttttcacacacatatatccttttgaggtgggtctagtgggaggtatctatttttactctttaccgaggtaagggtttcsatgaaacaatgcaaatatatgtgaaattaaactagaatagtaattgcaactggagcgaactaaaaagtacagtggacaccaaattaaattaataaaagta

SEQ ID NO: 228669 - DNA, 201 bp, Homo sapiens
agtcgtatctctcgtttgaatattccaaatattgaactttgttcaacattgtttcaatttgcaatatttatgggttgtcaaaacaaaagtagagatttttytctttatgtccatgtctaaaaatgtcattttggaaatggcaataaaatagagcattaaactgaaattaatatcatgatgttgaaggtgtgacctaattaa

SEQ ID NO: 228670 - DNA, 201 bp, Homo sapiens
cgtttgaatattccaaatattgaactttgttcaacattgtttcaatttgcaatatttatgggttgtcaaaacaaaagtagagatttttttctttatgtccrtgtctaaaaatgtcattttggaaatggcaataaaatagagcattaaactgaaattaatatcatgatgttgaaggtgtgacctaattaaaatgcaaatgta

SEQ ID NO: 228671 - DNA, 201 bp, Homo sapiens
tggaaatggcaataaaatagagcattaaactgaaattaatatcatgatgttgaaggtgtgacctaattaaaatgcaaatgtaagcacacttctttaaaatygacattgcagcttatatattccccaatagtgggactattgcttgttgataatttgatttgacaggttctcttcacaggttcatttctttaacctcacagt

SEQ ID NO: 228672 - DNA, 201 bp, Homo sapiens
tcagcaatgtactctattgaaatagcctgtccacttagaaatgcttaccgagttggcattttctttaaacaggataatttaatggtagaaccgtccacctsttttgcattctttaaataattaagctaatcatacaaggggtcctgcattccgtgattgataaattcgttttggtgcagcccttgcctctttcatgcctta

SEQ ID NO: 228673 - DNA, 201 bp, Homo sapiens
gtgttagccaggatggtctcaatcacctgacctcatgatctgcccccctcggcctcccaaaatgctgggattacaggcgtgagccaccgcgcccagccttragtgttatttttaagacataaagtaagttttaaaaacacaatttcaccaaaaatgcataaatatgaccatgaaattcaagaatacacatacgtattcata

SEQ ID NO: 228674 - DNA, 201 bp, Homo sapiens
gatttcctgcctgtcatgtcgtacatgaagagcactgaggtacagtttataacagaacttggagtaataaaaactccaagcagatgacttggtttggagcytcctgttcagtgcctgggaaacttgaaggatttcttcatactttttggccatttgtgagtatggcagtcttttggctatgaaaacaggcacaggccctcc

SEQ ID NO: 228675 - DNA, 201 bp, Homo sapiens
tgtatttctgaactttgcgtcattttgttcccatgttttcactcggtactatcccattcccgtacacatgacccacctcatccaccatgctctatcctccstcttcctggagtgctcccagaatcctcctcaggcaacaacttccttttgaactccccaactcctttgctcaaatactgctttttaggtggctctatcctt

SEQ ID NO: 228676 - DNA, 201 bp, Homo sapiens
gcgttatcaccaaaccattaaatagcacatcagtttaaaattattaaaaattgctaagtatccatttagcatgagatacgtgttatgactgcagacacctycaaaacaaatcgacagtctattgcactgcattctgagaatgtaaaagcaccattacttactgttaatggtacttctctaatgtatgtaaatacctcatct

SEQ ID NO: 228677 - DNA, 201 bp, Homo sapiens
gtttggagcctcctgttcagtgcctgggaaacttgaaggatttcttcatactttttggccatttgtgagtatggcagtcttttggctatgaaaacaggcasaggccctcctgccaaaactgaaaaagacattagggtgagcctaatgaaacctaggcagagatccccaaaaattaccacattgactgctgtttcttttgca

SEQ ID NO: 228678 - DNA, 201 bp, Homo sapiens
acataaagcatttatagcataatgtctggtatatagcaagggctacaggaatattagctcttattagtatggttaacaaatgccaattttaaatgttactgcacaagttttctaacggaatggtctctccttcatgggtatcatcaggagatgtccttggtggcatcatatgtaaacgttgacctccaagtcctgttttca

SEQ ID NO: 228679 - DNA, 201 bp, Homo sapiens
taaaaaaacaaaacaaaaaaaaaaaaaaccagaatattagctgggcatggtgatgcgtgcttgtaatcccagctactcagaaggctgaggtgggaggatcrcttgagcccagggggtggaggctgaggtgagctgagatcatgctactgtactccagcctgggtgacagactgagaccttgtctcaaataaaataataaaa

SEQ ID NO: 228680 - DNA, 201 bp, Homo sapiens
aatttgaatttcagataaatgtaaaaaacagtttagaataagtatgtcccatgcaatatatggcacatatactaaaactgttttattatttatctaaagaytaactgcttatcctatgttttatctaaaaactctattttatgatgataaaagataagtgctttttgtaagcatgtaaactcacacacttgtctcatctgt

SEQ ID NO: 228681 - DNA, 201 bp, Homo sapiens
agcctgggtacacccttggcctgtctgcttgaccccgagagacctggcatggccaccttatggactctgagtaatctctttatacctatggaaaaccaaasagacagactctgtgggtagcagtgattgtgcacttgaaaattaattcctttcttgacatcatgtctatttttttttttgttcttcctgtcacctcctccg

SEQ ID NO: 228682 - DNA, 201 bp, Homo sapiens
ctcacacacttgtctcatctgtaaaataggagtaaatgtggccatgacctctaaggttgttgggaggattaaattcattgataccagtaaagctcatagastgtttcctggcatctagtaagcaatgtgaaagtataagcttttgttcctgaggtgtggtggtcatttgctccaataagccaatacatttgctccttttct

SEQ ID NO: 228683 - DNA, 201 bp, Homo sapiens
ggtcctagtagatctgggtcagaattgatcaactaggcagtttctagaacagagtttatgtgtatgggttgagcacatgaggctgaatgagtttgtgataragaagtttaggtttagtcagtaattatagcttggcgagatacagtgtacttgtttcatgagtcataatgcagatttgcaagttatggctgatgttttcat

SEQ ID NO: 228684 - DNA, 201 bp, Homo sapiens
acaatcagaatgttcccatggaagttggaagctcagagaaaaatgcggtctttagatatttattaacaaggtgatcagtcagaggattaccgtagaatatrttatttcaatgctagaagtttgttattcatgctcctaattgaaagagtcaagattctggaagatacacgtattatcacatccttagcttgaaatggatgg

SEQ ID NO: 228685 - DNA, 201 bp, Homo sapiens
ctatctctagtttatatgtccagcttttcccttgaccttatgaagcaatgccaatatgacatgtcacataattattttcctattatgaaatattatttacytgttgactataaaggtattaaagtgttttaaaatcatactttcaggtcaaaattttattttaggataaataagagaaaaccgtttcagttttttaaataa

SEQ ID NO: 228686 - DNA, 201 bp, Homo sapiens
ggcctttccccaacagcctggcatgccaggaaaagtaaagaaaagacctcatgccattaaatagacaggtggtttccatggccaccaacacaggaagactycaacatcttagcaataagctgaagcagttaaaggggagtttgagaaacaatcagatttgtttaacagtgtgtgggatggcttcataagaaatggtgtaag

SEQ ID NO: 228687 - DNA, 201 bp, Homo sapiens
ttcaaatgattcatctctgaggtcccttccagctgtagattttgatggtttcatgtttcagtgcatcaaatgcatttcaccatctcaaaagtacgcttggrcatgcaagagtgaatctgttatgttatttatcttattccatcagatgtgctttgcgtggtctgttttaatgcatagaacttactggcatctcttttcaac

SEQ ID NO: 228688 - DNA, 201 bp, Homo sapiens
ggtcgataaagtatacgcttaatctccttccatggaaattagtgactttgaagccataactggaatatttttcctcttcttttcttgtttagcttctgtgyccttttttcttatattttctagcgtataaattctgtggtctttgacttgagatttttgggaaaagtgcaagtaagacatgagtaatctattactatgggc

SEQ ID NO: 228689 - DNA, 201 bp, Homo sapiens
gatttttgggaaaagtgcaagtaagacatgagtaatctattactatgggcacagattccccaatggtcagaactggcaaagtcaaaatttctgttttcatyattaaaattaatgaccctatatcatatttaggctcctcttctttctcatagaaatgtaatcttgggaaagaaataataactataaaccaaggtgtatatt

SEQ ID NO: 228690 - DNA, 201 bp, Homo sapiens
gtcactgctccaaagtttcaagtagaacatattacttctcccttgcctaaaaacttccaaaggctagccattttatagggataaaatttaaatggcttgcrtttatttctgttgatttcactcataattcagcctggcccatatcagggctttgtacttgttcttccctttatttagaggatcttgaggacctccaataaa

SEQ ID NO: 228691 - DNA, 201 bp, Homo sapiens
aatcacatttctatttgttaaaaggaaataactaggtccagcccacattcaaagtgagagaagattacataagggtgtgaatagcaggaggtggtgggctkattaggagccattttagaagctgtcaagcacagtactctttcccaaaacccatcttattttttctgttggaatatctcctagcatttctagcttagggta

SEQ ID NO: 228692 - DNA, 201 bp, Homo sapiens
ccatcctctttcctaactgctgccccacatttctattcatcagtaagtattattagctcttctcccaagacatatccagaataagtgcactgctgcctcascaactcaagtccctaccgcttcccatcgggctcgcctttgtagcttcttaactgtgtggtttctccatgcttgcttggctattgtccactctctctgcag

SEQ ID NO: 228693 - DNA, 201 bp, Homo sapiens
gaccaaatctacgtctgcttggtgtacctgaaagtgatgaggagaatggaaccaagttggaaaacactctgcaggatattatccaggagaacttcccaaayctagcaaggcaggccaacattcaaattcaggaaatacagagacaaccacaaagatactcctcaagaagagcaactccaagacacataattgtcagattca

SEQ ID NO: 228694 - DNA, 201 bp, Homo sapiens
gaaaaaaaggcagcagaaacttctgcagacttaaacgtccctatctgacagctttgaagagagtagtggttctcccagcacggagtttgagatctgagaayggacagaatgcctcctcaagtgggtccctgagacccaagtagcctaactgggagatacctcccagtaggggccgactgacacctcacacagccaggtacc

SEQ ID NO: 228695 - DNA, 201 bp, Homo sapiens
agtaaactgtcttttacacctgaggctcagagcctgtaatttctacttaatcactgtgaagtcaaacctcctgtgaaaggcaagtgttttgtagaccctawaataccacctaaatgtaaggcgttattattcagtcagagtcttacctttgttgatgtagtaaggccggttactcactgttgtcattttgctataggatac

SEQ ID NO: 228696 - DNA, 201 bp, Homo sapiens
ggaggtagaggttgcagtgagccaagatcccaccactgcactccagcttgggcaacagagtgaaactccgtctcaaaaaaaaaaaaaaaaaaaaaaaaaargaaaaagaaaaacgaaagatacaaagtatgtttggaggtgttatcctgaagaaagcatcttgcttcaaatgctttatgaaaatatttagtgaagttaata

SEQ ID NO: 228697 - DNA, 201 bp, Homo sapiens
atgtaagattttgcctcaggctgtgctttctgaggactctgggctaagccaacatcttagtaagtgtgtgcattacacacacacacacacacacacacacmcaagagagaaggtaaatcggattgagataaaaggagccatcagaggttacttagttaaatatctgtccaagaaggcaaggagtccttgaaaagaagctta

SEQ ID NO: 228698 - DNA, 201 bp, Homo sapiens
tgatggttttcacctttggaaaacttaggctttcaaactgttagatcacctacagaaagaaatacatgtatatgcacacacacacacacacacacacacaccccttcatgaaactataccctttattattatttgagatatgttctactatattcaattctattgtagcttttaaaatttctcgttacaatttcctaagtt

SEQ ID NO: 228699 - DNA, 201 bp, Homo sapiens
atgatggttttcacctttggaaaacttaggctttcaaactgttagatcacctacagaaagaaatacatgtatatgcacacacacacacacacacacacacaccccttcatgaaactataccctttattattatttgagatatgttctactatattcaattctattgtagcttttaaaatttctcgttacaatttcctaagt

SEQ ID NO: 228700 - DNA, 201 bp, Homo sapiens
tcttcatctaggacactatattctacagaaaggcttaagttggatagtgtccccatttaaatctccatctctttgcttcaagggtgaattattactggcarctgcaggagtggtattctgtcagcaacattctccatcttgctccctgataaacttactagtgggtgtcttgtgattttttttattattgtattagatgaa

SEQ ID NO: 228701 - DNA, 201 bp, Homo sapiens
gttaactgtaggaagagttaggttcaataccatttaagaaaagcaagaaaaataccttggtaagggctgtctaatcgtctgtggtgtgtgtgtatacacayatatatatatatatatatatatatatatatatatatacacattcagatacatatatataggtttgtatatgtattaatatttaatgtatgaatatagcat

SEQ ID NO: 228702 - DNA, 201 bp, Homo sapiens
aagcaggcagatgttcttattggtattgtagtgagcagtagcatggtgtaagcaggtgtgagtgataagtggacttgagcacaggtggctttaatgtatgyagggtcaatgctataggctccttaggccaaacagttgtaagctagattctagagcactccagcttggtcttagtcatgatgtctttaattcagtgggctt

SEQ ID NO: 228703 - DNA, 201 bp, Homo sapiens
actgagaccttgtctcaaataaaataataaaataaataaaatacctctccatatatttgcccattttttaatttctcattttcacgggtacatagtaggtrtatatattaatggagtacatgagctattttgatacaggcatgcaatgagtaataatcccaccaatgtaaatgcagtatccatctccctaagcatttttcc

SEQ ID NO: 228704 - DNA, 201 bp, Homo sapiens
atttctgtgccctctaaaggagatttgccacctctgtgaattgcaacttgagctggatttttaaaaatttccaattaggattgatgcctctgagtaaaacraataggtactattatgttagaactctgtttctattatagagagaaataataatagtatttgcttaaagggggataatatttttctaatgaatgctattta

SEQ ID NO: 228705 - DNA, 201 bp, Homo sapiens
caatgtaaatgcagtatccatctccctaagcatttttcctttgtgttagaagcaatccaattatactcttttattttaaaatgtacaattaaattatttastgtaatcaccttgttgtgctatcaaacactagctcttattcttcattctttctgttttttatactcactaactattcacccccctccccatgacccttcc

SEQ ID NO: 228706 - DNA, 201 bp, Homo sapiens
aggatagacggaattaggaggaaagattgctgtataaataggtgagcattaaagacttcatcatctctgacttgtcaaggaatgagctaaactcaggactyactattttgtatgattaaaatgtgatgatgaagtgttttgaatttctgataggcttatttccctgcgttagcaactttgagatagtcaggcactgcagga

SEQ ID NO: 228707 - DNA, 201 bp, Homo sapiens
atgtaaatgcagtatccatctccctaagcatttttcctttgtgttagaagcaatccaattatactcttttattttaaaatgtacaattaaattatttactrtaatcaccttgttgtgctatcaaacactagctcttattcttcattctttctgttttttatactcactaactattcacccccctccccatgacccttccca

SEQ ID NO: 228708 - DNA, 201 bp, Homo sapiens
cacttaagaagaatgataattgtgcaactgcaggagcctgcctgagtaagtttctcattctaccttaaggagcttccgagagctgctcagtgtgttcttgsttatgctttccttcacgaggctcttacatttgtgcccacgtgctgggtacagagacagcaatgggagtgtagagcagcactttaacttgcctagtgaagt

SEQ ID NO: 228709 - DNA, 201 bp, Homo sapiens
ttatgctttccttcacgaggctcttacatttgtgcccacgtgctgggtacagagacagcaatgggagtgtagagcagcactttaacttgcctagtgaagtytcttactcagtcccttactagccaggttcttgcgatcaagtcaccaaacctttctgcagattgtgatgactattcgattcaatcaaacccaaagagatca

SEQ ID NO: 228710 - DNA, 201 bp, Homo sapiens
tagatggcccttccattttgcagagagaaagggttttttggggggtagggtggttgttaaatgattcttttcttctgattatctacccagtgtagcatctstcttcctctgaatggccctggactttaagatattctacttgggaggctgaagtgggaggatcacttgagcctaggagttcaaggccagcctgggcagtat

SEQ ID NO: 228711 - DNA, 201 bp, Homo sapiens
ccaaacctttctgcagattgtgatgactattcgattcaatcaaacccaaagagatcagccaagagtctggcacacagaaattccttaacaaatattagttsttatgtatcctacaccttgtgtttatagcaagccagtctgcttgtggcagggttacttagaaatcatttgacagtgtctaaacagtcactcccaaagttg

SEQ ID NO: 228712 - DNA, 201 bp, Homo sapiens
ctgaatggccctggactttaagatattctacttgggaggctgaagtgggaggatcacttgagcctaggagttcaaggccagcctgggcagtatagtgagaycccatctcttaaaaaatagatagtattgtggtttgtattggcactcagaaatacaaacccacaatgtagaatttagaatgatgattgaaatctaccatag

SEQ ID NO: 228713 - DNA, 201 bp, Homo sapiens
ctgcagattgtgatgactattcgattcaatcaaacccaaagagatcagccaagagtctggcacacagaaattccttaacaaatattagttcttatgtatcstacaccttgtgtttatagcaagccagtctgcttgtggcagggttacttagaaatcatttgacagtgtctaaacagtcactcccaaagttgttgaaaaatt

SEQ ID NO: 228714 - DNA, 201 bp, Homo sapiens
atattatggtctctttaaattggactgagtactttccacccacgttgttctattttaagttgggtaagtggttgtcttcccagctgaactttagtaagttmtgttggagacagggaccattttatttttgttgcttgtctgtccttaatgcctggcaataaatgttgatgtttgttgaatggatgaatggacagaaggatg

SEQ ID NO: 228715 - DNA, 201 bp, Homo sapiens
cagccaagagtctggcacacagaaattccttaacaaatattagttcttatgtatcctacaccttgtgtttatagcaagccagtctgcttgtggcagggttrcttagaaatcatttgacagtgtctaaacagtcactcccaaagttgttgaaaaattgacagtctgtagttgcattttgtaatgtttcttttagagcaatag

SEQ ID NO: 228716 - DNA, 201 bp, Homo sapiens
tggttgtcttcccagctgaactttagtaagttatgttggagacagggaccattttatttttgttgcttgtctgtccttaatgcctggcaataaatgttgaygtttgttgaatggatgaatggacagaaggatgggtggttgaacaaaggagtaaagaaagacatcttgggaaataaaactgaatcagtagcctcaacattg

SEQ ID NO: 228717 - DNA, 201 bp, Homo sapiens
gagaggatatccgttgaaagataaaatatgcattataacatgtctttttgataaggagaagtgttttggctttgttcatcaaaagtacatctttgaagctkatatttgaagttattaagatttactagcatctggaatattaccttcaataattaatggaggagacatcagagcctgcccttctctgacctatagatcttt

SEQ ID NO: 228718 - DNA, 201 bp, Homo sapiens
agtggtctgctgagtattatccacaagagcaaatccaacatggtagagcagaattcgtagaattcatttagctcattagatggctgtcaaacatcaggccstaaaatgtggaaaggggatgcagagaagggaaattgattatcccagtcctgttggtaacagaactctcattagcacgtcagggagcacccacaatccagt

SEQ ID NO: 228719 - DNA, 201 bp, Homo sapiens
aagtgaaaaatccatcacaggctttatgaagattaagaaaatgtcataatttttaagtctgccgttcattattcattttatttatctcactcattctatartataacttaaaaatgtacttttatgggtggctggcagaccactggagagataattcatggggcataaacctatttttggcattactggttatgccttact

SEQ ID NO: 228720 - DNA, 201 bp, Homo sapiens
ttgataaggagaagtgttttggctttgttcatcaaaagtacatctttgaagctgatatttgaagttattaagatttactagcatctggaatattaccttcrataattaatggaggagacatcagagcctgcccttctctgacctatagatctttagctatcagtgaaagaactgatggtatgcaatgctttctttgcctaa

SEQ ID NO: 228721 - DNA, 201 bp, Homo sapiens
ggaattattccattcaaatatgaagaatttgccaaaaagatagaaagagagattgagaaattgaaacttggctaggtagaaaatggtaccagagctgcacygcctcccttgggcttttctcataaccataagttgacggtgatggtattttgcacgtgggacttgagcataccaaagggaagaacatcctcagtcctaatg

SEQ ID NO: 228722 - DNA, 201 bp, Homo sapiens
taatatttgctaccatgaaattctttaaaaagtccatgcgttatcttagaaacattatgatacataaaaaaatgggaatgtctcattcttcagattactcrgaaacaatgggtgtaaattagcaaagaaagtgagaaaaataaattaaaaaagtgtagctctttatgtaagtatcttatcagtaccatgtttcataacatg

SEQ ID NO: 228723 - DNA, 201 bp, Homo sapiens
tcttccttcttattgaatattttctactaaacctatctttttatgattctgaaatgccagcttcagttttttttattaattcatactgaccctgggcagasctgtctatctcaacttaatggctatttataatatatggatggcattcccctgccattaatgtttaatgaactggctcctgatccaatagagtctaataaa

SEQ ID NO: 228724 - DNA, 201 bp, Homo sapiens
ctgaaaagcattgaattacatattttagaaggataaatgttatggtatgtgaaaaatatatacctatgctacattaacagttacatatttttaatgatatktattaatatatattatatgattttgtcacatataatagcatatataaaacattggaactggatgacttgagggagcaaagttgagcatttcctgatacta

SEQ ID NO: 228725 - DNA, 201 bp, Homo sapiens
ctgttgaataggagtattaacaggggaaaatcttgccttgttctcagtagcttgctatatcaaattattacagactggtagcttcaaacaatagaaatttsttccctgacagttctgaaagccagaagtctaaaatctaggtgtcagcagggccgtactcccacagaagctgtggagggaaatccattccttgacagcttc

SEQ ID NO: 228726 - DNA, 201 bp, Homo sapiens
attacagactggtagcttcaaacaatagaaatttgttccctgacagttctgaaagccagaagtctaaaatctaggtgtcagcagggccgtactcccacagwagctgtggagggaaatccattccttgacagcttctggtagctccatatattctttgggttgtgggtgtgggtgtgacagtgatctctgtgttcctggtca

SEQ ID NO: 228727 - DNA, 201 bp, Homo sapiens
tataacctgaatagacctattcagattatctatttctctttttgtgagttttggtagtttgtttcttttaaggaattgcctctgtttatctaagttatcamatttgagatcacagagttgttcatcatatttctttatcatctttttaatatccatgagatcagtagtgatgacccctctttcatttctaatgttagtaat

SEQ ID NO: 228728 - DNA, 201 bp, Homo sapiens
cctgtcctgtctctactcagttaccaaattatcttggtttttttttttttttttttttttttttaacaaagccatggccatttgaaaaaaaaaaaaaaaaagccttttaacaagtatcgtttagaatcatggttatattctacacagtgcattgaatttaaggttctcaaggctgtcttccatatactcagttctataaag

SEQ ID NO: 228729 - DNA, 201 bp, Homo sapiens
aacaaacctaggaaagataccttaaaatacaaatgcttccttccaacactataggtgtatccataaaccaaagacttcagtagaaaaacctgtcctgtctytactcagttaccaaattatcttggtttttttttttttttttttttttttttaacaaagccatggccatttgaaaaaaaaaaaaaaaaagccttttaacaa

SEQ ID NO: 228730 - DNA, 201 bp, Homo sapiens
tatctcatttaattttcaccaagactctgggaagagttattattatagttttcacgtgaagactttagtaagtttgatggagtccctaagatcacatggcrtattgatggcagagcaaggattcaaacctaggttttctgactagcactatgttcttaatcactacccgtactgacaaagacagggccttgggatctgtaa

SEQ ID NO: 228731 - DNA, 201 bp, Homo sapiens
tctgtattctcacctgaatgatcagagtagttgctgagtgctttaccttctgcttctctttcttcttcctaattttaataataataataataataacaacmgctattattatatgtatcaagtactaggcactaacactactctgtattatgtgttatatctcatttaattttcaccaagactctgggaagagttattatt

SEQ ID NO: 228732 - DNA, 201 bp, Homo sapiens
agcacagagatgctctatgctgatggaaacctccatcctgtctcccataagtctgtattctcacctgaatgatcagagtagttgctgagtgctttaccttmtgcttctctttcttcttcctaattttaataataataataataataacaacagctattattatatgtatcaagtactaggcactaacactactctgtatta

SEQ ID NO: 228733 - DNA, 201 bp, Homo sapiens
ggttaatgttgattatatgtatgtgagtatgtggtcgtggattcaaacacgtaattctaaaatgtttagaaatgctgcatctactgtattatggacattaygatttttcatgaccaaagcttgttacattattttcctttaaacaatcaaatagaagcaatagtatttaggttgagtcctcacagcaacaacaaaatgcca

SEQ ID NO: 228734 - DNA, 201 bp, Homo sapiens
atagtcaagatttggaagcaacctaagtgtccatcggcagaggaatggatttaaaaaatgtggtacttaatcacaatggagtactatttatccacaaaaamgaatgagatcatgtcatttgcaacaacatgaatggaactggaggtcattctgcgaagtgaaataagtcaggcctagaaagacaaatattgtatgttctca

SEQ ID NO: 228735 - DNA, 201 bp, Homo sapiens
cctgagtaagtttctcattctaccttaaggagcttccgagagctgctcagtgtgttcttgcttatgctttccttcacgaggctcttacatttgtgcccacstgctgggtacagagacagcaatgggagtgtagagcagcactttaacttgcctagtgaagtctcttactcagtcccttactagccaggttcttgcgatcaa

SEQ ID NO: 228736 - DNA, 201 bp, Homo sapiens
tgaagtctcttactcagtcccttactagccaggttcttgcgatcaagtcaccaaacctttctgcagattgtgatgactattcgattcaatcaaacccaaakagatcagccaagagtctggcacacagaaattccttaacaaatattagttcttatgtatcctacaccttgtgtttatagcaagccagtctgcttgtggcag

SEQ ID NO: 228737 - DNA, 201 bp, Homo sapiens
actagataatgcttttgtgaaaaaagaatgaagtacatctgacatatggcttgatctttctcttcctctaattaaaaaacaaaaacaaaataaaatttttyattggaaattctagccctgaattacctgttttctattattgtttatatactctctcattttaagtgttgtgtaaatatttactgtatcctctatcaaatt

SEQ ID NO: 228738 - DNA, 201 bp, Homo sapiens
gagaaccagctgaccttcaggagaagctttccctagtcagtgctcccagctgatctttctagccttgcttacccctccctataaaagaaaattcctttctscccaatcgttgagctacttgcacatctcatgaccagagctctccctattgcagtagtctcactccccttatagcagttactttttcaaataaagtttctc

SEQ ID NO: 228739 - DNA, 201 bp, Homo sapiens
tggtccctaacccactttggtaggtggaataatgatcccccaaagaggtattaattctaatccccaacacctgtgaatgttaccttacatgaccaaatggrctttgcagatgtgattaggttaaaaattttgggatagggggattatctggtattattcaggtaggtccaatgtattcacaagggtccttataaatgaaag

SEQ ID NO: 228740 - DNA, 201 bp, Homo sapiens
ctaacagtaataggaacttcctgtgttccagtctctccatgtggtacttttgacacattagctctatttttctgtctcataccagggaaatatttttattyatattttacactcagggacactgaggctcaggtacgttaaataactttgcaaatggtgcatatctcctcaatgagagatgtagacttggaagatttctgt

SEQ ID NO: 228741 - DNA, 201 bp, Homo sapiens
acagccctgcttactttttggttttaccccagtgacagccatttcagacttctgacttccaaaacgataggataaatatgtgttgtttcaagccctaagtrtgtggtaatttgtgacagcggcaataataaactaatatgtccatcctcagtaactggttgattaaaactgtatcactttcaagtttttttcgtttaaaca

SEQ ID NO: 228742 - DNA, 201 bp, Homo sapiens
agtgtccattataacattctgtatgcctttgcatatccatagcttagctcctctgtgtatgtgagaacacgtggtatttggtttttctttcctgagttacrtcacttagaataatggcctccagttccatgaaagttgctgcaaaagacattatttttttcttgtttatggttgagtagtattccatggtatacatatata

SEQ ID NO: 228743 - DNA, 201 bp, Homo sapiens
cttgaaaggcagtctaggccacaaggactgcaaggaaagtcctggtcctgtactgagctcagaaccagtggacctggggtacacatgacctaagaagataycagctggtgaagggagtgcttgagctgctccccactaactctaggcaacacagctcacagctccaggcagctccttcttccctttgtttcagaagaggag

SEQ ID NO: 228744 - DNA, 201 bp, Homo sapiens
tatatatatatatcacattttccttatccgcttattggtttatggtcacttaggttggttccacgtcttttcaattgtgaactgtgttgcaataaatataygtgtgcaggtgtcttttttgatctcatgacttactttcctttcggtagaaacccagtattgggatcgcaagatagaatggtaggtcaacttttagatctt

SEQ ID NO: 228745 - DNA, 201 bp, Homo sapiens
gtaaagaggatattgttttgcaacttggatactagttcagccatagtagcatagggcaccaggcagagtcctgaggcctctgttctaggccttggcttccrgacagcgtttctaaacataccctgagctggaagagaacctgctgccttgaatgaagggagggactcagttcttgcagagtgcatcacctgctaaccgaag

SEQ ID NO: 228746 - DNA, 201 bp, Homo sapiens
caaagtctcattcttgtcccccaggctggagtggaatggcgcgatcttggctaactgcaacgtccgccttctgggttcaagtgattctcctgcctcagccycctgagtagctgggattacagctccctgccgctatgcctggctaatgtttgtatttttagttgttacagcgtttctccatgttggccaggctggtctaga

SEQ ID NO: 228747 - DNA, 201 bp, Homo sapiens
cttccagacagcgtttctaaacataccctgagctggaagagaacctgctgccttgaatgaagggagggactcagttcttgcagagtgcatcacctgctaascgaagagcactgggccctgaataatcagcagtgatagccaagcagtacttgctgcaggccttgagtgagactcagagccctgctggcttcagttgtgaac

SEQ ID NO: 228748 - DNA, 201 bp, Homo sapiens
ccatgttggccaggctggtctagaactcctgacttcaggtgatccaccctcctcggcctcctaaggtgctgggattacaggtgtgagccaccgcacccagscctcactgtggttttaatttgcatttccctgatgatgagtgatgttgagcatttttttcatgtttggtggccacttgtatatcttcttttgagaaatgtc

SEQ ID NO: 228749 - DNA, 201 bp, Homo sapiens
tctgctctaatttctattctgtttttcttctgattgctttaggtttaaattgtttttctttctgtgggtttctaacagaagtttagattattgattttagrtctttcttcttttttgatatatgtgttcagttctttaaatttcctgcaaagcattgttttccttgcattccacaaattttgctaagctctattttcattt

SEQ ID NO: 228750 - DNA, 201 bp, Homo sapiens
gcctgctttggactcctaaagtgctgggattacaggtgtgagccaccgtgcccagccctcccttagaatttttactataactatcttttggccagcttttrggggtatgtgtacatcacctttgtccttttccaccttttttcttttagtttttcttttttttttttctggtctcatctcactcccactctctggccatta

SEQ ID NO: 228751 - DNA, 201 bp, Homo sapiens
tcgagtgatgggaactaagaattttttttttttgttatgaggttttatgttaatctagcttagagctggactgtgtttaatgcttgctgtagctttaagtkccagatgcttctgtgtgctcgtattttttgtcttccctgttgtctttgggctttcctaagagctccttattcaatagagtctgtgtgtttcacctctcag

SEQ ID NO: 228752 - DNA, 201 bp, Homo sapiens
gggaagtaagggatgagaacaagagtctctgcctggtaatccagggaattcttctggaagttacccaagaccaccacggtggtatctgtacaagcctgcartagccacagtgttattgggcttggggcacccctaaagtagaaacgggtaaagtgaccaaaaacttagatgactacacccatgtcccttcaaatacctgga

SEQ ID NO: 228753 - DNA, 201 bp, Homo sapiens
gggattacaggtgtgagccaccgtgcccagccctcccttagaatttttactataactatcttttggccagcttttaggggtatgtgtacatcacctttgtycttttccaccttttttcttttagtttttcttttttttttttctggtctcatctcactcccactctctggccattagccatttcactgcgtcatttctgag

SEQ ID NO: 228754 - DNA, 201 bp, Homo sapiens
tgctcgtattttttgtcttccctgttgtctttgggctttcctaagagctccttattcaatagagtctgtgtgtttcacctctcagttgtaatcaccaaagmcctcttcacgtggtgatgaggtctcaggaaggataattgttgtatattatgattacatctcagttttcttagtgagcctgagtttctaggctgcgatctt

SEQ ID NO: 228755 - DNA, 201 bp, Homo sapiens
ttacagagaacaatctgggaaacttccaaaatggttactttttctcttccctgagatttttctccagacttccccatgagaacatgatagggttcttggasataaaactcacaaaagtatagtctcccctaagactaggctgcaagagtttttaactctcaagctagtctgcactgagcctcaagcaatttgtcaaaatta

SEQ ID NO: 228756 - DNA, 201 bp, Homo sapiens
aatctgggaaacttccaaaatggttactttttctcttccctgagatttttctccagacttccccatgagaacatgatagggttcttggagataaaactcasaaaagtatagtctcccctaagactaggctgcaagagtttttaactctcaagctagtctgcactgagcctcaagcaatttgtcaaaattatcatacacgtg

SEQ ID NO: 228757 - DNA, 201 bp, Homo sapiens
catgatagggttcttggagataaaactcacaaaagtatagtctcccctaagactaggctgcaagagtttttaactctcaagctagtctgcactgagcctcmagcaatttgtcaaaattatcatacacgtgttcgtatcagttcctaggtccttctgtttttgctttaggtaatctgatcttatgattctttgtgtttacat

SEQ ID NO: 228758 - DNA, 201 bp, Homo sapiens
acgtgttcgtatcagttcctaggtccttctgtttttgctttaggtaatctgatcttatgattctttgtgtttacatgtttctccaaatttggggatactaktttgctttggacctcagttctctgctgaatctaaaaaagtcattaatttccagttggttcatcttttttccttgtcgtaaatatttttcttgttgcaaat

SEQ ID NO: 228759 - DNA, 201 bp, Homo sapiens
gaaaaatgtcgagcattctctttctctgttgaaaagttctgcctcccattagttatgaagggaatcctacagaaaggggtgagtcccttaaattcttcaaytgattatgggaggttagcaaaaaaagagagtttatgaacccatgaaaccttaggttctatctatcagctgtgtcttactgaaatcacctcttgaaccagg

SEQ ID NO: 228760 - DNA, 201 bp, Homo sapiens
aaacatttttatgcaaatggttaaaagagaaaaccagatccagaaattaggaccattaatatgaaaattgaaattttaaatgttttcactgctttcttgcygaccaccaggacttcagcaggtaattaagatgtcagcaagattttttttaagtaactgaaagttctagctgctgtacttatatactttggatgcttgtcc

SEQ ID NO: 228761 - DNA, 201 bp, Homo sapiens
aatccccattgttggttgagtggcctggtgggaggtgtttgggacatgagggtggattcctcatgaatggcttggtgtcatccttgcagtaatgagtgagyttgttctcagtctgtgagttcacatgagatctggctgtttaaaagaggctgggacttcctctactctctctctttctccctctcttgccctgtgacatgc

SEQ ID NO: 228762 - DNA, 201 bp, Homo sapiens
aaagaagtctaatttcacaactacagattgcaaggcattattgtgtaggataggactgatgccgaaagaccacatgagaagatagaatatcagtttagttytagtaactgactctcctttataagaactttgaccctctgtaatactatagaacaaaatcttctttcctaagtatgcatttattgatcacatattatgtgc

SEQ ID NO: 228763 - DNA, 201 bp, Homo sapiens
tattagttcttatgtatcctacaccttgtgtttatagcaagccagtctgcttgtggcagggttacttagaaatcatttgacagtgtctaaacagtcactcycaaagttgttgaaaaattgacagtctgtagttgcattttgtaatgtttcttttagagcaatagggcagtggttttaactgaagcacgtttaaactgactt

SEQ ID NO: 228764 - DNA, 201 bp, Homo sapiens
ccttgtgtttatagcaagccagtctgcttgtggcagggttacttagaaatcatttgacagtgtctaaacagtcactcccaaagttgttgaaaaattgacartctgtagttgcattttgtaatgtttcttttagagcaatagggcagtggttttaactgaagcacgtttaaactgactttgttttgagaaattttagtggca

SEQ ID NO: 228765 - DNA, 201 bp, Homo sapiens
cagagagacagagacagatttcatctgtttggagggaagtaagggatgagaacaagagtctctgcctggtaatccagggaattcttctggaagttacccawgaccaccacggtggtatctgtacaagcctgcaatagccacagtgttattgggcttggggcacccctaaagtagaaacgggtaaagtgaccaaaaacttag

SEQ ID NO: 228766 - DNA, 201 bp, Homo sapiens
aagccatgtcttgcaataaatatagcaaatgcagggaaccagaaaagtcattcttctgtggtcatttgtaatctacttataagaaggaaggaagaatgggkgtagggcggagttgtagcattcagcagaattgccctaaagtatctaaagtatgaaactaaaagcctgaatgattgattgtgggaagatttcagtaaatga

SEQ ID NO: 228767 - DNA, 201 bp, Homo sapiens
ggataggcagaaacaagcccagactgaaaagactacagtgaatacctaactcttcaaaacccagacactgacaaacacccaaagcatcaagaccttccagraaaacatgacctcaccaaactaagtcacctgtagccaatcctggagagagagagagatatgtgagctttcagaaagggaattcaaaatagctgttttgaa

SEQ ID NO: 228768 - DNA, 201 bp, Homo sapiens
tttcagtaaatgatactcaaattaaaacattaggtgagtgactttaagaaaattacattgccacatgcaatttattcactgaaaaggaacttttaaaatargatgaataatacaaaaaaatccggagatctagttagagaatacaagcttttcttttctttctcctctttcccccccacccccagcttctaaattgaacac

SEQ ID NO: 228769 - DNA, 201 bp, Homo sapiens
agaatctacaaaatagcctcaaaagggcaatctaagagttattggccttaaagaggaggcagagagagagagagaaaagttaattcaaagggataacagaraacttccaaaacctagagaaagatatcaatatttaagtacaggaaggtaatagaacactaagcagatttaacccaaataagactatctcatggcatttaa

SEQ ID NO: 228770 - DNA, 201 bp, Homo sapiens
atacttcggtcctcagaggacaacttctcttctaaacttcagcctcatccacttcaattctgtattacgtgtggtaacttcatttgtcttttttctcactyttattttgtgaagccaatttaatgacaggcttgtgatgtgttgattgcagtttgacattagggggtttcacattttgcacgctgactccagtgagaggct

SEQ ID NO: 228771 - DNA, 201 bp, Homo sapiens
acttcaattctgtattacgtgtggtaacttcatttgtcttttttctcactcttattttgtgaagccaatttaatgacaggcttgtgatgtgttgattgcartttgacattagggggtttcacattttgcacgctgactccagtgagaggcttgtattttgtgttccctggccatcatgggtaaacacacagaagaagaatg

SEQ ID NO: 228772 - DNA, 201 bp, Homo sapiens
aacaaaacaccagaactatcctgcaagaaatgctaaaggattctttcttcaatctgaaagaaaaggatgttaatgagtaataaaaaactatctgaaagtasaaaacttactggtaatagtaagtacacagaaaaataaagaatatcataacactattgtagtatgtaaactactcatatcttgagtggaaagactaaacaa

SEQ ID NO: 228773 - DNA, 201 bp, Homo sapiens
taatttgagggagtgtagaacataggaagaaaatgaaaagatggtggtatttgttaaaaaaaaaaaacaaatacaataaaaacatccatctacaaagtttkcgggcatggcactttccatcctttttacagctcttctgctctaatttctctttcccaaccttagctttatcaatctaacactgtctttccttgttactag

SEQ ID NO: 228774 - DNA, 201 bp, Homo sapiens
actatcctgcaagaaatgctaaaggattctttcttcaatctgaaagaaaaggatgttaatgagtaataaaaaactatctgaaagtagaaaacttactggtwatagtaagtacacagaaaaataaagaatatcataacactattgtagtatgtaaactactcatatcttgagtggaaagactaaacaatgaatctatcaaaa

SEQ ID NO: 228775 - DNA, 201 bp, Homo sapiens
ctttgaaagacagttttgcagtttcctacaaagttaaacatagttttaccatacaatccagcagtcatatacctaggtatttacccaactgatatgaaaasttatgaaattagaaaaccctgcactggaatgtttgtctcagctttattcataattccccaaactggaaacaaccaaaatgtccttcaataagtgaatgaa

SEQ ID NO: 228776 - DNA, 201 bp, Homo sapiens
attctttcttcaatctgaaagaaaaggatgttaatgagtaataaaaaactatctgaaagtagaaaacttactggtaatagtaagtacacagaaaaataaasaatatcataacactattgtagtatgtaaactactcatatcttgagtggaaagactaaacaatgaatctatcaaaaataataaccacaacttttcaagaca

SEQ ID NO: 228777 - DNA, 201 bp, Homo sapiens
tcataattccccaaactggaaacaaccaaaatgtccttcaataagtgaatgaataaacaagctctgttacatctgtagaatggaacattactcagcaataraaaggaatgaactatacatagaaacatggatgaatagtaaatgtatattgctaaggaaagaagctagtctgaaaaggctatctactgcatgatgcaactt

SEQ ID NO: 228778 - DNA, 201 bp, Homo sapiens
tcacaggtgtgtgtgtgtgtgtgtgtatggcattgactaagacaacatctgtgaactcaggtttctgtgtagtggatataagatgaatgcctactgtcaastttccacaagactaccggaaaaacctgttgatcaagcaaagctatgattttagatctataggaaaagaatatacaagattgagagaatctgattagttgc

SEQ ID NO: 228779 - DNA, 201 bp, Homo sapiens
gacaagaatggcgaagaaaatcagtgcatatatttcttcttttaagcaagctaagaaattaagagcagtgtagttgtctattttttaaccatccattcatycatccatgcacctatctgtccacattcccactcatgtacctagctacccacccatccacccacccactcatccatctattcatccatccacccatccatt

SEQ ID NO: 228780 - DNA, 201 bp, Homo sapiens
aattatccatgctaaatttgctgacatgagtgttttcactaaagtcttcaatacataggctgtgctgggaaggtctgggccatacctactgtctggctacyaaggccatgaatctctcttaaagatgtgttttgtagtagacctgaacagactcattttagtggagtccaagagactatatcttctgttttaatagatttg

SEQ ID NO: 228781 - DNA, 201 bp, Homo sapiens
agatggtaaacaaatcattgttactgaaggttctggggtgaggtttaataggtgaaacatgcgatttttttttttccccacaccatgaaactattcaattygacgctgtaaatggtggatacctgacattctgcatttactaaaaccagggtacatttctgcttcacgaataaaccgtgggagcaacaaatacacctaaca

SEQ ID NO: 228782 - DNA, 201 bp, Homo sapiens
ggcatgtttttgttatagacaagtttttgtttccatatcattgtaaacatagcttatgacacatattctcaaatgtgcaaagaaaagtataatgtttgagyttatacatccatgtagtaagtgtggatcattcattccatatataagatacatttttaggtaagcattcaggtaaagggtattttgtcatttcgttcttca

SEQ ID NO: 228783 - DNA, 201 bp, Homo sapiens
tccaactaactgaatggcagtgataaaatttcctgtctaagcaaattatttctcaccatagatgttctctttatgtaaatcttgcattttgagcctaatgytgtaagaaaccaggtctgatatgtgtagtttttactaatccattgtttaccttgttagagaaacagtgagcaggttagctacctaggcgaattgatttga

SEQ ID NO: 228784 - DNA, 201 bp, Homo sapiens
taggcgaattgatttgaatggagacagaattgttagacatacgttaatttgatagcaccttcaaggaccaactcaagggaggcctgatttaccctcattgmcagtcacttgcttttgttagtagtggatgcaggagctatcatgtttcattctcaaaatcacagtatccgtttgcacacggaaaggtggaaggaaggccta

SEQ ID NO: 228785 - DNA, 201 bp, Homo sapiens
aaaatcacagtatccgtttgcacacggaaaggtggaaggaaggcctatgcaagtgtctgttgaggcattttcagctggaggtctgtcttgatttgtagatscacttccctcttaactgagttttaggattacagttctaacatttctgtgacttcaaactcagtttgtacagaagtggccattcagtgaggtcctcatcct

SEQ ID NO: 228786 - DNA, 201 bp, Homo sapiens
gagggtttaatgaaacaatgtacataaagcacttggtactacacctggagtttggtaagttttcagaaaatgttaacaattatggtcagcaattcagaagygcatggagcctctactatctgctcttttatacattcacagatgttgagtattagctctgtgccaggcattatgccatgttgagtctgcaaaaatgaataa

SEQ ID NO: 228787 - DNA, 201 bp, Homo sapiens
cagggtttcaccatgttgaccaggctggtcttgaactcctgagctcaagagatctgcccacctttgtttcccaaagttctgggattataggtgtgagccayggagcgtggcttctgtgctaacaagctattagtgacttcaaaggtgggcagcagaagttagcccccaaatagcagcagtccactgttatgtagattcctc

SEQ ID NO: 228788 - DNA, 201 bp, Homo sapiens
agatacttaaaagaatcttctaaccaacccatgagtttataactaattacaaggtcagcaaatgttcacccataggggtgtaactccccattttttatgamccgaaatggcagttttttaaaatgaagttagacatttctccctcaaagttcctgtaacacttacagattcctttcttaaactcttatttgttccaacatt

SEQ ID NO: 228789 - DNA, 201 bp, Homo sapiens
gcaatgaaaggtgtcaacatttggaagatctgcataatccaatgaaccactatttttgtccagagcaatgtgcacttttacaaaatttcacatggggaaakgatccattcaaaatgctacacagaccatggatttttcacataacagagcactaaaaatttcttgatgtggtttcgggttctactctgcaagtaactttta

SEQ ID NO: 228790 - DNA, 201 bp, Homo sapiens
tacataagttaacactgatgcccagagaagttaagtaaattgcccaaagccagagtttcaactggtctaagtttttttgattggaaaccatgtctattttytgggcaacttctctgggcatgctataacctcccacatggacagcttggcaagttcatgccttattacagtttgaaatgttacacgtccccttcctttccc

SEQ ID NO: 228791 - DNA, 201 bp, Homo sapiens
tggaagttgctaataatagtggaaactaggtgtggcatatatgggaactctgaactctttataatttttctgtagatttaaaactagtctaaaattaaaawgtaaaaacgttaacgctgttgactgtcatcaggatctgggccacagtaggaaatattttttcttagtaaaagttactggccctaatagagattggacaca

SEQ ID NO: 228792 - DNA, 201 bp, Homo sapiens
gtgcacatcaggctgtgacaatatgaccaggaatacatggagtgatacagagcagggttggttttgtgtcggcctgcctattgggaggactgtgccatgaytgtgtagatacagccagaaaagtcttttggactcacaagtattagcccagtgatctccctgcagcatgccctcagtggctccccagctgtcttagcccgg

SEQ ID NO: 228793 - DNA, 201 bp, Homo sapiens
agtctcactctgttgcccagatttgagtgcactggtgtgatttcagctcactgcaacctctgcctcctgggttcaagtgattctcctgcctaagcctcccragtagctgggattacaggcatgcaccaccacacctagctaatttttgtatttttagtagagatggattttcaccatgtcggctaggatgttctcaaactc

SEQ ID NO: 228794 - DNA, 201 bp, Homo sapiens
ctatgttctctgtcctgatgggctgaattctagtcctcctgctctccaagccctttatcctggcggatctcttgcttttgctcctacctcgatgctcttcyctcctctcttcactaccctgctttccgctctcagctcctgcattaattcctcagtggtgttctccctgccttggtcagatcctctaattatacattcttt

SEQ ID NO: 228795 - DNA, 201 bp, Homo sapiens
tgttgatgccagtggtaatagggggtgcttctgacattagaccaggccatgaatcctagcctatagctatatatccttgggaaattcctttacctttttgmacctagatgttcccatctgtaaaatgaggataatctgtaatctggggtcaggcactgtggctcacacctgtaatcccagcactttgggaggccgaggtgg

SEQ ID NO: 228796 - DNA, 201 bp, Homo sapiens
ctggcggatctcttgcttttgctcctacctcgatgctcttccctcctctcttcactaccctgctttccgctctcagctcctgcattaattcctcagtggtrttctccctgccttggtcagatcctctaattatacattcttttcacaccccatgcctttctgtcgaggacttgccctaggtgcatttgacatttgggttct

SEQ ID NO: 228797 - DNA, 201 bp, Homo sapiens
agagaattgttgcggtgatttactgagactgaaatgcgcctaatggaatgcggccacgtggtaggtagcaataaataccattcttttctcacttcttttgytgcccatgaaaagctaattctgaggaatctttaatcctttttactatctttttacaaacctactgtatgttaagagtcttatagtgtaattaaggggccc

SEQ ID NO: 228798 - DNA, 201 bp, Homo sapiens
ttagattgtgaactccaggcagacaagggctataactgtttttgttgcataacatccccccggtcctgctgaaatgcctcactcactgtggggcacccatycagtgttagtttttactgtgtaccagcactgagtcaggcgaactgaagacttcaacctcggtttcaaccggtagtctgtcataggatttacagattcatg

SEQ ID NO: 228799 - DNA, 201 bp, Homo sapiens
tatcctcctcagttcttctgaatacctcctgaacagaaatttcttctttcagtgttttatataatagctaatcaggacacttcatattaacgttaaattcyagtgctgccaggtatgaaaccaatcttgtctcactttcccgtagctaggactctcagcattgagtcacactattaactttcttttgtgattgtaatccta

SEQ ID NO: 228800 - DNA, 201 bp, Homo sapiens
tagattgtgaactccaggcagacaagggctataactgtttttgttgcataacatccccccggtcctgctgaaatgcctcactcactgtggggcacccattmagtgttagtttttactgtgtaccagcactgagtcaggcgaactgaagacttcaacctcggtttcaaccggtagtctgtcataggatttacagattcatgt

SEQ ID NO: 228801 - DNA, 201 bp, Homo sapiens
ttcttctgaatacctcctgaacagaaatttcttctttcagtgttttatataatagctaatcaggacacttcatattaacgttaaattctagtgctgccagstatgaaaccaatcttgtctcactttcccgtagctaggactctcagcattgagtcacactattaactttcttttgtgattgtaatcctatgtggcatacca

SEQ ID NO: 228802 - DNA, 201 bp, Homo sapiens
tatagtttttacctggcttaaaggggggcgggggttccctttttttaaaatcaatttcaatcttatttggaagctcagtgtatcaaacacattcaaaataraggtgctttgcttaggaaagagcatggcttgtttgggatcccccatccttatcctgcctctgactgcctctggaaacctttgccctaaataatgatggtc

SEQ ID NO: 228803 - DNA, 201 bp, Homo sapiens
caaaggctagagcaggacttccatcggctcatgattgacgcagctcttttcattaaaccagcttcctcctcgtgctaaatctctctggtaacatttgccartactcagctttgtaagatggaaagctcctaggaaggcctgactctccaagtctttgggacatttcagccctcgatgagcttttttacttacctgacttgt

SEQ ID NO: 228804 - DNA, 201 bp, Homo sapiens
gcttaaaggggggcgggggttccctttttttaaaatcaatttcaatcttatttggaagctcagtgtatcaaacacattcaaaatagaggtgctttgcttargaaagagcatggcttgtttgggatcccccatccttatcctgcctctgactgcctctggaaacctttgccctaaataatgatggtctgctttctaaggcta

SEQ ID NO: 228805 - DNA, 201 bp, Homo sapiens
ccccacctacctaggtgtttgtccgtttccatatggcagttgccaggtgtttgtttatatatcacacagccttaaagtttgagaagtatgcctgtactacwcatgcttaaagctattttgattgcccttatgaaatgcaggtaaactatgctagagagtatttctatattctttactaattaatatctgatagagttgctc

SEQ ID NO: 228806 - DNA, 201 bp, Homo sapiens
aaatgctataggagatagagattattcagcataagaatattatgctaaaaactcaaaagttcagactgcttttcaaggagttgaagcagtagggtgttaaygcctgaaaagctttttgtagttaccttgtttgcccatttagacttcaagggcaagtttgaggttctatgaatgatatccacagtttgcatttaaatttga

SEQ ID NO: 228807 - DNA, 201 bp, Homo sapiens
ggggggcgggggttccctttttttaaaatcaatttcaatcttatttggaagctcagtgtatcaaacacattcaaaatagaggtgctttgcttaggaaagarcatggcttgtttgggatcccccatccttatcctgcctctgactgcctctggaaacctttgccctaaataatgatggtctgctttctaaggctattgggtg

SEQ ID NO: 228808 - DNA, 201 bp, Homo sapiens
aaaactcgtctttcagctacattagccccgtttcaaatgctcagtaaatatatgtggttagtggccaccatattggacagaacagatctggaacagttctrttatcacaggaagttctattagagtgtgctacttcagactgagtcatggtttctatgggttgtactagggtagttaacagtaatgaaacccactgtcttc

SEQ ID NO: 228809 - DNA, 201 bp, Homo sapiens
gcatttcccatttattgtgtgtgtgtgtatatgtgacctcatgtagccctataaggcttgttactaaaaaataattcaaaacccctacattgtccctcctycctctccctcatttcttttaaactgattattttagtatttatctctgtatctctaagtaatatgtatacttttttattttttacatttcaagctctttct

SEQ ID NO: 228810 - DNA, 201 bp, Homo sapiens
aaaaaaaaagcatggaccttgaaagcaaatagatttataatcaggttccaacttgacttctcattagccatgtgattttggccaaattatattttctctctgaacttctgttttgtaacactagtataaaaataatagactttttttccagttagaaaggccaacagtgttaattagttttcagggaaatataagatgcat

SEQ ID NO: 228811 - DNA, 201 bp, Homo sapiens
tgtatctctaagtaatatgtatacttttttattttttacatttcaagctctttctattgattttgcactatggaagcagagaacataactaatatcactartcttcccttcacttctattgcacacgctcttcttctgtcccttatctcaatgtaattttactgcaaatttgatgaaattaatattcatattagtacagta

SEQ ID NO: 228812 - DNA, 201 bp, Homo sapiens
ggcttgtttgggatcccccatccttatcctgcctctgactgcctctggaaacctttgccctaaataatgatggtctgctttctaaggctattgggtgagasaccaacttggaatgcttaataagcaagcatggaagtaacttgcagaagaaaaaagacttcagccttttaatgtcaaaaatatcaaatagggaataatttc

SEQ ID NO: 228813 - DNA, 201 bp, Homo sapiens
tgcgtgtaccacattatttatcttttcatccatcaatggaaatttggggtgtttccacttttaggcttttatggatgatgctgttataaacattcatatasaacttttgtgtgaacatatgttttcatttctcttgggtgtataactaggagtggaattgctgggtaatatatatacctttatatatactatctttatgta

SEQ ID NO: 228814 - DNA, 201 bp, Homo sapiens
cagtgggagtgatatcacccccaagccggtgaaaattaattcttgggagcaataaaaagtcattctttttatgtgtaaagcgcagacatagagacaatacrtataaggatataaagaaaatctgtggtattaaaatttcaggggggcaattagaaaacgctccttgcagggatgatgatgaaaaaaagattgagaaacagt

SEQ ID NO: 228815 - DNA, 201 bp, Homo sapiens
tgagaaacagtgaggtgaaagtcgcatttcatcacaattgccttaaaaattccttccttaagtggctcattaatgagtacatggttttgatatattgataygtacttgaacattcaagaaccactgaaataaaagaaaggagaaaaggagagtccacattcaactccctgggttttgaagccattcctagcagagactttc

SEQ ID NO: 228816 - DNA, 201 bp, Homo sapiens
tgatatgtacttgaacattcaagaaccactgaaataaaagaaaggagaaaaggagagtccacattcaactccctgggttttgaagccattcctagcagagrctttcgaaggacttctaaatgctctatatgcagtgtttgctctattgtgcttttatattaactctctattaactctcttaatgtattattgttagtgtta

SEQ ID NO: 228817 - DNA, 201 bp, Homo sapiens
catcaggctactcctacatacagagtggtcctcagagaacattttcttctaggatttaagtgatgaaaagcaaggctgaatggagattttggtgaaaggcwttctctttggatccatctctaatatttttctcccccactttggggaattcactggaagctgatgccacatactttgttgatggtacccttagctaaccac

SEQ ID NO: 228818 - DNA, 201 bp, Homo sapiens
attggtaaaattctcaacgtaaatctaaaatcttttcatttaaaaaaaaaaacactcactttctccagaccagtttcctaggagactgccaattattctartgtgataagctagattgcaaatgaagaacttgttgaaagatgcatttaagctaaagactttatttctttagttttaattttttgatatcatttatataca

SEQ ID NO: 228819 - DNA, 201 bp, Homo sapiens
aatcagaggcacctggacagaatgatctgctcttggtaatcttctctctgcttgtctgtacccgtcttttatctctgaagatctttgtctctgtctagttyataaggaattcttcatcccttgagttaatacattgtaaaatctagaccactctcttttgttcctgttttgagtgtgtgaggaaggaattctggcccagct

SEQ ID NO: 228820 - DNA, 201 bp, Homo sapiens
gtctgctttctaaggctattgggtgagagaccaacttggaatgcttaataagcaagcatggaagtaacttgcagaagaaaaaagacttcagccttttaatrtcaaaaatatcaaatagggaataatttcaagtggtgatgtcagggacagctgcgttgtctgtacagcgttggagagaagatcctgcttcggcatagccta

SEQ ID NO: 228821 - DNA, 201 bp, Homo sapiens
gacaagctgttgcagagaaaaggttgtacatttaaggatggtggctgttcatactttttttctctgaaataaactcctaagagcagtatgccttggttatragccactaaaaaatggaaagctgcatccatggatgaacattcactttacccagtctaattcataccagggtggctgactcagaaaactgcactaccacaa

SEQ ID NO: 228822 - DNA, 201 bp, Homo sapiens
cctatgattttgaaggctactctatagctgccacctttcatcttaaagaaaaaggattttaattatgacaatgagaacaagatgacatattgttttattasttgcttaattttatttagctgactcacttagtatgggaatgtctctaggggctgctggagagtctctttctataaaaggagagagatcccaagaggcaga

SEQ ID NO: 228823 - DNA, 201 bp, Homo sapiens
cacctttcatcttaaagaaaaaggattttaattatgacaatgagaacaagatgacatattgttttattagttgcttaattttatttagctgactcacttastatgggaatgtctctaggggctgctggagagtctctttctataaaaggagagagatcccaagaggcagatttgtttaagagtgttgcataatgtgctcta

SEQ ID NO: 228824 - DNA, 201 bp, Homo sapiens
agttgcttaattttatttagctgactcacttagtatgggaatgtctctaggggctgctggagagtctctttctataaaaggagagagatcccaagaggcasatttgtttaagagtgttgcataatgtgctctacgtcttgggtttctaccattctcaggttatgaactgtagagctggatttttttggtaatttttctaat

SEQ ID NO: 228825 - DNA, 201 bp, Homo sapiens
ctataaaaggagagagatcccaagaggcagatttgtttaagagtgttgcataatgtgctctacgtcttgggtttctaccattctcaggttatgaactgtasagctggatttttttggtaatttttctaatcaaaaggaaaatcaataaggctcactactgaataacatatttaataacttgataaaataatcagagttttt

SEQ ID NO: 228826 - DNA, 201 bp, Homo sapiens
ccttttccacggcccacgttgttaatgtttctttctcctgtgtttgcggaaaccatcacgcacccccaccccatatctccacttctcatgactactcaccstgtgtcccagaattgtgcatctttgaaacccctgatcctgggtaccctccaatggatatatccccttttctcattccttttctgaaattatgctgctgct

SEQ ID NO: 228827 - DNA, 201 bp, Homo sapiens
ataaaaggagagagatcccaagaggcagatttgtttaagagtgttgcataatgtgctctacgtcttgggtttctaccattctcaggttatgaactgtagarctggatttttttggtaatttttctaatcaaaaggaaaatcaataaggctcactactgaataacatatttaataacttgataaaataatcagagtttttgg

SEQ ID NO: 228828 - DNA, 201 bp, Homo sapiens
atactttaaaatggctaaatggtggattttatgttatgtgtgtatgtttcaccacagacatataaattgctttcttccgatccacccactagttatctacstgctccatgaaaccaaacaagtttaattccttttccacggcccacgttgttaatgtttctttctcctgtgtttgcggaaaccatcacgcacccccacccc

SEQ ID NO: 228829 - DNA, 201 bp, Homo sapiens
tttctgaactattttgacctttggctattttacaggacttttgggttgctgattgcaacatgagagaaggacatcttgtctggtgggcatatacatgtacmtagcctttttaagagaagcttttgggtttgatatggcagtagattgccctgctcacctccccaaccccaatatatttgaacatttctgaaattgggatgc

SEQ ID NO: 228830 - DNA, 201 bp, Homo sapiens
aaaattaattaagtaattcagcttttaattttaatttgttcatgctcagcctactgactttgcaagaagtacagtattaagtgaaaagcattgaaggagasgaaaaaggctattttgtggaaaatgtctttataatcagctttattgtttagaagatctagaatctggttaaaaagcaaaatgagccatgctttttggcag

SEQ ID NO: 228831 - DNA, 201 bp, Homo sapiens
tttagaagatctagaatctggttaaaaagcaaaatgagccatgctttttggcagcttattgtggtttcaaaccactgctaagcgcgttgtacctatgtatytgtggtagctattactgccccattttgaaagtgagggcattgaaactcaaagaggtgctgtaatttatctaccttaatagctgatggagaatgagatttt

SEQ ID NO: 228832 - DNA, 201 bp, Homo sapiens
actctttgttttagttaattgatctttgacatttatttacttggtgtatactatctttatacctttgcattatggcatataccagtgatttctggaactasgtcattattagaatcaccttggaaactttggtaaactataaatttctggctcaacccttaaaatatactaattcactagctctgggatgtagcttgtatt

SEQ ID NO: 228833 - DNA, 201 bp, Homo sapiens
catttgttttagttattttcccatgtaggttgcataaccttgaggaaagggcatctagtatattatattgttcccataatagttaaatgactctttttagsaatcctgataatatccataataattattattcatactaaagcaaataaacaagcaacccactatgtgcctatctctgtgctcaacaaaacattatcacat

SEQ ID NO: 228834 - DNA, 201 bp, Homo sapiens
ttgtcatattacacaaacatggcgacagggagccagtccctagaagtggcaaaccaattccagagaaggtgtttggcatataactcaaaagacagtgcctycaacatatagaagagaagacatggtctctgcctttggcctctagggagaatgataacagaagatgcctgaagtaacagcaagatcataacatctaaccca

SEQ ID NO: 228835 - DNA, 201 bp, Homo sapiens
tagcacctctgtaaagcttaggttggaactggggaaatggattaacaaaagtgtttcagcactgttaagactccaccttgatttattcctttttattgttktaacttacaatggtaatatttgcttactctaaataaattcaaagactacaaaagaatgtaaagcaaaaaatcagagtaatcttttcttcctactcctgat

SEQ ID NO: 228836 - DNA, 201 bp, Homo sapiens
gtttattgtagcactatttacaatagcaaagacatgaaatcaacttaggtgcccatcaatggtggattagataaaggaaatacggtacacatacacaatgkaatactacatggccataaaaaaagaatgaaatcatgtctgttgcagcaccatgaatgcagctgcaggtcattatcctaagcaaattaacacaggaacaga

SEQ ID NO: 228837 - DNA, 201 bp, Homo sapiens
ggagtttttcttttctatagaccatcttcccaccaccagaagttcttttgattctatgtaaaaagtctttgtcacttaggaggatgaatcaggaaccttargtatgtggcaaaacaattaggcattataatgaaatcacatctcttttcaaaaaagagaatgacattcctttcagagtgaccagggctgggcatggtggct

SEQ ID NO: 228838 - DNA, 201 bp, Homo sapiens
acacatacacaatggaatactacatggccataaaaaaagaatgaaatcatgtctgttgcagcaccatgaatgcagctgcaggtcattatcctaagcaaatkaacacaggaacagaaaaccaaatactacatgttctctcttataagtgagagttaaacagacaaacatggtacacatggacatgaaaatggcagccataaa

SEQ ID NO: 228839 - DNA, 201 bp, Homo sapiens
gagggggtcaaggattgaaaaagagctattgggtactatgctcactacctgggtgatggtattaatcataccccaaacatgagcatcatgcaatatacctrtggaacaaacccacatgtgcaccccgaaatcaaaaataaaagttgaaattacaaaaacagataagtagacaatgcagtgaactcatcgagtttgtagaac

SEQ ID NO: 228840 - DNA, 201 bp, Homo sapiens
ccaccaggtctgagagcttcacggtgcacagtagactattaaagttactgagaagttgcatggaacagaaacctgcttaaccttctttaatctactgattyccaaactcatttgaccattgctttgagaaatatcattttaaacaaacactcgaataatatggaattaaatttaattggattcatggagttctattgtatt

SEQ ID NO: 228841 - DNA, 201 bp, Homo sapiens
gcagccggtggtgcaggcctgggatgcagagccccatcaaagtgttaacataaaataaggttgacagtgccacttcatcagaaacaggcaacaaattagaygttatgaaatgcttataagcctagggagtaaggtgctcaaagacaattaccaactaaacatttcattaatgaaataatgattaattgtaattactaatta

SEQ ID NO: 228842 - DNA, 201 bp, Homo sapiens
ggtctgagagcttcacggtgcacagtagactattaaagttactgagaagttgcatggaacagaaacctgcttaaccttctttaatctactgattcccaaastcatttgaccattgctttgagaaatatcattttaaacaaacactcgaataatatggaattaaatttaattggattcatggagttctattgtattattttt

SEQ ID NO: 228843 - DNA, 201 bp, Homo sapiens
gaaattgtctatgataataaatgaaagtgccattaacacacactgaggctcataggaagtggttctgccaaaagaaacatccataaaaaagcatactcgaraagaaaatgacaaggtctgaaattaaagatcaaacaaatagggatgatcttcatagaaaatccatctggagaagaaatatgaactaaagcaaacaggcaa

SEQ ID NO: 228844 - DNA, 201 bp, Homo sapiens
gatgttttgttgttgttgacgatgttttgttgttgttgacttggttggtttctttattttgttgttgatatggtatgggccacaaggtttagagaaggtgwtgacagccatcgaactggacaccttgcgtgatgttcttaacattagcaccaaatcatctagaaggagtctttcctagccattctaaatataaagggctgt

SEQ ID NO: 228845 - DNA, 201 bp, Homo sapiens
ttgatgttgttatcatgggagtaggtttcttgtaaacactagctcagcccttctcaccctctcttctggctatgtgatgcctttcaccatgttatgacatrgcaagaaggccctcactggatgcagcttgccccttgatctgggacttcccagcctccagaaccatgagccaaataaatttctgtttattataaatcttcc

SEQ ID NO: 228846 - DNA, 201 bp, Homo sapiens
cttggtaacactcttggtttctcctcctctacctttgtctttccttcctacctcatgtccttcaagtctttattacctgtattagtctgttctcactctgytagtaaagacaaacctgagacttggtaaatcataaagggaagaggtttaacggactcacagttccacgtggctgaggaagcctcataatcatggtggaag

SEQ ID NO: 228847 - DNA, 201 bp, Homo sapiens
acacttttgtgtgttatttttaagagttcaaggaatccttgttgtccattcagccaccttcctctggcctgaagtgagtatctgccttacagttggcagakatgaggaattaacattcatgccaatgcccaaatttgtgatgatcatgaagagctggaaaggtgagttaatttagtgagttagcttcagtttctttagata

SEQ ID NO: 228848 - DNA, 201 bp, Homo sapiens
gaaaaaggagcaatcttgctttagagtagttgagaattatcactgccctgaatctcaccacccttgcaactattggcttaatctcaaggaatgaaaactgmtggaagcaatagaaagagatctttaattagtagagtacatcgaaccttacatagatgtaatctcccaaagttcagtaaaagcttagagtcatcaagaagt

SEQ ID NO: 228849 - DNA, 201 bp, Homo sapiens
catctcataacatacgggaattatgggagctacaattcaagatgagatttgggtggggacattttattatcactggaaagtcagcttcggggagccccagscttaagtctgggcagacaattctgtcccccttttgagcattttggctaactttgctgcaggtcataaacagatagacattcaacaagtcttattccagag

SEQ ID NO: 228850 - DNA, 201 bp, Homo sapiens
ctcataacatacgggaattatgggagctacaattcaagatgagatttgggtggggacattttattatcactggaaagtcagcttcggggagccccaggctyaagtctgggcagacaattctgtcccccttttgagcattttggctaactttgctgcaggtcataaacagatagacattcaacaagtcttattccagagatg

SEQ ID NO: 228851 - DNA, 201 bp, Homo sapiens
gtgaacagcagtcaggcatgccagacatggaaagagagtcattcatgtgaagacaaaaaaacacacagcctcagaagtgggggaaatgcttgttatagtayagaaatcaagaggccaatacagacacggttgcagtgcccggtagaaatatgatgcaagccacttgtgtaattttagtttttccggtagtcaccataaaaa

SEQ ID NO: 228852 - DNA, 201 bp, Homo sapiens
acatggaaagagagtcattcatgtgaagacaaaaaaacacacagcctcagaagtgggggaaatgcttgttatagtacagaaatcaagaggccaatacagayacggttgcagtgcccggtagaaatatgatgcaagccacttgtgtaattttagtttttccggtagtcaccataaaaagtaaaagaaattaataatatgttg

SEQ ID NO: 228853 - DNA, 201 bp, Homo sapiens
tgaagacaaaaaaacacacagcctcagaagtgggggaaatgcttgttatagtacagaaatcaagaggccaatacagacacggttgcagtgcccggtagaawtatgatgcaagccacttgtgtaattttagtttttccggtagtcaccataaaaagtaaaagaaattaataatatgttgttaaaactcgatatatctaaaat

SEQ ID NO: 228854 - DNA, 201 bp, Homo sapiens
agtacatcgaaccttacatagatgtaatctcccaaagttcagtaaaagcttagagtcatcaagaagttggtgactgttatctaaacttgatggagataagwgcagaaaacagacataaaaaaataccagatgagagttataaaaatacagtgaagagtgaagtatcctgccttagagagagaatgatataagagaataaaa

SEQ ID NO: 228855 - DNA, 201 bp, Homo sapiens
aaatatgactgtcagatactcacctacctggtgagtcagttcttgagggtgagtttggacccagggcactccaggtgatcctgagccctgtgacttggatrtggccaccaagttggtcattgcaaagcagcatggtccacaccttgtgagggaatggaggcaatagggagcaataaaagcatgtaggggggatccctatac

SEQ ID NO: 228856 - DNA, 201 bp, Homo sapiens
ggaacttcagttgattgatggctgagaaggatgaatatttgataggcagggaatgctctttatggcacagaatgtctttccaagaagaaactttactagartcacagcaaacctctcagccacagtgcccaaaatgtcatagttagttgaattatttactatgaaaatgatggttaactgaaaatctctttaaaatatatg

SEQ ID NO: 228857 - DNA, 201 bp, Homo sapiens
gcagggaatgctctttatggcacagaatgtctttccaagaagaaactttactagagtcacagcaaacctctcagccacagtgcccaaaatgtcatagttarttgaattatttactatgaaaatgatggttaactgaaaatctctttaaaatatatgagtctcttttactgtcttggacaaaagcgctatacaagcaggggc

SEQ ID NO: 228858 - DNA, 201 bp, Homo sapiens
tgatggttaactgaaaatctctttaaaatatatgagtctcttttactgtcttggacaaaagcgctatacaagcaggggccttacctgtctctttgctggayctgcagcccctggagcagtgttttatgtaatgtatgtgctcaatgaatatatgttgtcagaatgtgtaattgacataggttacattagaaattttaactt

SEQ ID NO: 228859 - DNA, 201 bp, Homo sapiens
tgagtctcttttactgtcttggacaaaagcgctatacaagcaggggccttacctgtctctttgctggacctgcagcccctggagcagtgttttatgtaatktatgtgctcaatgaatatatgttgtcagaatgtgtaattgacataggttacattagaaattttaactttaaaccatttgttttgtcatgaattgtaacag

SEQ ID NO: 228860 - DNA, 201 bp, Homo sapiens
taacctgtaatttactgtcattttgaactatttggatattttttataatacacttaatacacaaacacttttcattatttaaaaaaaagtagttcaaattmcaatatataaaatatgaaatttctctacttcctcgttcatcttcataggttattactgtcagatgactggtgtgtatctttccaagcactgtttcatgac

SEQ ID NO: 228861 - DNA, 201 bp, Homo sapiens
tttttgtctttcagagtatgttttggagctttgtccttaggatagcaattacaagtttactcattctttttattgacttaatagcatttcatgtatggaartaccataatttatataaccacttctgtattttagtaatagagaaacagtcttacaataaacatccttgtacatatgttttatgtattttatgcatattaa

SEQ ID NO: 228862 - DNA, 201 bp, Homo sapiens
ccctgagtgatttgttgaatgaacaaatgaatggataagtgtgaaaccattgaaactacacttgaggctcctcaaaccattttagttattgcccttcaaastgttagtctgaacccaccatcactgttaggcagcgacaagaacgtgctggtttaattgggacattcatctagttaacaagctctcactgggtatttaatg

SEQ ID NO: 228863 - DNA, 201 bp, Homo sapiens
gatttgttgaatgaacaaatgaatggataagtgtgaaaccattgaaactacacttgaggctcctcaaaccattttagttattgcccttcaaactgttagtytgaacccaccatcactgttaggcagcgacaagaacgtgctggtttaattgggacattcatctagttaacaagctctcactgggtatttaatgatggaatg

SEQ ID NO: 228864 - DNA, 201 bp, Homo sapiens
agccttcatgtcgactaaaaagaaaaagtgatgagttgctgtagaagtgactttcgcaagatacaaggtcttcccagatcaatatccaccaaacaacaatrgcaattgataagttaagctgtgatgagccagatagtacctgtgggctctcttgacaaatatgactagcaagccctttgcattgtacatcatgtaaggagg

SEQ ID NO: 228865 - DNA, 201 bp, Homo sapiens
atacaaggtcttcccagatcaatatccaccaaacaacaatggcaattgataagttaagctgtgatgagccagatagtacctgtgggctctcttgacaaatrtgactagcaagccctttgcattgtacatcatgtaaggaggaaatcaaagatgaaatagagggttctttacttttcccagttaaatgagagattgtagttt

SEQ ID NO: 228866 - DNA, 201 bp, Homo sapiens
aaccccgtctctactaaaaatataaaaaattagccgggcatggtggtgggtgcctgttgttccagctactcgggaggctgaggcaggagaatggcgtgaayccgcgaggcggagcttgcagtgagccgagatcgtgcctctgcactccagcctgggtgacagagcaagactccatctcaaaaaaaaaaaaaaaaaaaaaaa

SEQ ID NO: 228867 - DNA, 201 bp, Homo sapiens
tgctagatgtagatgtgtgactttgagtagggtaagtgttatatctttaagtgtcaatttcttcatatgcaatgggaagattatgatattaaccaatggcwttttaaatgagaagtaaatgagataatacttgcgaagtgcctaacacagcatgtgtcagtgtattagagagttgataactgtgaaaatggttaaggtgaa

SEQ ID NO: 228868 - DNA, 201 bp, Homo sapiens
attaaccaatggcattttaaatgagaagtaaatgagataatacttgcgaagtgcctaacacagcatgtgtcagtgtattagagagttgataactgtgaaartggttaaggtgaaagggatgtaaatgaaaatacaaacaaaactggattatttggcagatcctaaatactctttgaccagtatagtctcacattgttctcc

SEQ ID NO: 228869 - DNA, 201 bp, Homo sapiens
tgcggtcaaaattctagaagtactgtctgtagcatggaaacagagtcttctctgcatattttcaaatgcaagatagagatggcagtggtggacaaggtatragggtggtttggttgggggtggggtgcatcagttatactgtgttctttcattgcagctaaaaatttcaaaaataccacccatttcggagttcagtgaagt

SEQ ID NO: 228870 - DNA, 201 bp, Homo sapiens
catggaaacagagtcttctctgcatattttcaaatgcaagatagagatggcagtggtggacaaggtatgagggtggtttggttgggggtggggtgcatcakttatactgtgttctttcattgcagctaaaaatttcaaaaataccacccatttcggagttcagtgaagtaaattctgagaatccaaacatcaaataagagt

SEQ ID NO: 228871 - DNA, 201 bp, Homo sapiens
tgacatgctggcctcttgtcctccaaatattaccattgtgaagtttcttctgtagcttttcagaaaaagaaattatgcacatgttgacatctaaacaaaaygacacggagcctttaaaatctttacttaaatggcatattatatacattcttcacacttagcttgtttcaaagcatagtatatcttgaagagcagacctac

SEQ ID NO: 228872 - DNA, 201 bp, Homo sapiens
catagtatatcttgaagagcagacctacctcattattcttaatagctgtacatattgttttgtattgataaatcaaaacgcgtttaacccaatggatggtrtatgggttttcttctccatttttttgtttgtttttatgggcaatactacaaaggacattcttgcacaaattctggcatactatttggaagtatatctgta

SEQ ID NO: 228873 - DNA, 201 bp, Homo sapiens
ctctcaacaaccagacagaaggaaaatctcttcattcctttcttttaatttaatttgcttatctttcaatggccttctaaaaaaattgaatggcatgtttkttaggtagattttgtttggcagtcactctgggcctctgcttttattaagggagggaaggcagatgagctgtggtaaacatggataagtcagtgttctggc

SEQ ID NO: 228874 - DNA, 201 bp, Homo sapiens
aaatccagcacttcagtagaagaaagatcgtgatctttgggttgggagacctggggttaaattcaggccctaccatttactcattgtgtaatacaagcaasttaagttttgaagctttattttcttcactagaggagataattcttaatggattgttttaaatgttggaaatgaaaatattaagcatccagcacagtactt

SEQ ID NO: 228875 - DNA, 201 bp, Homo sapiens
ttcttgctcttttccatgttgttttgccaatttctctttcttttgctttctctcctacatgtgaattctctcctgttcttctggctgaaattcatctctcrtgtcataaatgcccttccttctgtatgattcccttgtctgctttcctttcatatgatctattcaccttatttgaaagaaaatgtcatttgtttcctagca

SEQ ID NO: 228876 - DNA, 201 bp, Homo sapiens
agggcagggcctcgggccatcacattccatctcttactccagagtctcactgtgatttttacacaggtcctttcgctgtgtggcacctatggatctgctcwcttaaaccattgaaatttattagatgaaaggtaggaatccactgggctcttgttagaaaacgtcctactctaacactctttccccatcctattatttgca

SEQ ID NO: 228877 - DNA, 201 bp, Homo sapiens
ttgtttttctaatctgacctcaacgctttcatttatctcacacacataaagtgttttccaggttctgtattagaagtttttaactttgtgcttgaaaatarttttacactctgtaaccgtttttctttcttttgctctcacctgtccttatttctttccagtaattgtttgcaaacttatcatttagttctctgaagaaat

SEQ ID NO: 228878 - DNA, 201 bp, Homo sapiens
tagactatcagaaaaaatccagcagatcacatgattgtaacatagttagtgaataaatatgcaccctcagggaaaatgatcagggggtcataggggaccamgaataataaggcagctatgtagcgctaatgaagagcaagctgaattcagaaataaatcaagaaaatgaaaaacattttctttacttcatattaaacctgt

SEQ ID NO: 228879 - DNA, 201 bp, Homo sapiens
ctttaaaaaattctatgattaaaacaggaaaataattcatatgtaaagttaaactgatttttttcctatcatagctcatatttagaaatgtttttgatgaytgagcaaaattattaaatttgttctcctctcaataaatatgtgtgatttttcttttccagagtaatcacttggaagaatacaatatatatggcttctgat

SEQ ID NO: 228880 - DNA, 201 bp, Homo sapiens
gtagacaagtttaatttaacagagtttgaccaaagagcagtcaactaatcgggcagccctcagaatgagttaccaagaactacatttgccaaagattctarggactctaggattccctttagtacatgacctgtgttggtggctagggattctagagtttgagtctagtttttcagggtgtactcgtgataggcaaagctg

SEQ ID NO: 228881 - DNA, 201 bp, Homo sapiens
ttttttcctgtatgttgttatctgagagaagtcaccatatatggtttgtttccttgctcacaagtagaatcctgtatacactgttacagccttggggactyggcagcttagagttggatcaaagcattgaagggaaacctccacttttgtgtcattaatacacagtgggtgcaaaatatagaatcattaatgcactacaga

SEQ ID NO: 228882 - DNA, 201 bp, Homo sapiens
gactcaaattacggagacagcctcaggctaaatttaatttttttaacactatgcatttttgtgagtctccgcctaaacatgactcctgctgagaggcccamccttcccctacctcaaaggccccattaggtaccctcctgttatgcagaccagaagctccctacttccttactttagcagagcattgatgccccgtgttat

SEQ ID NO: 228883 - DNA, 201 bp, Homo sapiens
tttgaatagagagtagaatctgtgagactcggggatcctgcgcctggattctgtggactgcataaggatacatgaaagggcttgcagtagaggtctgggamcagcctgaaattatatatatagtattttatgcacatacattctttcagtaagaaagtcttcagttttgttcagattctcaaatggcaagtacctaagcct

SEQ ID NO: 228884 - DNA, 201 bp, Homo sapiens
tgcagtagaggtctgggaacagcctgaaattatatatatagtattttatgcacatacattctttcagtaagaaagtcttcagttttgttcagattctcaartggcaagtacctaagcctaggatgttggcaaccatctgctgctctaagtgctatagggcttcatgatggactgaagatccaaatatggaaggcgaaacta

SEQ ID NO: 228885 - DNA, 201 bp, Homo sapiens
ttatgcttattatagaatacttgtagtagttagaggaattaaaacctagatcacccctgtctggtagaagtataatgtgaaccacatgtgtaatttaaagmtttttagtagccacacaaaaaagtaccaagaaaatttatttttacttttttaaatttaaagaattaggtgatcatgttaatgctgtattttatttaatat

SEQ ID NO: 228886 - DNA, 201 bp, Homo sapiens
agattcatcaagatattccaaaaatatttaaaagtattctcataattaagatacaagttttcaaatttaaattaaagataaattaaaattacaaatttagwtttccacttgcatgagccgtatttcaaatgcccggtagctgcatgtggctagtggctactatgtttaacagcttagatccagaggtacacatacatattc

SEQ ID NO: 228887 - DNA, 201 bp, Homo sapiens
attccaaaaatatttaaaagtattctcataattaagatacaagttttcaaatttaaattaaagataaattaaaattacaaatttagttttccacttgcatkagccgtatttcaaatgcccggtagctgcatgtggctagtggctactatgtttaacagcttagatccagaggtacacatacatattctggtggttttcaaa

SEQ ID NO: 228888 - DNA, 201 bp, Homo sapiens
tgaggatttgagactgactttgttgctttacctcttggagatcattcaagttgtgcgttttaattaaatttatattatagatacacttacaaatttttttwaaaaaatattaggacctgaaatagcattttctcttgggaaaaataccagcttgcagatcattgaccagtgtcattggtggagttgttttatttccctctg

SEQ ID NO: 228889 - DNA, 201 bp, Homo sapiens
gcatcagaattggaggatatttgtataacctaaataaattctggggccccatgtggttcaatcttaagatagcatcgcaagtgaaataattaaaaaataawtctaaattttatttttacctctccaagaattttgaaaactattttatgcattacacatggcaactgtccttaaaattccctgttatcttttttcttcctg

SEQ ID NO: 228890 - DNA, 201 bp, Homo sapiens
tttgtgtttcctacatacctaaatgtgtttctaactcctacattctctcttattgtttcacatatgctcttgctttgtggtacatcttttttagagacagrtatcatttacaaatatataatacattaggcagaagggtgataaccttttaatttagcttcaggttttaaaattttatgtattgccttaagaatagggcat

SEQ ID NO: 228891 - DNA, 201 bp, Homo sapiens
attctctctacatatgtcaaggataaaattgtgcttcaagttctttatttcatttggcatactttattcccataaagaaataccctggagggagttcatayggggaccaaaaaaaatgagtgtatcacagaaatgtcgactaataggaaaattcatttgactttccttcttcctgtggttttaccacaggcagaaatttca

SEQ ID NO: 228892 - DNA, 201 bp, Homo sapiens
aaaaaatagctaccagtttgaatgcttaccacctgctagacattgtgtatattttacaaagattacctcatttcatctttataacaatatggtgaggtaartatctatattcttatttttcagataaggaaatcaaagctcaggaaagttaaatgacttactctaggttgtattcaaattaagtgccagaggctggatttg

SEQ ID NO: 228893 - DNA, 201 bp, Homo sapiens
agattctaaaaagtgctgacatgcctaaaaatgataagcactcccgttttagagcaacttagaggtaatttgtgaaatttttttatgatgagaagtctgtstcttgagtgtgagcttgtgcacgttccccacagacatagagacactactagtctgaagaaggaaagtaattcttcttaggacaacccttcctgctgttct

SEQ ID NO: 228894 - DNA, 201 bp, Homo sapiens
tttataagataaagacacctcatctgaaagtgtgaaagccttcagtatagcagctggtgttctgggtcagctgaggagaggagctttataaaggaattcaytggacctggttggccataggacatggcaggtgtgcatctactttggacaggcacctggctctggataaacaagtggtgagcacaatacctttttgtcttc

SEQ ID NO: 228895 - DNA, 201 bp, Homo sapiens
atagctttgatcagattctaaaaagtgctgacatgcctaaaaatgataagcactcccgttttagagcaacttagaggtaatttgtgaaatttttttatgaygagaagtctgtgtcttgagtgtgagcttgtgcacgttccccacagacatagagacactactagtctgaagaaggaaagtaattcttcttaggacaaccct

SEQ ID NO: 228896 - DNA, 201 bp, Homo sapiens
attggccaaaaaagtgagagtaggaagtactgatgtaaataatataggtcattctgttagacgttcccctcaatgaatatatgcctcttagaaaatgtgasatgggttctgggagtcattctcattttcctgaacctcttagtgtgagcatcttagtgctgagtgagattccagtgttgacattttctgttatatatgaaa

SEQ ID NO: 228897 - DNA, 201 bp, Homo sapiens
tcacaggcaggtaagccacaagccggaaagcctacaaatgtgttcgttgtggcagtcaaagtaagtacatgtgaatgagctttgagagggggccctggccytacacttcctacatgaggctgctgcttttctccctcgatattcgctgaccaccacagggctgaatttggagttgtggatgcacaagctagttgcagttat

SEQ ID NO: 228898 - DNA, 201 bp, Homo sapiens
ccctatatgtttatatgtataagctgtccattctgccttttgaaatttgtttaatatttttactgaaaaaatggaatatttctttttttgaaaaaatcttratttttaggggatagggtctcactatgctgcttaggcttgtctcaaactcctggtttcaagcagccttcccactttggcctcccaaagtactgagattac

SEQ ID NO: 228899 - DNA, 201 bp, Homo sapiens
aaaccagcgcatctcacgctgtagggcagccctgtccaaaataaacataatgggaaccacacatgtgactatcagttttatagtagccatattaaaaaaasagataaaattaattgtaatattttatttaatccaaaatatcataaatattatttcagtaggtaattaacatgaaataattattaatgagatattttacag

SEQ ID NO: 228900 - DNA, 201 bp, Homo sapiens
ttgggaatggtctccttgtcttccacatcaaataatttaactgaaacaccatcataattacaacttaatttctctcattcaaacagaggtgatgcatcttmtccccaaaataaaagcctccttaagcttacactctcacactccataacatgggtgtttacaaggttctttgcttttcttgcttgttgttacgtcttttga

SEQ ID NO: 228901 - DNA, 201 bp, Homo sapiens
tcatcttctgttttcagatacaaacactgaggcacaggcaggtgaggtaacttgccgaacctcacacaccaaaaagtggtagagacgtgattttaagtcartcggtccagttctggaatgaacgttcttgactggggtctgcatactttctctaaaaagggccagatggtaaatattttaagctcttcaggctattcagtt

SEQ ID NO: 228902 - DNA, 201 bp, Homo sapiens
cacttgattcatgcaacaaatatgtattgaatctcacgtgtgggctgtttaactgtgcttaaacagctggaacaagacagaaaatgatgccactctcctasgtctttaatttgatggggagacagacaggaaaaaaagataaagcaaaaatgtgtcattacaatttgtgataactgctagcagtaatattaatggtggcta

SEQ ID NO: 228903 - DNA, 201 bp, Homo sapiens
tgctttcatttataaaatcaaaaaggaaggtgcctgagctgttaaactcgggaatggattgtgtgtttgagtggtgcgaccactgatgtataaaatgcacrggagaaccaattcactgaggtaggcacctagaggaaaattacttacgactagattttcagaccttctgcatctgccggagcctgtggcctggtcactaca

SEQ ID NO: 228904 - DNA, 201 bp, Homo sapiens
ctttgaaaagagaacttaaggccggtcgtagagactcacgcctgtaatcccagcactctgggaggccgaggcaggtggatcacgaggtcaggagatcgagmccatcctggctaacatagtgaaaccccatctctactaaaaatacaaaaaattagggaagcgtggtggcacatgtccgtagtcccagctactcgggaggct

SEQ ID NO: 228905 - DNA, 201 bp, Homo sapiens
atacaaaaaattagggaagcgtggtggcacatgtccgtagtcccagctactcgggaggctgaggcaggagaatagcttgaacccaggaggcagaaggtgcrgtgatctgagatcacgccactgcactccagcctggacagcagagtgagactctgtctcaaaagaagaaaacaaagaaagagagaacttaaaatgaaacca

SEQ ID NO: 228906 - DNA, 201 bp, Homo sapiens
ctacaagagcatggctttgaattagctgctggacttttgaagttgaacatgatttatcctgagttttcttttaggattggtcagtgtccatatgtgtaaawgtccatatgcatttggaagcactgagagattaacctcagcagttacaggcacaagaaagaacaaccgcctctatagcactgtgtgtgaccactaacctca

SEQ ID NO: 228907 - DNA, 201 bp, Homo sapiens
ctgttacgttttgtggaacattacggcagtatgcttgcattataaaatttaacaaattcctagcaaaatgtcactattcactgtgtgaatgcaatctcttyagtgcatttaagttggttaccttcacacatcaagttctagcagataaaagtgggcacttaatattcagtggatgtgctgagaatagccctgtttatatac

SEQ ID NO: 228908 - DNA, 201 bp, Homo sapiens
aaaaatgctaccaagcccactgtttacagacaaaatttttctactatctgtaaacattactggctttcttgagtgatttcttgtctttctcattctcaccyccttgttctgtttctccatatgggattgtttctctttcaggtgtcctttctcagtcagaggctagctctgtttgtcttttttatttttccccctaaattt

SEQ ID NO: 228909 - DNA, 201 bp, Homo sapiens
ttggtgttctgttcaaaatccacctgtttattgaacaccctatgtttgcctaaattcaacatttggttctgcagaatggtgaaactgggcatgtgtgagayggtaattgcttgcgaaaaaggcaatggaaagtagtaaatgaagcatgtgaaaagcagctttattgaatggtctattgtgttaagtacttgctttcgtttt

SEQ ID NO: 228910 - DNA, 201 bp, Homo sapiens
tgttaaacatactcacattactgtgcaacagatcttcagaactcactcatcttacgaaactgaaactgtatacccattaagcaacaactccccatctttgkttctttctttcttttttttgctgttttttatgatggccaatatggacaagcaaaagaaggtacgtaagactttgggtcaaaataacttcaattgatcagt

SEQ ID NO: 228911 - DNA, 201 bp, Homo sapiens
gacacttctgtttggttttgatgattcctcatttagaagaaagcttgtaacagtggaatgaggtatacaatctagatttgagtctcattttcatcatttakttaattgtgaccatgtgcaagcaaaatcctgtatcatatgagctcttgagttttgtctggtagatcaatttctacaggcctttaccatgatatcattgtt

SEQ ID NO: 228912 - DNA, 201 bp, Homo sapiens
ttaaccaaggagtgctgggagtagaaaagggaatgagggacacgatttgctttgcaacattgtgaggaagccttaccctgggcactcatgctgaaaatgcrttgagtgatgttacagggggttctgcatgctttgggagtgctctgttctacttagaagtttgaagacgttgcctcacaactttctatattactaatgggt

SEQ ID NO: 228913 - DNA, 201 bp, Homo sapiens
catcacttcttctccatcgctcaccacttgagaaatgagaacacccccaaactaattagatttatcctaatctcctttctgtaccatccatcctctcagasgccatctgtgagtgtagagttcagacctttaagaattatgctaatcagtctttttctcatttaaagcgttcatctgatgaccacaatctgaaacttctgg

SEQ ID NO: 228914 - DNA, 201 bp, Homo sapiens
aaaagactttaatggggcttcattatctccatctgtccatccatcacttcttctccatcgctcaccacttgagaaatgagaacacccccaaactaattagrtttatcctaatctcctttctgtaccatccatcctctcagaggccatctgtgagtgtagagttcagacctttaagaattatgctaatcagtctttttctca

SEQ ID NO: 228915 - DNA, 201 bp, Homo sapiens
aactgaatcggatgcatcatggtattgaactgtctgcagaaagctatgagcccttcctcttaaatgaacgtgcttccagtccactgagatactgagagagyggggctgaggtgttcctgctgcatttgggaagttagagaaatggcatgtgcagatatcctgttctgattcatgagtgagatgagcactgagtttctcttt

SEQ ID NO: 228916 - DNA, 201 bp, Homo sapiens
tcggtccccactctcctccccagcttcccttctgacttcctatttaaggtttctagttcattcacatgactcagaaataatgtctgcaaaccagggagagrtgacaatgatgtagtctcctgtggttccttacaggaaccaaagcgtcagggaggtttcagtttcccccatcactttccacttgtcccaagacattggttt

SEQ ID NO: 228917 - DNA, 201 bp, Homo sapiens
taaagccaccttctgtgcctacctacacagtggtggttagtgtcccacactctgggaggaaccaggcaagactggtccagtggagttggaccacacagttrtaagtaatgaaataacaaaggcaatgtatggctttctaggccttgttaaggagttgggattttatccgaaaagaatggaaagccagggaagctagcagat

SEQ ID NO: 228918 - DNA, 201 bp, Homo sapiens
aagggtagggcctggtgggaggtgattgggtcatgggggcagatttctcatgaatccccttgatgccatcctcgtgatagtgagttctcatgagatctggytgtttaaaagtgtgcggcaactcccctctctctctcttgttgctcgggccatgtgacctgtctgcttccactttgccttccaccatgattggaagcttcc

SEQ ID NO: 228919 - DNA, 201 bp, Homo sapiens
tcatgtcgaattgtaatacctagtgttgaagggtagggcctggtgggaggtgattgggtcatgggggcagatttctcatgaatccccttgatgccatcctygtgatagtgagttctcatgagatctggttgtttaaaagtgtgcggcaactcccctctctctctcttgttgctcgggccatgtgacctgtctgcttccact

SEQ ID NO: 228920 - DNA, 201 bp, Homo sapiens
tgtgtgttttttgcattagccagtgggggtcaaattctgacactttaagtggtgagggagatggaagctgcaccccaagtaattcacattattaactcttytgtctctgttgtccaggaggaggtgggtcagcatctttattggcacggattatctaggcatctcattctgcctttcacttttggtgtggcccagacctgg

SEQ ID NO: 228921 - DNA, 201 bp, Homo sapiens
attaaaaaaaagtttacttagcacctaccaaccatatagcagggactatgttagtgctgggactgtgatgatgaacaagacaggtagtgatttggctctcrtagatattacagtgttggggagacacatattaaataattgcacaaatgttaaaaaaaaattatccttttcctaagtgcgtaaaaagagaagagcattata

SEQ ID NO: 228922 - DNA, 201 bp, Homo sapiens
tttgctctgttgcccaggctggagtacagtggtgcaatcatagctcaccgcagcctcaaactcctgggctcaagtgatgatcctctcacctcagtctcctkagtagctgggactataggcacccaccaccgtgcccagctcatttttgtattttttggtagagatgaggttttgccatgttgcctaggctgtcttacctaa

SEQ ID NO: 228923 - DNA, 201 bp, Homo sapiens
tcaaggagttaaaacttttgagtcttaattcacaaaagacagttcatctatcaagatatatttgttcttttataattaagatctgtcacgtctttctactrtattcagcaaacccatgttttcctgattttagggttttacttggctgtaaaatttcctctgagctgcaaagccacacatgtaatctgcttaggaatgaac

SEQ ID NO: 228924 - DNA, 201 bp, Homo sapiens
ctctccatctgtaaaatggagctagtaatatcagtctcaccttgtgaaaatggcataaaattatcatggtaagtgcctggcacggtgctagaaaaaaagtrcagttcgtagaaaataggaggtattgttacttattatctccaaccaggcaagaagaatagtttgtcatcattattggttcacacagaattatattaaaag

SEQ ID NO: 228925 - DNA, 201 bp, Homo sapiens
atctgtaaaatggagctagtaatatcagtctcaccttgtgaaaatggcataaaattatcatggtaagtgcctggcacggtgctagaaaaaaagtacagttygtagaaaataggaggtattgttacttattatctccaaccaggcaagaagaatagtttgtcatcattattggttcacacagaattatattaaaagtattat

SEQ ID NO: 228926 - DNA, 201 bp, Homo sapiens
cagttcgtagaaaataggaggtattgttacttattatctccaaccaggcaagaagaatagtttgtcatcattattggttcacacagaattatattaaaagwattatcatgggtttaatgtcccaaagaattggcaaaagcagactggccacttccatgctaacttaggtgatgtcaccgttgttgtgggttgatgagttgg

SEQ ID NO: 228927 - DNA, 201 bp, Homo sapiens
ctgcttttaactgtccagctgtcaatgcaagggagaatgaagtagaagcccaaagtccttcacagcttgattagtactctagccagtccactttcccccasgttgaaaaggctggcataaaaggagagggtaaattcatgagcatagaggctccatgtttttttccctctgttgcccagtgccatgcataatgccttgcca

SEQ ID NO: 228928 - DNA, 201 bp, Homo sapiens
cttcaggttacattttccattcaaaatgctttttcagtgtagtgtgctttttccaagctcagaaactgaggagaacagggagctgcttctaataaatttcyaatgccttttcctgggggattgattgaacacaaagagctcagagctatcttccagccatctgcaagagatgtgtttttgtacacctttggtaacatctaa

SEQ ID NO: 228929 - DNA, 201 bp, Homo sapiens
gaacagggagctgcttctaataaatttctaatgccttttcctgggggattgattgaacacaaagagctcagagctatcttccagccatctgcaagagatgygtttttgtacacctttggtaacatctaagtaggccggcacaaaagggccttcgtctgagagtgttctgtggaaaggcggccatgattgcagaagcatgta

SEQ ID NO: 228930 - DNA, 201 bp, Homo sapiens
gttaaaataaaggttaaaataaagattacagagatagaaataactttaacttctcattttatttgttttctttaaagagattatttacatatagattcatrtgggaataaaatttaattgcaaagtaaaaccaaggtaatttgaccaggttgtggtgacttaattatctcttttcagtggattgtaaattccttgaggaca

SEQ ID NO: 228931 - DNA, 201 bp, Homo sapiens
gagattatttacatatagattcatatgggaataaaatttaattgcaaagtaaaaccaaggtaatttgaccaggttgtggtgacttaattatctcttttcastggattgtaaattccttgaggacaagatttattgaattgaattgtccttttataaatttgctattacctatgatgaagattttctccttgcccaaacttt

SEQ ID NO: 228932 - DNA, 201 bp, Homo sapiens
aagctccagaaacatgacaaggaggactttcctgcctcttggagatcagaggaggaaatggcagcagaagccgcagctctgcgggtctactttcagtgacrcaggtaaagactgcatttcgtcattacccagaccctcccgtgggcctcaggaaagaggctgcactctcagaatggggatgcacaaaaacaccttcaccag

SEQ ID NO: 228933 - DNA, 201 bp, Homo sapiens
tcaactctctggagttcagtggatggtaaatatctgtttcttcattccttagtctttgagagttcaggccctggtccgagaggattcaatcctgtgggtaygaactgcttggtaagaacactacccaaagccagcagcatgggccttaacagaccttgctacagatgtccttgtgtgcccgctgcggccagtggagcgctt

SEQ ID NO: 228934 - DNA, 201 bp, Homo sapiens
ggtctgctcacctgaaacctgctctcatctccaagatggtggcgctcaagcttgacctccagccccacctctctcctgaatattagactcatatttccaaytgcttcctggacacctttatctgcactttgaattcagaaagtccctaattcgaatcttactcaccttcccataaacatcttctttcctttcatgacactc

SEQ ID NO: 228935 - DNA, 201 bp, Homo sapiens
tgagcatttttctgagtattcagtacatcaggtgtgggagcaaattgatattggagaaatcttcatggacagatgtggctaatgttctcagcttctctcthgtcctctgaggccaaaagtgaagtgaaataaaatagccaaagttgcaagaggatttatttctcctttgaaccacaacagaactcaactatccctctagaa

SEQ ID NO: 228936 - DNA, 201 bp, Homo sapiens
gaattcagatggcctgtccttcaaagcttggcctagggtagattgggcaaatgattcctgagaccaatagtatctcagtccattgacttttttcccttctycacccaagacacctgtggaaactattagtcttctatagaatgggcttcagtaatgtgtaagataaactgaggccttcattcaaagcctgatcttaaactg

SEQ ID NO: 228937 - DNA, 201 bp, Homo sapiens
gataaggtcactactggcaattggtgggcaggggccaggcatgccacacatccagcagcatgtatgagacacacgctgagactcccgtgtatgagactcgygcgcactcgcgcacattgtgtctcctacaatgccaggttaggggctgagaaacactcttgagtattgaataaaggcactgaagggtcatttccccaagaa

SEQ ID NO: 228938 - DNA, 201 bp, Homo sapiens
gatgaggacatttagactctgacaggttaattactttgccaaagttaagatggctcagaaatgacagcattaatgttttcaactcaatacatttggttctragatcttccattggactgcactgcctgagatactatcttccaccatcatcttcccagtgtgaaagtattgaattcaccatgtgaacactttataggacta

SEQ ID NO: 228939 - DNA, 201 bp, Homo sapiens
gaaaatattatttaagggcacttgttttattctgacaaatttttcagagaatatttagacttgaggtaggtgttatcagactcttagataaaatatataayattattcctaatataataggcttggcagatttcatatgaattacagcagtggttaacattcgtaaatagtcacattttattcccactatagtctgttgaa

SEQ ID NO: 228940 - DNA, 201 bp, Homo sapiens
ggcacttgttttattctgacaaatttttcagagaatatttagacttgaggtaggtgttatcagactcttagataaaatatataacattattcctaatatartaggcttggcagatttcatatgaattacagcagtggttaacattcgtaaatagtcacattttattcccactatagtctgttgaatcaagtaagaaagatt

SEQ ID NO: 228941 - DNA, 201 bp, Homo sapiens
tgaggtaggtgttatcagactcttagataaaatatataacattattcctaatataataggcttggcagatttcatatgaattacagcagtggttaacattygtaaatagtcacattttattcccactatagtctgttgaatcaagtaagaaagatttgattcagatcaataactatagcacataaaataataaaccctttc

SEQ ID NO: 228942 - DNA, 201 bp, Homo sapiens
taagctgagtgggttaaatggccatctagattgtttatcaactctggtgagacttcctagtgcctatttggcagtatggaaaacatttttttgaagcattrtgtatgtattttctaccttgttttagaaaaggttcaactcagactacacaaataaaaagagtgcatgataaaatgaaaagaattggatgagctaaatgga

SEQ ID NO: 228943 - DNA, 201 bp, Homo sapiens
cagtgttgagccaaggagaggaagtagtggtgaagactacactgatatttcctaatgatggtgactgtattaaacagcttagaagctttaaattaacggarattttattgcagaaaataagtctcagtattaggatatggcccaatgtgtctctatcttggggaagagcaaaaacaaacaaacaaacaaacaaaacctgtt

SEQ ID NO: 228944 - DNA, 201 bp, Homo sapiens
ctaaattattaatgggtgatatttctgaataagcaggagataccatctatctattctcacctctgttggttttttcctacttctaggatggccccgaagcyggacagactgtgaaggtgagtgcttattatgtgcatacaaattaataagaggcgattatgagaactaataaaaaatcacaacgagtcatatgcagcacat

SEQ ID NO: 228945 - DNA, 201 bp, Homo sapiens
aaagtcaaaagatattcagagtagaagacaatattaactaagacatatgaggaaatacatagcaaaaagttaattttggttggaaccttgaagtgctggcragaatagtgagaaacaaaattggaaggacagttgggacccatcctagcaagcctggactttgggctaatggtgaaaatagaataatctgttgaggtgtgg

SEQ ID NO: 228946 - DNA, 201 bp, Homo sapiens
gtcaaaagatattcagagtagaagacaatattaactaagacatatgaggaaatacatagcaaaaagttaattttggttggaaccttgaagtgctggcgagmatagtgagaaacaaaattggaaggacagttgggacccatcctagcaagcctggactttgggctaatggtgaaaatagaataatctgttgaggtgtggctg

SEQ ID NO: 228947 - DNA, 201 bp, Homo sapiens
cattttcttgatcatatcatcttcttgcctacagataattaaattcctgtgacgttttagtctcctacttgaaagggaaaggtggtgtttaaagacctttyagtaagtaaaagcaagaattgccctgtatgtgtgtgtgagccagccagctggccaacctgcacaattcatttgaatgacatgttcattgaatcagaggag

SEQ ID NO: 228948 - DNA, 201 bp, Homo sapiens
actatctgggcttaaaaaagttggcatccagtgcaaagtccctaatggatcttcagcactattacaaaatgatagattgttgtcatagtcattttagcagytttcagagctgttatatttttaattaaattggctgtgaattttttaagtagcaaaggttgataaactagcacgcagtgcgatatcactattcttcttagc

SEQ ID NO: 228949 - DNA, 201 bp, Homo sapiens
gttataaagatgtttggtattttcttcttcatagatagtcaatattttaaatgcagtgacattaattgtgcagaatgaaatgcccctactatctgggcttwaaaaagttggcatccagtgcaaagtccctaatggatcttcagcactattacaaaatgatagattgttgtcatagtcattttagcagctttcagagctgtt

SEQ ID NO: 228950 - DNA, 201 bp, Homo sapiens
gatattcaaagtggtaaaagaaaaaaaactctcagccaataatcacgtatccaacaaaactgtactgcaaaagaagtaaaggagtgaaggagaaattaagrcattcccagataaaacctgagaaaatttattagaactagatctgcccttcaagaaatgctaaagggagtccagaaggttaaaatgaggtgatgctagaca

SEQ ID NO: 228951 - DNA, 201 bp, Homo sapiens
cagaaggctcagatattcaaagtggtaaaagaaaaaaaactctcagccaataatcacgtatccaacaaaactgtactgcaaaagaagtaaaggagtgaagragaaattaagacattcccagataaaacctgagaaaatttattagaactagatctgcccttcaagaaatgctaaagggagtccagaaggttaaaatgaggt

SEQ ID NO: 228952 - DNA, 201 bp, Homo sapiens
atgagctctgatcgtttttgagctatgaggattaccaccactctactaccaccatcttcatcaactttagattcctcatatgagaccatcagctgactgtstggaactcagccagattgaccttgttagaagatccaggaggagccattgagtcctggatcagaatatcacagcttcatcatcagtgtccaaatccaaaat

SEQ ID NO: 228953 - DNA, 201 bp, Homo sapiens
aatcacataatacaactgagaaaacaagatgtacctcaatgatagaaagtataggctatgaaattcaccaaacttgagtttgaatcttggctctagcttayaatggccagtttgaaatatctacattctttgagtttcagcttcttgaactgtaaaatgaagatcataatagcctatgtggatatttcaaaaatgagtgtt

SEQ ID NO: 228954 - DNA, 201 bp, Homo sapiens
aatttaaaacatcatcctttcatggtgatattaaagaattagttcatttagataagcttccagtttcatattttgaagtatttagtggatattttattgastgaagattacacttagttttcatgttggtataatttaaatatattattcataggacttgcaaatcacataatacaactgagaaaacaagatgtacctcaa

SEQ ID NO: 228955 - DNA, 201 bp, Homo sapiens
aaagggaaaggtggtgtttaaagacctttcagtaagtaaaagcaagaattgccctgtatgtgtgtgtgagccagccagctggccaacctgcacaattcatytgaatgacatgttcattgaatcagaggagttcagggttatcagggatgttaaagggcaactagcaaagccattcaccttgaccctcttctgcagcatcct

SEQ ID NO: 228956 - DNA, 201 bp, Homo sapiens
ccagctggccaacctgcacaattcatttgaatgacatgttcattgaatcagaggagttcagggttatcagggatgttaaagggcaactagcaaagccattyaccttgaccctcttctgcagcatcctcaccaagtgatcaatctctgctccagcagggacagttagagtacctaccttatgaaattgttgtgaagattgag

SEQ ID NO: 228957 - DNA, 201 bp, Homo sapiens
gttaaagggcaactagcaaagccattcaccttgaccctcttctgcagcatcctcaccaagtgatcaatctctgctccagcagggacagttagagtacctamcttatgaaattgttgtgaagattgagtgaggggttatatggaaagtgcttagaaccacatctgccccattataagtactcaatcatgtaagtcactgctg

SEQ ID NO: 228958 - DNA, 201 bp, Homo sapiens
cgcgatcttggctcaccgcagcctctgcctcccaggttcaagcgattctcctgcctcaacctcctgagtagctgagattacaggcatgcgccaccacgccyggctgatttgtatttttagtagagacggggtttctccatgttggtcaggcttgtcttgaactcctggcctcaggtgatccccccgcctcagcctctcaaa

SEQ ID NO: 228959 - DNA, 201 bp, Homo sapiens
tcctggcctcaggtgatccccccgcctcagcctctcaaagtgctcattacaggcatgagccactgcacctggccccattatcatatttcacaaaattaatrggaatttcttaatgcagtagtcaagttctttgactgttttaaaatgtctttttatcattgcttggttggatcaggatccaaaaaagatccacaccttata

SEQ ID NO: 228960 - DNA, 201 bp, Homo sapiens
aagtgctctatgggcagtatactgtatccaggtagaatacagctgagaagcagacattcctgatttctgccctcatttcagtttgcattctcaatagaaawcaagtaatcataaatgagtactaaaatttcaagattgatataagctatgagggatacaaacaaatgggaagaaaaggaaggagggataccttcatgggat

SEQ ID NO: 228961 - DNA, 201 bp, Homo sapiens
ccccacccaatattttttaacacattggaagtacaagtacccctcatcttatacagcagtgtgggactataaaaatgaccacgcaagcggaaaccatgcawtgtccacttagtaatcaatgggaaaacgtatgactgttctatgacctttaacgtttttctctaatcattaaaaaccctctataagttatcagagtataaa

SEQ ID NO: 228962 - DNA, 201 bp, Homo sapiens
gacctttaacgtttttctctaatcattaaaaaccctctataagttatcagagtataaagaaatagaaaaatataatgaaagaagtaaaaaacgaactaatrctaatttagtacactgtaatttaaaacattagaaacactaagaattgaagtgctttatttctttgaaaatcacttattgagagtctcttgaacaattctt

SEQ ID NO: 228963 - DNA, 201 bp, Homo sapiens
gatactataaataaaatgcatggagagtgcttagcacacaggaagtgctgttacaatatcacttgggctctgggcctcagtgccctgatgtatgacatggragataacagcagctgtctccgaggaccactgaggggcttaaaagaggcgatacatataaaggtgcatataaagcgcctgcacagggcctgatgttttgcc

SEQ ID NO: 228964 - DNA, 201 bp, Homo sapiens
tctttgactgtttttaaaatgccccagcctcccctgtgattggcagttgattttattaggagacaggtgtaagcagatggaaagaacttttctttcccccyctttacaggccttggaggtttagtgataaatgctgagctatatttgcatacaaatcactatcttgaaaaagtttgctttcttgacactctggcagtacag

SEQ ID NO: 228965 - DNA, 201 bp, Homo sapiens
actgtcccacccaccgtatctcaaaattacatcactcttcacctactacccaagccagaaccttggaatcctctttgatccttctcttcctttttgccccmattagttaagtcttgttgctcctacctcaaacatacatctcaaattctctgcatctctactgccaccaccacaggccaggcctgctttgaatcttttacc

SEQ ID NO: 228966 - DNA, 201 bp, Homo sapiens
catcagaaggcaaccacactgaccgtatccccacttgatcacctggtccagttggtacttgccagatctccccatcattctttgagcatttctttatattstggtacaaaaaagatgctccaggatcatcttatactgtccctgtccagccttggaatcagccacttctccaagcagctctggttcctgtccgtgtagaat

SEQ ID NO: 228967 - DNA, 201 bp, Homo sapiens
ctcaagtcatgtattcttccatgccatcttggcaggaattccacaaaaacgctgctgagctcttctcagcatatcacatcagaaggcaaccacactgaccrtatccccacttgatcacctggtccagttggtacttgccagatctccccatcattctttgagcatttctttatattctggtacaaaaaagatgctccagga

SEQ ID NO: 228968 - DNA, 201 bp, Homo sapiens; identical to SEQ ID NO: 148594

SEQ ID NO: 228969 - DNA, 201 bp, Homo sapiens
tatggatttagctatcctaataggtatatactggtatgtcattgttttaatttgtaatcccctaatgacatatgatgttaatattttctaccattctgtgmcttgtcctttcattctcttaacagtattttttgtagagcaaaagttttaaattttaatacaattcaatttaaaattttttttgtagataattttttgttg

SEQ ID NO: 228970 - DNA, 201 bp, Homo sapiens
caggctgggcttgaactcctaacctcaggtgatccacccgcctcagcctcccaaagtgctgggattacaggcgtgagccacagcacccagcctggaatggwtttttattctttccctgtctcgtgttttcctgccttaaagagtataggtctttttttcctgtaggatgactctttctctggagcttccactgtttcttca

SEQ ID NO: 228971 - DNA, 201 bp, Homo sapiens; identical to SEQ ID NO: 148595

SEQ ID NO: 228972 - DNA, 201 bp, Homo sapiens
gttttcccttttccataatgtcatatggcagtatgtctgtaaggtgcctccacacctttttatggcataagagttcttttaaagaaaaaattgtagactartattctgtcgtatggatttgccacagtttgtttatacattctcgtgttgtgaaagacagattattatgaataaagtttctataagcttccctaagcagac

SEQ ID NO: 228973 - DNA, 201 bp, Homo sapiens
ttaagggtgttgatgaagggtgtggatgttatgggtggtgatttggaataacagaagaattatattacacctaacacttcaaaatttattcaacttttctycaacatccttcttttccctacaagttccattccctatggcaactgtttgcttgtttgcaagtactctctctcaatatctagcaatcagtttttctccttg

SEQ ID NO: 228974 - DNA, 201 bp, Homo sapiens
gatgctggatcagagactttgagggcacggtagccagccttccaggtggcttccagtgatccttaccttttaaaattctcctcctagtgacatctcctccyaccttgtattatgttacctctttgaccagtagaatacagtgaaagcaacagtgtgcgtcttcagagtctaggtcataaaatcttactcattttgggaaaa

SEQ ID NO: 228975 - DNA, 201 bp, Homo sapiens
gacccaggcacaaggcagcccactatagtaggaaaaaaagagatctttcgggttctatggacctgggctctgccatttactagctgggggatcatggatcrttactggattttcataccgtgctatttcaatgtataattcccaccttctggttcagagaaggagcttggggaatgtaaatattctttttccttctatttt

SEQ ID NO: 228976 - DNA, 201 bp, Homo sapiens
gcttgcttccccttcagccaagagtccattcttctcatcctgccagccagtcaagctctgtttcaagtttctgctcagtgccacgtcctccacagagcttygtccatcagactcccctctttcttcctcttctcttcagacccaggcacaaggcagcccactatagtaggaaaaaaagagatctttcgggttctatggacc

SEQ ID NO: 228977 - DNA, 201 bp, Homo sapiens
gcattttgaaaattgttgagattcttacaaatattagttattaatagcgcacacagcaaaattcaggttatctataagatcaaaacgtatttacaatattsatgctctctgatattgctctcactggcttcagaaatgtcattctggtggctgcagaggtgacttcctcagcagagtacacacttccttgccactataggc

SEQ ID NO: 228978 - DNA, 201 bp, Homo sapiens
tctcagcctggaaaaggagagcggggaacaaaggaggaacaatgtgagggaaggttctccttggcagcttcggggaagggatcctcaaaggagaggcacasgtctgaagacggaagtgtctgaggccaatcttctcttctcctggaaacaagcaaacaaataaaacaaaccccagtcattacaaagaaagccctttgaaaa

SEQ ID NO: 228979 - DNA, 201 bp, Homo sapiens
gtaggaatgaagaatatagaccttcagaaaaactgaacatgctcttcccctgctttctatgtgggcaatgtctcaatgtctcttttgatttttccaggctrtcatcctggtgtgaagcccatttactctttcactaaatttttctctgatagaggaaggttttgcaagctggactattggaagtgaaaagtagctttttaa

SEQ ID NO: 228980 - DNA, 201 bp, Homo sapiens
atagcaccctggaagtttgcactgagcccttccatctttcaggtgttgccttccttaaatgatgtctgaaaataaatgtttctgtgtgagtttggccccartgggtttggccttgagcttcagagaatgacattagggcacagaagtattgccagtgctgcctattccacagcctcccaatcagtataactgacgtctcaa

SEQ ID NO: 228981 - DNA, 201 bp, Homo sapiens
acctggtgggaatcatgggagcgggtttttcccgtgctgttcttgtgatagtgagtaagtctcacaagatctgatggttttataaagggcagctcccctgygcatggcctcttgcctgccaccatgtaagatgtgcctttgcttctcctttgcctttcaccatgattgtgaggtctcccccaccatgtggggctgtgagtc

SEQ ID NO: 228982 - DNA, 201 bp, Homo sapiens
tataggatcatatgacagcaaataagttatccgttgcaggcgttgtttcttcttatgcagcattgtgactttctccttcagggatacccaatggttttgartgctttcagcagataattagaccaaaccaccaataatttagaggacttgttatttgggacatcagtgagcactggagtagtctaaggggtgatgtgcgtc

SEQ ID NO: 228983 - DNA, 201 bp, Homo sapiens
gagaaggatttatgtttaaatactattaacattttcactgtgacagccatggtttaaaagactggtatttaaatataagatttaatgtatttctataatawtgctaatcccacagtattaattttttatgcttttaagtttgataacccaactcaccagtttagaaaatgtcatttcttccttggtttaatttttttcttt

SEQ ID NO: 228984 - DNA, 201 bp, Homo sapiens
acataaaggcttcccatttttcagctacataaagtaatataacacacatctcagcatcagacattaggattaacactgacaaggcttacgttaaaatgctytgctaggcagcatctctaaagtgaatagaatagctaacgtgcttgcacgatgaatgattcttcatggggagaaggatttatgtttaaatactattaacat

SEQ ID NO: 228985 - DNA, 201 bp, Homo sapiens
aattaatgagttactttaacaggagaaccatatttcatgtgccatctttcataaaactgtggtatataaaacagatgtagagggaactgctctggatgcastgaggatggagaaggcactggatccactttgatgctctctctccccgttcctgcctctgccgaacctcaggctctcactccccactctgaatttgatgaa

SEQ ID NO: 228986 - DNA, 201 bp, Homo sapiens
ctgaaatgtgctcatttattcaggggtttattgtctgtggctggtaaatatttgttgaattaatgagttactttaacaggagaaccatatttcatgtgccrtctttcataaaactgtggtatataaaacagatgtagagggaactgctctggatgcagtgaggatggagaaggcactggatccactttgatgctctctctc

SEQ ID NO: 228987 - DNA, 201 bp, Homo sapiens
gctgtctgtactggccacttcctctgcgtggaatggttcttcctggatctcacatggcttgctgtttctgcttattcatgactcagctcagattccccacyaaaccccagccaggctttccctgtcctctctgcaagtggcccttactccaggtactctctatctcatcatcatgcttgctggtctctgtatcgtctatca

SEQ ID NO: 228988 - DNA, 201 bp, Homo sapiens
cagttaaatttctaattggaacctcctgatacttctttttaaaaagcaattaaagtagaggcaaaaatattagtctgacattgaatcataaccactttaawtatatttagtcaatatgggtatttaatcatctcccgagagcaaacttttttttccttttataaggttactcttacagtttttaattgacaggatgtatat

SEQ ID NO: 228989 - DNA, 201 bp, Homo sapiens
aggctgtctgtactggccacttcctctgcgtggaatggttcttcctggatctcacatggcttgctgtttctgcttattcatgactcagctcagattccccmccaaaccccagccaggctttccctgtcctctctgcaagtggcccttactccaggtactctctatctcatcatcatgcttgctggtctctgtatcgtctat

SEQ ID NO: 228990 - DNA, 201 bp, Homo sapiens
cttagagataaaaatttaaaaaaagaatgaccaatatcttcaaaaaggaaaacataaaaacagcatcatttaattcccacagcatattgattcaaagtggscttcagttaaatttctaattggaacctcctgatacttctttttaaaaagcaattaaagtagaggcaaaaatattagtctgacattgaatcataaccactt

SEQ ID NO: 228991 - DNA, 201 bp, Homo sapiens
ctggaatgccccgaatgatctgccttcctcatcttttccatgcctctctttattcacccaatagcagttacattgccctttttctattcttggacacgttragcttgtttctgccttaggctgtctgtactggccacttcctctgcgtggaatggttcttcctggatctcacatggcttgctgtttctgcttattcatgac

SEQ ID NO: 228992 - DNA, 201 bp, Homo sapiens
aatcaacatggaggaatcacagctcagccagcgtgtgcttgcttccaaggccccaggtctctcagcctggaaaaggagagcggggaacaaaggaggaacamtgtgagggaaggttctccttggcagcttcggggaagggatcctcaaaggagaggcacaggtctgaagacggaagtgtctgaggccaatcttctcttctcc

SEQ ID NO: 228993 - DNA, 201 bp, Homo sapiens
catctgcttgctgtgacttgtaaactctgagtccccttatcctctagatttgaagcttctttggttaggttccaatctctcaaaactgacgtatcccctaktaaccaccagagggatcccatataatgtgataaaaattataatcaacatggaggaatcacagctcagccagcgtgtgcttgcttccaaggccccaggtct

SEQ ID NO: 228994 - DNA, 201 bp, Homo sapiens
ctattatttacgtgtatcttactgtaaatgactcaggattaaggagaaaaaaacaccatcttcctttgaagagaaagaagggaagctggtgtttctagcastctctgcgaaaggtagagattccttccacatccgtgaattaaccccacttaggagtgggcaccctgctatatttccattcccaaaccttgcacacgctgt

SEQ ID NO: 228995 - DNA, 201 bp, Homo sapiens
gcagctgtctccttgcagataatgggtgtggagtgttttctatggaagccaccacaggacactgacaagaggcaccaaatcctcagagcactctttacccmgacatgagcccaacaaagacctcttataaaagccaacatcagttgcttctgctttcacaaatattatcatgtttgttttcttctactcttctgattgctc

SEQ ID NO: 228996 - DNA, 201 bp, Homo sapiens
gagtctggaatgccccgaatgatctgccttcctcatcttttccatgcctctctttattcacccaatagcagttacattgccctttttctattcttggacaygttaagcttgtttctgccttaggctgtctgtactggccacttcctctgcgtggaatggttcttcctggatctcacatggcttgctgtttctgcttattca

SEQ ID NO: 228997 - DNA, 201 bp, Homo sapiens
tatgttcttgtgcctggaatctactctctgtgtggaagaactccgcaaaacagattttgtcatgcccccgttgtcaaccttccattggcttccaaccactrcacaatgacacccaaactccttgtttgagtctggaatgccccgaatgatctgccttcctcatcttttccatgcctctctttattcacccaatagcagtta

SEQ ID NO: 228998 - DNA, 201 bp, Homo sapiens
aatatgtgatatttggtcctgaattttagagcagttttgaatcacaaaatagttttctgtggctaaggcataccaaaaagctgaagctaatggaactcccsctggttctagataaaaggattaaggcaatcacacaagcagaaaaaggggaggatagtgagataaagtaatcacaaaataaagcaaaatgcataaatgcaa

SEQ ID NO: 228999 - DNA, 201 bp, Homo sapiens
tgtcaccagctctgtgtataaccttggtccgtaactttttcatggactcagtctcttcaactataacaaggttattagagtactctgccttctgaccacartaggtttatcttatgacttgagatggggagtacataccctaaggtggaggtggggagatgattttgtcctctataatctagagtgaaactctcaaaagtc

SEQ ID NO: 229000 - DNA, 201 bp, Homo sapiens
gcccccaatccaaacaaagtgaatggcttacagacacgagtggtaggattttcaccaatttagatataaaatgtgacaacggacagaatctacattcaatrtctgtatccttctcaattgccacagactgggtagtaggaaagcaaaagcaaatttttgtagtaaaaatcttcttggcattttatttttatagtagattag

SEQ ID NO: 229001 - DNA, 201 bp, Homo sapiens
aactgacttgtaacaaaacatgttgatagcaggatggtgtgattcaagacctcatatttgctttttatatcaagggatgcttgagctaattttcttttcasagtccattgataagtagcaatatcttgtattacacattccccattatcattttgacatacactgacagtcacatggagaaaacaattttttttttccgcg

SEQ ID NO: 229002 - DNA, 201 bp, Homo sapiens
acagcagcataaaaataaggctttgctgagtttgtcttctcatccgtctcttgactctttcttctactttgtactagaaataaagttctctgtggaggaaragtggggaggaacccctgctactggaaagtaatcctctttatctgtctgtctatctccgatatttgtggagaggagtatgtctttttgatataatggaat

SEQ ID NO: 229003 - DNA, 201 bp, Homo sapiens
atttgggcaggatagaaagcataatctttgagacccttatgtgtcctttattcttggctcatctggtagaaagagctaaactagttgagcttgttggttgmgaaaaacctattacttctaatcacaaaatcggtctgttagaaaagaggagccgtagtttcatttcataataaacttatttgaaaggcagtggagtgttgt

SEQ ID NO: 229004 - DNA, 201 bp, Homo sapiens
ctcctattacttcccactaaaggttaaaaacaacagcagcataaaaataaggctttgctgagtttgtcttctcatccgtctcttgactctttcttctactwtgtactagaaataaagttctctgtggaggaagagtggggaggaacccctgctactggaaagtaatcctctttatctgtctgtctatctccgatatttgtg

SEQ ID NO: 229005 - DNA, 201 bp, Homo sapiens
accatagtctgctgagttttgcgtactctagttctaatcaaaagtcagacaaagtcaaaagaatctggagttaataaaattctcctatttgttttccttcrcaacagtgatatgtcttagacttttacgctttaatacccctcatgaagacataccacagtactacatgtaggctagctttagaaaatcttggaattatgg

SEQ ID NO: 229006 - DNA, 201 bp, Homo sapiens
cccctgtactcatctaattcttggaccatgtagataagtttgaaataaatttcaaaataatttcaattacaaatttcatttgtaaatgagccctttgtttyctttctttcctctaatctgtgtccttgtgtgtttcaggaatacgtagagtgcttttgtcttgggggttgtgccttttaaggccaggttaggttggactgg

SEQ ID NO: 229007 - DNA, 201 bp, Homo sapiens
aatatagctgatgccaagaatagtcagcactcaataagtagcagctaaaaattggaagctatgattataattaattttactgcagaagaagaattcaaatmatctagatttgggtgaccataaagaagaaaactaagagtaaaatttccctggaattacagtgggcagctttcatctggtaactttaaattaaatggtatt

SEQ ID NO: 229008 - DNA, 201 bp, Homo sapiens
attagttattaatagcgcacacagcaaaattcaggttatctataagatcaaaacgtatttacaatattgatgctctctgatattgctctcactggcttcasaaatgtcattctggtggctgcagaggtgacttcctcagcagagtacacacttccttgccactataggcatagtatttgctaccctgtatcaaaaaattat

SEQ ID NO: 229009 - DNA, 201 bp, Homo sapiens
atcattttttaaagatttatgtgaatgtctgacattgataccaggaagataattgctacccaattcgaatgtgacattcagagcataccatttttctcccrttacagtgattggacaaggattaatatttgaattaaaacagagtaagatgcattatgtttagcgttacagctgttaaaacgcactttattagccatcgtt

SEQ ID NO: 229010 - DNA, 201 bp, Homo sapiens
cacagccaaaacatatcatatgccttttgtgggttagctaggtactgtgtatatgtctcttccttttaagaatataggccgatcactgtctgccatctgcratcttgctggttgtcatggcagaaagaaacaaatatggtaaattgtgcacgaactcataaaggcttccacctagaatgggatcatatctgttttccttca

SEQ ID NO: 229011 - DNA, 201 bp, Homo sapiens
caggcagaaaatactgttaaggggacatcgtccatttttaaaatatcgtacacagtaattaccattcactctgggaaagggtgagggggcagaagcaaacrtggtttaggacaggggtccccagcccctgcgtcatggaccagtccatggcctgttaggaacctggccacacagcaacaagtgagcagtgggcaattgagc

SEQ ID NO: 229012 - DNA, 201 bp, Homo sapiens
tgtctgccatctgcgatcttgctggttgtcatggcagaaagaaacaaatatggtaaattgtgcacgaactcataaaggcttccacctagaatgggatcatwtctgttttccttcattggccatggcaagccacatggccacatctaatttcaagggagcagggaagggcaaacttttcattcagcaggaagaagacaagct

SEQ ID NO: 229013 - DNA, 201 bp, Homo sapiens
tgtgaaacaaatgtacatctcagacattcgttgtcctttctaggaagaccctggtgtatttgaaactctgagttgatgacatgggagttcataaaatgctmgggagatttcggccatgtttggctgagaccttctgaaaggagacaaacatgtaaatgaagtcaagtttgcagacctctgggatccattacagcctgagat

SEQ ID NO: 229014 - DNA, 201 bp, Homo sapiens
gagaatcatattgcacttcccagggggtgggtttgaggaaaccacatgaagaggcaaaactgcagctgtctccttgcagataatgggtgtggagtgttttmtatggaagccaccacaggacactgacaagaggcaccaaatcctcagagcactctttaccccgacatgagcccaacaaagacctcttataaaagccaacat

SEQ ID NO: 229015 - DNA, 201 bp, Homo sapiens
aggaatctgttctctgatagctaattgttgcttctgattacaaaggtgcagacagagccaggggccattgttgttgcatttccttccattgttgcaagccyttctttctccagctgaagtgacttccaggggatttaaagggctagcactcttttccttttgttttcattttttttcttttccccttttgtgtttggagcc

SEQ ID NO: 229016 - DNA, 201 bp, Homo sapiens
ggatactatgttacaggattgtagtagggctacatttgttaacatataagagagcattttgaaaattgttgagattcttacaaatattagttattaatagygcacacagcaaaattcaggttatctataagatcaaaacgtatttacaatattgatgctctctgatattgctctcactggcttcagaaatgtcattctggt

SEQ ID NO: 229017 - DNA, 201 bp, Homo sapiens
ctaatctctcaaagactctttacccactgaacccagacacagcctccaagtagcttcctggctggctgtcattatcagttctttggagtgggcaaataaartgaaactttggtgttattcctgctagcctgtaaaacttattatgtgagcttagccttgtcacccaaatactctaagccccattatcctcatctgaaaaat

SEQ ID NO: 229018 - DNA, 201 bp, Homo sapiens
cttggttttgcctgtaattcccatgcatttatcaccgctgtttagatgtgtattatctctgtaacacgtatcacaaattgactcttcttgtcttcagtgcrcaagagaaacagactttgcctccaaaatgtcagctagtttctgttctgggaggttacctcttttaaatgtggatacttgtgagaaacaactctatgtgga

SEQ ID NO: 229019 - DNA, 201 bp, Homo sapiens
agatacatctaatctttggaaactttgtatcaccttggttttgcctgtaattcccatgcatttatcaccgctgtttagatgtgtattatctctgtaacacrtatcacaaattgactcttcttgtcttcagtgcgcaagagaaacagactttgcctccaaaatgtcagctagtttctgttctgggaggttacctcttttaaa

SEQ ID NO: 229020 - DNA, 201 bp, Homo sapiens
aaatgttttactccagcttcatcctttagtcagcagtcactactactagtagctctggactcaggcagaaaatactgttaaggggacatcgtccatttttwaaatatcgtacacagtaattaccattcactctgggaaagggtgagggggcagaagcaaacatggtttaggacaggggtccccagcccctgcgtcatggac

SEQ ID NO: 229021 - DNA, 201 bp, Homo sapiens
acatccataactcttcagagttcttttttttaaaaactatatatccattcaaaatatgactctcactatgcaacctggtggaaaactctgcatttggcctygaaattcttctgttaataacagacattgttctcagaaaaggccattccctctggaatttcaaagattcaattatgcagtgaattttctcctttaccaaag

SEQ ID NO: 229022 - DNA, 201 bp, Homo sapiens
agctgagggaaaacataaccttgtgaaattcttcttccagaaagcatttttacatttctcttcttcagcaatggggagatgtgggtcacagcacaggaaakgttttactccagcttcatcctttagtcagcagtcactactactagtagctctggactcaggcagaaaatactgttaaggggacatcgtccatttttaaaa

SEQ ID NO: 229023 - DNA, 201 bp, Homo sapiens
tgtgacttctccaaaagccacattctttttgacctttgtccatgttattttattgtatcatctagcttcagattcatgcagtgatctttaaatacttctgwatagctcttttccccacatttctgcagttaccaagtcctatatagtcttccttcacaacttctttgtcatgtatttacttctatttttatggccacggct

SEQ ID NO: 229024 - DNA, 201 bp, Homo sapiens
gtcttgttagaatcctctagtagtggttcagattgccaggggtctctagtgaggaacacggtattttctgtacacagggaggctgctttcagctgtttttwaaagctaatggctaatggctagaacactcagctagagaacagtgatcacaaaagcttcgataaatgttaaaatggttagctaaattagaaaaaaaaaagt

SEQ ID NO: 229025 - DNA, 201 bp, Homo sapiens
aacaagatctcttttcatgggaaaattgatatgtcaactttgtaccttctgagcctgatgtgctggctgtacaagttggagcccccaacaaggagctaggkatgtgggtctggagcccagggaagacaggttagtgggacccttgcccagaattcacttctgcatctaagctcaggctacacagcttatcatgtcatcatc

SEQ ID NO: 229026 - DNA, 201 bp, Homo sapiens
gtcaaaacaagatctcttttcatgggaaaattgatatgtcaactttgtaccttctgagcctgatgtgctggctgtacaagttggagcccccaacaaggagmtagggatgtgggtctggagcccagggaagacaggttagtgggacccttgcccagaattcacttctgcatctaagctcaggctacacagcttatcatgtca

SEQ ID NO: 229027 - DNA, 201 bp, Homo sapiens
gccattcaaggctcatgagcagggaagtgttttgttagaagttggtttgtttcctgctgtctttaatacccagcacaatgtcaggcatatagtaaatgatsagtaaatacattgtccatctacccatccatccatccagaaaatattacctgaatagccaccatgtgcctggtagagtactgagatttgaatgtggaggta

SEQ ID NO: 229028 - DNA, 201 bp, Homo sapiens
tgcattgttcattgaacaatattctctatttgcttttctgtccactggtaaagaatgtcttgttagaatcctctagtagtggttcagattgccaggggtcyctagtgaggaacacggtattttctgtacacagggaggctgctttcagctgttttttaaagctaatggctaatggctagaacactcagctagagaacagtg

SEQ ID NO: 229029 - DNA, 201 bp, Homo sapiens
aacttttcattcagcaggaagaagacaagctagaaatatttgttgatggctcttaaaactaccgcaggcaccttgccaatgggtgagcaggagctgaattygagctgcaatgctttggttaagcaatgagctctggctcagagcttcatctgcctggaagaaggagcacctttttttatcctttataagaaggtacttcag

SEQ ID NO: 229030 - DNA, 201 bp, Homo sapiens
actgttcttccctccttctcatctcctgcctggagtctatcacacaaactcactgaagccaggggggccaggggggccagggaagcttgttggagttcacrgaggccagactcctggggtacagagcacagtggagcagagtggggagtgatggggacaggagatacacagcgcagaggctttacagtgacaccattaaaa

SEQ ID NO: 229031 - DNA, 201 bp, Homo sapiens
aataccatagccatgattaaaaccaagacatagactaccatagccatgattaaaaccaagacatagactaccatagccatgattaaaaccaagacatagamtaccatagccatgattaaaaccaggcatgggaaatccattctggggctgcacagctcccactgtcttattcttagctgccgtaagctactccttgactgg

SEQ ID NO: 229032 - DNA, 201 bp, Homo sapiens
agccatgattaaaaccaagacatagactaccatagccatgattaaaaccaagacatagactaccatagccatgattaaaaccaggcatgggaaatccattytggggctgcacagctcccactgtcttattcttagctgccgtaagctactccttgactggctgaaggccattttctctcttctggttgaccttggcgcccc

SEQ ID NO: 229033 - DNA, 201 bp, Homo sapiens
gggttatagcctcccattttacagatgaagtaactgagcccacactggtaacatcggatactatgcttcttgcaataacacagaactacagcccaaagcartgtttctttgggaccagaatgcctggtcttaaataccagcaaccccatcctgcttcattggtacagtcagacaaaagcagtcatactgttcgaagagcag

SEQ ID NO: 229034 - DNA, 201 bp, Homo sapiens
actagcagaaacacagcagtgttaattaagttgccttgttaaatctgaaagaatgtacatagttaacgttggaaacccttctaattgcctttgtggaaagrcatcaaagggatctacaagcatcttgtttagagaagtgctgaggcttgagcttgggccaatgggacctttgggaaaaactcctggggaggtggagggtgg

SEQ ID NO: 229035 - DNA, 201 bp, Homo sapiens
ctcaataatatcttcaagttttttcaagctcataattacactctttgttctattggtcctgtctcttacagacctccattttgctcccatttggacaggtkgctctgtagacatgctgtgtagaatcatcctgagatgtccccattgctctccagggttggagtcactgtttgctggattgaatgggttttctttcttttc

SEQ ID NO: 229036 - DNA, 201 bp, Homo sapiens
cctcggctgcagtaacaaacaacccccaaataaacaaatatttatttctcatttatgagtctgtggttggcagcacttcttcttggctctattctgtgcawctcttattccaagacctaggctgaagcagagaagccctcatcggggccatgctattcacaatgcagaggacaaaaatgcagaaagttaagccttgcaacc

SEQ ID NO: 229037 - DNA, 201 bp, Homo sapiens
ttgtgctgcctcctttttcctttctgtgtctctggatattgtgtggacatagatatggcaatatagctgtattagttcattttcacactgctataaagaaytatgtgagactggaatagtttataagtaaagaggtttagtggactcaccattcctcatggctggggaggcctcaggaaacttatagtcatggtggaaggc

SEQ ID NO: 229038 - DNA, 201 bp, Homo sapiens
tcctggaaccaatttcccatagataccaagggatgactgtattggttcagggaaaggtgacttaaaattaatcaggcttctatactccaggactactcagscatttttagataatagaataatgtgttctgagaattgccagatggagcctgtacaaagaagtgtctcctaagcaaatccaaaaaactgaactcttttttt

SEQ ID NO: 229039 - DNA, 201 bp, Homo sapiens
aaaacgaaatgaagggagggtaaggacagctcaaagatcctgaggccttttgccagtttgcacacgtagagggaggccaaaagcctgactggcaaaaaaamctttacccttttgctggcacgttgggcttctgggtccccttcccctgagcccaatcctaagctaaccagtttaaggtttgggaaactaactctttctagt

SEQ ID NO: 229040 - DNA, 201 bp, Homo sapiens
actttcattctaaggaatgcaattttagaaatactacactgaactgtgacttcttcagggataaggatcttgtcttgcttatctctgtgttcctactaccwagcccagtacctggcatatactaacatttattgacttgatcaaggtgatgtggggagaaagatctgttttcaactgtagttcctatcatcatctcagtgt

SEQ ID NO: 229041 - DNA, 201 bp, Homo sapiens
tatattataccatacattataccacactgaaataaatcaaagtacagattcagtttggaaatttcaatggttgctttttctggtccaacacagccatcccmacttgtgcctgagggctacagaaagtgcttttcaaaggaggtacattttgctagatcctaatgaatggataagaaggagaaggagaaagggcatttcagg

SEQ ID NO: 229042 - DNA, 201 bp, Homo sapiens; identical to SEQ ID NO: 148593

SEQ ID NO: 229043 - DNA, 201 bp, Homo sapiens
agaagataataaagccagctactgacctctctgaatctcagtgccctcatctgtaagatagaatcagctagctactttatagcatttttccaggattaaaygagacatgtaaaatagaaaacaaacaaacaagcaaacaaagaaaagataaggaacatgctgagaaaaaaatatagacaccccttgtttgatgttactaat

SEQ ID NO: 229044 - DNA, 201 bp, Homo sapiens
ttttaaccaggtgtcttggcatttcgtgaatacagcatgagccctttgcattaacacatggcacgaaattgttttttggccagagaagaagttggatcgayggacttgagagctttgaacttctttttgaggcatttggggttagaatgacgtagaaggggatctttggaacatgaaactttttgagaaaagctgtaaata

SEQ ID NO: 229045 - DNA, 201 bp, Homo sapiens
ggcaaaaaaaaaaaaatgaaaaacacaaaacctaagcaagcagccggatgaagtctcctgacctccctcccttctttcccaagcccacggtcctaaccccrtaatatcgtacgtttcagtctgtgagggaataagcagggagcagcgggcatcttctagatccctggaccagcagcatcagcatcacctgggaacttggaa

SEQ ID NO: 229046 - DNA, 201 bp, Homo sapiens
tgtcagtgttggatcaaagcactcttctcctctggacaggaaacaaagcagaaagaataaactggatgcacctcctatctccagaggtaactaaaaagatrcacctgggaaggaccactctaataagggtttttgatgaaatggatcagagtcaaaaagggaagcacttgccgaaataggagatgcttctaaaaactcttg

SEQ ID NO: 229047 - DNA, 201 bp, Homo sapiens
tgaatcttggccaaaaatattgttaattcaagtgtatatctataaacttaacacaggtgacgtaagtttttctagcagctcttccttttacatattatgartaaaatggcaccaggtgtgaggaattgagattcaaagctctcggacataggcagcgaatcatgtactcctatagcggatacttttgtctattaggataat

SEQ ID NO: 229048 - DNA, 201 bp, Homo sapiens
agggcacttaccatggatggagcttagactggaagttgctcaggatgagtcagtacataagtgatgagtgcatgtgaagggctaagatattactgtatgcytctgtagactttataaacatgatacacttaggctatgctaaatttgtttaaaaacattgatgaagaaggaggattgcttgaggctgggagcttaagacca

SEQ ID NO: 229049 - DNA, 201 bp, Homo sapiens
cccatgacagaagactgttggttgtcaaagacatgtttttaatatctaagcatataaagaaaatgagagtgaattttaggattcttcaggaggaataacamtatacaaatgtgaaactgttgcagaattgccagaacatttgttttgtttccacagttttctttttccttaggcatgcttaaatattttttttcagttata

SEQ ID NO: 229050 - DNA, 201 bp, Homo sapiens
ctctctgcagcttgtttataagctcaggctttatggtatgaaagaataggaagtgtcactagcaggaccgtgccaatttttacataattgtgaagattctkttgggaaaataaattagaattgtaatgaggtatgtacagaaagctccatttgatttatctgttagataaacattttgagctaaaaaaaaaaaaaaaaccc

SEQ ID NO: 229051 - DNA, 201 bp, Homo sapiens
ttatattatgttttcataactgcagtgaaatgcaaccacagagaggggaaatatgccaagtacaatcagtcattccttttattatactagtttttaaaggrgaggaagtgctcatggctgcatttatatgaggcagattttttctaataatggtacaactattaacctaaaatataactacttattccttattaatttggc

SEQ ID NO: 229052 - DNA, 201 bp, Homo sapiens
aatttgtggcctctcctgatgaactgtacaatgtaatagctactagctacaagtgattactagctacagggtggtatttaaaatgtaaagtttaaatttartttttaaatgtaaaattaaaattaaaacaaaatgcaattaaatatggttgattacatcagccatatttcaagtgctcagtagccacatatggctagtggc

SEQ ID NO: 229053 - DNA, 201 bp, Homo sapiens
taggctaggaaacaacattgtcagggcccaagaactgacatctcttccaacactcttgttcagagaccatttgggtaaaagtacatgatgcatttaagccmttctggagataccgccacaatgcagtgatgtatgtaatgaaaatgcctctctctgcagcttgtttataagctcaggctttatggtatgaaagaataggaa

SEQ ID NO: 229054 - DNA, 201 bp, Homo sapiens
gggggcttgtgatgctctgaagtttgaaaatgactgccttataggaatagtgaagcccactttccacactaaaatgatttttagtaatgagctattgcccrtacccccttcctttgtgtctcttaaaagacatttttattcacaaattctaatcaaagggtaaataatcaaatatgtttaaaaaagatccaaatacttggc

SEQ ID NO: 229055 - DNA, 201 bp, Homo sapiens
gtctcctatatttgcttatgagtacactgaaaacagacaagctatattttttgcattacccatagtgctttccatattcagttagtgtgtaacaaatgtastttatgggtaaacctgtgttcaaagggcaggaaatagataataagcaaatttgctgattttatttaatttattccacaaatacatagcagcttccttatg

SEQ ID NO: 229056 - DNA, 201 bp, Homo sapiens
aaggaggtaggaatattccacatttctcagactttttaggctaggaaacaacattgtcagggcccaagaactgacatctcttccaacactcttgttcagakaccatttgggtaaaagtacatgatgcatttaagccattctggagataccgccacaatgcagtgatgtatgtaatgaaaatgcctctctctgcagcttgtt

SEQ ID NO: 229057 - DNA, 201 bp, Homo sapiens
tttgatatgtaaatgtctacttaagcatgtatgtgaatatgaatacatatttgcatctttgtgatgtctcctatatttgcttatgagtacactgaaaacasacaagctatattttttgcattacccatagtgctttccatattcagttagtgtgtaacaaatgtagtttatgggtaaacctgtgttcaaagggcaggaaat

SEQ ID NO: 229058 - DNA, 201 bp, Homo sapiens
aagagggtggtggtgaaggggtggtgctctatgctcaggtaaatttggaaggttggcttaaagatgaatacgtctcttcattttctgacttctcacagaargaggtaggaatattccacatttctcagactttttaggctaggaaacaacattgtcagggcccaagaactgacatctcttccaacactcttgttcagagac

SEQ ID NO: 229059 - DNA, 201 bp, Homo sapiens
tgagctagggagacggcttatacactcaacctgatcatgtccatttcctgctttaaaaacctttcatggcttcccattgtttttaacagaaagttctgatrtcctaagatggcctctgagctcctatgatggtggctctgcttattctctgcctagtctcacactatcgtgccttgctctctgtactgcaaccacactgac

SEQ ID NO: 229060 - DNA, 201 bp, Homo sapiens
ggtactaggcactgttctaggctctttacaaaggctgtctgacttcatctgtccacaaccttctggggcagatattactattattcccacaccaccccccsacaccaccaccattttacattgcagaaaacagtgcagagaggttttgtaacttgcccagagtcctataggtaatggatgctggaggcagtattccaaccc

SEQ ID NO: 229061 - DNA, 201 bp, Homo sapiens
tggttgaccttggcgcccctactttctgggtgtctttatgaggtcttccttcttctatgagagtttgatccaaaagatacatagcccttattgacagggtyatccccaaaatacctggccttgtggaaatgtccttgccctagaattgcaccgtttttttaattcaacaagcctttactaaggacaaggcctatactcagc

SEQ ID NO: 229062 - DNA, 201 bp, Homo sapiens
tgtgctagttatgaaggctagaggggtggaggcttttcaaaagcaggagtgggacagcgagagtgaatgactgtggagagcagtgaggaaaatggagacaraatgacttctggaatctgattctgagagagaggatgggagatgatggcaagatgatggtgatggtggcaatgactgcagctaacatttgccccaggctta

SEQ ID NO: 229063 - DNA, 201 bp, Homo sapiens
gtgattaatttgtatttttgaataatggaatggagattgccataggaaagaaccatgagacattcttaagcaacacagtaaatatgcgtagaacagctcaratccctttggatttagatgcagaggacttctattgttgttttccctacgagtgaaggataatttcacagagaataatgtgtttgtgcagaaaatttaatg

SEQ ID NO: 229064 - DNA, 201 bp, Homo sapiens
tatgtccatatatacacacacatatatatgtgtgtgtgtccatatatatatacacacacacacatatatacatatttatatgtatatgtatatatttaggrcagaaatgcttggtgatcctccatgttctttccctttaatacatggctcactgcaatttacaggagccaagtataaaaaaaaaaaagactaacatggtgt

SEQ ID NO: 229065 - DNA, 201 bp, Homo sapiens
agtagctccactgtgcttggccaggtagacgccttgggactgtttctgtgctgtcccagtggcatgtgaggaacacagcaagggatacaacaggtggaaasaaaaggtccaggaagaaggaatagaaataatgaggaaagaatacagttggaaggactggcctcaaataggggagaaacagttcatctacagaaacacagc

SEQ ID NO: 229066 - DNA, 201 bp, Homo sapiens
ttgtggttgatagatttgttttgttttgggaggtccttcaacctgtagaaattatatgtgaacatttatgtgtatgtgcattttcctcagggttctattakaatctaacagggggcttgtgatgctctgaagtttgaaaatgactgccttataggaatagtgaagcccactttccacactaaaatgatttttagtaatgag

SEQ ID NO: 229067 - DNA, 201 bp, Homo sapiens
atttgtctgaagaaaaaaatggttatatgcaaaggaagtgagggtgatttgaagtcttcatagagccagttttttacactggagtttgtggttgatagatwtgttttgttttgggaggtccttcaacctgtagaaattatatgtgaacatttatgtgtatgtgcattttcctcagggttctattagaatctaacagggggc

SEQ ID NO: 229068 - DNA, 201 bp, Homo sapiens
gggtgtttcaatagtatgattcctgaaatttgtttcataaacgatattaactttatacttccaaacatgttaaagtgtgaatatgttttaaatgttttgtyttccatatctaaatgtattttaagacttttacattttgcatttcctaccagcagtgtgttttatactgaatgcaggcatttcaaaagactcctattttga

SEQ ID NO: 229069 - DNA, 201 bp, Homo sapiens
ggctgaattgaagctacaaacctgatgtcactgcacagacttggaaagagacgtgcggtagcacactactgagagtatttccaccacaagatacaatagaygttgatatggtttggctgtgtccccacccaaatctcatgttgaatagtagctcccatgattctcatgtgttgtgagacggaccctgtaagagataattga

SEQ ID NO: 229070 - DNA, 201 bp, Homo sapiens
ttttgttcctgcggtcactgtatccttcagactatcttcagtggagaggacacatggcagcccctcgtgctcaatgctgcttcctgtttcttcagcaataytttcagtgtctgaagatgaggttgaaccatgatgaagctgtgatctccagtggctgagcccaatgctcatcctgtttcctcttctgaacatatatagaaa

SEQ ID NO: 229071 - DNA, 201 bp, Homo sapiens
tttctagaagccctttagggctgtttctgagggcatttttgttcctgcggtcactgtatccttcagactatcttcagtggagaggacacatggcagccccycgtgctcaatgctgcttcctgtttcttcagcaatactttcagtgtctgaagatgaggttgaaccatgatgaagctgtgatctccagtggctgagcccaat

SEQ ID NO: 229072 - DNA, 201 bp, Homo sapiens
gataaaccttcttctcttcttgaattacccagcctcaggtatttctttatggtgacaactaaacagactgagacagtaacataatacctgcacagtgtctrgtaaatagttggtcctaattcagtgggagtgaagtttgttctttcctctgactgtaggagctgggatgctcaggtgaaatgtggcctcaggctcacctgg

SEQ ID NO: 229073 - DNA, 201 bp, Homo sapiens
ccatgttgttactttcccccttccaagcctccctgctccatacacacttagccaaccagccagccaaagttatttactgactgcttaggtactcacttctytgagtgccacaggaatgcaaattccatgaggtcaggggccacatttgtctggttctctggtagccctgcagcaccatttctgacaaatagttggttctca

SEQ ID NO: 229074 - DNA, 201 bp, Homo sapiens
cccttttagtccttccataaaaatcagaaatatttgtcatttcctcagtaggttgtaatcttgtgaattcctttaattgttcaggaaactgcagttattaktgatctttcatttctctaaagagtttcttttcggccgggcgcggtggctcacgcctgtaatcccagcactttgggaggccgaggcgggcggatcacgagg

SEQ ID NO: 229075 - DNA, 201 bp, Homo sapiens
cactgctactgttcttgctctggttcgtttttaatatgagataggaagagatgggggatctgcgaggctatgtcacttgataaagtcaaaagtgaattagrctgaagttcaaattctgggtctttggcttattatctaggaatccctgcacaattgcttttctttccatgttgttactttcccccttccaagcctccctgc

SEQ ID NO: 229076 - DNA, 201 bp, Homo sapiens
tgtcagggggctctgcttattgtagtcattcagatagacccaggctgagggagccactaacatcctctagttaccccagagcatgtgaacttttgggggasaaagattggagaattaaacatagttttttctttgacttaagaaatgaaacatgttactttttctcgtgccccactaagtagagctagtcacatgatcctg

SEQ ID NO: 229077 - DNA, 201 bp, Homo sapiens
agatagttttgagggagctgtcagcaagagataggtcagtgaaacagccagcgacagctacactaagcatcctgaattgattctacggataagagtgagcsagcagtggttctgagttgggagagcctctgctttcctataaaattgttaattgttatccagtttgtaaagaaaacttaaatactaaatcattaggccaac

SEQ ID NO: 229078 - DNA, 201 bp, Homo sapiens
tcatcccaggttagtagggaaaaattaagacaaagggtattactgagaataggatggtgctctggtttgaatgtgtttccaaagtttatgtgttagaaacrtaatccccagaacaacagtattgacagatgggaacttgaagaggtgattaggttatgagggccctgctgtcatgaatgaattgatgttgttatcatggga

SEQ ID NO: 229079 - DNA, 201 bp, Homo sapiens
atgtgtactttaaaatggtatagtagtatttatactttcaatatatattttttgagacagagtctcactcaccgtgtcacccaggctggagtgcagtggcrtgatctctgctcactgcaacctctgcctcttgggttcaagagattcttgtgcctcagcctcctgaatagctggggttactggtgtacaccaccacatctg

SEQ ID NO: 229080 - DNA, 201 bp, Homo sapiens
tcccactgaattataaccagtgttctctggaattcgtagctttatacacactgtccacttctctatgccaccatttccaatgggggtattaaaaatatctrtgtcgtgtatggtattattttaataaatgtttatttcattttcaaagatggcagagaataacattatagagcatttgtccctggaaaaggtaatacgttt

SEQ ID NO: 229081 - DNA, 201 bp, Homo sapiens
taggcccatccaggaaagggtgtacatcacttctgccacattccattgatcggaactcagtcatttggacccacgtaactccactgaagcttggaaatgcsgtctacctgtgtgcatgggtggaaatgcggtctacctgtgcacatgggtgaatactaataatctctgctagaaaaactgaaaacagcagcaaaacaatat

SEQ ID NO: 229082 - DNA, 201 bp, Homo sapiens
ttccccagcagattttcactggcttcaagatggtctgagagaatgagtagttggccatgggatgggaacaggcaggagaaaaaggtgttaggaatgagcamtgggcaaactgagcagagtttcctgctacaggaagctctgtagatgtgtaattcagtgcaaaataaaaactcaatagactgacttgagaagcatcttgcc

SEQ ID NO: 229083 - DNA, 201 bp, Homo sapiens
tagcctgctacacatgggtaagaaattagtgacagtaactgtgctacaaagttgaaaccgctaagtaacatgggatggtggtctctgataaagggccatgraagtgtggggaaggaagtgaccacctgatatggggccatcagaaaggcttcctatcgaggttcaactcctgtccctgtggctaatgagactatgggcagt

SEQ ID NO: 229084 - DNA, 201 bp, Homo sapiens
ggaagtgggtttgccatccttatcaaagggcccctataggtgtctgagttggtaacctcagtggggccacaaaaataagacattatcttataattacacasttgcattttggctctctgaatgggaatgatggggaatctgcaagaatgggggagtacttctgttcaagtgagatgtcaagatttcaccttgcccatcctt

SEQ ID NO: 229085 - DNA, 201 bp, Homo sapiens
tttttaaagggggataatctggtgacatgatgcaccttcctgtgagctggcaatatgctgaaggaagtgggtttgccatccttatcaaagggcccctatakgtgtctgagttggtaacctcagtggggccacaaaaataagacattatcttataattacacagttgcattttggctctctgaatgggaatgatggggaatc

SEQ ID NO: 229086 - DNA, 201 bp, Homo sapiens
aaagtgagaaagaagtcaggataaaaggagagggctcacagtgtcttgaaaagcttccaaactcctggctctttgtagctcccatagctgctgggatcatwgtttaaatcggaaagtagaacacaatagtcagaagtacataatactaaccagacgtggtggctcccgtctgtaatgccagcactttgggaggctgaggcg

SEQ ID NO: 229087 - DNA, 201 bp, Homo sapiens
cttgctgccttttgaaacactcaggaaatatagttggctaaaactgaacaaacaataaaccttaggcattgaatggagttggagaaaatgcggtgctttakcatattttaactgttaatgtgcaacccaaatgtccctggaccctgaagggcatatccacatgtcctcaggagttaaagtcagattacaaccttccctcca

SEQ ID NO: 229088 - DNA, 201 bp, Homo sapiens
gaggagaaagaatacaggaggaggggacatttgtgaggaaagcatctactttttagcagaaattcaaattctaaaggagatgggtgcttctgcagaagaarggatgtgtcagagggaaatggtctcaaatgtccctaggacaccctcagaggggacgtttgatcagggaaagtgcaatatcacacagttatggacagtgcc

SEQ ID NO: 229089 - DNA, 201 bp, Homo sapiens
ttcaaagcagtctgtactgccttgatattggagatattgcatcaactttctgcccaaatactaattgttaatttggttgattaggtcttgatgggtaatcytgtggtgctggtttcaagtgaccataatttagaatctattgactctaagtttcttcaagtaatgcctgttaaatcttcccccccaaaaaaaagaaagaaa

SEQ ID NO: 229090 - DNA, 201 bp, Homo sapiens
ctcaaaaaataaaataacattgcatttcacccattcatgatagcactatcaatatttcagtgtgtggctttttttccattgtttttattgcatgcatattwgttctgttagttttctaacagaaaatggacacatttttctaaatttggataatactttacatacagttttgttttctgttttcactcgtcaatatattgt

SEQ ID NO: 229091 - DNA, 201 bp, Homo sapiens
tggctttttttccattgtttttattgcatgcatatttgttctgttagttttctaacagaaaatggacacatttttctaaatttggataatactttacatayagttttgttttctgttttcactcgtcaatatattgtatgcattttcccatggcattaatgtctacagagtattccactgttagaacatgacattattttt

SEQ ID NO: 229092 - DNA, 201 bp, Homo sapiens
gaacctttgaaacaattgggactggatggatgtcagacagtatgaattagaaaggctggactgcctcttgatgcctggtgtctagtcccatttttattggycagtgcccaagcattgttgaatatctttgaatatcatcccaggttagtagggaaaaattaagacaaagggtattactgagaataggatggtgctctggtt

SEQ ID NO: 229093 - DNA, 201 bp, Homo sapiens
ggagacatttccaggagtgggaatgctgggccacgttgtaaagctgtaggagtagctgcctggtttttctttgcagcaagcagtgctcccctatggatctmgaatcctcactaacagcttctcctgggctctacttcccaggagcttcagagaagagaatacagagccagaagctagtggggcaattaaccacatcagtct

SEQ ID NO: 229094 - DNA, 201 bp, Homo sapiens
ctcctctctgttataaggagggtaagtttttctcaagaatgcaaatcacttggccatggttgcctagtgagtcagagaccatgctaagggtctcaccttcrtgatgtaatttgagggtatggggaggcttcatttatctgaggatagttttcctaatggcctgtggtacgtgtgctagaattatgattagagattcatgac

SEQ ID NO: 229095 - DNA, 201 bp, Homo sapiens
gacatttccaggagtgggaatgctgggccacgttgtaaagctgtaggagtagctgcctggtttttctttgcagcaagcagtgctcccctatggatctagartcctcactaacagcttctcctgggctctacttcccaggagcttcagagaagagaatacagagccagaagctagtggggcaattaaccacatcagtcttca

SEQ ID NO: 229096 - DNA, 201 bp, Homo sapiens
aatcagtggaaatggtattgtccagctgctttgttttattttcctttttccttttacaaaggcagttagaacacacttcctacaaaaatgctgttcagcgmacttataatgttgccatattgctggtcccagactttcacccttggggacattctcctatttctccattaatgggagatgcttttgaggatcagttctagg

SEQ ID NO: 229097 - DNA, 201 bp, Homo sapiens
aagttttacacttgagttgaggagcagattctgaaacacagatagcctgatgggcaaaagacaagccacaactctactctgcaatgccaattagcaacaayggcaattagtcctcctggttatgatgctaatgtttatgaagtgtaaattatgtgctagacattgtgaaagttgccttaatttatttaatgttcataataa

SEQ ID NO: 229098 - DNA, 201 bp, Homo sapiens
tagatagttctagattcacatgcagttgtaagaactagtatagagagattcatgcctatgcgttacccaatttctcttcatgataacattttgtaaaactrtagcatcatatttactagcgactcattttatttagatttttccattttactgttgtgaacatttagttctatatgattttaccagtgagtatttttaaat

SEQ ID NO: 229099 - DNA, 201 bp, Homo sapiens
attgttttaagtcaagaatgtaccaaattgatcactttgcaatgccctgaaaatatgaatcattgaaagactttttgatctttcacggtccaaacatactrcagaaccaccatcgcaacacatcacatcttggtggtagagtctatccagttcactgattcaatcatataaagaactgtgtagatttgacttgtcccactc

SEQ ID NO: 229100 - DNA, 201 bp, Homo sapiens
atcacagaatattagtgtaggaatcaaatttaatagattgttctgtgatataccagttccaaaactttagaatttcagaggctgtaaacataatttttgarttaggaagtgagataggatgggagctgacataggattgctaacttttaattctgccaagcaaagacatttaaaaaattattattttttaaatttttctca

SEQ ID NO: 229101 - DNA, 201 bp, Homo sapiens
tcatggaaggagagaagcaagtggattctagaaatatgttggtgctggtcaagttgacgtaacttattgttaggttctggatgtggcatcagttacttctmtagggaagatagggaatgaaggaagtgggacagatttattggaagtgtctgatgtgctagatgcccaaataagcaaagtcatgttctgatatgtcttctc

SEQ ID NO: 229102 - DNA, 201 bp, Homo sapiens
tcatgccatgctggtccacactgctgaaccatatttggaaacttacaaaatcattgctatggttatgtattaagaattagtaaaattatttcattatactytcattatttcattgtctctttgcttgtaacagatttaaaaatataggatgaactttaatttagtactcataaagagaacgagggagatttatactaacaa

SEQ ID NO: 229103 - DNA, 201 bp, Homo sapiens
agggccttgggccaggatatttaactgggtggagaggtgacgaggaaaataagagctagtttaataaggtttgtttgtacagagttctcttggtctcagtrtcccgcccttgatgataagaatgttactttccttctggtgtcaggagaatattttccatacagggattttagctcttgcttttatgaagaaaaagaagag

SEQ ID NO: 229104 - DNA, 201 bp, Homo sapiens
attgcagaaagttcttttagactcagctgtggtgtaaataaggacacagataccccaagactatataaactttagaaccctgcaagttttggggatgttgytggagtgataagaactgcagttggaaaggtgggtgggaggcagaccaagaggaactgcatgtgctaattcagcatggtttgtcacagcctctgactttgc

SEQ ID NO: 229105 - DNA, 201 bp, Homo sapiens
gagataggtcagtgaaacagccagcgacagctacactaagcatcctgaattgattctacggataagagtgagccagcagtggttctgagttgggagagccyctgctttcctataaaattgttaattgttatccagtttgtaaagaaaacttaaatactaaatcattaggccaacatcataaaaagaaatgatggagcaaga

SEQ ID NO: 229106 - DNA, 201 bp, Homo sapiens
tgttctagacttccagagccgctaaaacaattcttcctaaagagctggtgaaatcctttttagggaatatcaatatacagattgcattccaagtttttgtstggatcacagatgaatagacagggagagatgaatgtcctgggggaacactatcatggtgctttttaaatcatcctgttgcacttaggcattgcagcctgt

SEQ ID NO: 229107 - DNA, 201 bp, Homo sapiens
tcagtgaaacagccagcgacagctacactaagcatcctgaattgattctacggataagagtgagccagcagtggttctgagttgggagagcctctgctttsctataaaattgttaattgttatccagtttgtaaagaaaacttaaatactaaatcattaggccaacatcataaaaagaaatgatggagcaagaatgttgca

SEQ ID NO: 229108 - DNA, 201 bp, Homo sapiens
aggaaaactcacttttcactccacgtgctttgcatctgtttgaatgtgttgccctgtgcttattaccttgtgcttacattgggttatactttttctctctmtatataaaaaggttaatttgacattcaaatagtttctctatttaaatctaaaattagcaccaaggaaggtggtcttgttacataaccctgttgctgagtc

SEQ ID NO: 229109 - DNA, 201 bp, Homo sapiens
gttactgggtagaagggaccatgaaaatctctttctagttgtgaagatgatgaaggtcatttgggataggtacttcccattcgggctaaaaaaggcagaascagattgcttgtaagaccttgtaattctatatgttttcagatcctttcttgtgtatacaggaatctaaagatgcacatatgtggagttgggctattatag

SEQ ID NO: 229110 - DNA, 201 bp, Homo sapiens
cctggagggagtgacattacctaaccttttgacttaaatggctgagaaccaacttttgagctagcttgaatttagttgtaatcaaagctctcaatagttgyttctgcaagtacagaatattaaactgtgtctaaacctcccatctgtctagtcaattcagaggaactcccccatacaacccaagtaaaaacataatgcctt

SEQ ID NO: 229111 - DNA, 201 bp, Homo sapiens
gaacccactttgggaaatatattttcattgacaatgaaagggtcctaggtaattgattctgtcctatgacttatgaacagatcaagaaggaaaaatagatkaccggaaggtgtgtttcaaaaagaaactggagttagaatttacatagtgaaatgttaactttatgttgagttgtgcctttgggtaccaagcctggttgaa

SEQ ID NO: 229112 - DNA, 201 bp, Homo sapiens
tgatggattctgtttgggaccaataatcacttggactttgataacctcatcactaaactctgcagaaacatttgagtttacctgtcaaaaatgcatttacrtaggatgaatttataaaagaatatttttatatatttactcttagccttatgcatatacatgttgcttttattagcctactgttctttgtgtttagttcat

SEQ ID NO: 229113 - DNA, 201 bp, Homo sapiens
caaagactgattttatgcaagaagttttataaacacacacacaatcaaaaaatagttttcatgtccttggggctatggtgtccattcaagctccagctctstgtattcaagagcattgtactgtccagttattctcatagagcaaatgccagagacacgcaatgccagaatacacaaggaggaaggggtcttttgaaaagg

SEQ ID NO: 229114 - DNA, 201 bp, Homo sapiens
ggaactttctcaccttcaggtagggagaccaaatccatatcccctcttcgctaaaaactgttttcgtcactcagtaaaattcttccctgccctcctcaccyttcaatgtccagtgtatcctcattcttcttgggcatggtacaagagctcagggaaccaccaaacacgggtacaagctataacacaagaagctggagcaca

SEQ ID NO: 229115 - DNA, 201 bp, Homo sapiens
agtgtctatgtgtgtgtccccatatctctgtgtctgcatatgtgtctgtcacacacacacatgcacacccacaatagaatatgatgaaaataaaaatttgyggaaattattctcaatctggaaactataaattcttcacttcttaatttaaaacatcatcctttcatggtgatattaaagaattagttcatttagataagc

SEQ ID NO: 229116 - DNA, 201 bp, Homo sapiens
tgaaattttgatagatggtttctttctttttttttttttttttaaagggggataatctggtgacatgatgcaccttcctgtgagctggcaatatgctgaargaagtgggtttgccatccttatcaaagggcccctataggtgtctgagttggtaacctcagtggggccacaaaaataagacattatcttataattacacag

SEQ ID NO: 229117 - DNA, 201 bp, Homo sapiens
cctgttgtttcctgactttttaatgatcgccattctaactggtgtgagatggtatctcattgtggttttgatttgcatgtctctgatggccagtgatgatsagcattttttcatgtgtcttttggcttcataaatgtcttcctttgagaagtgtctgttcatatccttcacccactttttgatggggttgtttgttttttc

SEQ ID NO: 229118 - DNA, 201 bp, Homo sapiens
ctgaggcccattctcaagtagctaatggctgaacagtgcttgctaatcactatccaccttacagttgggaggccaagtccctccttgaagggcaacctggrtggtacatatctgtgcctaccacaatatgggtgtagacttcagccccaccccacacacatacctagatctagtttagcatacagctgtgatcttccagaa

SEQ ID NO: 229119 - DNA, 201 bp, Homo sapiens
ggactttgaggtaggccctccaaagcttcacccaagccagtggggagccctgggttcattattgcctatctggattgttccgtgatgaatggaaacagcarcatcttgtcacacctgcctcactctgtaggaaatgaaagctgcccaagaaatgtatggtctttagggaagcagctcactggagctgaggcccattctcaa

SEQ ID NO: 229120 - DNA, 201 bp, Homo sapiens
tgcaaagccatgagccagcaggcatttgtgaccgccattctctaccaatattttgttgaatacttgctgtgagcatggcaccttacccggccacctccctrgtggtaggtgtgccaggcacaggaagactaattaagactttggaaggcaggactaatgtgttccagtggtcagggaccctcatttaattcctggcatcct

SEQ ID NO: 229121 - DNA, 201 bp, Homo sapiens
ataatttaggtattgtgattttaaaaaatcagggatgattgaaaaagagattattcattaatttcactgaactccaaaatttgtttaaattttttgttcayttaagcattttttctttaacagggcatgtagtacttgggagtgaagttgtcattaacgtgaccactgaatccattagacaacattccacaaaaactaatt

SEQ ID NO: 229122 - DNA, 201 bp, Homo sapiens
tttggtttggtgtacaacagtaggctcttctaagatacattaaaaaaatcttaaatactagagatagagacatggaaaagtgcaatgaatgaatccatttrttcattcagctgatgtttgttgggtatcaattatttgcctggcactttgctcactgctgtgtatatggggatggtaaatgaaaatattatcttattcttt

SEQ ID NO: 229123 - DNA, 201 bp, Homo sapiens
aatacagaaagaggatctctgtttttctttagacattaacaagatacagcaggagctggcaaactccccctataaaccaaatctgggctgctgcctgtttwttcaaataaagttttactggggcacagccacgcctactcatactgctttcatgctgccatgacaaagttgagtaattgcaacagacactgtgtggcctgc

SEQ ID NO: 229124 - DNA, 201 bp, Homo sapiens
agatgtattaccaacgagtaaaaaaattgctattttagtcccgattataaaagttgcagtgtaattctttaaatagtctttcccattaaattcgtcctcartatgattattctcaccaccacttctgtgcttatgttatcataggacagtctctctgctgaacatctcctctttctttatttctgtgtttattttccctga

SEQ ID NO: 229125 - DNA, 201 bp, Homo sapiens
ttctttcttttgtggaatagatctcttttttttcctaagtaaaggtcacccagatcccaaatatataaatataattgatcaaggtagcgcagctctggttraagtgtagaggcaggggctggaggtctgacaacctagcccgcttcagtttcctacttccgccttcaaaggcacctttgccaaatctagggctcctcaaaa

SEQ ID NO: 229126 - DNA, 201 bp, Homo sapiens
cgtattggcctccgctcctgtccccagacaagcggccatcttgggtcccgcccctaccgtggggtcttctgggaattgcagtccccgctctgctctgtccrgtcacaggactttttgccctctgttcccgggtccctcaggcggccacccagtgggcacactcccaggcggcgctccggccccgcgctccctccctctgcc

SEQ ID NO: 229127 - DNA, 201 bp, Homo sapiens
tccaggttccctgcagtcgtgtttttctgcccactctccagctttctgagttttacgaaatggttgggatggcagaagcagcagtggcagcgctatgatcwggcttctgaaactcgggaccacagctacagataagcattctatggtttcttgcattagtagagtcagttgtaatggtgacaagttcttgattttactatg

SEQ ID NO: 229128 - DNA, 201 bp, Homo sapiens
tgtttctgctggtaaacgtagctgtggcaatgtccaggttccctgcagtcgtgtttttctgcccactctccagctttctgagttttacgaaatggttgggrtggcagaagcagcagtggcagcgctatgatctggcttctgaaactcgggaccacagctacagataagcattctatggtttcttgcattagtagagtcagt

SEQ ID NO: 229129 - DNA, 201 bp, Homo sapiens
tgaagagtgcagtgagctgagattgcaccttcactcaggcctgggaaacagactgagaccttgtctcaaaaaaaaaaaaaaaaaaaaaaaaagatttctcytgttcttccttattttaagggccatttctgtgtattagtgtgtacaattaattgcctgtttacaagaaacaatgggagagtctgtcattcagacagagcc

SEQ ID NO: 229130 - DNA, 201 bp, Homo sapiens
tccaggaggtgaagagtgcagtgagctgagattgcaccttcactcaggcctgggaaacagactgagaccttgtctcaaaaaaaaaaaaaaaaaaaaaaaargatttctcttgttcttccttattttaagggccatttctgtgtattagtgtgtacaattaattgcctgtttacaagaaacaatgggagagtctgtcattca

SEQ ID NO: 229131 - DNA, 201 bp, Homo sapiens
aaagaaaatcagaaagaggaattataattactattaagtggaaatggatcattgtaaagacttttcatccttatcgtcttcacattaagtaggctgtaaargaggaggaagaggaggggttggtcttgctgtctcagaggttgtgaaggtgaaagaaaatccatgtataagtgggctcacacagttcaaactcatgttgtt

SEQ ID NO: 229132 - DNA, 201 bp, Homo sapiens
gcttgcaaagtgatcaagaaaaaatcctgtgtcaactccttcaaggtgtatatgttatttctggtctttttatgattcccttcttctcaaagccagccacmtggggaggtgacgtggaagaatatacacagcccaggatgggaaacaggagctctgggatgtaagcctggctgtggtggtggctcagtaatattctggacc

SEQ ID NO: 229133 - DNA, 201 bp, Homo sapiens
ctccctacagtgcacatcatgggggggcaagtggatcactgggtaaggagtaatgggttaatttactcaggtgcagggataacatgttaactacccagctscttaggggaagtaggaccagtagttgagagtccccatttgctctgctgactatggctgcaatacacacacacttaccatcagcttttggccacaaattga

SEQ ID NO: 229134 - DNA, 201 bp, Homo sapiens
tcacccaggctggagtgcagtggtgtgatcatggctcactacagcctcaacctcctgagctcaagccaccctccaacctcagcctcccaagtaactgggastataggcacgagctaattttttttttatttttgtagatatggggtctccctatgttgcccaggctgtcatataaactcttttaagggactggtggctctc

SEQ ID NO: 229135 - DNA, 201 bp, Homo sapiens
tgggtcagtctggttggacgttggaccccactcttcttaagggtgctttccccaagtcacatgtgggtagagttggcaactgtagaaaccaaatggggagytggtattctccaacctctctgttttcttcctttagaatgaggcaggcatgcaggaaaggtgaccttagttaggctggaggcagcagtaacagtggtggcc

SEQ ID NO: 229136 - DNA, 201 bp, Homo sapiens
tgctgcctgttttttcaaataaagttttactggggcacagccacgcctactcatactgctttcatgctgccatgacaaagttgagtaattgcaacagacaytgtgtggcctgctgtgtctggtcctttacagaaaaaaaaaatgtgcaaaaatgtgcgacctctgttctacagcgtctggctctgaagcagaatagaaagg

SEQ ID NO: 229137 - DNA, 201 bp, Homo sapiens
catgctgccatgacaaagttgagtaattgcaacagacactgtgtggcctgctgtgtctggtcctttacagaaaaaaaaaatgtgcaaaaatgtgcgacctytgttctacagcgtctggctctgaagcagaatagaaaggagtctagacttattcctgtgtatatatgggaacttactgtaatcattcccaggaattggtac

SEQ ID NO: 229138 - DNA, 201 bp, Homo sapiens
taagtagaatgcaagatgataaagatcaggaggtaggaggagctggcagggatgggggaaacaatagccccttaataagactcttagtaatcaagcatgcwttttgtgtctggagttagggccatggaagtgacagactgaccattttaaaggctgccatcattacagactggcatgtttctaattacgcatgaaatgaaa

SEQ ID NO: 229139 - DNA, 201 bp, Homo sapiens
cattctagaattgattgtagtaatgattgtaccactgggtaaatagattaaaaaccattgaattgtatcatttgggtgaattacatcaatgggtgaattgyatgatatgtgaattacatctcaataaagcagctatatatgaggcaggagaatcacttgaacctgggaggcgaaggttgcagtgagccgagattgtgccgt

SEQ ID NO: 229140 - DNA, 201 bp, Homo sapiens
aggggagggacttgcccaaagtctcctagctagccagatggaataagaacccaggcgttctgacactagagcttacgttctcctctactatatcgtcctgstgtcttcaaacatgaaggtgatcctgctaactcattactcagtaggcatatgcttggagtagtagtgatggatttccttacatctattcacatgtcatac

SEQ ID NO: 229141 - DNA, 201 bp, Homo sapiens
aataattggctttagaataagataaaggagttagcctctttgggaataaaatctcagttctcaatcactttatcacagtactgaaataaaccacgccagtstcctttggtggccaggaggtatccttagaagtacatttaaagaggaaaatgctggtatcaaagttataaattcaaaaccaactgttctacatcctggaat

SEQ ID NO: 229142 - DNA, 201 bp, Homo sapiens
tgtcatgtagttcttgtgccatggttttcagctccaccaggtcatttaaggacttctctacactggttattctagttagccattcatgtaatcttttttcraggtttttagcttctttgtgatgggttcgaacatcctcctttagcttggagaagtttgttactaacaatcgtctgaagccttctctcaactcgtcaaatt

SEQ ID NO: 229143 - DNA, 201 bp, Homo sapiens
tttacataatacaaaatgagttctgtgaataaatttgtcttgcttattaactaaggaatttggtaggatacacacacacacacacacacacacacacacasacagagtaccattggttaaaaaaacaaaaacaaaaaacctctacttcttaaaaaagtataaaacttaacaaactgtgtacttgtaaaggaatcacatatc

SEQ ID NO: 229144 - DNA, 201 bp, Homo sapiens
ttatcagtgggcttagcttttcagaaagttctttagggattttatgacatgagagctgaacatattctaatcctgggctgactgtatttcaggtagaaackgtactattgctgactttcatggggtttaggtgaacttctatgattaagcaatagtatttccctaattctgtccatttttcccccctggatgaatccttct

SEQ ID NO: 229145 - DNA, 201 bp, Homo sapiens
tacataatacaaaatgagttctgtgaataaatttgtcttgcttattaactaaggaatttggtaggatacacacacacacacacacacacacacacacacasagagtaccattggttaaaaaaacaaaaacaaaaaacctctacttcttaaaaaagtataaaacttaacaaactgtgtacttgtaaaggaatcacatatcat

SEQ ID NO: 229146 - DNA, 201 bp, Homo sapiens
aaggataaatgcttgagatgatgtatatcccatttaccctacgtgattattatgtattgtattcctgcatcaaaatatcccttgtaccccataaatgtacstacaacatatcttatatgtacccacaacaattttttaaaaaaatgaatgcaggggaacctagaaatacctagttcttttccttgagtcaagccttttgag

SEQ ID NO: 229147 - DNA, 201 bp, Homo sapiens
gccttaaccaaagatatgacatggctgaaatactgtttttcaatgagtggtgagttaattttcttggctcaaagatttaatgtaatttggtccaagaagtyaggcaagtgccttgtgaagtgtatgtgaaccgttgtatctagcgtctttctgggaactttgcatttctctttaagaagaagcaaacttcaaatagccata

SEQ ID NO: 229148 - DNA, 201 bp, Homo sapiens
acagtgcttattaaagtctacagtagtttacaataatatcctagatcttcacattcactcaccactccctcactggctcacccagaacaatttctagtccygtaagcttcattcatgttaagtgctctatataggtctaccattttcattttctaccttttatgcctttttttttttttttttttttttgacagagtctag

SEQ ID NO: 229149 - DNA, 201 bp, Homo sapiens
tctttgggaataaaatctcagttctcaatcactttatcacagtactgaaataaaccacgccagtctcctttggtggccaggaggtatccttagaagtacawttaaagaggaaaatgctggtatcaaagttataaattcaaaaccaactgttctacatcctggaatctgaaaatagatttctattttaaagatactgcctga

SEQ ID NO: 229150 - DNA, 201 bp, Homo sapiens
ccttttaaaatgcctaaaggttgagttccagtggtaggtttagttcattttgctttagtagttaggtggcaactgtttctcaaagtgttgggaagtctagmagttttcttttctttttttttaatttttattatactttaagtttcagggtacatgtgcagaatgtacaggttagttacatatgtatacatgtgccatgtt

SEQ ID NO: 229151 - DNA, 201 bp, Homo sapiens
aaagtgactatcgcaataaatcagtcatgtgaattttagtttcccaatgcatatacaagctatatttacacttagctgtagtctattaagtatgcaatatyattattcctaaaaagtgtacataccttaattaaaaatactttattgctaaaaaatgtgaacaataaaaatgggaaggtcttgcctcaatgttgatggctg

SEQ ID NO: 229152 - DNA, 201 bp, Homo sapiens
tgccaatcacaaacttttacgagagcaagttatcttggatattcagatttttaaaagtggtcttttatctatttgcttgaaatatttttctgagtattcaytttgttgtgtaactaatttcccttttttgtaaatgaaatccattgctctcatatttttaaaggaataacaggcatctattagaatccaacggtgaagaat

SEQ ID NO: 229153 - DNA, 201 bp, Homo sapiens
ttttcaatctgtctcttattgccaatcacaaacttttacgagagcaagttatcttggatattcagatttttaaaagtggtcttttatctatttgcttgaartatttttctgagtattcattttgttgtgtaactaatttcccttttttgtaaatgaaatccattgctctcatatttttaaaggaataacaggcatctatta

SEQ ID NO: 229154 - DNA, 201 bp, Homo sapiens
gacacaaaaaacccttcaaaaaatcagtgaatccaggagctggttttttgaaaagtctagcagttttcaatctgtctcttattgccaatcacaaacttttrcgagagcaagttatcttggatattcagatttttaaaagtggtcttttatctatttgcttgaaatatttttctgagtattcattttgttgtgtaactaatt

SEQ ID NO: 229155 - DNA, 201 bp, Homo sapiens
gatgttctttgaaaccaatgagaacaaagacacaacataccagaatctctgggacacattcaaagcagtgtgtagagggaaatttatagcactaaatgccsataagagaaagcaggaaagatctaaaattgacaccctaacatcacaattaaaagaactagagaagcaagagcaaacacattcaaaagctagcagaaggca

SEQ ID NO: 229156 - DNA, 201 bp, Homo sapiens
atatttattgagtacctaccatgtgtcaggcacttttctaggttctgggcataaaaaagcaaatggtatgcctagtactaattacctgccaagtttcttatccaattaattatgtttgttggacatatgcagcaaatgctaaactttgtttttctataactttggaagatgaattgtctttagaaagtaaataagaaggaa

SEQ ID NO: 229157 - DNA, 201 bp, Homo sapiens
agatgcagatattcaatcttgaattttttagccattagaattgtgatccacataaatccttttatttataaattacacagcctcagtgacacctttgtagygatacaaaatgaactaagacagaaaattagtacccagtggttgggggtaatgggcagcagttggaagagtttggaggtctcagaagaagaaaaaaagaca

SEQ ID NO: 229158 - DNA, 201 bp, Homo sapiens
aaagttaagtgcggaatagacagtacaccctgagagacagagaattcagggtgggctgcttgtaaggatgagacagcaaagactggcaatagggagttttkgggagttttacatgattattcataaggaggtggaaagcagtgttactagtaagcatgttctgggtggtcgtctggacgcacatgtgcagtagctgtacat

SEQ ID NO: 229159 - DNA, 201 bp, Homo sapiens
tgccctggaggtattagccttttagcttcctcgccaatgtaaccaaagtttactttgatatttcagcagacgtgtgcaccattcttcataaatcaagttgytggtaaaaaaaaaatcatttttattacgttataaagtatataattccccaatagtacatcaactcctcaaccacatcaggagagttgttaaaaacagcct

SEQ ID NO: 229160 - DNA, 201 bp, Homo sapiens
gttgttggtaaaaaaaaaatcatttttattacgttataaagtatataattccccaatagtacatcaactcctcaaccacatcaggagagttgttaaaaacwgccttgccatcatatctgaatttttcatttacaaatcaagtccaataacactaagtcatttaaaagttagactccctagtaatgttggtggctctatttg

SEQ ID NO: 229161 - DNA, 201 bp, Homo sapiens
gtttgctttattttaccaaaacatacacagtgctgcattttcaaaagtcctttgaaaacctctttgcagaagtagctggagaatcctaacagcaaagctcstcaatagggaaaagtgtgcaaaggcttagaaagataaccaaaagaaattagtctacaatggtgggggttaggagagggatgggtggaaggattaaggaag

SEQ ID NO: 229162 - DNA, 201 bp, Homo sapiens
tacactaccaggcactgttggagcaactgagggagaactctgcaaggcagaggtgattccagttagcatcccatctgctctgtgagagaatcatattgcayttcccagggggtgggtttgaggaaaccacatgaagaggcaaaactgcagctgtctccttgcagataatgggtgtggagtgttttctatggaagccaccac

SEQ ID NO: 229163 - DNA, 201 bp, Homo sapiens
atttctcctcacaaaaacatcaccaaacttctaaataaaaaccaaaatattgttaatattaaatacagaaataaagatgatgtctacatattataagaaakattaataaaagcaagataattatttacccattcattgcagttcagggtctcaggtggccagagcctgtcttggcagctcagggcccaagggaggagccca

SEQ ID NO: 229164 - DNA, 201 bp, Homo sapiens
agctaacctgcccatggtcatcctgttgggaaccaagttactaagatctaatgcgggtcttcccaaacccaaagcctatactgtttgcacagcctcacagsctccagccgctacttctttgtgtacattagcaagcgttctgtcagtgtataatgtgctagctacatctgtggccttggcctttgatcaatattgaccacc

SEQ ID NO: 229165 - DNA, 201 bp, Homo sapiens
aaattcccttcagcctccctttcctgcccccggccccccatggctttccctcaaaaggaagacgcagaacatttcaggtaccttgctgctttgtggccctrttacaaccaggaattgttctagttttgaactccgttttgctccttccttctttttaaatgttttttttctcctttattttggagattttactagaatagt

SEQ ID NO: 229166 - DNA, 201 bp, Homo sapiens
atgacaaaatagatgggtaaaaataagtagctgacaaatagggccttgtggatttgagttaaggtggcaccgtgaagtgcagagggagtgaaggggaaaarctgttttattgtccacgtggaagcttctgcttgaaaattgctaactctaatcaaggaaacactggtagggagagtggagtattttagaaagactttccca

SEQ ID NO: 229167 - DNA, 201 bp, Homo sapiens
tgtggaagtaagatatgtgaggatttgagactgactttgttgctttacctcttggagatcattcaagttgtgcgttttaattaaatttatattatagatayacttacaaattttttttaaaaaatattaggacctgaaatagcattttctcttgggaaaaataccagcttgcagatcattgaccagtgtcattggtggagt

SEQ ID NO: 229168 - DNA, 201 bp, Homo sapiens
atttcttagtaattctgaatgtacaaatatgccaagaggtttttcagagtaagctacattttttttccagtgaaaatgtggaaagtgcctgagaactttaygaacaagcttcttttctagccacgtaactattgtatgctaaaaaaaaaaaaaatacaaataagaaaaacatgtaccaaaagataattgtgattgtattat

SEQ ID NO: 229169 - DNA, 201 bp, Homo sapiens
atctctctctaggtgccagctttaactgacttttagaaaagaaataaagggacctgggatgaaaatatgaatttagacaagatccatttgtctaaattcastctcattcctatgaaaattagaggtcacagagatgtaccacttttttttgttgttgttccttttgaggcagagtctcactctgtagcccaggctaagttg

SEQ ID NO: 229170 - DNA, 201 bp, Homo sapiens
agcatgaaaatgaatttaaacattagtggtatccatttgaagactggggctttcattgtaaataaaattattcatttgttctgtcgtcttcagcagagagwgtattgatctctgcattgctattctgaatggcataaggagctgcaacatgagggagacacagcaacatttgtggatgaattgaatagggtgtgtaatgac

SEQ ID NO: 229171 - DNA, 201 bp, Homo sapiens
gctgcacgtggggtcagaaggcagtaactgtgatgggcactagaggggaaggggaagccctccttgctagtctcttcctctcccaagtttattttttgttyctggagccgagactgacatctttattttttatcatagacagaacaatggattgttggaagctgatgctgaaggaattaagtaggtactttgtatgtgtgc

SEQ ID NO: 229172 - DNA, 201 bp, Homo sapiens
gtcagtgaggtgcttaggaaatgcagactcccgactttggtaagatggctttgtcatttactgcatgtgtagccgaggacaagatagaacttgagccttcrtccttcaccagtaaaatactaaatgatttgaaataattaaaatatatacttaaataatattgaaagcataaacattagttccctttcaagtatgtgtggg

SEQ ID NO: 229173 - DNA, 201 bp, Homo sapiens
aaataattaaaatatatacttaaataatattgaaagcataaacattagttccctttcaagtatgtgtgggaggtggggagatagttttgagggagctgtcrgcaagagataggtcagtgaaacagccagcgacagctacactaagcatcctgaattgattctacggataagagtgagccagcagtggttctgagttgggag

SEQ ID NO: 229174 - DNA, 201 bp, Homo sapiens
ctgcatattacatatcaattccccagccaggtggtaagctgctcagagacaaggacatatttccataacacttttccttcttcatggcatcttatatgggrtggctatcaataaatatatattgatttgatttaagctgggatcctatcatttacttcctcatttcctttaatctctattgattataaaattaattgggtg

SEQ ID NO: 229175 - DNA, 201 bp, Homo sapiens
tattttttatcatagacagaacaatggattgttggaagctgatgctgaaggaattaagtaggtactttgtatgtgtgcaaggaaggtttgaaattggatgragaaaaatgtgtggactttgtgcactttgccctggccccttcaaaatgaaggtgacatacccacgaaacactgttcctgaggcatgtacatgttggtctc

SEQ ID NO: 229176 - DNA, 201 bp, Homo sapiens
gtgaggatatgtatgtacaaagtagccttgtgggttactaggtccctgttgcttaatgatagttttaactgtctttccttgatcttgacctgtcttccatrctatgttttaccttctagccccagaccgtgctgtgcatgggatggggtgggctggcctgacctgattatgcattacaggagaaaaattcaactgtcattt

SEQ ID NO: 229177 - DNA, 201 bp, Homo sapiens
gcagtgcaatgatcttatattttttttcatatttattcccccactgcatggtagcctttgtgagaacaggaggacaagcagagtcagcaaagggaactacmcaagaaaaggcaatttccagtagaagaaagtccaaagggaaagggcctctatattgggagctccatgagagagggactgtcttttcaagctcctagcaca

SEQ ID NO: 229178 - DNA, 201 bp, Homo sapiens
atatttcaggagccttggtttagcttatatctgcctgcatttgggggtcaggatatgggtggatatgtcttaggcagtggagttatgtttatgtgtaacarttagtatgacaggtggtactgaccaatgtcaaaggtggttcctgaaagctctctactgtgccagacatcagcctattaatttgtgcattgtggggaggtc

SEQ ID NO: 229179 - DNA, 201 bp, Homo sapiens
cctggccttgtggaaatgtccttgccctagaattgcaccgtttttttaattcaacaagcctttactaaggacaaggcctatactcagcattgggaatacasaaatgaatcacccacatttcatggagtacatgctcaatagactgcaacatagagaaattagagaccctttgcaagttatagaaacccaactcaacctgcc

SEQ ID NO: 229180 - DNA, 201 bp, Homo sapiens
gcacgcaagggtaataagtaatacttgtgtatttcaatattgtaataacaggaatagacatgccaatgcacatggtctcagtagattttagagggagattktagagggagaaaaacagatggaagaagctcctttatattcctaagaccaagcatgttctttgttcttcaagaccaattaagtcaagcatagttgtaggtt

SEQ ID NO: 229181 - DNA, 201 bp, Homo sapiens
aatcacattttggctgttctttaccttgactctttcaaatgatttttttccgtcttgtcaaattctgtgggaaaaggccgtgaaattttttaaaggaatgrcattgaatacatggattcatttatggaaatttgacatactgatgctgttggatatccccagttatgaacacaatgtaggtttccccctgttaggtctttt

SEQ ID NO: 229182 - DNA, 201 bp, Homo sapiens
ggctctccaatttttctcctttctgataggttttgaaatgcctgaagttatcaagaacttctttttatctttaagattaattttcagttcaagagatttaygtgctaatactttaaaagttagccatgatacccttccattcaccaaagatgattgctttaatagttgttaaataagatgtgtcaagataaaaataaatca

SEQ ID NO: 229183 - DNA, 201 bp, Homo sapiens
aatgacactggcatcttgttctttggcttgatgctacgaagctgtaggacctgcaggctgacacaggtactgtcatgatctgggagtgcagggaggtacarttgcttttggagagcttcccatgtgctctgtggagtttggaattgtacatgagcacacaagagtgcttgcttctcatctttgcattcttgaatgtagggt

SEQ ID NO: 229184 - DNA, 201 bp, Homo sapiens
caggactcaagtgatcttctcacctcagcctcctgaacagctgggactacaggtgtgggccaccacgcccagctaatttttgcattttttgtagagacaasgtttcaccatgttgctcaggctgatctcaaactcctgagctcaagcaatctacctcagcctcccaaagtgctggaattacaggcatgtgccaccacacct

SEQ ID NO: 229185 - DNA, 201 bp, Homo sapiens
agcagccggagtgatcctgttaagacttgttgaatctatgtcacttctctcattatccccacagtggcttcctaccttcttctaactaaagccaaagttaycacagtgattgacaaggttcctacttgtactcctccatccaccccctgccatcaaccattgcccctctgatttcatctattaccatttttcctgtagtga

SEQ ID NO: 229186 - DNA, 201 bp, Homo sapiens
ttatttctataataatcaaggaaatttccattagacaattttagtttgtttattcatttatttcctagaatttttaaaacatgatttaaggtgactatgawaaagtagagtaagatttaagtgctttaaaaaaaagcaaactacaaaattcaagaagtagtaaaaggaaagtaagatggaccaaaagtgagattagtgcat

SEQ ID NO: 229187 - DNA, 201 bp, Homo sapiens
atcataaggcctttgtttgtttaaaaatggcttaagatgtttttcagatcctgaattccagcaaaagagctattgccaaccagtttgaagaccgcccccccgcctctccccaagaggaactgaatcagcatgaaaatgcagtttcttcatctcaccatcctgtattcttcaaccagtgatcccccacctcggtcactccaa

SEQ ID NO: 229188 - DNA, 201 bp, Homo sapiens
atcacagggatggtttcccccatactgttcttgtggtaatgaataagtctcacgagatttgctgtttttataaggagtttcccctttcacttggctctcakttttccttttgcctgctgccgtgtaagatgtgccttttgacttctgccatgattgtgaggcctccccagccacgtggaactatgagtctattaaacctct

SEQ ID NO: 229189 - DNA, 201 bp, Homo sapiens
ttccaggcaaggcactggctcagaaaagactttaagtttatacctcagagtgatccttgctatagagttggcctacaacaatcaaaaacatgaaaacaaawaccagcaaccctagcaaagggggagaatctgatttcaagaattatcatattattcgattcatatgtccagttttcaacaaaaataaaattacaaggcata

SEQ ID NO: 229190 - DNA, 201 bp, Homo sapiens
gagtataatgggactaactatacctccctttaaggacaatggaaacattctattgaaaccatcctcacagggttaacaagaattagatgctgggttctggwcagaaatatagttgtaattaagcattaatcaggctgcactttggcccacttcttcgtaaccaaaagtcccagagcaccagatgctaaccatttgcctcct

SEQ ID NO: 229191 - DNA, 201 bp, Homo sapiens
ggagtataatgggactaactatacctccctttaaggacaatggaaacattctattgaaaccatcctcacagggttaacaagaattagatgctgggttctgracagaaatatagttgtaattaagcattaatcaggctgcactttggcccacttcttcgtaaccaaaagtcccagagcaccagatgctaaccatttgcctcc

SEQ ID NO: 229192 - DNA, 201 bp, Homo sapiens
agcctaactaaggtcattgtccaaagcaatagacattgtggtgataagccattaaaaggaggctggtagctctataaaatctacaagctaacccatcgatwacctagatgatcagagagaatcaaagaaaggtaaaggtaagagagccctcctggagtaacgaaaaattggcctgaagatctaactcccaaaggcccttga

SEQ ID NO: 229193 - DNA, 201 bp, Homo sapiens
tcacctctttacgtccctgcggaaactgtcatctgccagcatttggagaagacgcgctctcctacaacacctcttctgtattcaagtcatctttactacaraaacaaaagacatggagccccttggtaacgggccatgtcaacttggagctaagatagttgttcggaagagaagtacaggtgtagaaacacagcatgtgct

SEQ ID NO: 229194 - DNA, 201 bp, Homo sapiens
catgacacatacggtcaaagtcaagcaaagcactttccggacccataaaactgtattggattaagttgaccaatctgtcaaagtaaccaaactaacatatrtgtgaagatgaaaccttgaagaaaagtttaaagaggttttgtccactctgaatgtcctttcacagcaaccccagagtagtatttgtttctttgtttcaaa

SEQ ID NO: 229195 - DNA, 201 bp, Homo sapiens
ttggtttaattttggctgctactgtgggtcagtagccaactaagaggagaaactgggctgtaaagaagaacttcacctgcagaaaggtcagatttatgcaraaagccagcaggcaaagctaagaacatgtcttccaggggcctcaagttccattttcaccttttcttcttggtaagtctcagtactataggatacttaggt

SEQ ID NO: 229196 - DNA, 201 bp, Homo sapiens
tttcaccagatacttttttctctgaggctctgagtgtctatctgtccttcgtgtcctgaattgaatgttttcaggaggggctgctttttcccataaaatgrtctcttagaggtttaaacccctcctctgttcttgtggctagacactgtttacctaactcctagatttttaccaccacctcctgttcgagttccaagacgt

SEQ ID NO: 229197 - DNA, 201 bp, Homo sapiens
gtctttaagtcaacattccaaactctccccagccaaagtttctagaagagatttcaccagatacttttttctctgaggctctgagtgtctatctgtccttygtgtcctgaattgaatgttttcaggaggggctgctttttcccataaaatgatctcttagaggtttaaacccctcctctgttcttgtggctagacactgtt

SEQ ID NO: 229198 - DNA, 201 bp, Homo sapiens
ccagctttcaaagccttagtaatctttcccaggctgctgggattaataacttagaaggccatagttcttgctttactcttcctgtgttctaagatcttagrtcttaactgagagaagaacaaggtcctgggacacctctagagtgtgataactactatcactttttgtacttcctgcctcctctactggatccaaagaagg

SEQ ID NO: 229199 - DNA, 201 bp, Homo sapiens
atgatattgcattgaatgtttagactagactatgaaagaatgggggagtttgaatgtttttcctataatgattaatgttaggcctgttggggaaaactgcrcactgcaaaatcccaaagatttttcaacaacctctgattgcttttggaatcgcaaagcaacattttcaggagacagttttgacatggcacattttggagt

SEQ ID NO: 229200 - DNA, 201 bp, Homo sapiens
aggctcaccagacctgggtcagagcccaggaatctgcattttaaataaccccctcaggtgattctaatgggaacattcctgcaccaaacttggagaagcaytgcattcctctaagatttgtctacctcattccatctccctgtctatttctctctctttgctttctcttgcctggtctctatcccttcctttcattacatg

SEQ ID NO: 229201 - DNA, 201 bp, Homo sapiens
caaatgattcaaaaatatgtaagctattatatataatatattttacactataattataattaatggaattaatgttatatataattatattgtatgtaatwataatatataatagtattatataataatatcttatataaaaatcccaaagtaattattattattttatagatgaggaaagtgaggctcagagaaatcaaa

SEQ ID NO: 229202 - DNA, 201 bp, Homo sapiens
gcgtgagccactgcgcccagctgaggttaagttttcatgtgcaagtacctcaaatcagtatttccaaagaaaattttttgccaccaaagcaccacctttgyagttagccctattggttaatggccttttcattgtcatgtattttaagcctggcaatatttttctcccttctcccaggttgtctcttcacattgtatttat

SEQ ID NO: 229203 - DNA, 201 bp, Homo sapiens
aggatgaaccagttgtttttgcctcattgaaatgcttttttcttaaatatatatctttcctcttgctgttgtttttgctcttttttttttttaacaaaaawgtagactgagagctactagtgcagttacgttacgtggatatattgtgtagtggtgatgtctgggctttaagtgtacccatcacttgaatagtgaacattg

SEQ ID NO: 229204 - DNA, 201 bp, Homo sapiens
ggaacattcctgcaccaaacttggagaagcactgcattcctctaagatttgtctacctcattccatctccctgtctatttctctctctttgctttctcttkcctggtctctatcccttcctttcattacatgtcatgtaccttgatagagatagatgcctgcactcccatgtctagaggtacatggttgccaatgaatgca

SEQ ID NO: 229205 - DNA, 201 bp, Homo sapiens
gtcatgtaccttgatagagatagatgcctgcactcccatgtctagaggtacatggttgccaatgaatgcaaaactcagaaaggagactagaactctagccytctctttcactcctcctctttcctggcaaggtcacaagaacagtcatctatttcatccaagtgtttgcatctaacacaatcactgcattcagttttgaga

SEQ ID NO: 229206 - DNA, 201 bp, Homo sapiens
ctattaaacctctttttctttataaattacccagtcttgggtgtgtctttagcagcctgaaaaccaacaaaaacagatgggtcacaaagttggccctgaaytttctatcaccaacctaaataaggaaagagcatcaattcttgaggtaaaaataggctgattgttcagaaaaatgcagaaatgtgcacaacaccagagatc

SEQ ID NO: 229207 - DNA, 201 bp, Homo sapiens
caattgattggaaaaaattgtatcaaccacttagtgatcatgatttttagctagaaaacacattcattgtattctgatttcaccttgaaatgtaagtaagtctttactggatagctttaaatatatgtgcacttggcctttctctccccagccctctttttagagtattctaaatagttaaagacccagactaccttgccc

SEQ ID NO: 229208 - DNA, 201 bp, Homo sapiens
ctcgctcctccacccacaacattgaaaaatgaccctctaacaccatgttagtgtcctctttgaactaattttaatggattttttttttgaaagtgaagcawctctgcaatcctggggtcattgagactaccaacaattcagcaataagcagtagaccttcattttggagtgttcagcctgtacatgctggaaaggtttgga

SEQ ID NO: 229209 - DNA, 201 bp, Homo sapiens
gcaattgattggaaaaaattgtatcaaccacttagtgatcatgatttttagctagaaaacacattcattgtattctgatttcaccttgaaatgtaagtaagtctttactggatagctttaaatatatgtgcacttggcctttctctccccagccctctttttagagtattctaaatagttaaagacccagactaccttgcc

SEQ ID NO: 229210 - DNA, 201 bp, Homo sapiens
actaccaacaattcagcaataagcagtagaccttcattttggagtgttcagcctgtacatgctggaaaggtttggactaggactgacatgctctctagackagatgtttctcttttatttagtttcaaatcacactactgtttctttttaaaatctctttcatccacagctcagcctcctgatataatccgtacacaggag

SEQ ID NO: 229211 - DNA, 201 bp, Homo sapiens
agcaattgattggaaaaaattgtatcaaccacttagtgatcatgatttttagctagaaaacacattcattgtattctgatttcaccttgaaatgtaagtaagtctttactggatagctttaaatatatgtgcacttggcctttctctccccagccctctttttagagtattctaaatagttaaagacccagactaccttgc

SEQ ID NO: 229212 - DNA, 201 bp, Homo sapiens
ggcacacaaacacagtctggacatggtgccacttgcagttgagaggaatataaagaaatataaagatggtgtatgaaatcataaatgcataaaattaactrtagtacatactgtactataagaaatttgtagccaccttgtattgctattggggtgagctcaagtgttgggagtatctgtttaaaactcctcaggacacta

SEQ ID NO: 229213 - DNA, 201 bp, Homo sapiens
tagcaattgattggaaaaaattgtatcaaccacttagtgatcatgatttttagctagaaaacacattcattgtattctgatttcaccttgaaatgtaagtaagtctttactggatagctttaaatatatgtgcacttggcctttctctccccagccctctttttagagtattctaaatagttaaagacccagactaccttg

SEQ ID NO: 229214 - DNA, 201 bp, Homo sapiens
atggtgtatgaaatcataaatgcataaaattaactatagtacatactgtactataagaaatttgtagccaccttgtattgctattggggtgagctcaagtkttgggagtatctgtttaaaactcctcaggacactaatcatctctgagctgatggtcactccagtaaattgtttcacagtaaaaagtgatctctcatggtt

SEQ ID NO: 229215 - DNA, 201 bp, Homo sapiens
ttcacatagtagactgctggaatgactgagggtgatgtttggcctgtaaacaaaaagtgttaaagaaggccaggtacagtggctcatgcctataatcccamctacttgggaagctgaggcaggagaactgcttgaacctgggaggcagaggttgcagtgagctgagatcatgccactgcattccagcctgggtgacagagc

SEQ ID NO: 229216 - DNA, 201 bp, Homo sapiens
taacctacttcattgttgacatttttctgacgttttaatatgtatgtaaaaaataattgttttttagacagtctcactctgttgtccaggctagagtgcaktggtgccacctcggtgctcactgcaacctccacctcctgggttcaagcaattctcctgcctcagcctcttgagtagctgggattacaggccaccatgccc

SEQ ID NO: 229217 - DNA, 201 bp, Homo sapiens
aggaactacccggggctgggtaatttataaggaacagcagtttaattggctcctggtttctcaggctgtacagaaagcatggttggggaggcctcaggaayctttcaatcatggcggaagggaaagcaggcacgtcttctgtggctggagcaggaggaagagagagtggagggaggtgctacacacttttaaacaataagg

SEQ ID NO: 229218 - DNA, 201 bp, Homo sapiens
tgagtagctgggattacaggccaccatgcccagctaatttttgtatttttagtagagacgaagtttccccatgttggccaggctggtctcaaactcctggyctcaagcaatctgcctgcctctgcctcccatagtgcttggattacaggcatgagccagcgcacccagcctgcatataaatgaaatttttaacgatggtat

SEQ ID NO: 229219 - DNA, 201 bp, Homo sapiens
agaacttcagcgttctaaggtatcacaagtggcaggcagaggtttgtggtccaagaccattttctgcctcaagtgaaagcacctggtgattcattgggccmccaagaaagtccagcgtgggcgccagtctgctcagtaaccagcacatagacaaaggaagctccatgtctggcaggaaacatgtactgaaaggacagtgcc

SEQ ID NO: 229220 - DNA, 201 bp, Homo sapiens
ctttacagaactcctaagttggtctttatactattaattgctagtttcacatgtttcctgcataggggtaatattgaaaagacagatcttggggattgtgrcacaactataatgtgtcttctgagtcatgaaatgtactatattcaatatgacgttatggtgctgttttacattctagattatgtttaatataattttcat

SEQ ID NO: 229221 - DNA, 201 bp, Homo sapiens
aatggggtgtcctaagaatatcaaccccttagtagctcctcacagcccagttccaggctcctgttcttcagctgtcctgatgttgtgttgtaagaaagttytaggccgagcacagtggtgcatgcctataaccccggcactttaggaggcggaagtggctggatcacttaagcctgggaggttgaggctgcagtgagctgg

SEQ ID NO: 229222 - DNA, 201 bp, Homo sapiens
ataaatattttagaattttcttagttctaacttggaattaaatatcagcaaatatagtcacataaattcaagctcttcggtgtagtcaatttttcaacagygtgaagaggtacagagaccaacaggtttgtggataggtcctctgaacccatagtatgtttccccactcctttgtctcagctccagatttccctgccttcc

SEQ ID NO: 229223 - DNA, 201 bp, Homo sapiens
cactggtaagccagtcttgtttacactaccaggcactgttggagcaactgagggagaactctgcaaggcagaggtgattccagttagcatcccatctgctstgtgagagaatcatattgcacttcccagggggtgggtttgaggaaaccacatgaagaggcaaaactgcagctgtctccttgcagataatgggtgtggagt

SEQ ID NO: 229224 - DNA, 201 bp, Homo sapiens
cccagaactttgggaggccgaggcgggcaggtcatgaggtcaggagttcgagaccagcctggccaacatggtgaaaccccatctctacaaaaactagccargtgtggtggtgcactcccgtagtcccagctactgagaagggtgaggcaggagaatcacttgtacccaggagacagaggttgcagtgagccgagatcatgc

SEQ ID NO: 229225 - DNA, 201 bp, Homo sapiens
gctgccaagggggcacaaggcttcctattcagctgggcctgtgaggctgtgggaatccataaccccttgtcaccttcacaatcacagccatccacaagacsaaatgtgccttgctcttgaatagtattaactgccccttacagatccaaatgtggctatcacagtggcagtaagtgcgccattaaaatgaaaaccatttac

SEQ ID NO: 229226 - DNA, 201 bp, Homo sapiens
ttctaccttctatctgagaacttcctcactcgccttcagacacttgccttcagccagtgcacagaccatacagatgcctccttcttcccttggggtgtttkcacttgccactcctcagctgactgtcctttcctcagagcagtcttttctgaccatattgtctcaggtagctccctcttttattccctcccaaggcagtga

SEQ ID NO: 229227 - DNA, 201 bp, Homo sapiens
gcaattgataattgcaaaattctattgtaaatgaatgtcaaatcagaattctggtatccatttctttggtgatgccaagcaaatgaaaccctgccacttgycctgcattcaaactgaaattggaatttgatcttgggaattactttcttgtctagtatttgactgatcaaatgtaactccttcccttttaggcccctttct

SEQ ID NO: 229228 - DNA, 201 bp, Homo sapiens
agggcctggatgtgaatccaagctcagttgtcttacaagagcaagccctgggaattacttaacctagatttccttcagttaccttatgcttcaaatgggcrgtaatagtatctacccagcggaattgttgtgaggatcatgtgagttaatatatgcaaaatgcttaaactctctctcgtccatatgaagcattcaaatata

SEQ ID NO: 229229 - DNA, 201 bp, Homo sapiens
ggattgtgcaaggcttctaagaagttcagaagggatatctagcttaggctgagaaagcttctaagctggggtgatagacttttcatcatctggccttttcwtgcctctccagctatatcctccaccttgtttccaaatgcactcttcacttagtggtgctaaaccctttttagttctctggttaaattagtctgtcatgtt

SEQ ID NO: 229230 - DNA, 201 bp, Homo sapiens
taccttatgcttcaaatgggcggtaatagtatctacccagcggaattgttgtgaggatcatgtgagttaatatatgcaaaatgcttaaactctctctcgtscatatgaagcattcaaatataagctccattattgttaagtttctattgttatgagaattatagaagagtctaatgtgatttttgtgttctacaagttttc

SEQ ID NO: 229231 - DNA, 201 bp, Homo sapiens
tccagctgttctgggacggcctttctaccttcagctcactgagtttggatttattacagctttgcctgtttaatagtcttctgcacctagcacaaagtagrtgcttgaaaagagtgatgtgactgaaagaatcattcagtctctcgtcttctagccctttcgcctccagtgctaaagggaagggagattttcccacttctc

SEQ ID NO: 229232 - DNA, 201 bp, Homo sapiens
cttagctctgctgctgtagcccaaaagcagccaaagacagtaaatgagtgagtgtgactgtgttccaataaaagcccctttaccaaatcaggcacctggccagatttgacccagtggctgtcgtctgccaatgcctgttcttgatcattatccaaaccagcgcatctcacgctgtagggcagccctgtccaaaataaacat

SEQ ID NO: 229233 - DNA, 201 bp, Homo sapiens
gctctgctgctcttctgctcatggagcgtggggtttggggttcttatgggcacaggatagggtgcagggcaggtcagagtggttttggaaaaggcaacatytgggcacaaaaacaagcatgcctattctcatttaaggccatgggtccaggcttgagagtagaaccctcaccagggacccttccctcctgcttcctgtcca

SEQ ID NO: 229234 - DNA, 201 bp, Homo sapiens
gaactactatgaggcaggctatgcttgtggctttcacccaccttctgcctagcagttgtttcaggaaagtccattttactccttttcccaaagagatggaygttacctatgtgtccgtgtggtcatgcactttagaatccttctcctctcatgggatgggagtttccttacaatttgtttatccctcatgtatttatcgaa

SEQ ID NO: 229235 - DNA, 201 bp, Homo sapiens
aggcaacatctgggcacaaaaacaagcatgcctattctcatttaaggccatgggtccaggcttgagagtagaaccctcaccagggacccttccctcctgcytcctgtccatatcaccagtgtgtattgttccctgtgtccatgtgttctcattgttcagctccctcttgtaagtgagaacatgtggtgtttggttttctgt

SEQ ID NO: 229236 - DNA, 201 bp, Homo sapiens
ttgctcctcttcacattttctgagtgttcctccctgagacatctctgagaggtctcctaaaagctagattttagacaaatgcaaatctagagcatatgtcrtgatagcaaagggctcctacttggcttgagcaccagagtctcagtgacggcttcaacactgctatcataactttagaagcaaatggcaacttgccaaggt

SEQ ID NO: 229237 - DNA, 201 bp, Homo sapiens
tatttggaccactgtttctgccaataaagttttgagctgacttacaaaaacagagtacaacacatttatttttactgtaagtgagaaattgaggctgaagraaaatacctgggaaattccatgggtggtctgtgtatataagattcagaataaaagtaaatagaatgtaaaaatttcaacctcagtaaagttgaaagaaca

SEQ ID NO: 229238 - DNA, 201 bp, Homo sapiens
attgctcctcttcacattttctgagtgttcctccctgagacatctctgagaggtctcctaaaagctagattttagacaaatgcaaatctagagcatatgtsatgatagcaaagggctcctacttggcttgagcaccagagtctcagtgacggcttcaacactgctatcataactttagaagcaaatggcaacttgccaagg

SEQ ID NO: 229239 - DNA, 201 bp, Homo sapiens
gttcagtgatcacctgtttatctctcattgagattcattaactttgacatcttgatatatctgtgccgtgtctctgtagacacttcctttgtgccaaaccmtctaacaaacagtagtctgctgcagatgttaggatgctttactcctaaataattcagcttgcattttccaagaataaggaaacattcctacacaactaac

SEQ ID NO: 229240 - DNA, 201 bp, Homo sapiens
ttgagagattttcatatacttctttaggaatcagacagatctggtagataagtcaggttatgtaacaagtcaacttcaaaggtctgttcttcactataaaytggaagtctctgtctctgtccattgctcctcttcacattttctgagtgttcctccctgagacatctctgagaggtctcctaaaagctagattttagacaa

SEQ ID NO: 229241 - DNA, 201 bp, Homo sapiens
cagcttgcattttccaagaataaggaaacattcctacacaactaaccccatttactgcacccaagaaaattcacattagttcagtaatatcatattttccrtattcagattttctcaatttgctttctcagttggctttttttcctccatgacacagatccagtcaaggttcctaaattgcttttggttattcataaatta

SEQ ID NO: 229242 - DNA, 201 bp, Homo sapiens
ttcctgctgtcttggctagtttccaagcctgcccagaaaacaagcatctctgtttttagaagatggtagtgatgattactttttcctgggggaaaaaaaaatgccagaaagataaatactttgtaaatcactgcatgcctcctgcctgcaagcttggagtctgtttgtgagacatttatctccttgtgtactcacccccca

SEQ ID NO: 229243 - DNA, 201 bp, Homo sapiens
ttggttattaaatattttaaaatatatatcaattgtctaactcccttggatattcatgacattaaattatttgaagattccaagccatatggcccatgcarcagcctactatcttgatccatctcattgttttctcctgattcggttcatttaaaccatttttggcaaggacaccaaataggttatgttgtccccttgcct

SEQ ID NO: 229244 - DNA, 201 bp, Homo sapiens
ggagtgcagtggcatgatttggtctcactgcaacctacacctccggagttcaagcgattctcctgcctcagcctcccgagtagctgagactacaggcatgygccaccacccccagctaatttttgtatttttagcagagaaggggcttcaccatgttggccaggatggtctcgatctcttgacctcgtgatcttcccgcct

SEQ ID NO: 229245 - DNA, 201 bp, Homo sapiens
agttcaccattcatctgaaattcaaagacaaagctgaatttattgtaaaggagaactatgctggtcgagttcagtctgagtagaccaaagtggaaagtatrgagttaagtagattttcagaagtaagtaagctgacatatgtggaaacatgttgattcaggtgaggagtggggcaggttgcttaattggcacttagagatg

SEQ ID NO: 229246 - DNA, 201 bp, Homo sapiens
gttgtttaaaagtgtgcggcaactcccctctctctctcttgttgctcgggccatgtgacctgtctgcttccactttgccttccaccatgattggaagcttyctgaggcctccccatgatgccagcatcatgcttcctgtacagcctgcagaactatgggccaactaaacctcttttctttataaattaccctgtctcgggt

SEQ ID NO: 229247 - DNA, 201 bp, Homo sapiens
aaatgaaaaccatttactctagtgacccagagctgtcttatatattcctctctctgcagcagtgactgtttccttttctttatgtatcaaaattactagcrctgtgagcaacccccaccattgtcctggacttataaggagtccagtaaatcactaagtgattttctttttcttccttcctttctttctttaaaaaacaaa

SEQ ID NO: 229248 - DNA, 201 bp, Homo sapiens
tgcttaaaccctggaggcagaggttgcagtgagccaagatcgtgccactgcactccagcctgggagacagagtgagatactatctcaaaaaaaaaaaaaaaggcaagattgcatcactaatcacttctggaatgttatactggaaacatttataatatgccataaataggtgatatggttcggatatgtgtccccaccaaa

SEQ ID NO: 229249 - DNA, 201 bp, Homo sapiens
ttgctgggcggcgtaggtgcaaccccttctgctttagtatttttctgagctgaaatactgtcttagatattctagatgaaatactaccagccaaaaagggsacatgaagaaggtttttggtttaggaggttatggttctggcatgtttcccagtagggtggctctgagaaatggagccatggtgttgaagaggaaatcacc

SEQ ID NO: 229250 - DNA, 201 bp, Homo sapiens
gtcttccttcttctatgagagtttgatccaaaagatacatagcccttattgacagggtcatccccaaaatacctggccttgtggaaatgtccttgccctakaattgcaccgtttttttaattcaacaagcctttactaaggacaaggcctatactcagcattgggaatacagaaatgaatcacccacatttcatggagtac

SEQ ID NO: 229251 - DNA, 201 bp, Homo sapiens
ctgtttgtattactattatatgattatttttcgaagccccaagtctgtaattctgcccatactacttgctacctcattcactcgctctttacttatgcagktctctgttagccaattcttatttcttgtcagtttcagagtcatgatggtcacctttgaagatgcactgtcatttcaaagcactggctaactacaaccaag

SEQ ID NO: 229252 - DNA, 201 bp, Homo sapiens
gggttggcaattcccggagctgagggttgggttcctcctctttttagaccatatagtgtaacttccagactttgccatggcatttgtaaactgtcatggckctggtgggagtgtgttttagcacactgatgcattgtaattatcatataatgagcattgaggacaaccagaggtcacttttatcaccatcttggtttcgat

SEQ ID NO: 229253 - DNA, 201 bp, Homo sapiens
gcatttatttgcaaaagctttgtgttaagtctaaagccccaacaatcactttttcacttctgtgttctattgttttgttaaaagttttcaaacttctaaayaatagtgaatacgccaagttttaacgcttacacctggcaggaagaaaaataagttctgtattttacactttgtttctcctgacactatttttttcttttt

SEQ ID NO: 229254 - DNA, 201 bp, Homo sapiens
caggaatccagtaactgaggcttttaaatatctagctgtgttactcactattttgctgcagtcatcatacttaattggtacaccctgaagtgtgaaccaayctcctacaccctctacggcccttagaactggaaggatggttttgctagatcttccttaagaacactaatatttttttctcttctaacttgtagtggttag

SEQ ID NO: 229255 - DNA, 201 bp, Homo sapiens
catgaaataagccatagcactaaccatgaacaccagtttgttgtttgtttttttttgtttttgttttttgagatggagtctcgctctgttgcccaggctgragtgcagtggcacaatctcggctcactgcaacctccacctcccaggtccatgaacaccagttatagatatccatctaaggctgcagactaatgtctcatg

SEQ ID NO: 229256 - DNA, 201 bp, Homo sapiens
atggttccccctggaggccactgactgttttctttagtcctcatttctttttattttatcttttctttaaaaaaatataaactagccaccgaaatttttawtgggacatttcacataggaaagttagatttggggcggcttttggaaaataagtgattccagctactcagggccttcattccattcctgaaagcagttggt

SEQ ID NO: 229257 - DNA, 201 bp, Homo sapiens
aaataaaggattgcgtgtcaaaatggagatgtacgatttatggcattagcacttctattaataaatttatgcagcaattatatatcttcacattttatatytatttgtaactgaagacagcttctttatgttgcaagagcatatttttcttcaaaacacattttattttcttggatcttaagcttttgttccggatttcca

SEQ ID NO: 229258 - DNA, 201 bp, Homo sapiens
aatctgtttcattcttctcagataatgaaaaaatatgtcaagaacatgatttcttaaagaatatctaatttatggtgctcgggcctttaaaccatccttgygatgtgcttatgagcacaaccataagaataacaaaaagtcacatcaaatattcccattaggaaaatccccagactacaagctttagacatttacaattgt

SEQ ID NO: 229259 - DNA, 201 bp, Homo sapiens
acagcagagtgaaaattagggtcacgtttacacttactttgttaaagctaaatttattttttaagtgagaagcactgcctttattaagacagttaatgcckaagaatgaatgaaaatatattgaaataatgtgtctttctcttctgagcaaaggatgtaaacccaggctttaaaagaatcccaaggtcttaattctgcaag

SEQ ID NO: 229260 - DNA, 201 bp, Homo sapiens
gttcttaataactagaaacatgccagaatactttccatccatatattttctcctttttacaatgtcgattcagaatatcatgacagatcttccttttctgrcattaattggtgatatactaatgatagccttcattgtaagtaaaaatgtattaattatgagccttttttggcagtaggcattttgatttgctcactggag

SEQ ID NO: 229261 - DNA, 201 bp, Homo sapiens
tggcagtaggcattttgatttgctcactggagtgtagaatggaaataaaaacttaaaaatataagtagcaatgaatacttcagtgttctgtgctctttcartggtgtactacagtagaaactcgatgaggccacagtgttttttattttattatttgtttttattttttattatttattcatttatttattttgagatgga

SEQ ID NO: 229262 - DNA, 201 bp, Homo sapiens
tcttgaccttctggaagtagctgcggcctgctttccctcctggagaaacaaacaactcaatttgtttctgctctctggttagtgcatcacattagtaatakctacaataattttttcaggtaaaaatgtagtcaagttgttgaagacatgagagatcagagtagtttatgtgtgtacatacatgtgtgcatgtgcttccta

SEQ ID NO: 229263 - DNA, 201 bp, Homo sapiens
cctgatctcttgaccttctggaagtagctgcggcctgctttccctcctggagaaacaaacaactcaatttgtttctgctctctggttagtgcatcacattmgtaatatctacaataattttttcaggtaaaaatgtagtcaagttgttgaagacatgagagatcagagtagtttatgtgtgtacatacatgtgtgcatgtg

SEQ ID NO: 229264 - DNA, 201 bp, Homo sapiens
aaattaaagcagggagacatcatgttttaaactacaggtttggaaatgatttttaaaaagttataataacttatatgggcaggggtgcaaatgaataggcrttcttacaccctgctggtggggtacggaaagcccagatggtataggttatagagaaggggatgtgtaacatgccattttggcaaggagtcctggcagatt

SEQ ID NO: 229265 - DNA, 201 bp, Homo sapiens
tacaaaatgagcatgaatggatcctgaggttgtaccgtaagcaacttagagacctccaaattaaagcagggagacatcatgttttaaactacaggtttggraatgatttttaaaaagttataataacttatatgggcaggggtgcaaatgaataggcgttcttacaccctgctggtggggtacggaaagcccagatggtat

SEQ ID NO: 229266 - DNA, 201 bp, Homo sapiens
tttcttttgtagctacaaaatgagcatgaatggatcctgaggttgtaccgtaagcaacttagagacctccaaattaaagcagggagacatcatgttttaamctacaggtttggaaatgatttttaaaaagttataataacttatatgggcaggggtgcaaatgaataggcgttcttacaccctgctggtggggtacggaaa

SEQ ID NO: 229267 - DNA, 201 bp, Homo sapiens
ttgtaaaggagaactatgctggtcgagttcagtctgagtagaccaaagtggaaagtatggagttaagtagattttcagaagtaagtaagctgacatatgtrgaaacatgttgattcaggtgaggagtggggcaggttgcttaattggcacttagagatgtatgagtctgttgctgactggctgtcttttagcaataaaggg

SEQ ID NO: 229268 - DNA, 201 bp, Homo sapiens
tttcctttagagtattacacttatagtcaatcataactttgtttgtttacttgtttttagtgtgtctctcttactagtatgtcatctctaaagaacaaaarcagtgtctatcttgttcttcattgtatgcccagcacctagcacaatgtgaatgtgtagtgaatagctgttgaatggatgattgaatcctggccagggctg

SEQ ID NO: 229269 - DNA, 201 bp, Homo sapiens
tacatatcagtcaatcttttcctaggtttgctgtgacttgaattaatagacatgtcttgttccacaataagatttcccctaattgtttgttttagcatttrttggtgattctggcttgagtcatttataatatgggatatataagatgttagctttctatttttgtcgttctttcaacatatatttacagacattattctg

SEQ ID NO: 229270 - DNA, 201 bp, Homo sapiens
gggaggttgaggcaggagaattgcttaaaccctggaggcagaggttgcagtgagccaagatcgtgccactgcactccagcctgggagacagagtgagataytatctcaaaaaaaaaaaaaaaggcaagattgcatcactaatcacttctggaatgttatactggaaacatttataatatgccataaataggtgatatggtt

SEQ ID NO: 229271 - DNA, 201 bp, Homo sapiens
atttttgcatgagtgaaaaatcagaccttggcgatgactttgagcagtaggatatggataactcccacatgcttggcattccagtaatggaacactaggcmtaagtgggttaatggcagttctgttactaacttactttccagggaggccttgcttggccaccctaaacaaagaaggtgccttcgttattctccattagtg

SEQ ID NO: 229272 - DNA, 201 bp, Homo sapiens
tcttgttttctcctcctacaatcaatcaatatcaataatgcaatgatgaagacagatgatttatacacacacacacacagagagagagagagagagagagaaagagagagagagagaagcaatgaacaccttgaaatagaaagtaaaagttagggaagctgctcttactataattagctggctggctcattgcatgccacc

SEQ ID NO: 229273 - DNA, 201 bp, Homo sapiens
ttcttgttttctcctcctacaatcaatcaatatcaataatgcaatgatgaagacagatgatttatacacacacacacacagagagagagagagagagagagaaagagagagagagagaagcaatgaacaccttgaaatagaaagtaaaagttagggaagctgctcttactataattagctggctggctcattgcatgccac

SEQ ID NO: 229274 - DNA, 201 bp, Homo sapiens
cctaactataaaatggaaaaattcttgttttctcctcctacaatcaatcaatatcaataatgcaatgatgaagacagatgatttatacacacacacacacagagagagagagagagagagagaaagagagagagagagaagcaatgaacaccttgaaatagaaagtaaaagttagggaagctgctcttactataattagct

SEQ ID NO: 229275 - DNA, 201 bp, Homo sapiens
aaggtggaacctgtgaggtgctattggagcttcagagaggagcacatcacccatacttcatcagattttcaaggaggttcatgacccccccccccaaaaaataaggacctccaaactaaaggaacaggaatttgatatgatggttgggtgaacaacatatatagaaataatgatagatggacaaatatgtttgagatgttc

SEQ ID NO: 229276 - DNA, 201 bp, Homo sapiens
caaatatcacatatgtaagtctatgtacgccttcaaagaaggtttattctactaagaatggtattttctgagagatgttgtttaaaactgagttaaaaaaatatttaagtagatttcctagtgtttctagaatcttccaaagggcaggaaagggagtaatcagtggagaagtgcagcttccctttggtttgtttagattca

SEQ ID NO: 229277 - DNA, 201 bp, Homo sapiens
gctgtttccactttctcccctccccttttcctctacttctcatgaacaaaatatccacagatttcttccatccctgttaggggagtttcagggccttccccatcacaggccttgagaaaccaaacgtccgtgccctaaggtatttttttctctgttgcgcttggctttatagtcttgcccagtaggacctgcataagcttt

SEQ ID NO: 229278 - DNA, 201 bp, Homo sapiens
cacaggcttctgtctgaatagggcagacgctttggctacagttaattattgccaagcagggtaggggaacctgagccactaggtacacattttttttttttaatacaagtctaattattttttaaatcttttaaacactgcataagccatacagagcattcagtgtgcctgagctggcctggcacctgccatgtggcagcc

SEQ ID NO: 229279 - DNA, 201 bp, Homo sapiens
ccctatgctcgggcccactcccaccctgtggagtgtactttcattttcaataaatctctgcttttgttgcttcattctttccttgctttgtttgcgcattytgtccagttcttcaagatgccaagaacataggcaccctctaccagtaacagcagtaccttcttcttcaagggaaaacctagccttatgggataaagagac

SEQ ID NO: 229280 - DNA, 201 bp, Homo sapiens
aggcagagtcagcaaagggccttctcaggagacccaagtggcagtgagacaggaaaatagggtctgcaggcagggaacataaggctgattcacacttgagstatgacaggggctatcctctccatagggcatacgccaagtaaatgacttcataactttacttcatcctcttcatttacatagggcatacacccagtaacc

SEQ ID NO: 229281 - DNA, 201 bp, Homo sapiens
aacaagcctttactaaggacaaggcctatactcagcattgggaatacagaaatgaatcacccacatttcatggagtacatgctcaatagactgcaacatakagaaattagagaccctttgcaagttatagaaacccaactcaacctgccttaagagccttaagagaatgagaacgagtttattagctcatgtaactgaaaa

SEQ ID NO: 229282 - DNA, 201 bp, Homo sapiens
tagttaattgatctttgacatttatttacttggtgtatactatctttatacctttgcattatggcatataccagtgatttctggaactaggtcattattasaatcaccttggaaactttggtaaactataaatttctggctcaacccttaaaatatactaattcactagctctgggatgtagcttgtattttaaacattaa

SEQ ID NO: 229283 - DNA, 201 bp, Homo sapiens
ctgctgtgatgaagtggcatttacaatgggaagctttgggagtgatgggagaggagtgccatgtttgtgcagagtcacttttatgtggtggcttcgattcyttattcaatggaagccagatgcttacagttaacatttttaatgggttcactttcccaggtagctcataaaatcccactaataaatcaaagggcccttctt

SEQ ID NO: 229284 - DNA, 201 bp, Homo sapiens
agtcttcattaagaataacttcagtgtaaactgtcatggatggatttgggtaagatgtcaacacacacatgatcttccactcttcagtgctgatatcagtmaaaaagaagcctctctaatctgcctccaaatagctgcagcttctttgatctagtctaatcagaggaacaagcccattaggggttaaaagattctctgctg

SEQ ID NO: 229285 - DNA, 201 bp, Homo sapiens
tcagtaaaaaagaagcctctctaatctgcctccaaatagctgcagcttctttgatctagtctaatcagaggaacaagcccattaggggttaaaagattctstgctgctgctgctgccattaacttaattgctatgatacagtaaactatggggaagtcgagttaaatgctgaagtctttagggcaagagactaaataggtt

SEQ ID NO: 229286 - DNA, 201 bp, Homo sapiens
tttaaaaagttatactttaaaaatatttgtgaatatttaaaggcaacactgtatcttgtgtgtacaaacccatctgtgggctgacattattcaggggcatstgatcagatgtggattaattgcatgtggtggagctttttatgccaactctttcagatattctagctcactggcagtgtcttcatgaacgtggattggcca

SEQ ID NO: 229287 - DNA, 201 bp, Homo sapiens
agggagagatcttcatggcccccattttccaggtggtgaagagattaacttagagctgaaatacttacatagagtcagggctaggatttaaaacaggactsatggtgaaacctgaaggcatagacatgacccatagctgcctttatgttttacaacttcctgttgattttcattttcctcgtttgtcagtcatctcccttg

SEQ ID NO: 229288 - DNA, 201 bp, Homo sapiens
ttgattttcattttcctcgtttgtcagtcatctcccttgacttcccacatctatctatgttgcatcctagcctggtgcctggcctggcggaggcattggarcattggaaagaatgaatgaatgagtttagccctctggagagtgtatgctgaaaaactgttacctcgcctttaagagcttaaaagtgaagagaatgaattt

SEQ ID NO: 229289 - DNA, 201 bp, Homo sapiens
ccttgacccccctatgctcaagtgatcctcccacctagcctttctagtagctgggactacaggcagttgccattatgatctgctaattttttaaatttttwaaatttttaaaatttttttatagagacggggtttcgctatgttgcccaggctggtcttaaactcctgggctcaagcaattttcccgctttggtttcccaa

SEQ ID NO: 229290 - DNA, 201 bp, Homo sapiens
ccatttttcataatttggagtcaggtctttatatgaactttagatatttcattgttgaagacacttacatttgcatactttcaatgtaccttgttttttartctatcttatttggagttaatattgttagtaatataacctggaaaaataataactcaattgattcaagaccattttaattaaaaatatgtgctaactctt

SEQ ID NO: 229291 - DNA, 201 bp, Homo sapiens
gcccctggtaatctgtgttctacttttctgtctctgtaagcttgcctattctaggtacctcacagaagtggaattgttaccaaaacactaggggttcggtmtaggtcctgctgtttgccgtgcagaaaaccagtcactgagatgatgagtattgccaagaagaagggagttcagtctcaaatccatttccctgaccaaaac

SEQ ID NO: 229292 - DNA, 201 bp, Homo sapiens
catctgtcaaatggggccactttaaaccacttcatagggttttcctgatactgaaatgagataaagcatatgaatcgcttggtgcagtgctcaggaagtasgttactaattattagtccaaattagtgtgattttattattgagtgtggctgctattgctgcatttttttaccttagagttgcactgtaaattgatttatg

SEQ ID NO: 229293 - DNA, 201 bp, Homo sapiens
ttacttgcttaatgttttttctaaaaaagttgaactagttttagttgtactaagttatctttgtgcaaaatgagattttccgtagatacttatattctttmttgggattgtggcactagtataatcaactgatatttaatatcctttatgaaattttgtttacctgagattttgcattcatacaacttctggaaaatagca

SEQ ID NO: 229294 - DNA, 201 bp, Homo sapiens
cagcagggctttgacttacaagcaagatttccataggtggaaatgggagggaaaagaaaggtatgctgtgtagaagaaatggcatgagcagtggcccacaygctggacaaggataagatcagttgaaagattaactagaagtgcctgtactgggtcaaggatggttttagatacacacacacaacatgcatggagtgtatc

SEQ ID NO: 229295 - DNA, 201 bp, Homo sapiens
aataaaagtccaagttcagatgacttcactggccaattctaccaaacatttaaaaaattaatatcagtttttcagaaactcttccaaaaattatcactacrttctatgaggccaatagcatcctgttaaccaaaacagacagacatcacaatgcaaggaaactacagaccaatatcttatcaatacagatgtaaaaatcct

SEQ ID NO: 229296 - DNA, 201 bp, Homo sapiens
ggtgtcataatgttcctcactccctatgtactactccctccccagagagagccaaggcattccataaaatcaacatgatctgttacagcttcttttgggamtatatgatactcaagtgctattgacctaatacttaaaagcctctggctgttttttatggatatggtatactttgttgcccaaggtaaatgcaattggaat

SEQ ID NO: 229297 - DNA, 201 bp, Homo sapiens
aatcaacatgatctgttacagcttcttttgggactatatgatactcaagtgctattgacctaatacttaaaagcctctggctgttttttatggatatggtwtactttgttgcccaaggtaaatgcaattggaatagcttaatccagtgaaagctctttcccctcgattgcataaagctcaaaaggtatgtcttcataaaat

SEQ ID NO: 229298 - DNA, 201 bp, Homo sapiens
ttatctgaaatagattaaccttttaaagtgataatgacataaaattatgtaagtaattttcctaagaaataacacactgaaaataatgtgtgacaccatcracataaagctcagcataggcttttgtctgaattcagttactttggggtgaccgttttaatcaaaccatttgtctgtctctacatccaggaatgtccatac

SEQ ID NO: 229299 - DNA, 201 bp, Homo sapiens
tacttaaaagcctctggctgttttttatggatatggtatactttgttgcccaaggtaaatgcaattggaatagcttaatccagtgaaagctctttcccctygattgcataaagctcaaaaggtatgtcttcataaaatctgtatgggggaagcatatgtgaaaacccacaaggaagtaatagagtttgtttgcacatctcc

SEQ ID NO: 229300 - DNA, 201 bp, Homo sapiens
ctagttttgctgtcatgtctgagaaatatttgtttactgagtatggaaatgtctagtgttccatgttgtatagccaagagtctaccataaaacagtcaagytccaacatgtacaaattaagtaaacagaagtcatagagtagtatgtgctggctcctaaaggaaggtctcagatcttcatagctaatcacatttcacttca

SEQ ID NO: 229301 - DNA, 201 bp, Homo sapiens
ttgacttcccttcttgggtctaaactgaaatccatttatctaagtctattagtaaggtagtctttgattttctgaagtatttagtcttcttattcattaartgagaattgggcaaggatgagctttgtggatcattttactttaaatatagttaaatctgtgtgtgtttccatgctttagggaaacttttgcttgttagaa

SEQ ID NO: 229302 - DNA, 201 bp, Homo sapiens
cctttgaaatgatgtttgagtttggatgtgatttttgaatctctctcttattccatgtaacgttgagaagttacaccttgttcgaaactgctcctgatgcwcttgggtcacctacgtagccccaggataaatttgtacttgggaaagtaggtatattaaaagtaaaaatattaactaactacagttatcctcgaatgtgat

SEQ ID NO: 229303 - DNA, 201 bp, Homo sapiens
ttcattatgttgacatatgtttaattcaaatgaaatccgttagtgttaactattcattaatactacagatatatacatgtaaggataatttcactttccawggcattaattattattattttttgttgtccctgtgctatgtacacagctttaattgtctggtctgatttaaaggatttgtgtaatgtgtcatcattggaa

SEQ ID NO: 229304 - DNA, 201 bp, Homo sapiens
acagctgcattctaaccccatacactgtggagatacacatatatatatgtatacatatatatgtatatatatatataaaccctatacccatatatatatawgatttgctcaactgctttaactcacttgcagtaacaatgactgtggatggtaggagagagtcaagcaggcaaaattctccttgatgggaattgccgctgg

SEQ ID NO: 229305 - DNA, 201 bp, Homo sapiens
ggacacccccatgttccacagctgcattctaaccccatacactgtggagatacacatatatatatgtatacatatatatgtatatatatatataaaccctrtacccatatatatatatgatttgctcaactgctttaactcacttgcagtaacaatgactgtggatggtaggagagagtcaagcaggcaaaattctccttg

SEQ ID NO: 229306 - DNA, 201 bp, Homo sapiens
aaaattataatcaacatggaggaatcacagctcagccagcgtgtgcttgcttccaaggccccaggtctctcagcctggaaaaggagagcggggaacaaagraggaacaatgtgagggaaggttctccttggcagcttcggggaagggatcctcaaaggagaggcacaggtctgaagacggaagtgtctgaggccaatcttc

SEQ ID NO: 229307 - DNA, 201 bp, Homo sapiens
ctccgggtacttagagtagggcagagtgcaggggactgttattctgctttgaagttttctgcctccctctttggaatggatcaaaggcctcctttttttttctttttagaattcctataagctcttaatacagtgctctcctctcagttcccctcctcttctattgcaaattcctttcccaccagcctcagaaccagaagt

SEQ ID NO: 229308 - DNA, 201 bp, Homo sapiens
gaaagtaatagatgttggcgtggatgctgtgaaaagggaacacctctacactgctgatgggaatggaaactagtataaccactatggaaaacagtgtggarattccttaaagaactaaaaatggaactaccatttgatccagcagtcccactgctgggtatctacccagaggaaaagaagtcattatacaaaaaaggtact

SEQ ID NO: 229309 - DNA, 201 bp, Homo sapiens
aactgtagtcccagctactcaggaggctgaggtgggagaatcacctgagccccagaggccaaggctgcagtgagccaagactgcaccactgcactccggcstgggtgtcagagtgagaccctgggtctaaataaataaataagatgatcagagtaggagagaataatgcagatagggaaccatactgtggaattaaactgg

SEQ ID NO: 229310 - DNA, 201 bp, Homo sapiens
agctgggcgtggtggtgcgcaactgtagtcccagctactcaggaggctgaggtgggagaatcacctgagccccagaggccaaggctgcagtgagccaagastgcaccactgcactccggcctgggtgtcagagtgagaccctgggtctaaataaataaataagatgatcagagtaggagagaataatgcagatagggaacc

SEQ ID NO: 229311 - DNA, 201 bp, Homo sapiens
tagctgggcgtggtggtgcgcaactgtagtcccagctactcaggaggctgaggtgggagaatcacctgagccccagaggccaaggctgcagtgagccaagwctgcaccactgcactccggcctgggtgtcagagtgagaccctgggtctaaataaataaataagatgatcagagtaggagagaataatgcagatagggaac

SEQ ID NO: 229312 - DNA, 201 bp, Homo sapiens
taggaggtgaaaagtgcaaagaaaaaataaagaacaggttaaaccaaatggaagttgctggaaaagggaactatattacaattttaaagtagggtgatccracatggtgaaaccccatctctacaaaaaaattagctgggcgtggtggtgcgcaactgtagtcccagctactcaggaggctgaggtgggagaatcacctga

SEQ ID NO: 229313 - DNA, 201 bp, Homo sapiens
aactgatatttaatatcctttatgaaattttgtttacctgagattttgcattcatacaacttctggaaaatagcaccaaaagtgtatgtactatatggttycatttttttctagtatcagttttctggaattcttgtaacagttaaatatgtcaaagacaagatgtaccagtccattaaggagatgagtttattcgggtta

SEQ ID NO: 229314 - DNA, 201 bp, Homo sapiens
acgctacctttataagaacatcatcatcatcttcagtttattgagaaggaagctgaggcttacagtgtgactttctcacagttgcatagcttttcggcacmaaaggctagaacaagatgttgcatacagaccggggcactggttctctttcctgtctgcttacttagtagttgttcactgaaatgcagatttgcagcttga

SEQ ID NO: 229315 - DNA, 201 bp, Homo sapiens
ttagaaacttgtggaaaagagcagaccagatgcttcattttccaaacctaccgaattacttggaggaaaagcactggttggaatgaaggcttcttagcccyataggaatttatattgcctgtgtgtgatatccctataaaatgagcttcctggcaagacttagtaaacacatttcaactagctataaagatttcataaacc

SEQ ID NO: 229316 - DNA, 201 bp, Homo sapiens
agagctagttcaggttgtctctctctgcttactaccttgactaaattacttacccactctctgcttcattttccttatccgtaagaatgaggattatgacrgtatttaattcagagttactgtgaagatgagcagattttatgtaatatccttggcacagtgcctaccacatacagaaaatgctcttctttttattttttg

SEQ ID NO: 229317 - DNA, 201 bp, Homo sapiens
agcagttccagctatgaatcaatcaagcagtaagatcgaagatgagaaaaatggccctaatagctagtgttcctaacagctttgaatcctccaattagtcrtggtaaatttaatccaccataaggctgaacattgggaaattctttaggcctcaaattcacgattcagtcccctcatccgcaaaccactttcggacatttt

SEQ ID NO: 229318 - DNA, 201 bp, Homo sapiens
tcaggttgtctctctctgcttactaccttgactaaattacttacccactctctgcttcattttccttatccgtaagaatgaggattatgacggtatttaaytcagagttactgtgaagatgagcagattttatgtaatatccttggcacagtgcctaccacatacagaaaatgctcttctttttattttttggacatcagt

SEQ ID NO: 229319 - DNA, 201 bp, Homo sapiens
tgagcagattttatgtaatatccttggcacagtgcctaccacatacagaaaatgctcttctttttattttttggacatcagttgataccacttgatactgyacacatagctaaaattattttttgtttgcttttagacctaagtttttttgtgtgattttttttgactccatcttaacacttgataattatgaaaaccaat

SEQ ID NO: 229320 - DNA, 201 bp, Homo sapiens
atattagagcccaaaatttgggggtttggggactgttttgtatggatagaagctttctttgagaaaagaaattaaggaatttcacttacagactgcaaccrcatacaaatgaaggaaactgaacaattgcttagaatgtgattaatttgtatttttgaataatggaatggagattgccataggaaagaaccatgagacatt

SEQ ID NO: 229321 - DNA, 201 bp, Homo sapiens
aaggaaatagaatagtatgaaactttctcaacctgataaaaagcattattaaaaattcacagctcatatcatacttaacagtaaaaaaaaaaaaaaaaaaragtgttttcccctaagataaggaagaaggcacagatatcccctcttgccatttccattcaacattgtctaacagttctaaccagggaaattaggcaagaa

SEQ ID NO: 229322 - DNA, 201 bp, Homo sapiens
agtactccaaatgataacactgatttatggttatttgaagtttctttgaggcctgctgacagattacaaaaattgcttgatatatctgtcttaaaagagawcattgaactaagaatgagttgtcatgttgtttggaatagaatatgtgtattatcatatttgaagctaattcttaacaaaataattcctatgtaacatatg

SEQ ID NO: 229323 - DNA, 201 bp, Homo sapiens
agacccagaaatcagggaactatagagtgctgagccgggagtccacaggctgcttttcccttcagggaatttgctgggttttggctcaaggagcagttgaraaaacaggcagctagaaaatcataccttgtgggcaacataatttttggtgatctcataaggctgaagagacaagcatagaagtttgggtctgccaaagca

SEQ ID NO: 229324 - DNA, 201 bp, Homo sapiens
gtcctgaggtcatctatttgctcccctgtccgtctgttatcttcagttacaatgcagttttgatgatcccaaagtcgctgttttaagagggcaagttttgmattaaatgcttatttactgttgctctggtatttaacagaacagcctgttgagaagtaagcgtctactcaaatctcccttctgattttaaacttcagccat

SEQ ID NO: 229325 - DNA, 201 bp, Homo sapiens
gacccagaaatcagggaactatagagtgctgagccgggagtccacaggctgcttttcccttcagggaatttgctgggttttggctcaaggagcagttgagraaacaggcagctagaaaatcataccttgtgggcaacataatttttggtgatctcataaggctgaagagacaagcatagaagtttgggtctgccaaagcag

SEQ ID NO: 229326 - DNA, 201 bp, Homo sapiens
tagaaaatcataccttgtgggcaacataatttttggtgatctcataaggctgaagagacaagcatagaagtttgggtctgccaaagcagccaggattcagwggaaccaagacctaagagagaagatgggtgccttgggtagatttatacctgaaggctttttattattattattattattattattattattattattatt

SEQ ID NO: 229327 - DNA, 201 bp, Homo sapiens
tagatctattaaataagattctttggggtcagggcccaggaatctgtttttaataagagctctgggtgattcttatgtactaaggtttgagaatttgctaragaagcaagatgatatttataagtggggttcagtgaaacttcagaggagagtttgcaaatcacagtaaattgagggcaaggttttttatgctttttaaat

SEQ ID NO: 229328 - DNA, 201 bp, Homo sapiens
ttaaaaccccatactctgaatttctgtgggtaaactagtctctatttaagtatgcctgtgttgtcagtaactgtgcgaaagacttttacgatcttgttcakacaaagcagatgttattgtccatgtttcataaattaggaaactgagcccctgagaaatgatgtaatttgaccaaggccacagagaagtattttagtcaga

SEQ ID NO: 229329 - DNA, 201 bp, Homo sapiens
gaccagaagtttgcattttattcttagtacatattgaagccactggagtacttttagctgaagagtaatgtgatacgatctgatattttcacagatgtctrtagttgctgactggagaatgggctgtaggaggatggatagaggcaggcatctctgttaagggaacccttgtagtagcttaagcaggtggtactggggaga

SEQ ID NO: 229330 - DNA, 201 bp, Homo sapiens
ataatttattcagatgatcagtacagttaagttgttacggtttctaatttaattctatgtactatcaagaagtcaggcgtatctctacctgcaatctattrcaaatccttttggatctgctttcaaaatatttcgcataggactgaccagttttcactctcctgtgtgctacctggctagcacctttattcaccaggataa

SEQ ID NO: 229331 - DNA, 201 bp, Homo sapiens
ctgcaaactccgcctcccaggttcaagtgattctcctgccttagcctccctagtagctgggattacaggcgtgatctctgctcactgtgacctctgcctcycaggttcaagtgattctcctgcctcagcctccctagtagctgggattacaggtgtgcaccaccatgcctagctagtttttgtatttttagtttcaccata

SEQ ID NO: 229332 - DNA, 201 bp, Homo sapiens
atagcctgggaactgcctctcccaactgcctccctccctacttccccaggaggaagactggaggggttggaccaactacagggctcgtgattggagtcacmatgcatagctgaggatgggtataatgatgaaaatcggggcttaagtgaaagacaatatgatggggcttctgctctttcccatacttaaatctcagaacaa

SEQ ID NO: 229333 - DNA, 201 bp, Homo sapiens
atggcactgtaaatgtatgaaagtgggaatgaaggaatattaaaagaacattgaaagaatgacaaataactgctaatcagtccccagagttcttgcccaayccgcatagcctgggaactgcctctcccaactgcctccctccctacttccccaggaggaagactggaggggttggaccaactacagggctcgtgattggag

SEQ ID NO: 229334 - DNA, 201 bp, Homo sapiens
cttcctcccccaaatttttaatacttactctgtttattaaatacaaatacaatatatacataaggttgcatatatgtgtttgtatgtggatatacatacaygtatgtatataaatacatttatatttgtgttccatcctttctttgaaaagttatatatactctatacatttttcttcaactttctttcgttctttagaaa

SEQ ID NO: 229335 - DNA, 201 bp, Homo sapiens
aagagataacattagagctgagaccttagtgatttaaagatgcagagcatgagagagagagagagagagagagagagagagagagagagagagaagtgcasacacaaaggccctaacatggaaatggcaacaaagtaccacccactttattattagttgcacctgtgcccaataccttccagtgtagaacactgataaagg

SEQ ID NO: 229336 - DNA, 201 bp, Homo sapiens
tttcttcaactttctttcgttctttagaaaaatagcctggagagcatttagttgcactttctagaatgatttcttttcttctttttcctcttcctcctctyctttttttttttttttttttacggttttatagtactccatcatgggggatgtaccatgtttttttctcactccatcccctatttataaacatttttattt

SEQ ID NO: 229337 - DNA, 201 bp, Homo sapiens
ttaaggaaaagattttgcctcaaggatgcagagaaattgactggagaatccactagggaatctgagcaattatagtgttgtgctgagtaaccctacagagyctttatcttaattatatattttagggtttattaaactaggaactctgtcccctctatgggctaaagagtattttgatattttgattgaaataaaatggga

SEQ ID NO: 229338 - DNA, 201 bp, Homo sapiens
tctagaatgatttcttttcttctttttcctcttcctcctcttctttttttttttttttttttacggttttatagtactccatcatgggggatgtaccatgyttttttctcactccatcccctatttataaacatttttattttcaatctcttgttattttaaataatgctgcagtgaattgctttgtgcaaacatatattt

SEQ ID NO: 229339 - DNA, 201 bp, Homo sapiens
catcatctccctagccactgttacagtgcctagacgtaatatagctgtgcacatacttgccgaagagcactgagttggaatactactaaatgtggctttayactaaactaaataaaccaagtagtttggtttgttgtgtttcaccatatagttacagtatagctgaaataacatattaaaaatatgttaatcactaggttc

SEQ ID NO: 229340 - DNA, 201 bp, Homo sapiens
gaaaacaccctgagtaggttttctgggtacttctgcatctgacatccttgccagccagctgccacttatgtcctgggtctcctacttagttatccaaaccwgcacaaatgtgtcaaaccagctctcagcgtttgaagggatagtgtggctcattttcttccttgtgcagcagtcacaaaggataagaatgcccagcctaac

SEQ ID NO: 229341 - DNA, 201 bp, Homo sapiens
gtttattaaaaagatagttttaaaggattgtctgggtttcaggagtgtgtgtgtgcatcagtacacccgtgtgttatgggttgggttcttgggctgcagtrctgagatggactctggagtacaagatgtttattaggcatcaacacctgtgaaaggaaggggcagaaacaggagtgggcaaggtagaagctggactttgag

SEQ ID NO: 229342 - DNA, 201 bp, Homo sapiens
ggctcaagtgattctcatgcctcagcctcctgagtagctgggattacagacgtgcaccacaacacctgtctaatttttgtatttttaatggagccatgggstttcaccatgttggccaggctggtctcaaactcctggcctcaagtgatctgcctgccttggcctcccaaagtgctgagattacaggcatgagccactgag

SEQ ID NO: 229343 - DNA, 201 bp, Homo sapiens
gactggtcttgaactcctggcttcaagccattttcctaccttggtgcaaagtgttgggatcacaggtgtgagccactgtgtgtgtttttgatagtctcctrgggctgaggttaaaataagtagagttgcacatccacgaatgacaggtgtactagtgtaccccacaggccttaaaccacacctatggagtgtgtgtaaacc

SEQ ID NO: 229344 - DNA, 201 bp, Homo sapiens
tagtttggtgaaatcacatctgtgtctttgtctttgaattctttcttacaaagaaagaaaatcgtgtgtctacagggggaaaaataagaaaagcaagttcmgacaggcttaagtaaaattacattcagccctgtgagtggcttcctgggaatgttgaatgagcatttttgacatagactgttcacacctctctcaaatgat

SEQ ID NO: 229345 - DNA, 201 bp, Homo sapiens
agtgattcatcgaatattggtgaatcattcagaattaggtcccttctgtgtaaaatggccttttttttaaattcttttctgtctcctgtatcaggtaaagrtagtgatatcacctggttctaccttatgggactttgcaagaggtacagcagcaagttctaagaacaaaagcaaaaacaaaaggggtgaacatgctgattt

SEQ ID NO: 229346 - DNA, 201 bp, Homo sapiens
catccttcttgttaaaaatcctcaacaaactaggcattggaagaatgaacttacctcaaaataataatgacaaatccatagccaacatcataccaaatgarcaaaagctggaagcattccccttgagaactgtaataaaacaaggatgcccactctcaccactccttttcaacatagtactggaagtcctagccagagcaa

SEQ ID NO: 229347 - DNA, 201 bp, Homo sapiens
aaatttgaactgtcaagttgttatttaagttaacagtgtgtaatttttgaaggctgttgtgagacctcagttcttcttagtttaaaagaaattaaacaagrcacagcaaaggatatgcagcacagagtcatttactgcaaaagaaaagcatattttgaaagttaagtgcggaatagacagtacaccctgagagacagagaa

SEQ ID NO: 229348 - DNA, 201 bp, Homo sapiens
tgtaatctctgagcacagtgcataggatgtagtaaactcttaatacacagtagtgatgatgatgtgtcatggcgggcatagagcaggattcagcaagtttkggctaaatgaatgataaatggagctttacttgcttttctctaagttaagtgcctgacaggaagccctcctaagaacatatagagagaattttataactta

SEQ ID NO: 229349 - DNA, 201 bp, Homo sapiens
aaatgtatgatactacagtgagcgccaaggataccttcccagccaaacatgccaaggaatagtctggggatggctagtgaaccaagcttcacaggtagccscagttcttcatgagagacacacttgagttgctggcaataatattcttactgtccaaggttaagtggccctatgtctcacaaggccccattcagggcttat

SEQ ID NO: 229350 - DNA, 201 bp, Homo sapiens
ggaatatactgtaaaatgtttcaaaataattaggcaaaatgcaggaggaaattgaagagaaattattctgatatctctttggtataaagcaggcatttatytacggtaacactagtaccagtctgtcaagacatttaagaaaatggtttgaaaagacagtttgaatttgttattaaaacctgaaatagagacaaggtaatg

SEQ ID NO: 229351 - DNA, 201 bp, Homo sapiens
aataatccatttgtactcagattcctgtctcatgatcagttctggagaaattcagtctaaggcattaatgataataaagcagtaaagagaaagaatatgargttcagcatatctcctgctactactgggaaaacagtctggtgcagcatgcccaattctcagtgactgagtttcaccttggaatattagggatagtgtgct

SEQ ID NO: 229352 - DNA, 201 bp, Homo sapiens
ttgatacactattattaaccaagtctgtaggttatgttatggttcagtctgcattgtacatcctatgggttttgacagctgttgaatgacatgcaaccacygttatatcattcagaatagttttactgccctaaaaaatctcctatgttctatctagccatccctctttccctccccctcctctgagcccttgcaaaccat

SEQ ID NO: 229353 - DNA, 201 bp, Homo sapiens
aatatctaatttcagaaaatgaatttacaatttggggggaggtgatttcagagtacactttgcctacctctgatttggcaaaggatcaagaaaatttgtcragttctgaaagcctgcatcttttaataagcttcttcaataaaaatgtgattaaaatgtttcataaggttaaagtgttgcctgtggcagtggaaatttcct

SEQ ID NO: 229354 - DNA, 201 bp, Homo sapiens
ttggtaaggtggtttgaagttttgcattatatagagagattttcagctgcactaggtaaaagctagattttcaactcttaacaccttaaggccaagcagartaactgaaagttgtcaagcatatccaattatttttattctttccctttgttcaaaagaatcccattcatattgggtattttctttgggttgcatgtgatg

SEQ ID NO: 229355 - DNA, 201 bp, Homo sapiens
aagtgcatattaagctttccttattaattaaaggcagagaggaaagagtcagcctcgctcaaatttataaaaacaaataatgtttggaaatgagcttacartataaaactgggtgatgctgtgtcttaatacagtttgccttcatgttagatatcattgccatgacgtgttaaaacatctaattactggtgtgctgcaaga

SEQ ID NO: 229356 - DNA, 201 bp, Homo sapiens
atttggcaaaggatcaagaaaatttgtcgagttctgaaagcctgcatcttttaataagcttcttcaataaaaatgtgattaaaatgtttcataaggttaargtgttgcctgtggcagtggaaatttcctcagcttaacacgtcatcagtatgacatatcacgcttgcctttgtcagcagttcttgtacacagaaaaagtgt

SEQ ID NO: 229357 - DNA, 201 bp, Homo sapiens
aggaaactgagacccaaagatattaaaaatatgattaggtcattgcaattaagtggcagagctgagattggaaacttacatgtattggactttgagagccytcttggggttgtgccaatttcattacctttggaagacctacttgtaaatacttagagattttgaactaaggttttaataaattaggaagaaaaaggccaa

SEQ ID NO: 229358 - DNA, 201 bp, Homo sapiens
ttggttcaggcttcataaaatccctcttttcagtggaagtggtatagtactagtgtctctgccttttctaggcttttcctctctggtggcttactaggcartatttgctccataaaatgtgtattggcatgttcatagattcctgggcatattttgtgaagatctaacctgaagtcgggctgcctggtttaaatttctaac

SEQ ID NO: 229359 - DNA, 201 bp, Homo sapiens
taaaaatgtgattaaaatgtttcataaggttaaagtgttgcctgtggcagtggaaatttcctcagcttaacacgtcatcagtatgacatatcacgcttgcytttgtcagcagttcttgtacacagaaaaagtgtaaacacatttaaaatgacagatttaaatgtatcccaatagtagaggaaccactggtaataggtcata

SEQ ID NO: 229360 - DNA, 201 bp, Homo sapiens
agactggctggctctttccagagaaccacttgttactttcttcaccaagtgtcagtttccccccatttagaaataaatcaattcaaaatgaaattacccgragcattcatttttcaccatctagtaaatgaatctctctaaagaacacgaggtcctccctttttggttcaggcttcataaaatccctcttttcagtggaag

SEQ ID NO: 229361 - DNA, 201 bp, Homo sapiens
tctttcatgccttagagagcttagctgtgatgcattaggtttaattcttatagtcttgtgttttttttctggcatgttaagtcaaaacaaaagaaaaaaaytgtgcttttggcaataaatcgtggcctgctgggaaagtcaacatctacccagatttgccaggtggctattcagaaactctcataaccctgaagtctgaaa

SEQ ID NO: 229362 - DNA, 201 bp, Homo sapiens
cggcctcccaaaatgctgggattacaggcgtgagccaccgcgcccagccttaagtgttatttttaagacataaagtaagttttaaaaacacaatttcaccraaaatgcataaatatgaccatgaaattcaagaatacacatacgtattcatatatgtaaatgtatgtatgtgtatttctgaactttgcgtcattttgttcc

SEQ ID NO: 229363 - DNA, 201 bp, Homo sapiens
tgtcacccaagctggagagcagtggcgcgatattggctcgctgtaacctctgcctcccaggctcaagctatcttcccacctcagcctcctgagtagctgasactactggtgcatgccaccatgcctggccagatttttttgttttttttggtagaaatggggtctcactaataacctacttttaatgggatagattgtcag

SEQ ID NO: 229364 - DNA, 201 bp, Homo sapiens
atccaattatactcttttattttaaaatgtacaattaaattatttactgtaatcaccttgttgtgctatcaaacactagctcttattcttcattctttctrttttttatactcactaactattcacccccctccccatgacccttcccagcctctgttaaccatccttctactctgtcttcacaagttcaattgttctgat

SEQ ID NO: 229365 - DNA, 201 bp, Homo sapiens
agtttagtcagattttaccaattttacagacacgtgtgtgtgtatgtctatgtacttctattggggttttttttttaactgtaatgtgtcaaacaaattaytctgtcactgaaatcctaagctccacactcataaataaaagtagataaaactgaggtcatagacaaagtagggcatgggagtagctttctgactgatgct

SEQ ID NO: 229366 - DNA, 201 bp, Homo sapiens
gaggctgaggcaggaaaatggcatgaacccgggaggcagagcttgcagtgagccaagttagtgccactgcactccagactgagcgacagggcaagactccrtctcaaaaaaaaaaaacaaaaaaaggtttatctattaattattttatcaaagaatctacttttgacttttttgatcttttctagaaaatatttttctatt

SEQ ID NO: 229367 - DNA, 201 bp, Homo sapiens
agagaatcactggaacccaggaggtggaggttggagtgagccgagatcgctccactgcactccagcactccatctcaaaaaaaaaaaaaaaaaaaaaaaaagaaggtgggaaaaggaaggaagatcaccatttatgtctttttgctgatagatgatgtgggaaactcccatacacctttcacagcagtcacacatatgttg

SEQ ID NO: 229368 - DNA, 201 bp, Homo sapiens
ggatcattactggattttcataccgtgctatttcaatgtataattcccaccttctggttcagagaaggagcttggggaatgtaaatattctttttccttcwattttctgaagtttcctcacaccttatctgacactctctggtggctcctttttattctgttctaccctgtattagaactatttatgtagatgttttatct

SEQ ID NO: 229369 - DNA, 201 bp, Homo sapiens
tgggtatttcttcatagcagtgtaaaaatgaactagtacagttttgctttcaaaaatactggcagggtacactgtagcatcagttacaggttttttttttycccaaaggcatcttgtgataatttggcattttttgtttatattcatcatccaactagtaccaattacatcacataatcctttggggaaaaaacacacact

SEQ ID NO: 229370 - DNA, 201 bp, Homo sapiens
aagataatgaatttagctcttccgctagggccatgttcagtctttattctggcaaaacacaatgaaaggtttttttttttttttttttaaaaaaaaaaaaacatttccacagcagtagttcattcattaagcccaaaagaacattagctaagagtaaaacgttgggttttagcctcaagactgtcaccagctctgtgtata

SEQ ID NO: 229371 - DNA, 201 bp, Homo sapiens
atatttaggctggaacatggcatattttagctggggtcctcagctaaaggtcctggaaggctgaaatcaaggtgtcagttgactgtgctcttatctggagscttgcttgactagggaaatacccagttccgagctgtctcctgttggcagaatctgtttccttgtgattgtaggactggggcacccattatctttcggcta

SEQ ID NO: 229372 - DNA, 201 bp, Homo sapiens
tcagagcacaagagattgtgactgattggaaaccaaagctttaggatgtagaagtttaaagatgaccagacaggacagagtggagatgcatttctgacttyagctttgtaagctcttcaagaaatacattttgtttacttttgtttctctttgaaaagcagtctttatctccctgtatctaagagctttgagatgtatgtg

SEQ ID NO: 229373 - DNA, 201 bp, Homo sapiens
ttttttctccattacgaaatgaaagccatttttatgtctaacacctcactcgggaaaggcatgccagcttcaatcttagttactgcaactgtctttttaasttacccttgagtttatgtaaatcagaattgattgtccttcaacaatagcaataacaacaacaaaaaagaatgttgtaaagaacaagaaaatattgattct

SEQ ID NO: 229374 - DNA, 201 bp, Homo sapiens
ttgtacattattttctaggagttctatggttttacattttacatttaggtctgtgattcattttgagtcaatttttgtgaatagtgtgaggtctttgtctrgattcttttttttttttttttttttttttttgcatgtgggtatccatttgttctagatccatttgtggaaaagactatctgggctttctcttctgtttca

SEQ ID NO: 229375 - DNA, 201 bp, Homo sapiens
actgattcttttgcacaactgcttatacctaacagctttattggctgttctcaccttatgtgtcacacttctgtgtgcaaatctttggaatatttccatawgactctccagtatttggactttgggacatacgataaagcaaacatttgaaacctggagtcatatgggggcactcaaaaaatctgctgcttataagcaagg

SEQ ID NO: 229376 - DNA, 201 bp, Homo sapiens
gctaagtaaaataagataggtttttttcccctgggatgtaggcacaacttaataatatatgacatccaatgctgttagaatgtggagaaatgctaggagcwatatatattgcttagcagtttggctgtatcattttaaataaaaaaaatacacatagcctttaacacagtaatctctttgtgaattattctgtatagataa

SEQ ID NO: 229377 - DNA, 201 bp, Homo sapiens
tttattaggcaaaaatattcctttatttacattttattcacatttagttttttatgcgcacatttaaaggactttattgtaaacaacgacagtgattctasaacggtagatagcttttttaaatgtaattactcttgtaagaggaaaaaatacatgatactaaaggattgtattttgtgaccacctataatgcaacaaatc

SEQ ID NO: 229378 - DNA, 201 bp, Homo sapiens
atctgtagtgggattatgaatggttttatctttgtttatttcattttttggtctttgtttttctaaaattgacatgaattctctaagtggtaaaagccaamtttatttcaaaacgaagaaaaagtatagatgatattatgcccattttacccattaagaaactgaacctaattgatacctttttaaagattccagctagta

SEQ ID NO: 229379 - DNA, 201 bp, Homo sapiens
tggagccccttgatttgtaacagagtgaaaagctttcagaaatgtaaaaaacaattattttatttggggcttacagtggtggtgggaggaagcagagagamacagaaagtgccaactcttgcccttgtttaacatttggcaaattagaaaatgtaatgactaaggaaacaagcacatttcaaataataactgaggcaagat

SEQ ID NO: 229380 - DNA, 201 bp, Homo sapiens
ttgaaagacaaatccaaacatttatgaacagcaaatggctccgtctcagcaaatggacccactgtgttctgtgatcacagaatgatgaaccaaaagtgacygacctcattctctaacgaattttttcactgccataatggtgcaagtactaaaacctctaagtccgagcatagcttgcatttttactgaacagttgcaact

SEQ ID NO: 229381 - DNA, 201 bp, Homo sapiens
tgtacttctattggggttttttttttaactgtaatgtgtcaaacaaattactctgtcactgaaatcctaagctccacactcataaataaaagtagataaarctgaggtcatagacaaagtagggcatgggagtagctttctgactgatgctgtggagtgccattctgcctataaccttgaaaaaatatctacaaatgtgcc

SEQ ID NO: 229382 - DNA, 201 bp, Homo sapiens
ctaattctttgatttgactttataaagtacttatgcttgaatccagaacccaaggatttttcagttatcacaaattactttcacagaaggctaatttattmttctatgagacaatccattagattggtgcaaaagtaactatggtttttgcccaaaaaccatagttacttttgcaccaagctaaaatattcttctcactaa

SEQ ID NO: 229383 - DNA, 201 bp, Homo sapiens
tctgtcactgaaatcctaagctccacactcataaataaaagtagataaaactgaggtcatagacaaagtagggcatgggagtagctttctgactgatgctrtggagtgccattctgcctataaccttgaaaaaatatctacaaatgtgcctcaggttgtcatggctccacttagacctgcacgaagacagagcgtacataa

SEQ ID NO: 229384 - DNA, 201 bp, Homo sapiens
gccctgcatgttcagttacagagcaggctgccatcactacccacctccacaagacacccctcgctcctgcctcctcagatgctatcatttctctccaagawagaaagggaaaaggctgggcacgatggctcacacctgtaatcccagcactttgggaggccgaggcaggtgaatcacaaggtcaggagtttgagaccatcg

SEQ ID NO: 229385 - DNA, 201 bp, Homo sapiens
tgatgctgtggagtgccattctgcctataaccttgaaaaaatatctacaaatgtgcctcaggttgtcatggctccacttagacctgcacgaagacagagcrtacataaaacccccttttgatcttacaaagttgatgattcttggccttatgatgggaaacagagctcagtacttttaggctggctggtagggaccttctc

SEQ ID NO: 229386 - DNA, 201 bp, Homo sapiens
gaatttacctaaatcgtatagcactatactagagtttaccttagttcatgttaagatctatctaccgttagtgattaagctgaggaaggagaggtgataamacattgctgggcggcgtaggtgcaaccccttctgctttagtatttttctgagctgaaatactgtcttagatattctagatgaaatactaccagccaaaaa

SEQ ID NO: 229387 - DNA, 201 bp, Homo sapiens
aagttgatgattcttggccttatgatgggaaacagagctcagtacttttaggctggctggtagggaccttctcttacttaaggataaataaataatgagtrtttgtgaagatatgttctcctgactacagtgacacctgctgagactgtttggattgtaactttatagcatccttttccagaattagttacacatccacaa

SEQ ID NO: 229388 - DNA, 201 bp, Homo sapiens
ccacgttgttaatgtttctttctcctgtgtttgcggaaaccatcacgcacccccaccccatatctccacttctcatgactactcaccctgtgtcccagaaktgtgcatctttgaaacccctgatcctgggtaccctccaatggatatatccccttttctcattccttttctgaaattatgctgctgctgggatatactgct

SEQ ID NO: 229389 - DNA, 201 bp, Homo sapiens
ttttaggctggctggtagggaccttctcttacttaaggataaataaataatgagtgtttgtgaagatatgttctcctgactacagtgacacctgctgagaytgtttggattgtaactttatagcatccttttccagaattagttacacatccacaatcaggcaaccataactactctaccaataatgtctcatgtacaact

SEQ ID NO: 229390 - DNA, 201 bp, Homo sapiens
aaaggcacaatgataattagtgacgaagtcttgactaaaattccagctatcttcctctgaaaagatgctctttccactgtaacattatagcactttgttcmtttttatggattgaatgaatgggttaaaaagtcaaaacagtctacagaatttccaagattatttttctcctctttgttcctggagtatcctaagaagaca

SEQ ID NO: 229391 - DNA, 201 bp, Homo sapiens
aatcctgggacaggcagccatctcttgctatggagaacttactggtaagagtggttttggtggctgtaatgcttatgctgagctaatgtaacaaaattcartcaagaatttctaaaccattctattttttttttttctccctgagactccaaaagaagtttaactggggtctagttaggatgtttgaggaaaatttgggta

SEQ ID NO: 229392 - DNA, 201 bp, Homo sapiens
gccatctcttgctatggagaacttactggtaagagtggttttggtggctgtaatgcttatgctgagctaatgtaacaaaattcagtcaagaatttctaaascattctattttttttttttctccctgagactccaaaagaagtttaactggggtctagttaggatgtttgaggaaaatttgggtagtcttagatccaatat

SEQ ID NO: 229393 - DNA, 201 bp, Homo sapiens
aacagaaatattaaactcaaaggaatcctgaagccagtcttaggagaaactacagaattgtaggccttttctgtcttattctcctgacattaattctctcsctattacccctcttcattttcccaccacccacacaaagctgggaagacatgacatttggaacattcccctttgaggacccacaattaaatgacaatgaag

SEQ ID NO: 229394 - DNA, 201 bp, Homo sapiens
tgacattaattctctccctattacccctcttcattttcccaccacccacacaaagctgggaagacatgacatttggaacattcccctttgaggacccacarttaaatgacaatgaagtgagctggcagtctctcaactcctgtgattccaaaggctcccaatccagaatgtttctaactgatggtcatgagtcactgatgg

SEQ ID NO: 229395 - DNA, 201 bp, Homo sapiens
ggaggctgaggcaggagaatggcgtgaacccgggaggcagagcttacagtatgccgagatcgctccactgcactccagcctgggcgacagagcgagactcygtctaaaaaaaaaaaaaaaaggatgttctttaaggaaagatggaataatgactagtacatgaaaatgcaggcattcggtatcaaatacaactcagtgaag

SEQ ID NO: 229396 - DNA, 201 bp, Homo sapiens
aagaattgtctggctcaaaatgtcaatagtgctaaggtcagaaacccttggctagaggacagatgggagagtaggtgaccagtgaaacaattagaatgggkctgtgctgcagaagggcttgaatgctggaatgaaccatttatgttaattggccattcaaggctcatgagcagggaagtgttttgttagaagttggtttgt

SEQ ID NO: 229397 - DNA, 201 bp, Homo sapiens
ttctttttgatttctgtgtctctatactggaataaagaatctctgaaatttgtaatctataaaattcttgaactaaaatcttttttttttcttttttttttctttttttatcaaacagacgagttgtttctcatcctgagggcatatgtgcttgggaaaaactctgacatcttaagaaatgatgttactcatggctgacgc

SEQ ID NO: 229398 - DNA, 201 bp, Homo sapiens
cattattgagacatacagagtgcatattgtcccaaggatctcacattaatgacctttcagtttaatactatcctgctatataccctgtaactacttctcakcagctcattggcaactgacaaggtgttgacttctcccattctatcctgcctgctaaaagtggattttcctactgtcccatagcgtgactcccctacctac

SEQ ID NO: 229399 - DNA, 201 bp, Homo sapiens
aacccgggaggcggagcttgcagtgagccgagatcgcgccactgcactccagcctgggcaacagggtgagattccctctcaaaaaaaaaaaagaaaaaaaragtttcagattttggagcatttggagcatttcagattttcagattagggatgctcaagctatatctggtttgcagcttcttatataaatggagtaaacct

SEQ ID NO: 229400 - DNA, 201 bp, Homo sapiens
ggtagtggcagtgacaacataggttgttaatgtcctcagtggcagggcttttggggtcctcctattctgattttcctcacaatggggataattaaacaagwggatccctcttacatggcctacaagcagttccattgctttgagttccagggattggtacttgaagtggctatggagtcagggtgctaatatcagagtttc

SEQ ID NO: 229401 - DNA, 201 bp, Homo sapiens
aagctattatatataatatattttacactataattataattaatggaattaatgttatatataattatattgtatgtaataataatatataatagtattayataataatatcttatataaaaatcccaaagtaattattattattttatagatgaggaaagtgaggctcagagaaatcaaatcatttacccactttcacat

SEQ ID NO: 229402 - DNA, 201 bp, Homo sapiens
tgtggtatatcagggtctggcaaccagaaatggaatttgcatggtacttcttaagtaagacctttaactctattggccaagtaactcctatgttctgagcyactttcattgttaaaatcagggaagtcgttgcatggttctctgcctttcttttcttagtgtttctctccctctctctctccctcttactcaccctaactc

SEQ ID NO: 229403 - DNA, 201 bp, Homo sapiens
tccagttatcttgggagagactaggaaatctgcagagagagggaaatgcgtaagagaggccacattaaaaataaaatttaaatcctggcagacagaagggrgatgatgattgtgaatctctagggacctaaatgtgaaactggtcttatttatttatttttgtcctcatacactattgagaaaattatctgctaatggact

SEQ ID NO: 229404 - DNA, 201 bp, Homo sapiens
ttactccatataggaaagagaaagatcttgggctgtggtgtctgtgtttgcaggaagtcattaaataagcaatatgagaatggaagtgagcttggatgtayaaacctcttaacatttgaaaaattaattttagggtcttgaatcctctgtcctacttaatagttttccagggaaattatttagctaattaatctcttatat

SEQ ID NO: 229405 - DNA, 201 bp, Homo sapiens
ttcatgaatagtagccagtatatatgttaagtagtcacccaggaggtgttatttgcttatgctaattacttttcaaagtaaaaaaatgctgtgaatacttkggaaatttatttttggcaattaaaatatttaaaatcacgtattacaattcttttatccacgataaaaccttgtgagaatttattaataattgcttgatgg

SEQ ID NO: 229406 - DNA, 201 bp, Homo sapiens
tcactttttgtaacttttacctatgctttcagttaaacaatagcaggttcttagtattctgaattatcctgtattttgcttctgtttccttagatttgtayttcttgccagaattattaaaataaatctgttagggtgttgtttttgttcgattttcccattatttaaggttgaatttagaagcttgcttcatctataata

SEQ ID NO: 229407 - DNA, 201 bp, Homo sapiens
tgtaactagatcactgacatcttagtctatggttattacaaggttagttggcaaaccaagttcctgtggggaaaaaagttaatacaaacattctaacaaaygtaatttctcattacagctataaatatccagagtccaaggttacagattcacagttaaagtaaatctttcaatttgtgcgatagatcattgccagctctg

SEQ ID NO: 229408 - DNA, 201 bp, Homo sapiens
tcagaagttacatgcatcctccttaacaagtgggtgagctagataaatctcaggggattaaaaaagattcaattacttatcttttggggtgaattgatgartaagaaactgtaatagcaaccctctggacctactaggcatctgtaattggtaggcttttccgacattttttccttcacagacttagcaaccgaagcacaa

SEQ ID NO: 229409 - DNA, 201 bp, Homo sapiens
gatggtcagtttctaaaccctacttcaggtatccttctcaaaactctcataggcaagaaccaggtgccccattagctgtgttcccacagcacctcctgtcmgtacctctagcagaaaataaagcaaaatagtatatgatgttagttgtttccattactggattgagaagaactcctggatgcaaggaccttgtgtttaatt

SEQ ID NO: 229410 - DNA, 201 bp, Homo sapiens
aaaattttatataatagatgatgtcagagagcatcacatatagtatgacagtttcatgacatcagctgtctatatgttctagattatgatgtaacatgttstcaggctgctctactagttcattgttcctcccagtggaatggggaatcacaggaataaaagaccaacttttgtcccaaggtaatttttagtacctggctt

SEQ ID NO: 229411 - DNA, 201 bp, Homo sapiens
ttcaggcagtctccctggaataccagtaaaagaaaattaaacaactcacgacagctatcttgcatatctcacctgggaaggtatgcatgcagtaggacagrcactgcttaacattaatcagcctcctgaagtcattacattcatgaggaaatgtaattcacatgtgattactttttaatttactctgtaatcacattccaa

SEQ ID NO: 229412 - DNA, 201 bp, Homo sapiens
actctctccttcctttcctgcccccatgttctcattactggcccctgacattggacatatcacactgtgctacagtcatatatgtgaaagcctgtgtcccycactaaactgtttgcagggtcaggatgtggcatctccacagccagcacttgattggccccagaaatatttgaatgcttgagcaagtgcctcaagacttgg

SEQ ID NO: 229413 - DNA, 201 bp, Homo sapiens
aggcttgggcacgattacagtagttctcgtaaagtgactaagtgcattctaagtgttcatatttctgaagtgtattttgttaattatccttctcatggttraggattttaaattttgagaaatctccatttttctgagtgcagtctggtgtttacaattctaccttttaagcaaaatgtcatccctttagttttcggtcat

SEQ ID NO: 229414 - DNA, 201 bp, Homo sapiens
aggacaataaatctgtttattgaaatttatttgctgcttgttgttcagtttttctggctttgtgcaggagcagggtgaatgtaataggcagggctggtgaktcagcagaatgccatttttgtaagtgatcacccactctctagattgaagactcattaacacaaagataggatcaaatattctgcattcactgctttacat

SEQ ID NO: 229415 - DNA, 201 bp, Homo sapiens
atctgtttattgaaatttatttgctgcttgttgttcagtttttctggctttgtgcaggagcagggtgaatgtaataggcagggctggtgattcagcagaakgccatttttgtaagtgatcacccactctctagattgaagactcattaacacaaagataggatcaaatattctgcattcactgctttacattgcgtgtttc

SEQ ID NO: 229416 - DNA, 201 bp, Homo sapiens
aagcacaagttgggttatttttgttgcaacagcacggtatattttttctacttttcatttaaaacttgactcactttgctgcccgtgatcttcctagttaraaatcacttcagcattatctcataaattttccattgacgagcttgtgtgctttttgtcaagtctttgtataagctgttttggtggcctaaacaccactgc

SEQ ID NO: 229417 - DNA, 201 bp, Homo sapiens
agcacccacagtgactgcactgaatttaatgtccttttctcgattttctctgctgagggagaaagagggaaaacccagagaaagggctcctcctgaccccrcagagtccactgagaactgagaccagttgagcagacagcgtgaggaattctccaaaattctgcagccccggaaacatccaccatttcatgcttcgttgat

SEQ ID NO: 229418 - DNA, 201 bp, Homo sapiens
ttggttaactctttaggtaagagattcacagctgggattgttttgccgtcagggaatttcagtcagttagctgaacaggaaatgtttatttcagcgtctarcagttttaggggtaaaaagagttctaatcttagctaatcaatcctgagccacagagtgggaaattggctagaggtaaaaagggttgggtctctttctggc

SEQ ID NO: 229419 - DNA, 201 bp, Homo sapiens
aatggcgtgaacccgggaggcggagcttgcagtgagccgagatcgcgccactgcactccagcctgggcaacagggtgagattccctctcaaaaaaaaaaaagaaaaaaaaagtttcagattttggagcatttggagcatttcagattttcagattagggatgctcaagctatatctggtttgcagcttcttatataaatgg

SEQ ID NO: 229420 - DNA, 201 bp, Homo sapiens
ctttgggaggccaaggcgggcagatcacaagttcaggagatcgagaccatcctggctaacacggcgaaaccccgtctctactaaaaaatacaaaaaattasccaggcgtggtggcgggtgcctgtagtcccagctactcgggaggctgaggcaggagaatggcgtgaacccgggaggcggagcttgcagtgagccgagatc

SEQ ID NO: 229421 - DNA, 201 bp, Homo sapiens
caaaaagtttcagattttgggctgggcaccgtggctgatgcctgtaatcccagcactttgggaggccaaggcgggcagatcacaagttcaggagatcgagmccatcctggctaacacggcgaaaccccgtctctactaaaaaatacaaaaaattagccaggcgtggtggcgggtgcctgtagtcccagctactcgggaggc

SEQ ID NO: 229422 - DNA, 201 bp, Homo sapiens
agacttgctttctcacccaggctggagtgcagtggcaccatcatggctcactgcaacctccgcctcccgggttcaagcagttctcctgcctcagcctcctkagtagctgggactacaggcgtatgctgccatacccagctaattttttttttgtttttttgtattttagtacagacggggtttcgccatattgcccaggct

SEQ ID NO: 229423 - DNA, 201 bp, Homo sapiens
aacgtttgccaactcctggcctggcagagtgctaggcctgcaatagctgattcttttttttgtttttgttttttgagaaggagacttgctttctcacccasgctggagtgcagtggcaccatcatggctcactgcaacctccgcctcccgggttcaagcagttctcctgcctcagcctcctgagtagctgggactacaggc

SEQ ID NO: 229424 - DNA, 201 bp, Homo sapiens
cttttgcaattttgaagacgtatgtcagggctcaccccacctctgtctagcaagaagcaactttatctgcctcgaatgcattaccattttggttgatggcytctgaacgttttccatcacagtcttctgcctctcctccatattctttgctaaataacatgttgggaatggtctccttgtcttccacatcaaataatttaa

SEQ ID NO: 229425 - DNA, 201 bp, Homo sapiens
agttctcatgataaggatagccttgcctgtggaactgaaactccaaggccttagctaccttccacctcctgcatctctttccacagtaggggtgccgtgtycctacattagaatacttgaaggccattaactaaaggcttcctttccctagacagagcttaaatggccactgccaacatctctttgtagcttttctttgta

SEQ ID NO: 229426 - DNA, 201 bp, Homo sapiens
tttttttttttaattagtttcctcttttgaattttatggcacaagtttgtgcttaattccttatttagagcttactggtaaatttccctttttttttttttaaccatgattttatggttattattgttccttttgttaggtgttgatgaaggaggaagggagattttttttcttctgtattctgtcacctttatcataaag

SEQ ID NO: 229427 - DNA, 201 bp, Homo sapiens
caaaagacatgattaagtaaacgtttccaaggtcacacgtccagtaagtggtcaagccaaatcaaacacagaccttcctatttcagaggtcatgatcattycatgacaacaccctgcctcagaggtgacttgatgttgagcttagagcattgacctagctagtcttaaatctctcctgccatatgccatgattagtcctta

SEQ ID NO: 229428 - DNA, 201 bp, Homo sapiens
agagctgaacatattctaatcctgggctgactgtatttcaggtagaaactgtactattgctgactttcatggggtttaggtgaacttctatgattaagcartagtatttccctaattctgtccatttttcccccctggatgaatccttcttggaaatcatatcagtttgcttcctcctggaagccttccctgattccctca

SEQ ID NO: 229429 - DNA, 201 bp, Homo sapiens
gaggtggaagattttgatgcaacttcaaattgcatgaaaatcatctcctatttgctttttcaccttccctcgctccttcctgccttcctttttttttttttaattagtttcctcttttgaattttatggcacaagtttgtgcttaattccttatttagagcttactggtaaatttccctttttttttttttaaccatgatt

SEQ ID NO: 229430 - DNA, 201 bp, Homo sapiens
aggcttgtctgtggattgggtttgacagaactaacttggcatttaaggagtatgttgatgggcagccattcaattaagtggttaacttggaaagtgggagyaggatagtcagtcacacattgtaacagggtagcccaagaggtgggtagaattctaggatggggaatccagtatctacacacatggtacagaaaaatgaat

SEQ ID NO: 229431 - DNA, 201 bp, Homo sapiens
tatctttttaatgaaaagtccagtcccagaatcacacagtaccttccagaaaacaggccatacagttttacaaagcactgttatttgcatttctgaggggwtttttttgtaaattgacttaatttccaatgcattatgattatataatatcattcaagtatagaaacttacctatgatacatctttttgaggtgctaaatg

SEQ ID NO: 229432 - DNA, 201 bp, Homo sapiens
agttgtttattcattgttttggctgtcactgtggaagggatgagtgctggagtttctagtgagccatcttgctgatgttgctcccctaaacttaagtttgmaaagcatttagagcaactcaggttatcttgtgcaatttatgaatttatgaatgccataaaagaataatgtctacttaaatacacttttgtatttacttgt

SEQ ID NO: 229433 - DNA, 201 bp, Homo sapiens
agaatctatgactgttaggcaccccctaccagctttgattcagtgggtcaggttgtagctgtgattctacccctggggaataggatacagccctggctcarctctgggaaagaagcagagttttaggggtttgagcacagcatgcatggtacagctataatttaggagcctaagccaatagggttcagtggcagcttaggt

SEQ ID NO: 229434 - DNA, 201 bp, Homo sapiens
aagcctattgtggctcttgggtcctggggtacaggttcactctctgtagctgggtcaaatataggtttcccacagagccagaatctatgactgttaggcascccctaccagctttgattcagtgggtcaggttgtagctgtgattctacccctggggaataggatacagccctggctcagctctgggaaagaagcagagtt

SEQ ID NO: 229435 - DNA, 201 bp, Homo sapiens
gggggagggatagcattaggagatatacctaatgtaaatgacgagttaatgggtgccgcacagtaacatggcacatgtatacatatgtaataaacctgcayattgtgcacatgtaccctaaaacttaaagtataattaaaaaaaaaggggtatggtagtggcagtgacaacataggttgttaatgtcctcagtggcagggc

SEQ ID NO: 229436 - DNA, 201 bp, Homo sapiens
gcctaccgaccacgaaataggtgtttctatactccagatccaagacaaaagcagtccaaaatagagtgtgagtcagaagacttgagatcagattgcagtcygcttcccaagtcctcccatggcagtcattatgggagacagcaaatgtcacaggcattgatattctcagcatctattcctttgtgctcatcttttgggaga

SEQ ID NO: 229437 - DNA, 201 bp, Homo sapiens
aacacatccagagtttgtcagtttttcccaaaacatagattttttttccacctatgtggtatatatattattttcttaactcctatgaaatcaaatagatyccttccaggtaccttattccttccacaaaatttggattattgggtaatatggtaacattaatattttctaacatattaagtgtgtaatttactaagtatc

SEQ ID NO: 229438 - DNA, 201 bp, Homo sapiens
tgcaagaagttttataaacacacacacaatcaaaaaatagttttcatgtccttggggctatggtgtccattcaagctccagctctctgtattcaagagcaktgtactgtccagttattctcatagagcaaatgccagagacacgcaatgccagaatacacaaggaggaaggggtcttttgaaaaggaaagatccattagac

SEQ ID NO: 229439 - DNA, 201 bp, Homo sapiens
gtctaggaaattacaaagactgattttatgcaagaagttttataaacacacacacaatcaaaaaatagttttcatgtccttggggctatggtgtccattcragctccagctctctgtattcaagagcattgtactgtccagttattctcatagagcaaatgccagagacacgcaatgccagaatacacaaggaggaagggg

SEQ ID NO: 229440 - DNA, 201 bp, Homo sapiens
gaagccaatatttactggcagttgtttggtgaacctagtgaaaaaaattgactttagttttgatcaaaacctcatgggaaatacatgtgtgtgtgagctarctaagtagctgaaacacccaaagaggtgacttttttggtatttctactctttgacttgttagaaaaaaaaataaagatactccctgggatagaggcggac

SEQ ID NO: 229441 - DNA, 201 bp, Homo sapiens
ttcatctatgtagccatcaaatgagtttttatgaataatattaatgatataacactgtacacaaataatcagaccaagaataataaagcaaattagtcctmccatgatttatcattagtaaaaatgggaaactggagagagaaaagttatatttcaaaaactgtagtacacctgttgttagattctagtcttgcctgtttt

SEQ ID NO: 229442 - DNA, 201 bp, Homo sapiens
aatagaggaatatatttaatactatatattcatctatgtagccatcaaatgagtttttatgaataatattaatgatataacactgtacacaaataatcagmccaagaataataaagcaaattagtcctaccatgatttatcattagtaaaaatgggaaactggagagagaaaagttatatttcaaaaactgtagtacacct

SEQ ID NO: 229443 - DNA, 201 bp, Homo sapiens
ccgtggctttcctttatcagctgcaagtctccccacttcttgggcactgcctgcctcctgtcaaaacctccccctgagaaagaacttttacctcagttatyacaatagtagttcaaattgttgtccttcctgagatgccaaggtattttttcaaaccaacaaagcctgctgagaaaagaatgggattttaaagctggaata

SEQ ID NO: 229444 - DNA, 201 bp, Homo sapiens
ttgaatttggtagcagctagccacctgtgaccagtctgaattgagatgcgttgtaaatgtaaaatccagtttggatttcaaagccttctaccaaaaaaaaagtaaatatctcattaataatgttttataatagttacatgttgaaataatattttggtaatgttgagttaaaaattatatcactaaaattaatttcacctg

SEQ ID NO: 229445 - DNA, 201 bp, Homo sapiens
tctcatgtcgaattgtaatacctagtgttgaagggtagggcctggtgggaggtgattgggtcatgggggcagatttctcatgaatccccttgatgccatcstcgtgatagtgagttctcatgagatctggttgtttaaaagtgtgcggcaactcccctctctctctcttgttgctcgggccatgtgacctgtctgcttcca

SEQ ID NO: 229446 - DNA, 201 bp, Homo sapiens
ggaaaagcacagtattagggtgggagtgacccgattttccaggtgccgtctgtcacccctttctttgactaggaaagggaattctctgaccccttgtgctkctcgggtgagatgatgccttgccctgctttggctcatgctcagtgtgctgcacccactatcctgcacccactgtccgacactcctcagtgagatgaacct

SEQ ID NO: 229447 - DNA, 201 bp, Homo sapiens
cccccaattatgtgttacagtctttagggcagggatctaatctggcctagggtggaccttcagtgaatatttgaaaatgaatgaacacatttaaaaaaaaacaaggtgttgaactagaagaacctgaaattctctgctagttctaacataatttaaaaggagactatatattgctcttcagacggtcaattcactaactca

SEQ ID NO: 229448 - DNA, 201 bp, Homo sapiens
ctgaccccttgtgcttctcgggtgagatgatgccttgccctgctttggctcatgctcagtgtgctgcacccactatcctgcacccactgtccgacactccycagtgagatgaacctggtacctcagttggaaatgcagaaatcacccgtcttctgcattgcttactctgggagctgtagactggagctgttcctattcggc

SEQ ID NO: 229449 - DNA, 201 bp, Homo sapiens
cgaactcctgacctcgtgatccgcccgcctcggcctcccaaagtgctgggattacaggcgtgaaccacagcacccggccttcagtttttttttttttttttaagtaatagctttattgagatataattcacataatataaaagaaaccctattaaaatatacagttcattcttttagtattgtcacaaagttgtgcaacca

SEQ ID NO: 229450 - DNA, 201 bp, Homo sapiens
aggatgcaaagtaggattccacaattttaattaactgttcctcctctgacatttcattactggttctggaagtggtagtagatggcagacagttaactgtmagaatttttctttaaagaaggtaagatggagaaatgttagtgttgtcttggtgattggagaggaaagcagggaagggagagaaatggctgatagcttaac

SEQ ID NO: 229451 - DNA, 201 bp, Homo sapiens
ctgcagttaagttttgggtttttgttgttgttgttgttgttttgagacagagtcttgctctgtcacccaggctggagtgcagtggcacgatctcggctcayggcaacctccgcctcccgggttcaagcgattctcctacatcagcctcccgagtacctgggattacaggcatgtgccaccacgcctggctaactttttgtg

SEQ ID NO: 229452 - DNA, 201 bp, Homo sapiens
aaaggcaatttctttctcctgaaggtgggtacctcctagacatcatatatctttacccaaaagagtttttgaggattttctgtgagtcccaaggggcacawatgtgaaggtcaaagataatgggtccccatctgacactgggctgatttgccaagcacccaggatgcatttttatttctttttcatggtaaaagccagaga

SEQ ID NO: 229453 - DNA, 201 bp, Homo sapiens
gcctgtaatcccagcactttgggaggccaaggtgggcggatcacttgaggtcaggagttcagcttggaattaccagcttggccgacatggtaaaaccccaygtctaccaaaaaatacaaaaattagctgggtatgatgatgcacgcctgtaaacccagctactcgggaggttgaggcaggagaattgcttaaaccctggag

SEQ ID NO: 229454 - DNA, 201 bp, Homo sapiens
ctcacgcctgtaatcccagcactttgggaggccaaggtgggcggatcacttgaggtcaggagttcagcttggaattaccagcttggccgacatggtaaaamcccacgtctaccaaaaaatacaaaaattagctgggtatgatgatgcacgcctgtaaacccagctactcgggaggttgaggcaggagaattgcttaaaccc

SEQ ID NO: 229455 - DNA, 201 bp, Homo sapiens
gtcttagcactttttagactgcttatttgtgagttttctcctccgtcccctatctatgcacagttccggtgtatgcattaggtgcttaataaatatcttayggaatgagtgagttaccaaatgaacctatacttatacagttagccctcagagaaatcgtctgcggcagtttacaatttttgtaaacaataaaataataaa

SEQ ID NO: 229456 - DNA, 201 bp, Homo sapiens
gggaaggtttgagtttgatgagcactggtctggaagccaggaggctcaagtctctttaccagtggccatgtgaccttgggcaaggctggctcctcttgtcrtctttggtaaaacaagggacctggacaaaggttgccttcatcacgaacacagtgtcaattctgactttgtccttcctctcttgagaagacgatctacact

SEQ ID NO: 229457 - DNA, 201 bp, Homo sapiens
tctttcaaaggcttctcattacccttgggataaatgtaatttaaattctttaaacatgactgaaaaggttctaccgctccagctgcagttctccccacgcmttgtttactcttccacatgttgatcgtggaatatgttgaatccaggaggtttcctcttccccaggtccttggcatgttgggtttcctctgcttggggcac

SEQ ID NO: 229458 - DNA, 201 bp, Homo sapiens
atgcttggaaggaaattttcattgaattctcgcaaggactgagcttctggggaggcagtgcgagaggggaagagggggaaggtttgagtttgatgagcackggtctggaagccaggaggctcaagtctctttaccagtggccatgtgaccttgggcaaggctggctcctcttgtcatctttggtaaaacaagggacctgga

SEQ ID NO: 229459 - DNA, 201 bp, Homo sapiens
tttcctctgcttggggcacttttcacctcacttagttaactccttttatgtttcagttggtcttattttaaatattaccttctgaaggaggcctttactgyctattccctgccactaccactgatcaccaccactataaccccacctgcctctaccgatctagactattttccttctttgtatgcctttgaagtattttat

SEQ ID NO: 229460 - DNA, 201 bp, Homo sapiens
ccttcactctgtaggttttaaaagatttaaatcaactctttggtttaaagtcctgtcccctcacttgaccaaagtcatgtaaatcctgcatttccttacaytgtcttcggaccatgcttggaaggaaattttcattgaattctcgcaaggactgagcttctggggaggcagtgcgagaggggaagagggggaaggtttgag

SEQ ID NO: 229461 - DNA, 201 bp, Homo sapiens
taagcttgtgagaaatagcctgagtatgtggcagtgagattaatggattctcacgccgtgtcccatggaaaaatgctccccaagtgttcctgtgtgaaatrctgtacctttgtcacttttggggatacatgggccgggccttagctaaaggcattgctaagcctcagtgaggagaaaatgacaacccctatcctcactggg

SEQ ID NO: 229462 - DNA, 201 bp, Homo sapiens
tagcaccattgttaataacatgcgagtatctgaatttgagttgtggtaatgttcgtgtcctggtgcgttttcaattggtgccatttcagaaggaggcattygtgctataatggaaagcttcagtgcaaaacgtctgaaagaaagtctgatgtctgttgtttcgtttaagtcaagttctgacaacggtacgttctagagaat

SEQ ID NO: 229463 - DNA, 201 bp, Homo sapiens
tggggcacttttcacctcacttagttaactccttttatgtttcagttggtcttattttaaatattaccttctgaaggaggcctttactgtctattccctgycactaccactgatcaccaccactataaccccacctgcctctaccgatctagactattttccttctttgtatgcctttgaagtattttatcaatgaaatgg

SEQ ID NO: 229464 - DNA, 201 bp, Homo sapiens
gtgaatggcaagctgaggtttaagtccatgctatatgcactctttttttttttttttgagacggagtctcgctctgtcgcccaggctggagtgcagtggtrcaatctcggctcgctgcaacctctgtctccctggttcaagcgactctcctccctcagcctcctgagtagctgggactacaggcacatgccaccacaccta

SEQ ID NO: 229465 - DNA, 201 bp, Homo sapiens
ggatttggtgagatttaatgagatactataaataaaatgcatggagagtgcttagcacacaggaagtgctgttacaatatcacttgggctctgggcctcastgccctgatgtatgacatggaagataacagcagctgtctccgaggaccactgaggggcttaaaagaggcgatacatataaaggtgcatataaagcgcctg

SEQ ID NO: 229466 - DNA, 201 bp, Homo sapiens
ttttgagacggagtctcgctctgtcgcccaggctggagtgcagtggtgcaatctcggctcgctgcaacctctgtctccctggttcaagcgactctcctccytcagcctcctgagtagctgggactacaggcacatgccaccacacctagctaagttttgtatttttagtagagatggggtttcaccatgttggccaggatg

SEQ ID NO: 229467 - DNA, 201 bp, Homo sapiens
ctatgtgtctgcccctgctgtgctctcaccccaaatgccttcttcctcctggtttcctttcccagatcttctccagccttctttttgaaccattccttcaycctctcagcctacacaaatctctcctcctcagaactctctgacacttattgcctgccctactcatgttggcttttgatcattaactctttttagttgtca

SEQ ID NO: 229468 - DNA, 201 bp, Homo sapiens
aatacaaaaaattagccaggcgtagtggcgggcgcctgtaatcccagctacttgggaggctgaggcaagagaatcactggaacccaggaggtggaggttgsagtgagccgagatcgctccactgcactccagcactccatctcaaaaaaaaaaaaaaaaaaaaaaaaagaaggtgggaaaaggaaggaagatcaccattta

SEQ ID NO: 229469 - DNA, 201 bp, Homo sapiens
ttctccagccttctttttgaaccattccttcaccctctcagcctacacaaatctctcctcctcagaactctctgacacttattgcctgccctactcatgtkggcttttgatcattaactctttttagttgtcatttcagtagtttatatttcatgtcttgcctcccaaattatatgcaagtttttgtctctaaactatata

SEQ ID NO: 229470 - DNA, 201 bp, Homo sapiens
ggctaatttataaagaaaaagaggtttaatggactcacagtttcacctggctggggaagcctcacaatcatggtgcaaggcaaaggaggagaaaggcatgycttacatggctgcaggcaagagagcttgcgcaggggaactcccatttataaaaccatcaaatattgtgaaacttaattactaccacgagaacagtatggg

SEQ ID NO: 229471 - DNA, 201 bp, Homo sapiens
ctgagctggcctggcacctgccatgtggcagcctgtggcatatactacaccaaggtgaatacactaaggctgaggtgactcagagaatctttgtggaaggrggagtatttgatacacgtttggaagaatgggtgtagtctggaaaatggctttccaagtaaatgagagagtgtgaacattaggtatggacctagggacttt

SEQ ID NO: 229472 - DNA, 201 bp, Homo sapiens
ctacatcatataatgtcgagtggagttaaatgatataaggaaagtaaatctgcatgcatttgataaagagttttgggttattttttagatagggtggtcamataatcctttgtgatgaggtgacatttgaggacatacctgaataaagtgaaggaggaaaaacatctgaatatttgggggtctagccttttagctggaagc

SEQ ID NO: 229473 - DNA, 201 bp, Homo sapiens
tggtagatggattccatatgtggccttgccagccatggcaaagattttagattttaattatgagcaaaaccagtagagggctgaaaagaaggaaatgatgygatctgatttatattttttagaaaatcatttcagctgctgtgtaaagaagaggctgaaggggacaagaagagaggcaggtggccagtcagaaggctctgg

SEQ ID NO: 229474 - DNA, 201 bp, Homo sapiens
ctaatttcagaggacagattctttggaatatcttttctctattctcactgcttgtaattcagaccaccattctctctccctaggattatagcagtagtgamgtgactagtttctggccctcaatgaacacctgtgatgtgctgggcacataaaacaattgtcacgcgtgtccatgtgaagagaccaccaaaccaataggct

SEQ ID NO: 229475 - DNA, 201 bp, Homo sapiens
tggcgagaatgctggaacgatgggttccagctgatgttatgtaaaaatattcagccatgaaatatgcacttgtggatggctttctgcagatgtctgcagartgcagataatctgtcttctgagaaggtctgcaaattaaaggtctctctgaccagttagaattataccacagtgaggatggtgatgcagtgggtaatgaaa

SEQ ID NO: 229476 - DNA, 201 bp, Homo sapiens
ctcttctccatggaagcaagcccgctcacccaggtgaagagcaacagcactaatgagtaccaggagatgatcttaaaacagaatccttcgctggccccgtrctcgcctgtaaggtcctcattctttagtcttctttctgtccctacaacttgggaaaaaaatttacctcgtccctgtctttataaattgggagggatatct

SEQ ID NO: 229477 - DNA, 201 bp, Homo sapiens
agataatctgtcttctgagaaggtctgcaaattaaaggtctctctgaccagttagaattataccacagtgaggatggtgatgcagtgggtaatgaaatggmcttgaatcttgggcaataatgattataactgcctatggttataagcaaaaatgggtgatttttaccccgactctttttaagagagaaaggatcagttggc

SEQ ID NO: 229478 - DNA, 201 bp, Homo sapiens
atcacattcggagaccgttaatgcagcaggagctggcggaggtctcttctccatggaagcaagcccgctcacccaggtgaagagcaacagcactaatgagyaccaggagatgatcttaaaacagaatccttcgctggccccgtgctcgcctgtaaggtcctcattctttagtcttctttctgtccctacaacttgggaaaa

SEQ ID NO: 229479 - DNA, 201 bp, Homo sapiens
cacatcccccactctaatgagacccgtgctgccgccaaatcacattcggagaccgttaatgcagcaggagctggcggaggtctcttctccatggaagcaarcccgctcacccaggtgaagagcaacagcactaatgagtaccaggagatgatcttaaaacagaatccttcgctggccccgtgctcgcctgtaaggtcctca

SEQ ID NO: 229480 - DNA, 201 bp, Homo sapiens
gcacatcccccactctaatgagacccgtgctgccgccaaatcacattcggagaccgttaatgcagcaggagctggcggaggtctcttctccatggaagcamgcccgctcacccaggtgaagagcaacagcactaatgagtaccaggagatgatcttaaaacagaatccttcgctggccccgtgctcgcctgtaaggtcctc

SEQ ID NO: 229481 - DNA, 201 bp, Homo sapiens
ggcttgggcacaactctacttgaagacataatgaattaatcaaatgcttatatctacttgatatgagtgaaattggatttaagaaaagaatatcaggccgrgagtggtggtttatgcctataatcccagtactttgggaggcctaggtgggcgggttttattttctcctcacagttgagctcaggagctcgagaccagcct

SEQ ID NO: 229482 - DNA, 201 bp, Homo sapiens
ttttatgtaaatggaatgatacaatatatgatcttttgtgtcttgtttctttcacttggcatgttttcaaggttcacccaggttataagatgtatcagaaktttattcctttcttagggctgaataatattgcattgtatggatatattacaatttgcttatcctttgattcattgatgggtgttgatggacaagtgggct

SEQ ID NO: 229483 - DNA, 201 bp, Homo sapiens
atggccccgaagccggacagactgtgaaggtgagtgcttattatgtgcatacaaattaataagaggcgattatgagaactaataaaaaatcacaacgagtyatatgcagcacattgctgtttcattatgttatcttcgaggtcagagagaccctcagtgttagagccgtaaatcctgacattataaactctgccaaacaat

SEQ ID NO: 229484 - DNA, 201 bp, Homo sapiens
gattatgagaactaataaaaaatcacaacgagtcatatgcagcacattgctgtttcattatgttatcttcgaggtcagagagaccctcagtgttagagccrtaaatcctgacattataaactctgccaaacaatatgtttcccattggtttacaagacatttacttttagtagtaaaattattattgtgcaaacgctaaaa

SEQ ID NO: 229485 - DNA, 201 bp, Homo sapiens
taataaaaaatcacaacgagtcatatgcagcacattgctgtttcattatgttatcttcgaggtcagagagaccctcagtgttagagccgtaaatcctgacrttataaactctgccaaacaatatgtttcccattggtttacaagacatttacttttagtagtaaaattattattgtgcaaacgctaaaacagaaactaaat

SEQ ID NO: 229486 - DNA, 201 bp, Homo sapiens
cagtgaggatggtgatgcagtgggtaatgaaatggccttgaatcttgggcaataatgattataactgcctatggttataagcaaaaatgggtgatttttaycccgactctttttaagagagaaaggatcagttggcagaaaaatgatgaacttttggttgttttggaattccttcaatgcaagatgtattggtatcatgaa

SEQ ID NO: 229487 - DNA, 201 bp, Homo sapiens
aatagacctaaaactagtaaggagattaaatcagtgatcagtaatctcctagcaaagggaagccccagaccttatgactttgctggtgaatagtaccaaawatttaaacaactaaaccgatctttttcaaacttttcaaaaaaattaaataaaagggaacacttcctcattctatgaagccagcattaccttgatacaaag

SEQ ID NO: 229488 - DNA, 201 bp, Homo sapiens
gaggatggtgatgcagtgggtaatgaaatggccttgaatcttgggcaataatgattataactgcctatggttataagcaaaaatgggtgatttttacccckactctttttaagagagaaaggatcagttggcagaaaaatgatgaacttttggttgttttggaattccttcaatgcaagatgtattggtatcatgaataga

SEQ ID NO: 229489 - DNA, 201 bp, Homo sapiens
tgcactagggatcctcactaagattatcagcagattttttcattagaagctttacaggccagaaggctcagatattcaaagtggtaaaagaaaaaaaactstcagccaataatcacgtatccaacaaaactgtactgcaaaagaagtaaaggagtgaaggagaaattaagacattcccagataaaacctgagaaaatttat

SEQ ID NO: 229490 - DNA, 201 bp, Homo sapiens
ataatctttgtaataaaattagaccatcacaaaaatgggtctatacagaaccatctctatgacatttttaagtgaaaaatgggttagaatatgccattatktgtagtcatggaaatttaaaatgtgtgtatatgttcacatatgcatatgttgaagagggtacagagatcattaacagcatgagtgggaagacatttttca

SEQ ID NO: 229491 - DNA, 201 bp, Homo sapiens
gtatcggctcattaactctaatagcttgacctttagcttctcttctgtgtgtgatgtaccagccttcacttctcctgcgtaatttaagtgcagggatataycacattttttattggagggcttaggtttttcagggttaccctgagtctgagtttcattttaatgaggcagtgccagaaaacaacaaggattccattacct

SEQ ID NO: 229492 - DNA, 201 bp, Homo sapiens
gcaaagtgttttctcaaagtgaggccttctgcctttgcacatcccccactctaatgagacccgtgctgccgccaaatcacattcggagaccgttaatgcarcaggagctggcggaggtctcttctccatggaagcaagcccgctcacccaggtgaagagcaacagcactaatgagtaccaggagatgatcttaaaacagaa

SEQ ID NO: 229493 - DNA, 201 bp, Homo sapiens
gcttattataaacttttaataagccctcttcttccccaacaaggtaaagagcaattttttgaactgtgtggccaaaagctgtgtcattccccacttttatrtgtggtatcaggaggccctgagaacaatgtttaaaatgttttaatcattgttattgaaggaattaatgtatggtactattcagaaatcccattgctcata

SEQ ID NO: 229494 - DNA, 201 bp, Homo sapiens
tattagaagtagaaagtattggccataatccaggttattccctcgaaggggagctttggtgacatcagaatggattagaacatacaatcaggcttttaggwtgccaggatcaccacctctacctccccttgcacagtagtattctttttgttgccttaccaacacatttacaaatgcagaaagactcttgcttttgtggca

SEQ ID NO: 229495 - DNA, 201 bp, Homo sapiens
aatagggatttattattacctggcaatctcccttaggctgtttcgttcaggcttggttgttcaaggcaactgacaaaaagaaatttggggaacaaagccaytttgctttgttgggtcacctttaatagcttgaaaaggtccagaacttctttacttagcagaatctcctgatgactttgctaagtgaggagcgagatgcag

SEQ ID NO: 229496 - DNA, 201 bp, Homo sapiens
aggccctgagaacaatgtttaaaatgttttaatcattgttattgaaggaattaatgtatggtactattcagaaatcccattgctcatattaggtttctggygtgagtaggggcaaagaagaaaaaaaagacatggaagaaaaatacactcctaaaaaagttaaataacaacttgtaaatttcattctctgttgttggaaaa

SEQ ID NO: 229497 - DNA, 201 bp, Homo sapiens
aatgcttccgggcgagttatacagcagggaccctttaaagcatcagcgttgaagagcagagattgatttccttcccagcctttttctttcatgcaccttargcttctggggatttccttgcagtgcagggctaacgacttttgataccaatcaatgcaaagctaattaatttacttcacaattttcatgtactcgaagtac

SEQ ID NO: 229498 - DNA, 201 bp, Homo sapiens
agaaccaggccccaagtattatgttggcgcagaagtaattgcagtttttgccattgaaagtaatggcgaaaatcgctattacttttgcaccaacctaatayattcattgctaccgagaatctacatgccccggatgttcagggttttttgtgcctctttaattctgatattttttattttatcccttctttgagatgtcct

SEQ ID NO: 229499 - DNA, 201 bp, Homo sapiens
gttaatagaatggagataagatgattgcagctgatgatgctatgatctgtgactaattatgggaaataacttcaaagggacatcaagggcagaagttctgwtgaaatataaatgaaagggctgatttttcagacaaggtaattgaggctcataagagttaagaaattagcacatgaaatcacagccgctgacagagccaga

SEQ ID NO: 229500 - DNA, 201 bp, Homo sapiens
cttgaaagccccacaacaatgtgatattgagtctgtagtaattcagagtgatatgtgtagttcttttctgagtaaaagattttaagtgttttgttgaaaayttttaagtgcgtacaaaagaataaggaggaatctagtctaaattcagcatttttaaaattagctgctaaaaattaaaaaataaaatttttgacatgtctg

SEQ ID NO: 229501 - DNA, 201 bp, Homo sapiens
tttcttccttggtttaatttttttctttttttaaatgaaattgaaattatacaattaagatgaagtacataatttgaaaataaggaaccatctatttgacmtagagtggaggagtcagaaatgggcagtttcaatttaggctgaatgtggatcattaattagcagtgacagtagtagtaatacaactaattatgagcctga

SEQ ID NO: 229502 - DNA, 201 bp, Homo sapiens
ctttgaaggtggagcttctaggtcaaaaaggatgtagtctaatggcaataaactggggacacttagcacagagttttgttcagattcttctctgtgacccyttgtcttcagagataagaacattcctttcttcagggcacctctccaatgagggtcttctaacctgccgcaaggacaaacagggagcgaacagtcagaaag

SEQ ID NO: 229503 - DNA, 201 bp, Homo sapiens
agatgggcccggcgccatggctcacgcctgtaatcccagcactttgggaggccaaggcgggtggatcacaaggtcaggagatcaagaccatcgtggctaayacggtgaaaccccatctctactaaaactacaataaattagccaggtgtggtggcacgtgcctgtaatcccagctactcaggaggctgaggcaggagaatc

SEQ ID NO: 229504 - DNA, 201 bp, Homo sapiens
caataaattagccaggtgtggtggcacgtgcctgtaatcccagctactcaggaggctgaggcaggagaatcgcttgaacccgggaggcggaggttgcagtsagctgagatcgcgccactgcactccagcctgagcaacaaagtgagattctgtctcaaaaaaaaaaaaaaaaaaaaaagaaagaaagaaaagaagaagatg

SEQ ID NO: 229505 - DNA, 201 bp, Homo sapiens
ctaacccaccacatagctctggaccttattcttgctgatgacaccccatagtgtgttcctgtttggcatccctgctatgctactaatacccactgagctgraagttaaccaggcaggacatcttcctcactagggttaagctagatcttccgcaccccaacccgcaatgtgtgacattggatttggggctccagatggaag

SEQ ID NO: 229506 - DNA, 201 bp, Homo sapiens
gcctgtaatcccagctactcaggaggctgaggcaggagaatcgcttgaacccgggaggcggaggttgcagtgagctgagatcgcgccactgcactccagcstgagcaacaaagtgagattctgtctcaaaaaaaaaaaaaaaaaaaaaagaaagaaagaaaagaagaagatggtgctgtgtttttctggctctagtttgct

SEQ ID NO: 229507 - DNA, 201 bp, Homo sapiens
ttcccagtggccttcagctttgcaaagagaacccagaatctgtcatacatctccactctccgaaatgcttcagtggcttctccatgcatggcgaataaatmcagactgctgaccaaggctatcaagggcctgcactctttcctgaagatccagttagaccaagtgaactgggcctagttcacagccaccttagctggtttg

SEQ ID NO: 229508 - DNA, 201 bp, Homo sapiens
gcattcttgcaccttttctttctcatctcaccccttatattttcacagtagttactatgtcagttgcctttgtctgctcaccctctagatttcacatcttkggaagggagaggatgactgtacctggttgtgctgtatcctcagtgtcttatatagtacttgccaggtagtcggctcttaattcacaaatatttactgaat

SEQ ID NO: 229509 - DNA, 201 bp, Homo sapiens
ggaggtatgtgctcagggcactcccctcattcacatactggtgaaatgaaactgtgtatatggtgagggtgctattaaattatttatgttgcatgtggttytctagatctgcaatgaattgcagatttttagtattactttctcatctctacttcactaaaaagctttttacagagtttttgaaatgattctcatagcaaa

SEQ ID NO: 229510 - DNA, 201 bp, Homo sapiens
tgcatactatttcttatttttgagaagccagaatgcatagtagtacagtaaatatgctgatgaatactgcggtaaagagagctattttacttcatttcatscagtgtttctcaatcttctttgaccgcacagttttttttctgtataatgtataacagcatcccgtggaagcagggctctgctatcccactctagtaaaca

SEQ ID NO: 229511 - DNA, 201 bp, Homo sapiens
gccagaatgcatagtagtacagtaaatatgctgatgaatactgcggtaaagagagctattttacttcatttcatgcagtgtttctcaatcttctttgaccrcacagttttttttctgtataatgtataacagcatcccgtggaagcagggctctgctatcccactctagtaaacactgcagtaggtattatacatggaggt

SEQ ID NO: 229512 - DNA, 201 bp, Homo sapiens
ttccctcaatcagtataagattactttgcattgaaaagttcacagaaaaatatgtgaaattcaaccaaagaatctgtaccagaatgctatcgggctgcggrctcccctgtcaatttactttctttgaaaggcaactgtttgcttctctcgatgaaagtgattcttacttttgagcatccagatcggtaccggagttttgag

SEQ ID NO: 229513 - DNA, 201 bp, Homo sapiens
gattcttacttttgagcatccagatcggtaccggagttttgagggcagctcagggcatgttgcctagacaaggatacctgggttctcttcctccagatgamcaaggtctcatcatatctctgacccaaagcatatcccagggcaaaacatgagatagtggatatttgtgagatgcttgccttgagaaccagctctgagcag

SEQ ID NO: 229514 - DNA, 201 bp, Homo sapiens
tccagatcggtaccggagttttgagggcagctcagggcatgttgcctagacaaggatacctgggttctcttcctccagatgaacaaggtctcatcatatcwctgacccaaagcatatcccagggcaaaacatgagatagtggatatttgtgagatgcttgccttgagaaccagctctgagcagagtgttatcattatctta

SEQ ID NO: 229515 - DNA, 201 bp, Homo sapiens
agaaaatgtcatttcttccttggtttaatttttttctttttttaaatgaaattgaaattatacaattaagatgaagtacataatttgaaaataaggaaccrtctatttgacctagagtggaggagtcagaaatgggcagtttcaatttaggctgaatgtggatcattaattagcagtgacagtagtagtaatacaactaat

SEQ ID NO: 229516 - DNA, 201 bp, Homo sapiens
acagatctgcagtcgagatgaatacagactcttttttattagttcagaagaatgattaattctgtgttgtattatctgatactgccttacttcatattaayatatacacaggctaatcagcctaatcaaaatcagtgatattttgatgatttgctttattttggtgacttctatattctgaatccctagaatagatcagat

SEQ ID NO: 229517 - DNA, 201 bp, Homo sapiens
aacattttcactgtgacagccatggtttaaaagactggtatttaaatataagatttaatgtatttctataataatgctaatcccacagtattaattttttrtgcttttaagtttgataacccaactcaccagtttagaaaatgtcatttcttccttggtttaatttttttctttttttaaatgaaattgaaattatacaat

SEQ ID NO: 229518 - DNA, 201 bp, Homo sapiens
agtagagatggggtttcaccacgttggccaggctggtcttgaactgctgacctcaggtgattcgcgcgctttggcctcccaaagtgctgggattacaggcrtgagccactgcgcccggccgatcaatgttgttttaaggctctatgatttggggtagtttattatgcagcagtagataagtgatatagaaactggaagtca

SEQ ID NO: 229519 - DNA, 201 bp, Homo sapiens
gtcatatgcagcacattgctgtttcattatgttatcttcgaggtcagagagaccctcagtgttagagccgtaaatcctgacattataaactctgccaaacratatgtttcccattggtttacaagacatttacttttagtagtaaaattattattgtgcaaacgctaaaacagaaactaaatcaaggagtccggaaacata

SEQ ID NO: 229520 - DNA, 201 bp, Homo sapiens
aaagtgaatagaatagctaacgtgcttgcacgatgaatgattcttcatggggagaaggatttatgtttaaatactattaacattttcactgtgacagccawggtttaaaagactggtatttaaatataagatttaatgtatttctataataatgctaatcccacagtattaattttttatgcttttaagtttgataaccca

SEQ ID NO: 229521 - DNA, 201 bp, Homo sapiens
tggcctaacgtatacagatgtattttaaaaatcaagaaatttcaatgaaaatctggatttctattattacatatccaaagtggagaggcagcatgagttcwctttgttgtaagacccttttcttccagcttctggttttacacctggtcagcatcatacttttaattacctgcctggcccctgtagttgttggaattggta

SEQ ID NO: 229522 - DNA, 201 bp, Homo sapiens
cagcacattgctgtttcattatgttatcttcgaggtcagagagaccctcagtgttagagccgtaaatcctgacattataaactctgccaaacaatatgttycccattggtttacaagacatttacttttagtagtaaaattattattgtgcaaacgctaaaacagaaactaaatcaaggagtccggaaacataagtcaaag

SEQ ID NO: 229523 - DNA, 201 bp, Homo sapiens
gtcctgcagaggctctgacctagaatcccatttggcacctcgttatatcccaggccctggctccaaggggaggtcgttatttcagcctgtaatctgacatraaggcttcccatttttcagctacataaagtaatataacacacatctcagcatcagacattaggattaacactgacaaggcttacgttaaaatgctctgct

SEQ ID NO: 229524 - DNA, 201 bp, Homo sapiens
atcattaaatagggtacatgagttgactgttagaaacctttggactattctagttgcatgaggacaaaatcttgacctctgagtttcagtcttccaaaagkagttgtatctattcttgaattgccatattgagattcaactgtgaaaaattgactcagaatcagctaaaaagtttccttccttcttaaccttgatgttttg

SEQ ID NO: 229525 - DNA, 201 bp, Homo sapiens
tgccaaacaatatgtttcccattggtttacaagacatttacttttagtagtaaaattattattgtgcaaacgctaaaacagaaactaaatcaaggagtcckgaaacataagtcaaagtggttcatgtgagagagtgtctaggaaatagcatgtgagcttcctgtgggtttgtgcagccccatgttaagcctggggtgtctt

SEQ ID NO: 229526 - DNA, 201 bp, Homo sapiens
tgaaggagtggctgggtacatttccaccatcgcctgcctgaatccaaagcttggctggtaagccccactgtgaatcaagactttctctcttggttactctyctttgcagaggagccataaagtagattgcaaagggtaaaagcattctgttagtgagtgaatgggtcttaacaaaagatctgttcccttttatgtcctgca

SEQ ID NO: 229527 - DNA, 201 bp, Homo sapiens
ctggattgagtcattttagcaaatgacatcatgtgtcctttggagtctattttgaaatgtggcttgagtcattatagattggcttcttctctgggttaccrggatggcagtggtgagacttaataaataaatgtactggactctgcaggagcagatttacataattagggtgcagtgatgaaggcttctcattctgcagaa

SEQ ID NO: 229528 - DNA, 201 bp, Homo sapiens
gtttgtggacccagcaattgctgtgattatcccatcattgccagtgtccaatataatgtttgtatccagactgtgttattaactttatttttcatttattygaccctacgtaatgttaggtcatttgtgttttgtttggggctgtgtgggttttttttggagcagtccggttttgtcataacatgcatcacatagttaaga

SEQ ID NO: 229529 - DNA, 201 bp, Homo sapiens
atggatactgtagaggaggcaaaattgtacactcttttagggttttcttttcagctgggcctaagacttaaatgaatataagatagattaatgggagaaargcacacacatttatttaatataagttttatgtgacatgagatacctcataaggaaatgaagactcaaagaagtggcaaaacctagatggttttatattag

SEQ ID NO: 229530 - DNA, 201 bp, Homo sapiens
cgatgagatagtccacaaaaaagagctttttgcagtgcctggcacatggtaagccctaggtgaattgagccttattagtgtgggaacttatcatgccctcrttcaaccagaagctgacctttctcccttacaagtctgggcatttttctgtgttttgtttagttttgttttgcttttccttgtctctcatttttcatcaac

SEQ ID NO: 229531 - DNA, 201 bp, Homo sapiens
ttttggtgtactgcaatgcagagaaagaaggtacacttggtgactgcatttatgatttgagaaaatttcattttttaaagataatgaatttagctcttccrctagggccatgttcagtctttattctggcaaaacacaatgaaaggtttttttttttttttttttaaaaaaaaaaaaacatttccacagcagtagttcatt

SEQ ID NO: 229532 - DNA, 201 bp, Homo sapiens
ctctatactggaataaagaatctctgaaatttgtaatctataaaattcttgaactaaaatcttttttttttcttttttttttctttttttatcaaacagaygagttgtttctcatcctgagggcatatgtgcttgggaaaaactctgacatcttaagaaatgatgttactcatggctgacgcatggctggcatatgaatcc

SEQ ID NO: 229533 - DNA, 201 bp, Homo sapiens
tgttacggttccttttggtcatgggctgccttattgtttggatacttggtgccttaagtagcacctgacaccatagtagatcttaagtgttccatgactcraaaaacagtaatactaatagctgtaaacagtttctgttgaagggaatgaaaatattaataatgttaagcagctctaagaattttattattggcatgtctt

SEQ ID NO: 229534 - DNA, 201 bp, Homo sapiens
ctcacctctctcagacttcatagaattggagagagttaggaccttgctctggattaggctttggcttaagggaatgttgtggcttgtttgatcttctatcyagaccactcaaactctccctatcagcaataagtgttttactttcttactgtttgtgtgttcactggagtagcacttttaatttccttcaataacttgtcc

SEQ ID NO: 229535 - DNA, 201 bp, Homo sapiens
atgtgttagaaacgtaatccccagaacaacagtattgacagatgggaacttgaagaggtgattaggttatgagggccctgctgtcatgaatgaattgatgytgttatcatgggagtaggtttcttgtaaacactagctcagcccttctcaccctctcttctggctatgtgatgcctttcaccatgttatgacatagcaaga

SEQ ID NO: 229536 - DNA, 201 bp, Homo sapiens
tagtatcattcttaagggatccaggattttcagaatgctcaaggaccactgacttcaacttaaagtcaccatctgcagtagcccctaacaagagattcagyttgttcattgaagctttgaagccaggcactaacttctcctctctagctaggacagtccttgatggcatcgccttccaatagaaggctgttttgtcactat

SEQ ID NO: 229537 - DNA, 201 bp, Homo sapiens
  misc_feature (1)...(201): n = A,T,C or G
aagcataaatctgtagggacccaaaatggatccaaggctggcatctggcagaatccaccttaccaacattgtagttacctatgggctgttaggtcctttgngccttctgcctgacttgccagtgcttagagttcagaagcaaggttaatatataagacccccttagggatgaatgggcctgtaagacctgcaggctaggaa

SEQ ID NO: 229538 - DNA, 201 bp, Homo sapiens
ttatgaatgttcttaatggcttctagaatggtgaatcctttccaggttttcaatttactttgcccagatccatcagaggagtcactgtccatgacagttayagccttacaaaatgtatttaattaataagacttgaaagtcagaattcctccttgatctgtgggctgcagaatagatattgtattagcaagtgtgaaaaca

SEQ ID NO: 229539 - DNA, 201 bp, Homo sapiens
tgatttcatctcaagaaatcactttctttgctcacccataaaaagcaatttctcatctgttcaagtttgatcatgagattacagcaatacagtcacgtctycaggctttacttctaattctagttttcctgcttttttcaccactgatgtcttgaacccctcaaagtcatccatgagggctggaatcaacttcttctaaac

SEQ ID NO: 229540 - DNA, 201 bp, Homo sapiens
ttctttgaagctaaccttaagtttctggaccatttttaaggacagattttggtctaggtgtggagaaattgttctactttaaaaggtgaaatgtaaaatgrgatggaaaagtttatctaacaccctgaggcagaattagatctgacctcccctgtgctcccacagctttctatactgatttctaccaatagcattcatctc

SEQ ID NO: 229541 - DNA, 201 bp, Homo sapiens
atatttatatatatagtgtgtgtatatacacatgtgtgcatacatgtgtgtatagtgactgaaatgttattgatggtgtaacagtgaatattaatttcctrtcaagaagtaatcaaatttctatccttttttctcagatcttatatgttgctgagaccaatagtgtaaatacgttgccttgtctaacttgtagaatgcatt

SEQ ID NO: 229542 - DNA, 201 bp, Homo sapiens
gatcttatatgttgctgagaccaatagtgtaaatacgttgccttgtctaacttgtagaatgcattaagaatgctttatttgaataaacagacaacctttckttcatgatttaccttcaaatgtcttcttttggattctaaaaaaaaaattagtctgaggaactcttgtcataaattgcttaaccacatggcacctctctta

SEQ ID NO: 229543 - DNA, 201 bp, Homo sapiens
aattaaaaatttatccccatgttctacctagagaaaccaagtagatattccagttgctttttcaacctagtgcctttggctgctgaagcggacacagcttyagaataggggtcaagagagaatgatctagaatagatcttgcctcctcgcataattatctcaccatacacttgagtctgtctgtacacgaatgtccctttc

SEQ ID NO: 229544 - DNA, 201 bp, Homo sapiens
agtcgggacagtggtggaaaaacatttccatgggacctctctcaccttttccatgcaggtgagtgtacagatttctcagaaatgatttttcttccctttcrtatcccggcattgggcttgctcctcctgatatcttaccaggagggcagatgtgattgtttgtattttaggtagcagccaaaaaaagagatttctaatgca

SEQ ID NO: 229545 - DNA, 201 bp, Homo sapiens
taataagaggcgattatgagaactaataaaaaatcacaacgagtcatatgcagcacattgctgtttcattatgttatcttcgaggtcagagagaccctcartgttagagccgtaaatcctgacattataaactctgccaaacaatatgtttcccattggtttacaagacatttacttttagtagtaaaattattattgtgc

SEQ ID NO: 229546 - DNA, 201 bp, Homo sapiens
tttgtgcagccccatgttaagcctggggtgtctttgacacacctttgcttcttgacatagtctgcttttgcttcattgtttttgagtgaagcaataaccgyagcagtagcatcaagctgcctcccttcctttctgttctcctgtgcttctctctgttctccttctcgtcacccccacacctactcttttcctccctgtgta

SEQ ID NO: 229547 - DNA, 201 bp, Homo sapiens
ggctctaaatatacggatgcaaagaaaggatttaatacctgtggcttctttttgaaatcacttcttgaaatgcaaaacacaaatgtttaaacttggttccmagattttttaaaactcagtattcaaatgtaaattccaactataccggattagttagatgcactatgcaatatctatttgatggaattccttcagccattg

SEQ ID NO: 229548 - DNA, 201 bp, Homo sapiens
ctgaaaaagagtcccagattgatgctcagtccgtatttatggccattctaacatgaggaatgtagaaaatggagaaccagctatggacaccaccaagaackcagatctaattcccaccatggagtccccacagggcaataatctgcttagatcaaaagaggcctccagagccctgcaggctttatcctctcaaagaagtta

SEQ ID NO: 229549 - DNA, 201 bp, Homo sapiens
tactgtagaggcatagctagtgacatgggggaatgcacaaactgtattaagtgggatgcacagaatgataataggtgcatagtaagcatagctaaaacttrtatgaatagataggttatatgatctcaaaatttcatttagccattctaaagcgggatagaaaatatttgctatgcaacaggctctgaatagagatagaaa

SEQ ID NO: 229550 - DNA, 201 bp, Homo sapiens
cagaatccaccttaccaacattgtagttacctatgggctgttaggtcctttgagccttctgcctgacttgccagtgcttagagttcagaagcaaggttaayatataagacccccttagggatgaatgggcctgtaagacctgcaggctaggaaggacacctagcacctggtctaagtgaggacaattaaggaaaagatttt

SEQ ID NO: 229551 - DNA, 201 bp, Homo sapiens
ccccaacaggaaatgaaccgaggcagcacagagtgttcaggaaccctaaacccagcctttccttgaagccctcagtaaggcaggaaccagaagtttcacgrgcagcccttttcttttccagtgtttggccctctaggcaatctgaaaaagagtcccagattgatgctcagtccgtatttatggccattctaacatgaggaa

SEQ ID NO: 229552 - DNA, 201 bp, Homo sapiens
tcagaagcaaggttaatatataagacccccttagggatgaatgggcctgtaagacctgcaggctaggaaggacacctagcacctggtctaagtgaggacamttaaggaaaagattttgcctcaaggatgcagagaaattgactggagaatccactagggaatctgagcaattatagtgttgtgctgagtaaccctacagag

SEQ ID NO: 229553 - DNA, 201 bp, Homo sapiens
actgactgccctccttggcatggaaagccattaggcaggagagataggagacaagccattgtggcaaagtggtgctgatgctgggaactggactcctgagsgcaatttgtcagtttgcttaggaggttcaaagctcgctttgttgtgctcaaactttactgcctgtttgaccagctatgtccctcccgatgatgtaaaaat

SEQ ID NO: 229554 - DNA, 201 bp, Homo sapiens
acctgcaggctaggaaggacacctagcacctggtctaagtgaggacaattaaggaaaagattttgcctcaaggatgcagagaaattgactggagaatccaytagggaatctgagcaattatagtgttgtgctgagtaaccctacagaggctttatcttaattatatattttagggtttattaaactaggaactctgtcccc

SEQ ID NO: 229555 - DNA, 201 bp, Homo sapiens
gtgttgatgaaggaggaagggagattttttttcttctgtattctgtcacctttatcataaagaaatagcccctttagaacaactggctgtccgggggcggkggggtgtgggggagaaaaaaaaagaagtagccactattttgtgctatttctttcctatttccattcttattatctttcttcaggccctaactaactcata

SEQ ID NO: 229556 - DNA, 201 bp, Homo sapiens
tgtgctatgtcattaagacagctaggatgtcactaagcaataggaattttccagatacattataatcttataggaccaccatcatatatccagtaaattgrctaaaatgtcattacgtggtgcatgactgtatatatttatgacccttcctctccctccccaaccataggttttccatgcctcttgaccattgtgttttgg

SEQ ID NO: 229557 - DNA, 201 bp, Homo sapiens
ctggtctaagtgaggacaattaaggaaaagattttgcctcaaggatgcagagaaattgactggagaatccactagggaatctgagcaattatagtgttgtkctgagtaaccctacagaggctttatcttaattatatattttagggtttattaaactaggaactctgtcccctctatgggctaaagagtattttgatattt

SEQ ID NO: 229558 - DNA, 201 bp, Homo sapiens
ttttatggttattattgttccttttgttaggtgttgatgaaggaggaagggagattttttttcttctgtattctgtcacctttatcataaagaaatagccmctttagaacaactggctgtccgggggcgggggggtgtgggggagaaaaaaaaagaagtagccactattttgtgctatttctttcctatttccattcttat

SEQ ID NO: 229559 - DNA, 201 bp, Homo sapiens
gctactggtatttagagggcagaagttaaggatgctaaatgtcattcagtacatgagactgttatgcacgatgaagaattgttttccccaaatgccaatartgcccttgttatgaaatgccatgctaaccttcaaagtatgtttcacagcatcccactctctgaccaccacttcctatcttttcagggctgctgcctcagg

SEQ ID NO: 229560 - DNA, 201 bp, Homo sapiens
attttatggttattattgttccttttgttaggtgttgatgaaggaggaagggagattttttttcttctgtattctgtcacctttatcataaagaaatagcycctttagaacaactggctgtccgggggcgggggggtgtgggggagaaaaaaaaagaagtagccactattttgtgctatttctttcctatttccattctta

SEQ ID NO: 229561 - DNA, 201 bp, Homo sapiens
cacaactatgctgactgcagtggatcctctgttctacacggtgatcctgcattgtttacctaatacttctactttctgagaaaactattttatatcttcayctgtacctcaactctccaatggccatccccagctctctcaatcagttgattgtctcacttcttatttcactggagaaagagaaacaatcagaagaaacta

SEQ ID NO: 229562 - DNA, 201 bp, Homo sapiens
tgacccctggtcttactggtatcacccccattctgaaaaatccaggctagaaactttgggtcatctccagtttattcttgaagttcgtcctctgtatgctrtcattctctagttctatcaattcttttttcctgccaagcccctgtcataattattgctattcttggctgggctgaagttctgggattgtactccccaggg

SEQ ID NO: 229563 - DNA, 201 bp, Homo sapiens
tctacacggtgatcctgcattgtttacctaatacttctactttctgagaaaactattttatatcttcacctgtacctcaactctccaatggccatccccakctctctcaatcagttgattgtctcacttcttatttcactggagaaagagaaacaatcagaagaaactaccttattttctctagcaaatctacaagcctac

SEQ ID NO: 229564 - DNA, 201 bp, Homo sapiens
ttttttaaaatctgagtttattgttaccatcatttgttcatatttaattaaattttatatgcctcatccctcctgcacacacctataaaaggcttactacrtgagaggcactaggttaggtttatacagacatacgaattcaagggatgagttgctcaaacttaatttatctgataacagagtgcatgcccttctaccata

SEQ ID NO: 229565 - DNA, 201 bp, Homo sapiens
cggtgatcctgcattgtttacctaatacttctactttctgagaaaactattttatatcttcacctgtacctcaactctccaatggccatccccagctctcycaatcagttgattgtctcacttcttatttcactggagaaagagaaacaatcagaagaaactaccttattttctctagcaaatctacaagcctacctgtat

SEQ ID NO: 229566 - DNA, 201 bp, Homo sapiens
agggaggctgaggcgggtggatcacttgatgtcaggagtttgagaccagcttggccaacatggcaaaaccctgcctctactaaatatacaaaaaataagcrgggcatggtgatggatgcctgtaatcccagctactcaggtggctgaggctggagaatcactcgaacccaggaggcagaggttgcagtgagccaagattgc

SEQ ID NO: 229567 - DNA, 201 bp, Homo sapiens
gaattgagccataagccagggaattcaggcagcctctagaagctggaaaaggcaaagagcctccaaaaaggaatgcagactggccaacacctgaattttarcccattacacccattttggacatctgacctccagtgctgtaagataatacatttgtgttgttttaagccactgagtttgtggaaatttgttatagtagca

SEQ ID NO: 229568 - DNA, 201 bp, Homo sapiens
ttccctctaaagcctgcctttatttgcaccctcctgactctacacttagagaaatgcccgacttttgttcttcatcttgaacataccccaggtgacctgtstggggacacactttttgctcccagagcgtatgcaaattcctgtttactgtaaaattttctcaaattctcctcagaagcctaaagacttctgtataatcta

SEQ ID NO: 229569 - DNA, 201 bp, Homo sapiens
tccaagaactggaacttatgtttgtaagttctcttctgacctgtgaattctgtctccgatgccagttgctctctataaactttattccttacattttataytgtggtcttcttaattctttcattcttttaaatgaaaatcttatttgattaaaataactattaagggtttcctctgctattgtgtaagcctgtttctaca

SEQ ID NO: 229570 - DNA, 201 bp, Homo sapiens
cttcctccctggtgtttgctcaatgggaggcattagtgtaagtttacagggtgtgaagagaaggaggtgagtatactcattccctcctttatttgccagasgatagtaactgtgtccttctgcaactacatctcccaccagtcatcttggcctccgtgactgtggctgccagtggctttgagtaatgctgttttgcccttg

SEQ ID NO: 229571 - DNA, 201 bp, Homo sapiens
gaatcctacagaaaggggtgagtcccttaaattcttcaattgattatgggaggttagcaaaaaaagagagtttatgaacccatgaaaccttaggttctatstatcagctgtgtcttactgaaatcacctcttgaaccaggacccttcagacatagcaattcatgtcctcagtctctggacacaatggaatcctcattataa

SEQ ID NO: 229572 - DNA, 201 bp, Homo sapiens
agtaagcatagctaaaacttatatgaatagataggttatatgatctcaaaatttcatttagccattctaaagcgggatagaaaatatttgctatgcaacasgctctgaatagagatagaaagtagattagtggttgccagggactgggacaaggaaggaatggggaatgattcctaatggatacaggttcttttagggtaa

SEQ ID NO: 229573 - DNA, 201 bp, Homo sapiens
gatgtggggcctaggactctgtcctaacagacaccacaagtgattctgatgcacacttcacttttctgaagctgctttcctaaaggagtgataagaagcasttgtagggggctgctgctctcaacccaaaccaatttctaggaaagatttgatgtgtacagaaagagagaaagccttatcttgaggatgaaaatgattttc

SEQ ID NO: 229574 - DNA, 201 bp, Homo sapiens
gctctgtgggtggccccaactctaattactgatttctttgttagcatatgatttgatctcattataatggttgaaatcccatttccacgacaaccagaagytgaccaaggcctttatatcttcttggtcggagtcctgctctaccctggattcccctcacttttgtggtcaaaagtatttaattaattgcgtggttctgcc

SEQ ID NO: 229575 - DNA, 201 bp, Homo sapiens
atgcacacttcacttttctgaagctgctttcctaaaggagtgataagaagcacttgtagggggctgctgctctcaacccaaaccaatttctaggaaagatytgatgtgtacagaaagagagaaagccttatcttgaggatgaaaatgattttcttttaccgttacttattattttcatttggaaagacactccaagagaga

SEQ ID NO: 229576 - DNA, 201 bp, Homo sapiens
gtgataagaagcacttgtagggggctgctgctctcaacccaaaccaatttctaggaaagatttgatgtgtacagaaagagagaaagccttatcttgaggakgaaaatgattttcttttaccgttacttattattttcatttggaaagacactccaagagagatgtgatttgccataggacttttatcctttcattacagcc

SEQ ID NO: 229577 - DNA, 201 bp, Homo sapiens
caggtgcatgaaccctgggcgagttaacctttctgagctcccccacattcattcataaacttagaaaatggaggtcttaagagtatcctgtctcttgggastgttgtgaggaccaaatggattaatgcatgtaaatccctgtaaaatagtgcctggcacatagtaaagtctcaatacatgttcaccattagttttataatt

SEQ ID NO: 229578 - DNA, 201 bp, Homo sapiens
agaccacttgggtgcttgttacctgtagaaagtacttttaggggcaccatgagacatggaggcttgcccgggttttcaatcttgactccatcaccaatcawtgagtcatctcaagcaagttatttaagctccctgactcccagctttcttgcctctaagatggggataacaattcctatgtttgtgtagctaagagagctc

SEQ ID NO: 229579 - DNA, 201 bp, Homo sapiens
ctctactaaaactacaaaaattagccaggtgtggtggcacacccctgtaatcccagctacttgggaggctgaggcacaagaatcacttgaacctgggaggyggcagagggtgcagcgagctgaaattgcaccactgcactccagcctgaaaaaaattaggtgaccaataaagtcctctattgtttaagccagtcggagttg

SEQ ID NO: 229580 - DNA, 201 bp, Homo sapiens
ccatggactgctagactgaatttccctgacttgttatcttccaactaaatagtcagggaagattgtattttttgcctaaattgatggggtgaatcttgagrcaagtcacaaagccacattctacccatgtttgcaaaatgtctctctcactcatgggaaatgcatgctttaagtatttaaatctgatgctgtccactgtta

SEQ ID NO: 229581 - DNA, 201 bp, Homo sapiens
tccctgacttgttatcttccaactaaatagtcagggaagattgtattttttgcctaaattgatggggtgaatcttgaggcaagtcacaaagccacattctrcccatgtttgcaaaatgtctctctcactcatgggaaatgcatgctttaagtatttaaatctgatgctgtccactgttagctatttgcatgtgtttccttg

SEQ ID NO: 229582 - DNA, 201 bp, Homo sapiens
aaggtgaaaggagggcttaaaaattgcatgtcacgttctgagctttatacctccttggcccatggtgggtggacctgaaatgccatgtcttatcaatggcraccctttgtaaccagtttgggctttggatttggtaccacacagctttatggaaagacacttggggccgtcattttacttgcaaatagaaacaggctttgt

SEQ ID NO: 229583 - DNA, 201 bp, Homo sapiens
tagataaccagaaataggaggcaacatgtcgtaacgaccaaggagtgagttgaagatgaaaagcaaacaccatggattttggtggttaaagaaatttcccrgatgtaagaaaactttcttacctattgaagttgttctaccagaagagaaaagggagatggcctaagtgaaatattggagaggcaggaaccattagtagga

SEQ ID NO: 229584 - DNA, 201 bp, Homo sapiens
tttttattgtcagaatataacttccgtgacactggagagttgactatcttatgacttctgtatccttagtgcctagaacagtgtttaacactcactgtttrttgatgaagtatttaacatatatttgataaattaatgtttcatcaataaagtgtgctgactactatggcaaagactcttaatttggcatgcctctactac

SEQ ID NO: 229585 - DNA, 201 bp, Homo sapiens
ttaatgataaaagaacaattcaccaggaagagttaatcctgagcctacattacctagtagcatccttttaaaaatatagaaagtaaaaattgacacagtcrccaagaagtattgaaaacccatataatcataatctgagagttttaaccatttttctctcagacactgataaatcaaacaagctaagaagcttagaaaaga

SEQ ID NO: 229586 - DNA, 201 bp, Homo sapiens
gtcaataatttgtgagtcaaagaaaaatgatgatagaaattagtacatactttaagtcttgtgggacacaaagaggtatatagagggaaatttatagactyataaatgtatacgttagaaacggaaggagacattgttagggaattaaggattcaattaaaaaggtataaataaaatagcagagtaaacccaaatacagta

SEQ ID NO: 229587 - DNA, 201 bp, Homo sapiens
aaatggctctttaagtaatagcagtaaaaccgtttcatagagtttgtttggatggttttttagcatatggtatagtcatgtagattaaaatctaattaatraagcctttataataattcagacatggtctgtgtgattccttttcaataaaaagtacaatatgatttttcttagctacgtttctgagtcttgatcatgatt

SEQ ID NO: 229588 - DNA, 201 bp, Homo sapiens
tattctaatgatagtgaagttatatcacatagagcatttggaccaattaaaaatactaatgggaataaaatattttaaatgcagatctgcttgtagtcacrgtgaattttttaaaaataggaagtctgtgtcctattgttgaatggatgtctggattctgtatctagttaattatggattctaggtcagggttggcaacct

SEQ ID NO: 229589 - DNA, 201 bp, Homo sapiens
tcttaatttccaatgacgctcttgcctcttaaactgattttttccttttttatacagccttgtgttgggtaatctttgttttgcctgaggttcaacttctwcccgtctctgtcttgcgtctcctggacttcctccctggtgtttgctcaatgggaggcattagtgtaagtttacagggtgtgaagagaaggaggtgagtat

SEQ ID NO: 229590 - DNA, 201 bp, Homo sapiens
tcctcttgttcagattccttacatgtcagattgctgcctgattaggatttggttttgcagggaagacatttacaggaagggaatgaatgtattggtctttstgacatctgtgcaacagctatactgcaaatcgtagactactactttgacattctggttttatatgttggtctcatgagtgtgtttaatgaagtccatctc

SEQ ID NO: 229591 - DNA, 201 bp, Homo sapiens
caaggccaagggggctgaagcctggtataggggaccatgtaaagtgtggatgactttcagctgggcttctggggagaaagcctgctgcccttcctcatacrgcattctacatagcacaacacagtaggaagcttaagtcttttcctatttggactctgcccctttccaactctcaagttctgcaattctttgacttttctg

SEQ ID NO: 229592 - DNA, 201 bp, Homo sapiens
tattaaactcagagctctctctgggacccctcttctgtgcttcctgacgtttctctcatattttccacctccttatctttttgtcctaggaaatgtttggygccttgccttccatttcttgtattttttaaaaaaattttaccaatcatattcttaatttccaatgacgctcttgcctcttaaactgattttttccttttt

SEQ ID NO: 229593 - DNA, 201 bp, Homo sapiens
agaccagcctgaacaatgtggtgaaaccccatctctactaaaaatacaaaaatgagctgggcatgatggcgtgcacctgtaatcccagctactcaggaggstgaggcaggagaattgcttgaacctaggaggtggaggttgcagtgagcggagacctcaccattgcactccagcctgggtgacagggtgagactccatctc

SEQ ID NO: 229594 - DNA, 201 bp, Homo sapiens
tttggaaagcctatgttcttggtccctcaaattgctgctgaaaggcagcttcagaatttggtatgtgagagcttgttccctgaactagctcagtgttaatwtgggagggccagaaccatgtagtaccaaacctcatgtttatgataggttaaaaccaaaaaggtacctgttgatcaatgaggggtgttatatttttaatca

SEQ ID NO: 229595 - DNA, 201 bp, Homo sapiens
gcttctagacatttggaaagcctatgttcttggtccctcaaattgctgctgaaaggcagcttcagaatttggtatgtgagagcttgttccctgaactagcwcagtgttaatttgggagggccagaaccatgtagtaccaaacctcatgtttatgataggttaaaaccaaaaaggtacctgttgatcaatgaggggtgttat

SEQ ID NO: 229596 - DNA, 201 bp, Homo sapiens
cttatttagtgtacttttattaaaatactattgcactttacatctgaatcctcataattcagatatttaatggacagtcatagggtattaaattgtccctrttatttttgacccaaaagagagcatggggcacctaatgtaaggggctaaattaaggagagaggaatctggttagcttctagacatttggaaagcctatgt

SEQ ID NO: 229597 - DNA, 201 bp, Homo sapiens
ccattgactacgttttcgttaagaggtctattaccagcttccttatttagtgtacttttattaaaatactattgcactttacatctgaatcctcataattyagatatttaatggacagtcatagggtattaaattgtccctgttatttttgacccaaaagagagcatggggcacctaatgtaaggggctaaattaaggaga

SEQ ID NO: 229598 - DNA, 201 bp, Homo sapiens
caaagtgagtgaaacacacttagtcttagggctttaggaacttaaagtgatcccttagccttttgaagagcgtgctatgaaatttgagtcacctggaattrtctaagcaacttaattattgttagctaatattagaaaaggggaagcagaagattgaagtttgtttttgtaacagccaatgaggcatctaatgattcaaat

SEQ ID NO: 229599 - DNA, 201 bp, Homo sapiens
accaccatactcagctaatttttgtatttttagtagagacagggattcaccatgttggccaggatggtctcaatatcttgaccttgtgatccacccacctyggcctcccaaagtgctgggattacaggtgtgagccaccacactgggcactaaagtgtgcacttttaaaagattgtagttctccatccctttctgtattta

SEQ ID NO: 229600 - DNA, 201 bp, Homo sapiens
gacaatttgcaggtgcatggaaaccagaaccaaggagctataacagcatttcttgagataacattgaagatcagattgtaaaattccctttttcttgtgastgtttactttctttgcctgtaattaatgtccaaagacatggtatataaaagaagacatctagaaaatgtttcctaggaattagctatctgtaatagtaaa

SEQ ID NO: 229601 - DNA, 201 bp, Homo sapiens
tctctttttcagtcttgtagtacctgtctattctagaacatctttcctccagtgcagcatttcctaaaatatggccttcaggatagtaagaggaagtattygaaatgacggtttcctagttagatatgtgagggaaacacatttccctttgccaagctctaccagccatgggatttctcaaactctctgttagtgtatgtt

SEQ ID NO: 229602 - DNA, 201 bp, Homo sapiens
atggcctaagtgaaatattggagaggcaggaaccattagtaggatgagatatgtttgtttttagtttgtagaaaattatcatttcattaacgacctggacktcttacgggtagaataactaaatccattgtttaaagaaaaatatcatcagtttgaataaagttggcaagtgtgtggtagattcatttcattgtagccaga

SEQ ID NO: 229603 - DNA, 201 bp, Homo sapiens
tttgatcatcagctgtttgatccagtctctgggagtaatgtatttgtagcaggtttctgaaaatcctgatgtgttgttggtatacgcttctaaagatgcgstaatagggaaatactttggatttagtgaagactgtacttatcggtccaattgaaatatcctacaaattgattttagcattagtatttatttaaattaaaa

SEQ ID NO: 229604 - DNA, 201 bp, Homo sapiens
gttctacagccttggacaaatctttcattgttttcttcctctgtttcgttttacttcatttttatgttcctctcttcctcatctcctcttccctgcatacrttaaagactctttcagttgcaagtgtcagaaaacccaaactggctacagtaaatggatgatttattgggtcacataattaaagagttcaagggaagtttc

SEQ ID NO: 229605 - DNA, 201 bp, Homo sapiens
gtgggagaatctgtcttagagtagctcagcaaatactacctgtcctttactttcagagctttgcccctgtttcctcctgctcgaggccctaactgcattcscctatcttggagggcttgtcctacttcctacttacttaacctctgcttctgctgaagcccttggctcagggaccacccccacagggaagtcgtccttgat

SEQ ID NO: 229606 - DNA, 201 bp, Homo sapiens
cctgtcctttactttcagagctttgcccctgtttcctcctgctcgaggccctaactgcattcccctatcttggagggcttgtcctacttcctacttacttracctctgcttctgctgaagcccttggctcagggaccacccccacagggaagtcgtccttgatccttcgggtgtttgctcctttattttgagatccttatc

SEQ ID NO: 229607 - DNA, 201 bp, Homo sapiens
tcaaaatatatttcaagctatgttactaaaatgtacctaaggcttcttgatataggaaatagaaaaataagactttagatggggcagacatctctagtacmccaagtctttctttccttgaaatatcccttcactttgaaaaacataagtaggccatgtagggaaatgcctaatgtgaatttctcctaatagccccaaact

SEQ ID NO: 229608 - DNA, 201 bp, Homo sapiens
atgttagatatcattgccatgacgtgttaaaacatctaattactggtgtgctgcaagaaagaggaaaatgacaagattgtgaatgtgatttcaagttggasttgggaaaccattcaagaaaactctttagagaaacacatttgcttttgtcccatgagacacacacgatgaactaatagatcatccttggctctaatttct

SEQ ID NO: 229609 - DNA, 201 bp, Homo sapiens
ttttacaaataaccccctatgtctggagttttggcaaatactctgccttaccctgccagtgcagataaaatggaattctgtggcatttggaaggcggagcrttctgtgtttgtaatggagatcatttgggctctgcagggcacatttgaagtcactgatgccagttcaatccccagatgggcaaattaactttagtccttt

SEQ ID NO: 229610 - DNA, 201 bp, Homo sapiens
tgcctctggacacaagccaccacagagaagatgtccctgaagagtttcctaaacaaaatgtaactcactgtcctacgatgggaactctcccacttttccartacctatctgagattccatttctgattcaggttcattactggatcatagacctcaacacacctggcttagtaatggtgaagcccaatactgctgaccctg

SEQ ID NO: 229611 - DNA, 201 bp, Homo sapiens
aatggactaagtggctgtttggacaagggaccctgactattaatcaggaggtgagtgattgactgactttcatgttcattaattattcaaggaagttcacytacaagggccacaacagaaaaaagtttctgtcagtatgcacattttagtaccatattcatttactcacttaacaaatatttaatatgtgccacgcattga

SEQ ID NO: 229612 - DNA, 201 bp, Homo sapiens
gagaaggagaatgctaccgagcagtttagaagactcagttttgcttgactcccctctctatttaggaagtgattattctctgtacatatttcctaagtctyctggaaattcaacctagccaattctaattcttatctgagaaaatattttgtttggaatgatagggtcacagtttcttagagtcagaagagacttgagaag

SEQ ID NO: 229613 - DNA, 201 bp, Homo sapiens
tgtggattgtttgaaactttttccaaataatgaactgcagcttatttccctgcgtattctctttaatgattccagtcctgtatcctggataaaataataayatctcatttacctcttatttggaacacatgtcataattgtccatttatttgtgtgatttttgtatcattactctgttttcccttttaaacatgtgtacct

SEQ ID NO: 229614 - DNA, 201 bp, Homo sapiens
ttcactttagataaatgttttgtgtgaaaactgagaatttttctttttacggtccagtgtttcagggacactgatgatgattttcttggcttactctatctgtcttccaaattaatgcttactttgtttgcttgaacaagttccttgccttttttctcaggtattcagtgaaattattttgagtttctccatcatggtaat

SEQ ID NO: 229615 - DNA, 201 bp, Homo sapiens
tggatcttgaagaatgagaaagcattctccatgaaaatggagccaggaggggcactttccggggtgcagtgttatgaacatgtttactcatctggcatttkttacctcagccctttgtgcttccctattctttggagatttttgactcattttttcccatcttcttcaggaacttgactattctttcccctttcccacttc

SEQ ID NO: 229616 - DNA, 201 bp, Homo sapiens
gaagaatgagaaagcattctccatgaaaatggagccaggaggggcactttccggggtgcagtgttatgaacatgtttactcatctggcatttgttacctcrgccctttgtgcttccctattctttggagatttttgactcattttttcccatcttcttcaggaacttgactattctttcccctttcccacttcaacattgc

SEQ ID NO: 229617 - DNA, 201 bp, Homo sapiens
attaacttgccagggcactaactaagtcaacatacactttatttttatgatcaagaaatgttcacatacagtcatgcaccacataatgacattttgatcartggtagagtacacatacaactgaggtttcataagattataatatatttttactgtaccttttctatatttagatacacaaatatacttgtgttacagtta

SEQ ID NO: 229618 - DNA, 201 bp, Homo sapiens
gtgcttgagacacagtagagacctaacacactgtaactgtcatccttgcctgcactctagaaagccactgctgtagctcactctggtggtataaccatctstccagcggcctcaggacatgcagtggctcagacatattttttcatggaaacctcatcaatggctaatagatgtaaagctatttcagctttttccaggtcc

SEQ ID NO: 229619 - DNA, 201 bp, Homo sapiens
atagaaagcctctttctccactcaggagaatatgccaacattttcccttctcaaattgaaacaggagatttccaattgtaacatctcaaatttatctcaawctgtagtaatagtttagctaatgtaagacagactgtaatttataagcatgtatatatttatatgtgtgtgtatatataggtatatatgtgtatatgtata

SEQ ID NO: 229620 - DNA, 201 bp, Homo sapiens
agagacctaacacactgtaactgtcatccttgcctgcactctagaaagccactgctgtagctcactctggtggtataaccatctgtccagcggcctcaggrcatgcagtggctcagacatattttttcatggaaacctcatcaatggctaatagatgtaaagctatttcagctttttccaggtccttagtttagtggtttt

SEQ ID NO: 229621 - DNA, 201 bp, Homo sapiens
attaacgtgaccactgaatccattagacaacattccacaaaaactaattttgaataggacacaaattgtagacatttatacactgtatttgcctctttctrtaggttttgcttgaaattttaaattttagagttggaacgagcctcaggatagcatatgatacagtttttgtctcttgggaagggagaaggaattttattc

SEQ ID NO: 229622 - DNA, 201 bp, Homo sapiens
ggacatgagccaaaaagtgttccagagacagaagaaaaaagccttgctcttagtgtttaaaaataatttgtttttctaattgcagaggtgacatgcatcartagtaaatggtaatggtaaaaaaggagaaaaataataagaaagtgaagaacattcaacttcctactctacacacccgcttttgaggcttacctgagctgt

SEQ ID NO: 229623 - DNA, 201 bp, Homo sapiens
ttggcaggcatcactcatcaatcatggcactccatcccaccagcgtcctgcctaattactccagacagcctcaactaattgataggaattgtcatgagagrtgaaacctgtaatggaagaaacttttgtaaggaagaagtgacttacctgagtgacaaaggcagtgcattgccaagacagtactcaaacttgggattttta

SEQ ID NO: 229624 - DNA, 201 bp, Homo sapiens
gctctgagtgtcaactacacaccggagttctaagacttcatatgcaaaagaagaattcaatatatcacattattaatttctgttgcttacatgattaaatrttattttgcatatgttggactaaaatatatcactaaatgaatttcactggtttcttttaactttttaaaacgtaactactgacactaaaattacttatgt

SEQ ID NO: 229625 - DNA, 201 bp, Homo sapiens
gttctgtacagcggctgaagacatagcaatgggaatgccaaatttatttttaatggattggaaagggtttgcataagaaatgaagaggaaccaaaaacagyttgtgaaaactgttaaaatataaaaccagtaaggagaataaggaatttctcattctgcccgaatcacctcctttcagtttctttcattacctaatgctgt

SEQ ID NO: 229626 - DNA, 201 bp, Homo sapiens
acacaccggagttctaagacttcatatgcaaaagaagaattcaatatatcacattattaatttctgttgcttacatgattaaatattattttgcatatgtkggactaaaatatatcactaaatgaatttcactggtttcttttaactttttaaaacgtaactactgacactaaaattacttatgtgccttgtactgtattt

SEQ ID NO: 229627 - DNA, 201 bp, Homo sapiens
tcaactggctcacaaaatgctgaaaaatataatgagttcttctatgagctgataggagatggctctagcacacccctgctaagagctttcttaggtcctgktcattctgtggagctattttctctaaggaactgtacctatacctgtatctgcagctgtgaggagcttggaggctctggagaatgcctttgggaaatgaca

SEQ ID NO: 229628 - DNA, 201 bp, Homo sapiens
gtgtgtatgtgtaaaacagatctaagaggagtttgtctgttggaaaggggtaatggatagaggtatgctggccaatgtttaacaattgctctcagaggggraaaaaagcctaatttgtaacacttgtgaatacacatttctgaatttctgtggtgctgatgctcccaccatggccaatttcaggttatcaactcatgtcaa

SEQ ID NO: 229629 - DNA, 201 bp, Homo sapiens
tctaaaatggtgattaatcctaaatacatttgtttattacttggggaaattctttcctttccctgaacccacagttactgccaccgccaccgcagctcacragggttgtatgtgtgtatgtgtaaaacagatctaagaggagtttgtctgttggaaaggggtaatggatagaggtatgctggccaatgtttaacaattgct

SEQ ID NO: 229630 - DNA, 201 bp, Homo sapiens
atctaaaatggtgattaatcctaaatacatttgtttattacttggggaaattctttcctttccctgaacccacagttactgccaccgccaccgcagctcayaagggttgtatgtgtgtatgtgtaaaacagatctaagaggagtttgtctgttggaaaggggtaatggatagaggtatgctggccaatgtttaacaattgc

SEQ ID NO: 229631 - DNA, 201 bp, Homo sapiens
agctgacctttgtttttaatcacaactgcttttaaatggtaatagctagggaaaaggcatgacagaagagtggtggaagggaaaaaaaaaaggagaagggkcattgcatgatctttggagtcaggcagacttgcctcctgatacagattctaccccagccaggctgtgtgatctttgacatgagacggaacttctctgtgc

SEQ ID NO: 229632 - DNA, 201 bp, Homo sapiens
cttaattgatccatgtgttagttgctcagtctgccactctcatctagatccctgtctctgctcattcctgccttactctgtgttcagtgcctgcccttcamtttccaatagactacattgcctgtgctcccttacagttggattggatctgggattgacaagcatggtggctaggctgaaaatcagaggactggagcagaa

SEQ ID NO: 229633 - DNA, 201 bp, Homo sapiens
ctcaaacttaataggagcttggtaagtatttgaataaatgaaggcacattttcataagtgtgtgttactggtattagccaaggctgtgtgccttggttccwttctctgggactcacccttctcatatgtgctaaggttattctatttcacatgccttttactctgcactctggggctttctcttgctggtgtagagtgtag

SEQ ID NO: 229634 - DNA, 201 bp, Homo sapiens
ttattctatttcacatgccttttactctgcactctggggctttctcttgctggtgtagagtgtaggcctaaagtgtcaggaattattgactttaggaacartgtttagccaataccagtgggaatttgaggataaattccccagcttcctatgtcgtaagtgcgaaaactcagagggtagcatgttccacgctgtcttcca

SEQ ID NO: 229635 - DNA, 201 bp, Homo sapiens
tcccatccatcttatatagacaaaccccgtaaaattccaaagtccggttagaaactgtagaatgagggctaattataacaacctatagctaaagccagagrcattataccttcaggaactgggcaaaactggggactcttgaagaacatagatacatagttttgaagtatgaagaatatagatgcacacttttgtgtgtta

SEQ ID NO: 229636 - DNA, 201 bp, Homo sapiens
aactgtacaaacaacctgtgaatctaaaattctgccatgcttctgtagttcttgaggaccacaagaccaaggttggaatttccctggctgcttctgagagstgatttgaaagtctgggtggcccctggctctgtgctctctcagcctcagtgtgacatttttaggcacacatgttaaaacagtcttcagatgttcaatagg

SEQ ID NO: 229637 - DNA, 201 bp, Homo sapiens
aaagaatagcaccctaacaatttcacagaatggtttgcttatgtctgtctgctgaattcctaagcctccagatgcagagggaagtattcagttagttgtckgttaggttcacactcacttttcactacccttgccccccataatttggaaacttgacacattgtcttttgaagaacagagtctgggaagcagtaacctggt

SEQ ID NO: 229638 - DNA, 201 bp, Homo sapiens
acaggccttcttgaaatttgctggccaagaccacaaactttagcgagtaaaaacatacaggctttggaatttgagtccaaattgcaagttattagccatgsaactggagtaagttactttgcctgttttaggcctcagtttcctcaagtattattgctaatttctttaaactgaaattagcaataatacttacccacaggt

SEQ ID NO: 229639 - DNA, 201 bp, Homo sapiens
tctcattaccctttttgctattattgtggccaatggtggattcttctactagggttgtacatcagtgctggtttggcaggctggatttattttaaagaaaygcttcagggatgcctacttttccaccaaaaatcaatcaaaatgttgtgaagggagcataaattgtagtcatctttgctaggagagccttccaagtagctt

SEQ ID NO: 229640 - DNA, 201 bp, Homo sapiens
ataaaagcacattccaagataatttcaccagttttcactgtcccccactgcctgatccacccacccagagaccccaaccccaaccaggtggtgtgcagcayctcaattaaaagcccttcaccattagatgtgtcttcaagccatgcctagttccaaaataaccttggagatatcttgcattctcgttctcttgcttgagtt

SEQ ID NO: 229641 - DNA, 201 bp, Homo sapiens
tggaaagtgctaaggcaaatatcgatttgatttaggtagatttcaagcatcaaatgtggtggttggttgtggtaggtagggctgcgtgagaggctggggcrtgtgcctggagatgttaaatattagaatttcacccctttttctttttctctttcttcattctctttccttatgacccctccatgacataggtggtgggct

SEQ ID NO: 229642 - DNA, 201 bp, Homo sapiens
attaatttctgttgcttacatgattaaatattattttgcatatgttggactaaaatatatcactaaatgaatttcactggtttcttttaactttttaaaaygtaactactgacactaaaattacttatgtgccttgtactgtatttctattggatggtctcttttggaccattttctccccatgtatacaaaatttttaca

SEQ ID NO: 229643 - DNA, 201 bp, Homo sapiens
catgattaaatattattttgcatatgttggactaaaatatatcactaaatgaatttcactggtttcttttaactttttaaaacgtaactactgacactaamattacttatgtgccttgtactgtatttctattggatggtctcttttggaccattttctccccatgtatacaaaatttttacaaagaaaaactgagttatt

SEQ ID NO: 229644 - DNA, 201 bp, Homo sapiens
gtttcttttaactttttaaaacgtaactactgacactaaaattacttatgtgccttgtactgtatttctattggatggtctcttttggaccattttctccycatgtatacaaaatttttacaaagaaaaactgagttattctacacacaactttgtatcttcccttttgaagttaatatattgagaatatgttcatgtcat

SEQ ID NO: 229645 - DNA, 201 bp, Homo sapiens
ataactaccattttttaaaaaattacaaattctccacgagcatacttataactgtatctttgggttcatcttcaattatgctcctagggtttgtttctggragccagtttgctgagtcacagacttgcttgtggtgtgactggctacaagggaagggtgagtggttggttgtgggtagatgaaagggaagctagagaggag

SEQ ID NO: 229646 - DNA, 201 bp, Homo sapiens
ggaagccagtttgctgagtcacagacttgcttgtggtgtgactggctacaagggaagggtgagtggttggttgtgggtagatgaaagggaagctagagagraggaggtaccaactgctaggggctaccctcctttctccagcagaaagtggatgacaccaaaactgagaggttggaagagagtttaatgaacagaagattg

SEQ ID NO: 229647 - DNA, 201 bp, Homo sapiens
aaatccttcttggtccacgtgaatgatggaagatggtaatttgtctctaagagcaaggaagaaagaacatttgagttaagttatggacagctgacctttgkttttaatcacaactgcttttaaatggtaatagctagggaaaaggcatgacagaagagtggtggaagggaaaaaaaaaaggagaaggggcattgcatgatc

SEQ ID NO: 229648 - DNA, 201 bp, Homo sapiens
ctgatcccttaatgctgcctgccattgtcttagccctatagaaaccaaagggcacgggagatgagtctgtagagatcagtaaggaagagaccaccagcagsgcagagaagggtggagaagagataggaagaggtgggtggagaagagataggaagaggtgagtggaggaaaatcagaacaccagcttggatacttaaactg

SEQ ID NO: 229649 - DNA, 201 bp, Homo sapiens
gttgctgagtcacctgtgactccaacgggtgagtcacctgcccggtagaacccataggctccaacgaggagtctttctcaggagaatgtctttattctttmctggactcatgcagtcattgtctcacatatgtgtcatcatcatatttatgaccaatttttcctggagctaaatgctgaattcttaaacttgggaaacttc

SEQ ID NO: 229650 - DNA, 201 bp, Homo sapiens
tcctgtgtgagctttgctttcctgacctgtaaaatgtgcatagtaatacctacctcagaatgtgatcgtgagaataaatgaaggagagcacttagcacaayggttttttatttacttgttcttcatcagaggcttatcagtggaccatatcaacttcttaccatgttgtccatttatcatgtctaacaagttcatcaagag

SEQ ID NO: 229651 - DNA, 201 bp, Homo sapiens
gaatggcctccaggatatgttattctgggaaaagtgaaggagagaactgtgtgtataatgggcttcctccctttgtattaacagggaggagttcacacaartacaagtgattggttctacaaagtgtgtttctgaagtgccagaaagaagtggttgggcctggaaggaaaactcacttttcactccacgtgctttgcatct

SEQ ID NO: 229652 - DNA, 201 bp, Homo sapiens
attcgggaacctttgagtttcctggatctgtatatacacatctctatccagacttgtgaaattttcagctattagataattaaattaggttttttttttaatacatcttttccttctggaactgccataatatgaaaatttgttcacttaatggtgtcctataagtcttgtagtcttttttaaaaactctttttctttctt

SEQ ID NO: 229653 - DNA, 201 bp, Homo sapiens
ccatccctcagagatgtcaggctgaaggagatgatgaaactctgtaagccgaagaacatggggaaagaggagacacaggaaggtagtgaatgccccctccycactcccctccccatttgtcttctgccccatcaatttctagatcaggaaggggtttggaatccaacactccttcccatttaagatgagaaagtggaaggc

SEQ ID NO: 229654 - DNA, 201 bp, Homo sapiens
ggtccgatgtgagctgggaagagagcagcctgaatccctctccttggcatccccacctccaccctccctcgggggctcctcccgggaaccccaggtcttasctgctgcccccagtgcagcccagagtaccagcgctcgaggggcgctcagacgagctgcagcccccatccccaggaggcctccgagggacccctgcccaac

SEQ ID NO: 229655 - DNA, 201 bp, Homo sapiens
tccctcagagatgtcaggctgaaggagatgatgaaactctgtaagccgaagaacatggggaaagaggagacacaggaaggtagtgaatgccccctccccastcccctccccatttgtcttctgccccatcaatttctagatcaggaaggggtttggaatccaacactccttcccatttaagatgagaaagtggaaggccag

SEQ ID NO: 229656 - DNA, 201 bp, Homo sapiens; identical to SEQ ID NO: 42242

SEQ ID NO: 229657 - DNA, 201 bp, Homo sapiens; identical to SEQ ID NO: 42243

SEQ ID NO: 229658 - DNA, 201 bp, Homo sapiens; identical to SEQ ID NO: 42245

SEQ ID NO: 229659 - DNA, 201 bp, Homo sapiens; identical to SEQ ID NO: 42248

SEQ ID NO: 229660 - DNA, 201 bp, Homo sapiens; identical to SEQ ID NO: 42249

SEQ ID NO: 229661 - DNA, 201 bp, Homo sapiens; identical to SEQ ID NO: 42250

SEQ ID NO: 229662 - DNA, 201 bp, Homo sapiens
tgaggcaggagaatggcgtgaacccgggaggtggagcttgcagtgagctgagatcacgccactgcactccagcctgggcgacagagcgagactccgtctcaaaaaaaaaaaaaaaaaagaaaaaagaaaaagaaaaaaatagttggggaacggcagctcacgcctgtaattccagcactttgggaggccgaggaaggcaga

SEQ ID NO: 229663 - DNA, 201 bp, Homo sapiens; identical to SEQ ID NO: 42252

SEQ ID NO: 229664 - DNA, 201 bp, Homo sapiens
atacagaaagtgaaaggctgactgatactgcaagaagagcagactctacctaaaatgtagggctttcctcctccaggaagccttccctgaccgcccccccsccgccccaggctgggtcagtgcttgctgtgaacattcacaatgtcctgtgctacctccatgagagcatacatcttgttagaaagggactgtgtccccatg

SEQ ID NO: 229665 - DNA, 201 bp, Homo sapiens
agcgtattacataagtatcacatgaactccaaaatacatcttaggccaggcatggtggctgtaatcccagcactttgggagggtaaggcgggcggatcacytgaggtcaggagttcgagactagcctgggcaacatagtgaaaccctgtctctactaaacatacaaaacattagccaggggtggtggtgcagacctgtagt

SEQ ID NO: 229666 - DNA, 201 bp, Homo sapiens
gcctgggtgacagagcgagattttgtctttaaaaaaaaaaaaaaaaaaaaaaaaaagaggaaggcttcctggtcctggtgtgatagaacatttgactttctttttttttttttttttttttttgggaggcagagtcattctgtcacccaggctggagcacagtggtggcagagtctcatgatctcagctcactgtaacctc

SEQ ID NO: 229667 - DNA, 201 bp, Homo sapiens
gtatcacatgaactccaaaatacatcttaggccaggcatggtggctgtaatcccagcactttgggagggtaaggcgggcggatcacctgaggtcaggagtycgagactagcctgggcaacatagtgaaaccctgtctctactaaacatacaaaacattagccaggggtggtggtgcagacctgtagtcccagctacttggc

SEQ ID NO: 229668 - DNA, 201 bp, Homo sapiens
ttgtctttaaaaaaaaaaaaaaaaaaaaaaaaaagaggaaggcttcctggtcctggtgtgatagaacatttgactttcttttttttttttttttttttttkgggaggcagagtcattctgtcacccaggctggagcacagtggtggcagagtctcatgatctcagctcactgtaacctccaccttagggttcaagcgattc

SEQ ID NO: 229669 - DNA, 201 bp, Homo sapiens
acaggtgcatatcacacacccagctaatttctgtttttttgttttgttttgtttttgtttttgtagagacaaggtttcaccgtattgcccacactagtaattttttttttttttttttttgagacagggtttcgatcttgttgcccaggctggagtgcaatggtacgatatcggcttgccgcaacctccgccttctgggtt

SEQ ID NO: 229670 - DNA, 201 bp, Homo sapiens; identical to SEQ ID NO: 42259

SEQ ID NO: 229671 - DNA, 201 bp, Homo sapiens; identical to SEQ ID NO: 42260

SEQ ID NO: 229672 - DNA, 201 bp, Homo sapiens
gaaacctcatctctactagaaatacaaaattagccgggcgtggtggcacacacctgtaatcccagctactcgggaggctgagataagagaatggcttgaascccagaggcagaggctacagtgagccgagatggcgccactgcactccagcctgggtgacagagcaagactccatctcaaaagaaaaaaaaaagaaataga

SEQ ID NO: 229673 - DNA, 201 bp, Homo sapiens
gcacataggcaagtatgtgccaagtatttacacacctgaagtagaagcacacacacacccacactatgcctgcacaccaccgcatggccacgttcaccagygccccgggcctccatctcccagctaacgtgtcccgttttcctcccctgacagccatgctggtcgttcagatgcctttctcctttcccatggcccacttca

SEQ ID NO: 229674 - DNA, 201 bp, Homo sapiens
tctcgaactgctgacctcaggtgatccacccactttggcttctggaagttctggcattacaggcgtgagccactgtgcccggctacctcccgttctatgakctatggtttaaacgctacatttgaccactatcaatactcccagtatcaaaactgggaaacctgggttcttcacccagagcctaaaacgaacagcattctt

SEQ ID NO: 229675 - DNA, 201 bp, Homo sapiens
aaaaaaagaaaaaagaaaaactaaaggagaatgattttcttttgctttgagggacccagttgtgtgttaccttcttagagcaaccggggaaacacatagarcgtctaatgcatattaattgaatggattgtacaaacagagcgaaaagagaaccccatggcttagcaggaaagcagcttagagatgaaaggtttcagtgtc

SEQ ID NO: 229676 - DNA, 201 bp, Homo sapiens
aaaaaaaaaggtacattggactggagctggtaagtccggggggactcatgaacctcctgaacatctgtgaaactgggcctctaaagagtaggctgcatccrggcacgatggctcgtgcctgtaatcctagcactttgggaggccaaggtgggcagatcacctgaggttaggagttcaaaaccagcctggccagcgtggtga

SEQ ID NO: 229677 - DNA, 201 bp, Homo sapiens
ggtccacaggcatgcaccaccacaccaggctactttaaaattttttttttaaagacggggactcattatgtctcccaggctcatggacactctttgaagaracttggactgcagggtgttttgacactaagaggtttgagagccctggactggcaggtccctgagagcccggaagagttgtgggataatcagggagctcag

SEQ ID NO: 229678 - DNA, 201 bp, Homo sapiens
ccagcagactcataggaggcctgcctgggcggcctggggtccatctgggacccaggcttcctttccctggctcttggcatgcaccccccaacccgagcccygaggccccgacattggccaaacctgcactcaagaagagagcgtcctgcagccagttccccgcaggctcttcctccaagctgtggcgcggtgggctctcag

SEQ ID NO: 229679 - DNA, 201 bp, Homo sapiens
caagcagtcctcccaccttggcctcccaaagtgctgggattacaggcgatagccaccctgagtggttgtgttacattcagagtggaccctgcctctcccayggctcccctgcacctctggacagagtccccctcctcagcctttcttgtcgtgaccagattcttctaatgtccttgaagatccacctgtgagagaagtttt

SEQ ID NO: 229680 - DNA, 201 bp, Homo sapiens
gctggcgttggtctagatttgttggctgggccgaactcctgagtgtcttaagagagctgaatagcctgaggtcatagaccccaaggtcatggagcaggtgyggactggggattagggaaccgtgggacaagtctttatgggaagtggggctaaggctcaaatatctgggaccatgaagggaagcagaaagggtctctgaga

SEQ ID NO: 229681 - DNA, 201 bp, Homo sapiens; identical to SEQ ID NO: 42212

SEQ ID NO: 229682 - DNA, 201 bp, Homo sapiens; identical to SEQ ID NO: 42216

SEQ ID NO: 229683 - DNA, 201 bp, Homo sapiens
ccctcaaccttctcctcccccaggacccaggagtctgggcctcccagcaccccgcttccctcagaccccgggttccaggcacccaactgctccctccctcygaatctcgcctccgctcacgttgacaaagaggctgagaatggccaggccattggggccgcgggaggcagcgctgaaattcccgtagagttcctggttgaa

SEQ ID NO: 229684 - DNA, 201 bp, Homo sapiens
gcaataaacaagtagacaaaagtcctgggccttatggagtttatgttctaatgaaggcaagacagacaattgtgaatcacataagtaactgcttaattaaytacatcctgagctcatgtttgggggaactgggagctctgaggtgtcatggggagctcagcttagatgggggatgtcaggaaaagcttccctgcaaaggtg

SEQ ID NO: 229685 - DNA, 201 bp, Homo sapiens
gtcatggggagctcagcttagatgggggatgtcaggaaaagcttccctgcaaaggtgacattttatttttatttatttattattttgagacaaagtctcaytctggcacccaggctagattgcagtggtgccatcacagctcactgcagcctcaaactcttgggctcaaacgatcctcctgcctcagcctctcaagtagct

SEQ ID NO: 229686 - DNA, 201 bp, Homo sapiens
acgcatgaagcactgcacctggccaaaggtgacattttaatggggacctgaaggataagcaggggtgacttgcaaaagaacaaagagaagggcattccaaraagagggaacagcaagtgcaaaggccctgaggtggcctgtttgagtaacagcaaagagacttcatcaaagtccagtgaacagaggagagagaggttatgg

SEQ ID NO: 229687 - DNA, 201 bp, Homo sapiens
ggtttcaccaagttggccaggctggtcttgaactcctgaccacaggtaatccacccacctcggcctcctaaagtgctgggatttcaagcgtgagccaccgygcccagccgatcaaacccatcttaagccactgtagatggaactacaactcccagcaggccccagtgctaccagcctacccctctgctgcctacctgcccc

SEQ ID NO: 229688 - DNA, 201 bp, Homo sapiens
tcaagagattcttgtgcctcagccatctgagtagctgggatttacaggcgtgctccaccatgcctggctaatttttgtatttttagtagagatggggttcrccatgtttcccaggctagtctcaaattcctggcctcaagtgatccaccctcctctgcctcccaaagcgctgggatgacaggcgtaagccaccgggcccag

SEQ ID NO: 229689 - DNA, 201 bp, Homo sapiens
tggagattatccttgtagctccaccagtcctcggggtcaggtgctggtccgatgtgagctgggaagagagcagcctgaatccctctccttggcatccccayctccaccctccctcgggggctcctcccgggaaccccaggtcttacctgctgcccccagtgcagcccagagtaccagcgctcgaggggcgctcagacgagc

SEQ ID NO: 229690 - DNA, 201 bp, Homo sapiens
gattatccttgtagctccaccagtcctcggggtcaggtgctggtccgatgtgagctgggaagagagcagcctgaatccctctccttggcatccccacctcyaccctccctcgggggctcctcccgggaaccccaggtcttacctgctgcccccagtgcagcccagagtaccagcgctcgaggggcgctcagacgagctgca

SEQ ID NO: 229691 - DNA, 201 bp, Homo sapiens; identical to SEQ ID NO: 42219

SEQ ID NO: 229692 - DNA, 201 bp, Homo sapiens
tgtcctgacatgatttaaagtgatcatcctggcttccatgtgaagaagactttcagggggtagtgatgagagtagtgtggggactattgtaataatccggrcgagcagtgatggtggtttggacaaaggtggtagcaacagagatggtaaaaatggttgaattatgggagatattttgtggatgtggacaggatttgctca

SEQ ID NO: 229693 - DNA, 201 bp, Homo sapiens
cgatcaggggtctgtagacaaaaattcccaaagatttgagactttattgggggaaacagatcactggcggggaataagccacaggccaaaggaggaaatgytgggaccagaagtcccgcttgccgccttttgctaaaagttccgcacgcctgctcggcgtgggcgcaagcatagtgtcgtcggggctctgcgacgtctgat

SEQ ID NO: 229694 - DNA, 201 bp, Homo sapiens
agtgcaccgtcgaggtagaaggctcagctcctagtcgctcccaaattactttgttggtgctcgaggcagccccatctcacgtctagtgctccggcctgggrctgggtgtgggtgcccgcacgccgcggcagcctccggcgcgctcctcctgctgcagccgcttcaggggccgggcccagcgcggcctccatggcagcgcga

SEQ ID NO: 229695 - DNA, 201 bp, Homo sapiens; identical to SEQ ID NO: 42208

SEQ ID NO: 229696 - DNA, 201 bp, Homo sapiens
gttgactgcagcctcaacctcctgggctcaagcaatcctcccacctcagcctcccaagtagctgggaccacaggtgcatgccaccatgcttgactaatttwaaaaaaaattttttttttttgtaaagatagggtctcactttttttgctcaagctggtcttgaacttgggctcaagtgatcctcccatctcagcctcccaa

SEQ ID NO: 229697 - DNA, 201 bp, Homo sapiens
ctcatccccatttaacaggtgaggaaacagactcagagaaactcagtaacttcttgttgtttttgagacagggtcttgctctgttgcccaggctggggtgygggggcacaatcacagttgactgcagcctcaacctcctgggctcaagcaatcctcccacctcagcctcccaagtagctgggaccacaggtgcatgccacc

SEQ ID NO: 229698 - DNA, 201 bp, Homo sapiens
gtcttgaaaggagtgaggcaattatctgggcgtggtggctgtacctgtagtcctacctgtagtcccagctactcgggaggctgacgcaggagaatcactgraacccaggaggtagaagttgcagtgagccgagattgcgccattgcactccagcctgagcgacagagtgagacaccgtctcaaaaaaagaaaaagaaaaga

SEQ ID NO: 229699 - DNA, 201 bp, Homo sapiens
agggagggggtgaagggatgactgctgagctgtagccattggagtggccacagggaaaccataggacattggtcagaggagtggacaaggggagaagagaragccgatcaggacatggtagaggctgggagcagaggaccttctgggagccctggggagagctggaggagactcggaaagagcagcccccggagaagggac

SEQ ID NO: 229700 - DNA, 201 bp, Homo sapiens
cagaagggtcagatgaaccaaatgaggagccctggaatagaggaggatgacagctgaagaggcctggagggccccagattgttcaggcttctcagaagggycagatgaaccaaatgaggagccctggaatagaggaggatgacagttgaagaggcctgtaggcccccgatgtttaagaggacaggcggagggagagatggg

SEQ ID NO: 229701 - DNA, 201 bp, Homo sapiens
tttgtatgttcagtagagatggggtttcaccatgttgtccaggctggtctggaactcctgacctcaagtgatccgcccacctcggcctcccaaattgcggrgattacaggcatgagccaccgtgcccagccctggtcagtcttgaggtctgtgttgatgttaaacactggtcagctgagcctgaattacaatggcaggagg

SEQ ID NO: 229702 - DNA, 201 bp, Homo sapiens
aaaataataataaataaaattttggcagagatggctcttgctgtgttgtccagggtgctcttgaactcctggcctcaagcgatccttcagcctcagcctcycacagtgctgggattacaggcatgagtcaccacactcggcccatcaatttattttataagcaaactggttcacatacgttttttcccgttaatccagttt

SEQ ID NO: 229703 - DNA, 201 bp, Homo sapiens
gctcttgaactcctggcctcaagcgatccttcagcctcagcctcccacagtgctgggattacaggcatgagtcaccacactcggcccatcaatttattttrtaagcaaactggttcacatacgttttttcccgttaatccagttttggaaagggaaaaaaaccaagacttttaccacctttactggaccgggtcccacagg

SEQ ID NO: 229704 - DNA, 201 bp, Homo sapiens
cctcccaagtgggattttaggcacccgctgccacatccagctgatttttgtatttttagtagagatggggttttgccattttggccaggctggtctgaccrcaagtgatccttccacctcggcctcccaaacttctgggatgacaggcgtgagccactgtgcccagccaacagctttcacattacaaaagcccaagcagaa

SEQ ID NO: 229705 - DNA, 201 bp, Homo sapiens
ctgggaaggagactgttttttttgttggggagagttctttaagggctggagaccttcaccctcacagcttctacagaaggccaggcctgcccaaggcacakctctgaggtgggttcaacccagagagaacctcagtgctgggctcacacagacctctaacccctgccttggtggcccagatataacggagtctccacgagg

SEQ ID NO: 229706 - DNA, 201 bp, Homo sapiens
gggggagaccccagcagcgcaggtccttctgtgctctaggttgttggaaggtgccaagtgccttggagcaaagcaagtggggggggcggccacgggggccsggggattgcagatgtaagtggggtgatgcggaggggcatttgtgctgagcccaccgccagcacagaacccagctttgctgccacacaaaactgaggaaga

SEQ ID NO: 229707 - DNA, 201 bp, Homo sapiens
aggctcagtgtccagagagggagggggagaccccagcagcgcaggtccttctgtgctctaggttgttggaaggtgccaagtgccttggagcaaagcaagtsgggggggcggccacgggggcccggggattgcagatgtaagtggggtgatgcggaggggcatttgtgctgagcccaccgccagcacagaacccagctttgc

SEQ ID NO: 229708 - DNA, 201 bp, Homo sapiens
tgggcgacagagtgagactctgtctcaaaaaaaaaaaaaaaacaaaaacaaaaattagccgggtgtggtgacgcatgcctctagtcccagctgctcgggasgatgaggcatgagaatcacttgaactcaggaagtggaggttgcagtgagccgagatcacaccagtgccctccagcctgggcaaagagtgagactgtctca

SEQ ID NO: 229709 - DNA, 201 bp, Homo sapiens
cagaccagcccctggaattcaaaagacctcagtcgctttctaagatggtggggaaggcgacaaatgagctgagaacacctgggccccagtgtttctcatgmggcagagggagaaggcggggacccccggggtgcgggggaccaagctcaaaagcacctccccagtgccgctggtgtcctgcgagtcctcagtgctttcatc

SEQ ID NO: 229710 - DNA, 201 bp, Homo sapiens
tgaacattcacaatgtcctgtgctacctccatgagagcatacatcttgttagaaagggactgtgtccccatgtgttccaccggagggcccaagcctgaccygtctctgagtccccagcctcactgcacacagagcctggtgtacggggtcctcaggagagaactcaggcattattgaatgaaaccatgctcatgatgtctt

SEQ ID NO: 229711 - DNA, 201 bp, Homo sapiens
atgctgccttcctggaggccttcctggctgcctggaggagcggagcagagtgggggcccctttctgttggggcatcacaacagttccccaaggaagacccycggggacccggatgggggatgcgaccttgtcctgcctctctcccccacccttatggccaggcttggggtgcctggtgcaggtggaggagctaagggtaga

SEQ ID NO: 229712 - DNA, 201 bp, Homo sapiens
gttccgcacgcctgctcggcgtgggcgcaagcatagtgtcgtcggggctctgcgacgtctgattggctctctgcagtgcaccgtcgaggtagaaggctcakctcctagtcgctcccaaattactttgttggtgctcgaggcagccccatctcacgtctagtgctccggcctggggctgggtgtgggtgcccgcacgccgcg

SEQ ID NO: 229713 - DNA, 201 bp, Homo sapiens
ggggatgcgaccttgtcctgcctctctcccccacccttatggccaggcttggggtgcctggtgcaggtggaggagctaagggtagataacaagatggactktgtggccggcaatggggagggaggaggggctacgggctcacctccctcccgcagcccagccacacctgctctggaaagccctgtagctcctgggcggggt

SEQ ID NO: 229714 - DNA, 201 bp, Homo sapiens
attgcagtagttttgacactgagggtctggggagggtcaggctgtctgcagtgggctcctggggcctagaccacagccttctgcccctgcccatccctccrttccatcttgatggccagctggggtacccaaacctttgggactgggctcaatgggtgacccatgtatccccatctggggacccagtcagcccatcctcat

SEQ ID NO: 229715 - DNA, 201 bp, Homo sapiens
ccaggtgagagaaggtgagggggctcctctcccaccctacaacacgcacacctctgcacacacgcccaggcggagagcagggatttgggacgtggacctgygtgccctcgtgggtccctggtgccctctgggaggcacccccaactcaggacctccaggagaggagggtccctccctcggcagccaggacccccctcccca

SEQ ID NO: 229716 - DNA, 201 bp, Homo sapiens
tcagtataggatggaaggggcggggggtgtgcagggggcgtgggctgcgccgcgctgggccctaccgtcggaagtctgcgagcggggaaccagaatgtacyaggtcgagaagcactgggctgaaccacaagaagccaataggaggggggaatcgggacgtccagattcagcagtaggctgaactacttgaaggtcttcatg

SEQ ID NO: 229717 - DNA, 201 bp, Homo sapiens; identical to SEQ ID NO: 42221

SEQ ID NO: 229718 - DNA, 201 bp, Homo sapiens
ccagtgggttcaatagctcctccctccaagccccttaccttctctcctccagtgctgagccttaatgggggcagaaaggggtcataaagaaccctcttcasctccacatccacggggctctgccgcttccccacagcacacagactccacgctgcattcaccaggccccagaaaggaggccctgggggtggggtcggagta

SEQ ID NO: 229719 - DNA, 201 bp, Homo sapiens; identical to SEQ ID NO: 42213

SEQ ID NO: 229720 - DNA, 201 bp, Homo sapiens
gcctcaaactcttgggctcaaacgatcctcctgcctcagcctctcaagtagctgggaccacagtcacataccaccatgcccaactaattttcaattttcttttttttttttttttttttttggtagagagggttctccctatgttgcccaggctggtcttaaattcctgggctcaagtcatcatcctgccttagcctctga

SEQ ID NO: 229721 - DNA, 201 bp, Homo sapiens
ttacaggagtccttaaaagcagagaacctttcccagccatggtcagaaagagatgtgaggatagaagaggcaggaaaaatctgaaatgtgaaagggactcracctgtcgtggttggccgtgaagatggaaaaaggggtcatgaatcaggcaatgtgggtggcctctagaaactgggaatagaaaggaaacagattctctct

SEQ ID NO: 229722 - DNA, 201 bp, Homo sapiens; identical to SEQ ID NO: 42247

SEQ ID NO: 229723 - DNA, 201 bp, Homo sapiens; identical to SEQ ID NO: 42388

SEQ ID NO: 229724 - DNA, 201 bp, Homo sapiens
agaaacacacacacagactgagcatggtggctcacacctgtaatcccagaactctgggaggtcaaggtggatggatcacttgaggccaggagactgagacmagcccggccaacatggccaaatgccatctctactaaatacataaaaacttagccaggcatggtggctcacgcctgtaatcccagcacttagggtggtcga

SEQ ID NO: 229725 - DNA, 201 bp, Homo sapiens
agcctcaacctcctgggctcaagcaatcctcccacctcagcctcccaagtagctgggaccacaggtgcatgccaccatgcttgactaattttaaaaaaaattttttttttttgtaaagatagggtctcactttttttgctcaagctggtcttgaacttgggctcaagtgatcctcccatctcagcctcccaaagtgccagg

SEQ ID NO: 229726 - DNA, 201 bp, Homo sapiens; identical to SEQ ID NO: 42222

SEQ ID NO: 229727 - DNA, 201 bp, Homo sapiens
agggcggctccgtccctcctgcactccctaatcccgctctgaatcaccgcttctgttctgggtcggagaataaaggtggggtttccaagtgatggccctamgttattgtctgaagctcccttctcctccccagggtggaagtgataatgccgggaatccgggaatcccggggaggtgcaggaagacagcgagctcgaggca

SEQ ID NO: 229728 - DNA, 201 bp, Homo sapiens; identical to SEQ ID NO: 42224

SEQ ID NO: 229729 - DNA, 201 bp, Homo sapiens
caggaccttgtggaaaacagtagagagttttgtatttttatttaaataaactgcatatataggctggatgtggtggctcacgcctgtaatcccagcacttygggaagctgaggtgggcagatcaccagaggtcaggagtttgagaccagcctggccaacatggtgaaaccccatctctactaaaaatacaaaaaccagctg

SEQ ID NO: 229730 - DNA, 201 bp, Homo sapiens
ccaatcctgacaggcttgggacccactgccccaggcccgcccccagggggtgcgagggcacagcaaaggcgaccctcgactctggacccttaggtaccacrttggagggggccagatttggcaggagcaggacagggacatcggatttgaaagaagggagtcactccgaaagctgggaggtgcatcagctgcaggaggatg

SEQ ID NO: 229731 - DNA, 201 bp, Homo sapiens; identical to SEQ ID NO: 42226

SEQ ID NO: 229732 - DNA, 201 bp, Homo sapiens; identical to SEQ ID NO: 42357

SEQ ID NO: 229733 - DNA, 201 bp, Homo sapiens
aagctcaaaagcacctccccagtgccgctggtgtcctgcgagtcctcagtgctttcatcgtgacattttcatgcgaatgttgctgtctgttctattccatytccgaatgggttgactagaaaaataatgttttctgtcacttcccgctgagaaaagcaagggcctcatggagttggggcgcggcacctgctgccctgggtg

SEQ ID NO: 229734 - DNA, 201 bp, Homo sapiens; identical to SEQ ID NO: 42229

SEQ ID NO: 229735 - DNA, 201 bp, Homo sapiens
gcagcatcctgttaagggccagtcccccatgtcccctttctctctggatagttgctggatagttcagggggtggcaccctctggcccttagcaccttgagsaaccaggctgtgagttccctagtgttcctgggggatccagaaaccagtcgtggcccacagagagcccatacccctctttaagaaagagtccagccatgct

SEQ ID NO: 229736 - DNA, 201 bp, Homo sapiens; identical to SEQ ID NO: 42231

SEQ ID NO: 229737 - DNA, 201 bp, Homo sapiens
ctgccctctattctgggcctcagggcctggagaccagagtccccacattctccacccatccagagttccccagagcagatgggggaacagatgttgggggyggtgggtaatgaggaggagagaggcaggaaggcaggagctgggacagggtggggtgccagatgccagggcgcccgtgggggcagaagcccagaccctagg

SEQ ID NO: 229738 - DNA, 201 bp, Homo sapiens; identical to SEQ ID NO: 42235

SEQ ID NO: 229739 - DNA, 201 bp, Homo sapiens
aactcagggtgtggggaccggaagttagcgttctgggactttctgctcacctcaaccctgccctctattctgggcctcagggcctggagaccagagtcccyacattctccacccatccagagttccccagagcagatgggggaacagatgttgggggcggtgggtaatgaggaggagagaggcaggaaggcaggagctggg

SEQ ID NO: 229740 - DNA, 201 bp, Homo sapiens
gactcctgggtccccgccttggcggcacctggcacgaagtttccctggagattatccttgtagctccaccagtcctcggggtcaggtgctggtccgatgtkagctgggaagagagcagcctgaatccctctccttggcatccccacctccaccctccctcgggggctcctcccgggaaccccaggtcttacctgctgcccc

SEQ ID NO: 229741 - DNA, 201 bp, Homo sapiens
tgggtccacaggcatgcaccaccacaccaggctactttaaaattttttttttaaagacggggactcattatgtctcccaggctcatggacactctttgaaragacttggactgcagggtgttttgacactaagaggtttgagagccctggactggcaggtccctgagagcccggaagagttgtgggataatcagggagctc

SEQ ID NO: 229742 - DNA, 201 bp, Homo sapiens
ggggcttagggacagatgaagactcagtcacaaagaaatagaggacaggacagaggcagagagaggacagtcagcctaggggaggcgctcggcacagagargttgctgcaaagacagaggaacagacaggaggctgagaggctgagacagaggccaggcacccagaggccacagggagctgggagactgaggctcggactg

SEQ ID NO: 229743 - DNA, 201 bp, Homo sapiens; identical to SEQ ID NO: 42369

SEQ ID NO: 229744 - DNA, 201 bp, Homo sapiens
gacttggactgcagggtgttttgacactaagaggtttgagagccctggactggcaggtccctgagagcccggaagagttgtgggataatcagggagctcaracggctgcatgttcttggaaaaacaactccccctctcccagcctctgttttctccctgtccagagagaatccagatccctctctcccagggtttttgtgg

SEQ ID NO: 229745 - DNA, 201 bp, Homo sapiens
cttcctgagtagcttggactacaggcacctgccaccactccctgctaatttttgtatttttagtagagatggggtctcaccatgttggccaggctggtctygaactcctgaccataggttatcctcctgcctcagcctcccaaagtgctgggattacaggcgtgagtcactgcacccagcctcccttggccaagttcatat

SEQ ID NO: 229746 - DNA, 201 bp, Homo sapiens; identical to SEQ ID NO: 42215

SEQ ID NO: 229747 - DNA, 201 bp, Homo sapiens; identical to SEQ ID NO: 42218

SEQ ID NO: 229748 - DNA, 201 bp, Homo sapiens
actccccctctcccagcctctgttttctccctgtccagagagaatccagatccctctctcccagggtttttgtgggcattcaaagtggcaaagctattcaratgatcagtgagttgagtcaggttttggattctttctgacccaagggtaatcgttttgcctcacttcccctgtggagaactcagatgagggagaggagat

SEQ ID NO: 229749 - DNA, 201 bp, Homo sapiens
tgcagggatcagagccattgcctttcccacatggggccctaaccttgttctccacaccctgggcacggaaggggattatcaccaaacaacccagcctccckgccacccgcccacccacccccagcgccccacccttaaccctttcccacccgagtgcaaagcccagagagctgagctgaggaaagggatgctgggagctgg

SEQ ID NO: 229750 - DNA, 201 bp, Homo sapiens; identical to SEQ ID NO: 42209

SEQ ID NO: 229751 - DNA, 201 bp, Homo sapiens; identical to SEQ ID NO: 42214

SEQ ID NO: 229752 - DNA, 201 bp, Homo sapiens; identical to SEQ ID NO: 42217

SEQ ID NO: 229753 - DNA, 201 bp, Homo sapiens; identical to SEQ ID NO: 42223

SEQ ID NO: 229754 - DNA, 201 bp, Homo sapiens; identical to SEQ ID NO: 42225

SEQ ID NO: 229755 - DNA, 201 bp, Homo sapiens; identical to SEQ ID NO: 42228

SEQ ID NO: 229756 - DNA, 201 bp, Homo sapiens
cactttgggaagccgagcctggcggatcacgaattcaggagatcgagaccatcctggctaacaaggtgaaaccccgtctctactaaaaaaaagaaaaaatmcaaaaaaattagccgggcgtggtggcgggcgggctcctgtagtcccagctactcgggaggctgaggcaggagaatggcgtgaacccgggaggcagagctt

SEQ ID NO: 229757 - DNA, 201 bp, Homo sapiens; identical to SEQ ID NO: 42230

SEQ ID NO: 229758 - DNA, 201 bp, Homo sapiens
ggggtctcaccatgttggccaggctggtcttgaactcctgaccataggttatcctcctgcctcagcctcccaaagtgctgggattacaggcgtgagtcacygcacccagcctcccttggccaagttcatatattaaagtcctagccccaagtaggacctcagtccgtcacccaggctggagtgcagtggcacaatctcggt

SEQ ID NO: 229759 - DNA, 201 bp, Homo sapiens
ttaattgaatggattgtacaaacagagcgaaaagagaaccccatggcttagcaggaaagcagcttagagatgaaaggtttcagtgtccttggcacagggcyagtagtcctggagatgatttcatggacactgtcccaggaagtaaaattctggaaatactttcattcattcaacaatatggtcatgggtcacttaacaata

SEQ ID NO: 229760 - DNA, 201 bp, Homo sapiens; identical to SEQ ID NO: 42234

SEQ ID NO: 229761 - DNA, 201 bp, Homo sapiens; identical to SEQ ID NO: 42233

SEQ ID NO: 229762 - DNA, 201 bp, Homo sapiens
caccatgttggccaggctggtcttgaactcctgaccataggttatcctcctgcctcagcctcccaaagtgctgggattacaggcgtgagtcactgcacccrgcctcccttggccaagttcatatattaaagtcctagccccaagtaggacctcagtccgtcacccaggctggagtgcagtggcacaatctcggttcactgc

SEQ ID NO: 229763 - DNA, 201 bp, Homo sapiens; identical to SEQ ID NO: 42236

SEQ ID NO: 229764 - DNA, 201 bp, Homo sapiens
tttcatgttgtatgaacatcatagagtatatttacacaaacccagatggggtgtgtgtgtgtatatatatattaaattcattttttttaatatggaaaacsaaatctccgagcaccattattgaatatcagtcatctcctgtacttcatctgcaatgccaatacaaagtgccagagatgaggtttctatatatgctctatt

SEQ ID NO: 229765 - DNA, 201 bp, Homo sapiens; identical to SEQ ID NO: 42238

SEQ ID NO: 229766 - DNA, 201 bp, Homo sapiens; identical to SEQ ID NO: 42240

SEQ ID NO: 229767 - DNA, 201 bp, Homo sapiens; identical to SEQ ID NO: 42241

SEQ ID NO: 229768 - DNA, 201 bp, Homo sapiens
ttgcatcctgctcacagtgccagaactgcggggaagttaaaatgtttcccctggaggttaaaacatttgagtctatataaatcaaactaataatagccagrtagcaggagaaaggaatacacattttatcatgtgcacacaggactcacagaaaatacgcaaactcagagaaagggccagatagctgaagttgttttttga

SEQ ID NO: 229769 - DNA, 201 bp, Homo sapiens
tttgcattttttgtaggcacagggttttactatgttgcccaggctgctctcgaacttcagccctcacatgattcacctgcctcggcctcccaaagtgctgkgattataggcgtgagccacctcaccccgcccgtccagaaagagtaaatttctttcttttttctttttcttttttttttttttttttttgagacaagtctc

SEQ ID NO: 229770 - DNA, 201 bp, Homo sapiens; identical to SEQ ID NO: 42251

SEQ ID NO: 229771 - DNA, 201 bp, Homo sapiens; identical to SEQ ID NO: 42254

SEQ ID NO: 229772 - DNA, 201 bp, Homo sapiens; identical to SEQ ID NO: 42256

SEQ ID NO: 229773 - DNA, 201 bp, Homo sapiens; identical to SEQ ID NO: 42257

SEQ ID NO: 229774 - DNA, 201 bp, Homo sapiens
cctcccaaagtgctgggattacaggcgtgagtcactgcacccagcctcccttggccaagttcatatattaaagtcctagccccaagtaggacctcagtccrtcacccaggctggagtgcagtggcacaatctcggttcactgcaacctccgcctcccaggttcaagtgattctcctgcctcagcctcctgagtagctgaga

SEQ ID NO: 229775 - DNA, 201 bp, Homo sapiens
agtgccgcccagctgtgtggtggcggcaccgctcacaaacacccccactccggccgcccgacagtctgaacagctcagagttgaaccggcagcgtcgggcrtgctggttgcaggagcaggctaggagcaaaatggggtgggggcgcatcagggccgagtgtgctgctccccagtcctcagctttcttcccatggccctgcc

SEQ ID NO: 229776 - DNA, 201 bp, Homo sapiens
ggacctcagtccgtcacccaggctggagtgcagtggcacaatctcggttcactgcaacctccgcctcccaggttcaagtgattctcctgcctcagcctccygagtagctgagataacaggagcacaccaccatgcctggctaattttttgtatgttcagtagagatggggtttcaccatgttgtccaggctggtctggaac

SEQ ID NO: 229777 - DNA, 201 bp, Homo sapiens
ggcagaggttgcagtgagccgagattgtgccattgtactccagcctgggcaacaagagggaaactctgtcttggaataaataaataaataaaaataaatamaataataataaataaaattttggcagagatggctcttgctgtgttgtccagggtgctcttgaactcctggcctcaagcgatccttcagcctcagcctccc

SEQ ID NO: 229778 - DNA, 201 bp, Homo sapiens
ctgcaagctccgcccccggggttcacgccattctcctgcctcagcctcccaagtagctgggactacaggcacccaccaccacgcccggctaattttttttwtatatatatttttagtagagacggggtttcactgtattagccaggatggtctcaatctcctgacctcgtgatccgcccgactcagcctcccaaagtgctg

SEQ ID NO: 229779 - DNA, 201 bp, Homo sapiens
ggagtgcaatggtgtaatctcagtttactgcaacctccgcctcccaagttcaagcgattctcctgcctcagcctcccaagtagctgggattacaggtgcaygccaccacgccccactgatttttgcatttttagtagagacagggtttcaccatgttggccagactggtctcaaactcctgacctcaggtgatccacctgc

SEQ ID NO: 229780 - DNA, 201 bp, Homo sapiens; identical to SEQ ID NO: 42227

SEQ ID NO: 229781 - DNA, 201 bp, Homo sapiens
caatagaaagacgtggacggggctggacgtggtggctgacgcctgtaatcccagcactttgggaggccgagacaggcggatcacttgaggtcaggagttcragaccagtctggccaacatggagaaaccccgtctctactaaaaatacaaaattagccaggcgtggtggtgcatgcctgtaatcccagctactcgggaggc

SEQ ID NO: 229782 - DNA, 201 bp, Homo sapiens
cgtgtcccgttttcctcccctgacagccatgctggtcgttcagatgcctttctcctttcccatggcccacttcatcctctttgtctttacggtttccactrtatttcacgttcagcagcggctagcgaagattcaagccatgtgggagttaccggtgcagataccagtgctagcctcaacatcaaaggcactgggacccag

SEQ ID NO: 229783 - DNA, 201 bp, Homo sapiens; identical to SEQ ID NO: 42232

SEQ ID NO: 229784 - DNA, 201 bp, Homo sapiens
ttgttttgtttgtttgtttgttttagacagagtcttgctcttttgcccaggctggagtgcagtggtgcgatctcggaacactgaaacctccaccccacccygcctctgcctcccaggttcaagcaattcttctgcctcagcctcccaggtagctgagattacaggtgctcaccaccacacagccagctaatttttgtattt

SEQ ID NO: 229785 - DNA, 201 bp, Homo sapiens; identical to SEQ ID NO: 42237

SEQ ID NO: 229786 - DNA, 201 bp, Homo sapiens
aattttttgtatttagtagaaatggggtttcaccatattagtcaggctggtctcgaactcctgacctcaggtgatccacccgcctcagcctaccaaagtgytgggattacaggcatgagccactgcactggctcttttttttttttttttttttttttgagacggagtctcactgtgttgtgcaggctggagtgcaatggt

SEQ ID NO: 229787 - DNA, 201 bp, Homo sapiens
agcgatagaggtctcactatgctggctgggctggtcttgaactcctggcctcaagcagtcctcccaccttggcctcccaaagtgctgggattacaggcgakagccaccctgagtggttgtgttacattcagagtggaccctgcctctcccacggctcccctgcacctctggacagagtccccctcctcagcctttcttgtc

SEQ ID NO: 229788 - DNA, 201 bp, Homo sapiens
cacacaattttgcacacacctgtatatgtatacaatgtatggatccccatatccacattacacacaatgtgtacgcatctacctgtgtacacacacccacstatgaacacaatgtagacacatctgtataaacacacttgagatacatgcctgtgcacataggcaagtatgtgccaagtatttacacacctgaagtagaag

SEQ ID NO: 229789 - DNA, 201 bp, Homo sapiens
tgaacacaatgtagacacatctgtataaacacacttgagatacatgcctgtgcacataggcaagtatgtgccaagtatttacacacctgaagtagaagcasacacacacccacactatgcctgcacaccaccgcatggccacgttcaccagcgccccgggcctccatctcccagctaacgtgtcccgttttcctcccctga

SEQ ID NO: 229790 - DNA, 201 bp, Homo sapiens
agatacatgcctgtgcacataggcaagtatgtgccaagtatttacacacctgaagtagaagcacacacacacccacactatgcctgcacaccaccgcatgsccacgttcaccagcgccccgggcctccatctcccagctaacgtgtcccgttttcctcccctgacagccatgctggtcgttcagatgcctttctcctttcc

SEQ ID NO: 229791 - DNA, 201 bp, Homo sapiens
tatgtgccaagtatttacacacctgaagtagaagcacacacacacccacactatgcctgcacaccaccgcatggccacgttcaccagcgccccgggcctcyatctcccagctaacgtgtcccgttttcctcccctgacagccatgctggtcgttcagatgcctttctcctttcccatggcccacttcatcctctttgtctt

SEQ ID NO: 229792 - DNA, 201 bp, Homo sapiens; identical to SEQ ID NO: 42322

SEQ ID NO: 229793 - DNA, 201 bp, Homo sapiens; identical to SEQ ID NO: 42324

SEQ ID NO: 229794 - DNA, 201 bp, Homo sapiens
ctctaggttgttggaaggtgccaagtgccttggagcaaagcaagtggggggggcggccacgggggcccggggattgcagatgtaagtggggtgatgcggaggggcatttgtgctgagcccaccgccagcacagaacccagctttgctgccacacaaaactgaggaagaaggcttaggtctcgctgcgtcttcctccccacc

SEQ ID NO: 229795 - DNA, 201 bp, Homo sapiens
caggatggtctggatctccggacctcgtgatccgcccgcctcagcctcccaaagtgctgggattacaggcatgagccaccgcgcccggctttttgtttttkttttttttttttttaaatagaatctcactctgctgccgaggctggagtgcagtggtgagatctcgcctcactgcaacctctgactcctgggttcaagcga

SEQ ID NO: 229796 - DNA, 201 bp, Homo sapiens
aaataaaaataaataaactgcatatatataacacatttgccagaatgccaaacatatagtaagtgctatgtaaatgtttgctgttattacatatcctaataggaggattttgagcaggagtgatatgatcttatttgtgttttaaacatctctctagctgtggggtgaatagattgcaggaagttgagaggcaggccagtg

SEQ ID NO: 229797 - DNA, 201 bp, Homo sapiens
aataaaaataaataaactgcatatatataacacatttgccagaatgccaaacatatagtaagtgctatgtaaatgtttgctgttattacatatcctaataggaggattttgagcaggagtgatatgatcttatttgtgttttaaacatctctctagctgtggggtgaatagattgcaggaagttgagaggcaggccagtga

SEQ ID NO: 229798 - DNA, 201 bp, Homo sapiens
ataaaaataaataaactgcatatatataacacatttgccagaatgccaaacatatagtaagtgctatgtaaatgtttgctgttattacatatcctaataggaggattttgagcaggagtgatatgatcttatttgtgttttaaacatctctctagctgtggggtgaatagattgcaggaagttgagaggcaggccagtgag

SEQ ID NO: 229799 - DNA, 201 bp, Homo sapiens
caccccgtctaatggtagtgaaactgctcattgtcttcttttattttcttttttgagacaagccttgcaatgtcacccaggctggagagcagtggtgcgaycatggcttgatccagcctcgacctcctgggcttaaacactccttccacctcagcctcccaaatagttgggactacaggcacatgccaccatgccaggcta

SEQ ID NO: 229800 - DNA, 201 bp, Homo sapiens
cttcctctcccggcaaacacacacataatctccacccccacactttccttccactcactcccactcactacttgaaatgcgcatgtataatgtcccatggkgagcccctggggttcagaagctggcccgactcctgagggacagaggagggggctgggactcctggtcctgggggggaggagggagctgggaacccaggtt

SEQ ID NO: 229801 - DNA, 201 bp, Homo sapiens
tgagacaggagaatcgcttgaaccgggtaggtggaggctacagtgagccgagatcccaacagtgcactccagcctgggcaacagagtgagactccatctcaaaaaaaaaaaaaaaaagaaagaaagaaagaaacacacacacagagctagagacagagacctgggaacaggcacacacacatctataaatagagacactcg

SEQ ID NO: 229802 - DNA, 201 bp, Homo sapiens
ttatgaaaaagaaaaaaacaggccgggcacagtggctcacacctgtaatcctagcactttgggaagctgaagcgggcggatcacgaggtcaggagattgaraccacggtgaaaccccatctctactaaaaatacaaaaaattagccgggcgcggtggcgggcgcctgtagtcccagctcctcgggaggctgaggcaggaga

SEQ ID NO: 229803 - DNA, 201 bp, Homo sapiens; identical to SEQ ID NO: 42220

SEQ ID NO: 229804 - DNA, 201 bp, Homo sapiens
aaaaccaacctttgccaacttgcatggaacatgtatatgaacaagaaagaaactttgtgttttctttttctttttcttttctttctttcttcttcttcttyttttttttttttttttttgagacaaggtcttgctctgtcaaccagtttggagtattgtggcccaatcatagttccctgcagtctggacctcctggactca

SEQ ID NO: 229805 - DNA, 201 bp, Homo sapiens
gaggcaggcggatcatgaggtcaggagttcaagaccaacctggctgacagggcaaaaccctgtctctacgaaaaatacaaaaattagctgggtgtggtggygggtgcctatattcccagctactcaggaggctgaggcaggagaattgcttgaacctgggaggtgcaggttgcagtgagcctagatcgagccactgcactc

SEQ ID NO: 229806 - DNA, 201 bp, Homo sapiens; identical to SEQ ID NO: 42391

SEQ ID NO: 229807 - DNA, 201 bp, Homo sapiens
aggatgggaaataaataataacgatatcctcctccttctggctgcaaatcgtttttatgggaacctgcagggtgacccggcaccttgctaactgggcttaragtctaagggcttgggggctgcatctgatacaggttggagtttggggtgggagagtcctaggaagggggccccaagtagaaatgagagaaatcaggaagg

SEQ ID NO: 229808 - DNA, 201 bp, Homo sapiens
tgctgggattacagctgtgagctactggacctggcctatttatttatttatttatttatttatttttgagacagcatcttgcaatgttgcccaggctgtagtgcagtggtgtgtacatagctcatggcagccttgacttcctgggctcaaacgatcctcccacctcagccacctgagtagctgggactacaagggcaccac

SEQ ID NO: 229809 - DNA, 201 bp, Homo sapiens
ttgcagtcagaagcatagctaccaaaaattatgaaatttagctggttttgtggcccgcacctgtaatcccagttactcaggaggctgaggcacgagaatcrcttgaacccaggaggtggaggttgcagtgagctgagatcacaccactgtcctccagcctgggcgacagagagagaccctgtctccaacaaacaaacaaat

SEQ ID NO: 229810 - DNA, 201 bp, Homo sapiens
ctcgggaggctgagataggagaatggcttgaactcggtaggctgaggttgcagtgagccgagatcacaccactgcactccagcctcagtgacacttacaaraaaaagagacagaaaaatcagttccagttgacccactttgagggacttattcatttccatccacatgttaaatgtgctaagagccttggagaggtgtgac

SEQ ID NO: 229811 - DNA, 201 bp, Homo sapiens
agtcttgctctgtcacccaggctggagtgcagtggcgcgatctcggctcactgcaagctccgcctcctgggttcacgccattctcccacctcagcctcccragtagctgggactacaggcacccgccaccgcgcacagctatttttttgtatttttagtagagatggggtttcaccgtgttagccaggatggtctcgatct

SEQ ID NO: 229812 - DNA, 201 bp, Homo sapiens
atacatggttgaactatagagtgtgtgacactctagagctacttggtatcaggtcgtctagagtccagaaaccaagtagcctcaaaaggtaattattggaygggtgcagtagctcatgcctgtaatcccagcttgaggcaaggagttcgagaccagcctgagcagcatagaaagaccctgtctctacaaaaaagttaaaaa

SEQ ID NO: 229813 - DNA, 201 bp, Homo sapiens
cagcccaacttgaccaactttctaagagaaacaagaaatgtggtggtttatgtgaaatctgtcttgtgaaatgttggcaatgaatgaaaaaagataggccrgacatggtggcttacgcctgtaatccgagcactttgggtggccgaggcaggcagaccgctatagctcaggagtttgagacctgcctgaacaacatagtga

SEQ ID NO: 229814 - DNA, 201 bp, Homo sapiens
ggtttacagacatcacattgattagtgattggctatacatggttgaactatagagtgtgtgacactctagagctacttggtatcaggtcgtctagagtccrgaaaccaagtagcctcaaaaggtaattattggatgggtgcagtagctcatgcctgtaatcccagcttgaggcaaggagttcgagaccagcctgagcagca

SEQ ID NO: 229815 - DNA, 201 bp, Homo sapiens
agaaacaagaaatgtggtggtttatgtgaaatctgtcttgtgaaatgttggcaatgaatgaaaaaagataggccggacatggtggcttacgcctgtaatcygagcactttgggtggccgaggcaggcagaccgctatagctcaggagtttgagacctgcctgaacaacatagtgagacccccaactctacaaaaaatacaa

SEQ ID NO: 229816 - DNA, 201 bp, Homo sapiens
tgcagtggtgtgtacatagctcatggcagccttgacttcctgggctcaaacgatcctcccacctcagccacctgagtagctgggactacaagggcaccacyacgcctaattttttaaactttttgtagagatggggggtttcgctgtattgccccagctgtcttgaactcctgacctcaagtgaacctcccacaaggacct

SEQ ID NO: 229817 - DNA, 201 bp, Homo sapiens
ctccttgaaggctgccttcagaggcaccaggcttggtttcttgggagaaacttggcatagaaatctgtcacaggaaggccaggtgcagtggctcacacctrtaatcccagcactttgggaggccgggatgggtggatcacttgggccaggagttcgagaccagcctggccaacatggcaaaaccccatctctgctaaaaat

SEQ ID NO: 229818 - DNA, 201 bp, Homo sapiens
gccaagatcacaccattgcactccaacctgggcaataagagcgaaactccatctcaaaaaaaaagaaagaaagaaaagaaaaaacagaaatctgctgggtrcggtggctcatgcctgtaatcccagcactttgggaggccaaggcaggcagatcatgaagtcagaagatcgagaccatcctggctaacatggtgaaacccc

SEQ ID NO: 229819 - DNA, 201 bp, Homo sapiens
tcccaaagtgctgggattacaggcgtgagccaccgtgcccagcccaacttgaccaactttctaagagaaacaagaaatgtggtggtttatgtgaaatctgycttgtgaaatgttggcaatgaatgaaaaaagataggccggacatggtggcttacgcctgtaatccgagcactttgggtggccgaggcaggcagaccgcta

SEQ ID NO: 229820 - DNA, 201 bp, Homo sapiens
aaaaaaaagaaagaaagaaaagaaaaaacagaaatctgctgggtgcggtggctcatgcctgtaatcccagcactttgggaggccaaggcaggcagatcatraagtcagaagatcgagaccatcctggctaacatggtgaaaccccgtctctactaaaaaatacaaaaaaaattagctgggtgcggtggcatgcgcctgtag

SEQ ID NO: 229821 - DNA, 201 bp, Homo sapiens
cggtggctcatgcctgtaatcccagcactttgggaggccaaggcaggcagatcatgaagtcagaagatcgagaccatcctggctaacatggtgaaaccccrtctctactaaaaaatacaaaaaaaattagctgggtgcggtggcatgcgcctgtagtcccagctactcgggaggctgagtcaggagaatcccttgaaccca

SEQ ID NO: 229822 - DNA, 201 bp, Homo sapiens
gccgtctctgggctgccggctaataaaggactcctgatcttgtctcagagtgtggcgtttctctataactcgctcggttacaacaaagcaatcctcccgcytcagcctcccaagtacctgaggcgcaccaccatgctcaggtaatttccgtattttttgtagagacgagggtttcactatgttgcccaggctagtctcgaa

SEQ ID NO: 229823 - DNA, 201 bp, Homo sapiens
gaggaggggatgggggcctggactcctgggtctgagggaggaggggctgggagcctggactcctgggtctgagggaggaggggctgaggtctggactcctkggtctgagaaagtagggcctgggggcctggactcctgggtctgagggaggaggtgccagagcctggactcctgggtctgagggaagaggggctgggagcc

SEQ ID NO: 229824 - DNA, 201 bp, Homo sapiens
gcctggtgacagagcgagactccatctttaaaaaaaaaaaaagaaaagaaaagaaaaaacagaaatctgtcacaggcagttatgcctgggtgctgcatctrggagttaggtgtgagactttctagggccaagatcttgctaggtctggctcctaagttgtctggactcaaagccaaggcccatgggaaggagtagggaggg

SEQ ID NO: 229825 - DNA, 201 bp, Homo sapiens
ggctggagtgcattggcacgatcttggctcactgcaacttcagcctcctgcgttcaagcaactctcctacctcagcctcccaagtagctgggattacaggygactgccaccacgcccggctaatttttgtactttttagtagagacagggattcactaggttagccaggctggtctcaaactcctgagctcaagtgatcca

SEQ ID NO: 229826 - DNA, 201 bp, Homo sapiens; identical to SEQ ID NO: 42392

SEQ ID NO: 229827 - DNA, 201 bp, Homo sapiens
aggtgtgagccaccgtgaccaacccttctccttccttttttttttctttttttttttttgagacggagtctcgctctattgcccaggctggagtgcagtgrtgcaatctcggctcactgcaacctccgcctcccgggttcacgccattctcctgcctcagcctcccaagtagctgggactacaggagcccgccaccgcgcc

SEQ ID NO: 229828 - DNA, 201 bp, Homo sapiens
tgatgcaatctcggctcactgcaacctccgcctcccgggttcacgccattctcctgcctcagcctcccaagtagctgggactacaggagcccgccaccgcrcccagctaattttttgtatttttagtagagacggggtttcaccgcgttagccaagatggtctcgatctcctgacctcgtgatccgccggcctcggcctcc

SEQ ID NO: 229829 - DNA, 201 bp, Homo sapiens
gaaagaaaagaaaagaacaatggggagtttcagtacacatgaattatctgtactattctaggaatattttgtaagtcttaaattatgtcaaaataaaaatwaaaagcattctaatacactggtggtatggtacgcatgaagttcctactgataaaattgtatgatctgggctgggtgcggtggctcacgcctcccagcact

SEQ ID NO: 229830 - DNA, 201 bp, Homo sapiens
tcactgcatgccagcctggcgacagagcaagactctaaagaaagacaaaaaaaaaaagaaagaaagaaagaaaagaaaagaacaatggggagtttcagtayacatgaattatctgtactattctaggaatattttgtaagtcttaaattatgtcaaaataaaaataaaaagcattctaatacactggtggtatggtacgca

SEQ ID NO: 229831 - DNA, 201 bp, Homo sapiens
aaaaattagcccggtgtagtggtgcgtgcctgtaatcccagctactcgggaggctgaggcaggagaatagcttgaacccgggaggcagagattgcagtgarctgagatcgtgtcactgcatgccagcctggcgacagagcaagactctaaagaaagacaaaaaaaaaaagaaagaaagaaagaaaagaaaagaacaatggg

SEQ ID NO: 229832 - DNA, 201 bp, Homo sapiens
ctctacgaaaaatacaaaaattagctgggtgtggtggcgggtgcctatattcccagctactcaggaggctgaggcaggagaattgcttgaacctgggaggygcaggttgcagtgagcctagatcgagccactgcactccagcctgggcgacagagtgagaccccatctcagaaaaaaaaaaaaaaaaaaagccgggtgcag

SEQ ID NO: 229833 - DNA, 201 bp, Homo sapiens
tctactaaaactacaaaaattagccagacacggtggctcatgcttgtaatcccagcactttgggaggctgaggcgggcggatcatctgaggttgggagttygagaccagcctgaccaacatggagaaacaccgtctctactaaaaatacaaaattagccaggtgtggtggcacatgcctgaaatctcagctactcgggagg

SEQ ID NO: 229834 - DNA, 201 bp, Homo sapiens
aatttttgaaacttattgtaaagtataagtgtttacataagataaggagaaggctctcatcttgcatttttgaaccatagaatcagttccacgttgtactsgtgagagtagtgaaagggaaggagagaagagccaactcatagggctctttcaatggagttttaaaagaaggatattaacctaaatatgcaacagtagagg

SEQ ID NO: 229835 - DNA, 201 bp, Homo sapiens; identical to SEQ ID NO: 42401

SEQ ID NO: 229836 - DNA, 201 bp, Homo sapiens
atctttattatcaggtcacaaaagatgtcataaaagaatttgcagatgacggcgtcaagtacctggaactaaggagcacacccagaagagaaaatgctacyggtagaatttatacttctcagcaaatgtactgtccttttcctatgtgctttgatcactcacatgtttgtgagtgggaatatgaagcactaacttttatac

SEQ ID NO: 229837 - DNA, 201 bp, Homo sapiens
gtgggatcttggcccactgcaacctccgcctccaaggttcaagtgattctcctgcctcagcctcccgagtagcagggattataggcacatgccaccacacytggctcattttcatatttttagtagagacaggatttcaccatgttggccagggtggtctcgaactcctgacctcaggtgatcggcccgcctcggcctccg

SEQ ID NO: 229838 - DNA, 201 bp, Homo sapiens
gctgaggcaggagaatcacttgaacccaggagatagaggctgcagtgagctgagaccatgccagtgtactccagcctgggtgacagagggagactgtctcaaaaaaattatatatatatatatatatatatatatatatatatatatatatatatattttatccaaagtaggccttataaaattttgaatttttgaagtcg

SEQ ID NO: 229839 - DNA, 201 bp, Homo sapiens
ccactgcaacctccgcctccaaggttcaagtgattctcctgcctcagcctcccgagtagcagggattataggcacatgccaccacacttggctcattttcwtatttttagtagagacaggatttcaccatgttggccagggtggtctcgaactcctgacctcaggtgatcggcccgcctcggcctccgaaactgatgggat

SEQ ID NO: 229840 - DNA, 201 bp, Homo sapiens
caggagaatcacttgaacccaggagatagaggctgcagtgagctgagaccatgccagtgtactccagcctgggtgacagagggagactgtctcaaaaaaattatatatatatatatatatatatatatatatatatatatatatatatattttatccaaagtaggccttataaaattttgaatttttgaagtcgttgtata

SEQ ID NO: 229841 - DNA, 201 bp, Homo sapiens
gggattacaggcatgagccaccacaccctatttttatttttatttataattttatatattttaccagagactttccaccaaacataagcattttataatcygggtaaaagggtattttattttacccaatgtagcctaaagaaaaagaaaaaaaggtattttacaggaggttgctctggagagtgctcttgcagatcccct

SEQ ID NO: 229842 - DNA, 201 bp, Homo sapiens
ggagaatcacttgaacccaggagatagaggctgcagtgagctgagaccatgccagtgtactccagcctgggtgacagagggagactgtctcaaaaaaattatatatatatatatatatatatatatatatatatatatatatatatattttatccaaagtaggccttataaaattttgaatttttgaagtcgttgtataga

SEQ ID NO: 229843 - DNA, 201 bp, Homo sapiens
tatgtgtcctttctaggaatgactaaaaagacttatgtggaatctatacttgaaggtataaaacagtccaaacaagaaaacttggacattgatgttaggtragaagattgtaccttagtagttaacatttacaaaaccagaatgtgaatttttactgttttgatcatgggtgtaatggattttttaaaattaatcattcat

SEQ ID NO: 229844 - DNA, 201 bp, Homo sapiens
ctaatcgttttcccaccttagacacacttaagttagttttagaggagcttttgccttttaaagaaaaaattaacaaaatcctgtttctttgcttttacatstgaaaatattaacatttgttaaaataggtgaagctgaacccagatctacacatacagctaatcttaccaaaatgtgtggaagtaaagcaatctgaaggaa

SEQ ID NO: 229845 - DNA, 201 bp, Homo sapiens
tgggaagttgctaagtgaaaaaaaaagatacagcattttatatgtagttgatctaaattttgtaaataaataaatgaacaaatgctaaaggaatttatttygtcaataaatagtaaactcataactgctttaaaaaattataggggttctctgggtattcaagaaatattaacaggccaagcacagtggctcatgcctgta

SEQ ID NO: 229846 - DNA, 201 bp, Homo sapiens
aaatacaaaaaaaaaaaaaattagccgggcatggtggcgggtgcctgtagtcccagctactcgggaggctgaggtaggagaatgatgtgaacccgggaggyggagcttgcggagagccgagatcgcgccaccgcactccagcctgggcaacagagcgagactccgtctcaaaaaaaaaaaaaaaaaaaaagagaagtatta

SEQ ID NO: 229847 - DNA, 201 bp, Homo sapiens
agccaggtgtggtggcaggcacctgtaatctcagctactcagaaggctgaggcagaattgcttgaacccgggaggtggaggttgcagtgagctgagatcgygccatttcactccagcctgggtgacaagaatgaaattctgtctcaaaaaaaaaaaaaaaagaaatattaacagagattctctgggtattcaagtcttata

SEQ ID NO: 229848 - DNA, 201 bp, Homo sapiens
gactatacatagatatactaaagacaatacttttttttttttttgacattacagcacacttcctaaatcatctgagatcctgaggcactgcttcagactgktgtttcttgtagcttcctgtctgcttaggcaacataacagaagtaccatcttcccttaattcctaataaatattagatttttttgtactaagattcaaca

SEQ ID NO: 229849 - DNA, 201 bp, Homo sapiens
tttggatcctgaatcaaacaaactgaagaaacaaatacaggaacaaaaaaacctcgaaagacaactgtaaatctgaacagtgactggatgcttgatgctawttaggaattcatgtctcagtccgtatgacaaagtaaaatgtcatgttgtctagattcagtcaggctatacttttcctagtgagatgtattacacgtagtc

SEQ ID NO: 229850 - DNA, 201 bp, Homo sapiens
agtccgtatgacaaagtaaaatgtcatgttgtctagattcagtcaggctatacttttcctagtgagatgtattacacgtagtctgccatctctgtctggcygtactcagaattgtctttttcatctgtgtcatattagttttcaactctgtctttcttacattaaaggtatttgatagcagttgacagaagaggtggccct

SEQ ID NO: 229851 - DNA, 201 bp, Homo sapiens
gactaggaataaaccgggattggaaaaacattttttaaaaagggaaagtagaaatatttttacatctaaatttaaaaatacatgacttgcttcagtctctrctgttactgtttttatccttttgtggttcctgggagtggctgttgactcaaatgccagctgtgtcattaaaagcagtttaatgacgtcttgctagagaaa

SEQ ID NO: 229852 - DNA, 201 bp, Homo sapiens
gagaatcacttgaacccaggaggaggaggttgcagtgagcagagatcatgccattgcactccatcttgggcaacaagagtgaaactccatctcacaaagcaaaaaaaaaaagggactgggacatgagaggctacagagggccagggtgactctggtttggctctctagcaaaaggtacttgagaggacttaaaaacaaaca

SEQ ID NO: 229853 - DNA, 201 bp, Homo sapiens
ccactggcagtaaaggaagcagctcgtcatttttcaaagcccagcaaagaggtccagtgcccctcatcagccccaagctcactgttagcatgaacgtagtracagataattgctgggaagtagtcactttcttaagcacatccttatgaggcaaaccccttttgagggactttgctgcaattttccccattttataaatgg

SEQ ID NO: 229854 - DNA, 201 bp, Homo sapiens; identical to SEQ ID NO: 42407

SEQ ID NO: 229855 - DNA, 201 bp, Homo sapiens; identical to SEQ ID NO: 42410

SEQ ID NO: 229856 - DNA, 201 bp, Homo sapiens
taggcaaaatttgtaaactttattatgtagctaaatctagtaagcagtttgcctattgcaaactaccaacattaagtacttggtaagatgctatgaatctrttggatatttgataagttttactggttgtatctcttaggaacttcatgcccacttgaatggatccattagttctcataccatgaagaaattaatagccca

SEQ ID NO: 229857 - DNA, 201 bp, Homo sapiens
ttttagttttgcaccatttctctattttatcaatctgctattataaatactaggaaataaatgtttaaaagggggaaaagaagcaaagggtgtagctgatrtgcagattgggattgaatgtgggaatgaggggtgatgggagtgattggaaatattgcagccctgcatagtctccatcagggatgtgacaaagtggataat

SEQ ID NO: 229858 - DNA, 201 bp, Homo sapiens; identical to SEQ ID NO: 42412

SEQ ID NO: 229859 - DNA, 201 bp, Homo sapiens; identical to SEQ ID NO: 42402

SEQ ID NO: 229860 - DNA, 201 bp, Homo sapiens; identical to SEQ ID NO: 42403

SEQ ID NO: 229861 - DNA, 201 bp, Homo sapiens; identical to SEQ ID NO: 42405

SEQ ID NO: 229862 - DNA, 201 bp, Homo sapiens
tttattcataaggcaataaaattctgagtatttttacatgagtaaagtatggtgttcctttgccattaagctaaaatgaacttcttactgtggcctacaakgtcccacatgatctggctgcctctgttacttcagcagctcatctagaccactcctcctcccttacacgtgggcctgctgtctgttcctaaaataagcaaa

SEQ ID NO: 229863 - DNA, 201 bp, Homo sapiens
atttataaaaaagtttttccctctgacacagtaattctgtgctagaaatgcatcccaggaaatagattgatttatgcataagattccttattataatgttwtttataacaaaaattagaaaatagcttaaaatatccagcattcagaggataattacattatggtatgctcatatgatttatactattttctaacattatt

SEQ ID NO: 229864 - DNA, 201 bp, Homo sapiens
cttgtgcgtcacttccgggaagagcgcatctcgccaaccagaattgaggagggtgtagccagtgctaagttcgcttgcggctgacctttctttggaatgtygtgagttccatttgtcccagaatacggtccgctaccgctgtgacatgagtgttagggaaggcgggttgtcacgtttctacaagccttccagtcaaaaggg

SEQ ID NO: 229865 - DNA, 201 bp, Homo sapiens
tgttgttctgtatttcattgaacctttagtcaacagtccaagtcctctctctgatgtacattaatgatgttcattttgtttgttttagagacagggtcttkctgtcttgcccaggctggagtgcagtggtgcaaacatagctcactgtaaccacaaactcctgggcccaacaatcacctcagcctctaaaagtgctgggat

SEQ ID NO: 229866 - DNA, 201 bp, Homo sapiens
tggacccgggaggcagagattgtagtgagcccgagattgcaccattgcactccagcctgggcgacagagtgagattccatctcaaaaaaaaaaaaaaaaagataggacaacatgttaacaacacaggatacaatcaacaaaatccagaccatggaaaactttgtaggacaaacaacttggtttcttcaacaaataagttac

SEQ ID NO: 229867 - DNA, 201 bp, Homo sapiens
ggacccgggaggcagagattgtagtgagcccgagattgcaccattgcactccagcctgggcgacagagtgagattccatctcaaaaaaaaaaaaaaaaagataggacaacatgttaacaacacaggatacaatcaacaaaatccagaccatggaaaactttgtaggacaaacaacttggtttcttcaacaaataagttaca

SEQ ID NO: 229868 - DNA, 201 bp, Homo sapiens
tgcaattttccccattttataaatggatgtattttttacctcagtacttctagctatttaattatttcttaaatgcagaaaataatacttagtctacttayctcacagttattgtattaaaggggtaatgtataaaggttgagtaacatcatgatttaaagattagggaaaaaaatcagaaccccttgccagtacttgtat

SEQ ID NO: 229869 - DNA, 201 bp, Homo sapiens; identical to SEQ ID NO: 42404

SEQ ID NO: 229870 - DNA, 201 bp, Homo sapiens; identical to SEQ ID NO: 42397

SEQ ID NO: 229871 - DNA, 201 bp, Homo sapiens; identical to SEQ ID NO: 42398

SEQ ID NO: 229872 - DNA, 201 bp, Homo sapiens; identical to SEQ ID NO: 42399

SEQ ID NO: 229873 - DNA, 201 bp, Homo sapiens
aatctggccgggcgcagtggctcgctcctgtaatcccagctcaggctggtggatcacttgagcccaggagtttgagaccagcctgggcaacatggtgagaycccgtctctacaaaaaaaattttatataaaattagatgggcattgtggtgcatgcctgtgatctctgctgcttaggaggctgaagtgggaggatcgcttg

SEQ ID NO: 229874 - DNA, 201 bp, Homo sapiens
agtgacaagatccagattcctcaacctattaatacaaaggtgaggccacaatttcatggtgtcagtgacagcaagagggagttcctggagtagcagtgccrtggggccaatgccattcatgatggcatggaggctgcagtatcatgctccttggaggaggcagcagtggtatcttgcttggtcctggagtttcatgtgatt

SEQ ID NO: 229875 - DNA, 201 bp, Homo sapiens; identical to SEQ ID NO: 42413

SEQ ID NO: 229876 - DNA, 201 bp, Homo sapiens
tgttttcaggtggaagcaaatactgcacatgcgtgttggtcctgtgagggaaaccagctagtggagagggagaggttgaaggaacagaaaaatgagaagayaactcactggtagagtaacttggaatagatagaaatgggatcctgggcacgtattagttgtggggataggagaatgaatcctttatctgtgactcctgat

SEQ ID NO: 229877 - DNA, 201 bp, Homo sapiens
acagctatgcatagataaatttgtaggcccttgtttagactcttgaaagaagcatagtaaataggaaaatagactctaaacaaaaagatggttgtttttgraaaatccttcctttttcattttgaaacattcttgtttacgttggcagactgatgataagggtgtttttgcaacacacctttctcaagagtaccagctggc

SEQ ID NO: 229878 - DNA, 201 bp, Homo sapiens
tactcacagctagttaaaggtcagtctggaggatggtttgaatggggcacaaattaaggtcaggatcctggagtaaaattgaaaatctggccgggcgcagkggctcgctcctgtaatcccagctcaggctggtggatcacttgagcccaggagtttgagaccagcctgggcaacatggtgagaccccgtctctacaaaaaa

SEQ ID NO: 229879 - DNA, 201 bp, Homo sapiens
agcacatcagtaatacctaatcattttagctgtttatttctgtatgtgcatttcctagcagtctacacatacagatggttccagctggttttagttttgcrccatttctctattttatcaatctgctattataaatactaggaaataaatgtttaaaagggggaaaagaagcaaagggtgtagctgatgtgcagattggga

SEQ ID NO: 229880 - DNA, 201 bp, Homo sapiens; identical to SEQ ID NO: 42406

SEQ ID NO: 229881 - DNA, 201 bp, Homo sapiens; identical to SEQ ID NO: 42408

SEQ ID NO: 229882 - DNA, 201 bp, Homo sapiens
atgctcctggacttccccttccgccggcacttgtgcgtcacttccgggaagagcgcatctcgccaaccagaattgaggagggtgtagccagtgctaagttygcttgcggctgacctttctttggaatgtcgtgagttccatttgtcccagaatacggtccgctaccgctgtgacatgagtgttagggaaggcgggttgtca

SEQ ID NO: 229883 - DNA, 201 bp, Homo sapiens
ggtgtgagccaccgtgcccatcctgatgtacattattaatgagtgagttattcttaagtaaaaagtagtaaaattccagtcaggcattatctgtttaaggmaggaaacaaaggcctgcagcagtttcttttgttcttccttgtttagttgttttcactctgagaaaaggatacctgctccttatgtttgcattgttacaag

SEQ ID NO: 229884 - DNA, 201 bp, Homo sapiens
tatgttgcccaggctggtctcaaactcctggcctcaagctatccactcgccttggcttcttaaagttctgggattacaggcatgagccattatacccagcmtgtgatagtctttagatttgaaaatataggcatattgaatttccccatgtcaggtgtgggttggagaaggggtactattatttcccacttaaaaatatca

SEQ ID NO: 229885 - DNA, 201 bp, Homo sapiens
gcccctccccgcagccctgcagccctttctccaggcctgaggactggcagccagcccactcatttggttcgtcttggcaccaggcaatgaccatgatgttsgaggtgcaagacctggcggtggcttcaccagctacagtctcccgctgtggcatggtgtacctggagcccagcatcctggggctcatgcccttcatcgagt

SEQ ID NO: 229886 - DNA, 201 bp, Homo sapiens
aaggacaggcaccgatgctggggctactgcaggaccaagtgcagctgctgcgactgtggtatcacgagaactgccgcgtgttccgggaccgactggtgaaygaggaggaccgcagctggttcgaccagctcctcaagcgctgcatggagcagtgggaggtgaccttcaacaaggtctgccccttccagcccattctttacg

SEQ ID NO: 229887 - DNA, 201 bp, Homo sapiens; identical to SEQ ID NO: 42415

SEQ ID NO: 229888 - DNA, 201 bp, Homo sapiens
aacaccgtcaccccgcggctgatgcgtcacttcaactacctgtctttcgctgagatggacgaggtcagcaagaaacgcatcttctccaccatcctgggcarctggttgggtgagtattggtgggggtgagcatggacaaaggcagaagcccaggccagggaggccacaccaaggacaactgggtggccaccagaaagggtg

SEQ ID NO: 229889 - DNA, 201 bp, Homo sapiens
ccaggcttccctgggagccagctgtgctcgaagcaccgcctccctgatgtttccagccctctcctccctggcgctgcaggacagacgggatattctcctcrttcatccgggcgggggccatcacctccgacaccaacaagaagtggtacatgttcgatgggccggtggatgccatctggattgagaacatgaacacggtgc

SEQ ID NO: 229890 - DNA, 201 bp, Homo sapiens
ggcgcaactttatcttcttcatcgatgacctgaacatgccggccctggagacctacggtgcacagccacccatcgagctgttgcgccagtggatggaccayggcggctggtacgaccgcaagatcattggtgagtgtggccggcctggctcacagggcaagggctacgcgtgctgtgcaggggcacaggaggcacagcact

SEQ ID NO: 229891 - DNA, 201 bp, Homo sapiens; identical to SEQ ID NO: 42414

SEQ ID NO: 229892 - DNA, 201 bp, Homo sapiens
tctccaggcctgaggactggcagccagcccactcatttggttcgtcttggcaccaggcaatgaccatgatgttcgaggtgcaagacctggcggtggcttcmccagctacagtctcccgctgtggcatggtgtacctggagcccagcatcctggggctcatgcccttcatcgagtgctggctgaggaagctgcctcccttgc

SEQ ID NO: 229893 - DNA, 201 bp, Homo sapiens
ccaacaccagtgctcccttcgccactgggccttccacaaacaagccccattctccatctcaaccaccaaatgcaaaacagcctctctgggcccccttcccrcctgccccagcccgtcactctacctctctgctcaccttgatagcaaaactcctccaaagcattgtctttcccgctgcacccgccctcccctcccactttc

SEQ ID NO: 229894 - DNA, 201 bp, Homo sapiens
ccagggtgagcagcaagaggtccacctaaccctgagccccgtgtttctccctccatcctctagatggactccttggagaaaaaagctaccgggagcgtgtscgtaagtgtgggcctgggcgggaatggggcactggttccaggaggagccctgggctctggttgggtgtgttgaggctgcgaccaggcgccgtggtgaacc

SEQ ID NO: 229895 - DNA, 201 bp, Homo sapiens
cccaggtggcggtggtggccgcgggggcgcgacggcggggcgggggcgctgctgctgcgggggcaggaagcggcaagggcggtggcggcccgctccagccrtgccgaataaaacaagaaggagaaagaatcaccaaaagcagggaagagtggaaaaagttcaaaagaaggacaagacacagtagaatcagagcaaatttcc

SEQ ID NO: 229896 - DNA, 201 bp, Homo sapiens
gttccatgatgagtcccagtgctccgacaggccatgtcagcataaagatataaggggtgcagagcaggagattcttcacctcccccaagctgggggcatcygagatggggccaaagggtacgtggaatccaagcctgaaggctggggaaggggcttggtggggggcacagcacagcaaaggcaaggaggtcaggacctgca

SEQ ID NO: 229897 - DNA, 201 bp, Homo sapiens; identical to SEQ ID NO: 42417

SEQ ID NO: 229898 - DNA, 201 bp, Homo sapiens
tataggctttctgctcctcccattccatagacagtcacatcttgtgcagtgccagccatgtccctgagacacgaaggttgaagtgaaggccagagtaaacrgatttggccttactgggtgcctgatcactaggacagttttaactgtagcaaagtggttattgtcaccatcagtgacctcttcattgacctcaattacatg

SEQ ID NO: 229899 - DNA, 201 bp, Homo sapiens
atgaccaacacaatagaaaattccttcctctcttcagaaatttgtgttactcaactaagacaactgaataaatcagctagaatttctgaatctcaactccwaattcctggaaacaagactaaattgaccccccatatttagaagtttacctctagtctgatctgctatggcccaagaggaagagttgtgtgcactgttgtt

SEQ ID NO: 229900 - DNA, 201 bp, Homo sapiens
atcaccattgctcaagccatgatcttctgccatgtgagtagcagtggcagtggcaggcctggcccttccctctcagccagctccccacagggctcaggagractggatgcccctgggtgccatgggaagaaacgaagtggtttgttctcctaaggttttagtgagtcgtaagagggagactttgattccacttcttagtga

SEQ ID NO: 229901 - DNA, 201 bp, Homo sapiens
catggccactgactcatgggccctggcggtggacgagcaggaagctgcggctgagtcggtgagttggcttcagccctaaaagggtcaggggactagttctkgtcggagacttggtccctgggaaagaatgtttcccaggttgattagaggctggatggggtggcggggaggatagggatggagcctggaccctgagctggc

SEQ ID NO: 229902 - DNA, 201 bp, Homo sapiens
ttgagatcgcaccactgcactccagcctgggcgacagagcgagactccatctcaaaaataaataaataataaaataaatatctatctatatatatatatawgtgagcaacagtgttttacacctttgtttatttagggacaataaaatgtttttatcagcggctcggtttcctcatttattttttgctccccaggccttta

SEQ ID NO: 229903 - DNA, 201 bp, Homo sapiens; identical to SEQ ID NO: 42423

SEQ ID NO: 229904 - DNA, 201 bp, Homo sapiens
caatgaggctccggcttggccagtgccaagagcagcggttgttggagtgtaactgccatgctcagccgcgatggctggggctgccgggcgcgtccaagatygcgccctgcggcggtttcccatcaccctgcctgtgggcgacgtgagtatctgcgagggtagaagccagaccctttcctcccacgtttaggtgccttcctc

SEQ ID NO: 229905 - DNA, 201 bp, Homo sapiens; identical to SEQ ID NO: 42460

SEQ ID NO: 229906 - DNA, 201 bp, Homo sapiens
ttgcccaggctggagtgcaatggcgcgatctcggttcaccgcaatctctgccttccaggttcaagcgattctcctgcctccacctcccaagtagctgggaytacaggcatgtgccaccatgcctggctaattttgtatttttagtagagatggggtttctccatgttaatcaggctggtctcgaactcccaacctcaggtg

SEQ ID NO: 229907 - DNA, 201 bp, Homo sapiens
gagtacaagattctagagcatgatggaattttaatacagattgatcctatattttatatgattatatacaattctgcatataatgctaaattctgaatctcttttttttttttgtctaaaaatagatattttagggcaagtgtggtggctcatgcctgtaatcccaatactttgagaggccgaggcaggcagatcgcttga

SEQ ID NO: 229908 - DNA, 201 bp, Homo sapiens
gaaccccggaggtggaggctacagggagctgagatcacaccagtgcactccagcctgggcaacagagtgagactccatctcaaaaatgcaaaaaaaaaaaagaaaagaaaaaaaatcatctgtaatctccctctccccacattattaacattttggagtggagacttctagacttttctctatgtaaacatataactttta

SEQ ID NO: 229909 - DNA, 201 bp, Homo sapiens
gcttgtagtgagttgagatcgcaccactgcactccagcctgggcgacagagcgagactccatctcaaaaataaataaataataaaataaatatctatctayatatatatatatgtgagcaacagtgttttacacctttgtttatttagggacaataaaatgtttttatcagcggctcggtttcctcatttattttttgctc

SEQ ID NO: 229910 - DNA, 201 bp, Homo sapiens
cctcatcggcttcactttgttctttttttctggacctgacacatggtaagcaagagatgtgttaaacactactgcgtagaattaatttctcccaccgaaayactttaaatcctagtaggctttgaacctacttctgttagtacttattgctatgacttcctcaagaataagaaccttgtcttttattttttatagctcata

SEQ ID NO: 229911 - DNA, 201 bp, Homo sapiens; identical to SEQ ID NO: 42455

SEQ ID NO: 229912 - DNA, 201 bp, Homo sapiens
acaggatccaaacctgtgtctatttaactccaaagcccatgctcttaaccactgcactattacctccatcatctgatatatccaaatacacgggtaataaattgtgctgctggtcataactcaagttacagacaatacagaaaaatactactttttatgcaaaaagagcatcctacacaaaaagaaggtcaagcccaaaag

SEQ ID NO: 229913 - DNA, 201 bp, Homo sapiens; identical to SEQ ID NO: 42421

SEQ ID NO: 229914 - DNA, 201 bp, Homo sapiens
tgtcttctcccttcacttcagatgcctcctctggcttctgcctgggtcttggctctcgtactctcagcagcatttgtttgacgggccacttccgtgtcagygctggccacagtccctcccagcctgggttgagaaaggagacctagggactctcccccaacccctgtccccatcccaggcctgctgctcctcctccccaag

SEQ ID NO: 229915 - DNA, 201 bp, Homo sapiens
atgagacctacctgcaccggatcgggcgcacgggccgctttggcaagaggggcctggcagtgaacatggtggacagcaagcacagcatgaacatcctgaayagaatccaggagcattttagtgagtcccggggagggtcctgtgcctggcgccctttgctaagtagggcggggtggtgaaaggggtaggatcttctgtagc

SEQ ID NO: 229916 - DNA, 201 bp, Homo sapiens
aaacccacctctactaaaaatacaaaaaaaaaaaaaattagccaggtgcagtggcaggtgcctgtaatcctagatacttgggaggctgaggcaggagaatygcttgaacctgggcggcagaggttgcagtgagtcgagatcatgccattgcactccagcctgggcaacagagtgagactctgtctcaaaaaaaaaaaaaaa

SEQ ID NO: 229917 - DNA, 201 bp, Homo sapiens
agaattgtaggttgaaaattattttcctgccaaattttaaatgtattgttccattgccttctagatttctgtatttgttgttgaaatgtttgagaccatcstgattcttgatgtgacttgttttcccctttctaagcttggagaatcttctgtttgtctttaatattcagaaaatttatggtaatatgtcttggtatgggt

SEQ ID NO: 229918 - DNA, 201 bp, Homo sapiens
tctccctattatatttaacattttgcacagaccagactagttgcttttcaaatattctacattctggccgggcgcggtggctcacgcctgtaatcccagcmctttgggaggccgaggcgggcagcagatcacgagatcaggagattgagaccatcctagctatcatggtgaaaccccgtatctaataaaaatacaaaaaaa

SEQ ID NO: 229919 - DNA, 201 bp, Homo sapiens
gcagcgattcccccccacacacaaaagaaatatgagagaatgacaactctaatgatattctacaaagagagaaagtttataatcagggcattaagcaaackcacaaattacaattctctcacagaattttaagtagaaggtacagatttggagcatttttttccaccgatgtatttacgggaaattttgtttattctcatc

SEQ ID NO: 229920 - DNA, 201 bp, Homo sapiens
aactattttaatttataagtcaaaactatgacgtaccttgaatttgaatgttcagtacattattatttaaaatacaaatggcagttgaattagagtaaacrcctggtaggtttcaaggactttttaaaattctttgctttctttttcctgacagaggacagagctgcccagtccttactcaacaagctgatcagaagcaac

SEQ ID NO: 229921 - DNA, 201 bp, Homo sapiens
caggaggttgaggctgcagtgagccaagattgtgccactgcactccagcctggtcaacagagtgagacctaatctcaaaaaaaaaaaaaaaaaaaaaaaaagaagaagatgtggagtgcttcaaatcccaccagaaaatcttatttctatagtgccctgttcttgtgaagctagcatatgtaactctgctacataatccaa

SEQ ID NO: 229922 - DNA, 201 bp, Homo sapiens
tcagcttcctaagtaggtgggattacaagcacgtgccaccatgcccagccaatttttcatatttcagtagagatggggtttcatcatgttgcccacagtgstctcgaactcctgagctcaggcaatccatccatctcggcctcccaaagtactaggattacaggcgtgagccatcacatctggccatatgtatatatatgt

SEQ ID NO: 229923 - DNA, 201 bp, Homo sapiens
aaaaggttgagatttaagctcctaactagtttgtttcttgcgcagcccacagaacttaattgcccaatctcagtctggtactggtaaaacagctgccttcktgctggccatgcttagccaagtagaacctgcaaacaaatacccccaggtaaggatttatgaatttaggttttctactaatgcatagatagaaggggattt

SEQ ID NO: 229924 - DNA, 201 bp, Homo sapiens
gctcggtttcctcatttattttttgctccccaggcctttacaaaaacttctagtgtcatagaatttgaattgtctcaactgttgggtatgggatgcgattytgaatgatggccactttgtgtctataaaggtgctgttgtcaagaccaatgccaatgcagagaagacagatgaagaagagaaaggtaacacagccgtggag

SEQ ID NO: 229925 - DNA, 201 bp, Homo sapiens
ctcaggcaatccatccatctcggcctcccaaagtactaggattacaggcgtgagccatcacatctggccatatgtatatatatgtgtgtgtgtgtgtgtgkatgtatatatgtgtgtgtgtgtatatatgtgtgtattttttttaatagagatggggtctcattctgtcacccaggctggaatgcagtggcaagatcatag

SEQ ID NO: 229926 - DNA, 201 bp, Homo sapiens
tgctctcgaactcctgagctcaggcaatccatccatctcggcctcccaaagtactaggattacaggcgtgagccatcacatctggccatatgtatatatawgtgtgtgtgtgtgtgtgtatgtatatatgtgtgtgtgtgtatatatgtgtgtattttttttaatagagatggggtctcattctgtcacccaggctggaat

SEQ ID NO: 229927 - DNA, 201 bp, Homo sapiens
aaacatggagccaagcacagctgcacacacctgtagtcccagctacttgggaagcagaggcaggtgaacctcttgaactcaggagttcaaggatatagtaygtgctgtaatggtgcctgtgaatagccactgcactccagcctgggcaacatagcaagaccctgtctctaatttaaaaaaaaccatgcatatggaaaataa

SEQ ID NO: 229928 - DNA, 201 bp, Homo sapiens
ttttttattttttggagacaagagtctcgcactgtctcccaggctggagtgcagtggcaccatctcggctcactgcaacctctgcctcccgggtttaagcrattctcatgcctcagcttcctaagtaggtgggattacaagcacgtgccaccatgcccagccaatttttcatatttcagtagagatggggtttcatcatgt

SEQ ID NO: 229929 - DNA, 201 bp, Homo sapiens
ttctgacctcgtgatccgcccgcctcggcctcccaaagtgctgggattacaggcatgacccacagcacccggcctgttttttttattttttagttctgagmgttttgactattttaactaacttcttgttaggtcagttttgttgttgttgttgttgttgtttgttgttgttgttgtttttgaaatagagtcttactttgt

SEQ ID NO: 229930 - DNA, 201 bp, Homo sapiens
tcaatgtcatgcacgtctcttagtgccgtgttcccttaatgctgagtcatgctccattgtatggatggaccacatgactgatttgcctcctgtccttagtyctctcagcctccaactctccttcctgcaggcattgatgttgaacaagtgtctgtcgtcatcaactttgatcttcccgtggacaaggacgggaatcctgac

SEQ ID NO: 229931 - DNA, 201 bp, Homo sapiens; identical to SEQ ID NO: 42461

SEQ ID NO: 229932 - DNA, 201 bp, Homo sapiens
catagattgcacccatcaccctagattgtgttttgtttgtttttaattgaaatagagacatggtcttgctaggttgcccaggctagtctggaactcctggyctcaagctatcttcctgcctcggcctttcaaagcaccaggattacaggctgagccattgttcctggccgccccggtttgtaatagttattttaggtgtca

SEQ ID NO: 229933 - DNA, 201 bp, Homo sapiens
aagggtggccaaacaggagtggcctccgacgtcactgtggcgcccgcttccggtctgcagccttgtagtggggctggagcagagcctgccgcgaacccccrgagcccacgatccctcgtgccatccctcgaatccaccagcacgagcgtcccacccgcgcctgggaccatggccactgactcatgggccctggcggtggac

SEQ ID NO: 229934 - DNA, 201 bp, Homo sapiens
caactactaaaagcccaagatatttcttcctatttatttatttgtttatgaggcagagtcttactctgttgcgcagactagagtgcagtgacacaaacacygctaactgcagcctcaacctcctgggctcaagtgatcctcccacctcagcctcccaagtagctggaactgcaggcatgtgcgacgacacctggctaattt

SEQ ID NO: 229935 - DNA, 201 bp, Homo sapiens
tgtgtaacctctacggggccatcaccattgctcaagccatgatcttctgccatgtgagtagcagtggcagtggcaggcctggcccttccctctcagccagstccccacagggctcaggaggactggatgcccctgggtgccatgggaagaaacgaagtggtttgttctcctaaggttttagtgagtcgtaagagggagact

SEQ ID NO: 229936 - DNA, 201 bp, Homo sapiens
aaaaaaaagaaagaaattgtaattgaggcccaaaagtctcattctaatataattatctaatgatatttttctgtgatatttttctcttgtagatgtcaacwacatgctagaaagaatgctatcttaatgcaatgtgcaaattatgtattttaggaaactactggcaagttcttgatttactctaggctaagcaaataggcc

SEQ ID NO: 229937 - DNA, 201 bp, Homo sapiens
tcccaacactttgggaggccgaggcgggcagatcacctgaggttgggagttcaaaatcagcctggtcaacctggtgaaaccccatctctactaaaaatacwaaaattatctgggtgtggtggcggccacctgtaatcccagctactcagaaggctgaggcagaggctgcagtgactcaagattgtgccactgcactccagc

SEQ ID NO: 229938 - DNA, 201 bp, Homo sapiens
ggcccaaggtcttagccttgtgatctagaatccgccatctgtgaggtgggtacttcctgtgatttcaggggaaactgagactggctaggctcacgtgggartaaatgcaggaggctgaattccaatccagatgctcttattccccgaacactcttctttccacgcccgctttggaaaccaggttccttcttagccggagtc

SEQ ID NO: 229939 - DNA, 201 bp, Homo sapiens
gttctggatgaggctgatgtcatgatagccactcagggccaccaagatcagagcatccgcatccagaggtagggatctcgagggtgggggactcctcagaytccccatctgcagtgtcttctcccttcacttcagatgcctcctctggcttctgcctgggtcttggctctcgtactctcagcagcatttgtttgacgggcc

SEQ ID NO: 229940 - DNA, 201 bp, Homo sapiens
tataggggccgggcacggtggcttacacctgtaatcccagcactttgggaggccgaggtgggcagatcacgaggtcaggagatcgagaccatcctggctawcacggtgaaaacccgtctccactaaaaatacaaaaaaaaaaaaaaaaattagccgggcatggtggcagacgcctgtagtcccagctacttgggatgctga

SEQ ID NO: 229941 - DNA, 201 bp, Homo sapiens
ttaaagaatcaaatggtgtacattttaatgtacatattctttccttcagcttcagctggaggagtggctaagtactaatggtaattcccctttgcaaaagmgctattgtcttgaatttgcactctgcattcttttcctgccagtgtctatgtctctccccaacgtatgagctcgccctccaaacaggaaaagtgattgaac

SEQ ID NO: 229942 - DNA, 201 bp, Homo sapiens
agaaaaaaaatcatctgtaatctccctctccccacattattaacattttggagtggagacttctagacttttctctatgtaaacatataacttttaaaaamgttgacatatatgaccggggtggtggctcatgcctataatcccagcactttgggaggccgaggcaggtggatcacctgacgtcaggagtttgagaccagg

SEQ ID NO: 229943 - DNA, 201 bp, Homo sapiens; identical to SEQ ID NO: 42462

SEQ ID NO: 229944 - DNA, 201 bp, Homo sapiens
agaaatgctcaccagccaccgcctaagaggaataaaaggagccaaaaattgacaaaaggaaaagacgatgtaaaagcatacataaatgctccccaggaccrgtatggtttaggtgactctggactcaggggaggacctggacggcaggtgggtcccatgagtgtgttggacctgcagcttgtgccggcgcaggatgaaaac

SEQ ID NO: 229945 - DNA, 201 bp, Homo sapiens; identical to SEQ ID NO: 42491

SEQ ID NO: 229946 - DNA, 201 bp, Homo sapiens
cggggtctgtaagaggccgcaggggcctacagacctcatccccccatcccctggctggagccacttccagtggccactctcaggcagagttcagattcctrcccgcagggtcctctgggctgggccttggggcagctcccacattcccagggattttccccatcagtctgtcccttgggttttgcaagctactctgcacct

SEQ ID NO: 229947 - DNA, 201 bp, Homo sapiens
gctcccagagtggcatgggtggcagagccagtacctggctctctacgagcatggccatgtccacaaacatatcgtgcagctcgcggatgctggtctccagyttgatgatctcattgtgcctcgtctcaatctcattcagcgcctgcttcgtcatctgtgagtccattttgatctagggtgacgagggagagagctacaatc

SEQ ID NO: 229948 - DNA, 201 bp, Homo sapiens
aatctgcgtctgcagaacgcgccactgaaggttccccagcgctggctggcctcctcccctccgccccgccccttttcctcagggactagtcgcagctttcrtcgccgccgattcgtcaaggtcccgggccgcagcatctagatcgtcgtggcgaagccgactctccgggggatgcggccaatctccaagctaccctgggcc

SEQ ID NO: 229949 - DNA, 201 bp, Homo sapiens
tgatccaacatggtaaaataagtagaagtgtttttgataaatcgtgaagtgtcataaaatatgttgtttgtggtagtttagaggtagagataaggtagaargtcccaaaggtagagttatggtaggagaactgaaatcctgaaacccagattccaagaaattgtaggaaacttgaggcctgagaaagcaggaataccagat

SEQ ID NO: 229950 - DNA, 201 bp, Homo sapiens
cacagtggctcacgcctgtaatcccagcactttgggaggccgaggcgggtggatcatgaggtcaggtgattgaaaccatcctgactaacacggtgaaaccycatctctactaaaactgcaaaaaattagccaggcatggtggtgggcgcctgtagtcctagctacttgggaggctgaggcaggagaatggcatgaacccgg

SEQ ID NO: 229951 - DNA, 201 bp, Homo sapiens
ctggcagcctgtgattctctccttttctctctcagttggtcaccgaatcctcctggctcttttcttttttattcttcatctttctattctcattgccactkaatgtagaccttggtattcatttcacctggtctccttgccttcgttcttgcctcagtttctcctctgccttgctgtcatttgtctctttggcttcactac

SEQ ID NO: 229952 - DNA, 201 bp, Homo sapiens; identical to SEQ ID NO: 42493

SEQ ID NO: 229953 - DNA, 201 bp, Homo sapiens; identical to SEQ ID NO: 42494

SEQ ID NO: 229954 - DNA, 201 bp, Homo sapiens
cacaccagagactgcaccgctacgtggagctggcctggggcttctccactgccctgggcacctttctcttccttgctgaagttgtcctggttggttgggtsaagtttgtgcccattggggctcccttggacacaccgacccccatggtgcccacatcccgggtgcccgggactctggcaccagtggctacctcccttagtc

SEQ ID NO: 229955 - DNA, 201 bp, Homo sapiens; identical to SEQ ID NO: 42547

SEQ ID NO: 229956 - DNA, 201 bp, Homo sapiens
tctactaacaatagaaaaattagccaggcgtggtggcgggtgcctatagtcccagctacttgggagactgaggcaggagaattgcttgaacccgggaggcrgaggctgctgtgagctgagattgtgccactgcactccagcctggcgacaaagcgagactccgtctcaaaaaaaaaaatatatatatatatgccaggcacg

SEQ ID NO: 229957 - DNA, 201 bp, Homo sapiens
gttgcatttgacagttaggaggtcattggtgaccttatcaatttcagttgagtggttcagactgaagccaagttacagggtgttaaggaatgaggggaggkcagttttctggaagggtggaccactcttgctgagatagaaaggagagttggggccgggcgcagtggctcacacctgtaatcccagcactttgggaggctg

SEQ ID NO: 229958 - DNA, 201 bp, Homo sapiens
gctcctggccgaagcctacttcccatagccagcatctttgtggttggagcccaggcagctgtgcctggtgtaggaccagttgtccccttcctgttagtccycatttgtcttttttcttaaggatgaggaggatgacgaggaagatgaggaagatgaagatcgagaggaagctgtggataccacaaagaaggagacagaggt

SEQ ID NO: 229959 - DNA, 201 bp, Homo sapiens
gttacctagtaaaggctgagctaggaaatcatcgccctgtagctcgttctctccacgtatatttattcctcagtgtgtacatttctttctttctttctttytttttttttttttttttttgagacggagtctcgctgtgttgcccaggctggagtgcagtggtgtgatctcggcttagtgcaacctctgcctgccaggttc

SEQ ID NO: 229960 - DNA, 201 bp, Homo sapiens; identical to SEQ ID NO: 42499

SEQ ID NO: 229961 - DNA, 201 bp, Homo sapiens; identical to SEQ ID NO: 42500

SEQ ID NO: 229962 - DNA, 201 bp, Homo sapiens
ctgcagtggaacagatgatgctggtttctgtccacatggatgggtcgagtgagtcacattgggaacgtgactccagggtggaagatgaacccagcctctgscctctggccccagctctgacatggcctgtgtcctccaaccccggccagggcctgtgagggtgactgccatccagggggacgtgacccaggcccatgaggt

SEQ ID NO: 229963 - DNA, 201 bp, Homo sapiens
atgtcaccatctcctgtcactaccttctagagacattgattgtctgacacacttcaaactgtaccgtcatggtggtttacagaaccccaggctaagctgcmtactaaagtaaaatgggttggtctcttctcaagtaaattaaggagaaagtgcccagttgaataagttcttcctcctaatttttcttaagcctgttcttca

SEQ ID NO: 229964 - DNA, 201 bp, Homo sapiens; identical to SEQ ID NO: 42502

SEQ ID NO: 229965 - DNA, 201 bp, Homo sapiens
ttgtagtgagccaagatcacaccactgcactccagcctgggtggcagagcgagaccctgtctcaaaaaaaaaaaaagagagaatacctaggaaaacctgtrgttacgaaccatgagaagcaccaggaagaggcacagggcagccagccggagcacatctgcaggaggaggaaggcttcctgctgaggtactgctgggctga

SEQ ID NO: 229966 - DNA, 201 bp, Homo sapiens
gctcgcggatgctggtctccagcttgatgatctcattgtgcctcgtctcaatctcattcagcgcctgcttcgtcatctgtgagtccattttgatctagggygacgagggagagagctacaatcacccttctccgccatgagcgcctccaccgcagtggagtggccagggtcaaatccggtgtcatttactagctgaaacct

SEQ ID NO: 229967 - DNA, 201 bp, Homo sapiens
cctatccttgcagcaaggccctggccgagtggctggtcctggaggccaacgggaggaaggtgagcccagaaaaaggaggcgcagagatggggctcctgccmtgcacacccccttaccctgccagcccaaggaggccggggccgagagcaagctgtcgggtcccaggtctcagcagtacctgcctttgccaccaggtccgtg

SEQ ID NO: 229968 - DNA, 201 bp, Homo sapiens
ctccccgtcctgagggtacgctggggaggcagcacccccagctcggagccagtgtgttccctccccagccacccgcatcctgggatctccactccagcccygcttctctagcagcgctgtctcctgcccctccctgcagggcatgttcaaattctgtaggggatggggaggaaggcaagtttcataaaatattttaataca

SEQ ID NO: 229969 - DNA, 201 bp, Homo sapiens
gcaagacccagggcaagcaccgcaagtcctttgctctggacagcgaaggggaggaggcatcccaggagtcctcctcggagaaggtgagggcccgggcgccrgctcctggccgaagcctacttcccatagccagcatctttgtggttggagcccaggcagctgtgcctggtgtaggaccagttgtccccttcctgttagtcc

SEQ ID NO: 229970 - DNA, 201 bp, Homo sapiens
acccccagctaattttttgtatttttagtagagacagggtttcactatgttggccagactggtcttgaactcctgagctcaggcgatccacccacctcagsctctggaagtgctgggattacaggcgtgagccaccacacccagatttttttttttttttttgagacagagtctcgctttgtcacccaggctggagtgcag

SEQ ID NO: 229971 - DNA, 201 bp, Homo sapiens
cggcctggctctgggccccagccaggccccaggagtcctgtcccctctgagaaggggagggagagagctctagaaaccaacggagaaacagagaagggggyaggggctcatgtcagcaaacacggctacatcacgtgacacgccagtgacacagaaacacacgccaacgcacacggctgcacagcgggcaggggcggttag

SEQ ID NO: 229972 - DNA, 201 bp, Homo sapiens
caggctggtcttgaactcctaacctcaggtgatctacctgccttggcctcccaaagtgctgggattacaggagtgagccaccgtgctctgcctgagtgttygagctctaaacaggccccatcttttccccatcccccaggtaaagcggaaagagccatcggaaatttccgaggccagtgaggaaaagaggcctcgtccctc

SEQ ID NO: 229973 - DNA, 201 bp, Homo sapiens
ctctgtcgctctaggccgaatcccgccgccgctcttcctctgacacagctgcctacccagcaggcaccactgcggtgggcactcctggcaacggcaccccytgctcccaggacacaagcttctccagcagccgacaagataccccatcttcctttggccagttcacacctcagtcctcccaaggaaccccctacacgtctc

SEQ ID NO: 229974 - DNA, 201 bp, Homo sapiens
cagtccgggaccccactgtgaccaggcagatgctcgaaggagtcagtggctctcttacccagtgcagatttccctggagttccctgcgggtgacttagaayggccaccagaggcttaggatgctgccccaaagagggagggctcctggaagcagagtcgagagagtcagtgccgggttagcgggagctggaggcagagctg

SEQ ID NO: 229975 - DNA, 201 bp, Homo sapiens
cacagggcaagtatcttgtggttgatggtaaatttccccaactaccactctgctggcctagaccctgaacaagagaaggaggctggagagccaggacgtcyggggaccaagcccccgaagcgggacgaagagcgaggcaagacccagggcaagcaccgcaagtcctttgctctggacagcgaaggggaggaggcatcccag

SEQ ID NO: 229976 - DNA, 201 bp, Homo sapiens
aagtgtcataaaatatgttgtttgtggtagtttagaggtagagataaggtagaaggtcccaaaggtagagttatggtaggagaactgaaatcctgaaaccmagattccaagaaattgtaggaaacttgaggcctgagaaagcaggaataccagatcaggaaggagttagtatctccatctgacaattggttcccatttccc

SEQ ID NO: 229977 - DNA, 201 bp, Homo sapiens
atgggccccgggagcaccagacaggctcagcccgcagcgaaggctactaccccatcagcaagaaggagaaggacaagtacctggacgtgtgcccagtctcrgcccggcagctggagggcgtggacactcaggtgggcctaaccccgccgccgcgtcctcctgccactcacttccctgccctgctcacctcctccctgccgt

SEQ ID NO: 229978 - DNA, 201 bp, Homo sapiens
tgcaagggcactcaggggtgtgtccgcctctcttccgccaccggcaggcaatgttgcctggatgcacgtgctggcagcccgggagctggagcagcgggcarccctgatgggcggccaggtatacttctgctacgatggatcaccctacaggagctacgaggatttcaacatggagttcctgggcccctgcggactgcggct

SEQ ID NO: 229979 - DNA, 201 bp, Homo sapiens; identical to SEQ ID NO: 42501

SEQ ID NO: 229980 - DNA, 201 bp, Homo sapiens
aaggggagtgacaaggccactgcctacctgggtagcactattccccgcctctcatttggcgatgtcatttccctcttgtttccttcgaggactcctattcyccaccctagacaagatattcttcaggccttgaactgggcctggaacactggtggttcttcatttccttctctgattctttattcttcctttctaaataaa

SEQ ID NO: 229981 - DNA, 201 bp, Homo sapiens; identical to SEQ ID NO: 42503

SEQ ID NO: 229982 - DNA, 201 bp, Homo sapiens
gtcttgaactcctgagctcaggcgatccacccacctcagcctctggaagtgctgggattacaggcgtgagccaccacacccagatttttttttttttttttgagacagagtctcgctttgtcacccaggctggagtgcagtgatgtgatcttggctcactgcaacctccgcctccctggttccagcgattttcctgcctca

SEQ ID NO: 229983 - DNA, 201 bp, Homo sapiens
ctcagttgttttggataggaggtacacttaatcttccagaaaggtgcaggtcaggtgtcctaagtgtatccctggtggctggggtgtcgacttcttgaagrgtgaggtaaagactctttagctgctatacctatcactgtatattcgtagacagtgcatcatagcacacaagagtgggatctcccagttccttgacagtca

SEQ ID NO: 229984 - DNA, 201 bp, Homo sapiens
tgcaagttggtcaccaatagaaatgggactctgagggctaacagaaatgggactctgagggctaacaggagagggcggcctggctctgggccccagccagrccccaggagtcctgtcccctctgagaaggggagggagagagctctagaaaccaacggagaaacagagaagggggcaggggctcatgtcagcaaacacggc

SEQ ID NO: 229985 - DNA, 201 bp, Homo sapiens
gttccaggggtccttgtcatttgatgaattgttaatccccaaatctcagtaagaatgacaccatctttatgaattcttccctgatcatactctgtacaaargtttccttccctgggctccagaacaccatgtatgcgtcagctgccactgggtcgtgttgtgtttgtatgtgcatgtcatgctgcttttctgtatgggaat

SEQ ID NO: 229986 - DNA, 201 bp, Homo sapiens
gagaattgcttgaacccgggaggcggaggctgctgtgagctgagattgtgccactgcactccagcctggcgacaaagcgagactccgtctcaaaaaaaaawatatatatatatatgccaggcacgatggctcacgcctataatcccagcactccaggaggctgaggcaggaggatcacttgaacccaggagttcaatacca

SEQ ID NO: 229987 - DNA, 201 bp, Homo sapiens
cgttaaacaaagaagagccaagcaaagctgctgagatgctttcaaaagacagggaactaggggccaggcacagtggctcacgcctgtaatcccagcacttygggaggccgaggcgggtggatcatgaggtcaggtgattgaaaccatcctgactaacacggtgaaaccccatctctactaaaactgcaaaaaattagccag

SEQ ID NO: 229988 - DNA, 201 bp, Homo sapiens
agcagcaagccaaggaggaggataaagagaagacgaagctgaaggagcctggcctgctgtccctcgtggactgggccaagagcgggggcactacgggcatmgaggctttcgcctttgggtcagggctgagaggggccctgcggctgccttcattcaaggtactcagaactgtcgttttgtggggtagggtggggagaggga

SEQ ID NO: 229989 - DNA, 201 bp, Homo sapiens
aggctggagagccaggacgtccggggaccaagcccccgaagcgggacgaagagcgaggcaagacccagggcaagcaccgcaagtcctttgctctggacagygaaggggaggaggcatcccaggagtcctcctcggagaaggtgagggcccgggcgccggctcctggccgaagcctacttcccatagccagcatctttgtgg

SEQ ID NO: 229990 - DNA, 201 bp, Homo sapiens
tgcagtggaacagatgatgctggtttctgtccacatggatgggtcgagtgagtcacattgggaacgtgactccagggtggaagatgaacccagcctctggsctctggccccagctctgacatggcctgtgtcctccaaccccggccagggcctgtgagggtgactgccatccagggggacgtgacccaggcccatgaggtg

SEQ ID NO: 229991 - DNA, 201 bp, Homo sapiens; identical to SEQ ID NO: 42506

SEQ ID NO: 229992 - DNA, 201 bp, Homo sapiens
cagtccgctccccagctgccaccaccttctagtctaacttatccaattctgttcctcaaaaactgtgaaattcttcagttttttcgagtccttcccgtacrtgagcagtctcagaatatagagcctgtcgtgttttttaaccttttcagcccagaatcctttttcacccaatccttcgtccagactgggtcctgagaccca

SEQ ID NO: 229993 - DNA, 201 bp, Homo sapiens
agaggtagagataaggtagaaggtcccaaaggtagagttatggtaggagaactgaaatcctgaaacccagattccaagaaattgtaggaaacttgaggccwgagaaagcaggaataccagatcaggaaggagttagtatctccatctgacaattggttcccatttccctccctccaggacaacaacgaatgaaatactatg

SEQ ID NO: 229994 - DNA, 201 bp, Homo sapiens
gaacagaggtactgatgcttcccttctggtgatccaacatggtaaaataagtagaagtgtttttgataaatcgtgaagtgtcataaaatatgttgtttgtrgtagtttagaggtagagataaggtagaaggtcccaaaggtagagttatggtaggagaactgaaatcctgaaacccagattccaagaaattgtaggaaact

SEQ ID NO: 229995 - DNA, 201 bp, Homo sapiens
gtgcctggtgtaggaccagttgtccccttcctgttagtcctcatttgtcttttttcttaaggatgaggaggatgacgaggaagatgaggaagatgaagatygagaggaagctgtggataccacaaagaaggagacagaggtgtcggatggtgagcacaagacagtgaaatcgactttgggctcggaggaggggttcggctg

SEQ ID NO: 229996 - DNA, 201 bp, Homo sapiens; identical to SEQ ID NO: 42562

SEQ ID NO: 229997 - DNA, 201 bp, Homo sapiens
ttccttcagattgctttacttccacacattttggtaagattagctgtatgtgtagatctgggttcagcttcacctattttaacaaatgttaatattttcasatgtaaaagcaaagaaacaggattttgttaattttttctttaaaaggcaaaagctcctctaaaactaacttaagtgtgtctaaggtgggaaaacgattag

SEQ ID NO: 229998 - DNA, 201 bp, Homo sapiens; identical to SEQ ID NO: 42568

SEQ ID NO: 229999 - DNA, 201 bp, Homo sapiens
aaggacactgtcagctctatctctatctgtctctcaaatctagccccttctctctgctgccttagtccagatctccagatctccacctggactactgcagyggccttatggcttccagattctcccacaccattctatttcccacactgaccaggaaggaggaaaagcccacataaaaaatatgttatgactcatggcagc

SEQ ID NO: 230000 - DNA, 201 bp, Homo sapiens; identical to SEQ ID NO: 42571

SEQ ID NO: 230001 - DNA, 201 bp, Homo sapiens
tgtattttatttttatttatttttatttattttttagagagagggtctcactctgtcacccaggctggagtggagtggtgtgatctcagctcactgcaacytctaactcccaggctcaagcaatcctcctacctcagactcccaagtagctgggactacaggcgtatgtaaccctgcccagctaatattttgattttctgt

SEQ ID NO: 230002 - DNA, 201 bp, Homo sapiens
aaatattagtggtcaactaatattttagtttgtaattcctctcttccttagatgaatagctcacaaggtatcccttccttctccagagtcatcatgccctrtggagattttggtttttctttttcaatcagtacctgaattaagatgcacagaactaatccctcagtttctcaatattagcttctgagatacattaagaat

SEQ ID NO: 230003 - DNA, 201 bp, Homo sapiens
gcagatcactcccactcggcaacatgctgtttcttcttgagggatcttgcaagattgagcaccagaatggtgctgacatgctgactttgggtggcttaaawttttatttagacaggagccccggaaaaatatttttttgcagagaccctgcaaagtctaagggtgactctgcctctggaacttggagacacctgtcttcac

SEQ ID NO: 230004 - DNA, 201 bp, Homo sapiens; identical to SEQ ID NO: 42573

SEQ ID NO: 230005 - DNA, 201 bp, Homo sapiens; identical to SEQ ID NO: 42563

SEQ ID NO: 230006 - DNA, 201 bp, Homo sapiens
tatgtaaccctgcccagctaatattttgattttctgtagagatgggatcttactttgttgcccaggctggttttgaattcctggggtcaagtgatcccccrgcctcggcctcctaaagtgctgggattacaggtgtgagccaccaagccttgctagagaacacattttagagcctggatccaccatgggtgacctgagcga

SEQ ID NO: 230007 - DNA, 201 bp, Homo sapiens; identical to SEQ ID NO: 42564

SEQ ID NO: 230008 - DNA, 201 bp, Homo sapiens
gctggagtggagtggtgtgatctcagctcactgcaacttctaactcccaggctcaagcaatcctcctacctcagactcccaagtagctgggactacaggcrtatgtaaccctgcccagctaatattttgattttctgtagagatgggatcttactttgttgcccaggctggttttgaattcctggggtcaagtgatccccc

SEQ ID NO: 230009 - DNA, 201 bp, Homo sapiens; identical to SEQ ID NO: 42565

SEQ ID NO: 230010 - DNA, 201 bp, Homo sapiens
ttttagagagagggtctcactctgtcacccaggctggagtggagtggtgtgatctcagctcactgcaacttctaactcccaggctcaagcaatcctcctayctcagactcccaagtagctgggactacaggcgtatgtaaccctgcccagctaatattttgattttctgtagagatgggatcttactttgttgcccaggct

SEQ ID NO: 230011 - DNA, 201 bp, Homo sapiens
ctaacttttagatcctgggataaccacccacatggaagaaatgacatctgtcctgacattagaccctgctgggaggcatctttttttttttttttttttttgagacagggtctcactgtgttgcccaggctggagtgcagtgatgcggtcattgctcactgcagcctccaattcctggcctcaagggatccttctgcccag

SEQ ID NO: 230012 - DNA, 201 bp, Homo sapiens
aatctgaaagtcattctgtcatctagaaactttgctactgttctaccaactgatttacaaaccagactccctttagcatttcatttcatattcataatctyttttgctataggtcaaaagttaagagtgagcactaacttttagatcctgggataaccacccacatggaagaaatgacatctgtcctgacattagaccctg

SEQ ID NO: 230013 - DNA, 201 bp, Homo sapiens
tttctccatattggccaggatggtctcgatctcctgatctcgtgatcggcccaccttggcttcctaaaatgctgggattataggcgtgagccaccgcgccyggcccacactttgacttacatttttaaacgattcctctagtgaggagatttggttgtaggagttcaagagtctaagcagggagacttgttggaaggtttt

SEQ ID NO: 230014 - DNA, 201 bp, Homo sapiens
cctaatgctactcattaagaactttggcttttcatctggtgaaaaggggagttgtgcagggctctggattatatcgtttgacttactttttttttttttttaatagactttatcttttaaagcagtttaaggttcacagcaaaactgagagaaaggcacagagatctcccatataaagcctgcctccacccacggatagtt

SEQ ID NO: 230015 - DNA, 201 bp, Homo sapiens; identical to SEQ ID NO: 42566

SEQ ID NO: 230016 - DNA, 201 bp, Homo sapiens
cctccctctgatgaacatcctgactttctgccttcacaggagctttatttcactgattcatttgtagttatttatgggatcataaacggtgggtcaggggraaagatagaggctcaagagaaggagaccaggatgtaaaagcagtgaagctcttccctgactccaagccaacacctatcaggagctgaaaccatctgtcat

SEQ ID NO: 230017 - DNA, 201 bp, Homo sapiens
agtcaagatggcacttgaaggaagtacctctgagaatgtgctgctggtcagactggccgtaccggcagcgttgactctgcccctgaaatggcaaaactccyttctccacattgccaacccagcaacccgagaacaatttctgttgactttgagaacgaagccttacataaccctttgctgcctctacttcttttacaggcc

SEQ ID NO: 230018 - DNA, 201 bp, Homo sapiens
ttcagctagaacacatagcagctcagggtttctgcatcctgctatgtgttcgcctacagttaagttaaaaacacttgttgctatttattgtgtaagtcctrtgatcatgtcctctttgaagatgaggaaactgaggcttagaggagggatataacttgttcctagacacagacaaagcaagacaggattcaaactcaggat

SEQ ID NO: 230019 - DNA, 201 bp, Homo sapiens; identical to SEQ ID NO: 42572

SEQ ID NO: 230020 - DNA, 201 bp, Homo sapiens
atgggtttggacaagtgtataatgacatgcatctgcatgtattatagtatcatacagaatagttttgctatcctaaaaatcctctgtgctccacctattcrtctccccccgccagatgcctggcattcactaatttttttttttttttttactgtcttcataattttgacttttccagaatgtgatatggttgaaatcata

SEQ ID NO: 230021 - DNA, 201 bp, Homo sapiens
tttatcttttaaagcagtttaaggttcacagcaaaactgagagaaaggcacagagatctcccatataaagcctgcctccacccacggatagtttcccccayatcaacacccctacctacctgatgaacctacaccgacacatcattaccaccacagtttacattagggttcgctcttggagtggtacatttgatgggtttg

SEQ ID NO: 230022 - DNA, 201 bp, Homo sapiens
aatactaactaggtagggcagatagagtctctctcacggagaggtgaaacttcagcaaagatttgaggatgcaaaagaattagctaagtagattactgggraaataatatttcagacagaggaaatagccagagcaaagctcctaatgctactcattaagaactttggcttttcatctggtgaaaaggggagttgtgcagg

SEQ ID NO: 230023 - DNA, 201 bp, Homo sapiens
gatgagagattaaactatcaggatgataaatacagtgcataataaatacagtatgtaagtaagaaggacttggaaaaaagtaaagtaggataaggaggatmaggagtgcatgggggtgcaggtagtggtttacaatactaactaggtagggcagatagagtctctctcacggagaggtgaaacttcagcaaagatttgagg

SEQ ID NO: 230024 - DNA, 201 bp, Homo sapiens
cagaaaatcaaaatatagtttaatgtcataattaaaaatagtttggtattgatgtcacaataaataaatcaaaggaataaagaattaaaaacagactgtgkgataaggtgacatttcaaatcaatgaggaaaggctggattatttagtatatggtctgggctgatctgtatttatgaaaatgatgttagcaccctatttct

SEQ ID NO: 230025 - DNA, 201 bp, Homo sapiens
gaaccacagtttcattaacagtaatctgcacagttggaggtgtgagccagattgagaaccaaagctggataataattcttgcttctccatttcacttttgragtttttgttctaaaattctgatacggagctctggagtagttatgagagttaatgaacaggtctcttcctcttttagggattacttctagaccagataaa

SEQ ID NO: 230026 - DNA, 201 bp, Homo sapiens
aggaggaaaagcccacataaaaaatatgttatgactcatggcagcactagtcgcagcagccaaaaggtggaaacaacccaactgtctatcagtggatgaayagataaacacgatgtgttatatccacaggggaatactattcagccataaaaaggaatggagtaggccaggcctggtggctcacgcctgtaatatcagcag

SEQ ID NO: 230027 - DNA, 201 bp, Homo sapiens; identical to SEQ ID NO: 42567

SEQ ID NO: 230028 - DNA, 201 bp, Homo sapiens; identical to SEQ ID NO: 42569

SEQ ID NO: 230029 - DNA, 201 bp, Homo sapiens
tgacaacccgccttccctaacactcatgtcacagcggtagcggaccgtattctgggacaaatggaactcacgacattccaaagaaaggtcagccgcaagcraacttagcactggctacaccctcctcaattctggttggcgagatgcgctcttcccggaagtgacgcacaagtgccggcggaaggggaagtccaggagcat

SEQ ID NO: 230030 - DNA, 201 bp, Homo sapiens
tcctaatgctactcattaagaactttggcttttcatctggtgaaaaggggagttgtgcagggctctggattatatcgtttgacttactttttttttttttttaatagactttatcttttaaagcagtttaaggttcacagcaaaactgagagaaaggcacagagatctcccatataaagcctgcctccacccacggatagt

SEQ ID NO: 230031 - DNA, 201 bp, Homo sapiens
ctcctaatgctactcattaagaactttggcttttcatctggtgaaaaggggagttgtgcagggctctggattatatcgtttgacttactttttttttttttttaatagactttatcttttaaagcagtttaaggttcacagcaaaactgagagaaaggcacagagatctcccatataaagcctgcctccacccacggatag

SEQ ID NO: 230032 - DNA, 201 bp, Homo sapiens
agccagagcaaagctcctaatgctactcattaagaactttggcttttcatctggtgaaaaggggagttgtgcagggctctggattatatcgtttgacttactttttttttttttttaatagactttatcttttaaagcagtttaaggttcacagcaaaactgagagaaaggcacagagatctcccatataaagcctgcctc

SEQ ID NO: 230033 - DNA, 201 bp, Homo sapiens
tagccagagcaaagctcctaatgctactcattaagaactttggcttttcatctggtgaaaaggggagttgtgcagggctctggattatatcgtttgacttactttttttttttttttaatagactttatcttttaaagcagtttaaggttcacagcaaaactgagagaaaggcacagagatctcccatataaagcctgcct

SEQ ID NO: 230034 - DNA, 201 bp, Homo sapiens
tagcatgataaatagataaatattcttgtatgaattatgcataaagaggaaaagaaagaaaaggcaaggaacaattgccctttcaatttaagaagtgttastaagtgttgctgagctgatggagcactttggtgcaaagcccttgagccttagttgatggtctacatgaaccgcatgatctcaagaagagtaaaaatatat

SEQ ID NO: 230035 - DNA, 201 bp, Homo sapiens; identical to SEQ ID NO: 42588

SEQ ID NO: 230036 - DNA, 201 bp, Homo sapiens
aaaatttgaaagtcaaccagtagtaatgataatggatgataaaactaaacccacaattttctctatgatagatccactgagtgtgtgcagttgagcccaaycatgcaagcattcagtacattgcaggtgacaaagtactcgaattaaaactacttcaatcaaaatgataaaacagttttgtatattcaaaagtcagtttct

SEQ ID NO: 230037 - DNA, 201 bp, Homo sapiens
tccactgagtgtgtgcagttgagcccaaccatgcaagcattcagtacattgcaggtgacaaagtactcgaattaaaactacttcaatcaaaatgataaaayagttttgtatattcaaaagtcagtttctctgaaggaccattaaggttaatggaaacaatactttaacattaaagaataatatctatgagttttggaaata

SEQ ID NO: 230038 - DNA, 201 bp, Homo sapiens
ccttatccttaagtaaatgattattagtgcaaatgcaggcaatataacttagtcatgacaagagacagatgctcaagcccacagaaattaaaatcaaaaamttcaaatagctaaaattttatagccagccttattatttatatttccccaaagtaacaataaaactgctatgtttcagaaatcttcagaaagatagagttt

SEQ ID NO: 230039 - DNA, 201 bp, Homo sapiens
gacaggtcatttgttgagaaaagggttatgtagaaatagcatctgataatttgttggaaatattagcatatagatggctatgaaatgtgtgaagtattatyagaagaattctaataaaaaatttttgcagtgtaagtcgactatggttctatttcaaatgtagttaggttcttagccctaatggcaagcagaggctacact

SEQ ID NO: 230040 - DNA, 201 bp, Homo sapiens; identical to SEQ ID NO: 42575

SEQ ID NO: 230041 - DNA, 201 bp, Homo sapiens
gtagaaatagcatctgataatttgttggaaatattagcatatagatggctatgaaatgtgtgaagtattatcagaagaattctaataaaaaatttttgcartgtaagtcgactatggttctatttcaaatgtagttaggttcttagccctaatggcaagcagaggctacactaaatgtatttaacctaaagacaagttgat

SEQ ID NO: 230042 - DNA, 201 bp, Homo sapiens; identical to SEQ ID NO: 42576

SEQ ID NO: 230043 - DNA, 201 bp, Homo sapiens; identical to SEQ ID NO: 42578

SEQ ID NO: 230044 - DNA, 201 bp, Homo sapiens; identical to SEQ ID NO: 42579

SEQ ID NO: 230045 - DNA, 201 bp, Homo sapiens
tcctgtgtagtgatttggtgagaggaatcgttgctgcccccttcccctagcaccatatatgagtctcaagttttattattgcaataaaagtgctttatgcyggcttttctcaaaaaataaataaataaataaataaataaataaaataaaaatacagtatgcacctgttcaccaaaaatctatggaaataaaaaaattaaa

SEQ ID NO: 230046 - DNA, 201 bp, Homo sapiens
tgagaggaatcgttgctgcccccttcccctagcaccatatatgagtctcaagttttattattgcaataaaagtgctttatgctggcttttctcaaaaaatwaataaataaataaataaataaataaaataaaaatacagtatgcacctgttcaccaaaaatctatggaaataaaaaaattaaataaataactaaatataaa

SEQ ID NO: 230047 - DNA, 201 bp, Homo sapiens; identical to SEQ ID NO: 42577

SEQ ID NO: 230048 - DNA, 201 bp, Homo sapiens
gcttccacatggtgttgagcttgaggatgcacagaagtcaataattgaggtttgggaacctctgcctagatttcagaagatgtagggaaacgcctggatgyccgggcaagttttttgcaggggtggtgccctcataggaaacctctactagggcagtgcagaagggaaatacggggtcagagcccccacacagagtcccta

SEQ ID NO: 230049 - DNA, 201 bp, Homo sapiens; identical to SEQ ID NO: 42580

SEQ ID NO: 230050 - DNA, 201 bp, Homo sapiens; identical to SEQ ID NO: 42597

SEQ ID NO: 230051 - DNA, 201 bp, Homo sapiens
aggtcacatcagaagtgaaccgactgctggccgagctgcctgcctctgtgcatgccctcacaggcgtggacctgtctaaggtatgtgcctgcctagctgcrgtggggttgcccaggtagcccgtcggactggcccaggcaaagtggtcctgggctctggagccaaggtctcatggcatctcccatccttgcagatacccct

SEQ ID NO: 230052 - DNA, 201 bp, Homo sapiens; identical to SEQ ID NO: 42598

SEQ ID NO: 230053 - DNA, 201 bp, Homo sapiens
ccatctcatagatagggatgccaaggctgcagagctccttctggagcagccgctcacatttagcctctgccccaggtatcagttcctgtggccggacccgygaggcgtttaacctgctgcttcgggtgaaccatatcggtccctttctgctgacacatctgctgctgccttgcctgaaggcatgtgcccctagccgcgtgg

SEQ ID NO: 230054 - DNA, 201 bp, Homo sapiens
cagattccagccccccagggcctccaggtctgaaaaaaggaagggaggaggcacagccaccatcctgcctacctctgggtctggggcctttgtctgcctcrctccagcctagctgaagcgcctttgtcgtcactgacaggtgaagatcatgacggagaaggaactcctggccgtggcttgtgagcagtttctgggtaagaa

SEQ ID NO: 230055 - DNA, 201 bp, Homo sapiens
aaagtggtcctgggctctggagccaaggtctcatggcatctcccatccttgcagatacccctgatcaagaaggccactggtgtgcaggtgtgaggctcctrcaggcccactctcttcagcagccacccggccctccctccagcacccgttttaatcccacagaacaacgggaacgttactgactctggtgccttatctcga

SEQ ID NO: 230056 - DNA, 201 bp, Homo sapiens; identical to SEQ ID NO: 42603

SEQ ID NO: 230057 - DNA, 201 bp, Homo sapiens
gggctcccccagggtgaagcaggtcctcttggcacaggcagaggctgagaagatccgcaaaatcggggaggcggaagcggcagtcatcgaggcgatgggcraggcagaggctgagcggatgaagctcaaggcagaagcctaccagaaatacggggatgcagccaagatggccttggtgctagaggccctgccccaggtgag

SEQ ID NO: 230058 - DNA, 201 bp, Homo sapiens
cccactgatcctaactggcctgggctcccccagggtgaagcaggtcctcttggcacaggcagaggctgagaagatccgcaaaatcggggaggcggaagcgrcagtcatcgaggcgatgggcaaggcagaggctgagcggatgaagctcaaggcagaagcctaccagaaatacggggatgcagccaagatggccttggtgct

SEQ ID NO: 230059 - DNA, 201 bp, Homo sapiens; identical to SEQ ID NO: 42606

SEQ ID NO: 230060 - DNA, 201 bp, Homo sapiens
atctgagctgcagcctcccttcttccctccccactacccttcctccctccctccctctcccctatttccctctctccttccccagaagagagcttggtggrttcctgtctgagctgggtcaagaatcctctcaggcccaaggatgctagtgttaggggctcgaatgaaggcaacttttgcacatctgcatggccagtgccc

SEQ ID NO: 230061 - DNA, 201 bp, Homo sapiens
ttggcaggggtgctgtgaatgtccagtggtcccagctccccaccctggccctgccccagcctgtgtagctcttcctgcatgtggatgctgcatgtctggtytggggcttggatgttgcactgccccactgcctgtcccttctggtaaaataaagaactcttaatgcccacccctgcattgtgtcttctgtgaggagagaga

SEQ ID NO: 230062 - DNA, 201 bp, Homo sapiens
atgttgcccagtctggtctcaaactcctgggctcaagtgatcctcctgctccgcctcccgagtagctgtgactgtaaatacacaccactgtgcctagcccractcctttctttcttcctgcctacagggcctgtgaactcggagctgttcctgcgccatgttcctggatggctgcgcccacttttgcgcccattggcttgg

SEQ ID NO: 230063 - DNA, 201 bp, Homo sapiens
gaagctcaaggcagaagcctaccagaaatacggggatgcagccaagatggccttggtgctagaggccctgccccaggtgaggcttccacccaagcgggtcctagggttcaagtgtccttgcttgacaagctgggcaagtgccagaacttctctgggccttgcgagtaacacagggacagatggctagaagggttaaatgag

SEQ ID NO: 230064 - DNA, 201 bp, Homo sapiens
acacccacccaagactcctgcaatgcaaaaatgtacacaaaccaagcccgggtgttttctatactctaccagaaacccttcaactacaatctttgcatgaratgaagaaaaccttttgactgttttttaaaaatcctttttcttttctcaagttctagggggcatttgcacatatatttgtactcaacatttcatgggaaa

SEQ ID NO: 230065 - DNA, 201 bp, Homo sapiens
tgacttcaaacgcctggaccgcccagtggtgggctggcggcaggagctgcgggcatatgctgacactaagctggctaatgtactgtttgcccgggagctcsccaaccagcttgaggccactggcgtcacctgctatgcagcccacccaggtgaggtctggttctttggcttccgattcccctctcctttccttgccccatc

SEQ ID NO: 230066 - DNA, 201 bp, Homo sapiens
gtgggtggggagagaaagccttaccctgccgcagctcagtgttggatgtgagtttggaaagatgagtcatccagcgggattttctccaggccatgagccaraggtccagattttgttggtttatgtttggatcacaggatctgagtttctgaatgatcctattcctatgtttgtcttgtagtgcaaagaaaggaggtacag

SEQ ID NO: 230067 - DNA, 201 bp, Homo sapiens
gaccgaggtgggaggagaacttgaggcccagagtttgagaccggcttgtgcaacatagtgatgtaacaggacgagctgcagacaaaacttctcagatactragttgtagaaggaagggctttattcagctgggagcatcggcaagctactgccttaaaatccgagctcctcgagtgcccaatttctgtcccttttaagggc

SEQ ID NO: 230068 - DNA, 201 bp, Homo sapiens; identical to SEQ ID NO: 42614

SEQ ID NO: 230069 - DNA, 201 bp, Homo sapiens; identical to SEQ ID NO: 42593

SEQ ID NO: 230070 - DNA, 201 bp, Homo sapiens; identical to SEQ ID NO: 42594

SEQ ID NO: 230071 - DNA, 201 bp, Homo sapiens; identical to SEQ ID NO: 42595

SEQ ID NO: 230072 - DNA, 201 bp, Homo sapiens; identical to SEQ ID NO: 42596

SEQ ID NO: 230073 - DNA, 201 bp, Homo sapiens
aaaggaagggaggaggcacagccaccatcctgcctacctctgggtctggggcctttgtctgcctcgctccagcctagctgaagcgcctttgtcgtcactgrcaggtgaagatcatgacggagaaggaactcctggccgtggcttgtgagcagtttctgggtaagaatgtgcaggacatcaaaaacgtcgtcctgcagaccc

SEQ ID NO: 230074 - DNA, 201 bp, Homo sapiens
ggttcaaggatgggaagctcaggggtgatgggaccatgatgactcaggacctctactcactcaccttccccttctgccccttttgtccccaggaagctgaktgcaagaaggagatgctggatgtgaagttcatggcagacaccaagattgctgactctaagcgagccttcgagctgcaaaagtcagccttcagtgaggagg

SEQ ID NO: 230075 - DNA, 201 bp, Homo sapiens
acttctccccctccactgtgtcttcttactcactgtgaagtgaggataaccccatgtcccctgtgggactgctgttgggaagactaaatagataaaggagkctccagtgcctggtgtagtgcttgggcatagacggcatcctggtttgttccctcccacttacagatgggagccggtggcctttccctggccagagccgga

SEQ ID NO: 230076 - DNA, 201 bp, Homo sapiens
ccccatgtcccctgtgggactgctgttgggaagactaaatagataaaggaggctccagtgcctggtgtagtgcttgggcatagacggcatcctggtttgtyccctcccacttacagatgggagccggtggcctttccctggccagagccggaaggtcaggccaccccactccgttccaatgtctcccaccccgacagcccc

SEQ ID NO: 230077 - DNA, 201 bp, Homo sapiens; identical to SEQ ID NO: 42605

SEQ ID NO: 230078 - DNA, 201 bp, Homo sapiens
taacaagagagttcactacaagaatctcaggaattgccgggcgcagtggctcacgcctgtaatcccagcactttgggaagctgaggcgggcagatcatgargttaggagatcgtgaccatcctggctaacacggtgaaaccccgtctctactaaaaatacaaaaaattagctgggcgtggtggcgggcacctgtagtccca

SEQ ID NO: 230079 - DNA, 201 bp, Homo sapiens; identical to SEQ ID NO: 42607

SEQ ID NO: 230080 - DNA, 201 bp, Homo sapiens
gctgcagtgagccgtgtactccagcagtgctgtactcgtgtacagtgtactccagcctgggcaacagaatgagaccctgtctcaaaaaaaaaaaaaaaaaraaatgataacactctctggtttttcccagatcacatatttcctttgaatactgtttcctgtacatttttttgcactgcaagttaactgcctgtccagttt

SEQ ID NO: 230081 - DNA, 201 bp, Homo sapiens
gcgtcttggcaggggtgctgtgaatgtccagtggtcccagctccccaccctggccctgccccagcctgtgtagctcttcctgcatgtggatgctgcatgtytggtctggggcttggatgttgcactgccccactgcctgtcccttctggtaaaataaagaactcttaatgcccacccctgcattgtgtcttctgtgaggag

SEQ ID NO: 230082 - DNA, 201 bp, Homo sapiens
aatgataatgctcggccaggcgcggcggctcatgcctgtaatcccagcactttgagaggccaacgcatgtggatcgcttgagcccaggaattcgagaacascctgggcaacatggtgaaaccttgtctccacaaaaaatacaaaaattagctgggcatgggggcacacacctgcggttccagctactcgagaagctaaggt

SEQ ID NO: 230083 - DNA, 201 bp, Homo sapiens
ttgagcccgtgagttcaaagctgcagtgagctgtgattacaccactgcattcagcctgggtgacagagcacaatactgtctcaaaaaaaaaaaaaaaaaaagaaggtggaggaaggccaggaagggcaggggatgctcctgagagggcagagtggtgggctgtgtcctggggaagggctaagggagtggaacagaggttat

SEQ ID NO: 230084 - DNA, 201 bp, Homo sapiens
cgcttgagcccgtgagttcaaagctgcagtgagctgtgattacaccactgcattcagcctgggtgacagagcacaatactgtctcaaaaaaaaaaaaaaaraaagaaggtggaggaaggccaggaagggcaggggatgctcctgagagggcagagtggtgggctgtgtcctggggaagggctaagggagtggaacagaggt

SEQ ID NO: 230085 - DNA, 201 bp, Homo sapiens; identical to SEQ ID NO: 42611

SEQ ID NO: 230086 - DNA, 201 bp, Homo sapiens; identical to SEQ ID NO: 42612

SEQ ID NO: 230087 - DNA, 201 bp, Homo sapiens; identical to SEQ ID NO: 42613

SEQ ID NO: 230088 - DNA, 201 bp, Homo sapiens; identical to SEQ ID NO: 42808

SEQ ID NO: 230089 - DNA, 201 bp, Homo sapiens; identical to SEQ ID NO: 42809

SEQ ID NO: 230090 - DNA, 201 bp, Homo sapiens; identical to SEQ ID NO: 42810

SEQ ID NO: 230091 - DNA, 201 bp, Homo sapiens; identical to SEQ ID NO: 42811

SEQ ID NO: 230092 - DNA, 201 bp, Homo sapiens; identical to SEQ ID NO: 42812

SEQ ID NO: 230093 - DNA, 201 bp, Homo sapiens
tttttaatccatgtagaattcatgcatgcatgtagaactctgataaaaaaataataaaatacatttaaaaaccaacctatggatatttaaatcatccagayaagaaatcctaataacttggactaaggtaatgagagcagagatagtggagaatgcatggatttgatatagaggatgaggaataatgagttgtttgttaag

SEQ ID NO: 230094 - DNA, 201 bp, Homo sapiens; identical to SEQ ID NO: 42813

SEQ ID NO: 230095 - DNA, 201 bp, Homo sapiens
cagcttggagagtaagtcaatagcatttactcatcaccttgatgaccttgatgcattatgggtttaataaaggatattttcggccgggcgtggtggctcaygcctgtaatcccagcactttgggaggccagggcgggcagatcacgaagtcaggagatcgagaccatcctggctaacactgtgaaaccccgtctctactaa

SEQ ID NO: 230096 - DNA, 201 bp, Homo sapiens; identical to SEQ ID NO: 42814

SEQ ID NO: 230097 - DNA, 201 bp, Homo sapiens; identical to SEQ ID NO: 42816

SEQ ID NO: 230098 - DNA, 201 bp, Homo sapiens; identical to SEQ ID NO: 42815

SEQ ID NO: 230099 - DNA, 201 bp, Homo sapiens; identical to SEQ ID NO: 42818

SEQ ID NO: 230100 - DNA, 201 bp, Homo sapiens; identical to SEQ ID NO: 42817

SEQ ID NO: 230101 - DNA, 201 bp, Homo sapiens; identical to SEQ ID NO: 42819

SEQ ID NO: 230102 - DNA, 201 bp, Homo sapiens
catttgctccataacattctctgctaaaatgctgttgtcttgagagctctcatgctgtgttgttaataacagtaggatcttaaatgaagccattacctccrctctataaatcacaattgtttttaatcaaagaacattaaaatgagctagttgccactgagggattattcagtttaaaagaagcaactttacacagattta

SEQ ID NO: 230103 - DNA, 201 bp, Homo sapiens
gcagaggttgtagtgagccaagtttgtgccactgcacttcagcctgggcaacagagcaagaccctgtcctaaaaaataaatagagctggtcctcctgttgkgctgcagggacaaccccacccacctgcccaccagggattttgcccctgcagttatcccctttccttcttctattactaatccttcctttttatttcacct

SEQ ID NO: 230104 - DNA, 201 bp, Homo sapiens
ggggtgctaataatgctctttcgagggagtcatgggcatgaccccccgctgtctaccttctctttgcacctgagcagcccagcgttgccagagaaacacayaccagtggactggtttccttgctaagtgcaaatgtcacagggacacatggcactctccagggctcccacccagcctgctccttcttagacttatccactg

SEQ ID NO: 230105 - DNA, 201 bp, Homo sapiens
agtccctgagtacaggtgggcttgggggcagcatgtgtcaagctcagctgtcttgaatgtgctgagtggccaactgagcaaggacagaaagtagaggttgytggtgaccttgaccagccctctgctgttctagtctcttgatctgcctaccttgacatcagccatcagcctccctttctgtgtttccttccctccaagcct

SEQ ID NO: 230106 - DNA, 201 bp, Homo sapiens
gatcatggtggacagtagaggttgaaaagtggattgagaggtcgaggtgatattaacaggactcactgagggattggacagtgggaacaggggcagtgagrgaagtaggagaagttacaggacagccccgtttctagcctactttctggtggtatggacagagaacaggctttgggagaagtgagttggcccaaaaaggta

SEQ ID NO: 230107 - DNA, 201 bp, Homo sapiens
tctcctcctgggttgctggatagtgtttaccagagtgggctgcagcctgccttcaccaccgcctcccatccccacattttgccagcacaggttggagcctmtgttagatgcagcacactgttccagggaaacggagggtaaacgagatatgcgcggctgcaaggaggaaggaacagggctgagacagaataccaggaaggg

SEQ ID NO: 230108 - DNA, 201 bp, Homo sapiens
ggactttgagtcctctcatctctcctcatcgccctttccaggctagcctgtggtcgtcaggctttgggatgaagctggaggctgtcactccattcctgggsaagtatcgcccctttgtgggtcgctgttgccagacctgcacccccaagagctgggtgagtgatggtagggccaggccccaagcaggaagcttggttctgg

SEQ ID NO: 230109 - DNA, 201 bp, Homo sapiens
tggcatttctgggatcctgaatgggatgacaatgacactaggtaggggtgtttgagaggggtggctggggcaaggcttctagagcatgagctttgcctggracccttccttaaggaggagagtgaagactggaggctgtgccctgctgcagcctcatagcactccttctaaccccctcacagggtgcagaacctcctctca

SEQ ID NO: 230110 - DNA, 201 bp, Homo sapiens
tgactggttcgtggttcttctaggctctcatggccaccatgttggaaggcagatgccaaactcagccaaggagcagccccagtggccgagaggtaatgtgkctcctcccattcctcaaatcctctctgccctgccaccccttctgctgtgcccctcactcctagagcctccattgctccatctttccctctctcctgccaa

SEQ ID NO: 230111 - DNA, 201 bp, Homo sapiens
tgcacaccgggcagactgctggacatacagagatgagtccctgccctcaggacactctgaccacgtagggagatgaaaccatagccctggaggagggcttygaatggctctttgccgggcaggcttgggctggggaacccaaggaggagagggagggcttagagggtgttccagaagcatcgtggacttagaaccctgggc

SEQ ID NO: 230112 - DNA, 201 bp, Homo sapiens
tgcttccgtagagctagcacagacctaatggggttagatttgggggttgggggtggtctgcagctaggggacagacaccctccttgcaaagcgggcgtggrtttgtagccttcctgtaccatgtgtctgtgaacagggctatgcaacattttcaagataacagagtgcctttgggatgagcctcccgtggcccccgagacc

SEQ ID NO: 230113 - DNA, 201 bp, Homo sapiens
gtgtgtgtgtatatatatgtatatatgtattatatgtatatatgtgtgtgtatatatgtatatatgtattatatatgtatatatgtgtgtgtatatatatrtatatatgtattatatatgtatatatgtgtgtgtatatatatgtgtctatgagttgaatttgccctcggggtgccagtttgcatcctctgctgtaggagt

SEQ ID NO: 230114 - DNA, 201 bp, Homo sapiens
gtgtgtgtgtgtatatatatgtatatatgtattatatgtatatatgtgtgtgtatatatgtatatatgtattatatatgtatatatgtgtgtgtatatatrtgtatatatgtattatatatgtatatatgtgtgtgtatatatatgtgtctatgagttgaatttgccctcggggtgccagtttgcatcctctgctgtagga

SEQ ID NO: 230115 - DNA, 201 bp, Homo sapiens; identical to SEQ ID NO: 42821

SEQ ID NO: 230116 - DNA, 201 bp, Homo sapiens; identical to SEQ ID NO: 42826

SEQ ID NO: 230117 - DNA, 201 bp, Homo sapiens
atcagccctaagggatgaggagaaaggccttagggagaaaattctggcactgccatgctccctttttcattttccagggttcagggctctatctcaaaggygaggagcagaaactcctcagccagattacctgattcttgagttttgcacaccccactctccctacaagcacccagagcaagctgtgctgcaatcccaggg

SEQ ID NO: 230118 - DNA, 201 bp, Homo sapiens
ctgaccaggttgtatgtaggaattaagagtcaggcaatttcaacactttaatctagaagaatggtgtctagaggatggaggtgttcatcctactggtgggrttgttgtcaagaggcatacctgtgacacttaacactgagagtatcatttgagtcttgaaaaaggtgggggccttcagtcctcatctttcctttgatcccc

SEQ ID NO: 230119 - DNA, 201 bp, Homo sapiens
cccctctgcaccccaacctcagcctgatgttcgcccaccggcccagatcctggcgggaactgcccctgcgactagctgactttggggctctacaccgggcygaagcctctggtggtctggggggactgacccgactgcggtgcttccagcaggatgacgctcacatcttctgtacaacagatcaggtggcctttccctggc

SEQ ID NO: 230120 - DNA, 201 bp, Homo sapiens
ggcgaggtggcgggcgcctgtagtcccagctacttgggaggctgaggcaggagaatggcgtgaaccctggggggtggagcctgcagtgagccaagatcacrccactgcactccagcctgggcgacagcgagactccgtctcaaaaaaagaaaaaaaaaattagtcgagtgtggtggtggtggcctgtagtcccagctactt

SEQ ID NO: 230121 - DNA, 201 bp, Homo sapiens
gttcgagaccagcctggccaacatggtgaaaccctgtctctactaaaaatacacaaattagctgggtgtgctggcctacgcctgtaatcccagctacaaaraaggctgaggcaggagagtcacttgaactctgccaggaggcagaggttgcagtgagctgagattgtgccactgcattccagcctgggccacggagcgaga

SEQ ID NO: 230122 - DNA, 201 bp, Homo sapiens
cgcgatctcggctcactgcatctctgcctcccgggttcaaacaattcttctgcctcagcctcccgagtagctggaactacaggcatgcaccaccatgcctrgctaatttttatatttttagtagagacggggtttcaccatattgtccaggctggtctcgaactcctgaccacgtgatccacccaccttggcctcccaaag

SEQ ID NO: 230123 - DNA, 201 bp, Homo sapiens
gaggctgaggtggaaggatcacttgagcctgggaggttgaggctgtggtgagccatgatcttaaccactgcacccaacttgtgtgacacagcaagacactytctcaaaaaaaaacaaaaagaaaaagaagaaacaacttactttgttacttgttagctttcataaattcaagttttacttaatcgccctcattactattgt

SEQ ID NO: 230124 - DNA, 201 bp, Homo sapiens
cggctttcctaccagcttttgtgaggaagagctcagagatctaggggttaagggagaagtttatgaacttgtgaaccccttttttgtgaacccaggtgttytggcactccagcacccatgtcctgggggcagcagctgaacaattcctaggtgctgttctctgcagaggtccaagtacagaatatggcttttaccatgatt

SEQ ID NO: 230125 - DNA, 201 bp, Homo sapiens
tccatctcagcctcccgaagtgctgggattacaggcatgagccaccaaacccggcctgagatttgttttatctgtattagtttctgcatcagagtctctgkcctttcattggggaaagaaatgaaagcttctgttgctctggtaactcatttcacctttgcaagtttacagttgctgagagatgagcaactttctccccac

SEQ ID NO: 230126 - DNA, 201 bp, Homo sapiens
ccgattctgtgaggccgagttctcggtcaagacccgaccccactggtgctgcacgcggcagggggaggctcggttctcctgcttccaggaggaagctcccyagccacactaccagctccgggcctgccccagccatcagcctgatatttcctcgggtcttgagctgcctttccctcctggggtgcccacattggacaatat

SEQ ID NO: 230127 - DNA, 201 bp, Homo sapiens
ccagcctcacgccactcctcctctccctggtcctccgagtccccagaaaaggactcgtatctaaactcgttatctaattctcgagttagcggtctgggggrctctgagctcgaaggacccccagcctagggtcttgtatcacccaatccccttaaaaagtaggaattcggacgaagtccacttaaccatcccaaagtgcca

SEQ ID NO: 230128 - DNA, 201 bp, Homo sapiens
ctgccacctgaggcgcttccgctctgtgccacgcaacctgccagctactgaccccctacaaagggagctgctggcactgatccagctggagagggagttcyagcgctgctgccgccaggggaacaatcacacctgtacatggaaggccgtaagtgggcgtcccagcctccctgagagcctgtttgcctgcctgcccatctt

SEQ ID NO: 230129 - DNA, 201 bp, Homo sapiens
aattatctgaggaacgtggctctagtgtctggagacactgagaacgccaagggccagggggagcagggctcaactggaggaacaaatatcagctccacctytgagcccaaggaagaatgagtcaccccagagccctagagggtcagatggggggaaccccaccctgccccacccatctgaacactcattacactaaacacc

SEQ ID NO: 230130 - DNA, 201 bp, Homo sapiens
aagctggatgggtcatacagggaagggttgtagagagagggggcgtggtccaggaggaagatgaacaccatttgacaggcacagggaaaatacctttagtraagggcatgctttttatgaaaataccgttctgcatggtggctcacgcctataatcccagcactttgggaagccgaggtgggtggaccacctgaggtcggg

SEQ ID NO: 230131 - DNA, 201 bp, Homo sapiens
ccttccagttactctgaccttccatgtctgtaccctcctctccaggctgagtatgcccatcgtggtttctccgaggtgaaaactcccacactgttttctaygaagctctgggaacagtcagggcactgggagcattatcaggaagacatgtttgccgtgcagcccccaggctctgacaggcctcccagctcccagagtgac

SEQ ID NO: 230132 - DNA, 201 bp, Homo sapiens
acaggtcaactgcttcaacatcaattatctgaggaacgtggctctagtgtctggagacactgagaacgccaagggccagggggagcagggctcaactggargaacaaatatcagctccacctctgagcccaaggaagaatgagtcaccccagagccctagagggtcagatggggggaaccccaccctgccccacccatctg

SEQ ID NO: 230133 - DNA, 201 bp, Homo sapiens
ggccttgggtaaatcttacttattttccccatctataaaatgaggctattaattcctttttgtcctaccagtaaattcacctcataaagataatgaaaacyaggccaggcatggtggctcacacctgtaatcccagcactttggggagggtgaggcaggcggatcacttgaggtcaggagttcgagaccagcctggccaac

SEQ ID NO: 230134 - DNA, 201 bp, Homo sapiens
ctttgggaggctgaggcgagtgaatcacgaggtccagagatcgagaccatcctggctaacaccgtgaaaccccgtctctactaaaaatacaaaaaattagycaggtgtggccgggcgcagtggctcacgcctgtaatcccatcactttgggaggctgaggcaggcggatcatgaggtcaggagatcgagaccatcctggct

SEQ ID NO: 230135 - DNA, 201 bp, Homo sapiens
acatgatgaaggtagtagcccgggatgagggtaggttaaagggtgggatggcacaggtaatggaggatagtggttctggatagtgcttctggcttatctcrtgccttcccatctgtttcctgtagattgacgtgcacctccacgatgccctgggccggccacatcagtgtgggacaattcagcttgacttccaactgcccc

SEQ ID NO: 230136 - DNA, 201 bp, Homo sapiens
gtcctggggatgaacaggtcaactgcttcaacatcaattatctgaggaacgtggctctagtgtctggagacactgagaacgccaagggccagggggagcakggctcaactggaggaacaaatatcagctccacctctgagcccaaggaagaatgagtcaccccagagccctagagggtcagatggggggaaccccaccctg

SEQ ID NO: 230137 - DNA, 201 bp, Homo sapiens
ctcccctcttgctctagtgggaggaagcaatgagccgattctgtgaggccgagttctcggtcaagacccgaccccactggtgctgcacgcggcagggggargctcggttctcctgcttccaggaggaagctccccagccacactaccagctccgggcctgccccagccatcagcctgatatttcctcgggtcttgagctgc

SEQ ID NO: 230138 - DNA, 201 bp, Homo sapiens
aaccccagttcatgagttggcagatcccctctccacagaaggcagcctgtagatggagaaactgaggcacaaactaggggctcaaacacctcttgctcctkgattctctgaatcagtttctcttgaaggtcataagaatgttctcctctaatcagtcccattcttctcaatcctctgaggaggcttcagggtgactttggg

SEQ ID NO: 230139 - DNA, 201 bp, Homo sapiens
tggatcacctgaggtcaggagttcaagaccagcctggccaacattgtgaaaccccatctctactaaaaatacaaaaaaatagccaggtgtggtggcgggcrcctgtaatcccagctactcgggaggctgaggcaggagaatcgattgaatctgggagtcggaggttgcagtgagccaagatcgtgccattgcactccagcc

SEQ ID NO: 230140 - DNA, 201 bp, Homo sapiens
ctactaaaaatacaaaaaattagccgggcatggtggcacacgcctgtaatcccagctactcaggaggctgaggcaggagaatcgcttgaacccgggaggtrgaggttgcagtgagctgagattgcgccactgcacccccctaggcgacagagcgagactctgtctctaaataaataaataaataaataaatacaaactgga

SEQ ID NO: 230141 - DNA, 201 bp, Homo sapiens
agtgggctgatcctcccctcttgctctagtgggaggaagcaatgagccgattctgtgaggccgagttctcggtcaagacccgaccccactggtgctgcacrcggcagggggaggctcggttctcctgcttccaggaggaagctccccagccacactaccagctccgggcctgccccagccatcagcctgatatttcctcgg

SEQ ID NO: 230142 - DNA, 201 bp, Homo sapiens
cagctactgaccccctacaaagggagctgctggcactgatccagctggagagggagttccagcgctgctgccgccaggggaacaatcacacctgtacatgraaggccgtaagtgggcgtcccagcctccctgagagcctgtttgcctgcctgcccatcttcgacctctgatcctgccagtccatccatccatgtacccccc

SEQ ID NO: 230143 - DNA, 201 bp, Homo sapiens
ccctccacaccctctcctgccagagctgaatatttcttaaaaactggaaggtgatcttgggtacacaattcgtgatacttccaccattccatccacccccmcctttttcctttcaaggcaggcgggtgccctggagcgtccagtcctcattcaccgagcagtgctcggttctgtggaaagactgttgggagtgctggcaga

SEQ ID NO: 230144 - DNA, 201 bp, Homo sapiens
cagcctcctgagtagctgggattacagacacacgccaccatgcctggctagttttgtatgttttagcagagacagggtttcaccatgttggccagactggyctcgaactcctgacctcagatgatccgcctgccttgacctcctgaagtgttggggttacaggcatgagctgctgtgcccagcctttttttttaagcttgt

SEQ ID NO: 230145 - DNA, 201 bp, Homo sapiens
ccagaaaagtcttcactctgacctggcctgctccccatctctaagttcctattatgccttctccgggccacaagcttctggcatttccagatgtacacatytgtcagtcacaaggaatccagctgtgcaaggcaggcttgcactctctctgggccccaggaggggaacgagggagagagcagtagaagctgatgaaagggg

SEQ ID NO: 230146 - DNA, 201 bp, Homo sapiens
catgcatagagctttttctccagctgtaatatctgttacctgatatcctatttatattttctctgagtttgtctgtctttgcctataactctagatttctsttgaaggacaggaccttacccgctagccaacaggtgtgtcacccaggtgattgatgcacctcataggatgcaacccaaccaattctcctctttccaggac

SEQ ID NO: 230147 - DNA, 201 bp, Homo sapiens
ttctcctccaccccagattctttcaatcctcccagctcatccagcctttgtgggttccttcacatgtccccgcttcccactgttttccccattccaggaaygccagctccatttggggaccagagccatccagaacctgagtcctggaatgcagcccagcactgccaacaggaccggtcccaagggggctggggccaccgg

SEQ ID NO: 230148 - DNA, 201 bp, Homo sapiens
cagctccatttggggaccagagccatccagaacctgagtcctggaatgcagcccagcactgccaacaggaccggtcccaagggggctggggccaccggctsgatggcttcccccctgggcggccttctccagacaatctgaaccaaatctgccttcctaaccgtcagcatgtggtatatggtccctggaacctaccacagt

SEQ ID NO: 230149 - DNA, 201 bp, Homo sapiens; identical to SEQ ID NO: 42834

SEQ ID NO: 230150 - DNA, 201 bp, Homo sapiens
tctaagggtcagagtggttggggggaggcggggcagtgtgaaggccacaccactcctgccaccttccacttgctctaatacccccttcagacacgcgcgcrcacacacacacacacacacacacacacacagtttctctctgtggggttctcattgtttgtctttctctgcttgactctaatgtctctgacacacacacac

SEQ ID NO: 230151 - DNA, 201 bp, Homo sapiens
ctccacaccctctcctgccagagctgaatatttcttaaaaactggaaggtgatcttgggtacacaattcgtgatacttccaccattccatccacccccccctttttcctttcaaggcaggcgggtgccctggagcgtccagtcctcattcaccgagcagtgctcggttctgtggaaagactgttgggagtgctggcagaaa

SEQ ID NO: 230152 - DNA, 201 bp, Homo sapiens
tcccaacctcaggtgatctgctcgccttggcttcccaaagtggtgggattattacaggcatgagccatcttgcccagcgtttttttcgtttttgtttttttccccgagacagactcttgctctgttgccagactgaagtgcactggcggatcttggctcactgcaacctccacctcccaggttcaagcgattctcttgcct

SEQ ID NO: 230153 - DNA, 201 bp, Homo sapiens
cttcctttcccgaaaacttccttttgggacacctttgggaaaagcaaaatcatgatatcccaaccccatctgatgccagaagatgcccaaagaccctaacycctgcccctttcacaccaacatagtaaacatattcctgggctgatccacaacatgactgcccgctgctgtgacctgccatttccagaacaggcctgctgt

SEQ ID NO: 230154 - DNA, 201 bp, Homo sapiens
gaagcctctggtggtctggggggactgacccgactgcggtgcttccagcaggatgacgctcacatcttctgtacaacagatcaggtggcctttccctggcwccaccaaagcttttctaaaccacctttctttctccctatgaacctgcaaacccctgatctttatttgccccctgtatgtactataattcagctacattct

SEQ ID NO: 230155 - DNA, 201 bp, Homo sapiens
tgatccctgctccttggtgccctcacccctatcttgcagtgggtccccctctccctcaggaagctgtccccctccaaaaagagctgccctctctccagcaycccaatgaacagaaggaaggtaagcagctccctctcttctttacccacctttacctcatggccttcccccagagcatgggcttcggggcagacaagacgg

SEQ ID NO: 230156 - DNA, 201 bp, Homo sapiens
cttgtgttgccgccaccctcccagccctactcgggatgagtgctttgcccgtcgggctccttaccccaactatgaccgggacatcttgaccattgacatcrgtcgagtcacccccaacctcatgggccacctctgtggaaaccaaagagttctcaccaagcagtaagttgcctagtccttccccactctcttcctttcccg

SEQ ID NO: 230157 - DNA, 201 bp, Homo sapiens
tgtgtttgtcacctgagtttgttcatcttgagcttcgtactacacttctggcctcctccactcatgatccacacacgcatctgtctaccatccatccatcsgtccagctctggcctcacctgaccttctccatccactgttccagctcatctcccggcaccagcttggaacctcatccaggcttccacccgtccaccttcc

SEQ ID NO: 230158 - DNA, 201 bp, Homo sapiens
ctctagtgtctggagacactgagaacgccaagggccagggggagcagggctcaactggaggaacaaatatcagctccacctctgagcccaaggaagaatgrgtcaccccagagccctagagggtcagatggggggaaccccaccctgccccacccatctgaacactcattacactaaacacctcttggatttggtgtcctc

SEQ ID NO: 230159 - DNA, 201 bp, Homo sapiens
tcaagcctatgaactgccctgcacactggtaagctgggagctagggttacaatcaggttgctaaatattaaataatagaaagcaccttggggccgggcacrgtggctcacgcctgtaatcccaacactttgggaggccgaggcgggcggatcacctgaggtcgggagtttgagaccagcctgaccaacatggagaaaccct

SEQ ID NO: 230160 - DNA, 201 bp, Homo sapiens
tggtaagctgggagctagggttacaatcaggttgctaaatattaaataatagaaagcaccttggggccgggcacagtggctcacgcctgtaatcccaacamtttgggaggccgaggcgggcggatcacctgaggtcgggagtttgagaccagcctgaccaacatggagaaaccctgtctctactaaaaatacaaaaaatta

SEQ ID NO: 230161 - DNA, 201 bp, Homo sapiens
gcgtgagccaccgcgcccggctcattagtactgttaaaggagagagcaggcagaggcttttggatttcatgtggccaggaatgggatatggtatagaagaytgacttttctagcagctgtataggatattgataaatggaggaatagactgacatttgaccagagcttatggttattcctctaagcagtcattgattagaa

SEQ ID NO: 230162 - DNA, 201 bp, Homo sapiens
accaacatggagaaaccctgtctctactaaaaatacaaaaaattagccgggcacggtggcgggcgcctgtagtcccagctactcaggaggctgaggcaggmtaatggcgtgaacccaggaggtggagcttgcagtgagccgagatcgcgccactgcactccagcctgggtgacacagcgagactccatctcaaaaaaaaaa

SEQ ID NO: 230163 - DNA, 201 bp, Homo sapiens
ccaacatggagaaaccctgtctctactaaaaatacaaaaaattagccgggcacggtggcgggcgcctgtagtcccagctactcaggaggctgaggcaggckaatggcgtgaacccaggaggtggagcttgcagtgagccgagatcgcgccactgcactccagcctgggtgacacagcgagactccatctcaaaaaaaaaaa

SEQ ID NO: 230164 - DNA, 201 bp, Homo sapiens
agtgctcggttctgtggaaagactgttgggagtgctggcagaaagctgcggggggaaatggtgagacctctgacctggatttctgttctggccccaaaccrgatagttatgctccagatcctgtcccccttcatatgccagcctctttccttctcaagtctgctccatacaagcacacttctggccagagccagagtgact

SEQ ID NO: 230165 - DNA, 201 bp, Homo sapiens
gccgggcacggtggcgggcgcctgtagtcccagctactcaggaggctgaggcaggctaatggcgtgaacccaggaggtggagcttgcagtgagccgagatygcgccactgcactccagcctgggtgacacagcgagactccatctcaaaaaaaaaaaaaaaaagaaagcaccttggaaagagtattgggacaccgatttga

SEQ ID NO: 230166 - DNA, 201 bp, Homo sapiens
agcgataaggcctgcggggactgaagcacttccttgtctcctcaggatgagcaggactggtcatttagtattagcagacacagctgaatacttcctttctrtgaaccatatctgggctctgctcccacccttcctaaagatttaggtctctcaagtttctgcagagcaaaagaaactgttccatgtgggtgaatttgccct

SEQ ID NO: 230167 - DNA, 201 bp, Homo sapiens
tagagtggcagctgtagtaaccaatagacacggactttgttggaccagaagccaatgaagaattacgtggaggagaagcggcgataatctgtttgaggatrtaggcactggtgtgaaggaacatggccctgtatcagaggtggcggtgtctccggctccaaggtttacaggcttgcaggctacacacggtgcgtgaggcac

SEQ ID NO: 230168 - DNA, 201 bp, Homo sapiens
aaattttgctctgtcgcccaggttggagtgcagtggcgcaatctcggctcactgcaacctctgcctgccaggttcaagcgattctcctgccccagcctccygagtagctgggattacaggcatgtaccaccacgcccggctaatttttgtatttttagtagagatgggatttcaccatgttggccaggctggtcttgaact

SEQ ID NO: 230169 - DNA, 201 bp, Homo sapiens
gtccttctgcctttggccctaaaaactaaaccctccacaccctctcctgccagagctgaatatttcttaaaaactggaaggtgatcttgggtacacaattygtgatacttccaccattccatccacccccccctttttcctttcaaggcaggcgggtgccctggagcgtccagtcctcattcaccgagcagtgctcggttc

SEQ ID NO: 230170 - DNA, 201 bp, Homo sapiens
gtgcatggaataagtccttctgcctttggccctaaaaactaaaccctccacaccctctcctgccagagctgaatatttcttaaaaactggaaggtgatctygggtacacaattcgtgatacttccaccattccatccacccccccctttttcctttcaaggcaggcgggtgccctggagcgtccagtcctcattcaccgag

SEQ ID NO: 230171 - DNA, 201 bp, Homo sapiens
gagctatgatcaaggcaccacactccagcttgggtaacagaacaaaaccctgtctcaataaaataaataaataaaaagatagagaaaggaaattactcaaraactgttatatagctaaaatcttttttttgtttgttttgttttatttatttatttttatatatttttttgagatcaaattttgctctgtcgcccaggttg

SEQ ID NO: 230172 - DNA, 201 bp, Homo sapiens
agatacaaagaatttttttttttgagacagtctcactctgtcacccaggctaaaatgcagtggtgtgatctcagctcactgcaacctccagctccctggttcaagcaattcccctgcctcagcctcccgagtagctgggattacaggtgtacgccaccacacccggctaatttttttgtatttttaatagagatggggttt

SEQ ID NO: 230173 - DNA, 201 bp, Homo sapiens
atttttcctttctagagagaattgaggatatggatggtaccagagtcaaacagctggttgggtagagcagtggctagaaggcaaagtccacggaataactsgggggtcatctccagtaggaggcagaaagattgtggggttggggatgaatggggaggaggcctcaatgtggagatgaaatgaggagaggttgctggtaag

SEQ ID NO: 230174 - DNA, 201 bp, Homo sapiens
ctcaagcgatccttccatctcagcctcccgaagtgctgggattacaggcatgagccaccaaacccggcctgagatttgttttatctgtattagtttctgcmtcagagtctctgtcctttcattggggaaagaaatgaaagcttctgttgctctggtaactcatttcacctttgcaagtttacagttgctgagagatgagca

SEQ ID NO: 230175 - DNA, 201 bp, Homo sapiens
atggacctaaggtaagcttgggaccctggttagtgttgtatttatttattttttgctttgttttagtaaatatttaatagatacaaagaatttttttttttgagacagtctcactctgtcacccaggctaaaatgcagtggtgtgatctcagctcactgcaacctccagctccctggttcaagcaattcccctgcctcagc

SEQ ID NO: 230176 - DNA, 201 bp, Homo sapiens
ggcactgggagcattatcaggaagacatgtttgccgtgcagcccccaggctctgacaggcctcccagctcccagagtgacgattctaccaggcatatcacrgatacactcgccctcaagcctatgaactgccctgcacactggtaagctgggagctagggttacaatcaggttgctaaatattaaataatagaaagcacct

SEQ ID NO: 230177 - DNA, 201 bp, Homo sapiens
cgaagcctctggtggtctggggggactgacccgactgcggtgcttccagcaggatgacgctcacatcttctgtacaacagatcaggtggcctttccctggytccaccaaagcttttctaaaccacctttctttctccctatgaacctgcaaacccctgatctttatttgccccctgtatgtactataattcagctacattc

SEQ ID NO: 230178 - DNA, 201 bp, Homo sapiens
gatcgcgactcactgctagctccaccttccgggttcatgccattgtcctgcctcagcctcccgagtagctgcgactacaggcacccaccaccacacccagytaatttttttgtatttttagtagagacggggtttcaccatgttagccaggatggtctcgatctcctgacctcgtgatccgcccgcctcggcctcccaaag

SEQ ID NO: 230179 - DNA, 201 bp, Homo sapiens
tgacagaacctgattatgaaattgggagcagattcagtcacacagactgagcagctccgtcagttgttctgagttccaaagccacctccttgcccttgagktgacccaatattgctattcctgaccccaggaacaggagctcttcttcttccatgaactgagccctgggagctgcttcttcctgccacgagggacaagggt

SEQ ID NO: 230180 - DNA, 201 bp, Homo sapiens
catcaattatctgaggaacgtggctctagtgtctggagacactgagaacgccaagggccagggggagcagggctcaactggaggaacaaatatcagctccrcctctgagcccaaggaagaatgagtcaccccagagccctagagggtcagatggggggaaccccaccctgccccacccatctgaacactcattacactaaa

SEQ ID NO: 230181 - DNA, 201 bp, Homo sapiens
gtgccaccacacctggctaatttttgtatttttagtacagacaaggtttcaccatgttggtcaggctggtcttgaactcttgaccttgtgatccacccacctcagccccccaaagtgctgggattacaggtgtgagccactgcgcccggcctctcattagtacttttttgtttgtttgtttgtttgttattttttgagatg

SEQ ID NO: 230182 - DNA, 201 bp, Homo sapiens
cgtgccaccacacctggctaatttttgtatttttagtacagacaaggtttcaccatgttggtcaggctggtcttgaactcttgaccttgtgatccacccacctcagccccccaaagtgctgggattacaggtgtgagccactgcgcccggcctctcattagtacttttttgtttgtttgtttgtttgttattttttgagat

SEQ ID NO: 230183 - DNA, 201 bp, Homo sapiens
acgtgccaccacacctggctaatttttgtatttttagtacagacaaggtttcaccatgttggtcaggctggtcttgaactcttgaccttgtgatccacccacctcagccccccaaagtgctgggattacaggtgtgagccactgcgcccggcctctcattagtacttttttgtttgtttgtttgtttgttattttttgaga

SEQ ID NO: 230184 - DNA, 201 bp, Homo sapiens
cacgtgccaccacacctggctaatttttgtatttttagtacagacaaggtttcaccatgttggtcaggctggtcttgaactcttgaccttgtgatccacccacctcagccccccaaagtgctgggattacaggtgtgagccactgcgcccggcctctcattagtacttttttgtttgtttgtttgtttgttattttttgag

SEQ ID NO: 230185 - DNA, 201 bp, Homo sapiens
gctgaccaagagacagtaatcagagtagggtgtctgatggacagtttcagaggtacagccattgggggagatgacaggataaagggtgtagccatagatgrgtggtggtgaagatctctgagatgaggagctcaaggaattgagaggccagggtgtggacatcaggtaatattataacaccattattagatggagagagct

SEQ ID NO: 230186 - DNA, 201 bp, Homo sapiens
aaatagagttctcctgccatctatgtgtaaatagtgaccaaatccaagaggaatatatcgcactagattcgtgggacagaaaaaaataggactaaaagacsaaacagagacctaagtaaccactgtgttaagaagatagcttattctggccaggcacagtagctcacgcctgtaatcccagcactttgggaggccgaggca

SEQ ID NO: 230187 - DNA, 201 bp, Homo sapiens
gaggcggaggctgcagtgagctgaaatcgtgccactgcactcctgtcagggtgacagagtgagactctgtctcaaaaaaaaaaaaaaaaaaggaataattstcagagctggctgaccaagagacagtaatcagagtagggtgtctgatggacagtttcagaggtacagccattgggggagatgacaggataaagggtgtag

SEQ ID NO: 230188 - DNA, 201 bp, Homo sapiens
cttaaccatcccaaagtgccatcatctgcaattctaagaaagaatgatgggacgtgtgttacctgctaatatatctttccctccaggcagttgtgtcgacycctccacgctggttggcagagcggcttggcctttttgaggagctgtgggctgctcaggtaaagagattagcaagcatggcacagaaggaaccccggacta

SEQ ID NO: 230189 - DNA, 201 bp, Homo sapiens
ggctgcgggaggggaactcctcaggcagctaccctcctgtcctacctcatgctcggacctcctgcctgccttgtccccagaacgtcctggagctcaccctytatgacaaggacatcctgggcagcgaccagctctctctgctcctgtttgacctgagaagcctcaagtgtggccaacctcacaaacacaccttcccactca

SEQ ID NO: 230190 - DNA, 201 bp, Homo sapiens
aaagaaggctctggtgagggggactggctgggtgtgtggggattgccctttgtggacggcctgggttccactctgtgtgtgagggagctgccttctgaacrctgttggcagcacaggtctcccagttgcaggagaattgctgagattatggtgggcgtgggaagaggaggccaaagagggtccccaggaatcttctagcct

SEQ ID NO: 230191 - DNA, 201 bp, Homo sapiens
ctgtcctacctcatgctcggacctcctgcctgccttgtccccagaacgtcctggagctcaccctctatgacaaggacatcctgggcagcgaccagctctcyctgctcctgtttgacctgagaagcctcaagtgtggccaacctcacaaacacaccttcccactcaaccaccaggtgagcccaccagtgctggcggagagcc

SEQ ID NO: 230192 - DNA, 201 bp, Homo sapiens
cttcccactcaaccaccaggtgagcccaccagtgctggcggagagcccagctggaggaggggaggcccagcacagggccaccaaagagggggctctggtcrgcacaggccaagcctccaaggcagaccttcctccaccccgcagccctgaccctataaaggtctccctctaatacatcttccttgcatgaaaccaaaatat

SEQ ID NO: 230193 - DNA, 201 bp, Homo sapiens
ctggaggaggggaggcccagcacagggccaccaaagagggggctctggtcggcacaggccaagcctccaaggcagaccttcctccaccccgcagccctgascctataaaggtctccctctaatacatcttccttgcatgaaaccaaaatatgagctccttgagggctgtgtgttccctcagtcacagctgaattatcaatg

SEQ ID NO: 230194 - DNA, 201 bp, Homo sapiens
agtgtatatatgtgagtgcgagtgtgtgtgaacgtgagtgtgtatgtgtgtatacgtgtgtgcgtgttgtgtatgtgtgtctgtatacatgacagtgagtrccagtgtgtgtgactgagtacgagtgtgtgtatatacgtgtgtgtgtgccagtgtgagagtactacacatgtgtgcgtgcatgagtgcaagagtgtgtgt

SEQ ID NO: 230195 - DNA, 201 bp, Homo sapiens
agaagaggtgagttctggtagagccaacgccctcagagactcagagatttgagtcagggcagctcctaggtgccagtcaccatgtcctgcactggccttgsaggcctggcctggaggcaatggcctggtcttgacacccatctgcatgttgggcggcaggctcgccccactccaaaccctgctgtgttcctcatgctctgc

SEQ ID NO: 230196 - DNA, 201 bp, Homo sapiens
gatttgagtcagggcagctcctaggtgccagtcaccatgtcctgcactggccttggaggcctggcctggaggcaatggcctggtcttgacacccatctgcwtgttgggcggcaggctcgccccactccaaaccctgctgtgttcctcatgctctgcccgctgcttcagtcacattatgattgtagaggccatcatgatggg

SEQ ID NO: 230197 - DNA, 201 bp, Homo sapiens; identical to SEQ ID NO: 42847

SEQ ID NO: 230198 - DNA, 201 bp, Homo sapiens
tcctaggttcaaatgattctcctgcctcagcctcccgagtagctgggactataggcacacaccaccatgcccagctaatttttgtaattttagtagagacrgggtttcaccatgttggccagggtggtcttgatctcttgacctcatgatctgccagcctcggcctcccaaagtgctgggattacaggcatgagccaccat

SEQ ID NO: 230199 - DNA, 201 bp, Homo sapiens; identical to SEQ ID NO: 42850

SEQ ID NO: 230200 - DNA, 201 bp, Homo sapiens
gtgcatttgcaagataccccaatggagtggtcgtccattacttctgttccaaagaggtaaacccagctgacacttgagcccagcatcctggggatccagcrgatggacagcttggctctcccagagaggtgaaggagcacctggccttaggaatcctggctgccaccaccacaaggctccccatttggacattactggcta

SEQ ID NO: 230201 - DNA, 201 bp, Homo sapiens
gtgggggcgcgagcgtctgaggggagctgcaggtgtgtggtgcgtgacagccatcgttagttcagtgagtccgtgctggatttagatttgaacccagaccrgatgggttccagggtccagacacatcacgaaggtgctgaactcccaatgcctgggacccgccaaggtctccctgctccccggcacagagacgtcagtgac

SEQ ID NO: 230202 - DNA, 201 bp, Homo sapiens
atgtgactgcgagtgtgtatacacatgtaggagtgtgtgagtgcaagtgtgagtggaagtgtatatatgtgagtgcgagtgtgtgtgaacgtgagtgtgtatgtgtgtatacgtgtgtgcgtgttgtgtatgtgtgtctgtatacatgacagtgagtgccagtgtgtgtgactgagtacgagtgtgtgtatatacgtgtgt

SEQ ID NO: 230203 - DNA, 201 bp, Homo sapiens
ccgtgctggatttagatttgaacccagaccggatgggttccagggtccagacacatcacgaaggtgctgaactcccaatgcctgggacccgccaaggtctycctgctccccggcacagagacgtcagtgaccctatgccaggttgctgctccatgatgggacgaggggaacaatggggcgagggaccaggctcacactagc

SEQ ID NO: 230204 - DNA, 201 bp, Homo sapiens
gttccctcagtcacagctgaattatcaatgtctagaacagcacctgacacatattttggaataaatgaggttctccatggagataccactgcccctcctaygtccatgacaagccacaatgccagtctccccttctagcccctggagccaagcagggctggcaggcaggaacagctctggaggcttttggagccttgaaaa

SEQ ID NO: 230205 - DNA, 201 bp, Homo sapiens
gagtcagaggcttgctcctgctcaggtcttgaagatgacagagaagtactgcctggaccgaggaatccccttccctagcatcgaggtgggccctgaggacrtggaggaggcccgtgagtgctatctgtttgccaaggctgaggacccccgctcccccattgtgctgcacttccccctggttaaccgtaccttccgcacaca

SEQ ID NO: 230206 - DNA, 201 bp, Homo sapiens
tgtatatatgtgagtgcgagtgtgtgtgaacgtgagtgtgtatgtgtgtatacgtgtgtgcgtgttgtgtatgtgtgtctgtatacatgacagtgagtgcsagtgtgtgtgactgagtacgagtgtgtgtatatacgtgtgtgtgtgccagtgtgagagtactacacatgtgtgcgtgcatgagtgcaagagtgtgtgtgt

SEQ ID NO: 230207 - DNA, 201 bp, Homo sapiens
gtggggattgccctttgtggacggcctgggttccactctgtgtgtgagggagctgccttctgaacgctgttggcagcacaggtctcccagttgcaggagarttgctgagattatggtgggcgtgggaagaggaggccaaagagggtccccaggaatcttctagcctcatccatagaagatcccccagttctagactctgcc

SEQ ID NO: 230208 - DNA, 201 bp, Homo sapiens
ctctgcttgcacaaggactatgtggctggcagggagttcgtggcctggaaaggtgggtgctgccttgggtgggagatggggggcttcccttcctgcctgcrcctctggctcactggagccagtgctggctttgggctgggggttgaggtgtggtctcctgctgcctatgggctgatgcggagcgactctaaatactgctgg

SEQ ID NO: 230209 - DNA, 201 bp, Homo sapiens; identical to SEQ ID NO: 42849

SEQ ID NO: 230210 - DNA, 201 bp, Homo sapiens
ggcccctgtggccctctgctccctgggtctcagcgttcagatggggccagcccctcctggggggtctgagagctgagatgtggcccaagcagggcccgcakggagccagccaggtgtcctgcacaaggaagacttctgggctgttccagccagttccacagagggctccatcctggcctctcctctgcttcccccacccac

SEQ ID NO: 230211 - DNA, 201 bp, Homo sapiens
ctgtccctaggccctcaaccttctgccagcaaacactcagatcaatgacatacgcatcttcctggaaaaggtcttggaagaaaatgcacaaaagaaacggktcaatcaagtgctcaagaaccttctccatgcagaattcctgagggtaggtatgggccttccaaactctagggtgggcttttaacttttagtatgagacaa

SEQ ID NO: 230212 - DNA, 201 bp, Homo sapiens
ttggagagggactgagctgcctcctgcctggggaaattaagctccagtcacttcctggagcatgtcaaactccacctccagcaggccatccagcctgagtyctctgcagagcaggcagctccaccctcccaactcagtgctgcctgtcacacctgagccagcagtttgtgcaaccagaggagcgcaggcagggttccctgc

SEQ ID NO: 230213 - DNA, 201 bp, Homo sapiens
gtggaccttctgtgattgtcgcatgtcaaccttgtgaaactgacatcagcttctaatagggagcagagaggggtgagagaagggaagaccatggtggttcytggaggaccatggcggaatgctgttgaggcagtggatgattgattgttgatcattactgattattgttaatcttcacaacaccactggatggggagcttt

SEQ ID NO: 230214 - DNA, 201 bp, Homo sapiens
acgactgaaagaggacacagttgctggcctctgcctcctgtttctgggtgccacactgtagaacttcttcctcaatccccctgttcttccaggtccaggargagcggattttacaccagcaggtgaagtgcatcatcacagaggagaaggtgtgcatggtgtgtaagaagaagattgggaacaggtgagcctccttcacac

SEQ ID NO: 230215 - DNA, 201 bp, Homo sapiens
cgagcaaagaggttgtatccgcccaactattgctctacaacaaacactcacatgatctcagtggcatacaagcagcatttatttggctcacacaactggcrgtcagctgggctgggcttggcgggggtggcccagccctgtgccatgcgtctctcctctgcctcctgtgacaagcccattagcctgggcatgttctcaagg

SEQ ID NO: 230216 - DNA, 201 bp, Homo sapiens
gaggcagtggatgattgattgttgatcattactgattattgttaatcttcacaacaccactggatggggagcttttttttttttttttttttttttttttwagatggagtctcactctgtcaccaggctggagtgcagtggtgcaatcttggctcgctgcaacctctgcctcctaggttcaaatgattctcctgcctcagc

SEQ ID NO: 230217 - DNA, 201 bp, Homo sapiens
ccagtgagagcctgggattgactggggattgatgaagcctcttctgacgtggaccttctgtgattgtcgcatgtcaaccttgtgaaactgacatcagcttytaatagggagcagagaggggtgagagaagggaagaccatggtggttcttggaggaccatggcggaatgctgttgaggcagtggatgattgattgttgatc

SEQ ID NO: 230218 - DNA, 201 bp, Homo sapiens
gctgcggcctgaagcctgtccctcagagggctgtccttacagcactggccttggcgacccaaagcctctcttgtgggcacaccacgccttgcagggtgccrgccccaggccacggggatggggaatggaactcctgaaaggccaagctgcctcccttctttcctgcccaggagaaccctgccaagctgtctgaccaacagg

SEQ ID NO: 230219 - DNA, 201 bp, Homo sapiens
tgcgagtgtgtatacacatgtaggagtgtgtgagtgcaagtgtgagtggaagtgtatatatgtgagtgcgagtgtgtgtgaacgtgagtgtgtatgtgtgtatacgtgtgtgcgtgttgtgtatgtgtgtctgtatacatgacagtgagtgccagtgtgtgtgactgagtacgagtgtgtgtatatacgtgtgtgtgtgcc

SEQ ID NO: 230220 - DNA, 201 bp, Homo sapiens
ctgcgagtgtgtatacacatgtaggagtgtgtgagtgcaagtgtgagtggaagtgtatatatgtgagtgcgagtgtgtgtgaacgtgagtgtgtatgtgtgtatacgtgtgtgcgtgttgtgtatgtgtgtctgtatacatgacagtgagtgccagtgtgtgtgactgagtacgagtgtgtgtatatacgtgtgtgtgtgc

SEQ ID NO: 230221 - DNA, 201 bp, Homo sapiens
tgtgactgcgagtgtgtatacacatgtaggagtgtgtgagtgcaagtgtgagtggaagtgtatatatgtgagtgcgagtgtgtgtgaacgtgagtgtgtatgtgtgtatacgtgtgtgcgtgttgtgtatgtgtgtctgtatacatgacagtgagtgccagtgtgtgtgactgagtacgagtgtgtgtatatacgtgtgtg

SEQ ID NO: 230222 - DNA, 201 bp, Homo sapiens
tgccagtcaccatgtcctgcactggccttggaggcctggcctggaggcaatggcctggtcttgacacccatctgcatgttgggcggcaggctcgccccacyccaaaccctgctgtgttcctcatgctctgcccgctgcttcagtcacattatgattgtagaggccatcatgatggggccagatgtattctccatgtattcc

SEQ ID NO: 230223 - DNA, 201 bp, Homo sapiens
tggccacatcatgcaaatatagtctcaccattcctaggagctaaatgggtgtgtctagtaggggcatcagttcatcgggggagaggtgtgcacctgtatgkggggcaggagggtgtgcaagttcctggaggtgggttactccaaggcatgggcagtgcagagggagcctcgcctgggctcttgcctctttcccagatgcat

SEQ ID NO: 230224 - DNA, 201 bp, Homo sapiens
cccaggttcacgtctgcagcagtaagatgggagctttgtccacggagcggctacagtactacactcaggaactgggggtccgggagcgcagtggccacagygtgtccctcatcgacctctggggcctccttgttgagtatctcctgtaccaggaggtgagagaagagccagaaggaaatacgtaggctcctctccactcct

SEQ ID NO: 230225 - DNA, 201 bp, Homo sapiens
gcttcctggagtggtacagaggcagtgtgaatatcacaggtgagggtagcgaccccgagcccctcccacaccacattccagcaacagggccctggcagagrcaagaagaatgagggaggggacagagaaggacttggctgtcccactggattcggggaagtcctgaggaaatgacttctagcttagggtgtctagatgccc

SEQ ID NO: 230226 - DNA, 201 bp, Homo sapiens
cctgaggaaatgacttctagcttagggtgtctagatgcccagaggtatgatcaagccacacctctgagttctctgttctgggatccaattaggtccactckgtgcaggactactgggtattgggttgacactctgtctgcccctcttcagcctggtccttaaatggctcatgggggccccacggtgcagagcacccttccc

SEQ ID NO: 230227 - DNA, 201 bp, Homo sapiens
gtctagatgcccagaggtatgatcaagccacacctctgagttctctgttctgggatccaattaggtccactctgtgcaggactactgggtattgggttgayactctgtctgcccctcttcagcctggtccttaaatggctcatgggggccccacggtgcagagcacccttcccgcttttctcccctggatcacttttgctc

SEQ ID NO: 230228 - DNA, 201 bp, Homo sapiens
ggctgcccagccatgctttgggcactctggccaaggtggctggcagacaagatgctgcccctcctgggggcagtgctgcttcagaagagagagaagagggkccctctgtggaggcactggcgggtaacgtacctgagattacctgggaaacccggactgggggagtcctgggagctgcagtgccctgtgaagactgagacc

SEQ ID NO: 230229 - DNA, 201 bp, Homo sapiens
ttgggttgacactctgtctgcccctcttcagcctggtccttaaatggctcatgggggccccacggtgcagagcacccttcccgcttttctcccctggatcrcttttgctctgttcttcagttcagctcagatgtcattttctcagacatcccttttccactccatccctccaggatgcctgagaatcttaccaccatggtc

SEQ ID NO: 230230 - DNA, 201 bp, Homo sapiens
acagccatcgttagttcagtgagtccgtgctggatttagatttgaacccagaccggatgggttccagggtccagacacatcacgaaggtgctgaactcccwatgcctgggacccgccaaggtctccctgctccccggcacagagacgtcagtgaccctatgccaggttgctgctccatgatgggacgaggggaacaatggg

SEQ ID NO: 230231 - DNA, 201 bp, Homo sapiens
tgcagtgagtggacagaaagggtgagggaggagaggaggggaaagaaggctctggtgagggggactggctgggtgtgtggggattgccctttgtggacggyctgggttccactctgtgtgtgagggagctgccttctgaacgctgttggcagcacaggtctcccagttgcaggagaattgctgagattatggtgggcgtgg

SEQ ID NO: 230232 - DNA, 201 bp, Homo sapiens
ctcagagctcagctcaggctggctaacagagagtgtgtgtgtgtaagagtatacatgggtgagtacaagtgagagtgcatgtgtgtatacatgtgtgagtrtacgtgtaggcatctgtgcaagtatgtgtgagtgcaagtgtgagtacatgtgtatacgtgtgtgtgagtgcgtgtatatgtggtgtaaacatgtgagtgc

SEQ ID NO: 230233 - DNA, 201 bp, Homo sapiens
tccgcctctcgggttcaagcgattcttctgcctcagcctctggagtagctgggagtacaagtgcctgccaccacacccggctaatttttgtatttttagtwgagatgatggggtttcaccatgttggccaggatggtctcaatctcttgacctcgtgatccgcccgccttgacctcccaaagtgctgggattacaggtgtg

SEQ ID NO: 230234 - DNA, 201 bp, Homo sapiens
gatagggcttctcccctgtatggatgacctggtgctgggagaggttcttgcgctgggagaaacgtttgccacactggtcacaaacataggggcactcgccrgagtgtgcccgccggtgactgaccagcagggatggataggaaaagcggcgcccacagtctgggcaagggtaaggcttttttagattctgggcgcacttgt

SEQ ID NO: 230235 - DNA, 201 bp, Homo sapiens
acaggccgcttcgggccccgccgcctccggatgcggcgctgagggcggtcgccatggagacggcagcggccgcggccccgggtccgggctgggcagcagarggggagcgccgacggcggcgctgctcgcgccgagaccgagaccgggagcagcggcgccgccgaggtccaggcggcgacgcgccccgggccctgttggccg

SEQ ID NO: 230236 - DNA, 201 bp, Homo sapiens
gttctattctggggtaaaggtatcagattctcaaagggattcttaatctagaaagtttgcgaagagatggcaaaggtgtttgaaagctatcaggaaaccaycctcgcgtaaaacgaagcagcgctacagaagtgggctgccatgggaatcgggaggcccaggttccactgctaacttgctgcagcttactgggtgatctgt

SEQ ID NO: 230237 - DNA, 201 bp, Homo sapiens
tgagactgaaaagtttgagaaaaacaaatggaaagagatgactgcaggacttatttgagtccgttacacattcccatgcaggggaatccaggctgtgctgbttcccagttgtgtttgctggtgagaacgttttttcaggcaggcaagtctgctcggaatagtgttctttggaacatactttgggaaatgctgacatgatgg

SEQ ID NO: 230238 - DNA, 201 bp, Homo sapiens
tccgcacttctccatatggcagcagcctggacctcagcactggcaggtgagtggtcttgggggattgatgcggtccggaagggcctggtcagtttggtggyggggacacaggatggtacctgtggggtatgacttgaaaaaggattctgagactgaaaagtttgagaaaaacaaatggaaagagatgactgcaggacttat

SEQ ID NO: 230239 - DNA, 201 bp, Homo sapiens
ccccagtgtgacgcggaaagtgatctggacgagagggtgagtggggctagagcttgggtgggcagtgtcactgcttgtaaaagggactgcagcataaaggycttctgcgtgcagcagacagccttcccttgagtgagaaacatggcttaggttgagtcaggattaggtttttgggaggaacgggggtggattgggagggta

SEQ ID NO: 230240 - DNA, 201 bp, Homo sapiens
ggcgtcaaaggaatatagttgggtcgtaaattaattgtggttcctgcccttcctcgaggtggtggcagtccagcagaaaagaaatagccagcaagcaaacmcctagaccttaatttgagaagctacagaagacaaagatggggagagatgctacagaaacccacatgaggaagccgcttgtgctgcctgggggatgggagg

SEQ ID NO: 230241 - DNA, 201 bp, Homo sapiens
gtgtaggcattaagagcaaactcttgattttccagatttcttggccttgattattttctttgcctttgggtggggaagtctggctttgagtgttttcaccytgggtcttcattcccacaggtggtgcgcatggtgatccggcaccacgaggagcagcggcagaaagaggaacgggcccggagggaggagcaggccaagctg

SEQ ID NO: 230242 - DNA, 201 bp, Homo sapiens; identical to SEQ ID NO: 42853

SEQ ID NO: 230243 - DNA, 201 bp, Homo sapiens
ctctacctgcgcctggatggatctactagagttgaacagagacaggtaacccaggtttctgcagctcttagaggctcacctccgcttctctctccttttcycaggatttgggcttccagacggggtgccactaagcctttagacctgttttgggggataagtctcccagtatcatctttttttccctttccttctaggcct

SEQ ID NO: 230244 - DNA, 201 bp, Homo sapiens
cgcctgagcctcaattcgtttgtaaaatggagcagttaggattaaaagaaataatcaaggcaccaagtagtgtcagtagaaggtagctgttatttattgtyctattctggggtaaaggtatcagattctcaaagggattcttaatctagaaagtttgcgaagagatggcaaaggtgtttgaaagctatcaggaaaccatcc

SEQ ID NO: 230245 - DNA, 201 bp, Homo sapiens
tctgactgtgaaccagaggggcccgtggaagcggaagagcctcctcaggaggatagtagcagtcagtcaggtgaatatgtggtcatgaagcaggagctggrgagggtggccattggaagagcaggtatgatgagcagtaagccttggtcttaccctttagactctgtggaggaccggagtgaggatgaggaagatgaacat

SEQ ID NO: 230246 - DNA, 201 bp, Homo sapiens
ctccaggacaaggcgccagcaacggagccacaggccgcaccagcccgtctttgatcccgggtgttcggactcagggcctccaccaccccctcctaaactcrgaccctgggccgtgggaacccagtttaggaacccaggaagatgccggaaccttcctcaaacgaggccactctaggaaattgggaatttcacatatcgtta

SEQ ID NO: 230247 - DNA, 201 bp, Homo sapiens
tccacatatataggtattgcctagtcttccctcaccttactttccgtttactgatggggtttcctggatatatttggctgcttacacacggccttcatcamcccctaggcttatcagtgaacggacagtggaggagaacatcctaaaaaaggcaaatcagaagagaatgttgggggacatggccattgagggaggcaactt

SEQ ID NO: 230248 - DNA, 201 bp, Homo sapiens
ggccgcccggactccaggctcagacaaggagcggcctgtggagcggagggagccctccatcaccaaggaggagaaggacaggtgtgcctcccacccacccygcccctgccccaccctcagcccctgctgcccctggagaacttcattctctccccacgcctgccctccagggacctccccttctcacggccccagctccga

SEQ ID NO: 230249 - DNA, 201 bp, Homo sapiens
ggaggtggcggtggtccgagctggcagccgcaatgcagccccaggtagatctaggggcaaacggtaaaggcgctccgaggaagggcgagcgcgcagcctcygggagactacacctcccaggctgccttgcgcaccgtgctgcaccctacgctagcacgcgagcctccccgttcccccaccctccagttactgtctctcgcg

SEQ ID NO: 230250 - DNA, 201 bp, Homo sapiens
ctccgtctcaacaacaaaaacaacaatataaaagaaagaaagaaagaaagaaagaaagaaaggaaggaaggaaggaaggaaggaaggaaggaaggaaggaaggaaagaaagaaaagaaaagaaacagccaaaataaacaaattctgcaatgcctagcatctcactcacagtagaagccaagtccttacaaaggcctgcaaa

SEQ ID NO: 230251 - DNA, 201 bp, Homo sapiens
gactccgtctcaacaacaaaaacaacaatataaaagaaagaaagaaagaaagaaagaaagaaaggaaggaaggaaggaaggaaggaaggaaggaaggaaggaaggaaagaaagaaaagaaaagaaacagccaaaataaacaaattctgcaatgcctagcatctcactcacagtagaagccaagtccttacaaaggcctgca

SEQ ID NO: 230252 - DNA, 201 bp, Homo sapiens
agactccgtctcaacaacaaaaacaacaatataaaagaaagaaagaaagaaagaaagaaagaaaggaaggaaggaaggaaggaaggaaggaaggaaggaaggaaggaaagaaagaaaagaaaagaaacagccaaaataaacaaattctgcaatgcctagcatctcactcacagtagaagccaagtccttacaaaggcctgc

SEQ ID NO: 230253 - DNA, 201 bp, Homo sapiens
gagtcaagtccctctgggttgacagcagtccctgtgttgttctttttcagctccgtaacttgcgacgttacttaaccatccttttcaccatctataaaagraggatggtaatctattttttttttttttgaagcagagtttcactctcgttgcccaggctggagtgcaatggtgcgatgtcggctcaccacaacatctgcc

SEQ ID NO: 230254 - DNA, 201 bp, Homo sapiens
caccccattccagtctggcccttggcaaaaacctggtctggatttgattggcgcctctgtatcctggtcagtgatttgaagaaggctatagtcctggagtygagtgttacgtaggaaaatacccacaaatcgtccattctataaacttgttggaattgtagatcttaattttgaatattcagtcattctgctttggtagca

SEQ ID NO: 230255 - DNA, 201 bp, Homo sapiens
ttgcctgtctgccttatgtagcactcctggccctgacatgtcccagaaactgaaatacagaccaggccttacctgtcccttcaggccccactggcccaagrtttctcagtggcctctgctctttgctcacaggttgaacaagaaggagttcagcttggaagaaatttacaccaacaagaattaccaatcacccacaaccag

SEQ ID NO: 230256 - DNA, 201 bp, Homo sapiens
gccaggagaattcacttgaacccgagaggcagaggttgtaatgagctgagatcgcaccactgcactccagcttagggaacacagccagactctgtcccccscaaaaaaacaaaacaaaacaaagagctaagagtaatgggccataatgaagcactcacgacgactgtcataggtgcttgacctgcacatgtccctgcgaca

SEQ ID NO: 230257 - DNA, 201 bp, Homo sapiens
cggatgtccatcccctccaggtaagtatgattccattaatatgaaatgtaaaggttatcggcattactccaaccatgtacctcttttcgttagactggggkctgacttttgcatcctcatgactcccctatcattcccttagttttattgtactctagccatgtgacttaacgatggttcaacttaatatttttttgactt

SEQ ID NO: 230258 - DNA, 201 bp, Homo sapiens; identical to SEQ ID NO: 42858

SEQ ID NO: 230259 - DNA, 201 bp, Homo sapiens
aggaaaagaattctggggctaactcatcctctctctccacagcttcagcccccggagctgcccccttgaccatctcttctcctctccacgtgccatcctcmctccctgggccagcctcttctccaatgccaattcccaactcctctccccttgctagtcctgtgtcctctacagtctcagttccattgtcatcttcactcc

SEQ ID NO: 230260 - DNA, 201 bp, Homo sapiens
aagtgtagggcttctctcccgtgtgtgtacgctggtggatggctagcagggaggggtaggcgaagcgacgtccacagctagggcactggtggggtttttcrcctgtgtgtgtggtccggtgattggccaaggaccggctcctccggaagcagcgaccacagtcagggcagtgatagggcttctcccctgtatggatgacct

SEQ ID NO: 230261 - DNA, 201 bp, Homo sapiens
cccatgtcagtaaatccactgggcctttccattgtccttcttctggggatttccataatagctttggataaactttcctctttccttctaacatttgcccrtgtcattccgccagagtcttactatctgtaccaggagtcaaaaaatttaaagtaaataaggctaaatgtaattttgtttcaggtggttagttggtctcct

SEQ ID NO: 230262 - DNA, 201 bp, Homo sapiens
gcctagattgctccaacagaagtcagaaacaagtgaccagaaggtgaacgttggcttgcagacaagatttcacatggaagttcttgttttcagcttctctkgaaaaatccaaaaatctgtggtcactagacctgcttacccccatggctttcctttgaaatggggcataatctcaccagattgcgactgtcccctccactt

SEQ ID NO: 230263 - DNA, 201 bp, Homo sapiens
gtagggtgggaccccaggtggcttgttctaattaagcgtcaacatgaatgatctgttctgtgctgtggttgagtcagaaagggaaagtcatctggccagaratggcagaggcagctgcgtggatgcagagacctagacagggagaaataggggttgctgggtgtgggaggcgcctcagtctgagaacggattccctcggtg

SEQ ID NO: 230264 - DNA, 201 bp, Homo sapiens
tttgtattgtgctatgattaaggcaattatacagctgacaggaatcacaagccaattgggcatcgtttacctggagttggtccttttttgctgctagaaaracatagggattaaaaacacaaattgtaggctgggcgcggtgtctcacgcctgtaatcccagcactttgggaggccaagacgggcagatcacgagttcagg

SEQ ID NO: 230265 - DNA, 201 bp, Homo sapiens
taaccttccgcaaatcataaggtcttaacttcgtaacttacaaaacagattatattagaatgtaagctacatttaggtcgggaatcctttctgcatggctmtatccgttgtgtgtaggaggaagtcaatatttgttatgctgtgaaaagcacttggtttttaaggtaggtgtgaggattatagaacacatcaaacaggtac

SEQ ID NO: 230266 - DNA, 201 bp, Homo sapiens
gaacgccccacagttccccctcccatgacggctgactgcgcgcgcatctttccgccaccgcctcccccccaccttcccggggtgctgcgcgcgcaccctcwgccggggccccggggccggtgcgcgaggctgtcggcgcgcgcccatagagacagactgagggggtcaggccggccggcgctgggccccggcgtgtctcct

SEQ ID NO: 230267 - DNA, 201 bp, Homo sapiens
tgtgtcagaagaaggcactcttggaggtgcagctgatgggttgtacaaccactgccattatctaatcatggagacattcagaaacacccattttgtatggytgtgtgtgcctgtgtgagcagaaggcacctgtggagatgcagctgatgggctttggggtgatgagtccttccaacggaaagaaagcagggcccagaggct

SEQ ID NO: 230268 - DNA, 201 bp, Homo sapiens
gcctcaaaggaccaggtgctttcagaacctgagaccaaggtaggcattcagatcgggtagaagagactagtgggggcctgagcccatgtcactctttcacyctctgccccatttttgcagaccatgggaaaggtttctcgattcagaatacgcagaacaccagcccgtcctcagctaaaccttacaccaatgggactgcct

SEQ ID NO: 230269 - DNA, 201 bp, Homo sapiens
gagtttctcctgctactcccaaggcccgggctggtgaggaggggcctcggccaaccaaggaatctgtgcgggtaaaggaagagcggaaggaggaggctgcmgccgccgctgccgctgctgctgccgccgccgctgccgccgccgcagcagccactgggccccagggccttcacctgctgtttgagaggccccggccgcccc

SEQ ID NO: 230270 - DNA, 201 bp, Homo sapiens
cgggcgaccgtcctctgcttctttcaccctccagcccgcctggccagccgcgtctgtgccgccagcctctgactcgagcattatggggagccaggagccckaaacggccgaggctgcagctcccgggggccccttctcccctggaaaaggcctctcggcgggtcctggccgtggtgctagaagatgtcatggctgttcaca

SEQ ID NO: 230271 - DNA, 201 bp, Homo sapiens
ggcggatcacttgaggccaggagttggagaccaggctggccaacatgatgaaaccctgtctctactaaaaatacaaaaattagccgggcatggtggtgggygcctgtaatcccagctgcttggaaggctgaggcaggagaatcacttgaacctaagaggcggaggttgcagtgagttgagatggcgccattgcactttagc

SEQ ID NO: 230272 - DNA, 201 bp, Homo sapiens
atttgcactccctgatgtgtgtcttgtttttgtttcaaaagttggctggataggactgtggtgaaccagagggttcttgtcaatttccgtcatccatctckatctgtctaggctgattgttgctacgagaacagggggcccattcttgaggcaatctgcaagcctgagttttaatgaggaatctccggattcttaaatatc

SEQ ID NO: 230273 - DNA, 201 bp, Homo sapiens
catccccagatccccgaccatttccggccacctttgagggtgagttgtgtgaggacctcaggctgcatgaggctgggggctggtgttagcatgtttggctraggggggttttgcttacaaataagtgagaagcccagaacatggaggcagccagatgtggaacagcagagagtgagggctttcaagttgcagacctgggct

SEQ ID NO: 230274 - DNA, 201 bp, Homo sapiens
gggcttgggaagaccatccagaccatctctctgcttgcccacttggcttgtgagaaaggtaagtaggcaaggccccttcttttgttccccctagtctagckccctgggagcttgttcagtgatgactccagcttcattgacttttgctttattgactccggtcattaactgtatagagaggacagtgtaggtgctaggatt

SEQ ID NO: 230275 - DNA, 201 bp, Homo sapiens
tctcgggtcactgcagtctccgcctcccgggttcaagcagttctcctgcatcagcctcccgagaagctgggattacaggcgtgcaccaccacgcccggctmatttttgtatttttagtagagacgggggtttcaccatgttggccaggctggtcttgaactcctgacctcaggtgacctgctggccttaacttccccaagt

SEQ ID NO: 230276 - DNA, 201 bp, Homo sapiens
caggctggtcttgaactcctgacctcaggtgacctgctggccttaacttccccaagtgctggaattacaggcgtgagccaccgcgcctgacctggaagctsctaatttctactcactctctactctgcttgcctcctcctgaccacttttggaccctgttgttgtaggagcaagtggaagctgcccgcaaagacctggacc

SEQ ID NO: 230277 - DNA, 201 bp, Homo sapiens
tggcttgttctaattaagcgtcaacatgaatgatctgttctgtgctgtggttgagtcagaaagggaaagtcatctggccagagatggcagaggcagctgcrtggatgcagagacctagacagggagaaataggggttgctgggtgtgggaggcgcctcagtctgagaacggattccctcggtggggggcggtcctggggct

SEQ ID NO: 230278 - DNA, 201 bp, Homo sapiens
aggctgtgggttgaggaaaacgtggtcaacctggctctaccaggaagagtagcaggttttccttggttttggcatcagactgtggattgaagccctcctaycacttttttactgtgtaaccttccgcaaatcataaggtcttaacttcgtaacttacaaaacagattatattagaatgtaagctacatttaggtcgggaat

SEQ ID NO: 230279 - DNA, 201 bp, Homo sapiens
gggacatggtaaattgtgggaagggcttagttgtttgaactggacactcgggggagaggtgtgcttcatggggtctgtgaagtggtgttgagcaggatgakccttgtgtacaataaggccttctctgtttttagcaggcgaagtggtcagcatcgggcagttagcctcactggcacaacgtccagtggctaatgcaggggg

SEQ ID NO: 230280 - DNA, 201 bp, Homo sapiens
ccaggtgccgtccacgctgcagccaaccctttcacggcagctcccggggcccacggacccttcctgagccccagcacccacattggtaagagccaagggcktgttgggcaacccaggctttgtccctgacttccaggagatggaaatcagacccagcaggcagctggaatgcaggatagacctggttccacttgcttagtg

SEQ ID NO: 230281 - DNA, 201 bp, Homo sapiens
aaaggtcataacctcaccagccacctctgaggtcatggaacctgggaacagaagcctcaacccccacaagaccaagcatcacatggagtgtagggtcactrggagagcagaggtcacagcctctagagaagggagaggggcgtgtgcatgggagtgtggctcatctcgggggccatggggcctcctgaggtacacctttgc

SEQ ID NO: 230282 - DNA, 201 bp, Homo sapiens
cttctctgcttctgctttgtggattgttgagtgtgaggcagaagaaatgtggcaggggaatatttgtggagagttttggagaatctttggtgctcgggggmtgggctgtagtatatcaggtctgttggatactcacattccatttaacattagtgtaatattatctccaagagtgtaaaagcgcctcgttacctgaaaaag

SEQ ID NO: 230283 - DNA, 201 bp, Homo sapiens
ggttggtcccaaggtctggggctggaggcacgggagggcagtggggtgagcatgagcctcaactgagcatgtctgccatcctgccccacagcctcgggccmccacggcgccttcaatgggaactgtgaagcaaaactctccgtggtccctaaagtgtcgggcctggagcggagccaagaacagcccccggggcccgacccg

SEQ ID NO: 230284 - DNA, 201 bp, Homo sapiens
tgaacccaggaggcggaggttgcagtgagccgaaatcgcgccactgcaccccagcctgggcaacagagcgagactccatctcaaaaaaaaaaaaaaaaaaagtataggaagggctcagaacagaaagatactcctgaagaaaaagggagaggagatttgctccaccagaattgttatagagctgtggcaaaaaagatgagg

SEQ ID NO: 230285 - DNA, 201 bp, Homo sapiens
ctctgcccctgaagaggaggaagagactgtggccagcaagcagactcatattctggagcaggtaaaaaaagagtgggcagttcgtaaagttgagctgattyttacagaatatcttgtcttttgttagtctgttgagcttgtccaggggaaagagatgtttcttctgcttcccagattacagtcagcctttgatagttgtaa

SEQ ID NO: 230286 - DNA, 201 bp, Homo sapiens
agcccttttgggggcaccacctccgcttgtgcccgccccccggcccagttccccacctaggggccctggcccagctcgggctgacaggtgaggggaacggsggggggtcggggcaaagctccatctccccttcctttaaccaggtcctagggctgaggttttaagccagggctggagggcaaaggtcataacctcaccagc

SEQ ID NO: 230287 - DNA, 201 bp, Homo sapiens
tgctgaagaagagccccctcaggtgttggaggtataggcagaaggagcagagggagggttcagagggggaacagagggagaggttcagggtctgagttccsggctgtgaggttggttatgagttttaggagttctgctagtaatggacatttgggctctttggggatgactggggaagaatctgtttggggcaagttgcat

SEQ ID NO: 230288 - DNA, 201 bp, Homo sapiens
tgccccaggctaagggtggccagagaaggtcaccatgtaccacacaccaaagaagggggtcggcccaggggtgggcgacacaggcagcttcttcggcagcstcacggcagcaaccccagccttcccaaagcagcaggcgcctccaggctggggcccaacctagaaggcaggggtcaatctaacaaaaccctaacgttgact

SEQ ID NO: 230289 - DNA, 201 bp, Homo sapiens
  misc_feature (1)...(201): n = A,T,C or G
ctaggagagaagttacttaacataacttctgagaaagaatagttatttaacataaaaaagaaagttatttaacataacttctgagaaagaatagttctcantgataacttggaaaactacaaaaagcatagtgtatttttggatcccatggtttctatatatttatttccatctgggaagaacagtcaggttttgatgtgg

SEQ ID NO: 230290 - DNA, 201 bp, Homo sapiens
cagtaaacccaacttccgggtcccattccaggcctccaagcccacgtgacaacaagctccgccctctgctgtcccgcagatgccactcggtgattggccgygtttgaagccgcgccccggcgtcgcgttgcagccttaggtccagccgagcgccgactcacgccccagccccaattgggcggccggtttccaattggaagg

SEQ ID NO: 230291 - DNA, 201 bp, Homo sapiens
catcaccaaggaggagaaggacaggtgtgcctcccacccaccctgcccctgccccaccctcagcccctgctgcccctggagaacttcattctctccccacrcctgccctccagggacctccccttctcacggccccagctccgagtttctcctgctactcccaaggcccgggctggtgaggaggggcctcggccaaccaag

SEQ ID NO: 230292 - DNA, 201 bp, Homo sapiens
ccctcagctcccagtcctacagacacaggtttgaaagtgggaagagttccttctctgcttctgctttgtggattgttgagtgtgaggcagaagaaatgtgkcaggggaatatttgtggagagttttggagaatctttggtgctcgggggctgggctgtagtatatcaggtctgttggatactcacattccatttaacatta

SEQ ID NO: 230293 - DNA, 201 bp, Homo sapiens
caagaccctccctccttttttttttctttactctacttctctccagcagagaccctgtctctacaaagcaaaacaaaacatctgtagcatcctaaaggctyatgtccctcctagttactaccctaccacaagagtaaccactagttcaatttatttttctttattttctgttagagatgggagtcttgaactcctggcttc

SEQ ID NO: 230294 - DNA, 201 bp, Homo sapiens
ctttggtgctcgggggctgggctgtagtatatcaggtctgttggatactcacattccatttaacattagtgtaatattatctccaagagtgtaaaagcgcytcgttacctgaaaaaggttgaattaggctaggctggaaatggaggtcgtggcaccatgcttctaataccatacgctttaagaatagtttaacttctatca

SEQ ID NO: 230295 - DNA, 201 bp, Homo sapiens
agactccatctaaaaagggaaaagccaagcttttatttctttttttcttttttttagcaggagaagcagatgccacactcagagcaggactgaggcttctyacctgtatgcgtgtgcctatgaatggccaagggagcctctttggtgcacgcaccacacacagtcaaagcaccagtagggcttctctcctgcatggataag

SEQ ID NO: 230296 - DNA, 201 bp, Homo sapiens
tccctgtctttagccttacagacatatcacgcatcttgttacatacatcacccttcataaagtggaacatgggtcatgccaatctttttttttttttttttgagatggagtctggctctgtcgccaggctggagtgcagtggcacgatctcagctcactgcaacctctgcctcccgggttcaagcgattctcctgcctcag

SEQ ID NO: 230297 - DNA, 201 bp, Homo sapiens
aatcttaaacagaccgctatactctaaagttggtaataggagagcttctctgagaaacctgtcctgcctgccccctcaccacccgcagccttccagcaggrcagctccctggggcttggttcagaaaccttgtgctggaggagagatgcctagactgggagagatggggaaaggagtttgggcctgagcaggaagggtttg

SEQ ID NO: 230298 - DNA, 201 bp, Homo sapiens
cgccattgcactttagcctgggtgacgagcaaaaccgtctcaaaaaagaaaaaacaaaaaggactgctttggccttcacagacgtgcgtcttcaaccagtrgtacccctgacagttccaagaaccatcagccttacagcttagacctaagactagcattctgttgactctgacacttccctctgttctatccgatagcaga

SEQ ID NO: 230299 - DNA, 201 bp, Homo sapiens; identical to SEQ ID NO: 42854

SEQ ID NO: 230300 - DNA, 201 bp, Homo sapiens
agttttgtggttcagatggtgagttcacttttttttttttttttttttttgaaatggagtctcgctctgttaccaggctggagtgcaatggcgtgatctckgctcactgcaacctccgcctcctgggttcaagcaattctcctgcctcatcctcccgagtagctgggactacagatgcctgccaccacacctggctaattt

SEQ ID NO: 230301 - DNA, 201 bp, Homo sapiens
cgccgccgcagcagccactgggccccagggccttcacctgctgtttgagaggccccggccgcccccgtttctgggccctagcccaccagatcgctgtgctrgcttcctggagccaacctggttggcagcacccccacgcctggcaaggccaccccgcttctatgaggcgggtgaggagctaactggacccggggccgtggc

SEQ ID NO: 230302 - DNA, 201 bp, Homo sapiens
cagggcagtggctgacatagacgtggctaggagactaccagcccgtctgtgcgcgcattcctttccgtcccagtaaaatggggctgacagcatctccttcrtggaattattaccaaacgcagtcacaaacgcggagaagcgctcatgcaggtgcaaggcgttttcgaattgctagcactcgggaccgctgccagcagccgc

SEQ ID NO: 230303 - DNA, 201 bp, Homo sapiens
gaaggaaggaaagaaagaaagagaaagaaagaaagaaagaaagaaagaaagaaagaaagaaagaaagaaagaaagaaagaaagaaagaaagaaagaaagamagaaagacagacctccttccttcctgagatccacaagtttttggagagggcacagaagtacagaagtcgctgaagtacagtagttgctggagtgtcagtc

SEQ ID NO: 230304 - DNA, 201 bp, Homo sapiens
tgaaagggagccaaggatgatgcgtggtgcttcagaaaggttgttcagactgaggaggaagtagtgaaattaaagggtttgaggagctgggctggggacasgggtctagtatttgatgggttggaagggagtatggaggcttctggcaccaggctaaggctttagtcagggtatatctgacaggtgtttgctttgtgtctg

SEQ ID NO: 230305 - DNA, 201 bp, Homo sapiens
aaggaaggaaggaaggaaggaaagaaagaaagagaaagaaagaaagaaagaaagaaagaaagaaagaaagaaagaaagaaagaaagaaagaaagaaagaaagaaagaaagaaagaaagacagacctccttccttcctgagatccacaagtttttggagagggcacagaagtacagaagtcgctgaagtacagtagttgctg

SEQ ID NO: 230306 - DNA, 201 bp, Homo sapiens
atgcagggggaagcaaacctctcaccttccaaatccagggcaacaagctgactttgactggtgcccaggtgcgccagcttgctgtggggcagccccgcccrctgcaaagtaggtaaaacccaccccctgtcctgcctttttcctcctcttccctgtctctttgtttttgtgacttttttgaatgtcagcctttatgtttct

SEQ ID NO: 230307 - DNA, 201 bp, Homo sapiens
cagagcgcaactttgtatcaaaaaaaaaaaaaaaagaaaacaggaagtcttccttaactattacttttccttcatttatctctgttcctttacttcttccrtgtcactgtagacattgatgactgtgtcctattagattttatcttctgagattacagatttgccttttgttttatctcctgtcaaggccacagtttttat

SEQ ID NO: 230308 - DNA, 201 bp, Homo sapiens
aaggaaaggaaggaaggaaggaaggaaagaaagaaagagaaagaaagaaagaaagaaagaaagaaagaaagaaagaaagaaagaaagaaagaaagaaagaaagaaagaaagaaagaaagaaagacagacctccttccttcctgagatccacaagtttttggagagggcacagaagtacagaagtcgctgaagtacagtagt

SEQ ID NO: 230309 - DNA, 201 bp, Homo sapiens
gaaggaaagaaagaaagagaaagaaagaaagaaagaaagaaagaaagaaagaaagaaagaaagaaagaaagaaagaaagaaagaaagaaagaaagaaagamagacagacctccttccttcctgagatccacaagtttttggagagggcacagaagtacagaagtcgctgaagtacagtagttgctggagtgtcagtctggt

SEQ ID NO: 230310 - DNA, 201 bp, Homo sapiens
ggaaggaaaggaaggaaggaaggaaggaaagaaagaaagagaaagaaagaaagaaagaaagaaagaaagaaagaaagaaagaaagaaagaaagaaagaaagaaagaaagaaagaaagaaagaaagacagacctccttccttcctgagatccacaagtttttggagagggcacagaagtacagaagtcgctgaagtacagta

SEQ ID NO: 230311 - DNA, 201 bp, Homo sapiens
agagagaaggaaggaaggaaggaaggaaggaaggaaggaaggaaggaaggaaggaagaaagaaagaaggaaggaaggaaggaaaggaaggaaggaaggaargaaagaaagaaagagaaagaaagaaagaaagaaagaaagaaagaaagaaagaaagaaagaaagaaagaaagaaagaaagaaagaaagaaagaaagaaaga

SEQ ID NO: 230312 - DNA, 201 bp, Homo sapiens
gtttttgtgtctggctcattgctggagttcaacaaatgtactgaacaaataaatagacacctcagcccatatttagagccctcctgcccccacaaaaaccytgactgtcccatgtttaggccttcctctttctctagagcaaaggtcacagtggtgtgaatctgttttctgtctcttagacctcaatgcctcagcattgcc

SEQ ID NO: 230313 - DNA, 201 bp, Homo sapiens
tgtagctctgcaatgtgcccttttgggaacctgtacataagttgagttgagcatttatctcatcgtgttggtctatttcattgtctctgaagacaaggackctcactgtcttgtccaccatagtgtttttgtgtctggctcattgctggagttcaacaaatgtactgaacaaataaatagacacctcagcccatatttaga

SEQ ID NO: 230314 - DNA, 201 bp, Homo sapiens
ttcttgttttgcagagacaagataattggaactaagaattataaggtggtctgggcatggcagctcaacttactggaaccctggaattggagaccatcccrgccaacctggtgaaaccccgtctctactaaaaatacaaaaatcagcctggcagccaggcgcggtggctcacgcctgtaatcccagcactttgggaggctg

SEQ ID NO: 230315 - DNA, 201 bp, Homo sapiens
cctctgcctcctgggcttaagccatcctcccacctcagcctccggagttgctgggactacaggctcacaccaccattcctggctaatttttttttttttttagagacagggttatgccatattgcccaggctggtctcaaactcctgaactcaagcagtctgcctgcctcagcctcccaaaatgctgggattacaggcgtg

SEQ ID NO: 230316 - DNA, 201 bp, Homo sapiens
tccacccaaaggaacagattgtctttttactcctagaggcgtacagcggaccctcattccataattcaccccctttacaggctatgaggcacaggaaatgraataggttcattcgtagttcagagggaagaggtcaggccttggaatcagaacctcctttgaaccctggctccacctggcggcagctgttggaagtaagca

SEQ ID NO: 230317 - DNA, 201 bp, Homo sapiens
cctagtatgttctgctatctctaagcagtgagacacactacagtatacattcttggagaagccttgaaggttgatgatcatgttcttgggatgcagcggcygtggtgaccaacataataagcctcagcattcgcattgtaattgagctcattcaagcaaagctatcttcagtagggactgtcccgtctagagagcatgcac

SEQ ID NO: 230318 - DNA, 201 bp, Homo sapiens
tacaagggttctcttgtctcaacaggatcttttggaaccttccttctccttgggatccccaacttcggataccacagatctcagctttttttgtcccatcyaagagacaaggtggttggccaggcatggtagctcacacctataatcccagcactctgagaagctgaggcaggcagatcacaaggtcaggagttcgagacc

SEQ ID NO: 230319 - DNA, 201 bp, Homo sapiens
ggctggtctcaaactcctgaactcaagcagtctgcctgcctcagcctcccaaaatgctgggattacaggcgtgagccactgctcccagcgtatttaaaaawttttttaaagaataatgtaatacagaaaagtgcacaaaccctaagtgtaggctcaatgcattgtcacaaagtaaacacacccatatcaagaaaccagtac

SEQ ID NO: 230320 - DNA, 201 bp, Homo sapiens
gggctttaggtggtaaaattttatgacagcgagtgcattcttgtggcttagactgcttggctaggaatcttgacttcaggatctgtcactgtgttttaacrcctgagcctcaattcgtttgtaaaatggagcagttaggattaaaagaaataatcaaggcaccaagtagtgtcagtagaaggtagctgttatttattgttc

SEQ ID NO: 230321 - DNA, 201 bp, Homo sapiens
ccccgtctccactaaaaatacaaatattagctgggtgtcttggtgtgtacctgtaatcccagctactcaggaggctgagccaggagaattcacttgaaccsgagaggcagaggttgtaatgagctgagatcgcaccactgcactccagcttagggaacacagccagactctgtcccccccaaaaaaacaaaacaaaacaaa

SEQ ID NO: 230322 - DNA, 201 bp, Homo sapiens
gtgtctcaggcatgttgggggtgagtggatgctgtggagatgcgaggcgcctggcccaggactcgggtctgagtcgcctcccatctctcctttgccatccmcagatccccgaccatttccggccacctttgagggtgagttgtgtgaggacctcaggctgcatgaggctgggggctggtgttagcatgtttggctaagggg

SEQ ID NO: 230323 - DNA, 201 bp, Homo sapiens
cttaccatctctgatttttttgcctaacaggtaactggggtccccatttaatcattgttcccaccagcgtgatgttgaactgggagatggagttgaaacgktggtgccccagctttaaaatcctcacttactatggagcccagaaagagaggaagctcaagcggcaggttcgatgtttcatgtggtcactttcctcccatt

SEQ ID NO: 230324 - DNA, 201 bp, Homo sapiens
tcttgaactcctgacctcgtgatccacctgcctcggcctcccaaagtgctgggattacaggcatgaaccactgcgcccagccaaaatatatatatatatakagagagagagagagagagagagagagacaggttctggctctgttgcccaggctggattgcagtcgtggcatctcagctcactgcaacctctgcctcctgg

SEQ ID NO: 230325 - DNA, 201 bp, Homo sapiens
gtcttgaactcctgacctcgtgatccacctgcctcggcctcccaaagtgctgggattacaggcatgaaccactgcgcccagccaaaatatatatatatatagagagagagagagagagagagagagagacaggttctggctctgttgcccaggctggattgcagtcgtggcatctcagctcactgcaacctctgcctcctg

SEQ ID NO: 230326 - DNA, 201 bp, Homo sapiens
caaggcgccagcaacggagccacaggccgcaccagcccgtctttgatcccgggtgttcggactcagggcctccaccaccccctcctaaactcggaccctgrgccgtgggaacccagtttaggaacccaggaagatgccggaaccttcctcaaacgaggccactctaggaaattgggaatttcacatatcgttagcactcag

SEQ ID NO: 230327 - DNA, 201 bp, Homo sapiens
ggtcttgaactcctgacctcgtgatccacctgcctcggcctcccaaagtgctgggattacaggcatgaaccactgcgcccagccaaaatatatatatatatagagagagagagagagagagagagagagacaggttctggctctgttgcccaggctggattgcagtcgtggcatctcagctcactgcaacctctgcctcct

SEQ ID NO: 230328 - DNA, 201 bp, Homo sapiens
gcactccagcctgggtgatagagtgagactcagtctcaaaaaaaaaaaaaaaaaaaccacatttctgcccaggcgcattggctcatgtccataatccagcrctttgggaggctaaggtgggtagatcacctgaggtcaggagttggagaccagcctagccaaaatggtgaaaccccttctctactaaatacaaaaaattag

SEQ ID NO: 230329 - DNA, 201 bp, Homo sapiens
aagtatagtcagaagtttgctaagaaaagacacggggaaaagttgttttgggcaagagcatgaagacgtgaggacccggcgtatttagagaatggtgagarcactgggacccgggtgggcagtggcgggagaagcagctggaaggagaggctgagagtagatcctggaggcccatgagcgccctgctgggagctgcgactt

SEQ ID NO: 230330 - DNA, 201 bp, Homo sapiens
gaacccaggagacagaggttgcagcaagctgagatcgcaccactgcactccagcctgggtgatagagtgagactcagtctcaaaaaaaaaaaaaaaaaaamcacatttctgcccaggcgcattggctcatgtccataatccagcgctttgggaggctaaggtgggtagatcacctgaggtcaggagttggagaccagccta

SEQ ID NO: 230331 - DNA, 201 bp, Homo sapiens
gccactgcatccggccacccttcattttaaaagtacatttctggccaggtgcggtggcttatgcctgtaatcccagcacgttgggagtccaaggcgggccratcacttgaggtcaggacttcaagaccagcttggccaacatgatgaaaccccatctgtactaaaaatacaaaaattagctgggtgtggttgtgtgaacct

SEQ ID NO: 230332 - DNA, 201 bp, Homo sapiens
acttcaggtgatccacctgccttcacctcccaaagtgctgggattacaggcgtgagctgctgcgcctggtgtgtttgagtttatactgggtagggagtcayggttaacgcctataatctcacccagagtctgagatgggaggctccgttgagtcctggagttcgaaaccccgtcactacaaaaaaatatatataaagaaaa

SEQ ID NO: 230333 - DNA, 201 bp, Homo sapiens
ctggtttcaaactcctgacctcaagtgatccgcccgccttggcctcccaaactgctgggattacaggtgtgagccaccgcgcccagcaatattttatttgyttttgtttttgtttttttgagacagagtttcactcttgttgccccagctggagtgcaatggcacgatcttggctggctgcaacctccacctcctgggttc

SEQ ID NO: 230334 - DNA, 201 bp, Homo sapiens
gacgtgaggacccggcgtatttagagaatggtgagagcactgggacccgggtgggcagtggcgggagaagcagctggaaggagaggctgagagtagatccyggaggcccatgagcgccctgctgggagctgcgactttcccagctgcctcagcagccgcctccctcacctctggactctggtcttcctcaggcgtcctccc

SEQ ID NO: 230335 - DNA, 201 bp, Homo sapiens
cgctgcctccatttagtcctcttggcctatcggattcttggggtcagctgctccactctgctttttctccaagctcagccccctagagcccagtctttgayggatctcagctaaactgaaggaacagacttgccactaccaccagttcctagcagcctccagaggctatttggccttcctgggtggaggcctggcccaccc

SEQ ID NO: 230336 - DNA, 201 bp, Homo sapiens
cccgggaggcggagcttgcagtgagccgagatcgcgctactgcactccagcctgagagacagagcgagactctgtctcaaaaaaaaaaaaaaaaaaaaaaattagctgggcgtggtggtgcgcacctgtagtcccagctactcgggagactgaggcaggagaatcgcttgaacctgggaggtggaggttgcagtgagccga

SEQ ID NO: 230337 - DNA, 201 bp, Homo sapiens
cataaaactcaaaatgtgtgaaaattctttgtaactttactaaaaattgggggcactctatagtttacaaaactatccccatccaggcagggcacggtggytcacacctgtaatcccagcactctgggagtctgaggcgggcggatcacctgaggtgaggagttcaagaccagcccgaccaacattgtgaaaccccgtctc

SEQ ID NO: 230338 - DNA, 201 bp, Homo sapiens
acccgggaggcggagcttgcagtgagccgagatcgcgctactgcactccagcctgagagacagagcgagactctgtctcaaaaaaaaaaaaaaaaaaaaaaattagctgggcgtggtggtgcgcacctgtagtcccagctactcgggagactgaggcaggagaatcgcttgaacctgggaggtggaggttgcagtgagccg

SEQ ID NO: 230339 - DNA, 201 bp, Homo sapiens
gctcacgcctgtaatcccagcactttgggaggctgaggcgggtggatcacgaattcaggagatcaagaccatcctggctaacatggtgaaaccccgtctcyactaaaaatatttttaaaaatagccaggcatggtggcaggcgcctgtagtcccagctactcgggaggctgaggcaggagaatggtgtgaacccaggaggc

SEQ ID NO: 230340 - DNA, 201 bp, Homo sapiens
ctcagcctcctgagtagctgggactacaggcgtgcgccaccatgctcggctcatttttttgtatttttttttttagagatggggtcttgccatgttggccrggctggtcttgaactcctggcctcaagtgatccgctatcttctgcctcccaaagtgctgggataacaggtgtgagccaccacacccggccctgttttatc

SEQ ID NO: 230341 - DNA, 201 bp, Homo sapiens
cctggggcttggccccgctcttccgttccgtccgctccaagctggagagctttgctgacatcttcctcacgcccaacaaaaccccacagcccccacccccstcccccccaatgaagctggagttgaagatcgccatctcagaggccgagcagtctggggctgctgagggcactgcgtctgtcagcccccggcccccaatcc

SEQ ID NO: 230342 - DNA, 201 bp, Homo sapiens
gcattgagccatcttggccaaacagatgcaggcttatgtcccctgaagtatagctttgtctcccctcagggagcacagtccagcctgaaagattcaattcrgtgtggggatggtttgtgctcaaaattgcctgtctgccttatgtagcactcctggccctgacatgtcccagaaactgaaatacagaccaggccttacctg

SEQ ID NO: 230343 - DNA, 201 bp, Homo sapiens
ccgttgcctcacatccggggctttggagggctggcctcgctgccccgccccgcctcgcgcctttcatggcgaccggaggcggaggctggaggagctgggcycggaggaggcccctttaaatctccttaaaggggtggccactgaactcggcggactgcaacgccagccttaaaggggaagccgccgagcagacgctgacaa

SEQ ID NO: 230344 - DNA, 201 bp, Homo sapiens
tagttttactttcctaagaggccagcccaggatctggttaaagaaggtctccctaaacatcgggtaaaagtacataaataaaatggttatcttggtgagcrgtccctttcacatctgtggcaggtggtgcaattcaagcaacagtcccggcttgaggaaaagcgcaaaaaagccctggacctgcatttggacttcattgtg

SEQ ID NO: 230345 - DNA, 201 bp, Homo sapiens
gacccggtttcccggcccgaggggtacttcggcaacctggtcacccctagaggggttgggagcttgcccttttccatctatctcagccccacctcctcctycacagaaggatgcatctcttcagcccccagagcgactggaacatcggctgaagcattctgggaagcggaaaagggggggctccagtggggccaccgggga

SEQ ID NO: 230346 - DNA, 201 bp, Homo sapiens
ccatttctggagggatgggttcgagggttgggcactgaagtttttcacactgtttttctataatccaggaatacatagtatgtaggattcaagcaacccaktaagacactgagcaaaacattaaatttctccttcacctgccaaccttcccaagccccatccccttcccccaggtaaccgctgtaaatcattaggtgtata

SEQ ID NO: 230347 - DNA, 201 bp, Homo sapiens
tcattgttattattgagaaaactaaggctcagagaggggcagtgacttgctcaaggtcaccccgggcattcatggcaagatgggcctagaattcaggtctyctgactcccaggccaggccagtgtggtgctgcttccactgttgtagggtgggaccccaggtggcttgttctaattaagcgtcaacatgaatgatctgttc

SEQ ID NO: 230348 - DNA, 201 bp, Homo sapiens
gtatactgagttggtcacaaccctcattctttcggcctccaacacacaaacatggggacggtcaccagagtggatttcctggtattggaccaacagtgagrtggaggcaaagagctgcccacggtcaagacatgcctacggcttctccctcatgtgtgtgcctgtgggtggccagagccccacttgttcgaacacagtggc

SEQ ID NO: 230349 - DNA, 201 bp, Homo sapiens
ggattagcttttaaagcaggtgccagcacttggcctacagcaggtgcttgccacagggtaagaactattgacacttactattgatgctctattttgtcacygtcattgtcattgttattattgagaaaactaaggctcagagaggggcagtgacttgctcaaggtcaccccgggcattcatggcaagatgggcctagaatt

SEQ ID NO: 230350 - DNA, 201 bp, Homo sapiens
gaacccgggaggtggaggttgcagtgagctgagatggcaccactgtactccagcctgtgcaatgggagtgagacgccatctcaaaaaaaaaaaaaaaaaawaaaggccgggcgtggtggctcacgcttgtaatcctagcactttgggaggccgaggtgggcggatcacgaggtcaggagttcgagaccagcctgaccaaca

SEQ ID NO: 230351 - DNA, 201 bp, Homo sapiens
tccagcttaatttgcttttaggttttgaggccttttttactgcgccgagttaaggtggatgttgagaagcagatgcccaaaaagtacgagcatgttatccrctgcaggctctccaagcgtcaacgctgtctctatgatgacttcatggcacagaccacgtaagggaggaaggagggtgggccctgggactcgagattggag

SEQ ID NO: 230352 - DNA, 201 bp, Homo sapiens
gagaatctcttgaacccaggcggcagaggttgcagtgagctgagatcatgctactgcactccagcctgggtgacagagtgagactccatctcaaaaaaaawaataataatataacaataacagaggattagagaaatgattagattgtgtattatttttctaaaactgacataacaaattaccacagattcattcaagagg

SEQ ID NO: 230353 - DNA, 201 bp, Homo sapiens
ttgggaggccaagatgggcggagcacgaggtcaggagatcgagaccatcctggctaacatggtgaaaccccgtctctactaaaaatacaaaaaattagccratcgtggtggcgggcgcctatagtcccagctacttgggaggctgaggcaagagaatggcgtgaacccgggaggcggagcttgcagtgagccgagatcgcg

SEQ ID NO: 230354 - DNA, 201 bp, Homo sapiens
tgttggccaggctggtctccaactcctggcctcaagtgatctgcctgcctgagcctcccaaagtgctgggattagaggcatgagccaccgtgcccagcctygtttggttttttattttttaaatgtttggtttttttatttttttattttttttgagacaaagtctcgctctgtcgcccgggctggagtgcaatggcatga

SEQ ID NO: 230355 - DNA, 201 bp, Homo sapiens
agtcccttagaaaacatggcgacgccagcctcaccacctgtttccaaaagcagtgtgacgcccttcgctcccttagtcaagctaatcttactaaataaggwacaagcttcccctgaggcttgcccttcagcgcactggcactgcccacccgaacgggcgtcacggatcctggtcagtctctaggatcgcgctcgctgatag

SEQ ID NO: 230356 - DNA, 201 bp, Homo sapiens
tccctgtgtccagcagcacgattctgtctagcctggtctgcacacagttcttgccaatttaaattccatgtcaggtatgaactagcagacaaacaagtgcrggccaaatgctttacatcaaagggtggaaggcgcatagcaccaaatacagattctagcaatcctaaagtaaatgggctctgtactccattattcagtaca

SEQ ID NO: 230357 - DNA, 201 bp, Homo sapiens
ccagacaatcttgtctaaaataatgcctcttctgcccctcacccgagctcatccaccccacttcattttttcataacacgtatcagccattattatatttyattttattcatttattgagatagagtctcgctgtgtcgcccaggctggagtgcagtggcacagtctgggctcactgcaacctctaccccccaggttcaag

SEQ ID NO: 230358 - DNA, 201 bp, Homo sapiens
agtcccagctactcaggaggctgaggcaggagaatggcgtgaacccgggaggcggagctttcgaccgagcgagactcgtctcaaaaaaaaaaaaaaaaaaagaggaaggagaagaaagaagaaggaggaggaggatgaggaggcagcagtgagatattcagaggaaggagatgtttgaacagaggtggtggaaaaaaaact

SEQ ID NO: 230359 - DNA, 201 bp, Homo sapiens
aaactggaaggcggaggttgcagtgatccaagatggtgccactgcactccagcctgggtgacagagtaagactaagtctcaaaaaaaaaaaaaaaaaaaaaggctgggcttggtggctcacgcctgtaatcccagcactttgggaggccgaggcgggcagatcactaggtcaggagatcaagaccatcctggctaacacgg

SEQ ID NO: 230360 - DNA, 201 bp, Homo sapiens
cagcttgccaggcgcggtggctcacgcctgtaatcccagcattttgggaggccgaggtgggcggatcatgagatcaggagattgagaccatcctggctaayacagtgaaaccccgcctctactaaaaatacaaaaaattatccgggcgtggtggcgggtgcctgtagtcccagctactcgggaggctgaggcaggagaatg

SEQ ID NO: 230361 - DNA, 201 bp, Homo sapiens
cccgtctttgatcccgggtgttcggactcagggcctccaccaccccctcctaaactcggaccctgggccgtgggaacccagtttaggaacccaggaagatrccggaaccttcctcaaacgaggccactctaggaaattgggaatttcacatatcgttagcactcagtcgacgtttattggcctaagaacgaaagaaccgga

SEQ ID NO: 230362 - DNA, 201 bp, Homo sapiens
ccctctctgggccgaagctactcctgccctgatctggggccccctggcccaggtacctgcacctggccacctgctccaccccaaccaagccgaccacggcygcggcggcacactgtgggtggtggggaaatggcccgagccccgccaccccctcggccctgtctccggaaagaggtcttccctctcggaggagtgggagcc

SEQ ID NO: 230363 - DNA, 201 bp, Homo sapiens
gcccaggaggcagagcttgcagtgagcggagatcgcgccactgcactatagcctgggcgacagagcaacactccatctcaaaaaaaaaaaaaaaaaaaaaagtgaaatttcaatgaaccacagccacacataaaagtatgaatgatttttgtcaatacaatatcgagtgtaaaaaagaaacagcttgccaggcgcggtggc

SEQ ID NO: 230364 - DNA, 201 bp, Homo sapiens
agtggtcacttgagatagatagatagatagatagatagatagatagatagatagatagatgatagatatagatggagttccgctcatgtcactcaggctgragtacaatggcacgatcttggctcactgcaacctctgtctccctcattcaagcgattctcctgcctcagcctcccaagtatctgggattacaggcgtgcg

SEQ ID NO: 230365 - DNA, 201 bp, Homo sapiens
cctctgccccgccctggggtgggaggaggtagagctcgtctctggggacccggtttcccggcccgaggggtacttcggcaacctggtcacccctagagggrttgggagcttgcccttttccatctatctcagccccacctcctcctccacagaaggatgcatctcttcagcccccagagcgactggaacatcggctgaagc

SEQ ID NO: 230366 - DNA, 201 bp, Homo sapiens
catagggacgctccccagagtgcacacgccggtgactgaccaggcgagaggaggaggagaagcgccgctcgcagtccgggcacgggtagggcttctcgccygtgtggatgcgctggtggatgacgagggccgtgcgctggcggaagcggcggttgcactcgaggcaagtgtagggcttctctcccgtgtgtgtacgctggt

SEQ ID NO: 230367 - DNA, 201 bp, Homo sapiens
aaagcggtggcttacgcctataatcccaacactttgggaggctgaggagggcagatcacaaggtcaggagtttgagaccagcctggccaatatggtgaaaycctgtctctactaaaaaaaaaaaaaaaaaaattacccgggtgtggtggcgggcgcctgtagtcccagctactccggaggctaaggcagaagaatcgcttg

SEQ ID NO: 230368 - DNA, 201 bp, Homo sapiens
tgtgaacccaggaggaggagcttggagtgagccaagatcgcgccactgtactccagcctgggcaactgagcaagactccgtctcaaaaaaaaaaaaaaaaaagaaaaagaaaaagaaaaaatcagtaaagccagcctgtgcaacatagtaagactgtctctactgaaaaaaaaattagtcgggtatggtggtgtgcaactg

SEQ ID NO: 230369 - DNA, 201 bp, Homo sapiens; identical to SEQ ID NO: 42887

SEQ ID NO: 230370 - DNA, 201 bp, Homo sapiens; identical to SEQ ID NO: 42892

SEQ ID NO: 230371 - DNA, 201 bp, Homo sapiens; identical to SEQ ID NO: 42893

SEQ ID NO: 230372 - DNA, 201 bp, Homo sapiens
cggccgggcgggggaggcgagcgcgcgcattcccggtggcggtggagggaagggccgggcggccggcgccgccgtgggaggtccgctgcccctttgtcccyacggggcctcctccaagccgggagagtgtcagcgctcgagagaaagtccggagagcctcactcttctgccgggcgagtgttacacggatagaagcctccc

SEQ ID NO: 230373 - DNA, 201 bp, Homo sapiens
gagttctatgaggagacaatcgtcaccaagaacgggcagaagcgggccaagctgaggcgagtgcataagaatctgattcctcaggtgaggggctgggcagyggtcacagagcctacactaagcgtgtggaggtggacccagatgggatctgttgtcatggtgggggcttttgcggggggatctgggaggaacaaggaagct

SEQ ID NO: 230374 - DNA, 201 bp, Homo sapiens; identical to SEQ ID NO: 42889

SEQ ID NO: 230375 - DNA, 201 bp, Homo sapiens
tagatgggcttgaggtgggcacttccagtattccctagactgacttgttctccccaacccttcttccagttcctgagctggtgccaggcaggtgacacctsctgcagcccccagcatgcgggcaggcccaggccccaccgttacattggccctggtgctggcggtggcatgggccatggagctcaagcccacagcaccacc

SEQ ID NO: 230376 - DNA, 201 bp, Homo sapiens
ccataccagctcgcacccccctgttctaagggggaggggaagtccctgggaggccccttctctccctgccagaggggaaggagggtacagctgggctgggkaggacctgaccctactcccttgccctagatagtttattattattattattttggggtctcttttgtaaattaaacataaaacaattgcttctctgcttgg

SEQ ID NO: 230377 - DNA, 201 bp, Homo sapiens; identical to SEQ ID NO: 42890

SEQ ID NO: 230378 - DNA, 201 bp, Homo sapiens
cacagtattggttgggtgttggtttgtgtgtggacaagaggtggttggtgggtggtgaaggctaatggcagagttagcaccccactctcccaagccacccytgcaagcagcacagcagggcatataccagtcaggaatgcccgttacctggttccttgcctggtctgctttcttccaagtttgcctggggcctagccctgc

SEQ ID NO: 230379 - DNA, 201 bp, Homo sapiens
atcagtcaagggaaagcactagaacccctgggtagggaaagaaaggagggaaaaaccataaaaggaatacttataatgtgaaggtttgtaaatagtccatratgatgtcgtggcagagtctgatttctatatagaggtgactttttttttaagtactgtgcaagctctgtgcttctataatgtgggaaatggcttggggag

SEQ ID NO: 230380 - DNA, 201 bp, Homo sapiens; identical to SEQ ID NO: 42895

SEQ ID NO: 230381 - DNA, 201 bp, Homo sapiens
tgggtgttggtttgtgtgtggacaagaggtggttggtgggtggtgaaggctaatggcagagttagcaccccactctcccaagccacccctgcaagcagcayagcagggcatataccagtcaggaatgcccgttacctggttccttgcctggtctgctttcttccaagtttgcctggggcctagccctgctagaggctacag

SEQ ID NO: 230382 - DNA, 201 bp, Homo sapiens; identical to SEQ ID NO: 42896

SEQ ID NO: 230383 - DNA, 201 bp, Homo sapiens; identical to SEQ ID NO: 42898

SEQ ID NO: 230384 - DNA, 201 bp, Homo sapiens; identical to SEQ ID NO: 42891

SEQ ID NO: 230385 - DNA, 201 bp, Homo sapiens
ctttttttttaagtactgtgcaagctctgtgcttctataatgtgggaaatggcttggggaggatggcccctagcttaggaagactgttgtgttatttgttyaatttcaataaaatgatttgtagatcctgcacatgagagtggcatcctgtgggggctctgacacccagtgtctagactaccacctgggttcaataggtag

SEQ ID NO: 230386 - DNA, 201 bp, Homo sapiens; identical to SEQ ID NO: 42897

SEQ ID NO: 230387 - DNA, 201 bp, Homo sapiens; identical to SEQ ID NO: 42899

SEQ ID NO: 230388 - DNA, 201 bp, Homo sapiens
ctcctagacccctctgagcttccctgaccccaaccctgcggccacgccgcgacccagagccgggctgccaggataacgactgcctcggcccttcctgggcmggctaagaagcggtgcttggccccttccctcagtctggcagggggcggggcctccctttagacggcggaccagagaagggggcccctgattcgtgggagg

SEQ ID NO: 230389 - DNA, 201 bp, Homo sapiens
aaaaaaaaaaaaagattttaaatcaagctacgtgtccaggggtatgctctagaaaaattaccatggcaataatatttaatttgagggcagggaagctggtwaggcctttgctgtaatacagaaaagtgaaaagagggaatggaagaaatagtaacctatatgttgccattggccgtttttttgtttttgtgggtgtgcttt

SEQ ID NO: 230390 - DNA, 201 bp, Homo sapiens
tgtgagacattgtagaagagatggacaagaacttcgttgtttgaaaagagagtagcttgtaatggttactttgggaaacgtctttatactattagagactrccaccaaattttgagatcttcctatttgcagtacaggtagaaatcccagtttactatttggtctaaaagggagtgccagcaattgagtcaactgtcatgt

SEQ ID NO: 230391 - DNA, 201 bp, Homo sapiens
ggttctacagctttaaaaaacttgttgtatccttaggtcctcataatattaaatattttctaattttaacagattttaagagtcagatatatactttgacwtgaatgatgtagtgttgcttaaggaagaaaaaattataaaaaaaatgtttcttttattttcaggagtttttaattcatatctagttcatttccactcata

SEQ ID NO: 230392 - DNA, 201 bp, Homo sapiens
cagcctgggcagtagaggagacttgtctctctctgtatatttgtctctctctccctctctctctctgtctctcataatacatatatacatacatatatatmcacacacacacacacacacatacagagagatatataaaatagatataaaaataaagatattttaaagattatttataaatatatgttttttaaaaatgta

SEQ ID NO: 230393 - DNA, 201 bp, Homo sapiens
acttgtctctctctgtatatttgtctctctctccctctctctctctgtctctcataatacatatatacatacatatatatacacacacacacacacacacatacagagagatatataaaatagatataaaaataaagatattttaaagattatttataaatatatgttttttaaaaatgtagtctattataagccaaatgt

SEQ ID NO: 230394 - DNA, 201 bp, Homo sapiens
cttgtctctctctgtatatttgtctctctctccctctctctctctgtctctcataatacatatatacatacatatatatacacacacacacacacacacatacagagagatatataaaatagatataaaaataaagatattttaaagattatttataaatatatgttttttaaaaatgtagtctattataagccaaatgtc

SEQ ID NO: 230395 - DNA, 201 bp, Homo sapiens
tctttattattttctttgttctgctaattttgggtttagtttattattttctagttccttgaggtacatcaggttgtttatttgagaactttctttttctytttttttttttttttttttgagacagtttcactctgacccctagactggagtgcagtggcatgattttggctcagtgcaacctccgcctcccgggttcaa

SEQ ID NO: 230396 - DNA, 201 bp, Homo sapiens
cattatgttgataatatttttagcagtattacacagtggaggtccaaattggattagacttttgcattgaattccaaagtattggtaagtctagcacatastataaagtcttgctaaattcttgtgggtacattatttttaaaacctgtctgtctgtcggtatcacacagaggtcacttcttgagtaaaataagatgacct

SEQ ID NO: 230397 - DNA, 201 bp, Homo sapiens
atacaagcttgcaaatacagaggagactactaaaaccactctagagtctataactctaaggagttatagagtgattgcagaagactgttttatggggtctstgtgtgtgtttatgtgcctgtacatgttttcgcatgtggtggcggtgttttcttctttcccttttttccttccctgtctgataaatgagactggtgcatg

SEQ ID NO: 230398 - DNA, 201 bp, Homo sapiens
cacccaccagcagaagactttgcagaacctttaattggatgtgttaagtgtttttaatgagtgtatgaaatgtagaaagatgtacaagaaataaattaggrgagattactttgtattgtactgccattcctactgtatttttatactttttggcagcattaaatatttttgttaaatagtcttttgttggtttgtgtgcat

SEQ ID NO: 230399 - DNA, 201 bp, Homo sapiens
caattacagttcaacccagaaacccagatcactgagagtgagaaacaacttggacatacgaaaagtctggagcaggcagagtggctcatgcctgtaatccyaacactcggggaggctgaggcgggtggatcacttgagcctagcagttcaagaccagcctgcgcaacatggcaaaccctgtctctacaaaaaatacaaaaa

SEQ ID NO: 230400 - DNA, 201 bp, Homo sapiens
tttttgaatagtgtgaaaggaattagtattatttaaatgtttgttagaattcagccatgaagccatcaagtccgggcttttctttgatgggagactttttrttactgatttaatctcactctttattggtcagttcaggttttctatgtcttcatggttccgttttgatagttcgtgtgtgtctaagaatttagccatttc

SEQ ID NO: 230401 - DNA, 201 bp, Homo sapiens
tacatgacagaactgagattcactctgcagtctgtagacttccagtaactccaaacctcatactttttcttttatgttacacggactctgtttttaatggmatatttaaatgagatatttaagtgggaaagtaatagacaaccactcttacctgttaaaatccaaagtaattctctagtttttaaatggagcacatttaaa

SEQ ID NO: 230402 - DNA, 201 bp, Homo sapiens
acgccacatgatcttccctgggcaagggtccacaggaggcattcccattggttaatatcctaaattgcataaatatacgggaaaacctgggcaggtcccayttggcaagtcattacacagacataatttctttaggccccactaaggaagaaaagattttatcacaaatcgagagtagtcttgtcattctctggaattgtg

SEQ ID NO: 230403 - DNA, 201 bp, Homo sapiens
gggtttcaccatgttaacaaggctggtcttgaactcctgacctcaggtcatccacccgcctcagcctcccaaagtgctgggattacaggcgtgagccaccrtgcccagccaaattaatataacctttatttcttacctgagggtatttagtatatgatgacaaaggtgttcttaaggagctttcagccaatacttagaaac

SEQ ID NO: 230404 - DNA, 201 bp, Homo sapiens
gttaatataattgggtgctaaaatatatggtatggtacagaaaataagtagtatgaatacctgccatttgtactataattataatgtaactgataatatgyctttaataaaacatttaaacatgtaagcttaattgcattactggagaaagaaaaaggcgttttttaaaaatccatatgaatgtggcatctattcagaatt

SEQ ID NO: 230405 - DNA, 201 bp, Homo sapiens
atgaatgtggcatctattcagaattttaaattacaattacatttctaagactgtctctcacagattaggaagctgataacctggtataagtcacatagcaragtgaatgaggtttttctttcctctctcctgcatctctgaataacttttcttcttctctttttgccaaatatacttcttatcatggggaattttatcttg

SEQ ID NO: 230406 - DNA, 201 bp, Homo sapiens
aatataaatcattgtactgtaaagatgtaaacacacgcgtatgttgattgcagcactattcaccatagaaaagacatggaatcaatctaaatgcctatcartgatagactgcataaagaaaatgtacatatacagcatggaatactatgcatccataataaagaatgagatcatgtcctttgtaggggcttggatggagct

SEQ ID NO: 230407 - DNA, 201 bp, Homo sapiens
tttgcagtacaggtagaaatcccagtttactatttggtctaaaagggagtgccagcaattgagtcaactgtcatgtcttttcactggccatgaaacaatctgtgtgtgtgtgtgtgtgtgtgtgtgtgtgtgtgtgtgtgtgtgtgtgtgttaaaaacccataccataaatttcttgtaggtgtatattaacagtattgtt

SEQ ID NO: 230408 - DNA, 201 bp, Homo sapiens
atgaaataatacgttaaagattatatctaaattggaaccttgttaacgatacccccaggctcctggcaaaagctaataaagggcccatgggaggctaaccycctctctgtttttatacatattttgcctacacttgaacacaaatgttttcactaacaggtacatgcatatttgtgatagtgaattttcaattcagagagt

SEQ ID NO: 230409 - DNA, 201 bp, Homo sapiens
ttgcagtacaggtagaaatcccagtttactatttggtctaaaagggagtgccagcaattgagtcaactgtcatgtcttttcactggccatgaaacaatctgtgtgtgtgtgtgtgtgtgtgtgtgtgtgtgtgtgtgtgtgtgtgtgtgttaaaaacccataccataaatttcttgtaggtgtatattaacagtattgtta

SEQ ID NO: 230410 - DNA, 201 bp, Homo sapiens
tgcagtacaggtagaaatcccagtttactatttggtctaaaagggagtgccagcaattgagtcaactgtcatgtcttttcactggccatgaaacaatctgtgtgtgtgtgtgtgtgtgtgtgtgtgtgtgtgtgtgtgtgtgtgtgtgttaaaaacccataccataaatttcttgtaggtgtatattaacagtattgttaa

SEQ ID NO: 230411 - DNA, 201 bp, Homo sapiens
tgacctgttccactcatccttctccccagttcatttgtttcgtttcaattccactttcccttatagctatcttcaaagcagtgtctatgggacagcattgscaagagccctgactgggcctggcttggtaactcactcctgtaatcccacctgcccctagaagtgcagatatactagaaaatacagctgtctttgttccag

SEQ ID NO: 230412 - DNA, 201 bp, Homo sapiens
gcagtacaggtagaaatcccagtttactatttggtctaaaagggagtgccagcaattgagtcaactgtcatgtcttttcactggccatgaaacaatctgtgtgtgtgtgtgtgtgtgtgtgtgtgtgtgtgtgtgtgtgtgtgtgtgttaaaaacccataccataaatttcttgtaggtgtatattaacagtattgttaac

SEQ ID NO: 230413 - DNA, 201 bp, Homo sapiens
tcgccactgcactccagcttgggcaaaagagtgagactcgagactctgtctccaaaaaaaaaaaaaaaaaaaaaaaatagaggttggctgggtggggtggyttacgcctgtaatcccaggactttgggaggctgaggcgggcggatcacttgaggtaaggagttcaacaccagtctggccaacatggtgaaaccccatatc

SEQ ID NO: 230414 - DNA, 201 bp, Homo sapiens
ctcactgcagcctctgcctctcgagttcaagcaattctcctgcctcagcccctcgagtagctgggagtacaggcacgtgccaccaggcctggctaattttktgttttttagtagagacagtttcactgtgttggccaggctggtctcaaactcctgaccttaagtgatctgcctgcctcggccttccaaagtgctaggatt

SEQ ID NO: 230415 - DNA, 201 bp, Homo sapiens
cactgcagcctctgcctctcgagttcaagcaattctcctgcctcagcccctcgagtagctgggagtacaggcacgtgccaccaggcctggctaattttgtkttttttagtagagacagtttcactgtgttggccaggctggtctcaaactcctgaccttaagtgatctgcctgcctcggccttccaaagtgctaggattac

SEQ ID NO: 230416 - DNA, 201 bp, Homo sapiens
ggcatctgtaatcccagctacttgggaggctgaggcaggagaattgtttgaacctgggaggtggaggtgacagtgagccgagattgcgccattgcattccmgcctgggcaacaagagcgaaaaaaaactccctctcaaaaaaaaaaaaaaaaatctttaattttaatcaaagccaaatcaaagctatttatgatgttaata

SEQ ID NO: 230417 - DNA, 201 bp, Homo sapiens
ccctctctagccagctcgccagcctttctgaatctgccagtcctgccgctacaccattccctttcattcctctttatgatgtgccctctgctggaatttcyccttcctgctgatctcactaggcctattcaggtagcaactactcaagctccttcccacaatattttatgcaataaagtatcagtactcagagtcacggct

SEQ ID NO: 230418 - DNA, 201 bp, Homo sapiens
gttacaatgaatacaaattctcctttctgtttgacctggaaaactttccaaaaggagatgtctttacaataatgatatatttggtgaaagctgtgggttgtttttttttttttaaagcttatgatgacagtattgaaagaggaaactaatctgtattgtcagcacagccacagctagcactagtcatttcttgagaggtgg

SEQ ID NO: 230419 - DNA, 201 bp, Homo sapiens
ggaacactgttaactaaaatatccgtgagactgaccccttccacatctgtgcttacatgtgacccacctgggtggtcagccacaaggcccatcctgaccamcctgtttagaattgcaacctgcccctctccccagcgctgtgagtcccgttactcttttttcttagcatttattactcatatactttacttagttatgctt

SEQ ID NO: 230420 - DNA, 201 bp, Homo sapiens
acctaagcagtttagcttgtcctggtattcagtctggtggggattttgtttttgtctttgtttagacagagtcttgccctgtcacccaggctggagtacartggtgcaatcactgctcactgcagcctcaacctcctggactcaagtgatcctcccacctcagcctcccaagtagctgcctgcaccaccacacccaactag

SEQ ID NO: 230421 - DNA, 201 bp, Homo sapiens
tgtccccgtggctccagccacattcttcatgtccctcagacatgttaggtatgtaccaccttaagtcattcgccgttctctgtgcttggaacactgttaastaaaatatccgtgagactgaccccttccacatctgtgcttacatgtgacccacctgggtggtcagccacaaggcccatcctgaccaccctgtttagaatt

SEQ ID NO: 230422 - DNA, 201 bp, Homo sapiens
tgagaaaatggaagtagcagtcctttttccctgacagtcaaatttaggagaaatgaatcagtacaggatttcttgactctccgaacctaaactgcagactkctcctctccgctttgtccccgtggctccagccacattcttcatgtccctcagacatgttaggtatgtaccaccttaagtcattcgccgttctctgtgctt

SEQ ID NO: 230423 - DNA, 201 bp, Homo sapiens
gagtgccccttatcataggactgtcggcgactgggatgctgatagtgtttctcaagtagtagtcacccttttctgggaaatcatgactacgtctggaatcrtgtaggttggtagagccaaaagagagatcagaatccacatctttagatccctcaaactcccctcacccatgtttttcatctgcgtcgcaaaattccaggt

SEQ ID NO: 230424 - DNA, 201 bp, Homo sapiens
aattaccaaggaattttgtactttaataccctcttagggtattaaggagggtttgtcagtgaaaataatcaagaaggactggtccattcgagccactgatwttgacagacaagaaaacagacccctgagtgccccttatcataggactgtcggcgactgggatgctgatagtgtttctcaagtagtagtcacccttttctg

SEQ ID NO: 230425 - DNA, 201 bp, Homo sapiens
aatgatccttggttttgttgatctttcgtttctttttttggtcactttatttccattcttctggtctttattattttctttgttctgctaattttgggttwagtttattattttctagttccttgaggtacatcaggttgtttatttgagaactttctttttctttttttttttttttttttttgagacagtttcactctg

SEQ ID NO: 230426 - DNA, 201 bp, Homo sapiens
taaaatacagatacatgatcaagtagaattctgaaattcctttaaatgtttaaggtaaaataggaattaccaaggaattttgtactttaataccctcttarggtattaaggagggtttgtcagtgaaaataatcaagaaggactggtccattcgagccactgattttgacagacaagaaaacagacccctgagtgcccctt

SEQ ID NO: 230427 - DNA, 201 bp, Homo sapiens
caaaaaaatgatccttggttttgttgatctttcgtttctttttttggtcactttatttccattcttctggtctttattattttctttgttctgctaatttkgggtttagtttattattttctagttccttgaggtacatcaggttgtttatttgagaactttctttttctttttttttttttttttttttgagacagtttc

SEQ ID NO: 230428 - DNA, 201 bp, Homo sapiens
tctcactgtcagatcttctagagaatatttgtgaatgaattatagagggttgcattagattactttggtctatttcttgtatgcttcatttcttgcccctrttcatctctttctcaccaatttcccgcattcacctttctgtcctattacattgtgaattccttaacagatgaaacttttttttttttttggactgacaaa

SEQ ID NO: 230429 - DNA, 201 bp, Homo sapiens
tttgtttgccttttcaaaaaaatgatccttggttttgttgatctttcgtttctttttttggtcactttatttccattcttctggtctttattattttcttkgttctgctaattttgggtttagtttattattttctagttccttgaggtacatcaggttgtttatttgagaactttctttttctttttttttttttttttt

SEQ ID NO: 230430 - DNA, 201 bp, Homo sapiens
tgaacttttacatggaaaaaagagttctttatcctgtgttaagcccaaaatatagaactagggttcatgagcgaataatagcactggtgaatatcaggttrgcattagctcttaagagctgttttaaacctacaaacgaaccctctgaactagtacacttgttattggaggtattcacgcagagggtggatcttctcactg

SEQ ID NO: 230431 - DNA, 201 bp, Homo sapiens
gctaaagaatcaaagtcctccaactacttgaggggttgagatgtggggagggatgagtaggctgggatagttgttgtgtacataacagttatagctggagkgttaaattatcgttgttctttcagaggagaaaatgcatagcaaaaatcttagcaatgatcttgcattgattctgtttcctgggttccaataacaagactt

SEQ ID NO: 230432 - DNA, 201 bp, Homo sapiens
tctgacacagagtgctgcttatgcttcttagtgtcttcttttctcttcccataccctgtggcaaaaccagaggccctggacagctcttctgtagctccccstgcctcgcatatatcttcagagagtacaccaagccctggatggtgtctggtcgtcttcaaggacctgagcgggtgctgagaccaggtgctccagaggccc

SEQ ID NO: 230433 - DNA, 201 bp, Homo sapiens
ggctggagaatcatttgagcccaggggttcgagaccagcctgggcaacacggtgaaaccccactctatttaaaaaaaaaaaaaaaaaaaaaaagccctgayccccctctctgggcgatccattgggagaatttgaaaagttcaaacttttgaactcttcctactttatttttttaaatttagaatggaaggtgggaattat

SEQ ID NO: 230434 - DNA, 201 bp, Homo sapiens
agcaggaattttctgaatatttagcacattcagattgctccaagaacagcattgagcaatgctgtacatgtgctttctcctaaggctgtctcccctgtctmctgggttctggaaagactcattgtccttcagggaagggagcatttttcctcactgccattgctgagccttttctcctgttgtatactatttagcccagca

SEQ ID NO: 230435 - DNA, 201 bp, Homo sapiens
actcttcctgcggaggaggcgcggggaacacagccccgagctcctacctgcttaggccgggactgaaggagacgattagacaagacagcaggaactcacgsagcacagcatggaaggaaggggaccccacacgccccgctcccaagtgaggagcaatgcaggcaggtgtggacgtttggctcctcagaatagggagtcccc

SEQ ID NO: 230436 - DNA, 201 bp, Homo sapiens
aggtctcaatctcttgacctcataatctgcccaccttggcctcccaaagtgctgggattacaggtgtgacccaccacattatttatttatttatttatttatttatttatttatttatttatttatttttgagatggagtctcgctctgtcgcccaggctggagtatagtggcactatctgacctcactgcaaccgccgcc

SEQ ID NO: 230437 - DNA, 201 bp, Homo sapiens
gcctgcatgccgccttccctgcctgcttcctggctgtgatgagacgggtaactgggagggaaatgtattgtcctttggattgtgtctttcctaccactgctttttttttttttaagttttgtgtctttagttttagaatacatactttatctgagggtggatctttttttatcacagagatgagtttttctggacacactt

SEQ ID NO: 230438 - DNA, 201 bp, Homo sapiens
aaaatataaagatcgtttctttagattaattcttgagttgctcccctatgcctgtgtagcagaatctaaaagataatcatgtgaacgggagattatatttwaaaaataaactttgaaattcataaaaaggaaaatgttaaagaatgtaaaattatactggtagaaaaaaaatttttttttttgaagatggagtttcactct

SEQ ID NO: 230439 - DNA, 201 bp, Homo sapiens
tgaggggttgagatgtggggagggatgagtaggctgggatagttgttgtgtacataacagttatagctggagggttaaattatcgttgttctttcagaggrgaaaatgcatagcaaaaatcttagcaatgatcttgcattgattctgtttcctgggttccaataacaagacttgtctcattttttgcctttcttgcagatg

SEQ ID NO: 230440 - DNA, 201 bp, Homo sapiens
agcactttcatttctctgattactagccaatataagaatgtaaattagatcggaccattggtgtcagaataaaggtttatttaaaaagattttttccaaayctttaaatagcattaaaatattcttaatgcacagaaacattagggcactcagagccaaaatacgcaatgtttgggaaactcagcccattagaacatgtcc

SEQ ID NO: 230441 - DNA, 201 bp, Homo sapiens
gtgacctgaatgtgaaaaaaattgagaccactagttttgagccaaaatcatacaagcaaagagaaagcaagctgttgcccaagattgtggggtaaccataygtttgagccaggacttgatgaagtaattgtgcgcaggaccccgtaggggtactgggccgtagcccacagagcactgcaggcccctgctcaaagcagacca

SEQ ID NO: 230442 - DNA, 201 bp, Homo sapiens
gcatgtattcatttacagaaaacttccaatgactttgacattcctatagacatataggctatttgcaattgcctttcagcacaaggtcaggcataaatacktaagctggttgctggtattaccacatatttattagcatattcccagtattgatgatgacagttaaccccccagagtaaatatctagtttggcaattcaga

SEQ ID NO: 230443 - DNA, 201 bp, Homo sapiens
ccagaagagaggattttatgtgtatataaaatgtgtatgtatataaatttttttcgagatagggtctcattctcttgttcatgctggtgtacagtggcacsatcatggctcgctcactgtagcctccgcctcctgggctcaagtgatcctcctgccctagtctcttaagtaattgggactgcaggcgcgtgccaccacata

SEQ ID NO: 230444 - DNA, 201 bp, Homo sapiens
ggctctaatttggcatatttttcagacacaggttgctcttgatacatcaaatttctgctgttaaaaacttcagttattttgagtttagttaattcaggagygggaacctaggtaagtcatctgtagagcatctttgcaccttaagagaagtttctgattagcctcaattcagtttagtagaatattagtgtggatatctgg

SEQ ID NO: 230445 - DNA, 201 bp, Homo sapiens
cttgattttaaccagaatcttctttttttcttgagaaggggtctcattccgtcacccaggctggagtgcagtggcacgatcgtaggtcactgcagactcamaactcctggctcaagtggtcctttgcctcagcctcccgagaagctgggactacaggcacacaccaccacgcctgacaaatttcttcttcttcttcttctt

SEQ ID NO: 230446 - DNA, 201 bp, Homo sapiens
gcagatattttcttccattctgtagattgtctcttcagtctatcgattgcttcctttgctatacagaagctttttagtttgatgtaatcccatttgtctgkttttgcttttgaggtcttatacaaaagacccttcccttgcccagaccaatgtcctgaagtgtttccctatcttttcttctagtatgtatatttgtttggg

SEQ ID NO: 230447 - DNA, 201 bp, Homo sapiens
ttgctctggctaggacttacagtattatgctgaataaaagtgttgaaagtgggcatcctagcccggtgcggtggctcatgcctgtaatcccagcactttgsggggctgagatgggcagatcatgaggtcaagagattgagaccaccctggccaacatggtgaaactctgcctctactaaaaatacaaaaattagctgggta

SEQ ID NO: 230448 - DNA, 201 bp, Homo sapiens
tgcaaccgccgcctcctgggttcaggcgattctccagcctcagcctccaatgtagctgggattacagacatgcgccgccacacccagctaatttttgtatwtttagtagagatggcatttcgcgatgttggccaggctggtctctagctcctggcctcaagtgatttggcctcccaaagtgttgggattacaggcatgagc

SEQ ID NO: 230449 - DNA, 201 bp, Homo sapiens
tggcactatctgacctcactgcaaccgccgcctcctgggttcaggcgattctccagcctcagcctccaatgtagctgggattacagacatgcgccgccacrcccagctaatttttgtatttttagtagagatggcatttcgcgatgttggccaggctggtctctagctcctggcctcaagtgatttggcctcccaaagtgt

SEQ ID NO: 230450 - DNA, 201 bp, Homo sapiens
tatagtggcactatctgacctcactgcaaccgccgcctcctgggttcaggcgattctccagcctcagcctccaatgtagctgggattacagacatgcgccrccacacccagctaatttttgtatttttagtagagatggcatttcgcgatgttggccaggctggtctctagctcctggcctcaagtgatttggcctcccaa

SEQ ID NO: 230451 - DNA, 201 bp, Homo sapiens
tgcccacctcggcctcccaaagtgctgggattacaggcatgagccattgcacccggcagaaattttttaaaatagaaaaaaatagcccattcatgatacaygaattaaagaaaatattggtaacatgtatggtaacagattagtagctgagaacccaaaggctgccccaggttgcttcaaatcctggttctgccatgttcc

SEQ ID NO: 230452 - DNA, 201 bp, Homo sapiens
gtggccgcagcaagtaagaaacaaagtgggttattaacatccactggaatcttaacctcatttaaaggaaaacttgactttgagttaactgtatccccccmaccccccgctgtcaagaacccacctctctagctcattcctgtgtcagtgttgccgtattaactgcccacctgctgctttgtaaaaggagactagagttta

SEQ ID NO: 230453 - DNA, 201 bp, Homo sapiens
tgtgccactgcacctcaacctggatgatagaatgagactccatctcaaaacccactgcactgcagcctgggcggtagagtgagactccatctcaaaaaagraaaaaaaaaaaatcaaggattatgacattgtcagtttgagcaccattgtagactacatgatttgcaaattttatttctctcattttggagtataattact

SEQ ID NO: 230454 - DNA, 201 bp, Homo sapiens
ccgttgttgacagcttttttactaaaagattttctcactcactgttagggtctttagttctatcttcaattttttttttttttttttaaatattcagtttkggcctagtgcagtggcttatgcctgtaatcccagcactttaggaggcagaggtgggtggatcacctgaggtcaacatggtgaaaccccgtctctactaaa

SEQ ID NO: 230455 - DNA, 201 bp, Homo sapiens
ttttggtatgttgtctaggagatatgtggtctttattttaattaagttgctgacctttttactattttacataatataacagttaaagggtgattaaactkttttttaaaaaagtgatttttaaaaaaaagtgcttgttgacatcatctttctgagaacactagtatatgtgatttactataacaagatcttagtttttcc

SEQ ID NO: 230456 - DNA, 201 bp, Homo sapiens
tacttgattcaggcctcatcaccttttgattacgctttcagtgtattggtgtatgaagttgccttcttcttggttcagtccatcttctatgctgctgagasttattttcatgaaaatcaaatgtgtttataccagtcctttaaagaacttcactggggccctgtccagagcctgtgcctgtagcacggcccacgtgccctt

SEQ ID NO: 230457 - DNA, 201 bp, Homo sapiens
tcccacttggtcatggtaaatgatgtttttaatatactgttgaattcaatttgctattatttcattcaggatttttgcatccatattcatcaaggatattrgcctgtagttttcttttttgttgtgtccttgtctggttttggtatcagggtaatgctggccttacagaatgattttggaagatttccctcttcagttttt

SEQ ID NO: 230458 - DNA, 201 bp, Homo sapiens
aaagcaaggagatagtagtgacggtatcaagagcagcatcccaggttgactttctttggggcaggaccttgcttgtgtcttaacccttggttcctacccargtttgtctctctagtcctcaactctgaaagccacttgatatcttacacaattccttttttgcctgagaaaataaaagtcagttttgatcatttacaacca

SEQ ID NO: 230459 - DNA, 201 bp, Homo sapiens
tcaatgaggcctccaactcctggcctcaagaaatcctcccacttcagcctcctgagtatctgggattacaggcatgagccaccatacctaattttcttatwtttttttaatagagatggggtcttgccttgttatccaggctggtctcaaactcctgagctcaagcgatcctcccaccttggcctcccaaagtgttgagat

SEQ ID NO: 230460 - DNA, 201 bp, Homo sapiens
tctttgtgttgtaatagaataaactagaaaataatgaaatgagagtaattctgagatgctaatagaaactgtgatagcttgaaaataggagaatgtttagyctcatatgactttaggaatgtatgtagtctataagtgaaatactgttttagttaaccattaagtaaattaagtgatcactaacaatacaaaaaaacctta

SEQ ID NO: 230461 - DNA, 201 bp, Homo sapiens
tggggtttcgctgtgttggccagactgatcttgaactcctgacttcaggtgatctgcccgcctcagcctcccaaagtgctgggattacaggtgtgagccamcacgcccggccatctcctaacttttgacatggggataagtccttttgaaaagatgctaattgttgtaaagagagattattgattctgaagcatctttctg

SEQ ID NO: 230462 - DNA, 201 bp, Homo sapiens
gtaatcatataacacttaagggactcattattgggcttgtatggtaaatgacaaaatactagatacaaattataattgccttctataccgcaatgaaaatraaaaatgaaataatacgttaaagattatatctaaattggaaccttgttaacgatacccccaggctcctggcaaaagctaataaagggcccatgggaggct

SEQ ID NO: 230463 - DNA, 201 bp, Homo sapiens
ctttataatttttaattagaactagggattctttattctttagaaggataaagtagcatttcagtatgagaggcagaattacatttgcctaagtagataamctctagaatcagatagcccaagtttaaatcctgactctgccattcttgctgagtgacttgggtcacattactttactatagatgataaacagtacctgtt

SEQ ID NO: 230464 - DNA, 201 bp, Homo sapiens
agggcatatgcttaaattgctgtggcctaacaattcctgttgttacacttgctcaactcacaggttattttcctggcttcatatatgcaagtttgacattrctgttcaaagactttaaatttagaattctcttttaaaaatgtaaatgggattttgccttagaacagcaagccactgacattttgtgcagaatgtagtata

SEQ ID NO: 230465 - DNA, 201 bp, Homo sapiens
ttcttattttagaatgttttgaattctcttttttaatgcaataaatttaatttaccttttttttttaacctacaataagattgattccttttggtgtacartcgtgttgtgacttttgacagtgcattcagtcatgtaaccactgcccataacagaaacatagatcggttctgtcacctctcccctgccccagatgttctt

SEQ ID NO: 230466 - DNA, 201 bp, Homo sapiens
gaacaactttttttttccatttccttctggtattccaccaaagtctaatggacatcttatttcctttataagtctcttgttctttttatctgcactacccmaagaattctttttttctttttcttcagatattattagttttaccaaaaatatgtcttagtaattggccattctgggtcagtttttacaggtacatgatgt

SEQ ID NO: 230467 - DNA, 201 bp, Homo sapiens
tccctcccattcttctgcattccctctctgtattaggacctttttcgaggctcttctgtagtttccttcccagcctttcctgctccctaagacctgatggkttaatttgcccatactcttgtactacttaactgtgtccattagtcatacaagtacttctccttctacctttgcaagctcttaaagagccaagactgcatc

SEQ ID NO: 230468 - DNA, 201 bp, Homo sapiens
tcgcatatatcttcagagagtacaccaagccctggatggtgtctggtcgtcttcaaggacctgagcgggtgctgagaccaggtgctccagaggcccagccrcaaggccttgtgctccctgtggccttctgcccagttgcctctgagcgcatcagccacacctgtgtgcaagcatgattcttccttccattctgagatagta

SEQ ID NO: 230469 - DNA, 201 bp, Homo sapiens
aggcagatgatgcctgtagaaaaaaaagtgtatgttcttgatagttctgctactagtgctagtagaggttgagaaataagatttcctgtgaagtgtggttkggttgcttttgtggtatcccatgcaaaagagtttgaactatcttcatttttctccctttactggatcctttaaaagaggaaagggtgagataaccagact

SEQ ID NO: 230470 - DNA, 201 bp, Homo sapiens
agacctttcttgcccgaaattgtggactttatatgatggtttaaagaattattctttattattagatttgaagtttgataagcacatgcatttggataatwcctatagtatctagccataatcacgtgtttttagattgtgtgtctgcatctagtagctttctgaggactctgaagaaacagtagaaactaagaatttcaa

SEQ ID NO: 230471 - DNA, 201 bp, Homo sapiens
ggcttactgcaaacccctgcctcctggattcaagcgattctcctgcctcagcctcccaagtagctgggattacaggtgtgcaccaccatgcccggcttatktttgtatttttagtagagatggagttgcaccatgttggccaggctggtcttgaactccttacctcaagtgatccgcctgcttcagtctcccaaagtgctg

SEQ ID NO: 230472 - DNA, 201 bp, Homo sapiens
gtcaggaagtttgagctatgtgttctcctgtggccttagaacatccattcagccattccacaaatatgcccggacccccagtggagttgcagcttttgctyctggccttggggattcagcagagaatgctcctggcaagtttcctaccctcgaggtgctcactctagggcttattcttttggggcctcattgtagttccat

SEQ ID NO: 230473 - DNA, 201 bp, Homo sapiens
agggaccacggccgccgggtggtcccctggccccgccccctcccacctgggcaccccgagccccgccccccgagcgccccgccccgccccgccgccgactycgcgccgcgctcgggcgccgagtctgcgcgctgacgtccgacgctccaggtactttccccacggccgacagggcttggcgtgggggcggggcgcggcgcg

SEQ ID NO: 230474 - DNA, 201 bp, Homo sapiens
agcctgggcagtagaggagacttgtctctctctgtatatttgtctctctctccctctctctctctgtctctcataatacatatatacatacatatatatayacacacacacacacacacatacagagagatatataaaatagatataaaaataaagatattttaaagattatttataaatatatgttttttaaaaatgtag

SEQ ID NO: 230475 - DNA, 201 bp, Homo sapiens
taccttatttcagtggttttcaaactatgctcattggatgtccaggtgggtcaagaggttactttcaaccacagcatctctgccttgtctctttatatgcyacataagatttctgcataaggcttaagtattttaaagggggcagttatcatttaaaaacagtttggtcgggcgcggtggctcatgcctgtaatcccagca

SEQ ID NO: 230476 - DNA, 201 bp, Homo sapiens
ttttctttggtatcattaatatccttgaaaattcaatgagaattgtgattcctctttccagaaaaatgaacttaactcgcatccactggagatttcacatscattttcaaaaagataaggaaatccttctatagattcttaccgaggaatcctgtagtttccttggttggtcaatgctcatattattttttcctagttgaa

SEQ ID NO: 230477 - DNA, 201 bp, Homo sapiens
catgatcatatttgcttcttttttttttgacagagtcccgctctgtcgcccaggctggagtgcagtggtgcgacgtcagctcactgcaacctctgcctccygggttcaagtgattcacttacctcagcctcctgcgtagttgaaattacaggcacacaccaccatgcccggttgatttttttgtacttttagtagagacag

SEQ ID NO: 230478 - DNA, 201 bp, Homo sapiens
gaaattacaggcacacaccaccatgcccggttgatttttttgtacttttagtagagacagggtttcgacatgttggccaggctggtctcgaactcctgacytcaggtgatccgcctgcctcggcctctcaaagtgctgggattacaggcatgagccactgctctgggctgatcatatttacttgttagcaagatcgttctg

SEQ ID NO: 230479 - DNA, 201 bp, Homo sapiens
tcccagtgcataggttatatatgcgtttttcttctctggcatgtacaattgtcactgctttcatctgcaggggcccagatacactcttcttcctctacctytgtccctaggaatggtgacaagtgagagcacaggaaacatattttctagacatgatgctgggcgcttcacatgccatctcattaatcacaactgtctccc

SEQ ID NO: 230480 - DNA, 201 bp, Homo sapiens
gaccctatgtctataaaaacaaataaacaaaatggcacctaacttttaaaatgctttttcttacatgtaataatgtgagcaaaagcataatttaatttttsctattaaaatgctttttttttggtttctgttacatttctgtatttacttgaattcttagaacactgtttcctgggagatcaaacctggccattctggata

SEQ ID NO: 230481 - DNA, 201 bp, Homo sapiens
gaacaaacttatttaaaaataaataataacttgggtttatattctttggagtttttaaaaataaacatgtattttaaacggaaaattagaatcttgccacrtactcatttgtagctcttttcttagcagtacattgtaaacttttttttattataaacacaatttttaattgctttgacagtggctttggatataccactc

SEQ ID NO: 230482 - DNA, 201 bp, Homo sapiens
aaatctattagtggggaagactatattatacaaatagtcatgagcatttctgggaactggcttccaatatcccagacagcgtgacctgaatgtgaaaaaarttgagaccactagttttgagccaaaatcatacaagcaaagagaaagcaagctgttgcccaagattgtggggtaaccatatgtttgagccaggacttgatg

SEQ ID NO: 230483 - DNA, 201 bp, Homo sapiens
taacatcttgcataactacagtccaatatcacacctgggaacctgaaacaatacagtccatccaggtttcaccagttttacatgcactcatttgtgtgtgygtgtaagttctgtgcagttttatcacgtgtagattcctggaatcaccaccacagtctagatgcaaaccagtggagcattcccatcacagggtcacttgca

SEQ ID NO: 230484 - DNA, 201 bp, Homo sapiens
tataaggtcatctagagtacttgtctttcagttttttctttttagttgcccttcactatttctgtaatgttggcccgctttatgtttagtgagttccaggratactgttataatgctgactgtcttctatttccctgtccctaaagatttagcaagatgagagtctctaattattatgatgcttagctgggatttggttca

SEQ ID NO: 230485 - DNA, 201 bp, Homo sapiens
aggtaaaataggaattaccaaggaattttgtactttaataccctcttagggtattaaggagggtttgtcagtgaaaataatcaagaaggactggtccattygagccactgattttgacagacaagaaaacagacccctgagtgccccttatcataggactgtcggcgactgggatgctgatagtgtttctcaagtagtagt

SEQ ID NO: 230486 - DNA, 201 bp, Homo sapiens
ctcaagtgatccttccagctgggcctcccaaagcaccaggattgcaggtgtgagccactgtgcccagaggaaacattcggaatctgtgatagaaggggaargttttagctccagaacacaagtagagctggctttgccttatgtgatagacctagtgaatagctcagctgtctgctttcctaatgccatttagacagatac

SEQ ID NO: 230487 - DNA, 201 bp, Homo sapiens
ctgtatattttattgcttatgcaatgtgcttataaaattgtttatttttgtgtcttgggtattcctgaaaatgcctcatcagtgtcagatctagttgctgktgagatttggttttgctgcgtatattagttacagacctgatttagctacatgggaaagaaaattaatcaatagctgatttaacaaccaggagtttatgtt

SEQ ID NO: 230488 - DNA, 201 bp, Homo sapiens
aaaattaaatttctcttccacgtgcaggctaataacagtgtcttatatcttgcaaaagtacttaccagtccattcacttccagaaaaatggagaagtttcrtattagaaatttgtgcatcatgtttcataaataaaaacttcagatactcggctgatggtgttggctcaaacctgtaatcctagcactttgggaggctgag

SEQ ID NO: 230489 - DNA, 201 bp, Homo sapiens
aagtgttgggattacaggcgttagccactgcgccaggcttgttgctgaacatttatggctctagaaataattttttttttaaggagaagtaatgacaaacrtgatagaaataaaatttgaggatatttctgggttcaaaataaagtaacagttaaatagcgtgaacatgaagaaataaatattttcaggtagaaactccaa

SEQ ID NO: 230490 - DNA, 201 bp, Homo sapiens
acctgtttttcttatgcacagttttcctttctttaaaataattgtaattatagatgtctatataatatccatatgtatttccttttcatatcattccatcscctttgtaagttttgcttaaaatagttattggtgtagtttggtttttttccttccccaagttataagagtagtatgtactcgctgtagaaaacttagaaa

SEQ ID NO: 230491 - DNA, 201 bp, Homo sapiens
acgctgtctcaaaagaatattgaggcttttcccctcattattccagtgttcaaatagggtgaaaactatgtggatggttttatttgcgcctaggtcctctstgttagagtactcaagtcctgctctgtgtgcacttcctttcacttgtttttatttcctcatagtgctctacggaaacgtattcgagaggacagaaaggcc

SEQ ID NO: 230492 - DNA, 201 bp, Homo sapiens
aaaacttagaaaacagagaagagtataaggaacaaacttatttaaaaataaataataacttgggtttatattctttggagtttttaaaaataaacatgtaytttaaacggaaaattagaatcttgccacgtactcatttgtagctcttttcttagcagtacattgtaaacttttttttattataaacacaatttttaattg

SEQ ID NO: 230493 - DNA, 201 bp, Homo sapiens
tgtcgagtttcatggatctggctaccaatattaaaattatattactgtgactaatagttgagtgtggtcccagtatagtttgtctcaaataggtaaaagtmcacaagattttattaagattattatattcaactatatactcatgtacataaatactaaatgctttattataaaattttgaaattaaaataagcatagttg

SEQ ID NO: 230494 - DNA, 201 bp, Homo sapiens
attagaaagaaagatgaaacagtaccaggcctcaaaatgagagctcctttgaggttatagtttagtgaaatgtaattccttggcttcaccagtcagcattratgacctgaggcaggtgactcaggagtgctggctcccttgtgtgtcacagggaggacagagacgagtgagtttgctgaacctatataggcatgagtgagt

SEQ ID NO: 230495 - DNA, 201 bp, Homo sapiens
atacatactttatctgagggtggatctttttttatcacagagatgagtttttctggacacacttttttgtggagtctttgacagtgcagtttgtggctagsaaggattttttttctgttaatttatctggtgtgatattgtcctcaggctctcaattctaaggcattttctgcccctattccagataggatattggaaaca

SEQ ID NO: 230496 - DNA, 201 bp, Homo sapiens
ttatcgaattgatctaaatgggattttttttttttttttttttgagatggtgtctcactctgttacccaggctggagtgcagtggcgtgatcttggcttamtgcaaacccctgcctcctggattcaagcgattctcctgcctcagcctcccaagtagctgggattacaggtgtgcaccaccatgcccggcttatttttgta

SEQ ID NO: 230497 - DNA, 201 bp, Homo sapiens
tttgggcaaatgagcgtgtgccttgggtggactccagtgttaggtgggcttggggttgccttgctgtcctcatgccctcgtctgccccactgccaccctgytccagctctgcaccgagtaaatcatctctcagagctcctcaccatgctcaggatatcgtcctgctttcaattctacagataaaaattgtaaaaatcagga

SEQ ID NO: 230498 - DNA, 201 bp, Homo sapiens
ttgcccaggctggtctcaaactcctggactcatgtagtccacctgcctcgacctcctgatgtgttgggattacaggtgtgaggcaccgtgctcagcctccrtaatgtatttcaaatctgttttcttctctgttcacattggcttggttcaggccctactacgcttttcctcgtcattacagtagcctccaaacccatctcc

SEQ ID NO: 230499 - DNA, 201 bp, Homo sapiens
cactgtgttggccaggctggtctcaaactcctgaccttaagtgatctgcctgcctcggccttccaaagtgctaggattacaggcatgagccactgtgcctrgcccagtattttaagatgaaagttaaaattaatgtgctgtctaacctaatttagagtaaaaataagagaatgagaaaaaaaaagcagaaagaagtaacaa

SEQ ID NO: 230500 - DNA, 201 bp, Homo sapiens
aagtaactcactaaggccatgcatgttcaaggagagggtacttaatactcttattagtttgatggaggaagtatcagtgaattgtggacatattttaaaascatcaccactatagatgatacgaattgcttcgtagataacccctctagaaatgtgcagacaagtcaaagaattattaagaaacattttgatagtcttaga

SEQ ID NO: 230501 - DNA, 201 bp, Homo sapiens
tatgtggtctttattttaattaagttgctgacctttttactattttacataatataacagttaaagggtgattaaactgttttttaaaaaagtgatttttwaaaaaaagtgcttgttgacatcatctttctgagaacactagtatatgtgatttactataacaagatcttagtttttcctgttggcaaatgacatgtaata

SEQ ID NO: 230502 - DNA, 201 bp, Homo sapiens
attacttcttcagagtttcatgaaggcactgccagtgctttgcacagtatcaggtgcttagtaagcacttgaaaatatgtgctgaatgaatgactttttaygaggaaagggcaacttgatatatttatgtgattgcagggatgaacctaaagagagaggtggaggttgaaatagaagggatgattgttggagccagaaatc

SEQ ID NO: 230503 - DNA, 201 bp, Homo sapiens
gttctttggtgtattcatcatcatgcggtgattttattttttgttctgattcatgcagcttattcagatattaaattgggcctccttcgtgcttcagcatrtttccctatgtttgactttagtgggctaaacataggttttctctttagggctccctgttggtagggacttgaaaaacagtatcagattgatcacattctg

SEQ ID NO: 230504 - DNA, 201 bp, Homo sapiens
ctgataactgaggaagagatacatttccacaggctaactttaaagaatataagctctcactttcctgagtagaagaaaactaaacttttctgttctatgctttttttttttttaatttttatttttattgatcattcttgggtgtttctcacagagagggatttggcagggtcataggacaatagtgaagggaaggtcagc

SEQ ID NO: 230505 - DNA, 201 bp, Homo sapiens
taatgcttttttctttactaccagttagaagtgttcttaaagacaagtagctagaagagtggttttccattttcttcagttgcagcacacttgaagatttracccacttcctctgaaacaggtggctcatcacggtggcagttccagtgtgggtgtgcgttcagggaatagcgggtgtgggcagtaattctgatacttagg

SEQ ID NO: 230506 - DNA, 201 bp, Homo sapiens
gctgccttcaagcatctgtttaacaaagcacatcttgcactgcccttaatccatttaaccctgagtggacacagcacatgtttcagagagcacagggttgsggggtaaggtcacagatcaacaggatcccaaggcagaagaatttttcttagtacagaacaaaatgaaaagtctcccatgtctacttctttccacacagac

SEQ ID NO: 230507 - DNA, 201 bp, Homo sapiens
cactttgggcaaatgagcgtgtgccttgggtggactccagtgttaggtgggcttggggttgccttgctgtcctcatgccctcgtctgccccactgccaccstgttccagctctgcaccgagtaaatcatctctcagagctcctcaccatgctcaggatatcgtcctgctttcaattctacagataaaaattgtaaaaatca

SEQ ID NO: 230508 - DNA, 201 bp, Homo sapiens
gacggggcggcggggcaaaggcactccccacatctcagacgatgggcagccgggcagagacgctcctcacttcctagatgggatggcggccgggcagagaygctcatcactttccagactgggcagccaggcagaggggctcctaacatcccagacgatgggtggccaggcagagacgctcctcacttcctagacggggtg

SEQ ID NO: 230509 - DNA, 201 bp, Homo sapiens
tgggtggactccagtgttaggtgggcttggggttgccttgctgtcctcatgccctcgtctgccccactgccaccctgttccagctctgcaccgagtaaatyatctctcagagctcctcaccatgctcaggatatcgtcctgctttcaattctacagataaaaattgtaaaaatcaggaaacaccaccttagcttcatgttc

SEQ ID NO: 230510 - DNA, 201 bp, Homo sapiens
ttttttgtttttttgttttttttttgagacagagtcttgctctgtggccccaggctggaatgctacggcacgatctcggcttactgcaacctctgcatgcygagttcaagcgattctcctgcctcagcctcctcagtagctgggattacaggcgtgcaccaccacgcccagctaattgttgtatttttagtagagacaggg

SEQ ID NO: 230511 - DNA, 201 bp, Homo sapiens
caccttagcttcatgttctatcacctggaaactcactttcttttgcccctatccttccctaaagtcccaggagagaagcctcccctccctctgtcctagcygaatccttcgtccccatcctcctcatgggccctgctcttcatcatcactgctttttgtgtgttttcagcctctttctatctcataacttcttctcttttg

SEQ ID NO: 230512 - DNA, 201 bp, Homo sapiens
gtaatcaacagagtgaaaaaggattttttaatgccatgtcacagaaacctagagaaaaaaggtttaagtttgatttcataaaaatttaaatttttgacataaataccataaaggtcaaaagataaaaaattttaaatattttcaatatataacaaaaactaaactttcttaatatgtaaagaactacatatcaaaaagaga

SEQ ID NO: 230513 - DNA, 201 bp, Homo sapiens
ggtggttctcgttcactaagtccagaggggctcaggaatgtgtattttttaaaagctgggatggtgttgctgtaccttttccaactgatagtcattatgtmatttaaaaatgtgtttctggctgggtgctgtggctcatgcttataatcccaacactttggaaagctgaggtaggaggattgcttaaggccaggagtttga

SEQ ID NO: 230514 - DNA, 201 bp, Homo sapiens
atcttcctcttcccccagcccctggcagccagcattctgctttctgtttctatgagtttgattactttagacactaaatatatgtgtaatcatgcagtatktgtctttctgcgactggtttatttcatttgacatactgtcttcaaggttcatccatgtgaaacagtcagattttaaaggaaattaacacagagactcatg

SEQ ID NO: 230515 - DNA, 201 bp, Homo sapiens
ccttggagtagaatagctagttcatatgttaactctttgttcagcatttgtttttctaaagtggctacatcattttaacctttagttttttgttttttggktttttttttgggagtggggtggggctggagtgcagtggcgttatctcggctcactgcaacctccgcctcctgggttcaagcaattctcgttcctcagcct

SEQ ID NO: 230516 - DNA, 201 bp, Homo sapiens
gaacccagcaaaattatttctatagtagaatcaatttagttccttattttaagccatgcatatatatctcaaagcaaatttcaagagggattaaatgttaytatgtgaaaatattaggaggtgaaataataggagaaagtaaacacattgaaagtaggtatgttcaggccaggcgcggtggcttatgcgtgtaatcccagc

SEQ ID NO: 230517 - DNA, 201 bp, Homo sapiens
caaaaattagactactttggaaaaaggtggtgtgtggtcttaatgtaggcaatgcacatgtgtgtttaagtttcaaatacagctaaggagctaagtggaattttttttttttttttttaccaaatagcgtgtattaataatagctcagttccatttactgatttgtttttcctttgtttatgtcatatattatctttccaa

SEQ ID NO: 230518 - DNA, 201 bp, Homo sapiens
tgtgaatcagctaaagaatcaaagtcctccaactacttgaggggttgagatgtggggagggatgagtaggctgggatagttgttgtgtacataacagttayagctggagggttaaattatcgttgttctttcagaggagaaaatgcatagcaaaaatcttagcaatgatcttgcattgattctgtttcctgggttccaata

SEQ ID NO: 230519 - DNA, 201 bp, Homo sapiens
aagctagaaatagaagggaacttctaagatttctaagagataactgcaacaacatcactcataatgatgacatgatgaaagcattgttttaaaaaaatatygggaacaaggtaagtgtgttcattcttaccacttatacttaacattatacttctgtctccctgaccttatactctaggtcctagttagtacagtaagcaa

SEQ ID NO: 230520 - DNA, 201 bp, Homo sapiens
ggtctttattattttctttgttctgctaattttgggtttagtttattattttctagttccttgaggtacatcaggttgtttatttgagaactttctttttytttttttttttttttttttttgagacagtttcactctgacccctagactggagtgcagtggcatgattttggctcagtgcaacctccgcctcccgggttc

SEQ ID NO: 230521 - DNA, 201 bp, Homo sapiens
ttagccaggtgtggtgatgcgagcctgtggtcccagccactcgggagactgaagtgggaggatcacttgagctggggaggtcgaggttgcagtgagctgasataccaccactgcactcccacctgggtgacaaagcaagaccctgtctcataaataataataataaataaataattatgtggatatgatatatgaaataat

SEQ ID NO: 230522 - DNA, 201 bp, Homo sapiens
ttttatcttgtggttatatttgttagattggaatgaaaatagtcgaagtctgccatacattatagctttactgctgtattttcctaatataaaaattaaayacctgaaattttataaatgctaacatattccaatatataatacatgtattattatatattatagtggaagagtttattatgatttagtaatgttattccc

SEQ ID NO: 230523 - DNA, 201 bp, Homo sapiens
cgcctcagcctcccaaagtgctgggattataggtgtgagccactgcgcccggccgaaaatttatatttttaaagcgaaagctaacttctaattttgaaaawttttattgggagcaggatattataataataatctttagttgttaaaccattaaacatcaaggttttttacattgtttctatgcctcctccctcaaaaaaa

SEQ ID NO: 230524 - DNA, 201 bp, Homo sapiens
gaattccttggtgggggtgggtggcatgcctttgcatattgctttctctctgctgagaatgcaagcctgtccctagccgtttctgccactcctcctgatcyggtgagtttgatctgcctttcacaatgaatcccagtcagtaaatatttatcactgacatgctgaccctggcaaaaattgatgagagactcaactaaggca

SEQ ID NO: 230525 - DNA, 201 bp, Homo sapiens
tgaggattctgagttaattcatgggctttttctcctggtgtcatgcttctcttgctttcccatctaaatgtataaggtcacattttgtatttcacatattkaaattagcataaattctcaatctatgagatttttacttttaaaaactagaaatatctctaaactgttaacagagtctaagtagtgaagtatcttcagtgg

SEQ ID NO: 230526 - DNA, 201 bp, Homo sapiens
tcctattatacgtatgttggattttctttgcctaccttttttatttgtcacgttctctttaatcctgtttatctctttatttctattttacttaaaaaaawtttttttttttctggccaggttggagggcttacacctataatcccagcactttgggaggctgaggcaggagggtcacttgagcccaggaattcaaaacca

SEQ ID NO: 230527 - DNA, 201 bp, Homo sapiens
tccagctttaagatcttgtactgttctacttcagatttcttactttattctacatttcataattgctggtttttaatgatgatgaaaatttcctaatccayttctaattagatgtggcaatgacatgccagaatttccagcagtatcagcatagtcatttacaggggtttttcctgatcttcaatatcatttaaaaattaa

SEQ ID NO: 230528 - DNA, 201 bp, Homo sapiens
ggtggtgcacgcctgtaatcccaactactcaggaggctgagggagggagaattgcttgaatccaggaggcagaggttgcagtgagccgaggtcgtgccatkgcactccagcctgggcaacagagcaagactccagctgtgttcctgtttattatttagtctttagaatcaccagtggaatggcatgggttgtgattgtgtg

SEQ ID NO: 230529 - DNA, 201 bp, Homo sapiens
tttgaaaacataacttaaatcagaatgacttatttgaaagagaaaaatatttgataagtaaaaagatatgcagattaatgtaactatgagctattatactrcgtcaattcacaggaaactaaaatgcattttttacttgaggtagtacagctcctgcaagtcaaaaagaaaaaaaacagcccatggaaaaaactggcaaag

SEQ ID NO: 230530 - DNA, 201 bp, Homo sapiens
ttgtgctatgagttgcctacattttggatcattgccactaagaaagaaattaactagtgactcaattattccttgctttttttgagcaaaaatcatattamaaataattagatttaaaatttttggttaaattatactttaaagcaaagatccttgccatttagatctagtttggtattaaatgagaacggtggttctcta

SEQ ID NO: 230531 - DNA, 201 bp, Homo sapiens
tcttgcattgattctgtttcctgggttccaataacaagacttgtctcattttttgcctttcttgcagatggaaaaaggagatgatattaacataaaacaartgttactgaacatgagaaaataccgaatgggtcttattcagaccccagatcaactgagattctcatacatggctataatagaaggagcaaaatgtataaa

SEQ ID NO: 230532 - DNA, 201 bp, Homo sapiens
cagaggagaaaatgcatagcaaaaatcttagcaatgatcttgcattgattctgtttcctgggttccaataacaagacttgtctcattttttgcctttcttscagatggaaaaaggagatgatattaacataaaacaagtgttactgaacatgagaaaataccgaatgggtcttattcagaccccagatcaactgagattct

SEQ ID NO: 230533 - DNA, 201 bp, Homo sapiens
cctttaatttttatatatttgttgtaattgcaattattggatgcactacactacatttgagtcccctaattagttttatcgaattgatctaaatgggattttttttttttttttttttgagatggtgtctcactctgttacccaggctggagtgcagtggcgtgatcttggcttactgcaaacccctgcctcctggattca

SEQ ID NO: 230534 - DNA, 201 bp, Homo sapiens
gatctttagttgactttttcatgtattgtgaagttggaaatgtattgaattgaaatttcgattaaaaaatgtagtgaagcatattactttgtcctctaacytaactattaataactttcttgttgtttttatatttaaaaaataactctggattttttaattccaccattttgtgaagctccaacttaggaaaaatcagtc

SEQ ID NO: 230535 - DNA, 201 bp, Homo sapiens
catcgtgcactaggcccggtaacgaaaaaaaaaaaaaaagattttaaatcaagctacgtgtccaggggtatgctctagaaaaattaccatggcaataatayttaatttgagggcagggaagctggttaggcctttgctgtaatacagaaaagtgaaaagagggaatggaagaaatagtaacctatatgttgccattggccg

SEQ ID NO: 230536 - DNA, 201 bp, Homo sapiens
acacctgccttttctccttttccccatgtttataagtggtgccgttatttacacattttctgaagccagaaacagattcttccctcattcatttcccacgwcactaatactaatttccatttccatgatgtattcctatttctttttcttttttctttttttttttttttttcaagacagggtctggctctgtcactcagg

SEQ ID NO: 230537 - DNA, 201 bp, Homo sapiens
acccaccaagttcagtgcacgctggatgggtccgacccaccgagttcagtgcacagtgaatgggtccaacccaccgagttcagtgcacgctggatgggtcygacccaccgagttcagtgcacagcgaatgggtccgacccaccgagttcagtgcacgctggatgggtccgacccaccgagttcagtgcacagtgaatgggt

SEQ ID NO: 230538 - DNA, 201 bp, Homo sapiens
gtgtgtgtgtatgtgcacgagtgtgtctccgtgtgtgtatgtgcacgagtgtgtctccgtgtgtatatgtgcatgagtgtgtctctgtgtgtgtccatgagtgtgtctctgtgtgtatatgtgtatgagtgtgttcgtgtgtgtgtgcatgagtgtgtgtctgtgtatgtgcatgagtgtgtctctgtgtgtgtgtgcatg

SEQ ID NO: 230539 - DNA, 201 bp, Homo sapiens
tgatacgtgagaggctcccacgcgattagggtaagtgctgtgttgtgggacttccccaggtctcacttcaagatgcatatcttactcttggataccaccggaaaaaaaaaaaaaaaaaagggaagcgctgtcttcgttcctcatatgcagcgtgcaccttggtttctgtccttgctatgcccttgcctgcttaagtgttga

SEQ ID NO: 230540 - DNA, 201 bp, Homo sapiens
aaacagcctcccttgcctgcgactggggccaatgctccccactggacggagctcctgatgatggctcagccccatcccatattgcttctagttactaaacwgccttgttcctgctgaagacagctcttcccgagcctggtctggctggtggcttcttggggcctgtgtagggttgctggagcttcccccgtctgtgctgtc

SEQ ID NO: 230541 - DNA, 201 bp, Homo sapiens
gttcagtgcacgctggatgggtccgacccaccgagttcagtgcacgctggatgggtctgacccactgagttcagtgcacagtgaatgggtccgacccaccragttcagtgcacgctggatgggtccgacccaccgagttcagtgcacagtgaatgggtccaacccaccgagttcagtgcacgctggatgggtctgacccac

SEQ ID NO: 230542 - DNA, 201 bp, Homo sapiens
gagtgtgtgtgtatgtgcacgagtgtgtctccgtgtgtgtatgtgcacgagtgtgtctccgtgtgtatatgtgcatgagtgtgtctctgtgtgtgtccatgagtgtgtctctgtgtgtatatgtgtatgagtgtgttcgtgtgtgtgtgcatgagtgtgtgtctgtgtatgtgcatgagtgtgtctctgtgtgtgtgtgca

SEQ ID NO: 230543 - DNA, 201 bp, Homo sapiens
tctgtgcccagcctgaaatatatttttctattcctttcagtcaatgtccatctttatagatatggctggtttattgtgggcagcttatagttgggtcttawttctttatccatacagccattctatatcttttaattggagaattgagtacatttaaattcaatgttattattgatgagtaaggactgactactgctattt

SEQ ID NO: 230544 - DNA, 201 bp, Homo sapiens
gccccatcccatattgcttctagttactaaactgccttgttcctgctgaagacagctcttcccgagcctggtctggctggtggcttcttggggcctgtgtrgggttgctggagcttcccccgtctgtgctgtcctgggtatctcttgggtgaggccctgcgctttgctgctcgttgtcacggcttctaagggcccaggtgc

SEQ ID NO: 230545 - DNA, 201 bp, Homo sapiens
agttcagtgcacagtgaaagggtctgacccaccgagttcagtgcacgctggatgggtccgacccaccgagttcagtgcacgctggatgggtctgacccacygagttcagtgcacagtgaatgggtccgacccaccaagttcagtgcacgctggatgggtccgacccaccgagttcagtgcacagtgaatgggtccaaccca

SEQ ID NO: 230546 - DNA, 201 bp, Homo sapiens
catgagtgtgtgtgtatgtgcacgagtgtgtctccgtgtgtgtatgtgcacgagtgtgtctccgtgtgtatatgtgcatgagtgtgtctctgtgtgtgtccatgagtgtgtctctgtgtgtatatgtgtatgagtgtgttcgtgtgtgtgtgcatgagtgtgtgtctgtgtatgtgcatgagtgtgtctctgtgtgtgtgt

SEQ ID NO: 230547 - DNA, 201 bp, Homo sapiens
gtgatcatggctcactgcaggcttgaccttccatgctcaagtgatcctcccacctcagcatcccaagtagctgagaccacaggcacatgccaccatgcccrgctaatttttgatttttttatagagatggagtctcactgtattgcccaggctggccttgaactcccagacacaagcaattctctcaacttggcctgtcaa

SEQ ID NO: 230548 - DNA, 201 bp, Homo sapiens
acccaccgagttcagtgcacagtgaaagggtctgacccaccgagttcagtgcacgctggatgggtccgacccaccgagttcagtgcacgctggatgggtcygacccactgagttcagtgcacagtgaatgggtccgacccaccaagttcagtgcacgctggatgggtccgacccaccgagttcagtgcacagtgaatgggt

SEQ ID NO: 230549 - DNA, 201 bp, Homo sapiens
ctctgtcccagccatccgtggatgggccgggctgagtgctctgggacttcagaagcccaggcacgccgggctgaatctgaaggcgggtgtgtggcgcagcycctggagcaggcgtgttaaaccctaagctccttcccatgtagcaggaccgcccattcctgtgggccatgtggctgcacaacgtggagcgaggtcgaagtc

SEQ ID NO: 230550 - DNA, 201 bp, Homo sapiens
tgtatgtttttatttgatgactgtacctgttggccatttatatgtttttatttgaaaaatgtctattcagatcttttgcccatttttaaattagaggtttkttttttttttgctgttgagtgttttgagctctttatatattctggttattaatcccttgtcagatggatcgtttacatatattttctccattctgtgggt

SEQ ID NO: 230551 - DNA, 201 bp, Homo sapiens
gggagcagcgggcatcgtgtgcagttggggtgggtgtggggagagacgggcgtcatgtggagttggggtgggtgtggggatcagcgggcatcgtgtggagycggggtgggtgtggggagtggcgggcgtcgtgtgcagttggggtgggtgtggggagcagcgggcatcgtgtggagtccagcaaccaagtgggccaggcgt

SEQ ID NO: 230552 - DNA, 201 bp, Homo sapiens
gtggaatttctggatcatatgttagttctagtttcacttttttctgagcaacctccatactattctctatagtggctgcgctaatttacattcccacccacagtgtccgagggctcctctccacatccgtgccagccatttgttattttctgtcttttcaataagagccattttgggccaggcccggtggctcatgcctgt

SEQ ID NO: 230553 - DNA, 201 bp, Homo sapiens
gcagcctcatcctcctgggctcaagtgatcctcccacctcggcctctcaagtagctgggagtacaggtgcacgccaccacacctagctaattatttttttsgagatggggtctcactatgttgcccaggctggtctcaaactcctgggctcaagggatcctcccacctacttcccaaagtgctgggattacaggcgtgagc

SEQ ID NO: 230554 - DNA, 201 bp, Homo sapiens
tctagggaccagctcctcgggcccatgcagaaaggaagagaaggagtctccctggactggattctgggagggaccctcactctttctgcctgaatgaacaytagtgcgtggacttttccagtctttccatctgttctgttttgaagtttattcatgttgatttacgtgaatctagttcactctttttgcctctggtgtcac

SEQ ID NO: 230555 - DNA, 201 bp, Homo sapiens
agtggaatttctggatcatatgttagttctagtttcacttttttctgagcaacctccatactattctctatagtggctgcgctaatttacattcccacccacagtgtccgagggctcctctccacatccgtgccagccatttgttattttctgtcttttcaataagagccattttgggccaggcccggtggctcatgcctg

SEQ ID NO: 230556 - DNA, 201 bp, Homo sapiens
gcggacagggtcttgctctgtcaccagggttggagtgcattggtgcaatcatagctcactgcagcctcatcctcctgggctcaagtgatcctcccacctcrgcctctcaagtagctgggagtacaggtgcacgccaccacacctagctaattatttttttggagatggggtctcactatgttgcccaggctggtctcaaac

SEQ ID NO: 230557 - DNA, 201 bp, Homo sapiens
tagtggaatttctggatcatatgttagttctagtttcacttttttctgagcaacctccatactattctctatagtggctgcgctaatttacattcccacccacagtgtccgagggctcctctccacatccgtgccagccatttgttattttctgtcttttcaataagagccattttgggccaggcccggtggctcatgcct

SEQ ID NO: 230558 - DNA, 201 bp, Homo sapiens
tgttgattttgctttataaattatcttttgctcaaataaaatgctctcgagatcatagctctgtatttttggcgggtgtaggcggacagggtcttgctctrtcaccagggttggagtgcattggtgcaatcatagctcactgcagcctcatcctcctgggctcaagtgatcctcccacctcggcctctcaagtagctggga

SEQ ID NO: 230559 - DNA, 201 bp, Homo sapiens
tttcttaatccagtctatcattgatggacatttgggttggttccaagtctttactattgtgaatagtgccacaataaacatatgtgtgcatgtgtccttakggtagcatgatttatagtccttttttttagttcacatatatattgttttttcttcgctgctaaagagtatgaattgggaagagaaaagaaaacaggtttc

SEQ ID NO: 230560 - DNA, 201 bp, Homo sapiens
gacccagtatgcatgggtagatggtgagggctctgccaagatccagtatgcatgggtagatggtgagggctctactaagatccagtatgcatgggtagatsgtgagggctctactaagacccagtatgcatgggtagatggtgagggctctactaagatccagtatgcatgagtagatggtgagggctctactaagaccca

SEQ ID NO: 230561 - DNA, 201 bp, Homo sapiens
caagagcccccgcagtgagaaactcccaggagccccaggggagggtctgggtaaatggcatttgcatctggatgtggtgtatccaccacctgcagactccrgccctcacgggcaatgttgctacctgtttcacctgtgttctggatttgccaagtgaggaaggtggggaatggggcctcatgttatgtaactctccttccc

SEQ ID NO: 230562 - DNA, 201 bp, Homo sapiens
aaacgtttcataataagaataaaaggacgaacaaagcaagcaaaagacattaaaaagaagaaaataatgaagacaagagcagaaaatactgaaataggtaygaagaaatgagggcaagcatcaagaacacaaacagcagaaatatctctgggtctttgaaaagacttacagagctctttttaccgacaatgacaaaaaagg

SEQ ID NO: 230563 - DNA, 201 bp, Homo sapiens
gttttaccatctactacactgcctgcgtctgtctgcatggtgggagtgcccgtgaggctgaagtgccgccctcccggtcctcaggtccccctgctgtgcaygtccccagccgtggactcaggccctgtggtcctgaggggtcatgggtataggaggtaggtttggaatcagctgtacctgcttccagattctggctctggc

SEQ ID NO: 230564 - DNA, 201 bp, Homo sapiens
agcaggcgggggattgggcagaaggcctgccctgacctcccaatgctgcttcccttgagctacctgagccccggtttcccatctgtgaagtggggtggacrtgacaaggatgtgtcattccggcccgtcaggtacccgaaggtgaggtggcacccgcccccgctgcctcccccagaccatggtgtccagcagaatcatggc

SEQ ID NO: 230565 - DNA, 201 bp, Homo sapiens
agtaggttctggttgtacacagaaagagaaacaatccctcctgccagggccgcgggggcgatgggagatggcaggtaggcaaggccaagcaggtgcagtakgcctgggggagggcggcccttggtgtatgcagctctggatcctggccttgccagtgctctgcagagtcaactccagagagccacccccctctgggccttc

SEQ ID NO: 230566 - DNA, 201 bp, Homo sapiens
agaatccccagccctgtttttgggcttaccagagtggcaaccacaagctcatttctcctgctggttcttctcttcccacacatgaggtcccttaagcagartaagccccatgagagaaagccagaaagagacgcagtgtggaaaatcagcaaagcagtaggtatgagtgcccagtgtgaggaacagagctcgcacctaagg

SEQ ID NO: 230567 - DNA, 201 bp, Homo sapiens
gcatgagtgtgtgtgtatgtgcacgagtgtgtctccgtgtgtgtatgtgcacgagtgtgtctccgtgtgtatatgtgcatgagtgtgtctctgtgtgtgtccatgagtgtgtctctgtgtgtatatgtgtatgagtgtgttcgtgtgtgtgtgcatgagtgtgtgtctgtgtatgtgcatgagtgtgtctctgtgtgtgtg

SEQ ID NO: 230568 - DNA, 201 bp, Homo sapiens
tgcatgagtgtgtgtgtatgtgcacgagtgtgtctccgtgtgtgtatgtgcacgagtgtgtctccgtgtgtatatgtgcatgagtgtgtctctgtgtgtgtccatgagtgtgtctctgtgtgtatatgtgtatgagtgtgttcgtgtgtgtgtgcatgagtgtgtgtctgtgtatgtgcatgagtgtgtctctgtgtgtgt

SEQ ID NO: 230569 - DNA, 201 bp, Homo sapiens
gtgcatgagtgtgtgtgtatgtgcacgagtgtgtctccgtgtgtgtatgtgcacgagtgtgtctccgtgtgtatatgtgcatgagtgtgtctctgtgtgtgtccatgagtgtgtctctgtgtgtatatgtgtatgagtgtgttcgtgtgtgtgtgcatgagtgtgtgtctgtgtatgtgcatgagtgtgtctctgtgtgtg

SEQ ID NO: 230570 - DNA, 201 bp, Homo sapiens
aaaaccctggtgctgcactcggacccggggtccccgaggaaaccctggtgctgcactcagatctggggtccctgaggaaaccctgaccatggcactcggasccggggtccccgaggaaaccctgaccatggcacttgcacccggggtccccgaggaaaccctggtgctgcactcagatatggggtccccgaggaaaccctg

SEQ ID NO: 230571 - DNA, 201 bp, Homo sapiens
taccataaatcagaagacactctgcatggagcttaatgaaatatgtatgattttaaaaagaaaagatgggagctgcaggacgttgctctgtgtgtgtgtgygtgcacgtgtgcgtgcacgagtgtgtgtgtgtgcacatgcacgtgcatgcgtgtgtgtttgggtgtgcgtgttggggggtgtgttcctgctgttctcatg

SEQ ID NO: 230572 - DNA, 201 bp, Homo sapiens
gtagtggaatttctggatcatatgttagttctagtttcacttttttctgagcaacctccatactattctctatagtggctgcgctaatttacattcccacccacagtgtccgagggctcctctccacatccgtgccagccatttgttattttctgtcttttcaataagagccattttgggccaggcccggtggctcatgcc

SEQ ID NO: 230573 - DNA, 201 bp, Homo sapiens
aataagtcatgtctgcctgtggcaacggcagtccctgcttctcgacatgcttccctccctccctgtgcccttttctaacattttcagctgcatttttatamaaatatgcataatatagatttcagtcgcagggacacggcttattgtctgaggtggggacttggtgatgtctcccgctgaagaaacggaggcccgccttgt

SEQ ID NO: 230574 - DNA, 201 bp, Homo sapiens
tgggcatggtggctcacgcttgtaatcccagcactttgggaggccaaggcgggcagatcacttgaggtcaggagtttgagaccagcctgaccaacatggtraaaccccatctctactaaaaatgcagaaaagttagctgggcctggtggcgcgtgcctgtaatcccagctgctcaggaggctgaggcaggagaatcacttg

SEQ ID NO: 230575 - DNA, 201 bp, Homo sapiens
gaacatgaactcatccttttttatggctgcatagtattccatggtgtatatgtgccacattttcttaatccagtctatcattgatggacatttgggttggwtccaagtctttactattgtgaatagtgccacaataaacatatgtgtgcatgtgtccttagggtagcatgatttatagtccttttttttagttcacatata

SEQ ID NO: 230576 - DNA, 201 bp, Homo sapiens
acaatcccgcccacagccacgttctgtgtggcccatgtgtgagctgcccgaggccgccctcaccaagtaccatgaacctaggggccttcaaacaacaggcrtttattctcccacagtgctgggagccagaagtctgagagcatgtctgaagctgtgctccctcctcctccagcctctgccagcacctgacagctcccagtg

SEQ ID NO: 230577 - DNA, 201 bp, Homo sapiens
agcctgcttgctgcttactgctcttctcactctttttctatttctcaaaagtgaagaaaaacacaaaaatgtattttcgatataattaactgcacttgacrtattgacaaataggagttcatcatgaaacaacatcttttcctcctggaattgtgaatggcacacaggtttccacgttgcgctggctcacggatgccttct

SEQ ID NO: 230578 - DNA, 201 bp, Homo sapiens
gtgtcctcatgtggccggagcgtgagccgtccttgggtcctgtgtaaggaaggccccacctcctcgcctctcagccgtccgcctgctaacagcagcacccrgggctggtttcggcacacagcctgttgcatggaggaggagcctcatgggcttggggtgggggtttaaggcatccttaaaggtaaaaggctgggaagtgct

SEQ ID NO: 230579 - DNA, 201 bp, Homo sapiens
tcattaatagtactttgtactaaacagactgctatttaggaggtacttagtgcttagcagtagttagtactaagtagacactgatacttaggagatatatagtagtgactagtgcttagtacttagcagagactatgactcaggaggtacctagtactaagcagagactacaacttaggaggtacttagtacttagcacta

SEQ ID NO: 230580 - DNA, 201 bp, Homo sapiens
gtgcacaacgtgcaggtttgttacatatgtatacatgtgccatgttggattgctgcacccaccaactcgtcatttacattaggtatttctcctaatgctayccctccccctggcccccagcccctgacaggctgtggtgtgtgatggtccccgccttgtgtccaagtgttctcattgttcacttcccaccgatgagtgaga

SEQ ID NO: 230581 - DNA, 201 bp, Homo sapiens
gtttggatctgtgacaaggacctcgatggcccagacagccccaccgtggtgggcttggctctgtgacgaagacctcgatggccccaggatagacccgctgtgggtttgtctctgtgacaaggacttcagtggccctggggcagccccactgtggtgggctcagctgcaccccatcagcctgcttgctgcttactgctcttc

SEQ ID NO: 230582 - DNA, 201 bp, Homo sapiens
tgtgttctcggcactgtcttcactgtcctcccctcctagcctgctcctcacctcccagaagggcctcccacccgccacgcttccccctgccccgcctggcyggcgtctgctgggctcctcagtactgccggctcacaccctcaagctgtggcttctgtcgtgcgcctccctcggtgcagtgggctgtgcgccgctggattt

SEQ ID NO: 230583 - DNA, 201 bp, Homo sapiens
atcattaatagtactttgtactaaacagactgctatttaggaggtacttagtgcttagcagtagttagtactaagtagacactgatacttaggagatatatagtagtgactagtgcttagtacttagcagagactatgactcaggaggtacctagtactaagcagagactacaacttaggaggtacttagtacttagcact

SEQ ID NO: 230584 - DNA, 201 bp, Homo sapiens
tggtcctcagcctctgccttacacggccacaccgtgcagatctcagctctgtcttggcttgctttttttgccaataatggatttcattttctactgtggggttttttttttttctaacacactaatggctctggaatactttcttctcaagaatagaggcacattataatcattgatattttactatggagatgacctgca

SEQ ID NO: 230585 - DNA, 201 bp, Homo sapiens
gggaggcccgtgatcttcatgctcagggtcccatgaggactgtggggtgtagggaggcccatgatctccatgctcttggccctgtgaggactgtggggtgyagggaggactgtggggtgtagggagtcctgtgatctccacactcagggccctgtgaggactgtggggtgcagggagtcctgtgatctccacactcagggc

SEQ ID NO: 230586 - DNA, 201 bp, Homo sapiens
gtgggtttggatctgtgacaaggacctcgatggcccagacagccccaccgtggtgggcttggctctgtgacgaagacctcgatggccccaggatagacccdctgtgggtttgtctctgtgacaaggacttcagtggccctggggcagccccactgtggtgggctcagctgcaccccatcagcctgcttgctgcttactgct

SEQ ID NO: 230587 - DNA, 201 bp, Homo sapiens
catatgtgtggtgtgtgtgcgtgtgtatgtgcatgtatgtgatgtgggtccgtgtgtggcatgtgtgcactgtgtggtgtatatatgcacatatgtgataygtgtgcatggggtgtgtgtgggagtgttttgttttgttcagtcctacacagtattttgaaaattttgaatttattgcaaacattttaagatttgaattca

SEQ ID NO: 230588 - DNA, 201 bp, Homo sapiens
acgggccgagtgtgcaagccaggctgtgtactcgttgcacccacctgagatcagtgtcccacgggccgagtgtgcaagccaggctgtgtactcattgcacmcaccagagatcagtgtcccacaggctgagcgtgcaagccaggctgtgtactcattgcacccaccagagatcagtgtcccacaggctgagtgtgcaagcca

SEQ ID NO: 230589 - DNA, 201 bp, Homo sapiens
ccactgtgggtttggatctgtgacaaggacctcgatggcccagacagccccaccgtggtgggcttggctctgtgacgaagacctcgatggccccaggatagacccgctgtgggtttgtctctgtgacaaggacttcagtggccctggggcagccccactgtggtgggctcagctgcaccccatcagcctgcttgctgctta

SEQ ID NO: 230590 - DNA, 201 bp, Homo sapiens
tgcatgtgtatgtgcatgtatgtgacgtgggtgcatgcgtgtggcatgtgtgcacgtgtgtcatctatatgcacatatgtgatgtgtgcgatgtgcacatatgtgtgatgtgtgtgcgtgtgtaggggcatgcatgtgatgtgggtgcatgtgtgtggcgtgtgtgcacgtgtgtggtgtatatatgcacatatgtgctgt

SEQ ID NO: 230591 - DNA, 201 bp, Homo sapiens
gaatatctgctttaatatagctatcatttcttttccaaaattacttctctctatctggaatttaattaatcgaaatgaatttatctgaatataggaagcayatgcctacttgtaatttctaactccttatgtttgaagagaaacctccggtgtgagatatacaaatatatttaattgtgtcatattaaacttctgatttca

SEQ ID NO: 230592 - DNA, 201 bp, Homo sapiens
accagggctgctccattctcaccaggtgggcttggacagccacgggggctcatccccgacctgccaacctgggtcactcctggtgaggcagcagcatcccygtcgcaggctgggacagcagttccacaggtgttccctgcacacacctgtgcctctcacacttccgtggcctccaatgccctccctgtggccctgaaagca

SEQ ID NO: 230593 - DNA, 201 bp, Homo sapiens
gtgtcccacgggccgagtgtgcaagccaggctgtgtactcgttgcacccacctgagatcagtgtcccacgggccgagtgtgcaagccaggctgtgtactcrttgcacacaccagagatcagtgtcccacaggctgagcgtgcaagccaggctgtgtactcattgcacccaccagagatcagtgtcccacaggctgagtgtg

SEQ ID NO: 230594 - DNA, 201 bp, Homo sapiens
gtgcatgtgtatgtgcatgtatgtgacgtgggtgcatgcgtgtggcatgtgtgcacgtgtgtcatctatatgcacatatgtgatgtgtgcgatgtgcacatatgtgtgatgtgtgtgcgtgtgtaggggcatgcatgtgatgtgggtgcatgtgtgtggcgtgtgtgcacgtgtgtggtgtatatatgcacatatgtgctg

SEQ ID NO: 230595 - DNA, 201 bp, Homo sapiens
ccgagtgtgcaagtcaggctgtgtactcgttgcacccacctgagatcagtgtcccacgggccgagtgtgcaagccaggctgtgtactcgttgcacccaccwgagatcagtgtcccacgggccgagtgtgcaagccaggctgtgtactcattgcacacaccagagatcagtgtcccacaggctgagcgtgcaagccaggctg

SEQ ID NO: 230596 - DNA, 201 bp, Homo sapiens
tgaatacaggatgcctgactggattcgaatgtcagagtaacaagaaaaagacgtttagcgcacgtacagcaggtcctcaaatcacgccatctcattgtaaygctgaggagaaaagaatcagccaaatctgggatgtagactctctgaacatttggttcctgtgtaagtttttaatttaaaggaaggatcctaccccagaaa

SEQ ID NO: 230597 - DNA, 201 bp, Homo sapiens
aaacccagagctgaggccggtctgcagcaggtgccgggcctgagacctttatgttgtctgagggaaacacctccatcccctgtcaggctcagagtgtcctyttttgttctgggaaccatttctgtgtcatttgtgtggaggctgaagttgcccggggtcgtcctgcaaggcgtctcccagagcgaagtccctccgacgtgc

SEQ ID NO: 230598 - DNA, 201 bp, Homo sapiens
tccagagagaagatgctcattaaaattctgtgtttccttccaatgtctttattttcacaactgtttcctggtttcaatctgacgttatcaggagcagagcaaatgaagaaaatgaatgtctttagtcttaggggagaggcagtccctaagaaaaagggaggcaggaggtcgggtttcagcacgtcggtcactctcggatgc

SEQ ID NO: 230599 - DNA, 201 bp, Homo sapiens
gacatttctcgctgctgcacgcttgctcacccaactgggggctcggggtcgtccagcaccacagtcctcttatcctatgattcccagagcttgagggcccmccagaaggaagagcagagttccagattgaatacaggatgcctgactggattcgaatgtcagagtaacaagaaaaagacgtttagcgcacgtacagcaggt

SEQ ID NO: 230600 - DNA, 201 bp, Homo sapiens
gccgggcctgagacctttatgttgtctgagggaaacacctccatcccctgtcaggctcagagtgtccttttttgttctgggaaccatttctgtgtcatttrtgtggaggctgaagttgcccggggtcgtcctgcaaggcgtctcccagagcgaagtccctccgacgtgccccctggtgatgatgtttaaggaaaccaggct

SEQ ID NO: 230601 - DNA, 201 bp, Homo sapiens
ttccagagagaagatgctcattaaaattctgtgtttccttccaatgtctttattttcacaactgtttcctggtttcaatctgacgttatcaggagcagagcaaatgaagaaaatgaatgtctttagtcttaggggagaggcagtccctaagaaaaagggaggcaggaggtcgggtttcagcacgtcggtcactctcggatg

SEQ ID NO: 230602 - DNA, 201 bp, Homo sapiens
agcgaagtgggcttgaagcctgggggctcagacatttctcgctgctgcacgcttgctcacccaactgggggctcggggtcgtccagcaccacagtcctctyatcctatgattcccagagcttgagggccccccagaaggaagagcagagttccagattgaatacaggatgcctgactggattcgaatgtcagagtaacaag

SEQ ID NO: 230603 - DNA, 201 bp, Homo sapiens
gttccagagagaagatgctcattaaaattctgtgtttccttccaatgtctttattttcacaactgtttcctggtttcaatctgacgttatcaggagcagagcaaatgaagaaaatgaatgtctttagtcttaggggagaggcagtccctaagaaaaagggaggcaggaggtcgggtttcagcacgtcggtcactctcggat

SEQ ID NO: 230604 - DNA, 201 bp, Homo sapiens
tgttccagagagaagatgctcattaaaattctgtgtttccttccaatgtctttattttcacaactgtttcctggtttcaatctgacgttatcaggagcagagcaaatgaagaaaatgaatgtctttagtcttaggggagaggcagtccctaagaaaaagggaggcaggaggtcgggtttcagcacgtcggtcactctcgga

SEQ ID NO: 230605 - DNA, 201 bp, Homo sapiens
tcctggtgaactgcatggttcctgccaccagacagtcagagccactgccatgtcaggcgtttctctcgtcccgagtcggcaatctcactcccagattttgkgctcacctgcttagcttctctcacccagaagtatgccagattacagtcaattaccagatgcgcagcaccatctttctgcctttcttcccctggattactt

SEQ ID NO: 230606 - DNA, 201 bp, Homo sapiens
tctcctcggccattggccccagagggtccctccagggaatggaagtcaatgtctctcgtgcaggttctttttatctttaagggagcagcagctgctgggtyagggtgtttggaataagaagtatttgttcctgcagctgtacatctgaacgtgaaacatggctgttgcgttacaaccgtcgcaagagggaagaaaatctag

SEQ ID NO: 230607 - DNA, 201 bp, Homo sapiens
cttcaaaatacatttctagggaaacaaatttagttgtccttattaaaaatgtattacatatttcagaatcaaagctcacggctcacgagcatcccgcgccmggctgcgccccgcgctggcatcgcagacgtgtcctggaaggaagaactccaagtgcatttgaaattcaaattgtgtttggttttaagatggggatgtcat

SEQ ID NO: 230608 - DNA, 201 bp, Homo sapiens
tggactcttcaaaatacatttctagggaaacaaatttagttgtccttattaaaaatgtattacatatttcagaatcaaagctcacggctcacgagcatccygcgcccggctgcgccccgcgctggcatcgcagacgtgtcctggaaggaagaactccaagtgcatttgaaattcaaattgtgtttggttttaagatgggga

SEQ ID NO: 230609 - DNA, 201 bp, Homo sapiens
tctgcgggccgtgcctgttgagaagaaggctctgaagttaccccatgccacaggcctttccgttgcaggcccggctcggccgtcatcatgtgagcgtgagyctctgggtctccatcttgctcatgcccctcatgactacatgactcctcggaatgcaaggggcagtgtggtgttgccagtgagctgcttcttgtttcctac

SEQ ID NO: 230610 - DNA, 201 bp, Homo sapiens
tgtgtttgttttaagctaagtgttataagaaaaagttaaaagtagttaaaacatttataaagtacacaagttactatttttttttttcgagacagagtctkgctctgtcacctaggctggagaacagtggtgcgatctcagctcactgcaacctctgcctcctaggtttgaacgattctcctgcctcagcctcccgagtac

SEQ ID NO: 230611 - DNA, 201 bp, Homo sapiens
tgaatgaccatctttgtgtctgtgagtccccgtgcagtgagaggtaacagcagtgttcctgcagagtctaagtggccaggcagtgttcctgcagagtctamgtggccaggcagtgttcccgcagagtctacgtggccaggcagtgttcccgcagagtctacgtggccaggcagtgttccctcagagtctacgtggccaggc

SEQ ID NO: 230612 - DNA, 201 bp, Homo sapiens
gacgcaggcctcaaaatcacccaggcagctcacagctcagggacgcaggcctcagaattgcccggacacccctctgctcagagatgcaggcctcagaatcscccagacaccccacagctcagggacgcaggcctcagaatcacccgggcagctcctacctcagggacgcaggcctcagaattacctcaacagctcacagct

SEQ ID NO: 230613 - DNA, 201 bp, Homo sapiens
cctcgatggccccaggactggcccactgtgggtttggatctgtgacaaggacctcgatggcccagacagccccaccgtggtgggcttggctctgtgacgargacctcgatggccccaggatagacccgctgtgggtttgtctctgtgacaaggacttcagtggccctggggcagccccactgtggtgggctcagctgcacc

SEQ ID NO: 230614 - DNA, 201 bp, Homo sapiens
ggacctcgatggccccaggactggcccactgtgggtttggatctgtgacaaggacctcgatggcccagacagccccaccgtggtgggcttggctctgtgaygaagacctcgatggccccaggatagacccgctgtgggtttgtctctgtgacaaggacttcagtggccctggggcagccccactgtggtgggctcagctgc

SEQ ID NO: 230615 - DNA, 201 bp, Homo sapiens
aggacctcgatggccccaggactggcccactgtgggtttggatctgtgacaaggacctcgatggcccagacagccccaccgtggtgggcttggctctgtgrcgaagacctcgatggccccaggatagacccgctgtgggtttgtctctgtgacaaggacttcagtggccctggggcagccccactgtggtgggctcagctg

SEQ ID NO: 230616 - DNA, 201 bp, Homo sapiens
ggtgggctcagctgacgaggacctcgatggccccaggactggcccactgtgggtttggatctgtgacaaggacctcgatggcccagacagccccaccgtggtgggcttggctctgtgacgaagacctcgatggccccaggatagacccgctgtgggtttgtctctgtgacaaggacttcagtggccctggggcagccccac

SEQ ID NO: 230617 - DNA, 201 bp, Homo sapiens
atgggtgggctcagctgacgaggacctcgatggccccaggactggcccactgtgggtttggatctgtgacaaggacctcgatggcccagacagccccaccgtggtgggcttggctctgtgacgaagacctcgatggccccaggatagacccgctgtgggtttgtctctgtgacaaggacttcagtggccctggggcagccc

SEQ ID NO: 230618 - DNA, 201 bp, Homo sapiens
agctcctctgcaggcgggctcacccctggcacgcacgccatccctgtgattctcatcatcagggcagttccaggtcagcgccgtggggctgggcgggggcrgtcaccgccgcaggtcttggtcagtcctccaggagcggagctgcagggttggatcctttgtacagtgggtgagacccaggctgagcgaagtgggcttgaa

SEQ ID NO: 230619 - DNA, 201 bp, Homo sapiens
catgggtgggctcagctgacgaggacctcgatggccccaggactggcccactgtgggtttggatctgtgacaaggacctcgatggcccagacagccccaccgtggtgggcttggctctgtgacgaagacctcgatggccccaggatagacccgctgtgggtttgtctctgtgacaaggacttcagtggccctggggcagcc

SEQ ID NO: 230620 - DNA, 201 bp, Homo sapiens
gtgtgtgaatgtgtgtatgtgtgtgcagtgaatgtttgcagtgtgtgtgaatatgtgtgcagtgtgtgtgaatgtgtgtgcagtgtgtgaatgtgtgtgcrgtgtgtgtgaatgtgtgtatatgtgttgcagtgtgcatctgtgagtgtgagtgcctgtgtgtccatgcaagtgtgtatgcttgtgtctgtgtttacatca

SEQ ID NO: 230621 - DNA, 201 bp, Homo sapiens
ctgttccagagagaagatgctcattaaaattctgtgtttccttccaatgtctttattttcacaactgtttcctggtttcaatctgacgttatcaggagcagagcaaatgaagaaaatgaatgtctttagtcttaggggagaggcagtccctaagaaaaagggaggcaggaggtcgggtttcagcacgtcggtcactctcgg

SEQ ID NO: 230622 - DNA, 201 bp, Homo sapiens
gcccgtcatgggtgggctcagctgacgaggacctcgatggccccaggactggcccactgtgggtttggatctgtgacaaggacctcgatggcccagacagscccaccgtggtgggcttggctctgtgacgaagacctcgatggccccaggatagacccgctgtgggtttgtctctgtgacaaggacttcagtggccctggg

SEQ ID NO: 230623 - DNA, 201 bp, Homo sapiens
caggcaacaaaatcaaaaataaacaaatgggattatatcaaatacaaagctctacacagcaaacaaaacagttagcagagtgcacagacaacctaaggatkgggagaaaatatttgcaagctgtacatccaataagggcttaatatccaaaatatataataagctcaaacaactcaatagcatgaaaatgaaaaacccaat

SEQ ID NO: 230624 - DNA, 201 bp, Homo sapiens
acccacagcacccaccggggacctttacatgctcgataagaatgaatcgatacattgaactaagatcttgatgtggtaagagcaggtctgtgggcaggggrcggggggcgggggagcatgtaaaccctcttggaaaccatcctgtgcaattctcaggtccagagtcctgcccgcccatggggagtcctccctacgcgctgc

SEQ ID NO: 230625 - DNA, 201 bp, Homo sapiens
gacaggcccgtcatgggtgggctcagctgacgaggacctcgatggccccaggactggcccactgtgggtttggatctgtgacaaggacctcgatggcccagacagccccaccgtggtgggcttggctctgtgacgaagacctcgatggccccaggatagacccgctgtgggtttgtctctgtgacaaggacttcagtggcc

SEQ ID NO: 230626 - DNA, 201 bp, Homo sapiens
gcagcaccgtgagtgtcccacatggtagccagtctatgtttcccagtaggctgtctgtttcctgccccctggcctttctttggaatttcacttccagcacyatcccttttcattctctggtgcacttatatctttgtttgtctgttctttcttctgataattcacttctgcgaaatgttgtttggtttctccctgggagat

SEQ ID NO: 230627 - DNA, 201 bp, Homo sapiens
tactgatggttaagaatgaaatcttgggactggcacaggggctcacctgtaatcccagcactttgggaggccgaggcaggcagatcacctgaggtcaggartttgagaccagcctggccaacatggcgaaaccccgtctctattaaaaatacaaaaattagccaggtgtggtggcgtgcacgtgtcatcccagctactcgg

SEQ ID NO: 230628 - DNA, 201 bp, Homo sapiens
atgccccaggacaggcctgtcatgggtgggctcagctgatgaggacttcgatggccccaggacaggcccgctgtgggcttggctgtgtgacaaggacctcraaggccccaggacaggcccgtcatgggtgggctcagctgacgaggacctcgatggccccaggactggcccactgtgggtttggatctgtgacaaggacct

SEQ ID NO: 230629 - DNA, 201 bp, Homo sapiens
ccctcacagccacttccctgctgtgtgcggatgagttgccttccttaggttcctgcagcaccgtgagtgtcccacatggtagccagtctatgtttcccagyaggctgtctgtttcctgccccctggcctttctttggaatttcacttccagcactatcccttttcattctctggtgcacttatatctttgtttgtctgttc

SEQ ID NO: 230630 - DNA, 201 bp, Homo sapiens
aagcgtggcgccctttgatatactttgaaattcaaatataaaatattgatagaatggaaaggttggacttgcatgcagaaatgactaatttgaaaaaaaamctgcaggttgaaaatgcatacttaggactgagtttgtgataattaacagaaaaaaaaaagccttcccagtgacagctctaattaatagtatctgtaatta

SEQ ID NO: 230631 - DNA, 201 bp, Homo sapiens
tcatctgggaggtgacaagtgtggtgcctggtgtccagacacaccttcctcattgaaacctggactccggccactccagaaaagaggcaggacatggtgayaggtggagccactgactgggcagctccagcccaagtggcttctgccatgtgccttgccacaggttgcctcttaagcatggaaggtcagatgctgttgtct

SEQ ID NO: 230632 - DNA, 201 bp, Homo sapiens
agggtgctgagcacacctggcgtgggagattaagctgatggttaatgcccctgggccccgaggtccccggaccttctcgagggtgctgagcacacctggcrtgggagattaagctgatggttaatgcctgtgggccccgaggtccccagatgttctcgagggtgcggcacatgcatggccactggggccaggcagcagcat

SEQ ID NO: 230633 - DNA, 201 bp, Homo sapiens
tcttctcgcccgctgcgggcctgactgcgccaggggccgggggttatgtgggcaggctcgaacgactgggagcgtggcctgtgattctgctccactccttkcgcccgcagagcggtggtctaggccagaccattgacctgggtagggggaagggcaaggacgcagctcgcacgcctgggttttcaccgccgtctcccttcg

SEQ ID NO: 230634 - DNA, 201 bp, Homo sapiens
tggtagttataactacagaatgccttctccgaaacacccgggccccagacctggtgagctggcatgggagattaggctgatggttaatgcctgtgggcccsgagatccccggaccttcttgagggtgctgagcacacctggcgtgggagattaagctgatggttaatgcccctgggccccgaggtccccggaccttctcga

SEQ ID NO: 230635 - DNA, 201 bp, Homo sapiens
gatttagacttctgaaatcaagagtctcaggtgttttttaaatcattttctaccttaccatattattttaaattcctgaaatatgtgttttgctttataakaatcatgtttcccataacagtctttctctattttgtttaaaaatacattttctttgataatttagtgcatgggatatttattctaatcacttaaatgtgt

SEQ ID NO: 230636 - DNA, 201 bp, Homo sapiens
cttgtcttggatgcgctgcgagtcacgtccgacgccgctgtgccttcaccacctcatgttttattactgttaaaaatgaatgtttttccattttgggatgrgagagtgccccagctcccctgccctcttacaggagtgaatttcattcgtggccccagtttaaagacactcggattggcttgttggtttcatcataacctt

SEQ ID NO: 230637 - DNA, 201 bp, Homo sapiens
ttaaatatatgcatgaagaaatgccttatacacatacctacaatatttttaaggatctatttttatttttatattataatagtaaatactttttaaaaatrgatttagaaatcaaaagtattttaaatactatttgtgtactgtaaaattataaattactgtcttagtttaaaaaacaaaattgatttagacttctgaaat

SEQ ID NO: 230638 - DNA, 201 bp, Homo sapiens
gagcgtgagcctctgggtctccatcttgctcatgcccctcatgactacatgactcctcggaatgcaaggggcagtgtggtgttgccagtgagctgcttctygtttcctaccaggaatcacacatcgcatccgtgtgagtacaagaaagacccaaatacccatccactgcctgccgatctggaggcggagagaggacggccc

SEQ ID NO: 230639 - DNA, 201 bp, Homo sapiens
tgcagcagaagcaggtctaagagggatgtttatagtgataaatgcctacatcagaaaagaagaaagaatccaaataaacaacctaatattacacctcaagktactataaaaagaactaactaagcctaaatctaataggaaagaaataataaagatcagaacagaaagagattacatcgaaactagaaaaacaatagaaaa

SEQ ID NO: 230640 - DNA, 201 bp, Homo sapiens
cccggataacatgatggagcactcagacacagcttcccctggcaccagcctgtccctcgggtgggtggctgtaagccagtgtgtgcccagtgtgtgcccgrtgtgagccagtgtgtcctggtgtgtgcccagtgtgagccattgtgagccagtgtgtggccagtgtgagccagtgtgagccagtatgtgcccagtgtgagc

SEQ ID NO: 230641 - DNA, 201 bp, Homo sapiens
gctggtggttctagacactgaggttgacaggcgtgctcgaggagttctcatcaccctgttcttccttaatggaaggaagttatttctaaaattctaccgasaggggctgcctggggtgagacatacctgcaggtccgatgaggctttgggatgtggacagataaccagagcaggatggtcctgtccgcaggggataccggg

SEQ ID NO: 230642 - DNA, 201 bp, Homo sapiens
gggtagatggtgagggctctgccaagacccagtatgcatgggtagatggtgagggctctactaagatccagtatgcatgggtagatggtgagggctctgcyaagacccagtatgcatgggtagatggtgagggctctactaagatccagtatgcacgggtagacggtgagggctctactaagatgcagttgtttcactgcc

SEQ ID NO: 230643 - DNA, 201 bp, Homo sapiens
ggctgaagtaatcctcctgcctcagcctcctaagtagctgagaccacaggcaggagctaccatgcctggctaatttttaaaaatgattttatagagacagrgatctcactttgtggcccaggctgttctcaaactcttggactcaagtgattctcctgccttggcctcccaaaacactgagatcacaggtgtgcactacca

SEQ ID NO: 230644 - DNA, 201 bp, Homo sapiens
ctccatgccaggatggttccccagacaacgctgggtgtgcagcagatccccgccgccctctcctcgtgtgagctgacgcatggacagaacacttggggttrccctgtgcctgccgctcagccacggtctcatgagtggacccatcttgtggaacatccacagtgcccaggaggcttgcctttgtgtccacaccctgtgtcc

SEQ ID NO: 230645 - DNA, 201 bp, Homo sapiens
atgggtagatggtgagggctctgccaagacccagtatgcatgggtagatggtgagggctctactaagatccagtatgcatgggtagatggtgagggctctrccaagacccagtatgcatgggtagatggtgagggctctactaagatccagtatgcacgggtagacggtgagggctctactaagatgcagttgtttcactg

SEQ ID NO: 230646 - DNA, 201 bp, Homo sapiens
ggtaggtgggcatttctcatcataaaatgagacatttgtatcctcctcatggtgaccttaagcctcaggaagaagctaggggaggctgctgtggctgagasaccttcccaggacatggtctctttcccgacgggcctctgcagtcagcgtccgaaggagagatgggcctgtgagtatagctgggtgtcagggcccggacct

SEQ ID NO: 230647 - DNA, 201 bp, Homo sapiens
acccagtatgcatgggtagatggtgagggctcttccaagacccagtatgcatgggtagatggtgagggctctgccaagacccagtatgcatgggtagatgktgagggctctgccaagacccagtatgcatgggtagatggtgagggctctactaagatccagtatgcatgggtagatggtgagggctctgccaagacccag

SEQ ID NO: 230648 - DNA, 201 bp, Homo sapiens
actcggggatgagacgagggtgactctggcatcgtgacctcattctgtgtcctttcccccacatctcctgccttcgggatgacagctgtgtcctgagtgtygtgttaggttgacattttggtgtcgggagaggctctctagagagggagcgggccttgtgtggtgagggtagcttgtcagatgcttgaaggcagagagggt

SEQ ID NO: 230649 - DNA, 201 bp, Homo sapiens
aggacacaccacacacaggggtaaatgttcccgtggtgcccagctggccagtggccgcacagagctgtggcctggtcctctccgagcccacgttctcaccytcgggccacactgctcggtcacggggtaccccagatgccaccacacccaccttgaaggtggttttatgcttcatcttcccgcccccttggctgtccaaag

SEQ ID NO: 230650 - DNA, 201 bp, Homo sapiens
cctaaagatgccaccaaaaacactgttagagctaataaattcagtaaatttgcaggatacaaaatccacagacaaaaataaagagcatttttatacactgrgaatgaactgtctgaaaaagaaatcagataataatcccatttatagtagctcaaaaaatataaaatacttaggactccatttgcccagggagcctggaga

SEQ ID NO: 230651 - DNA, 201 bp, Homo sapiens
gggtcctgtcctgtggcatgtccacagctgagaaacacgggagccactgcccccaacaatgtgggtattgttagatgtgtgtttccccagtgactgtcgcrgtgacacgtgttttcatgtcctgtggggccactttcacctctgcttctgtaagttactgctcccatctttgccccattcccactgagttttgtctttttc

SEQ ID NO: 230652 - DNA, 201 bp, Homo sapiens
agggaggtaacgcgtggaccctcagcttcctgtggctgtggtttagtggtagatagacagagggaggtaatgcatggataaaaattaaattcatccattcrcctcacatgtagactcaaaagcttaataaagtctaaactaattttccataattacagtgcaaatactgaaaatgataacaaaaccataaaatatattttg

SEQ ID NO: 230653 - DNA, 201 bp, Homo sapiens
gttattcccactccactttctttcccatgcccttgtcacggctccgcatcccacccgttctttgagacgcagagcgggcctctgcctcctcattcgttacygacgtgctgagccttcctttcccactcttccccagtggcgtccattgctcaccctacgcacagcaccgaatgccaggagaatgatcaagaccttgtgctt

SEQ ID NO: 230654 - DNA, 201 bp, Homo sapiens
gagtgtccagcaagatcagggtgaaggatctccagggctgcagggagagaggctacttctcaggtctaagcaggaagcaaaggagcagcattttacagggkctgtgggtgtttgtgagtgaatgcagctacagagtgtttagaggaaggggcactggagggtgcgtaggaggcctgggatgcagggagtcccgcccagtta

SEQ ID NO: 230655 - DNA, 201 bp, Homo sapiens
acagggtgtgatctgttggcctgctgttaggagacccggaataggagcgagtgtctggcctattggcccagggtggcctgtctgtaactgggtggcctggygcaggccctggtgcggcaaaagcagctgccatgttccagaaacagagtaacaggcagagagagccaggcagctgcagctcagaaaggttaatgtctccat

SEQ ID NO: 230656 - DNA, 201 bp, Homo sapiens
tttggctgcaggcctgagcaggtgttggaggacaggggccatgcactggggaacacgctcctggggagaccccctcctggagcccccagggccagagacgyctgcaggagggagaggtccagaagatggctgcccaagaaacagggcaatgtgtggggatggaggcaaggggtggggcatggcaggctacagtagcgctgc

SEQ ID NO: 230657 - DNA, 201 bp, Homo sapiens
cgtttctcgccctgcaggagcagtttgagttcgcgctgacagccgtggctgaggaggtgaacgccatcctcaaggcccttccccagtgagcggcagcctcrggggcctcaggggagcccccaccccacggatgttgtcaggaatcatgatctgactttaattgtgtgtcttctattataactgcatagtaatagggccctt

SEQ ID NO: 230658 - DNA, 201 bp, Homo sapiens
tctgtgacttcgattttgacttacactgcagtctcagattagctcgagaatgaaactgtcccttgtactctcttaaaaccttttagtataaaaaaaaaaaaggaaaaagaaaaaaccaaacactaattcaggttgtttgcttcaatcgctgatttaaaccgactgaactacattttaaaaggtccagtcagtttcgagagg

SEQ ID NO: 230659 - DNA, 201 bp, Homo sapiens
caattattttactctgtgacttcgattttgacttacactgcagtctcagattagctcgagaatgaaactgtcccttgtactctcttaaaaccttttagtayaaaaaaaaaaaaggaaaaagaaaaaaccaaacactaattcaggttgtttgcttcaatcgctgatttaaaccgactgaactacattttaaaaggtccagtc

SEQ ID NO: 230660 - DNA, 201 bp, Homo sapiens
ttaatgaaaagagaaaaaaattattatctcaatagatacaggtaaaaacatttgctaaatattaacattcattcataataaaaatgttgaataaagtaagactagtttgttcttattttgattttttaaagaccctacagaaacatcatgcttcccagcaaaacactggaaatattctcttgaacaccagaaataagacag

SEQ ID NO: 230661 - DNA, 201 bp, Homo sapiens
agtggctagaggaacacacgttcagcgtggggaggtctcacggcaagagatggcgatgtggggtctttggagcctggggagagatgaaggccaggccagcycggatccgaggctgacagcagagagcagggctgctgaagcctcggtgcagggagggcccgttgccctcagcatccctgtccagcacctcccacccacgct

SEQ ID NO: 230662 - DNA, 201 bp, Homo sapiens
attaatgaaaagagaaaaaaattattatctcaatagatacaggtaaaaacatttgctaaatattaacattcattcataataaaaatgttgaataaagtaagactagtttgttcttattttgattttttaaagaccctacagaaacatcatgcttcccagcaaaacactggaaatattctcttgaacaccagaaataagaca

SEQ ID NO: 230663 - DNA, 201 bp, Homo sapiens
cattaatgaaaagagaaaaaaattattatctcaatagatacaggtaaaaacatttgctaaatattaacattcattcataataaaaatgttgaataaagtaagactagtttgttcttattttgattttttaaagaccctacagaaacatcatgcttcccagcaaaacactggaaatattctcttgaacaccagaaataagac

SEQ ID NO: 230664 - DNA, 201 bp, Homo sapiens
aacttgagagactccatcaacagatgactcttaggaaaagacagacagaactcgagagactccatcaacagatgactcttaggaaaagacagacagaactygagagactccatcaacagatgactcttaggaaaagacagacagaactcgagagactccatcaacagatgactcttaggaaaagacagacagaactcgaga

SEQ ID NO: 230665 - DNA, 201 bp, Homo sapiens
gaccttcagctggggagggggacgtgtgttggacgtgtcccggagtggccggggtgcgtggccagcccctgccatggtggggaccttcagctggggagggrgatgtgtgttggacgtgtcctggagtggccggggtgcgtggccagcccctgccatggtggggaccttcagctggggagggggacgtgtgttggacgtgtc

SEQ ID NO: 230666 - DNA, 201 bp, Homo sapiens
ctaccatcatcatcaccgtcaccaccaccaccttcaccaccaccaccaataccactgcccccaccaccacccccgtcactgccatcaccaccaccactactactaccaccatcaccactaccacccccatcaccatcaccactatcactaacatcaccaccaccactgtcaccaccactgtcatcatcaccaccaccttca

SEQ ID NO: 230667 - DNA, 201 bp, Homo sapiens
agatggtgagggctctcccaagacccagtatgcatgggtagatggtgagggctctgccaagacccagtatgcatgggtagatggtgagggctctgccaagwcccagtatgcatgggtagatggtgagggctcttccaagacccagtatgcatgggtagatggtgagggctctgccaagacccagtatgcatgggtagatgg

SEQ ID NO: 230668 - DNA, 201 bp, Homo sapiens
atggacataagttttcaactctatttagcaaataccaaagggcatgactgctgggtcatatactaataatatattcagtttttaattttcatgaagtcctrcctatcagttgtttttttcatgaactgtgcttttggtgttgtatctctaaaaagtcatcaccaaacccaaggtcacctagattttctttgtatcttctag

SEQ ID NO: 230669 - DNA, 201 bp, Homo sapiens
cactaccatcatcatcaccgtcaccaccaccaccttcaccaccaccaccaataccactgcccccaccaccacccccgtcactgccatcaccaccaccactactactaccaccatcaccactaccacccccatcaccatcaccactatcactaacatcaccaccaccactgtcaccaccactgtcatcatcaccaccacctt

SEQ ID NO: 230670 - DNA, 201 bp, Homo sapiens
cctttccttcagggtgatgaccgcttctccgagagcatcctgacctatgtggcccacacgtctgcgctgacctaccctcccgggccccggacccagctccrcgaggacctcctgccgcggaccctcggccagctccagccagatgagctcagccctaaggtggacagtggtgtggacagacaccatctgatggcggccctc

SEQ ID NO: 230671 - DNA, 201 bp, Homo sapiens
atgggtagatggtgagggctctactaagatccagtatgcatgggtagatggtgagggctctactaagatccagtatgcatgggtagatggtgagggctctkccaagacccagtatgcatgggtagatggtgagggctctgccaagatccagtatgcatgggtagatggtgagggctctactaagatccagtatgcatgggt

SEQ ID NO: 230672 - DNA, 201 bp, Homo sapiens
cttgtgtttagtagattttatgtttagtgcagttttacatttacagaaaaatagagcagacagtccagagggttcccacgtgccctgccttccactccacrccccgtctccccattgctcccatctgtattaggatggtctgtttgtcacagttgatgagcccacattcattccatggtttacatcagggttcactcctgc

SEQ ID NO: 230673 - DNA, 201 bp, Homo sapiens
tcactaccatcatcatcaccgtcaccaccaccaccttcaccaccaccaccaataccactgcccccaccaccacccccgtcactgccatcaccaccaccactactactaccaccatcaccactaccacccccatcaccatcaccactatcactaacatcaccaccaccactgtcaccaccactgtcatcatcaccaccacct

SEQ ID NO: 230674 - DNA, 201 bp, Homo sapiens
ctgccaagacccagtatgcatgagtagacggtgagggctctgccaagatccagtatgcatgtgtagacggtgagggctctgccaagacccagtatgcatgkgtagatggtgagggctctgccaagatccagtatgcatgggtagatggtgagggctctgccaagatccagtatgcatgggtagacggtgagggctctgcta

SEQ ID NO: 230675 - DNA, 201 bp, Homo sapiens
tgccactggtggcatcatttgtaatatatattttcattttgctctgaagcacagcaaataggtttttgtaagcgagtgacctcaggattagctgtgttatttgtgacttagaaagcagtcagttgaaatattgaaagtattttcccaactcaggctggtttcagcggtgccgcagcgtgccgtgacatcgagcttgctaat

SEQ ID NO: 230676 - DNA, 201 bp, Homo sapiens
gcgttgtgtcttgtctgtcctccatagcaaccatccccaatcctgacatgggtgattgtgtgcgttgtgtcttgtctgtcctccatagcaaccgtccccartcctgacatcggtgattgtgtgcattgtgtcttgtctgtccccacctagaatgtgagtttcataggaagagacttgtctgctttgctgagtttctaagtg

SEQ ID NO: 230677 - DNA, 201 bp, Homo sapiens
gacggtgagggctctgccaagacccagtatgcatgagtagacggtgagggctctgccaagacccagtatgcatgagtagacggtgagggctctgccaagayccagtatgcatgtgtagacggtgagggctctgccaagacccagtatgcatgtgtagatggtgagggctctgccaagatccagtatgcatgggtagatggt

SEQ ID NO: 230678 - DNA, 201 bp, Homo sapiens
ttgccactggtggcatcatttgtaatatatattttcattttgctctgaagcacagcaaataggtttttgtaagcgagtgacctcaggattagctgtgttatttgtgacttagaaagcagtcagttgaaatattgaaagtattttcccaactcaggctggtttcagcggtgccgcagcgtgccgtgacatcgagcttgctaa

SEQ ID NO: 230679 - DNA, 201 bp, Homo sapiens
taacaactgtccccaatcctcacatcagtgattgtgtgcgttgtgtcttgtctgtcctctgtagcaaccatccccaatcctcacatcagtgattgtgtgcrttgtgtcttgtctgtcctccatagcaaccatccccaatcctgacatcggtgattgtgtgcgttgtgtcttgtctgtcctccatagcaaccatccccaatc

SEQ ID NO: 230680 - DNA, 201 bp, Homo sapiens
agatccagtatgcatgggtagacggtgagggctctgctaagacccagtatgcatgggtagacggtgagggctctgccgagatccagtatgcatgggtagayggtgagggctctactaagacccagtatgcatgggtagatggtgagggctctgccaagacccagtatgcatgggtagatggtgagggctctgccaagatcc

SEQ ID NO: 230681 - DNA, 201 bp, Homo sapiens
ggccgtggccgatggcgtccgtgccgttgtcttctctgcagagcgatgggtggccgtggccgatggcgtacgtgccgttgtcttctctgcagagcgatggktggccgtggccgatggcgtccgtgccgttatcttctctgctttcgtgtatgtttgaacatttctataataaaaacttaagtgaaaagcttactgtgctgg

SEQ ID NO: 230682 - DNA, 201 bp, Homo sapiens
tgctctgttttgctctcctttccttcagggtgatgaccgcttctccgagagcatcctgacctatgtggcccacacgtctgcgctgacctaccctcccgggycccggacccagctccgcgaggacctcctgccgcggaccctcggccagctccagccagatgagctcagccctaaggtggacagtggtgtggacagacacca

SEQ ID NO: 230683 - DNA, 201 bp, Homo sapiens
gggtagatggtgagggctctgccaagatccagtatgcatgggtagatggtgagggctctgccaagatccagtatgcatgggtagacggtgagggctctgckaagacccagtatgcatgggtagacggtgagggctctgccgagatccagtatgcatgggtagacggtgagggctctactaagacccagtatgcatgggtag

SEQ ID NO: 230684 - DNA, 201 bp, Homo sapiens
gacagatcctgtctcaaaaaaaaaaaaaattaattaaaagattaaaaaatttgccctggtttacccagataataaattacagagccgagatcctaacctaraacttcattattcactcattcatggaaactcttttggaagtgccactcttccagataattccacttaaaaacacatacacgtaattctttgattgtaaag

SEQ ID NO: 230685 - DNA, 201 bp, Homo sapiens
gtgccgttgtcttctctgcagagcgatgggtggccgtggccgatggcgtccgtgccgttgtcttctctgcagagcgatgggtggccgtggccgatggcgtmcgtgccgttgtcttctctgcagagcgatggttggccgtggccgatggcgtccgtgccgttatcttctctgctttcgtgtatgtttgaacatttctataat

SEQ ID NO: 230686 - DNA, 201 bp, Homo sapiens
agatccagtatgcatgggtagacagtgagggctctgctaagacccagtatgcatgggtagatggtgagggctctgccaagatccagtatgcatgggtagayggtgagggctctgccaagatccagtatgcatgggtagacggtgagggctctgctaagacccagtatgcatgggtagacggtgagggctctgccgagatcc

SEQ ID NO: 230687 - DNA, 201 bp, Homo sapiens
gctcatgcccctcatgactacatgactcctcggaatgcaaggggcagtgtggtgttgccagtgagctgcttcttgtttcctaccaggaatcacacatcgcrtccgtgtgagtacaagaaagacccaaatacccatccactgcctgccgatctggaggcggagagaggacggccccagagaccatccaccctccccattcac

SEQ ID NO: 230688 - DNA, 201 bp, Homo sapiens
cgatggcgtccgtgccgttgtcttctctgcagagcgatgggtggccgtggccgatggcgtccgtgccgttgtcttctctgcagagcgatgggtggccgtgsccgatggcgtccgtgccgttgtcttctctgcagagcgatgggtggccgtggccgatggcgtccgtgccgttgtcttctctgcagagcgatgggtggccgt

SEQ ID NO: 230689 - DNA, 201 bp, Homo sapiens
gagggctctgccaagatccagtatgcatgggtagacagtgagggctctgctaagacccagtatgcatgggtagatggtgagggctctgccaagatccagtrtgcatgggtagatggtgagggctctgccaagatccagtatgcatgggtagacggtgagggctctgctaagacccagtatgcatgggtagacggtgagggc

SEQ ID NO: 230690 - DNA, 201 bp, Homo sapiens
gtgtggtgttgccagtgagctgcttcttgtttcctaccaggaatcacacatcgcatccgtgtgagtacaagaaagacccaaatacccatccactgcctgcygatctggaggcggagagaggacggccccagagaccatccaccctccccattcacccatggtccacacagtgatgggaaaccacattccaaaatcaacact

SEQ ID NO: 230691 - DNA, 201 bp, Homo sapiens
agaaatccctttagcatttcttataggacaggtctgctgttgatggaatccttcagcttttgtttgtctgggaaagtatttttccttcatatttgaaatgyatttttgttggatatacaatttcagaataaaagggtttctttcctttaacactttaaataacaatcccgtttcctggcctgtaaagtttccactgaaaag

SEQ ID NO: 230692 - DNA, 201 bp, Homo sapiens
ttacgttctctgcagagcgatggggggccattgccaatggcgtccgtgccattatgttctctgcagagtgatggggggctgtggctgatggcgtccatgcygttatcttctctgaagagtgatgggtggctgttgtcttctccgcagattgatggggggccgtggccgatggcgtccatgtcgttgtcttctctgcagagc

SEQ ID NO: 230693 - DNA, 201 bp, Homo sapiens
agacccagtatgcatgagtagatggtgagggctctgccaagatccagtatgcatgggtagacagtgagggctctgctaagacccagtatgcatgggtagayggtgagggctctgccaagatccagtatgcatgggtagatggtgagggctctgccaagatccagtatgcatgggtagacggtgagggctctgctaagaccc

SEQ ID NO: 230694 - DNA, 201 bp, Homo sapiens
gtgtgagtacaagaaagacccaaatacccatccactgcctgccgatctggaggcggagagaggacggccccagagaccatccaccctccccattcacccayggtccacacagtgatgggaaaccacattccaaaatcaacacttttccaaaacagtgggcagaaaaagctggtggcatggccactccggacgcacatctca

SEQ ID NO: 230695 - DNA, 201 bp, Homo sapiens
gccagctctcccgcaaagtgcgctgagagctgaggggctggtggttctgcaccctctgggacggggcaagcctggccgggcagtggacagcagttggcatrggacaggctcagctcccagagccacagtgagcagcattgcggccactcggtgtccagatgcctgtgttccctcctaccttggccgaggccctccagcacg

SEQ ID NO: 230696 - DNA, 201 bp, Homo sapiens
gacccagtatgcatgagtagatggtgagggctctgccaagacccagtatgcatgagtagatggtgagggctctgccaagatccagtatgcatgggtagacrgtgagggctctgctaagacccagtatgcatgggtagatggtgagggctctgccaagatccagtatgcatgggtagatggtgagggctctgccaagatcca

SEQ ID NO: 230697 - DNA, 201 bp, Homo sapiens
gcaagcctggccgggcagtggacagcagttggcatgggacaggctcagctcccagagccacagtgagcagcattgcggccactcggtgtccagatgcctgygttccctcctaccttggccgaggccctccagcacgatggtcctactgcgaggctggagaagggatggggtcggggtgcctgctgtgactgtcctggggca

SEQ ID NO: 230698 - DNA, 201 bp, Homo sapiens
aaagagtaactgtgctgggcgcctgggacgggaaagggtaactgtgctgggcgcatgggacgggaaagggtaactgtgctgggtgcatgggacggaaaagrgtaactgtgctgggcgcatgggacgggaaagggtaactgtgctgggcgcatgggacggaaaagggtaactgtgctgggcgcatgggacgggaaagggtaa

SEQ ID NO: 230699 - DNA, 201 bp, Homo sapiens
agcattgattaggagcctctgagaagctcccgccactccttggagccctctctggggaaagacgacaatatttcagttgctctgtgtgtttcccctgcccygggcactacccacccccaacccaggtgatggccatggcagcatgaagtcaccccgtggacagagggagacagggttccggagctggtcaggctcccgcgt

SEQ ID NO: 230700 - DNA, 201 bp, Homo sapiens
gcttgctcccgtcttgcaggtagtgagcacgtcccccagagggagtttcagcccttttctcccacctccctctcacattccctctcacattccctcttacrtgtctgttgttcccatctctatggctgtaagtacccgatgtctggtccccacttccatgtgagcgcatgtggttctctgatgagtgtagttcccacttcc

SEQ ID NO: 230701 - DNA, 201 bp, Homo sapiens
gctgagccttcctttcccactcttccccagtggcgtccattgctcaccctacgcacagcaccgaatgccaggagaatgatcaagaccttgtgctttcacgmcccttccagtctgcagttttccgagtgtctgtacggcgctgctttccctcctctagccgtccactgcagtgcacctgcaggagtgctggctgatttctgg

SEQ ID NO: 230702 - DNA, 201 bp, Homo sapiens
agctcccagggaattactgagatgacgagcgtgatgaggagggttcctgtcatcctttttgtacccagtggaggataacgtcagcatatgggcacagccgrgctcgtgggggcacaggcagactgctcaccctatgcaatctaggcaggcggcgtgtgccagccaggccaggcatattgaggcactgctgctttaaaagtc

SEQ ID NO: 230703 - DNA, 201 bp, Homo sapiens
atcctttttgtacccagtggaggataacgtcagcatatgggcacagccgggctcgtgggggcacaggcagactgctcaccctatgcaatctaggcaggcgscgtgtgccagccaggccaggcatattgaggcactgctgctttaaaagtccagctcaacgagctcaggcagcatgtggtagatacacatatgtagtagaag

SEQ ID NO: 230704 - DNA, 201 bp, Homo sapiens
gccaggcatattgaggcactgctgctttaaaagtccagctcaacgagctcaggcagcatgtggtagatacacatatgtagtagaagttccaaaattattgrtgatagtacattcatcgcctgcacctgctcactccattggatgcgggcagaggagctgggtgggaatgccttcctgcgggaggtgtgggtagaggggaca

SEQ ID NO: 230705 - DNA, 201 bp, Homo sapiens
cttgccactggtggcatcatttgtaatatatattttcattttgctctgaagcacagcaaataggtttttgtaagcgagtgacctcaggattagctgtgttatttgtgacttagaaagcagtcagttgaaatattgaaagtattttcccaactcaggctggtttcagcggtgccgcagcgtgccgtgacatcgagcttgcta

SEQ ID NO: 230706 - DNA, 201 bp, Homo sapiens
gaattccagggcaaaaactatgaccagcctctgttgggctgccaggctgcggcggaggctgtgctgggtgggcgtctgagcttaagcatgggaaacgatcyggtggcttcctcctaaaaggaacaaaccgaggactgaagccctcaggagtcgcgccagggtctcccggtgctgcaggaacccacagaggagttgacattt

SEQ ID NO: 230707 - DNA, 201 bp, Homo sapiens
atgtcaaagtaagtcacctctaatctgaaactgtcaatcaaagtgactcaccccattctaaagttgtcactatcacaaagaccaagaaagactgaactgaaggattttctaaattgaaggaggctagagagacatgacgtcggtatgcagggcctcatgtgggcatttattttgttctagaaatgttcttgggagaagtag

SEQ ID NO: 230708 - DNA, 201 bp, Homo sapiens
aatgtcaaagtaagtcacctctaatctgaaactgtcaatcaaagtgactcaccccattctaaagttgtcactatcacaaagaccaagaaagactgaactgaaggattttctaaattgaaggaggctagagagacatgacgtcggtatgcagggcctcatgtgggcatttattttgttctagaaatgttcttgggagaagta

SEQ ID NO: 230709 - DNA, 201 bp, Homo sapiens
aaaatgtcaaagtaagtcacctctaatctgaaactgtcaatcaaagtgactcaccccattctaaagttgtcactatcacaaagaccaagaaagactgaactgaaggattttctaaattgaaggaggctagagagacatgacgtcggtatgcagggcctcatgtgggcatttattttgttctagaaatgttcttgggagaag

SEQ ID NO: 230710 - DNA, 201 bp, Homo sapiens
aaaaatgtcaaagtaagtcacctctaatctgaaactgtcaatcaaagtgactcaccccattctaaagttgtcactatcacaaagaccaagaaagactgaactgaaggattttctaaattgaaggaggctagagagacatgacgtcggtatgcagggcctcatgtgggcatttattttgttctagaaatgttcttgggagaa

SEQ ID NO: 230711 - DNA, 201 bp, Homo sapiens
taaaaatgtcaaagtaagtcacctctaatctgaaactgtcaatcaaagtgactcaccccattctaaagttgtcactatcacaaagaccaagaaagactgaactgaaggattttctaaattgaaggaggctagagagacatgacgtcggtatgcagggcctcatgtgggcatttattttgttctagaaatgttcttgggaga

SEQ ID NO: 230712 - DNA, 201 bp, Homo sapiens
ctctcaccacaagataggatcagaagaaaacagcattcacggtgcagaaaccaggcaggcagcgcttaacaagtgataccagtgaacgtcaccagcggcargatggatccgcacacgtgcccttgagctgatgcacaaagaacacaaaagatgatgtccctggtgttctcgacaaagagcaaaacccagtctattcctgag

SEQ ID NO: 230713 - DNA, 201 bp, Homo sapiens
ctagacaggcccatgctggagaagcaccaggtaacgtggctcagtgtcctgacggctcgtgagtccacaggagcagcagcacaggccacattccccacacrgactcagcctccaggcctgagtttgcttctcccaggactcaggccccacaggcttcctcgggaagggcccgcaccaggccctgctcttcctgagcccaca

SEQ ID NO: 230714 - DNA, 201 bp, Homo sapiens
agtcatttgagggagagagaagggaaaacgccttccaaacaatgatctcgtgtgtcttagcaacagccaagcttcaccttctcaaagaccctcccacgccraggacagagacacctcccgagcgagcgcactccgtgggcgctggagagcaggcactcagccactcctgcgagctgccggctttccctgcacacgctcagc

SEQ ID NO: 230715 - DNA, 201 bp, Homo sapiens
tacaatggaacagtggaatttagccatgacggggcgactcggatcatctcacagacatgaagctgagtgaaagaaggaaggtgtgaaagacgacaggcccygtgaatctggtgcagaggcaggcgcggccatgagcacagcttccatcaagtcggcggtggctccccatgaaggtgcagcaggggtgggggttccagctgc

SEQ ID NO: 230716 - DNA, 201 bp, Homo sapiens
ggggctggtggccagaaaggccaaggcaccattagatggttgggcctttcaggcccccccaactcttggggggttaatcaccaatggccagtgatttaatycatcatgcctatgtacgtgaaacctgcatagagaactaagtgagaggttcatggagctcgcaggttggcagacacgtggaggtgcagggagcctggtgca

SEQ ID NO: 230717 - DNA, 201 bp, Homo sapiens
catgtcagcatgtctccagttgcaatttataaccgagaaagaaatcaatcccttggtcctgcggctgcaggtccccccagcctactactgggcgtcgggascctcctcggccccacagctcacagcagctccccgccaggatctgggaggttttcccagagttgggcaggacgctcactggtgaggaggctctttagagcc

SEQ ID NO: 230718 - DNA, 201 bp, Homo sapiens
tcttctgagcgggtggttatttgagtaacacgtcctcttgtcaatctttaggaaaacgggtgttgcccgcagcgaggtgggcggaggcacaagtgagctgrgcccggaagaggctgttttgttcagtggtagggcaggcgcgggagcgctgaggctttgtgccaaagagaaacagaaaagaaagtttgccatgtgagcgtc

SEQ ID NO: 230719 - DNA, 201 bp, Homo sapiens
ctttcccactcttccccagtggcgtccattgctcaccctacgcacagcaccgaatgccaggagaatgatcaagaccttgtgctttcacgccccttccagtytgcagttttccgagtgtctgtacggcgctgctttccctcctctagccgtccactgcagtgcacctgcaggagtgctggctgatttctggacagtttgggt

SEQ ID NO: 230720 - DNA, 201 bp, Homo sapiens
ttgcccgcagcgaggtgggcggaggcacaagtgagctgggcccggaagaggctgttttgttcagtggtagggcaggcgcgggagcgctgaggctttgtgcyaaagagaaacagaaaagaaagtttgccatgtgagcgtctcacatcactgtctgccaaattccgcatgtgagagaaggctggaaggaccacactgttacag

SEQ ID NO: 230721 - DNA, 201 bp, Homo sapiens
acagtttgggtcctggggaccagacgtagcagtcatgggctgagccttcttcattcaagcagcacctggggccgcggctcccgtgctgtgtgatgacccaytcagcccactctctttgccgccgtgcctgtcccacgctccgtggtgactctgcagcatggcctgcctaccaccccttggctcttcccactcggtttcctg

SEQ ID NO: 230722 - DNA, 201 bp, Homo sapiens
cccgcccattccgctgcttttctcttccacccttcaccccagcaagaactcgctttgctttgggtaaaccaagaatagggaagatctgaaaaatcctaatktgcaaagcatatttcagagatgaccattcgttctcccacatgaagattgtattttacacattgatgtggcacagcattcctgatcccgcatgaatttaaa

SEQ ID NO: 230723 - DNA, 201 bp, Homo sapiens
tgtggcagacctagagccgtcaaagtcagtgggacaggaaacaactttccccggacggccctcctgccgtgccctgaagcccctcttgtgcccagctggtygtccatccctcctcctccgctttccacctcctcttctctcccaggtgccccctgctgacctgtgcccccagtgtgatgccgagtgctgcgctctcctcag

SEQ ID NO: 230724 - DNA, 201 bp, Homo sapiens
tgccctgtccctgagcctgcctcccacagcctgtcctctcccccaacctgcctcccgcagcctgtcctctcccccatgcctgcctcccgcagaccaccccyggctctcagccttgcgttcgtctggagcaatgtttacagtgagagggtggacgagtccgtgcagaagcttctcatccagcagatcactggctggatctgt

SEQ ID NO: 230725 - DNA, 201 bp, Homo sapiens
ccatgtgtgactctgcatctggttggttcggccccgccatgcctcatgttgaaatttggtccccatgttggaggtgcagcctggtgggagggctttggatstgggggagggacagatggggcggggcagatccctcgtgaatggattcatgccctcccagggtggaggtgagcgacttctcgctctcttaactcctgtgag

SEQ ID NO: 230726 - DNA, 201 bp, Homo sapiens
ccattggatgcgggcagaggagctgggtgggaatgccttcctgcgggaggtgtgggtagaggggacagaggtgggatggcagggagggtcaggaataagcsgagtccgtacgccaaactatggagtgggacaggaaggggcacctgagagcctcctaaattctcattaggaagttcagaaagagtccataatttctgtcaa

SEQ ID NO: 230727 - DNA, 201 bp, Homo sapiens
ggggacaggcagcctgcacaccatgaactgtgagacacagagggccgtgctgaggatgttgagggagggggtgcccctgagcacatgtagggcctgagctkcctgggaggaggactgcgttttcgtcagactgaggagctcagagcatcctggcaggggacggagaatgcctgaaatgtgctgaaaagcccaatatctggg

SEQ ID NO: 230728 - DNA, 201 bp, Homo sapiens
ctctcagtggtggtctcagtggttttgctctgtctcctgccccgtcttggctacaagaggctgggctctgggacggatggcagacggtgtgaactgcagayggggcctgctcggtcactgctccctctcctcttgggggtctggggagctgcctgaggctcacagcctcggttcatttcccacataggagtttgtttacct

SEQ ID NO: 230729 - DNA, 201 bp, Homo sapiens
atgaacgtaacaagaagtgttttttttcatgcgtgttgtcgaatgcgtcttcccctgacatcagcgctacctttcctcagttctcttctctcaagagtgtyttcctcctgagagctgaggcccctgcatgtgggagcacgaggagggatcagccatctgtgtccggctgctgtgcgtgtgggagcatgaggagggacgagc

SEQ ID NO: 230730 - DNA, 201 bp, Homo sapiens
cagaacagtcacttctgtccatttttgtcagcttacttgttacttcagtggagggacagatccttggagccacctgctctgtgatttccatgtcactactcgacctgatggagtctttggcccacttggaagaagtacccctttgacagaccttttcgcatcctgcccacatcccagttgcccaccctgtgcctcccttca

SEQ ID NO: 230731 - DNA, 201 bp, Homo sapiens
ccagaacagtcacttctgtccatttttgtcagcttacttgttacttcagtggagggacagatccttggagccacctgctctgtgatttccatgtcactactcgacctgatggagtctttggcccacttggaagaagtacccctttgacagaccttttcgcatcctgcccacatcccagttgcccaccctgtgcctcccttc

SEQ ID NO: 230732 - DNA, 201 bp, Homo sapiens
tcccagaacagtcacttctgtccatttttgtcagcttacttgttacttcagtggagggacagatccttggagccacctgctctgtgatttccatgtcactactcgacctgatggagtctttggcccacttggaagaagtacccctttgacagaccttttcgcatcctgcccacatcccagttgcccaccctgtgcctccct

SEQ ID NO: 230733 - DNA, 201 bp, Homo sapiens
agaatcccagaacagtcacttctgtccatttttgtcagcttacttgttacttcagtggagggacagatccttggagccacctgctctgtgatttccatgtcactactcgacctgatggagtctttggcccacttggaagaagtacccctttgacagaccttttcgcatcctgcccacatcccagttgcccaccctgtgcct

SEQ ID NO: 230734 - DNA, 201 bp, Homo sapiens
gggcgggccatttttctccagccaggaagggtaggggtgtgcaccatagggcctctcccaagttcgcctcggcgcctgcccccctccatcacggtgatcasgtgtggccttagccccaggtttctgagggcgtcagcatcacatgtgtttgttctgcttcatgggctccctccgtcaggcaggtcagggtgtgacatgcac

SEQ ID NO: 230735 - DNA, 201 bp, Homo sapiens
acagaatcccagaacagtcacttctgtccatttttgtcagcttacttgttacttcagtggagggacagatccttggagccacctgctctgtgatttccatgtcactactcgacctgatggagtctttggcccacttggaagaagtacccctttgacagaccttttcgcatcctgcccacatcccagttgcccaccctgtgc

SEQ ID NO: 230736 - DNA, 201 bp, Homo sapiens
ggtccctctgattgatgtggaggccgtatctcacgtcctggaacgcgtgtgtttatttgctgtttcacggggcgggccatttttctccagccaggaagggyaggggtgtgcaccatagggcctctcccaagttcgcctcggcgcctgcccccctccatcacggtgatcaggtgtggccttagccccaggtttctgagggcg

SEQ ID NO: 230737 - DNA, 201 bp, Homo sapiens
actacagaatcccagaacagtcacttctgtccatttttgtcagcttacttgttacttcagtggagggacagatccttggagccacctgctctgtgatttccatgtcactactcgacctgatggagtctttggcccacttggaagaagtacccctttgacagaccttttcgcatcctgcccacatcccagttgcccaccctg

SEQ ID NO: 230738 - DNA, 201 bp, Homo sapiens
tagactacagaatcccagaacagtcacttctgtccatttttgtcagcttacttgttacttcagtggagggacagatccttggagccacctgctctgtgatktccatgtcactactcgacctgatggagtctttggcccacttggaagaagtacccctttgacagaccttttcgcatcctgcccacatcccagttgcccacc

SEQ ID NO: 230739 - DNA, 201 bp, Homo sapiens
tttcctagaatcatccagtctcaggtgtttctttgtagccatggagaatggactaataccactgtcaaagatggtccaagtttgtttcctctctccaaccrgatttttaacgtttccttctcttctctgcgcctttcccagtgatgaggacagtggcttccatgggcaggcgttcagtaaacagcacccagtgaactcaga

SEQ ID NO: 230740 - DNA, 201 bp, Homo sapiens
tccccaccctcgcctgtctccctgtgtcccccaccccgtctcaggatgcacactacccaccctcgcctgtctccccccgtgtcccccaccccgtctcaggsatgcacactacccacccttgcctgtcccaccctcgcctgtctcccttcgtgtcccccaccctgtctcaggcgtgcacactaccccaggttcctcccaccc

SEQ ID NO: 230741 - DNA, 201 bp, Homo sapiens
cccaaaatctcctgtcgaaccgtaatccccagtgttgggtgtggggcctggggggtggtgactggacttgggggtgatttttgaatggttttgcaccaccytctccttgctgttctcatgatagtgagttttctgagacccgtgtgtttaaacctgggtagcccctcccaccttgcgcctacgcccaccgtgggacgagat

SEQ ID NO: 230742 - DNA, 201 bp, Homo sapiens
ccaccacggagtcagcgtctccctccccaccctcgcctgtctccctgtgtcccccaccccgtctcaggatgcacactacccaccctcgcctgtctccccccgtgtcccccaccccgtctcaggcatgcacactacccacccttgcctgtcccaccctcgcctgtctcccttcgtgtcccccaccctgtctcaggcgtgcac

SEQ ID NO: 230743 - DNA, 201 bp, Homo sapiens
tcagtgtgccccaaaatctcctgtcgaaccgtaatccccagtgttgggtgtggggcctggggggtggtgactggacttgggggtgatttttgaatggtttwgcaccaccctctccttgctgttctcatgatagtgagttttctgagacccgtgtgtttaaacctgggtagcccctcccaccttgcgcctacgcccaccgtg

SEQ ID NO: 230744 - DNA, 201 bp, Homo sapiens
gtgtgattctcccagctgagccgtgagttcgtctgagcggcgagtcggaactcgaggcagatcactctttgctgttgagatggttggatcagtgtgccccmaaatctcctgtcgaaccgtaatccccagtgttgggtgtggggcctggggggtggtgactggacttgggggtgatttttgaatggttttgcaccaccctct

SEQ ID NO: 230745 - DNA, 201 bp, Homo sapiens
ccttttggctgacagtctttgcctgtgtgaccctcacgggatgcctcccacgacctcagcctgtgaccctcacgggatgcctcccacgacctcagcccatwagcatccctgtggccagcttgtgtaacctgccaggcaggaggctgggatgaaattctcacttgccacaccttgtaaatatcaggtgtaaatatcaccctc

SEQ ID NO: 230746 - DNA, 201 bp, Homo sapiens
cgagtggtacgtcccacagcacacccaggagcctgtggccgcctcccgtccgggccttggaattccttttggctgacagtctttgcctgtgtgaccctcaygggatgcctcccacgacctcagcctgtgaccctcacgggatgcctcccacgacctcagcccataagcatccctgtggccagcttgtgtaacctgccaggc

SEQ ID NO: 230747 - DNA, 201 bp, Homo sapiens
ttgggcaggacgctcactggtgaggaggctctttagagcccacggtcgagtagccctttctagagaagctaaagatgcggccagaaggttccacggcctamcagcgagccctggctcgtccaggaagatcggccgatggtgccgagctggcccaccccagaatgcagctgcaccctgctccaatgccacggtgtctctggg

SEQ ID NO: 230748 - DNA, 201 bp, Homo sapiens
ctgcctctcataggtgcggaggaagcagctcacctgggtggcatcttgctgcttccccaaggagctggcagcaggctgggacattcctgtgcagtagtagsagctcatcctctacgcctcactccctacatccggccagcctcattgccgtgggggaagccaagacccagagatttgattgttttgatcgtttggccaaaa

SEQ ID NO: 230749 - DNA, 201 bp, Homo sapiens
tgggctgggtctgctctggtggggaaaatgaaatgtctgcttggccaagttacactggggcctgcagtggagacgttgagtaagtggctagaggaacacaygttcagcgtggggaggtctcacggcaagagatggcgatgtggggtctttggagcctggggagagatgaaggccaggccagcccggatccgaggctgacag

SEQ ID NO: 230750 - DNA, 201 bp, Homo sapiens
agtctgattttatgaaaagggaagatgttggccattacagtattacccacttttctctttcaggtgtgtcaattaaaatcaattaaaaaatgaattatacrtatatggatatattcaaaatgaacagtttggaactatctagaataaaaagtaaaaattccttttgtgtcccttcaccaaatctcactcccactcggaggt

SEQ ID NO: 230751 - DNA, 201 bp, Homo sapiens
gaaaaatcctaatttgcaaagcatatttcagagatgaccattcgttctcccacatgaagattgtattttacacattgatgtggcacagcattcctgatccygcatgaatttaaagttggtttctcccgtcaactctaccgtggccgcttgtggtgtgaagaagcttccgcctccatgccccagcctgcacctgccctgcag

SEQ ID NO: 230752 - DNA, 201 bp, Homo sapiens
ttgcattattggttagtaatgaaccggaccatctaagatgtcccagccaccttgtgggcagggccccgccccttcatcctctcagaggggctgaggcaacrggaagacccacagctgtgagacacgagaccgcatcactccgtgtgactggcagtctcattgcactcccaaattccaatgaataaaacctaaaaggagatg

SEQ ID NO: 230753 - DNA, 201 bp, Homo sapiens
cctcaggtgttcacaccaaccttgtcagaagttttctgttatatgcagctgaatttagtcctaaacagcacatcttgtcagaacccaggggttggcccagrctggtcactctgagtggcgtggggctgcagcagcatctcgggaagggtacaagcagtcagaggaacggtggctcagggacctgggagaccttctgctgag

SEQ ID NO: 230754 - DNA, 201 bp, Homo sapiens
tttggtgtattaacagaaaaagtgacgtgatattgagacttcagattagtgacttgaggtgagttaaaatcagttcagctcagtttgggtctcacacacaygtgagctcagatgtatgcatgtgaccccacccaatggctctgaagatgcggttcgctcctcaaactttccaggcttttctctcctcagaagtttgctggg

SEQ ID NO: 230755 - DNA, 201 bp, Homo sapiens
agaggaacggtggctcagggacctgggagaccttctgctgagcttccttgctgaggtgtgaccctgagaggacgcacacccacatgagcctcggccccgtmgtgtctgacatgaatcgcaacttccggatggccccagctcacacactgggaatgacggtggcctcatgctgcctcctccatcccagcctgggggagaaag

SEQ ID NO: 230756 - DNA, 201 bp, Homo sapiens
tgggcgcatgggacggaaaagggtaactgtgctgggcgcatgggacgggaaagggtaactgtgctgggcgcatgggacgggaaagggtaactgtgctgggmgcatgggacgggaaagggtaactgtgctgggcgcgtgggaaggaagagtaacacaggccctgtccccagggagacctctggacttacttatttgttctgt

SEQ ID NO: 230757 - DNA, 201 bp, Homo sapiens
ctggggagcccacagcacagagaagcaggcctcagagtcacccgaacagtctacagctcagggacacaggcctcagaatcacgtgaacagcccacagctcrgggacacaggcctcagaatcacccggacaccccacagctcagagatgcaggcctcagaatcacccagacaccccacagcgcagggacacaggcctcagaa

SEQ ID NO: 230758 - DNA, 201 bp, Homo sapiens
gggcaggctgtaacaagatctcatcgcgtccctctccgaaaggaataatttcattaccccagattaacacaggggcgttacaataaggggtgagagtaatygatattttcctgctatctcatcctgtattaatcacaattgcaaggcactcttcattcatagggtttgcagtgaaattccatttttttctggttttcatct

SEQ ID NO: 230759 - DNA, 201 bp, Homo sapiens
tcaacacctaatgctggttaatgaaacatatttcccagtaattatacagctagaaacgattacgtaattttaaaataagacgttgcagtttgcagaatgtstctacatatttctcatcagtgattcatagcagtcctggggacccgggtgggacacccctttctagatgaaaccaaaagcgcacagttgtgccggcccgag

SEQ ID NO: 230760 - DNA, 201 bp, Homo sapiens
tgtgggagcacgaggagggatgagccgtctgtgtctggctgctgcatgtgggagcacgaggagggatcagccgtctgtccggctgctgtgtgtggagcacsaggagggacgagccgtttgtgtctcgctgctgtgtgtgggagcacaaggagggatcagccgtctgtcctgctgctgtgctcacttcagcagtgctgtctc

SEQ ID NO: 230761 - DNA, 201 bp, Homo sapiens
catcttcccagctcctcctgtcctccgctgggcacctgtgatgtccaggcactccctgcttggattgggggatctgggtttcatcttcccagctcctcccrtcctcccctgggcacctgtgatgtccaggcactccctgcttggatcggggggtctgggttttgtgctatacttggtgctccctttcactcaggccccttc

SEQ ID NO: 230762 - DNA, 201 bp, Homo sapiens
tccaccacggagtcagcgtctccctccccaccctcgcctgtctccctgtgtcccccaccccgtctcaggatgcacactacccaccctcgcctgtctccccccgtgtcccccaccccgtctcaggcatgcacactacccacccttgcctgtcccaccctcgcctgtctcccttcgtgtcccccaccctgtctcaggcgtgca

SEQ ID NO: 230763 - DNA, 201 bp, Homo sapiens
ttccaccacggagtcagcgtctccctccccaccctcgcctgtctccctgtgtcccccaccccgtctcaggatgcacactacccaccctcgcctgtctccccccgtgtcccccaccccgtctcaggcatgcacactacccacccttgcctgtcccaccctcgcctgtctcccttcgtgtcccccaccctgtctcaggcgtgc

SEQ ID NO: 230764 - DNA, 201 bp, Homo sapiens
gttccaccacggagtcagcgtctccctccccaccctcgcctgtctccctgtgtcccccaccccgtctcaggatgcacactacccaccctcgcctgtctccccccgtgtcccccaccccgtctcaggcatgcacactacccacccttgcctgtcccaccctcgcctgtctcccttcgtgtcccccaccctgtctcaggcgtg

SEQ ID NO: 230765 - DNA, 201 bp, Homo sapiens
cacgttccaccacggagtcagcgtctccctccccaccctcgcctgtctccctgtgtcccccaccccgtctcaggatgcacactacccaccctcgcctgtctccccccgtgtcccccaccccgtctcaggcatgcacactacccacccttgcctgtcccaccctcgcctgtctcccttcgtgtcccccaccctgtctcaggc

SEQ ID NO: 230766 - DNA, 201 bp, Homo sapiens
cccacgttccaccacggagtcagcgtctccctccccaccctcgcctgtctccctgtgtcccccaccccgtctcaggatgcacactacccaccctcgcctgtctccccccgtgtcccccaccccgtctcaggcatgcacactacccacccttgcctgtcccaccctcgcctgtctcccttcgtgtcccccaccctgtctcag

SEQ ID NO: 230767 - DNA, 201 bp, Homo sapiens
gcggcctgggaggcacatggatgccgagtctttggatcagcagagggtcgttgagtcgctttgaggggccagacactgttgtaggagctgggagcgcagcrgggaagcacgctaggggtccccttgtcgcggagaagggacaggcactatagtgaccgggtaatttctagtaaggtgtgatgtgaagaaaggagaagaggg

SEQ ID NO: 230768 - DNA, 201 bp, Homo sapiens
acccacgttccaccacggagtcagcgtctccctccccaccctcgcctgtctccctgtgtcccccaccccgtctcaggatgcacactacccaccctcgcctgtctccccccgtgtcccccaccccgtctcaggcatgcacactacccacccttgcctgtcccaccctcgcctgtctcccttcgtgtcccccaccctgtctca

SEQ ID NO: 230769 - DNA, 201 bp, Homo sapiens
tgcggaggaagcagctcacctgggtggcatcttgctgcttccccaaggagctggcagcaggctgggacattcctgtgcagtagtagcagctcatcctctaygcctcactccctacatccggccagcctcattgccgtgggggaagccaagacccagagatttgattgttttgatcgtttggccaaaaccacacaacaagaa

SEQ ID NO: 230770 - DNA, 201 bp, Homo sapiens
tacccacgttccaccacggagtcagcgtctccctccccaccctcgcctgtctccctgtgtcccccaccccgtctcaggatgcacactacccaccctcgcctgtctccccccgtgtcccccaccccgtctcaggcatgcacactacccacccttgcctgtcccaccctcgcctgtctcccttcgtgtcccccaccctgtctc

SEQ ID NO: 230771 - DNA, 201 bp, Homo sapiens
acctacccacgttccaccacggagtcagcgtctccctccccaccctcgcctgtctccctgtgtcccccaccccgtctcaggatgcacactacccaccctcgcctgtctccccccgtgtcccccaccccgtctcaggcatgcacactacccacccttgcctgtcccaccctcgcctgtctcccttcgtgtcccccaccctgt

SEQ ID NO: 230772 - DNA, 201 bp, Homo sapiens
ccagcctatcacctacccacgttccaccacggagtcagcgtctccctccccaccctcgcctgtctccctgtgtcccccaccccgtctcaggatgcacactacccaccctcgcctgtctccccccgtgtcccccaccccgtctcaggcatgcacactacccacccttgcctgtcccaccctcgcctgtctcccttcgtgtcc

SEQ ID NO: 230773 - DNA, 201 bp, Homo sapiens
agccagcctatcacctacccacgttccaccacggagtcagcgtctccctccccaccctcgcctgtctccctgtgtcccccaccccgtctcaggatgcacactacccaccctcgcctgtctccccccgtgtcccccaccccgtctcaggcatgcacactacccacccttgcctgtcccaccctcgcctgtctcccttcgtgt

SEQ ID NO: 230774 - DNA, 201 bp, Homo sapiens
ccagaaccctcggtggaggcattcagcagccgcctctcctgtgaatttttcttaaatatcatttggcaataaatcatagcgtgcccatcaaatttttccckagagaaaattattatttttaggcctttaaaacatttgctctttccttcttctaagatgatgtttgttttcatgcaggctaagatgtttttacctatactc

SEQ ID NO: 230775 - DNA, 201 bp, Homo sapiens
cctccttagttaaaagtgagattgtcctcagggacatttgagggccatggaaaagaagcagcctgggtaccatgagaggtgcctccatgagcagcagggcrgcctggagccatgggagggaggaagctgttgcacccagacacataactgagataattgggcagagggcaggcagtcacaagaggtggctttggaataaag

SEQ ID NO: 230776 - DNA, 201 bp, Homo sapiens
ctctgtaaacattgggcacgcatgatgcagtgagagagggctctgtaaacatcaggcacacatgatgtaatgagagagggctctgtaaacattgggcacayatgatgtaatgaaagagggctctgtaaacatctgtaaacatactgcacccatgagggagtgagagagggctctgtaaacatcaggcacacacgatgtaat

SEQ ID NO: 230777 - DNA, 201 bp, Homo sapiens
gctttactgcgactctccccaggccaggctcgccctggagggggaggtctggtgttaacgcccctcaccgtgcgctgactggggccgcgcatccgctgtgktcccgcaggccgaggtagcacctttgctaatgaacttggaaggagttttgatgctagttttactgtgactccccccaggccaggctcgccctggagaggg

SEQ ID NO: 230778 - DNA, 201 bp, Homo sapiens
tcgctacacgttcttagcacacggaagtgaagtcccatgaaggaagcggagtcggagagggacgccggggcgggtttcacggtggacgaaggagctgcacsccgagaagtccagccaggtgccacaagccagaaaaggtcaggagccgccccagagcgtgcggcccacccaagccctgacttcagctcagtgaaacccatc

SEQ ID NO: 230779 - DNA, 201 bp, Homo sapiens
ccctggagcccgttcgtcccaggcaggggctctggattctggatcccgttcgtcccaggcgagggctctggattctggagcccgttcgtcccaggcgggtsctctggattctggagcccattcatcccaggcagtgggggctctggattctggagcccgtttgtcccaggcagtgggggctctggattctggagcccattc

SEQ ID NO: 230780 - DNA, 201 bp, Homo sapiens
ttcagctcagtttgggtctcacacacacgtgagctcagatgtatgcatgtgaccccacccaatggctctgaagatgcggttcgctcctcaaactttccagrcttttctctcctcagaagtttgctgggaggaaggagaagcgggaggaacagaaccagattgacgttctcgcgtctcttcttacttgggcgtatttatagc

SEQ ID NO: 230781 - DNA, 201 bp, Homo sapiens
ctgacatgaatcgcaacttccggatggccccagctcacacactgggaatgacggtggcctcatgctgcctcctccatcccagcctgggggagaaaggcacygcgaactccagctttctgcctcttcggtgggaacagtgggtgtcctcttgctgtgttaaatttgatctgagctgagggaaacccgaagaatcagctccat

SEQ ID NO: 230782 - DNA, 201 bp, Homo sapiens
gaagcgggaggaacagaaccagattgacgttctcgcgtctcttcttacttgggcgtatttatagcatccccgctaaggacgccctcgttttagaggaacaygttttacattttttttccagcctccaggctgcctggcagcctcaggcggagaagcagattgactcggtgtcagggtcacactctcaggccccttggcggc

SEQ ID NO: 230783 - DNA, 201 bp, Homo sapiens
cacagggctgcaagtgaccgagaacaaatccggcttttggaaaagcaagatttggtgtttgtagtaatcccagtgtgtgcagagcacgtgcaattttgctytgaggtttttcattttgtaccagaccaggagcacacaccggccctgctcccgactgcggtgggcagagacaccacaaagtatctgggaggtttcagtaaa

SEQ ID NO: 230784 - DNA, 201 bp, Homo sapiens
ggacgccagccacgctgggaccgaggggctccgcagacgtcatcccaagacccgctattggttcagagcttgtggatcaggaccagagccagtcctctcaytggggcagtgagagcctgacatatgtccagaaggcagcccctgtgatcctcccagggtggcagcggccaagtgagtggtccagggcacaccgtggtgcac

SEQ ID NO: 230785 - DNA, 201 bp, Homo sapiens
tgctcactctttgggtcctcactacgtctgtgagctgtaacactcacctcgaaggtctgcagcttcactcctgaggccagtgagaccacaaatccaccacraggaatgaacaactccggatatgctacctttatgagctgtaacactcactgtgagggtcttcagcttcactcttgaagccatagagaccacgaacccact

SEQ ID NO: 230786 - DNA, 201 bp, Homo sapiens
atgttcttagtacagagcagttagatgagactattacggtttagcaagcgagacagccagtgctaggagtccaaagccttggtctcagttcaggcttggcyaccaacccgccacgtgcccacaggttgatgtagctggctcagctggaactcgtaaatcctcccacaccctgtttttcttgcagtaaggctgtcccggcac

SEQ ID NO: 230787 - DNA, 201 bp, Homo sapiens
ggagttcaagaccagcctggcaacatggtgaaaccccttctctacaaaaagtacaaaaatcagccaggtgtggtggcatgtgcctgtggtctcagctactygggaggctgaggtgggaggatcacttgagcccaggaagaggaggttgcagtgattaagcctttgcactccagcctgggcaacagagccagactctgtctc

SEQ ID NO: 230788 - DNA, 201 bp, Homo sapiens
ttttcttcctagaatattggcggctcatcttcattgcctggctggacgcagacccagccctttcatctgacagaggtgccgtgaatctcgcttcctggcgsgtggctcacccccaccttttcccactttttaatagtgtttcttgaagcacagaagctgcttcacttgatttgatcaaattttaccactcccttcctccgt

SEQ ID NO: 230789 - DNA, 201 bp, Homo sapiens
tagtttgtaggataagttcccaaaaaccacagaggggacaaaatataaggtgtagtttcctactttcattttcactttcagtgttatataattttatatcytcctttgcttatagctccttaagaacctaagcatcatgatatgttcttaatttgtaccattttctatcacttaatatggtgatcgtcggtgacgatggtc

SEQ ID NO: 230790 - DNA, 201 bp, Homo sapiens
gctacctttatgagctgtaacactcactgtgagggtcttcagcttcactcttgaagccatagagaccacgaacccactgggaggaatgaacaattctggaygcgctgtgtttatgagctgtgacacccactgcaaaggtctgcagcttcactcctgaagtcagggagaccatgaacccaccggaagaaagaaactctggac

SEQ ID NO: 230791 - DNA, 201 bp, Homo sapiens
gagccagcctatcacctacccacgttccaccacggagtcagcgtctccctccccaccctcgcctgtctccctgtgtcccccaccccgtctcaggatgcacactacccaccctcgcctgtctccccccgtgtcccccaccccgtctcaggcatgcacactacccacccttgcctgtcccaccctcgcctgtctcccttcgtg

SEQ ID NO: 230792 - DNA, 201 bp, Homo sapiens
ggagccagcctatcacctacccacgttccaccacggagtcagcgtctccctccccaccctcgcctgtctccctgtgtcccccaccccgtctcaggatgcacactacccaccctcgcctgtctccccccgtgtcccccaccccgtctcaggcatgcacactacccacccttgcctgtcccaccctcgcctgtctcccttcgt

SEQ ID NO: 230793 - DNA, 201 bp, Homo sapiens
gggagccagcctatcacctacccacgttccaccacggagtcagcgtctccctccccaccctcgcctgtctccctgtgtcccccaccccgtctcaggatgcacactacccaccctcgcctgtctccccccgtgtcccccaccccgtctcaggcatgcacactacccacccttgcctgtcccaccctcgcctgtctcccttcg

SEQ ID NO: 230794 - DNA, 201 bp, Homo sapiens
agggagccagcctatcacctacccacgttccaccacggagtcagcgtctccctccccaccctcgcctgtctccctgtgtcccccaccccgtctcaggatgcacactacccaccctcgcctgtctccccccgtgtcccccaccccgtctcaggcatgcacactacccacccttgcctgtcccaccctcgcctgtctcccttc

SEQ ID NO: 230795 - DNA, 201 bp, Homo sapiens
ccactgcactgggtccctaatggtcctggcgtgggagctgtggcctgggcctcctgtgcactgcaccgtaccctcggctgccatgagcacgggcaccccayggggacagcaagctcagcacccagtgggcctgatcagacagccgcctgcgtcgtttcatggctttctccttcatgttgaaggagtgacagggacactgag

SEQ ID NO: 230796 - DNA, 201 bp, Homo sapiens
ctcagggagccagcctatcacctacccacgttccaccacggagtcagcgtctccctccccaccctcgcctgtctccctgtgtcccccaccccgtctcaggatgcacactacccaccctcgcctgtctccccccgtgtcccccaccccgtctcaggcatgcacactacccacccttgcctgtcccaccctcgcctgtctccc

SEQ ID NO: 230797 - DNA, 201 bp, Homo sapiens
gctcagggagccagcctatcacctacccacgttccaccacggagtcagcgtctccctccccaccctcgcctgtctccctgtgtcccccaccccgtctcagsatgcacactacccaccctcgcctgtctccccccgtgtcccccaccccgtctcaggcatgcacactacccacccttgcctgtcccaccctcgcctgtctcc

SEQ ID NO: 230798 - DNA, 201 bp, Homo sapiens
tagagccaccatatgattcagcaatcccacttccagatatttatccaaaggaagttaaatcaggacctcgaagtgacgggtgcgctccggagttcatcacrgcattgttcacaggagccaagacatggaagcacatgtcccccagggacgagcgggcaggaaagcgtggtgcatagacccagtgggtgctcttcagcctta

SEQ ID NO: 230799 - DNA, 201 bp, Homo sapiens
tgctcagggagccagcctatcacctacccacgttccaccacggagtcagcgtctccctccccaccctcgcctgtctccctgtgtcccccaccccgtctcaggatgcacactacccaccctcgcctgtctccccccgtgtcccccaccccgtctcaggcatgcacactacccacccttgcctgtcccaccctcgcctgtctc

SEQ ID NO: 230800 - DNA, 201 bp, Homo sapiens
agatcaatggaacagagagtccagaaacaactcatacactgccaagtgctccttcataagcatgaggagaatacaccatagggaagggtcgcctcttcacrggtgctggggaaactggatgtccacatgcaaaagaacggcatcggaccctcacctcacatccacaaaaacccactcaacatgggctaaagactgagacat

SEQ ID NO: 230801 - DNA, 201 bp, Homo sapiens
ggctgctcagggagccagcctatcacctacccacgttccaccacggagtcagcgtctccctccccaccctcgcctgtctccctgtgtcccccaccccgtctcaggatgcacactacccaccctcgcctgtctccccccgtgtcccccaccccgtctcaggcatgcacactacccacccttgcctgtcccaccctcgcctgt

SEQ ID NO: 230802 - DNA, 201 bp, Homo sapiens
atgatgtatttgcacacgcacacacacacacacacacacacacacaggagtatatatattttttctatgcttcttaaagaaacaacaagtccttttaaaasacctttcaaatgcacagtataagaagcactgtgggggagaggaacagagactcccagagaaggagtttccttaatgcttactggaatttgctattttctt

SEQ ID NO: 230803 - DNA, 201 bp, Homo sapiens
taaccccagcttccaccagctgccccgggtctgagtcctcagacttggccctcctgtcccccaactgctctgatgatgcagctctgaaaaaatgagatgtytgtgaggggtgaggtgtctcctgtccagagagtgtccaagcagggcagtgtcaggatgtcatagaagtctttagggacaccggacctccagccatgtgga

SEQ ID NO: 230804 - DNA, 201 bp, Homo sapiens
gggaggaacacaaatcgtagtaagtatgatatgcaggtttccgagcccagatgtgcagccctggattttcaagtcttccctcaagtcaggactttaaggaragaactctgggttttgtgtttctgcacaatgaagttctaatatctgactcccaaacttcttccccgtgagactgccttaatgatgcttatgtagactgga

SEQ ID NO: 230805 - DNA, 201 bp, Homo sapiens
ctttgcaaaacactgcctggtcttattattgaagttactttcttgggtttattaagattcttcttttactcaaatattgaccaaggcctgccctgcccccrccgcttaactggcaaacaggctgtggagccataacctgacactagacataacgacacaacgttaatgactttaaacaaccgggagtttacgtcgaataca

SEQ ID NO: 230806 - DNA, 201 bp, Homo sapiens
ttccatttcccaagtggccattcgctcatgtggttctgatgttgggtaggacctttccttcccttttccttcttactctctaggtgtccaccattcaaaayagaatgggctcagatgcaggttttcatagtggcatgagccaggcattctagcaaggttgcagatttaaatgaaccctttacttggtggcaattgaaacaa

SEQ ID NO: 230807 - DNA, 201 bp, Homo sapiens
tcagctgggggtggaggcgggcgtgccctcccgagggtgttttgctgggggttcctctgctgagtgggcccgtccttggtgattgtccctggtgcacggcyggcttgttaagcaggggcgaagcgtgcacaaggtcacctttctccagcatcctcatcttcatggtctcgctgggagagtggccgggggtgcctgaatcaa

SEQ ID NO: 230808 - DNA, 201 bp, Homo sapiens
actttttgagcataggcctgaccctaaaggaaaatgctgatttggagcatcttggatttcagatttttgtatttgggatgctcaaccagtaagtgtgatgyaaatattctaaaatgcaaaatttgagacacttctggttccaatcacttcagataaggaatggtcgacctttatatatattacacacacacacatttttgt

SEQ ID NO: 230809 - DNA, 201 bp, Homo sapiens
tcggggcccttcggggcctccccagaactgtgctcgttggtggcatccacaggctgctcctctgggagcttgttgcttttcgggtcctgagccctcccgcytgccaccgtggcgtcagggaaactggtgcctcccaagcacccccagctcttctgcgtgagaaggttggagactgtgctgcagccggggttcttatgatca

SEQ ID NO: 230810 - DNA, 201 bp, Homo sapiens
tcgaaaactttttgagcataggcctgaccctaaaggaaaatgctgatttggagcatcttggatttcagatttttgtatttgggatgctcaaccagtaagtrtgatgtaaatattctaaaatgcaaaatttgagacacttctggttccaatcacttcagataaggaatggtcgacctttatatatattacacacacacacat

SEQ ID NO: 230811 - DNA, 201 bp, Homo sapiens
attttcactttcagtgttatataattttatatcctcctttgcttatagctccttaagaacctaagcatcatgatatgttcttaatttgtaccattttctaycacttaatatggtgatcgtcggtgacgatggtctgacggtttgggggtttcttttaaacatgtgctccctcttctggttgaatggatgcttcaaactgga

SEQ ID NO: 230812 - DNA, 201 bp, Homo sapiens
tcggtgacgatggtctgacggtttgggggtttcttttaaacatgtgctccctcttctggttgaatggatgcttcaaactggaatgaaatcaaacacctgtktatcttttgtgcatctttgattcaggccattggtatttgttaaaatcataagggattttgaaacaaagatgatagagaagaggcctctaccaacttttaa

SEQ ID NO: 230813 - DNA, 201 bp, Homo sapiens
tctccctggaacagaggagctgatgctcagaggggagcccagggcagcccctgagcttggtgctgctgaggtgcaggtctgatgggatagaggctgtgcaygcagaggagagcgggaagctgggcccatgccagtggccctccaagtactcactttgttcatgcagaccaccgggccctggtctgcctggactgagggggt

SEQ ID NO: 230814 - DNA, 201 bp, Homo sapiens
cttcattctgttagtggggtgtattgcgtttattattttttatgtgttgaaccattcttgcattctaggaatacatcccacttggtcatggtacagcaatygttttaatatgcttctgaacttccgaattttgtctactagtattttgtcgaagattttttgcatcagtatttataagggatattggttcttagttttgtt

SEQ ID NO: 230815 - DNA, 201 bp, Homo sapiens
ggccaggcatttgcaggggcggtgcctagtctctgcagctgacagctgtatggaaccctgcagtgttcagtacaaagctccaggatgtgaaggatttgtcrgctctcaggcatgcagccctgccctcaccctcctgtgatgaattgggccaggcaaacagtagaaataggagcagtcccctggctgtgcagaaaggcatct

SEQ ID NO: 230816 - DNA, 201 bp, Homo sapiens
ggagacacccaggctggattcttcatctgcaaggatgaccctggagatgtgccaaatagagaagtcagtgtttcaggtctgaggagcccagccccagccggcacctgctgagtggtcgcagacacgcggctccagcgttcaagccttgttagatcccctggaaaaacagaaggaggctggttcacatccattcacacaacc

SEQ ID NO: 230817 - DNA, 201 bp, Homo sapiens
tctcagcttctgccctggaaggaagccactgtccccagaaccacttccgggccagagtgaaggcagctggacagcaggaggccaggcatttgcaggggcgrtgcctagtctctgcagctgacagctgtatggaaccctgcagtgttcagtacaaagctccaggatgtgaaggatttgtcagctctcaggcatgcagccctg

SEQ ID NO: 230818 - DNA, 201 bp, Homo sapiens
aggcaggcagatcgctttagcctgggaagtggtggctgcagtgagctatggttgtaccattgcactccagcctgagtgacagagcaagatgaaaaaaaaaaggaaacattgatgccatggatattgcaagatgttaacccttcatgtgcagcatctgacatgtgcagtacagactctcataatttatcctggattaaaaat

SEQ ID NO: 230819 - DNA, 201 bp, Homo sapiens
tggatgcgctgtgtttatgagctgtgacacccactgcaaaggtctgcagcttcactcctgaagtcagggagaccatgaacccaccggaagaaagaaactcyggacacacctgaaggaacaaactctggacacaccatctttaaaaactgtaacactcaccgcgagggtccgcggcttcattcttgaagtcagcgagaccaa

SEQ ID NO: 230820 - DNA, 201 bp, Homo sapiens
aaacctttggtgctgtaaccaccgaaggctctagaacattctgcacatgtcctatgccaatgtgtgggagcctctggagggcccaccccagagaacactgygcagcgttcatgagcacctgctgtggacacggccctgtccctggctgtcaggaaaatgcgctgcccttcggagacctggctttggatcccgagtctctgc

SEQ ID NO: 230821 - DNA, 201 bp, Homo sapiens
ccaaaagcggaaaaagagaaaaatgaaggtgggaaaaatgggtgttagcattttaaatcccctgtaagtcattttggccagagggggaggagcaacaacartgaggaggtggccaaacaatggtgccctcctcctttcctgcacctctgtgatgagaagcagcaatcagcagtgagattgcagattcccaatatttggagg

SEQ ID NO: 230822 - DNA, 201 bp, Homo sapiens
tcacactacccacatggggcaacccagaggaaggtctcggtttccgtggaaatctggtgtgcagtgaggggacgaggggcagtcacagggcaatgtggctrtccgtgggcaccatctgggatttcactgtgtggagagggactgggctgccctgatgtgtggaactggctcagatagaaggcaggagacacagggctgcaa

SEQ ID NO: 230823 - DNA, 201 bp, Homo sapiens
caggccctgctgaggtcctctccccaaggggtccctgagtgtaagtcatggatagagaatgcctggggtctccagccctggtgccagttctgttaccattstcctactcctgccgaaggcctctgcctgctctgggcacacacagccatgccctacatccagcaccttgtctcatcactcctatccctatgctagcatcct

SEQ ID NO: 230824 - DNA, 201 bp, Homo sapiens
cccccccggctgcacctggatgctgcgataggcagtgccctgccgaggaatggagggccgcccaggcccacactcgggccacgcaggagttgcttctggcrtcaagtccacacatttcagtgcaaacgcaaagcctccaggatctgggccaagctgccactccagcttcatcttcattcactgctcgtctgcaccacccac

SEQ ID NO: 230825 - DNA, 201 bp, Homo sapiens
gactcttgtcccctgctctagagtaacaatgggctctcaggtgcaagtgctcgagctgtttattaacccttctgaacctctctgagccatggaggtcaaaygtatttccatttcccaagtggccattcgctcatgtggttctgatgttgggtaggacctttccttcccttttccttcttactctctaggtgtccaccattc

SEQ ID NO: 230826 - DNA, 201 bp, Homo sapiens
gggaagtgcacatcagatgaatttgtggggacttatagtcaccttgggtgactcttgtcccctgctctagagtaacaatgggctctcaggtgcaagtgctygagctgtttattaacccttctgaacctctctgagccatggaggtcaaacgtatttccatttcccaagtggccattcgctcatgtggttctgatgttgggt

SEQ ID NO: 230827 - DNA, 201 bp, Homo sapiens
tggtacagggtgctgcagattctgggaagtgcacatcagatgaatttgtggggacttatagtcaccttgggtgactcttgtcccctgctctagagtaacartgggctctcaggtgcaagtgctcgagctgtttattaacccttctgaacctctctgagccatggaggtcaaacgtatttccatttcccaagtggccattcg

SEQ ID NO: 230828 - DNA, 201 bp, Homo sapiens
ctgtacccctccttaatttatggaattcacccccccagggattaatacttaagtcctagatgccaaaaatatgtgtctcctaagctcacagttaggatgcrctgttgctgtggagaggggatgggggttggtacagggtgctgcagattctgggaagtgcacatcagatgaatttgtggggacttatagtcaccttgggtg

SEQ ID NO: 230829 - DNA, 201 bp, Homo sapiens
gaaagatgaacgagttagccctgttctggcatctcccgggtggactagcaccgaggtgctgtgacaggaagccaaggggacctcactgagaagcggcatcrtctgccctggggatggggtgagggcatgaccacagatctcccccctgcagacttctctcccaggcccgaactgtggcctgtttccactcaaggctgcctg

SEQ ID NO: 230830 - DNA, 201 bp, Homo sapiens
ccaccactcacctcctgctgtgcaccccagttcctaacaggccacagactggtgtcagtccgtggcccagaggctggggatgcctggtccagtgggaagayatgggtgggagatctgggatgcccatggacttttacagagtgtgagtttgggggcaaacacacttggagttggacctcagctctgctgctcactagccaa

SEQ ID NO: 230831 - DNA, 201 bp, Homo sapiens
aacaaaaggatttaatgatagaaattaagtttgagaaatgtagcaaccccggccattggactggaaagatgaacgagttagccctgttctggcatctcccrggtggactagcaccgaggtgctgtgacaggaagccaaggggacctcactgagaagcggcatcgtctgccctggggatggggtgagggcatgaccacagat

SEQ ID NO: 230832 - DNA, 201 bp, Homo sapiens
caaagtttcactcgctcactcacccgccactcacccgcttacctgccactcacgtactcactcacccaccactcaccggccactcaacagctcactctccygccactcacccactcacctacctgccactcacctgctcactcacccaccactcaccggccactcaacagctcactcacccaccactcacctcctgctgtg

SEQ ID NO: 230833 - DNA, 201 bp, Homo sapiens
gatgatggtaatgatggtgatgaagatgttgataatgaaaatgatggtggtggtgaagatgatggtggtaatgaagatgatggtggtgatggtgatgacakgaaggagaaagaggagtctcaggaaacaaaacaggaagccttttctttcacaggaaggcagttaaaccaggacagcagtgttgcttcataaataataaaa

SEQ ID NO: 230834 - DNA, 201 bp, Homo sapiens
ctcctctgggagcttgttgcttttcgggtcctgagccctcccgcttgccaccgtggcgtcagggaaactggtgcctcccaagcacccccagctcttctgcrtgagaaggttggagactgtgctgcagccggggttcttatgatcaccttcctccctcgccagcatctgccctggagctgaatgaggaccaccaggctcctc

SEQ ID NO: 230835 - DNA, 201 bp, Homo sapiens
ggggcgactcggatcatctcacagacatgaagctgagtgaaagaaggaaggtgtgaaagacgacaggccccgtgaatctggtgcagaggcaggcgcggccrtgagcacagcttccatcaagtcggcggtggctccccatgaaggtgcagcaggggtgggggttccagctgctggcgggactatttcttgagtgctgtttgg

SEQ ID NO: 230836 - DNA, 201 bp, Homo sapiens
gcacccccagctcttctgcgtgagaaggttggagactgtgctgcagccggggttcttatgatcaccttcctccctcgccagcatctgccctggagctgaaygaggaccaccaggctcctcagggcctgtctccgtggggtaccaggaggcgcaaatgccagtttgcatcattgccctgttttcagctgtccaggatgccca

SEQ ID NO: 230837 - DNA, 201 bp, Homo sapiens
ggtcccatgaggactgtggggtgtagggaggcccatgatctccatgctcttggccctgtgaggactgtggggtgtagggaggactgtggggtgtagggagkcctgtgatctccacactcagggccctgtgaggactgtggggtgcagggagtcctgtgatctccacactcagggccctgtgaggactgtggggtgcagggg

SEQ ID NO: 230838 - DNA, 201 bp, Homo sapiens
agccccctccagggccagagtcacagcctcctggctccacagcctcggtgtcatctcatccaaccctgggcctacgtgggagctcacacggcaggggtggygccgggctccttccacacctcgctcagggctgagccccctccagggccagagtcacagcctcctggctccataaggcatctggcttgtcgcaacacgttc

SEQ ID NO: 230839 - DNA, 201 bp, Homo sapiens
ggttctatgatggagaaacggcagggcccagcaccatgatgtgggcagccacagcggctggacaggggccactggacatttagggagatcctgtgacacayaggctgtggcctttctccgagtcatgtgtgtgtggccctcagggtagtgggagaaagagaagctatgacatttggactgaggcgtgcatgggtttgcggc

SEQ ID NO: 230840 - DNA, 201 bp, Homo sapiens
gctgcagccggggttcttatgatcaccttcctccctcgccagcatctgccctggagctgaatgaggaccaccaggctcctcagggcctgtctccgtggggyaccaggaggcgcaaatgccagtttgcatcattgccctgttttcagctgtccaggatgcccatgtctgcagaacgcagtgtgcacagtcccacagggcacc

SEQ ID NO: 230841 - DNA, 201 bp, Homo sapiens
cctgtgatctccacactcaaggccctgtatggactatggtgtgtagggagtcctgtgatctccatgtttgtggcgtgcgtgctgagtgcatcctgcagccrgagaaggagctttgtgatggtcaaatcagggcgtgcgtcaaacatgttaggtttcatttaccgactgcctggaaatgggtaggaaccagatcgttgggtg

SEQ ID NO: 230842 - DNA, 201 bp, Homo sapiens
cagggctgagccccctccagggccagagtcacagcctcctggctccacagcctcggtgtcatctcatccaaccctgggcctacgtgggagctcacacggcrggggtggtgccgggctccttccacacctcgctcagggctgagccccctccagggccagagtcacagcctcctggctccataaggcatctggcttgtcgca

SEQ ID NO: 230843 - DNA, 201 bp, Homo sapiens
tgcagttatccctaaattattatttccaacagtgtggccccagtgtctaatacaaaactgagctggtagagccctggccctgtgggaaacaaatgtctttwacctttccctgtgtgttcctggaactgagcctctgcaactcccttgccagggccaccaatttccccaggccagcccagtgatgtttttcctggactcatc

SEQ ID NO: 230844 - DNA, 201 bp, Homo sapiens
tccgttccgtctccgtcctcggggcgtgtctgtgctgtctcttcttagaaggatgccggccgtactggataagggcctcatctttactaactccatccacrgagaccctatgtccagaaggcggcattcactgtgctggtgttaggagttgaacgtgtctttttggggaaacggttctgctcgccacagtgccttggtgtc

SEQ ID NO: 230845 - DNA, 201 bp, Homo sapiens
gtggcaagtatattgtgcagttatccctaaattattatttccaacagtgtggccccagtgtctaatacaaaactgagctggtagagccctggccctgtggkaaacaaatgtcttttacctttccctgtgtgttcctggaactgagcctctgcaactcccttgccagggccaccaatttccccaggccagcccagtgatgtt

SEQ ID NO: 230846 - DNA, 201 bp, Homo sapiens
gtggctcctggcaatgccgggggctccttggcaggtagacgcctcactccgttccgtctccgtcctcggggcgtgtctgtgctgtctcttcttagaaggaygccggccgtactggataagggcctcatctttactaactccatccacagagaccctatgtccagaaggcggcattcactgtgctggtgttaggagttgaac

SEQ ID NO: 230847 - DNA, 201 bp, Homo sapiens
cggtgacgatggtctgacggtttgggggtttcttttaaacatgtgctccctcttctggttgaatggatgcttcaaactggaatgaaatcaaacacctgttyatcttttgtgcatctttgattcaggccattggtatttgttaaaatcataagggattttgaaacaaagatgatagagaagaggcctctaccaacttttaac

SEQ ID NO: 230848 - DNA, 201 bp, Homo sapiens
ggccagtgagacggtttcctgtgaggatcctggggtcaaagtgccacaaactgggtggcttcaaaccacagaaatgaattgtctgacgggaccgcgggccrgaagctggagatccaggtgttgtcagggccacgtgctcaggaagctctcgggcgactctctgtggctcctggcaatgccgggggctccttggcaggtaga

SEQ ID NO: 230849 - DNA, 201 bp, Homo sapiens
gttttgagtaaatccatccatcttggaattcttactttttcaagtgtagaaatgatgtagtgtgtaccccactgggaaccacccaatgctgttaacacacytttaaacacaggttatttgtgtgtctgtgggttcactctctagatgtctctgtagcacctacaatgtctgaggcctgaagtaggtgctgagctggtggat

SEQ ID NO: 230850 - DNA, 201 bp, Homo sapiens
cccccgtcctctctgccgagccctcgtgagttggacggtggccccggcttccagctccggcctggcggttccctgatctcctccccacgcaccctctgccrtcagcctggtattttccatgacccattacagtcctgttccccgaacctgcctcctgttcaaggacagcaagtccatcccatgggcagggcccagcaggac

SEQ ID NO: 230851 - DNA, 201 bp, Homo sapiens
accccactgggaaccacccaatgctgttaacacacctttaaacacaggttatttgtgtgtctgtgggttcactctctagatgtctctgtagcacctacaaygtctgaggcctgaagtaggtgctgagctggtggatgggtgagcagaggaaggaaaggacggacctggaggatcctggccccccaggatctcgtggtagtg

SEQ ID NO: 230852 - DNA, 201 bp, Homo sapiens
cttgatccatcttgagttgatttttggataaggggagagatgaggatccagttttattcttctacatgtggcttgccaattatcccagcaccatttttgamtagagtgtcctttccccactttgtttttgtttgctttgtcgaagatcagttggctgttaagtagttgagtttatttctgggttctctattctgttccatt

SEQ ID NO: 230853 - DNA, 201 bp, Homo sapiens
caggctcaggcctcctgcagacgcctgttttctcataggagccatacttggtccccggccaccccgggccttggatctgatgattctctgggtgtgtcagrcaaggacctggcctccctgttatgtgctggaggtcagggaggtcaggagcagggctggcacctctaactcccatcccccccttgtgtgcctggtggtcct

SEQ ID NO: 230854 - DNA, 201 bp, Homo sapiens
cccggcccttctccttcttggaattcttgccagctcgctgcttgcctctgtcacagtccttttcattctcttttgccagttcccctcattgccctaaatgytggggggccctcaatgctggggggccctaaatgccggggggccctcaatgctgggggatcctaaatgctggggggcaaggctccgtcttaggtgctccag

SEQ ID NO: 230855 - DNA, 201 bp, Homo sapiens
taaacctggctggtagaggcgtctcctatgggaattatcttccttatttaggagcatgctctgggcccttttggtcatgtgcaaaaaagcaaaggcctccrtgggggctgtgaagctctgggcggctgagtcctgggtgcagagaccagcggcagagtctgcgggtgagctgggcagggagggccatgcccatccctaggg

SEQ ID NO: 230856 - DNA, 201 bp, Homo sapiens
cctggctttgacgatttgggagcttaagcagaagtgtttatatcctctgtgacttagtaaaatgctaccacacctctatacccccacagtttaatatcaayaagacaacatgggcttaggtacatttaaaaacaaaatattacttagttttgtgatgaattacagtttgaagagtgtaccttagttatctgctctaggatt

SEQ ID NO: 230857 - DNA, 201 bp, Homo sapiens
tctgctccctgaacatgctcaattcatcccacctggggccttgtacactactccatgaacacactcacgtcatcccacctggggccttctcacgtcatcccacctggggccttgtacactactccatgaacacactcacgtcatcccacctggggccttgcacgctctgggccctccacctgccaggcacaatcccacatt

SEQ ID NO: 230858 - DNA, 201 bp, Homo sapiens
acaacctccaggtggcacctggcgtaagggctgcatttggagaactgctgctttgcaaagcccttgaagaatgggctgatatgatagggaactggtgttayattaactcaaagccttcacatcatagcttgtgcctttccgaagtattgctaattaattaacttggaaacgcccaagggtcattttagatcaaaccttatt

SEQ ID NO: 230859 - DNA, 201 bp, Homo sapiens
ccctcctcgtctctatgactcagggtttggggggaccctgcactctgcattcccctcctcatctctatgactcagggtttggggggaccctgcactctgcmttcccctcctcgtctctttgacttggggtttaggggggaccctgcactctgcattcccctcctcgtctctgtgactcagggtttggggggaccctgcact

SEQ ID NO: 230860 - DNA, 201 bp, Homo sapiens
aggaaaaggggatccggctgggagactgtagcccgtgtgaggaccacagatccctcaggtatcgttagaatcaattacacatccctgtgatgtgcccactygtgggttaatcgctttgtgcctccgtctccccttctgtgaactggggttactgagggtgccccacccacaggcttacgtgaggactcagtgtgttcatgc

SEQ ID NO: 230861 - DNA, 201 bp, Homo sapiens
ctgagttccaattctggatctgataatcacgacttttgtgatctggtaccaataatttgatatttaacctctgtaaactccagagtctacaaattaaaggygaaactcaccctttatttatggggttggagtagtaattacatgagaacccacacaaagcaaatctgtacccggtgcatagtcagcagaggtgccaggggg

SEQ ID NO: 230862 - DNA, 201 bp, Homo sapiens
ccaggaggcgcaaatgccagtttgcatcattgccctgttttcagctgtccaggatgcccatgtctgcagaacgcagtgtgcacagtcccacagggcacccygtggcatcacccggcctctctctttgacttctctcccgctgaacagcgagtgcttccccaaagccatgggcagccccactcccgactccctcagtggtca

SEQ ID NO: 230863 - DNA, 201 bp, Homo sapiens
agtgagttgtaaagtgaatcagattttcctgtttacatctaatataatattgaagatataatttcatggttggaaaaaaaccctgccaagtagacataagrcttttggcatcacatgcaccaggaggtgtccgtgggttgcctggtatgtgccagtggcaggagcagacccggtctttcctaggaagcagtgtagggtgcc

SEQ ID NO: 230864 - DNA, 201 bp, Homo sapiens
ggcatcacccggcctctctctttgacttctctcccgctgaacagcgagtgcttccccaaagccatgggcagccccactcccgactccctcagtggtcagayggtcacccgcctcttagccgaccttgggaagagggtccctctcagatgggcacccgcctcttagctgaccttgggaaaagggtccctctcagacgggcac

SEQ ID NO: 230865 - DNA, 201 bp, Homo sapiens
gcacccgcctcttagctgaccttgggaagagggtccctctcggaggaggggtgcccacattctgctgggcggttgactctggtggaggtggcccgtagttygggcgggcacatgggcatgctctgtgcaacctgcagcatttactaagatgctcttgaaagaccgttttcccttttatctgctgggttgactttcccattt

SEQ ID NO: 230866 - DNA, 201 bp, Homo sapiens
cgcgtcatggaaattacatttctgaaaggggaggaaaaaaaagcacatggggtatgtcctggctctgaccgggtacgggatgtccctgtggggtctttttytgcggaggctcagggctgcttaggtggtttttttttttaatttcataaagtcatacaacctaggaaaaaatctattttcctcttttgtccttggtcttaa

SEQ ID NO: 230867 - DNA, 201 bp, Homo sapiens
gaagagaggtgagcattgtcggaggagcccagcattgtgcagcctgccctctcccccagcctgcctccctgagcctgccctgtccctgagcctgcctcccrcagcctgtcctctcccccaacctgcctcccgcagcctgtcctctcccccatgcctgcctcccgcagaccacccccggctctcagccttgcgttcgtctgg

SEQ ID NO: 230868 - DNA, 201 bp, Homo sapiens
ccagcatcctgggaaatgattgcaccccacaaaggagctaaaagcagcagctgagagaccctgaacagagaccccctctcaggaggctgcgaatcacgagrggcaccaggaatgttttattatgcaacgtttgtgataaaataagagtgaaccagactttcattgccatcacttaacacgctgtatgctattaatatttta

SEQ ID NO: 230869 - DNA, 201 bp, Homo sapiens
caggggccaccgttgctgactgtacgagctccacctctttcatcctcatttcttcccctgagaaatgctggggtggccactcctggagctgtctcggtctmtaaatcttagctccgtgcaaggggagcatcgtgacccaacccagatgcggtggcatagggactcagaggcgcctctcagacacccgtagtcctcgtaagg

SEQ ID NO: 230870 - DNA, 201 bp, Homo sapiens
tgttggtgacccgtcgtctgatgggacaactgaagccaggaagtggtgtggctggacttgctctttaggaagcagactttgtggaggtgggaaggcggcaytgtccaagctggaggcggcattgtccaagctggaggtggcattgtccaagctggaggtggcatcatccaagttggaggtgacatcgtccaagctggaggc

SEQ ID NO: 230871 - DNA, 201 bp, Homo sapiens
cacctctttcatcctcatttcttcccctgagaaatgctggggtggccactcctggagctgtctcggtctataaatcttagctccgtgcaaggggagcatcrtgacccaacccagatgcggtggcatagggactcagaggcgcctctcagacacccgtagtcctcgtaaggaaggtgccgcctggaaggggacccacatttc

SEQ ID NO: 230872 - DNA, 201 bp, Homo sapiens
ctgggctaatgaagggatgggaatgcagagcccaggcaaaccccgcagggtgtccgccctagcaccctgtggggctgagctgcggtgccgccttgccctcyttgtctttctcttctgagctgtgccctgccacttaaaaccacaatggttgggagttgtctgaagaagagagttgatcctggagagcatttcttcaaatgc

SEQ ID NO: 230873 - DNA, 201 bp, Homo sapiens
ggctccagcgttcaagccttgttagatcccctggaaaaacagaaggaggctggttcacatccattcacacaaccccgagacccagaaactcttgaaaaccraaagttttcacaactcactttgcagcaaatcatgccctgaacagattgatggaaggctctgtgccctcctcacttactgcagatgatgccagtcagcaca

SEQ ID NO: 230874 - DNA, 201 bp, Homo sapiens
gacaagatgaagtgctctacggggtcctgcaggggcatggctggaagtgagggtggagggtctggggcaggcaaaggccagcctggtcttgaaggatgggygggagacagtgcctactcagtgggtttggctggtgcccatggtggggcaggatggcatggggaattctgggaatggcgtggcatagatcagtgatgatga

SEQ ID NO: 230875 - DNA, 201 bp, Homo sapiens
ctggagatgtgccaaatagagaagtcagtgtttcaggtctgaggagcccagccccagccggcacctgctgagtggtcgcagacacgcggctccagcgttcragccttgttagatcccctggaaaaacagaaggaggctggttcacatccattcacacaaccccgagacccagaaactcttgaaaaccaaaagttttcacaa

SEQ ID NO: 230876 - DNA, 201 bp, Homo sapiens
tttcccatggataagaacaagttgctatgtagaatgaagacttcttttgggaaattcttggcaaagaacctagctgagtggtgacggttaataaatagcaygtattgtgtataatcgtgcctcagaactgcttgcatttgaattgggtggaagcagatttgatcattgatcagagcgttttcaagtccgacctggagagtg

SEQ ID NO: 230877 - DNA, 201 bp, Homo sapiens
ccctgctctcgtggtgtggagtgcccgtggtctctgaagccctgctctcgtggtgtggagtgcccgtggtctctgaagccctgctctcgtggtgtggagtkcccgtggtctctgaagccctgctctcgtggtgtggagtgcccgtggtctctgaagctctgctctcgtggtgtggagttcccgtggtctctgaagccctgc

SEQ ID NO: 230878 - DNA, 201 bp, Homo sapiens
acttttctttctagccccttcctgtccccttctgtgtcttcatgccttcatcagatgcacctggcgcttcctccacagcagggccacatctcatcaccacyggccatcgtccgctctctgctccctgtgggaggtgccctgtgaggccccactgccctccgtagtccctgcgtctgggtcccctccatcactgtcacaccc

SEQ ID NO: 230879 - DNA, 201 bp, Homo sapiens
tgggcttggggtgggggtttaaggcatccttaaaggtaaaaggctgggaagtgctgggcgcgctggtgctccgtgagggaggcatgactggctgtgttctyggcactgtcttcactgtcctcccctcctagcctgctcctcacctcccagaagggcctcccacccgccacgcttccccctgccccgcctggctggcgtctg

SEQ ID NO: 230880 - DNA, 201 bp, Homo sapiens
aaccggcttgccctggccctgtcactgccttctctacggtcccacgcgctctggagatgcttgtctgtgggcccgggtggttggcttgggggaggctgccrtgcgtgtggttttagcacggcacaggtctttgcagatacacggcacgtgtcacagtcatttgagcaccgtcctcctgtttgtcaccgagtcatctctttt

SEQ ID NO: 230881 - DNA, 201 bp, Homo sapiens
tgctcttagccagtctggatctgtgtcttcatagcagactgtgggcatatgacaatgtctcttatactgtaaagttacatgcaaatggctgtgcccatccrcttggattttggtgactatgttcttgatgaaaacacacaaagcatgcactcctggtattcctatttgcctttgttatttaggagtatgtgtatgactcta

SEQ ID NO: 230882 - DNA, 201 bp, Homo sapiens
ctgctgggttgactttcccatttatcaaattaactttctaaacccttaaatttcagagatttgagaggataaggaattgtttagtagatgaaactcatttkcatatttccagaggcatgtccaaaaactaaatggggttgagcatttctcagggaaaagttaactcggggtgccagttacacgcagtgttttccagaggtc

SEQ ID NO: 230883 - DNA, 201 bp, Homo sapiens
tgagaggataaggaattgtttagtagatgaaactcatttgcatatttccagaggcatgtccaaaaactaaatggggttgagcatttctcagggaaaagttractcggggtgccagttacacgcagtgttttccagaggtcctggggtccaaggccttcccatggctgaatctcccggtttactccgctttttgatgaagga

SEQ ID NO: 230884 - DNA, 201 bp, Homo sapiens
cacctcttatcgttagagtgtgggtgtcagtgacgtttgcggttgtcagctcttatggagagagtgtggatgtgagtgacgtcttcagttgtcagctcttrtcgtgggagtgtgagtgtgagtgacgtctgcgggcgtcagctcttatggtgagagtgtgggtgtgagtgacgtctgcgggtgtcagctcttatggtgaga

SEQ ID NO: 230885 - DNA, 201 bp, Homo sapiens
gcgagatcttgatgtctacctagaaatgtcactgacgtaggagaaagggattttttttttgcttttaccatgaagggttgtcatgggcctgtgtgaaagamattaagtaaattagatatcagccccaaggaatgttaatatctgagatttatactggagtagttttcgcttcccaatttattttcttttaaatacttacaa

SEQ ID NO: 230886 - DNA, 201 bp, Homo sapiens
tgtgagtgacatctgcaggtgtcggctcttatggtgagagtatgggtgtgagtgacctctgtgggcctcagctcttatggtgagagtgtgggtgtgagtgwcgtctgcagatgtcacctcttatcgttagagtgtgggtgtcagtgacgtttgcggttgtcagctcttatggagagagtgtggatgtgagtgacgtcttca

SEQ ID NO: 230887 - DNA, 201 bp, Homo sapiens
gacactgctgagagctggctgacactgctctgtgctggatggggcccttggggacaacatagtgccctccagacccccaacagatgccccctgcagatgcmccccatgggcactgctagcatctgtggcttctcagatgtacacaccacatctctgcatttcatcttttgggcagagactggcaaaggaagaagaaatccc

SEQ ID NO: 230888 - DNA, 201 bp, Homo sapiens
ttccctgcccctttcaactccttcaggaaccaaaggtaatagctacattgcaacaaataaggactgagcaccacatttctatcaggttgcattttttttttgagatggaatcttgctgtgttgcccaggttggagtaaaatggtgcgatcttggttcactacaacctctgcctcctgggttcaagcaattctcctgcctca

SEQ ID NO: 230889 - DNA, 201 bp, Homo sapiens
cacttcttatggtgagagtgtgggtgtgagtgacgtctgcaggtgtcacctcttatggtaagagtatggatgtgagtgacctctttgtgcctcagctcttrtggtgagagtgtgggtgtgagtgacgtctgcaggtgtcacctcttatggtgagagtgtgggtgtgagtgacgtctgcaggtgtcagctgttatgttgaga

SEQ ID NO: 230890 - DNA, 201 bp, Homo sapiens
tgggggtcactagcagtgaattaatgtgtgcctgcatcattccctgcccctttcaactccttcaggaaccaaaggtaatagctacattgcaacaaataagractgagcaccacatttctatcaggttgcattttttttttgagatggaatcttgctgtgttgcccaggttggagtaaaatggtgcgatcttggttcactac

SEQ ID NO: 230891 - DNA, 201 bp, Homo sapiens
actagctgactgaacccaacagcacatcaaaaagataataaaccatgatcaagtgggtttcatcccagggatgcagggatggtttaacacatgcaagtcartaaatgtgatacgtcacataaacagttaaaaacaaacaccatacgattatctcgatagatgcaggaaaagcattcaataaaacccagcatcacttcatga

SEQ ID NO: 230892 - DNA, 201 bp, Homo sapiens
agtcttgcctcgcctgtgtgccgcattctgcagattctcatggaagactcaaggccaacctgaccaccgccgaggggaggggacagattcctgtggggcgyggtcctggcctgggtttcgggagtctggcgtgtgctctggagacccggggctgcccctgccctagatggttttgcagtgggttccttgtggaagcaacag

SEQ ID NO: 230893 - DNA, 201 bp, Homo sapiens
agtcgtttggtaagaggcctttgaacccattctgttgctttttcatcagcctggatgtgcctgagtgatgaggacagtggggatctgtggcttcccctccrcctcactcagtgtccaccaggcagacagacctgtccttgggggcccttccacatcctccgtcttctgcacacgttctgatggtactgaagtgcctcacac

SEQ ID NO: 230894 - DNA, 201 bp, Homo sapiens
tatttgggttgaatctggtgttctctgactttcccgaatctggttatctatacctttctcaagtttcagaaagttttctgttactgtttctttgagtaagyttggtacctcttgttctcactcagctccctcttgaacaccaataattcttggatttggtgttttgaggtaattttctctatcttgtaggttgtctttcat

SEQ ID NO: 230895 - DNA, 201 bp, Homo sapiens
cgggtccccagttcctatcaccttaggtgacgttccagcctcttccacttgtttgagtttcaggctccttgaatctccttcgatgtctgggagagctgctrtgttcaccccgttgaggccagctgacccccagcccaccccagcatcacggcttctgtgccctccatgcctggaccacctcgcgcccgcttgtttacgctc

SEQ ID NO: 230896 - DNA, 201 bp, Homo sapiens
gaggaaatcaagtcccaggaaaggtgctggagccaggctcttttccatagggctggtggacagggcctttgccgtcatggagcctgtggaaggaggcgtgkggtggctccgactgtgagttagaagcacctttggcctccaaatcacatgagcatcatctccccccttcccttgttgctcgtttcagtagcatctgaaatg

SEQ ID NO: 230897 - DNA, 201 bp, Homo sapiens; identical to SEQ ID NO: 42955

SEQ ID NO: 230898 - DNA, 201 bp, Homo sapiens; identical to SEQ ID NO: 42956

SEQ ID NO: 230899 - DNA, 201 bp, Homo sapiens
tgaggtcgtggggtgggcctggctccagcaggactggtgtccttgaaagaagagacactggagaagaagccacgtgaggacacaggaggagacggccgccygccagcctgcgcagtctcaggagaaaccgaagcccggacctcagacttcagcccccagaaccgtgacggagtacatttctgttgtttgagccgctcaggc

SEQ ID NO: 230900 - DNA, 201 bp, Homo sapiens
ctgagtttaattttaaactcgggcaaattctattgctctcaagccaccagggtagtgcatggttgtccaacatggagcttctgctgggcgcccagctgctygagtcctgccctcttctctgccgtcatcacttgtcctcacgggagctgcctaggttcccccccgcccccgccagcttctgtctcctccaccacctttcct

SEQ ID NO: 230901 - DNA, 201 bp, Homo sapiens; identical to SEQ ID NO: 42957

SEQ ID NO: 230902 - DNA, 201 bp, Homo sapiens
gtctgggacgcctgtgggcagggcttgttcctggggccgcattccctggctcacggtggctgcgtcgtggccacgtcctcaggggctgtccttctgtgtasatgcaggctgtgtgtctcttcctcttcctgaagaacacaggtcctattggattggggccccctcaggacctcatttttttttttttttttttttgagacg

SEQ ID NO: 230903 - DNA, 201 bp, Homo sapiens
agagtaacaagaaaaagacgtttagcgcacgtacagcaggtcctcaaatcacgccatctcattgtaacgctgaggagaaaagaatcagccaaatctgggaygtagactctctgaacatttggttcctgtgtaagtttttaatttaaaggaaggatcctaccccagaaacacgccacaggtttctgtgatcaaacctgaggg

SEQ ID NO: 230904 - DNA, 201 bp, Homo sapiens
acaaggggaggtttctcagcatgtggaacggagtgggtttggtctgagtaacaggtggatttcaaaagcgatgataacaccacacttccgaggacaggaarcgcccaagcatggccctcattgtgagttttaatggccacgtctttgtagtgtctgcacctgcccctcacaccgtccaccaaggcgggtggctgtgaggag

SEQ ID NO: 230905 - DNA, 201 bp, Homo sapiens
tactgagctcttcaatgccaggccctgggcaggcacttcccatatgggatctcatttggccgagccattgaccctgcgatgaagccatcgtgagcctcccrtcattccacctcatggggtccccggaggcgtcagattcatagaagcctagtatgaatctagggggtagtagccaggggctcagggaggggacagtgcaga

SEQ ID NO: 230906 - DNA, 201 bp, Homo sapiens
atgttttaggggagacacaggatgctgcaatccactttactgagcaccttttgccggaaggaatccgtgctgtatcctgtgacctagtctgcaaaggggarcacgtgagcgctagtaacgcccttgttcttggacatcaggaagggggtgggcctcatgtggcctggggggccctcagggaccacccagggagcacagtga

SEQ ID NO: 230907 - DNA, 201 bp, Homo sapiens
ctcctttaataataggttctaacacgtacactaagaggccgcgtggccacactaccaaaggcaggtagagtccagcagaccattccgtcagcatcagggcrgaagaatatgaaaggagaaactgtcttttgtctcagaatgagcatcacgttattttgactttctgatgtctcggttcaagctattttccatctttctgtt

SEQ ID NO: 230908 - DNA, 201 bp, Homo sapiens
agtcttaacacctcatacccatccgttgacacccccaggcgttgagctctggttgctgtcaacaagccgcttagggaggaggctgaatatcaggaaggaaracgagaggaggaggcaggtctccatggtccactcctggatccctgcggctttgggtacctgtcagatagcctttctctagaaagcctttctctagaaagt

SEQ ID NO: 230909 - DNA, 201 bp, Homo sapiens
acacgctcactgaggtcccctttaaggttcctatttgtacatctccacccaggcctttgtttacacctgaaggattacaaatataaacataagcacaaatmgaaatccaagcagcctccacaaagctccacggcttccagccctggctgacccttaccccagcagcgggtgtccgagagccatggcagctcctgcagcctc

SEQ ID NO: 230910 - DNA, 201 bp, Homo sapiens
attgaaatgatgcatctctgtatgaaataagtagagacaaattttaaagcaaggtgaaatgcaagataattttgagacacatctcggacagcaggtatcargtggttccaggaaaccccagcgtccctcaacctggtcacagcttttctaagacaagagctcatggccagtagcctcagccctcccaggatgttctcgagc

SEQ ID NO: 230911 - DNA, 201 bp, Homo sapiens
ctgcatctctggggtctctccgtctctggagtctctgcatcactggggtctctccatctctaggatctctgcatctctggggtctctgcatctctggagtytctgcgtctctagggtctctgcatctctggggtctctgcgtctctagggtctctgcatctctggggtctctgcatctctggagtctctgcgtctctggag

SEQ ID NO: 230912 - DNA, 201 bp, Homo sapiens
ggtgccacatccaccctccatcctgtgtgaaggctctcggtgtccacactcaacgaccacgatgatgcccacatccaacctccgttcagcaggtgctgggwcctacatgaagctctcacatgctgacctgtagtctctgtggtccgtgagactcagaggctcatagcgtgcccagattcctgtggctagtgaatagaaggc

SEQ ID NO: 230913 - DNA, 201 bp, Homo sapiens
acaagaacttaagaactggagcaggaaggaggctgatgatagcagagtgtgagacgcaccagagccctttccacgccagtcgcgcagggcaggggctgcasgtggagatgccgggggaggcgtcagcggctgattcaggacggcctgtgttcaccctggagcaggctctgcagcagacagagcggaggaaatgtggtgtgt

SEQ ID NO: 230914 - DNA, 201 bp, Homo sapiens
ctcacccccttttgagaggtgctgggggaagctgccccgcagttatgtgtgcagcctcctggagggcacaggtggctcagagacacgctcactgaggtccyctttaaggttcctatttgtacatctccacccaggcctttgtttacacctgaaggattacaaatataaacataagcacaaatcgaaatccaagcagcctcc

SEQ ID NO: 230915 - DNA, 201 bp, Homo sapiens
gtgttctgacgtgttcgttgcatgaataatcaaccgcagaaaataatctcacggcatgtttcatagactcgactcacagacaaaaacagccggtaaatgtrtgtttttccttcgtgtcttcctctcttgctctgtcccccatcccacacagcagtctttttgagtgtctgcagaaagggtgtggcctttctttcctgagga

SEQ ID NO: 230916 - DNA, 201 bp, Homo sapiens
tgaaaaagcaagagaatccaccttccaggaaaggcttcagggaaggccctgaaatctctgaaatctcccccaaagctgtgactggggggcaggggaggagmcacagacccttccacagaggtggtatctgatgtggtcgcccccatcctaccagaggctggatgcagaggatcagcagggcggccacccaggcagctccct

SEQ ID NO: 230917 - DNA, 201 bp, Homo sapiens
aaggtgtgtcatcctcacccccttttgagaggtgctgggggaagctgccccgcagttatgtgtgcagcctcctggagggcacaggtggctcagagacacgmtcactgaggtcccctttaaggttcctatttgtacatctccacccaggcctttgtttacacctgaaggattacaaatataaacataagcacaaatcgaaat

SEQ ID NO: 230918 - DNA, 201 bp, Homo sapiens
tcctctcttgtgagcctctcttgaatcccggctcagaactggactctgtgccgatgcctggaccccatagcccgcagcgttctgcgttagtcacaggcctytctgctggagcaagggctgcccaggcttctggcctctcataaagcagacaaacgtgcttattttgaaaagcgtaatggcaaagtgaagtgaattccttta

SEQ ID NO: 230919 - DNA, 201 bp, Homo sapiens
ttcctccctaaagcttaacaatatgaacaacaaataggccaaaacaaacagatacagaagcaacaaggaaaaccctggatgccattccagcagagccaacrgctggtggttgctgaaaaagcaagagaatccaccttccaggaaaggcttcagggaaggccctgaaatctctgaaatctcccccaaagctgtgactggggg

SEQ ID NO: 230920 - DNA, 201 bp, Homo sapiens
cttctctaaactcccccagggaaagggagactccctttcctggtctgctaagtagcgggtgtttttccttggcactgacgctaccgcttgaccacggtccrcttggcaacgggcatcttcccagacactggcgttaccgctagaccaaggagccctctggtggccctgtctgggcataacagaaggctcacacccttgtct

SEQ ID NO: 230921 - DNA, 201 bp, Homo sapiens
gttcctccctaaagcttaacaatatgaacaacaaataggccaaaacaaacagatacagaagcaacaaggaaaaccctggatgccattccagcagagccaayggctggtggttgctgaaaaagcaagagaatccaccttccaggaaaggcttcagggaaggccctgaaatctctgaaatctcccccaaagctgtgactgggg

SEQ ID NO: 230922 - DNA, 201 bp, Homo sapiens
tgggcagcttgactcagggcattcgcaatagagggggcctgtggggagcagctcactgtggggagagaacagggggctgaagtcatcctcggatgcaggcstgtggtcaccatgagtcactgggacctgcggttcccccttcagaaccattgctgtgtttctgtggaaaaggagcttaagtccctagtgggtccagggccc

SEQ ID NO: 230923 - DNA, 201 bp, Homo sapiens
ctacccagcacgaccacgcagtgcaggcctcgtggacagacctcgcgtggctgcaggagacttctggcttcctgggaccttgtgaaaccagatccccaaaygttcctccctaaagcttaacaatatgaacaacaaataggccaaaacaaacagatacagaagcaacaaggaaaaccctggatgccattccagcagagccaa

SEQ ID NO: 230924 - DNA, 201 bp, Homo sapiens
ctgctggagggagcatcctacgtgtggacacctgaccttgctgttccctgctctagggggcagcctatgagccttccccactctgggggctctcccacccyttccatgcacacagggccaggcctggcaggtgcagcccctgtcctaacccagcacttctcaccccgcaccctgcctcaccctgcagggagctcttcccct

SEQ ID NO: 230925 - DNA, 201 bp, Homo sapiens
agactcaagacctgcggcgggtatggcctgtggggccctggatgtggtcccattctctctggaaagtgcgccctgagccctgcaacgttgctgtttctagkctctgggttcagtgcctgggacacccccaggaggccgcgttcccctcctgggcttcccaggtgtgttcccagggagctgctgtgagactgactgcccgtt

SEQ ID NO: 230926 - DNA, 201 bp, Homo sapiens
gaaattaagtaaattagatatcagccccaaggaatgttaatatctgagatttatactggagtagttttcgcttcccaatttattttcttttaaatacttamaacatttggtttttaagctatttatagccaaccttttttttaaaaattaatgtttaaaatgttttttccccccaatctatcatggtcgactgttagacag

SEQ ID NO: 230927 - DNA, 201 bp, Homo sapiens
ttttaaatacttacaacatttggtttttaagctatttatagccaaccttttttttaaaaattaatgtttaaaatgttttttccccccaatctatcatggtygactgttagacagttggatggctgtgtggttttcaaagctgaggtcaagtttgaatgagctcatttcagatcactctagattttctgaggctgacagtgt

SEQ ID NO: 230928 - DNA, 201 bp, Homo sapiens
gctgcctcccagttactgacgcagtgtcactgaaggtggagttgggaggaaatgtggacggccagctctcgggcccttgcatgcaacggccttgttatttyagaggcgccgtctaatcattcttgggacgctggtctgctctgtcttttgaggcagtttccatagaggtggggtctgtgttaagagtgcattgaagggtga

SEQ ID NO: 230929 - DNA, 201 bp, Homo sapiens
ggttgtcccacagaaaggagaggaatgtggtttagaactcggtgtcacctcagcatccacatgctcttggtgctgaggttcagatgggaggatggtagggstcggcttttccaggcatgattttctctctcacattttctgatggacacagtaatcctttgccatttacatttttatcctttttacaaactagagggattc

SEQ ID NO: 230930 - DNA, 201 bp, Homo sapiens
ctgtagggcatctgaaggccaggccgtgcttctctactcgacgcaagcccaggtcacacagatgaaggcacagacgtgagggctgacgtgaatgtcaaacrtcagcaaatagagcaacatgcagagggcaggtggggtcttccttctccagctgcccccgggtctcccctcaccagccacgtgacaaagctgaataggaat

SEQ ID NO: 230931 - DNA, 201 bp, Homo sapiens
gcagggcgttgcccagacatgctcctatcttcccaacccagcacagcaccggagtgacagacacggattctgtcacgcgtagcgcagtccacgctcacacrtcagctccaggcccgcagcccacttctcccaaggcctcccgtgccattgaaactgttcatttccgtagctctccatctctctccacctctctccgtctct

SEQ ID NO: 230932 - DNA, 201 bp, Homo sapiens
cacccaccatacagatatggagactgaggcccggagacgccgacgtccaagctcctcactccctgagctcacccaccatacagatacggagactgaggccyggagatatgacaggccttttcccacagccgggcagtttgtgtcgggaacataacagtcatacaaataaaaagtatgttgcaatgaaatggaaagtcatga

SEQ ID NO: 230933 - DNA, 201 bp, Homo sapiens
atcaaatccttccaggtgctctgtctcctgggctgcacccctctctcctgactcttttccatcttcctccaaaccaaagtcgctggggatgtgtgggtggytggtgggacagccctaatttgacctgtgagcatcctaaggacatgatgcccctaccccttcatggaactagaaataatacatacaaaaccctaaaacacg

SEQ ID NO: 230934 - DNA, 201 bp, Homo sapiens
gaagtagagccagtgatgagtgtgtcccacacccaagaagccccacgccctcctcactggacgggaggccccgccccctcctcactggacgggaggcccckcgcatgtccacgtgctgcccgtgcgtcactctccccaacctgccgtctcacatctgcattttagtttcttccccattttcttctgcaccagccccttgtc

SEQ ID NO: 230935 - DNA, 201 bp, Homo sapiens
gaatccagagctaaaggacacttagaaaccgcatcatccaagctcctcactccctgagctcacccaccatacagatatggagactgaggcccggagacgcygacgtccaagctcctcactccctgagctcacccaccatacagatatggagactgaggcccggagacgccgacgtccaagctcctcactccctgagctcac

SEQ ID NO: 230936 - DNA, 201 bp, Homo sapiens
ccttaacactttcctgcccacaatggtgtttcctcttttacatctgtcagttccagaagtagagccagtgatgagtgtgtcccacacccaagaagccccaygccctcctcactggacgggaggccccgccccctcctcactggacgggaggccccgcgcatgtccacgtgctgcccgtgcgtcactctccccaacctgccg

SEQ ID NO: 230937 - DNA, 201 bp, Homo sapiens
ttccagggttctcggaccagcagtgaccttcaaagtgagcgccaatgtccaaaacgtgaccactgaggatgtggagaaggccacaggtgaggctgtttccrcacacacgtacacgcacacacacgtgtgtgcacacacacacgcacgcaaacacgcacatgcacagccagggcagagagagactcacactacccacatggg

SEQ ID NO: 230938 - DNA, 201 bp, Homo sapiens
ggccgcagaccgcctgacagcttggcgttcacctaataaatttacaggttttcacggacagtttcgggatgaccaacaccaggacacacacatacacacagacgagtctgcacatgcacgtgcactggaatccagagctaaaggacacttagaaaccgcatcatccaagctcctcactccctgagctcacccaccatacag

SEQ ID NO: 230939 - DNA, 201 bp, Homo sapiens
tgtgagcccctgaggcttgggctgggtccctgccaggatcacacagttgggaatctggggaagggattgtgtctcacaagttcgtgtgctttattatttcycaggggctgttacctccctccccctgactccttgccctgtccaagctccatgtggcctggtgctcccatctttccgggagcctcttcccgctgcccggcc

SEQ ID NO: 230940 - DNA, 201 bp, Homo sapiens
tacaccccacacacacctacacacccacccacggggtgcacacccacacacacacccatgcacactgcacacacccacacacctccacaggtgtacacacrgtgcacacccacacacagtcatggaccctgcacacccacacacctgcacagctgtgcacacccccacacacatccacacacccacctgtacacacccatg

SEQ ID NO: 230941 - DNA, 201 bp, Homo sapiens
ctgtgtagggtccagccccacagggtcagtgggtttttctccccgtgtgtggagacgagagatcatagaaataaagacacaagacaaaaagataaaagacagctgggccctggggacaactaccaccaagtcacggagaccagtagtagcccggaatgccaggctgcgctgatatttattggatacaaaacaaaggggcag

SEQ ID NO: 230942 - DNA, 201 bp, Homo sapiens
cagatgcttggccccgcacaccactggaggacacagcagctctgtgcttgaggaagcagcatccttccttccttctgtggttcactgaggacagcatggaygcgtgttcacgggccgcagaccgcctgacagcttggcgttcacctaataaatttacaggttttcacggacagtttcgggatgaccaacaccaggacacac

SEQ ID NO: 230943 - DNA, 201 bp, Homo sapiens
cctgctggacgtaggagctcttcgtgctctgggaaccgtaggtggcctccgtgctgcagccactggcacctgggaaccaggggctcagggcggctgtggcmcctcctgttgtcacagtcaccgcgggaggaggggcagaagtacggcgcagccaccacgggctttagggccaagtgagctcctagattcctccctcctgag

SEQ ID NO: 230944 - DNA, 201 bp, Homo sapiens
gcagtgcgggctttgacaccacacgagccgccagagaggcggcacactcagccacacacactgcgtacacccacacacctgcacactgcgcacacccacaygcagccagggacactgcacacccacacacctgcacacacccatgcatacatccacacacacctacacacccactcacgcagtgcacacccacactcagcc

SEQ ID NO: 230945 - DNA, 201 bp, Homo sapiens
tctgtgtagggtccagccccacagggtcagtgggtttttctccccgtgtgtggagacgagagatcatagaaataaagacacaagacaaaaagataaaagacagctgggccctggggacaactaccaccaagtcacggagaccagtagtagcccggaatgccaggctgcgctgatatttattggatacaaaacaaaggggca

SEQ ID NO: 230946 - DNA, 201 bp, Homo sapiens
cctcctgccaaccccagtcacccccaccctggggtccgcagccccttctgcaggctgctggagggagcatcctacgtgtggacacctgaccttgctgttcyctgctctagggggcagcctatgagccttccccactctgggggctctcccaccccttccatgcacacagggccaggcctggcaggtgcagcccctgtccta

SEQ ID NO: 230947 - DNA, 201 bp, Homo sapiens
tccagcctggggtaaagaacaagaccctgtctcaaaaaaaacaagtcaatctcccattgattactgaagctacaatttcccaataaattcccatattaagmcttagtatttggaaaagagacttgagaagtcaaatggtggttttcaagaaagcgtttcatgcaatttgctttaaatgttaggaaaggcaggtggagatgt

SEQ ID NO: 230948 - DNA, 201 bp, Homo sapiens
tcttagaagagaagtccaggcacccaggggctgaacggcagtgcgggctttgacaccacacgagccgccagagaggcggcacactcagccacacacactgygtacacccacacacctgcacactgcgcacacccacatgcagccagggacactgcacacccacacacctgcacacacccatgcatacatccacacacacct

SEQ ID NO: 230949 - DNA, 201 bp, Homo sapiens
tggtcctggggaccggtgatgaaggacacccccattgcatctcagctacggctcttggaccatgggcagcggtgctgaaatgacaatcctggagccacagscttcctccgtccacagccagtgtgctcacggacgacacaagtaattgtggacaccactttgccaccacgactgtttatgctgcagccccaggggccacag

SEQ ID NO: 230950 - DNA, 201 bp, Homo sapiens
tcttcagcccagggtggtgatgcagtggccccatcctcactggtcctggcctcctccacatcctgacccccggggctgttcacggaggggagttggagtcrtgaggctgtgctgagctgcgttgcccaggtgcctgcacatgtatgcccaccagggtggacctgtagtgggtcctgcccaccatttctctcctggctgtgg

SEQ ID NO: 230951 - DNA, 201 bp, Homo sapiens
agtggccactgatggcagacagtgctcagctctcggctctgctggtctcggcggccactgatggcagacggtgctcagctctcggctctgctggtctcagyggccactgatggcggacggtgctcagctctcggctctgctggtctcagcggccactgatggtggagggtgctcagctctcggctctgctggtctcagcac

SEQ ID NO: 230952 - DNA, 201 bp, Homo sapiens
gatgaccgcaggccctgacagcaaaacatcatcgttgtggtaaaaaagatgcccctcaggagagctgtttcctccctggaatttgggtcgaatagaaaatrtttcaccagcgcccacctgagcatttggcaactcagtccccgaccacaaactccatcatcttagaagagaagtccaggcacccaggggctgaacggcagt

SEQ ID NO: 230953 - DNA, 201 bp, Homo sapiens
gccaacgctcctctgctgtgagctgatgcgaagccacctcagataacctctgtgctcagtgctctgtgccatggccatcgcccgtcgctttactgaggctrttgcagaagtcagcgtgggctctgggcttccgcaccaaggtgcgagatgctcaccccgtggaatgaggttgctctgacagcaggaccatggccgtgctca

SEQ ID NO: 230954 - DNA, 201 bp, Homo sapiens
tacctgttttacaccaaaaagtgggtgaggttgtgtggcttacccaggacatggtggaggggtcttcagcccagggtggtgatgcagtggccccatcctcmctggtcctggcctcctccacatcctgacccccggggctgttcacggaggggagttggagtcgtgaggctgtgctgagctgcgttgcccaggtgcctgcac

SEQ ID NO: 230955 - DNA, 201 bp, Homo sapiens
gaagtgcctgttcctgctacctggattctccctgctgttggcacccatgctgatcttggagcaaagtcagggctgagcccgggcgctgtcacagcccagcrggtgtgacactctgggcagtgctgacacaccagccccctgccacctcagccccctctggactttgggcaccaacaagcatgggagggaagccgaaggagg

SEQ ID NO: 230956 - DNA, 201 bp, Homo sapiens
cggctcacgaggcgccgtccactgtactggggattcgggcaacaaaagtgactctccccaccagaggttttagtttacaacatttcccctcaccgtgaaastggaagctttttaggggccgaaactcagtggcactaatttttcatatgaccttctcccaaaacacgtccctgcctctctcatcctccgtagaaccaactc

SEQ ID NO: 230957 - DNA, 201 bp, Homo sapiens
ataaaccttgagctagacacagagtgctgattggtgtgtttacaaaccattagctagacacaagagtgctgattggagtatttacaaccccttagctagasataaatgttctccaagtcctcactagactcaggagcccaactggcttcacctagtggatcctgcaccagggccgcaggcggagctgcctgccagtcgtgc

SEQ ID NO: 230958 - DNA, 201 bp, Homo sapiens
cccctgcaggaagtgcctgttcctgctacctggattctccctgctgttggcacccatgctgatcttggagcaaagtcagggctgagcccgggcgctgtcasagcccagcaggtgtgacactctgggcagtgctgacacaccagccccctgccacctcagccccctctggactttgggcaccaacaagcatgggagggaagc

SEQ ID NO: 230959 - DNA, 201 bp, Homo sapiens
aacttcaaggcataaggaaatgggaccatgcgaaagtcaccatcacatcttaatccgtgactgcgctgcccaacatcgccccgagactaaacttcccctasaagttcagtttcacaaagatagaaaaattatttgggcaaaatgctgctgtccaatctgaatgcttgcttctacgaagccaagaggaggcgcctgcagctc

SEQ ID NO: 230960 - DNA, 201 bp, Homo sapiens
gtcttcagggcccctcatgtgttaataggagccttaatgttctccaggcatcatgtcatgatgaacattaatgtactgtgggatactgacggagtgtgccrtttatcaataggctgtaagacagtggtccccaacctttttggcaccagggaccagcttcctggaagacagtttttccatggaccatggttgggggtgtgg

SEQ ID NO: 230961 - DNA, 201 bp, Homo sapiens
gattggtgtatttataaaccttgagctagacacagagtgctgattggtgtgtttacaaaccattagctagacacaagagtgctgattggagtatttacaaycccttagctagagataaatgttctccaagtcctcactagactcaggagcccaactggcttcacctagtggatcctgcaccagggccgcaggcggagctgc

SEQ ID NO: 230962 - DNA, 201 bp, Homo sapiens
ccctgggatttttgcatcattcacaccttcgttcagagctgatgggatgacttgcagcttcatgacattcctgaggcattcagctgcatagagcatgtgcrtatgtacacatgcattcttctcctctctctagatgttttatcttatcccatcttgtcacccctgaaagaggctgacattcctacctgaaggaaggtgtca

SEQ ID NO: 230963 - DNA, 201 bp, Homo sapiens
ccggaggagttcaccctcttcctcagggtgtgtgttcaggagctgtcttggagcatgcacataaattcagctcctggaacttcaaggcataaggaaatggraccatgcgaaagtcaccatcacatcttaatccgtgactgcgctgcccaacatcgccccgagactaaacttcccctagaagttcagtttcacaaagataga

SEQ ID NO: 230964 - DNA, 201 bp, Homo sapiens
cactgagtgctgattggtgtatttataaaccttgagctagacacagagtgctgattggtgtgtttacaaaccattagctagacacaagagtgctgattggwgtatttacaaccccttagctagagataaatgttctccaagtcctcactagactcaggagcccaactggcttcacctagtggatcctgcaccagggccgca

SEQ ID NO: 230965 - DNA, 201 bp, Homo sapiens
actggctttaggatgggtctgggcaaaatcatcgcaaggggatatctttgccaaaagtgaaaaaaatcacaaggagcaaaccctccaagcctcccattgtrtgtatcctgttcgccagaacaagcccttcctggcacacagatggctgaggtgcacaacggtggtcccaggacccttcgtgaagtgaggtgctttgggact

SEQ ID NO: 230966 - DNA, 201 bp, Homo sapiens
tgtggatgggcgtcatgggtgtggatgggcatgtgtggatgggcgtcgtgggtgtggatgggcgtcgtaggtgtggatgggcgtcgtgggtgtggatgggygtcatgggtgtggatgggcatcgtgggtgtggatgggcatgtgtggatgggcgtcgtgggtgtggatgggcgtcatgggtgtggatgggcatgtgtggat

SEQ ID NO: 230967 - DNA, 201 bp, Homo sapiens
tgcgtccctcagtttggctctccttgagctgtgtcctttataagagctagtgatggtgagtgaagtgctttcccaagttctgtgtcatccaaagaaaaatygcacccgaggaggttgtgggcagccgagtttgtcgctggctgggaagaaatgcaggtggcctggctgtccatctgcactggccctcatgggggggtggtc

SEQ ID NO: 230968 - DNA, 201 bp, Homo sapiens
gatgggcgtcgtgtatgtggatgggcgtcatgggtgtggatgggcatgtgtggatgggcgtcgtgggtgtggatgggcgtcgtaggtgtggatgggcgtcrtgggtgtggatgggcgtcatgggtgtggatgggcatcgtgggtgtggatgggcatgtgtggatgggcgtcgtgggtgtggatgggcgtcatgggtgtgga

SEQ ID NO: 230969 - DNA, 201 bp, Homo sapiens
ctcatcacagctacaaggcagccaattccgtggtgatccagcagcccagccctctgtgcgcaaagcctcgtttccgccagacacccaaccggccacctcastgcccctcacctgaggatggcaggacggtcagataagccacagagattcccagcgacatgttcctgacatgcagccactcctggggcacgttggacaaaa

SEQ ID NO: 230970 - DNA, 201 bp, Homo sapiens
tccgtggtgatccagcagcccagccctctgtgcgcaaagcctcgtttccgccagacacccaaccggccacctcactgcccctcacctgaggatggcaggayggtcagataagccacagagattcccagcgacatgttcctgacatgcagccactcctggggcacgttggacaaaacgtggcatctgaaccccacgatccga

SEQ ID NO: 230971 - DNA, 201 bp, Homo sapiens
cacgctgccctgatgcctcctctgccctccgtagaggccaggccactggtctcagggtgccgtgggcaccatcaaagcacgagaccaagccaggtcaaaascctgagggctccaggctgcgctgcctgttccctgccctgctccctcctgaccctgctcttggtaatgccttctcagacacgtaagaacggtccgcagttg

SEQ ID NO: 230972 - DNA, 201 bp, Homo sapiens
ctgcaaacctgagtgtctgtctcagcgatggctttgtgacgattctagaaatggtcgcagtccctgcccagccctggaacgtgctagtgcttgctccgccrgggctctgcctgcccggtggtttgccgggtgtctctcgcctgcccttcttgtcggaatacagcctcccacgcctctcatctgcaaaggcttcgtaattgg

SEQ ID NO: 230973 - DNA, 201 bp, Homo sapiens
acgctgccctgatgcctcctctgccctccgtagaggccaggccactggtctcagggtgccgtgggcaccatcaaagcacgagaccaagccaggtcaaaagsctgagggctccaggctgcgctgcctgttccctgccctgctccctcctgaccctgctcttggtaatgccttctcagacacgtaagaacggtccgcagttgc

SEQ ID NO: 230974 - DNA, 201 bp, Homo sapiens
gaactttgttctgatagtttccaggcagctgagataaatcagttttcacgtgcataccatttaccttaatatgctgtttacacaaatgattgaataggtaygcgcattgtggttatttcaaacaatgccctaagctaattgcctcactttgaaatactaaattaagtgatcatattgtattcattaattcccaagtcctgt

SEQ ID NO: 230975 - DNA, 201 bp, Homo sapiens
ccctgtggatctctgtggagaattgtggggactggaggaccccctgtggatctctggggagaattgtggggcctgggggaccccctgtggatctctgtggwtaattgtggggactgggggaccccctgtggatctctgtggagaattgtggggtaacgcagtgagtgacgtttctcagcagatgcacagttagcgtctctg

SEQ ID NO: 230976 - DNA, 201 bp, Homo sapiens
tgaaggtggagttgggaggaaatgtggacggccagctctcgggcccttgcatgcaacggccttgttatttcagaggcgccgtctaatcattcttgggacgytggtctgctctgtcttttgaggcagtttccatagaggtggggtctgtgttaagagtgcattgaagggtgagtgatttccctctaactgatgggtgatgtt

SEQ ID NO: 230977 - DNA, 201 bp, Homo sapiens
ggtgatgttcatggtctgagtctgtgtgcaaagcttagcctggggctgctttggaacctgctctctctattccaggcctgggtgctttgagatattcttgrgctggaataacacccagcacctgctcttgtgactgaaatggcataaagtaataatagtgcactgcatgggggttaatgcctttctgagtgttttatatgt

SEQ ID NO: 230978 - DNA, 201 bp, Homo sapiens
ggctgctttggaacctgctctctctattccaggcctgggtgctttgagatattcttgggctggaataacacccagcacctgctcttgtgactgaaatggcrtaaagtaataatagtgcactgcatgggggttaatgcctttctgagtgttttatatgttatcgtgttagatttctgcaccgtcactgacaataacagggca

SEQ ID NO: 230979 - DNA, 201 bp, Homo sapiens
attttagcagcggaaacatttcctcaaagagaagtcttcccaggagtccctatgcacggagctgctgaagatggagctgtccacgggagcagagtgggggktccgggacctgaaggcatccagccctccagagcccagggttccagccaccgcacagactccagccactgtgctcaagacagctcatgggttcccacctgc

SEQ ID NO: 230980 - DNA, 201 bp, Homo sapiens
cctgattctcccgcgttcactcattcattcaggaagcacttgcgaagtcccggccaatcacacgggctcctgattctcccgagttcactcattcactcagraagcacttgcgaagtcccagccaatcacacgggctcctgattctcccgtgttcactcattcactcagaaagcacttgcgaagtcccggccaatcacaagg

SEQ ID NO: 230981 - DNA, 201 bp, Homo sapiens
aacagggcatgtatttttgttctcatttaacagatgacaaacttggtcccttagtgttaaatgtgggtgacacacaggcagaatctgatctggaaccacamtgatcgggcgtcttcccatccttcctccaatcagctcaccctttggcttctcaaaggcccacggaatttatggtggttcatcgttctttgccttaagatg

SEQ ID NO: 230982 - DNA, 201 bp, Homo sapiens
ctcccgagctagggaagcattttcttaattttccaatgagaaaatccagctggcacttgtctgctgagtccaatggcagtggccactttccccgtggcctrttgctcacagggcctggcagcagggacccctcagctgaggaggagctcccagcacgctgccctgatgcctcctctgccctccgtagaggccaggccactg

SEQ ID NO: 230983 - DNA, 201 bp, Homo sapiens
ttctcatattttcaccagccctacccccgccctccaagaagcagtgagaatctgaagggttttcctcgctgagaagtgaagttccaaaggctctgcagctyctttcaaggaaaaatacgtaggtgcataggtggcaagtgttgtggtctgcaccaggccactcctggagagtgactggagtcaggtgggattcgaccagcg

SEQ ID NO: 230984 - DNA, 201 bp, Homo sapiens
gtgggtgtgaggccccagcacatggagcctccctcatcctgcacctcggcccatcccctccccacgtggtccaggtcagcatctcgctgaggtcagcagtyggggtgtgtgaggagttacgagacccagtgttagatggagcctgtacatttccccgtttctgagctattattcacacggccagccgctttgcacgatgac

SEQ ID NO: 230985 - DNA, 201 bp, Homo sapiens
aggtggaggttgcagtgatccaatattgtgccactgcacttgagcttgggtgacggagcaagaccctgtctctttaaaaaaaagacttcgctggtaatttsaaaagcaatatgttgacacaaaatcaaatatgcgatcaggaagtaggagctctccgaagtcatggaagccgggtccttgactcagtgccatctttaaagg

SEQ ID NO: 230986 - DNA, 201 bp, Homo sapiens
gccccaggtctgaggctccatcctcctgggaccagaggagacatctgggccctgtggagtcctaaaccttggccacagcatgacaagggcagggagtgctrttcctgctctctgaacccacactcgttctggctgccatgtgtgtgcagcaccatctctccaagcagccgtcttgtggcttccccatccaatgggccggga

SEQ ID NO: 230987 - DNA, 201 bp, Homo sapiens
cccggcaagtctttctccttcccttttttcacttttcctcacaaaccacagcctgagagggagccacgatgtcatgaaataagagagactttatccatcayattttatgtgaggacgacgacgccactctgggagacagccgccagcaacagccatctccagagatcagtgcacgcggagggagagccccttcctcgccca

SEQ ID NO: 230988 - DNA, 201 bp, Homo sapiens
ctacgtgagttcccacattttcctggcctctcagtaaattctcagactacggttttgatagagcacacccgttcttaatggaaacatgagccccaggctgytatgaattctcaccctgtggttcccgccattgctctgtgttgcctccccagggaggtctgatatttcatttgacaacagaagggagcagccttcagttcc

SEQ ID NO: 230989 - DNA, 201 bp, Homo sapiens
cgcatgatggagtgagagagggctctgtagacatcgggcacgcatgatggagtgagagagggctctgtagacattgggcacacatgatggagtgagagagsgctctgtaaacatctgtaaacatccggcatgcatgacagagtgagagagggctctgtagacattgggcacacatgatggagtgagagagggctctgtaga

SEQ ID NO: 230990 - DNA, 201 bp, Homo sapiens
cagacagttgattttcctgctacatcattatggacctaatgctggtgctgcacactttttaagcgttaactccgtttcctccgctcttcagttttggtctmgggctcagcgcgactcggaggcacgctcccgtgtcattttgtatttccgcccggttctccccatgttgtctggggatggcccggcaagtctttctccttc

SEQ ID NO: 230991 - DNA, 201 bp, Homo sapiens
ctctgagggctctaggcagcaggtgtgtgtgaagactccctctttcatcaggggaggaaggtttgtgtgaagactccctctttcatcaggggaggaaggtktgtgtgaagactccctccttcatcaggggaggaaggtttgtgtgaagactccctccttcgtcaggggaggaagcgtttgcatctgagtgggcagcattcc

SEQ ID NO: 230992 - DNA, 201 bp, Homo sapiens
ccagagcgggcaggatacggcgcccagcctgagcctggctatccagggtctgtcccttatgaaagatctcatgcatgggctctatgaaagcttctgtctcyaccacacttgaagtaaggagttagtcttaatcctggcatgcaagaagcaggagccgtccacagcagacagttgattttcctgctacatcattatggacct

SEQ ID NO: 230993 - DNA, 201 bp, Homo sapiens
atgggtaggcctttcagagccacatggaacaggggtgctctccactgtgttagcacaatggggaggccttccagagccacatggtacaggggtgctgtccrctgtgttagcacaatggggaggccttccagagccacatggaacaggggtgctctccgctgtataagcatcctctgcatatgatgtcatccttcctgtcac

SEQ ID NO: 230994 - DNA, 201 bp, Homo sapiens
gggttaaaatcgcttcaggtatgggaatcccccagggcttgaggctccttctagtccacctgccccaggtcacctgcccaacatgcttccgatcccattgrggggcgactttctgagagatctgtctgtgggggatgccagtgaaaccatttaagacatgagacactaaaccagccttgtgaccatgccatttggggccac

SEQ ID NO: 230995 - DNA, 201 bp, Homo sapiens
tcaggattagctgtgttatttgtgacttagaaagcagtcagttgaaatattgaaagtattttcccaactcaggctggtttcagcggtgccgcagcgtgccrtgacatcgagcttgctaatgaataataaagacgattgccgctggtgatgtggaaggaaaagaaccaaccttactgcagatgccctttttccttcccagca

SEQ ID NO: 230996 - DNA, 201 bp, Homo sapiens
ctcattcattcaggaagcacttgcgaagtcccggccaatcacacgggctcctgattctcccgagttcactcattcactcaggaagcacttgcgaagtcccrgccaatcacacgggctcctgattctcccgtgttcactcattcactcagaaagcacttgcgaagtcccggccaatcacaagggctcctgattctcccgagt

SEQ ID NO: 230997 - DNA, 201 bp, Homo sapiens
gcatgactgcggctgtcttcgtcttcacacgggcgctctccctccgcgtgtccccagcatgactgcggctgtcttcgtcttcacacgggcgctctccctcygcgtgtccccagcatgactgcggctgtcttcgtcttcacacgggcgcgctccctccgcgtgtccccagcatgaccgcggctgtcttcgtcttcacacggg

SEQ ID NO: 230998 - DNA, 201 bp, Homo sapiens
tggggtgatggggacaaatgtgttatgggactctaagtcactatttgtctccagctccctcacccccaggagtttcaaaatcattgaagacaaaattgacrggcagattctgggtgcagacggcagtcagacaccagaagcaggcccgcagtcagcatcttctgagcagcctctccatccttctgaggtttcattccaacc

SEQ ID NO: 230999 - DNA, 201 bp, Homo sapiens
accctacccacccagcaggtgctttatcaatgccaacgttgtgcccctgcccggcctggccacacccatgctcaggagggcacaagagcgggcaggatccrgcgcccggcctggccgcacccatgcccaggagggcacgagagcgggcaggatccggcgcccggcctggccgcacccatgcccaggagggcacgagagcgg

SEQ ID NO: 231000 - DNA, 201 bp, Homo sapiens
tctccagccatgcaacgcttcgcgtggttattcccaagttcactcattcattcagaaagcacttgcgaagtcccggccaatcacacgggctcctgattctyccgagttcactcattcactcagaaagcacttgcgaagtcccggccaatcacacgggctcctgattctcccgcgttcactcattcattcaggaagcacttg

SEQ ID NO: 231001 - DNA, 201 bp, Homo sapiens
aggaaaatatgcctcctcgttttggttttcatttcttatgctaagtttatgttttcttttatgaattttattggtaaaattgttacaaatgttaatcaaayaaaacataaggatatattttattctcatgtatttaaaaatagaaggttaaatcttcatgaagtgaaattaatcttttttttttttgctttcctttgcttg

SEQ ID NO: 231002 - DNA, 201 bp, Homo sapiens
agctgacagcggaaacgaaggacaagcggagtcgcctagcgccgtcgctgcttagcccagaaaacggcctcgtcagcgccctcgacctgtttgcggaccgyttcaggagctgaaggaaccaccgaggttctgcggctgaggcgggaggcgggactggagacggggccgggcctgtccctccggatgcggggggcgctgccc

SEQ ID NO: 231003 - DNA, 201 bp, Homo sapiens
tggggattcgggcaacaaaagtgactctccccaccagaggttttagtttacaacatttcccctcaccgtgaaactggaagctttttaggggccgaaactcwgtggcactaatttttcatatgaccttctcccaaaacacgtccctgcctctctcatcctccgtagaaccaactcttaataaaggggtgagtgagtgaccat

SEQ ID NO: 231004 - DNA, 201 bp, Homo sapiens
aaaaaaacaatccccccttgaatcgtgaagctgtgctcgcctgcacaggggtgcagaggtccggtgtctccgcgttgatgctgccagcacctcaacagtaytatgggatggtccagcagtcgatagaaacttaccaggatattttgcacaattccctgtcctcctggagtattggggatggtgactttaaaatgacagtac

SEQ ID NO: 231005 - DNA, 201 bp, Homo sapiens
cctcaggacgtatgacagggccatgggggagtcccctgaccccccctcgcaggacgtgtgacaggactgtgggagagtcccctaaccccacgtgcaggacrtgtgacagggccgtgggggagtcccctgacccccctctcaggacgtgtgacagggctgtgggggagtcccctgaccctgcatgcaggacgtgtgacgggt

SEQ ID NO: 231006 - DNA, 201 bp, Homo sapiens
gtgtctgtgagaagagcagcactgggaataagtcacctgctgagctgacagcggaaacgaaggacaagcggagtcgcctagcgccgtcgctgcttagcccrgaaaacggcctcgtcagcgccctcgacctgtttgcggaccgcttcaggagctgaaggaaccaccgaggttctgcggctgaggcgggaggcgggactggag

SEQ ID NO: 231007 - DNA, 201 bp, Homo sapiens
aacatcacaaactggccgtagttgtttgctgctactgtgtgcctctttgagacatatgtgtgcgtgaagacacctgagcaggtgggctcttgttggggttwccataaactctcacactgagactcttctgcaattgaacacaaacccacacctttctttcctgaccacttaaagttcttttgtccttctgttttgatgact

SEQ ID NO: 231008 - DNA, 201 bp, Homo sapiens
ccttgccacgggccacagacttcaaaccctgccttggccctgagctccaccctggccctcccctgtcctcccccttcctcccctgtcttccccctcctctscgtcctcctttttcctcctcccacctctttcatggttccctgtgttctgattggccggttgagcagtcctgctgcagaacgatgctttccaaggcatccc

SEQ ID NO: 231009 - DNA, 201 bp, Homo sapiens
ctgcacactgccccggagcccagaccttcaggcggggctggcctggctgtggccccacaggaagggcctcctggccccgagagccccctcccgccctgggrcactctacccactggagctcacgctgctgctttctgcacagaggctgggattccgtgctggagacccggagtaacagaactctagaaatgagcactccat

SEQ ID NO: 231010 - DNA, 201 bp, Homo sapiens
tcctggaggcacctcccagagcatcatccctgcccagcccgcaggcccaacatcctccgtccagaccctgaggggctgtccccagaggcagcaggtcccamgcgtccgttcctagcgcctgaagtccaggcacatgcagcctggccttttggcagtggggctccctcgtagtgttgagtaggatgctgggggtcccccgat

SEQ ID NO: 231011 - DNA, 201 bp, Homo sapiens
ctctctccatcggccacctcctctccctgacctgccagaggcatccgtggagacccagacactggggttcctgagctgcaggccagccgcttcccaggccygtgccccgccccctcccgacctctcctggctctctcacctcagagctctgggggccgagcgccctgggacaccctaagtgtctcacctcggagttctggc

SEQ ID NO: 231012 - DNA, 201 bp, Homo sapiens
cgagcctaccccgtcgccagcgcggcgcagccagaccctagggcgctcccagcaccgcggaggtcgggcctccagtcctggaggggtttgctctgtcgccrccctagggttctgcgatcccctcccagcccccgcggggagtcccgggaacaccacgggcacacacacatcagacacgcgcgcacacacagacgcgcgcgc

SEQ ID NO: 231013 - DNA, 201 bp, Homo sapiens
gtgcccgaagcactggtccctgagtccacatgtttctgttcaaactcctgtttggaaattcgggaggggatcaaagtcctgccctccaaggttcccgttgsagacacagctccacggtccaggctggcccggcctgcgcacttgcctgcctgattctgctccctgctgccgggcagtcactccttcatctcagtccctggg

SEQ ID NO: 231014 - DNA, 201 bp, Homo sapiens
gtccggtcagacatcacgtgtgatcttagaaatccctgagtggtgaatgctggccacaccgagtgctggaggcttgtgaattcgactctcttctccaagtsctccatcaggtatttcactcattccagctgcagtgctgcgtggtgaggctcctggcgtgacatggaaggagggctgtgtgagtcagggctgacactccca

SEQ ID NO: 231015 - DNA, 201 bp, Homo sapiens
actttataggtatatatgtgtgtgtgtgtgtgtgtgtatgtgtatatatatatatatatatataaaggggagtttactaagtattaactcacatgatcacraggtcccacaataggctgtctgcaaggagagccagtccaggtcccaaggctgaagaacttggagtccaatgttcaagggcaagaagcatccagcatggga

SEQ ID NO: 231016 - DNA, 201 bp, Homo sapiens
atatatcatattagttacatatacgtgtatgtatataactttataggtatatatgtgtgtgtgtgtgtgtgtgtatgtgtatatatatatatatatatataaaggggagtttactaagtattaactcacatgatcacgaggtcccacaataggctgtctgcaaggagagccagtccaggtcccaaggctgaagaacttgga

SEQ ID NO: 231017 - DNA, 201 bp, Homo sapiens
cccctttatatgggttgtcttttcgctctctggatggtgcgctttgacgcacaaacgttttgagtgtcatcaaacccaatttatctatttttttcttttgkgcctgtgtttttggtgttatatccaggaaatcgtggccaaatccaatgtcataaaggtcttgccctgtatgttttaggtctcacatttagctctgagttc

SEQ ID NO: 231018 - DNA, 201 bp, Homo sapiens
gcagtgagtgacgtttctcagcagatgcacagttagcgtctctgggccatttctcctaggatatcctctagggcaggcctggacgtgtcactcgggatgtygtttagtgcaggcctgggcatatcacctaagcaaagtgtggcaagagcactttcctcacggggtatcaaagccaccttgttcggtccacagctttccggt

SEQ ID NO: 231019 - DNA, 201 bp, Homo sapiens
ggtcccttagtgttaaatgtgggtgacacacaggcagaatctgatctggaaccacaatgatcgggcgtcttcccatccttcctccaatcagctcacccttyggcttctcaaaggcccacggaatttatggtggttcatcgttctttgccttaagatgcaggttctagatttgctactgggacccacggtgactttgatttg

SEQ ID NO: 231020 - DNA, 201 bp, Homo sapiens
gcagatgcacagttagcgtctctgggccatttctcctaggatatcctctagggcaggcctggacgtgtcactcgggatgttgtttagtgcaggcctgggcrtatcacctaagcaaagtgtggcaagagcactttcctcacggggtatcaaagccaccttgttcggtccacagctttccggtgctccaattggatggttctg

SEQ ID NO: 231021 - DNA, 201 bp, Homo sapiens
caaggctccggtgtcaccctgtgatggccgcggcaccctgtcctctctctcctgtgcccccacagatgttgccatctcctgcctctcgtgtcttccccacrtgtgtcctttgccaatgctccctgcagtttcccttgtctggcctgtgctgcgtggagggtgcacctctgaacatcacgcagtcctcagggggccctggga

SEQ ID NO: 231022 - DNA, 201 bp, Homo sapiens
acgggcaacagacacgcacccagcctgagaggggccctggggccggggcgcccgccaattgtcagagtcttcttggttgcttttcaattcagaaatcagasaaatgatttgtagagagttttccttttcttcatttagcttgaaatcaattttgttagtaagtttttttttttgtttgtttgtttttgtttttttgagacg

SEQ ID NO: 231023 - DNA, 201 bp, Homo sapiens
cttcacttatggagctggggatagaaatgctgggggtcaatcggccctctgagcccaagcagagagacagtacgggacggggtggaggcgcatggccacckgagaacttgcgagactcatgccagcccctcctagggcgcccccaccaccacctttttggtccccagtgagtctttcatccaagtgggtcactgccagggg

SEQ ID NO: 231024 - DNA, 201 bp, Homo sapiens
accctgtgatggccgcggcaccctgtcctctctctcctgtgcccccacagatgttgccatctcctgcctctcgtgtcttccccacgtgtgtcctttgccartgctccctgcagtttcccttgtctggcctgtgctgcgtggagggtgcacctctgaacatcacgcagtcctcagggggccctgggatcaaaggtgtgtcca

SEQ ID NO: 231025 - DNA, 201 bp, Homo sapiens
catctcctgcctctcgtgtcttccccacgtgtgtcctttgccaatgctccctgcagtttcccttgtctggcctgtgctgcgtggagggtgcacctctgaasatcacgcagtcctcagggggccctgggatcaaaggtgtgtccacggttagtgtgctgaggtctcactctgtgctggttgctgggactagaaggggaaatg

SEQ ID NO: 231026 - DNA, 201 bp, Homo sapiens
tcccatgtgggaaccagagggggtgtgtgtttgggggatgaattcctgcacattcatgcaactccctctccaggccttactgggcaggagcttgggtgagwaggcaaggccaggagggagaagtaattttatggtacattttgtgtctttcctttatttcataccacaattcttttttttttccaaatttgggttgtaaga

SEQ ID NO: 231027 - DNA, 201 bp, Homo sapiens
tcatcctccgtagaaccaactcttaataaaggggtgagtgagtgaccatccagagcacagcctctgcagggggcgggtctctaaggcagcactcgcctgaygaccacgccgtgtttcccgcgggggctgcttgcctcaagcccccgctttgcacctcagttcccataaaagggcatttggtggtgagatgtggctcccgcc

SEQ ID NO: 231028 - DNA, 201 bp, Homo sapiens
cagagtcttcttggttgcttttcaattcagaaatcagacaaatgatttgtagagagttttccttttcttcatttagcttgaaatcaattttgttagtaagkttttttttttgtttgtttgtttttgtttttttgagacggagtctcgctctgtcccccaggctggagtgcagtggcgcaatctcagctcgccacaacttct

SEQ ID NO: 231029 - DNA, 201 bp, Homo sapiens
cgattccgcttacagaatcttcgtgtggggagggtctcacagtgtggggcgagcctggccttcggggtggcagcagccgggctcaccgtctcctgggcgcmctgtttcccgtgacttggaagacctaccctccagaggggccccaggccacggtgtgcttcttcctggatcaggcctcccactttatccaccagaagttac

SEQ ID NO: 231030 - DNA, 201 bp, Homo sapiens
gagaagctggaatcttgttttgcttcagaaactaacctggggcactgcagacctgtgtaaaatcccattcacccagctgggtgcacgcttcttgctacccrtttagtgttcagaccagtttctatgaggtctgagggttttaaccctaaagagatctaaaaacagaagctgtgtgatttataaattttatatttagaagaa

SEQ ID NO: 231031 - DNA, 201 bp, Homo sapiens
tatatatcatattagttacatatacgtgtatgtatataactttataggtatatatgtgtgtgtgtgtgtgtgtgtatgtgtatatatatatatatatatataaaggggagtttactaagtattaactcacatgatcacgaggtcccacaataggctgtctgcaaggagagccagtccaggtcccaaggctgaagaacttgg

SEQ ID NO: 231032 - DNA, 201 bp, Homo sapiens
ggcagatatatatatatcatattagttacatatacgtgtatgtatataactttataggtatatatgtgtgtgtgtgtgtgtgtgtatgtgtatatatatayatatatatataaaggggagtttactaagtattaactcacatgatcacgaggtcccacaataggctgtctgcaaggagagccagtccaggtcccaaggctg

SEQ ID NO: 231033 - DNA, 201 bp, Homo sapiens
agaggggcagatatatatatatcatattagttacatatacgtgtatgtatataactttataggtatatatgtgtgtgtgtgtgtgtgtgtatgtgtatatrtatatatatatatataaaggggagtttactaagtattaactcacatgatcacgaggtcccacaataggctgtctgcaaggagagccagtccaggtcccaa

SEQ ID NO: 231034 - DNA, 201 bp, Homo sapiens
aggttactgtgggtggagggaagccccccaaatccacttccttcactgccgtgctgctcaggtctggcccagcagcaggggatagaacatggatcccggtktctcccccgtggtttctcttgggtttcttgcttgtttcccagatgagttgatgtatacagtttattcacggatcaaggctcatttctttgctatcttaac

SEQ ID NO: 231035 - DNA, 201 bp, Homo sapiens
ctagaggggcagatatatatatatcatattagttacatatacgtgtatgtatataactttataggtatatatgtgtgtgtgtgtgtgtgtgtatgtgtatrtatatatatatatatataaaggggagtttactaagtattaactcacatgatcacgaggtcccacaataggctgtctgcaaggagagccagtccaggtccc

SEQ ID NO: 231036 - DNA, 201 bp, Homo sapiens
gttctctagaggggcagatatatatatatcatattagttacatatacgtgtatgtatataactttataggtatatatgtgtgtgtgtgtgtgtgtgtatgtgtatatatatatatatatatataaaggggagtttactaagtattaactcacatgatcacgaggtcccacaataggctgtctgcaaggagagccagtccag

SEQ ID NO: 231037 - DNA, 201 bp, Homo sapiens
ggttctctagaggggcagatatatatatatcatattagttacatatacgtgtatgtatataactttataggtatatatgtgtgtgtgtgtgtgtgtgtatgtgtatatatatatatatatatataaaggggagtttactaagtattaactcacatgatcacgaggtcccacaataggctgtctgcaaggagagccagtcca

SEQ ID NO: 231038 - DNA, 201 bp, Homo sapiens
gggttctctagaggggcagatatatatatatcatattagttacatatacgtgtatgtatataactttataggtatatatgtgtgtgtgtgtgtgtgtgtatgtgtatatatatatatatatatataaaggggagtttactaagtattaactcacatgatcacgaggtcccacaataggctgtctgcaaggagagccagtcc

SEQ ID NO: 231039 - DNA, 201 bp, Homo sapiens
tacacatgcatgctttattttctcgtgtggacacacttggaacctgtgtctacacatgacacacagtaccttgcaaatccacaagcagagtgacagcagaygaggccgtcacttcctgtggtgccatagtgcagctgggtttggtcctttgaaatgttctttcttaaaatcagggcttgttctcaacggtacagatgaata

SEQ ID NO: 231040 - DNA, 201 bp, Homo sapiens
aggaaggttactgtgggtggagggaagccccccaaatccacttccttcactgccgtgctgctcaggtctggcccagcagcaggggatagaacatggatccyggtttctcccccgtggtttctcttgggtttcttgcttgtttcccagatgagttgatgtatacagtttattcacggatcaaggctcatttctttgctatct

SEQ ID NO: 231041 - DNA, 201 bp, Homo sapiens
tcccaggccgggaatgagggagctagcacatcaccagcgggtctaagggtttgtggaagctgcagtggggacccagcattgggctgacggtccgtgggaasgaggcagagatggtggtggagctgggtggtgcagagagtgcctgatggcgggaaggtcctggagaagggatgctgagctctgagctgcaggaggaacagc

SEQ ID NO: 231042 - DNA, 201 bp, Homo sapiens
agggttctctagaggggcagatatatatatatcatattagttacatatacgtgtatgtatataactttataggtatatatgtgtgtgtgtgtgtgtgtgtatgtgtatatatatatatatatatataaaggggagtttactaagtattaactcacatgatcacgaggtcccacaataggctgtctgcaaggagagccagtc

SEQ ID NO: 231043 - DNA, 201 bp, Homo sapiens
ggacactctgtgtattagtcagggttctctagaggggcagatatatatatatcatattagttacatatacgtgtatgtatataactttataggtatatatrtgtgtgtgtgtgtgtgtgtatgtgtatatatatatatatatatataaaggggagtttactaagtattaactcacatgatcacgaggtcccacaataggct

SEQ ID NO: 231044 - DNA, 201 bp, Homo sapiens
gttctccacctcggtgaatgctccgaccccctcttgcctcacctcccactgtatgcatttgttcctttttaattttttgaagactggtcaagtgcagtagwgagaagggggaaggggtacaacaaggagctagattgggaactgactgagcagccggtcggggtgacgcaacgctaccttcctacccccaccctttgctcc

SEQ ID NO: 231045 - DNA, 201 bp, Homo sapiens
gctgcgtggagggtgcacctctgaacatcacgcagtcctcagggggccctgggatcaaaggtgtgtccacggttagtgtgctgaggtctcactctgtgctkgttgctgggactagaaggggaaatgaggcagagtctctgctcttaggcagcgtggagcccgcccagcctggtgttatgggggtaccagcttcacagtagg

SEQ ID NO: 231046 - DNA, 201 bp, Homo sapiens
gggtgaggacttgtaaatctatgtgagatttcaacaaatgaggcttctagctgatggtcttaaacacttccacggacatctccattttcttttagacaaawgggaaaataccagttatagtcattcactaacatccttttagtccacaccgggggcaaggcactgtaccagatgctgtgggggcgtgaagaggctgtagct

SEQ ID NO: 231047 - DNA, 201 bp, Homo sapiens
ctcactctgtgctggttgctgggactagaaggggaaatgaggcagagtctctgctcttaggcagcgtggagcccgcccagcctggtgttatgggggtaccrgcttcacagtaggatttggatttgaatcccaaatctactcagtaaataactgtgcaactttcagctctccgaggtgtgcagtggggacgatcatggttct

SEQ ID NO: 231048 - DNA, 201 bp, Homo sapiens
ttttagtccacaccgggggcaaggcactgtaccagatgctgtgggggcgtgaagaggctgtagctgtgatccctgccttccaggaactcacggtgtcaccrgggagagggtggtcctgcagggcggtagaggcgaggtgccgtcttgtccatgcggagactgtgtgtgagcgtacgcgtgtgggcgtgtgagtttgtgcat

SEQ ID NO: 231049 - DNA, 201 bp, Homo sapiens
ggccgtggtaagctttgggagctgggggccgagcttctcagcctgtgtcagcatctcctggacatcccgatggactgcagatcactcgcccggcccacttyctggtgcactggtctgagcattgtcctttgaaaaccaccagatgtcggggaaataacgtttgctgtggcgtctggggcaggaaaggaggaagcggagcac

SEQ ID NO: 231050 - DNA, 201 bp, Homo sapiens
cctcggtgaatgctccgaccccctcttgcctcacctcccactgtatgcatttgttcctttttaattttttgaagactggtcaagtgcagtagtgagaaggsggaaggggtacaacaaggagctagattgggaactgactgagcagccggtcggggtgacgcaacgctaccttcctacccccaccctttgctcctgttgtcg

SEQ ID NO: 231051 - DNA, 201 bp, Homo sapiens
gtgaatgctccgaccccctcttgcctcacctcccactgtatgcatttgttcctttttaattttttgaagactggtcaagtgcagtagtgagaagggggaargggtacaacaaggagctagattgggaactgactgagcagccggtcggggtgacgcaacgctaccttcctacccccaccctttgctcctgttgtcgctgag

SEQ ID NO: 231052 - DNA, 201 bp, Homo sapiens
aaataataatgaaaaataaaaaaaaaaagtaaaaataaaaaccagaggccagagttcatcaggtaaacatctgagatcaagtgtggtatgtcggagctgcraaccccagtctgcaccccacctttgagtggctgagatttaataaagtgcagtgaagtctcagacccacacccccaccttgatgtttccagttacggaact

SEQ ID NO: 231053 - DNA, 201 bp, Homo sapiens
cgctgtgttgagcacccaccgggagaagttccgtcaaatccagggtacttgagattctggaaagatgcagaaatgtaaaaaataaaaacaagcaacaagcrgtttatcccacaagtcactaggaaaatgtattgttgtctctctaacagtcaaatcctattggtcggccttagtttttctgcaaaacagaataaattttat

SEQ ID NO: 231054 - DNA, 201 bp, Homo sapiens
tatttttgccataaatttagaaattcaagagaacttagagtgtaattttgcttcctatagttaagataaatgtgagaatttaaatagctgtagtttatacraattaagataatatccagtgcctcttttgcagataatattttcgattggattaaacctgctagggttcatcattttagaacccatcatgttttactgaag

SEQ ID NO: 231055 - DNA, 201 bp, Homo sapiens
ccacacccccaccttgatgtttccagttacggaactcgttatcaggtgggccagggactcgcggagaacagctgcagacagcacctcttccccctggtctygtcgtgtggacgagtctcccgatgacaggtttcctggaggcctcatctccggtgggtgccagcaagtccagccagggagcaggtcccagaactcaggttc

SEQ ID NO: 231056 - DNA, 201 bp, Homo sapiens
atttttgtatttttagtagagacaaggtttcaccatgttggccaggctggtctcgaactcctggcctcaggtgatccacccgcctcagccttccaaagtgmtaggattataggcgtgagccaccgagcccggcctcaatgcactttcaacttaagaagttcttgggccataacccatcataagtaggggagcatctgtact

SEQ ID NO: 231057 - DNA, 201 bp, Homo sapiens
ggaggcctcatctccggtgggtgccagcaagtccagccagggagcaggtcccagaactcaggttcccaggccaagctttcccctgcctgtgttggtggaawacgcagggtaagtgggcaagagtgagagaacacaaaagccttcagccgggtctttattgggctgctttatctttgtgtagctccgtggcacgtgaaaacg

SEQ ID NO: 231058 - DNA, 201 bp, Homo sapiens
ggttcaagcgattctcctgcctcagtctcccgagtagttgggcttagaggcgcccgccaccatgcccgactaatttttgtatttttagtagagacaaggtktcaccatgttggccaggctggtctcgaactcctggcctcaggtgatccacccgcctcagccttccaaagtgctaggattataggcgtgagccaccgagcc

SEQ ID NO: 231059 - DNA, 201 bp, Homo sapiens
ttaagaactctatcaacacaaagtccagtgccttcccagtgtgttcatgtgcgttcctgttccacagaagctcctttccatgttcatctctgcgagtgacrgggtggttcctctcctgaagagaaggtgctcttgcaatcgttaacagacactgttgtgttctggactgtctgtgctccgtgttcctagaaatcagcccct

SEQ ID NO: 231060 - DNA, 201 bp, Homo sapiens
catagtctcttaaacaggcatttcctaggatttcctctcctgaagacaggccatgaaatatttccctcttcaaaaaagaagtgaacagaagagagtggacrtgttgtatttccttaaacaagaggataagagtctccccagaaccgcagtgcagccacagagcgtgggagggaactcaggagtctttccagtaccctcttc

SEQ ID NO: 231061 - DNA, 201 bp, Homo sapiens
gatgaaaaagttttaaataaagcagatagttcagtagcgttcccggtctcaaaaccaacacgcaccacacgttgtttccccttctacgctttgttcctgcygctgctacttcaccttctccacccgaactgcataccaactggggactttctccggaagattccattttgaagtatttgaacttttctccactaccttaat

SEQ ID NO: 231062 - DNA, 201 bp, Homo sapiens
gcgttgtgtcttgtctgtcctctgtagcaaccgtccccaatcctcacatcagtgattgtgtgtgttgtgtcttgtctgtcctccataacaactgtccccartcctcacatcagtgattgtgtgtgttgtatcttgtctgtcctctgtagcaaccgtccccaatcctcacatcagtgattgtgtgtgttgtgtcttgtctgt

SEQ ID NO: 231063 - DNA, 201 bp, Homo sapiens
cacattatttgggttttaggatttcaacatatgaatttttaggtgacataattcaacccatcatagcatgattgatttctattcaccagcatctctagaaygtgaacccctcgagggcagggctggtcttgctgttcattgctgtatttggaagcagctcctggtgccctgcaggcatcctgcacgctcactggatgagga

SEQ ID NO: 231064 - DNA, 201 bp, Homo sapiens
atcaaatcattagggtctttccttgctgtggttctgtgaggggtgaagagtttaaacaatgacaaaatattttgcaagctaaagagctgaagacaacttargtgtgtgaggaagggcaggtcagatgagcagacgggaatcctaggacgtgttgcctgcaggacgcggtgcaccctgcccagttctctcattcgcccgcct

SEQ ID NO: 231065 - DNA, 201 bp, Homo sapiens
ttgcccatgtaacaaaagcatgaaggctattggaaatatcagagttgtggatagaatttttcaggtttttatccagactgttaacttcaggtaacttaagkgtaggtatgaccttgcttctcagatcaaatcattagggtctttccttgctgtggttctgtgaggggtgaagagtttaaacaatgacaaaatattttgcaa

SEQ ID NO: 231066 - DNA, 201 bp, Homo sapiens
ctaacagatctcttgtgtaaaatctttatgattttctacctataggatcatatcataagtgaacagaaacaattttatgtcttcttttctcatttaggtgmcttttacttatttttcttgcctaattcctgtggctggcacctccaatactgtcttgaataacagtggtgaaagcaggcctcctcatattgttcctagtct

SEQ ID NO: 231067 - DNA, 201 bp, Homo sapiens
gagttcccatggtctctgaagccctgctctcgtggtgtggagtgcccatggtctctgaagccctgctctcgtggtgtggagtgcccgtggtctctgaagcyctgctctcgtggtgtggagtgcccgtggtctctgaagccctgctctcgtggtgtggagttcccgtggtctctgaagccctgctctcgtggtgtggagtgc

SEQ ID NO: 231068 - DNA, 201 bp, Homo sapiens
gctcccccatccaccgatgtctcctcccttgccttgtgtcgctctccccctgcccagaacttgccagaggtgggtgcagggcggggaccgttgggcatggkggcatggagtgtggcccaagccttggggagagggtgggtgggggtgccctgaaggaaggagaacctggatcccagaggacttggagcccctggaggccac

SEQ ID NO: 231069 - DNA, 201 bp, Homo sapiens
tggtaccgggcagttgcaaaaggctgagcaagtacagcccaggcagggagaccacagggcctgcccgggccccggagacgcggctctccgaagacaagacrtcccggggggctgtttttccatttggaccagttccacttggcttgagatgggcttcactctagaccctcctctgccagctcagcacgaagtgtgcatagt

SEQ ID NO: 231070 - DNA, 201 bp, Homo sapiens
ccaactacctcgtctgctggtgcctgtcagtgagttcttctgccggtgtgctcctcttgacatccagcccttgtgtctttgcccgctagggtcttggggasctgcttgtgtctctgcctgctagggtctcagggtttttataggcacaggatagaggcgtggtggaccagggtggtcttgggaaatgcaacatttgggcac

SEQ ID NO: 231071 - DNA, 201 bp, Homo sapiens
cccaccagccgtgaagtgggtgccacgagcctcctcgcaggtggggaggaccagggcgtggggagctgacctcacagacacgtgagggtgggggccagggsctcactgtaacctcatgacagggaccaaatgctgccagatacagacaatgtttcttggttggtggctgctccgggggtggggggcgagactgaagcgctt

SEQ ID NO: 231072 - DNA, 201 bp, Homo sapiens
actgtgcacagccaaaaacagtgttttcctttcctcagtctgaaagcctgacactgttgatccaccaggagtgtgcatgagtgtgcatagtgttgatccaycgggagtgtgtgtgggtgtgcatagtgttgatccaccgcgagtgtgtgtgggtgtgcatagtgttgatccaccgggagtgtgcatgggtgtgcatactgt

SEQ ID NO: 231073 - DNA, 201 bp, Homo sapiens
agggagacagggttccggagctggtcaggctcccgcgttgccgtggacggagggagacggggttccggagctggtgaggctccccctgccttgccgtggayggagggagacgatgttccggagctggtcaggctcccgcgttgccgtggacggagggagacgatgttccggagctgaagccgaagcaatttgaccttgctg

SEQ ID NO: 231074 - DNA, 201 bp, Homo sapiens
aagccacagctctgtgcacgttggatttcttacgtgcaaaacaagggggtcagccatgccggtggtaacacctggaaacacctggaagctttgaaaaatastgatgcccagacataacctggcgccagtgaatcagaatgtcagctgagggcggcaaggggcggggtgggggcgggacccaggctttgccgtcctttcttt

SEQ ID NO: 231075 - DNA, 201 bp, Homo sapiens
cccgtggacagagggagacagggttccggagctggtcaggctcccgcgttgccgtggacggagggagacggggttccggagctggtgaggctccccctgcsttgccgtggatggagggagacgatgttccggagctggtcaggctcccgcgttgccgtggacggagggagacgatgttccggagctgaagccgaagcaatt

SEQ ID NO: 231076 - DNA, 201 bp, Homo sapiens
acgttggatttcttacgtgcaaaacaagggggtcagccatgccggtggtaacacctggaaacacctggaagctttgaaaaatactgatgcccagacataamctggcgccagtgaatcagaatgtcagctgagggcggcaaggggcggggtgggggcgggacccaggctttgccgtcctttctttttctctgaagcttcccg

SEQ ID NO: 231077 - DNA, 201 bp, Homo sapiens
cagcatgaagtcaccccgtggacagagggagacagggttccggagctggtcaggctcccgcgttgccgtggacggagggagacggggttccggagctggtsaggctccccctgccttgccgtggatggagggagacgatgttccggagctggtcaggctcccgcgttgccgtggacggagggagacgatgttccggagctg

SEQ ID NO: 231078 - DNA, 201 bp, Homo sapiens
atgccggtggtaacacctggaaacacctggaagctttgaaaaatactgatgcccagacataacctggcgccagtgaatcagaatgtcagctgagggcggcraggggcggggtgggggcgggacccaggctttgccgtcctttctttttctctgaagcttcccgaggtgactgtaatgtgctatcagagttgaggagctctg

SEQ ID NO: 231079 - DNA, 201 bp, Homo sapiens
cgaaagctgaatagtgccattcaatatctgaatgtcttgcccatgtaacaaaagcatgaaggctattggaaatatcagagttgtggatagaatttttcagrtttttatccagactgttaacttcaggtaacttaagggtaggtatgaccttgcttctcagatcaaatcattagggtctttccttgctgtggttctgtgagg

SEQ ID NO: 231080 - DNA, 201 bp, Homo sapiens
tctttcacagaattgttttgtgttctttggaaagcagttcatgattgcaggagtcatttaataactggagcccggggggtctggaagaggtcgtacggccyctctgacctgtgggggataattcactcccaggaccatgcccggtcgcgatgcattgacaacgcagccctgtgtgcacacaggcacccggatgccttggtc

SEQ ID NO: 231081 - DNA, 201 bp, Homo sapiens
tttgtgttcaggcaactaaatctgccttctcttcttttaggctggaaataaaagccggtcagtgcaggggtgtgaggggctggctgtgggttctctggcaygaggctcacgtttacaggaggtcctcttggtgggcatagtgtaggggccagggcggacccctacggccgctcggaggaacagccaggatcggacccggga

SEQ ID NO: 231082 - DNA, 201 bp, Homo sapiens
acactaatggaatttttaagtaactcattgcttaaactatatttcatatgtcaaagggatatgttcgaagctagagtcaaattcttttctcattgaataargaatgtgtattgatttatattaataaaaaaatgttgtagaacaaatatttgcaaatacatttgttcatattgttcaaataagttataaaaagtaaacaga

SEQ ID NO: 231083 - DNA, 201 bp, Homo sapiens
cggtcagtgcaggggtgtgaggggctggctgtgggttctctggcatgaggctcacgtttacaggaggtcctcttggtgggcatagtgtaggggccagggcrgacccctacggccgctcggaggaacagccaggatcggacccgggaccgccccacactgtcagcactgtaggggtcactgttgctgcagctcacagtcccc

SEQ ID NO: 231084 - DNA, 201 bp, Homo sapiens
ttttctttctcttgcaccctcttttcctatgatctgtttggaatccaaggttggttttcagctgaattttgcacactaatggaatttttaagtaactcatkgcttaaactatatttcatatgtcaaagggatatgttcgaagctagagtcaaattcttttctcattgaataaggaatgtgtattgatttatattaataaaa

SEQ ID NO: 231085 - DNA, 201 bp, Homo sapiens
ttcccagcctcccgggtctgcagcgtccattgtcccatgtgctacatccatgcacgcatgtaatttggctcccacttaaatgtgtgaatgtgcagtatttractttctgattctgcattgtttcactcaagataatggctccagttccatccatgttgctgcaaaagacaggatttcatccttttttatggctgaatagta

SEQ ID NO: 231086 - DNA, 201 bp, Homo sapiens
ctgttctcttctcctccaaactcctcgtttcaaagcaattggaagaggagtggtgaccagtcaacacttggtaattgtggttgactatggaagcctgaatrttctcttcccttcaccaacattttagaaatttcactgctcacaggaaggtctggaaggtggaggaggtagactgagccctccaggctcagttccttgtga

SEQ ID NO: 231087 - DNA, 201 bp, Homo sapiens
atgagaagtcccagcaagaagagtgaccccgatcatccactcccacctcaccctccaaaccctgggaatgccagcgggcatgtcatttggtccccatgccrtgtgactggcactgagctgggaaaagatgtaaaatatctctgatagtctcacctctaactcttcaccctgaaaagtgaaaacactgtttgacatatcagc

SEQ ID NO: 231088 - DNA, 201 bp, Homo sapiens
gcagggttttccctgctggccccacatgggcagcaaagtccaagaccctgattttagatgtagggaatcctgtcgcctgccttccacccagggcttgagcrgcttcaggccgcacatcccccattccagtttcactttctccttcagcttggattcctggggatttcccttaattctgtgaaaggctgactgtgccatttg

SEQ ID NO: 231089 - DNA, 201 bp, Homo sapiens
tgagactatcttcatgtcaattcctcacccagatcactcatgtgtttgagcctcaattctggatgaggcccatgtttcaagcgtcttcccattttgagtcyatatggtgacagacgagattcctgtggtgtgagcacacccatttgctaagggtgtggttgttgagggtcctgtgttatgtggggggctcgggtccagctc

SEQ ID NO: 231090 - DNA, 201 bp, Homo sapiens
tgtgcacagccaaaaacagtgttttcctttcctcagtctgaaagcctgacactgttgatccaccaggagtgtgcatgagtgtgcatagtgttgatccatcrggagtgtgtgtgggtgtgcatagtgttgatccaccgcgagtgtgtgtgggtgtgcatagtgttgatccaccgggagtgtgcatgggtgtgcatactgttg

SEQ ID NO: 231091 - DNA, 201 bp, Homo sapiens
tctcaggacctcactcagattggtctggggccaaccccagtggcctcattttaactccatcatctctgtaaaggccccacctgcaaatgaggttatgtgcrgggtaacctggaggggattagggaggcagcacatggattctagggaatggttcagcccgtaacagggaccgacgcctgatgcacaccagtgttttctggt

SEQ ID NO: 231092 - DNA, 201 bp, Homo sapiens
cacagtttattcgcctactgaggaacatcttggttgcttccatgtattggcaattattcataaagctgccataagcaccctcatgcaggtttttgtgtggrtataagtctttaacttctactggttaagtaccaaggagtgtaatcactggatcacacagtaagagaatgtttggttttggaagcagccaccaaactgtct

SEQ ID NO: 231093 - DNA, 201 bp, Homo sapiens
tcttctcaggacctcactcagattggtctggggccaaccccagtggcctcattttaactccatcatctctgtaaaggccccacctgcaaatgaggttatgtgcagggtaacctggaggggattagggaggcagcacatggattctagggaatggttcagcccgtaacagggaccgacgcctgatgcacaccagtgttttct

SEQ ID NO: 231094 - DNA, 201 bp, Homo sapiens
ctggggttacaggtgtgagccactgtgcacagccaaaaacagtgttttcctttcctcagtctgaaagcctgacactgttgatccaccaggagtgtgcatgrgtgtgcatagtgttgatccatcgggagtgtgtgtgggtgtgcatagtgttgatccaccgcgagtgtgtgtgggtgtgcatagtgttgatccaccgggagt

SEQ ID NO: 231095 - DNA, 201 bp, Homo sapiens
ggatcatgaggcattagattctcgtacagagtgtgcagcttctgtccctcctgtgtgcagttcacaatggggtttgcactcctgtaaaatctaacaccacygctgatctgacaggcagcggaactcaggcgggaatgctcgcacacctgctgctcacctcctgctgtgtggcctggttcttgtactggttcatggcccggg

SEQ ID NO: 231096 - DNA, 201 bp, Homo sapiens
ttggctgacaggcagggtgcaggggagtagtggaactgcaccccgggagggcctgtgttaggtggtcgcccagtggttgaaggaatcgggacccgcaccakggctaggagggatgcaggaggccctggtgtgcgtgctgtctccaggggcactgttcaggtgccatgagtcacgcacctttgggcactgaaagtaggatat

SEQ ID NO: 231097 - DNA, 201 bp, Homo sapiens
cccagagggtccctccagggaatggaagtcaatgtctctcgtgcaggttctttttatctttaagggagcagcagctgctgggtcagggtgtttggaataasaagtatttgttcctgcagctgtacatctgaacgtgaaacatggctgttgcgttacaaccgtcgcaagagggaagaaaatctagtctgtagttaggatgat

SEQ ID NO: 231098 - DNA, 201 bp, Homo sapiens
acaggcgtgatgggaagtgttgtgtttggactgtgtaccggtgaatattgtcaaatatttgaatagcagagtgagaggggatcattcaaatgtctgcttgkggcgtgcattggtcctctgaggctgctggggaagcagaaggcagcccctcagcaccactaccccggcaggcatccggagccctgtggaggccccatgggt

SEQ ID NO: 231099 - DNA, 201 bp, Homo sapiens
agacatttgtatcctcctcatggtgaccttaagcctcaggaagaagctaggggaggctgctgtggctgagagaccttcccaggacatggtctctttcccgmcgggcctctgcagtcagcgtccgaaggagagatgggcctgtgagtatagctgggtgtcagggcccggacctggatttcgggcctggtgcagcttggccag

SEQ ID NO: 231100 - DNA, 201 bp, Homo sapiens
tttctgctggggagatggggatctgtattaatgatttttatctgtttgaacttttgcctctaaaagctttcttaacagactaagcctaccagagcaattaygttgaatggcaaattgctctctgcgaggaggtttcactcctccatgctgaggctgagtcaggaaaacaggcgtgatgggaagtgttgtgtttggactgtg

SEQ ID NO: 231101 - DNA, 201 bp, Homo sapiens
tcgaggcagccctgggagagcggccctgggagagtctggagaacaggcggatggccccaaggccaccctccgtggagacagctttccaggtgactgcagcrccatgggtgcccacacccaggggtgctgcggggaggggaggcctcagggctgtgcagagactgctggctcaccaagtgcaatgtgggctttctgctgggg

SEQ ID NO: 231102 - DNA, 201 bp, Homo sapiens
gtagctcgaggcagccctgggagagcggccctgggagagtctggagaacaggcggatggccccaaggccaccctccgtggagacagctttccaggtgactscagcgccatgggtgcccacacccaggggtgctgcggggaggggaggcctcagggctgtgcagagactgctggctcaccaagtgcaatgtgggctttctgc

SEQ ID NO: 231103 - DNA, 201 bp, Homo sapiens
gtgtgcccctaggagcacggattcataccctcctgaaggacctgcagaggcagccggctgaggtgaggggcctgagtggcctggagctggacggcatggcygagctgatggctggcctgatgcaaggcgtggaccatggagtagctcgaggcagccctgggagagcggccctgggagagtctggagaacaggcggatggcc

SEQ ID NO: 231104 - DNA, 201 bp, Homo sapiens
acccacaacgtccttgtgtttgtgtgtgtgcccctaggagcacggattcataccctcctgaaggacctgcagaggcagccggctgaggtgaggggcctgartggcctggagctggacggcatggctgagctgatggctggcctgatgcaaggcgtggaccatggagtagctcgaggcagccctgggagagcggccctggga

SEQ ID NO: 231105 - DNA, 201 bp, Homo sapiens
atatcccaatcttctctgagcactggcctgcgcctggccctaggtggccactgccttgggacgccgcagacgcccaccacacccctatggtctggaggccstcacctttgcattcgtccacccacaacgtccttgtgtttgtgtgtgtgcccctaggagcacggattcataccctcctgaaggacctgcagaggcagccgg

SEQ ID NO: 231106 - DNA, 201 bp, Homo sapiens
gaatgttgttagtaaaggtgacacttttttctgtccatgggattaaaacctgggatttgctcccttagattagaggaaagtgttcccctccacatggcacrttacttttatcactaggaacttttttttggtatttttttcttcatgagatggggtcttgctatgtttctgaggctggtgttgaactcctgagctcaagta

SEQ ID NO: 231107 - DNA, 201 bp, Homo sapiens
tttaggattagttcacagttccatggatctctcatctctttctgaataaatgattcatgcgtgtggtagagagtgcattaccctgtgctgcagagagtgaygtggatcctaccctgtgtctggtgcctgaacttgtgcagttctgagctgtgtttggctttgctccgaagcggctcaccattgatgggaacactgaatcca

SEQ ID NO: 231108 - DNA, 201 bp, Homo sapiens
aatgtgtgttggattctgttttaatttccccactctgctgagcagcgggtgcacacatctctccgtggttatggcagctccacaaatggccttgtctcctsgctctaatcatcgactgccctattctcaatttcgggttctgtttttctgcctcctcctgcatctgttgctgcttgtgtgaagtgggggcctagaccctgc

SEQ ID NO: 231109 - DNA, 201 bp, Homo sapiens
gagtgatggggggctgtggctgatggcgtccatgctgttatcttctctgaagagtgatgggtggctgttgtcttctccgcagattgatggggggccgtggscgatggcgtccatgtcgttgtcttctctgcagagcgatggggggctgtggctgatggcgtccatgctgttatgttctctgcagagcaatgggtggccgtg

SEQ ID NO: 231110 - DNA, 201 bp, Homo sapiens
gggtaaggtaaggtttttcccccctctctggctttgtccaaaaattcctgtctttgatttttctgcagtgtgtgtgcacgtgtgtgcatgtgcagtgtgtttgtgtgtgtgtgtgtgtgaagtgtgtgcacatgtgtatgcacgtgtgtgtgtgcatgtgtgtatgcatgtgtgtgcgtgtccgtgtgtgtgcatctgtgt

SEQ ID NO: 231111 - DNA, 201 bp, Homo sapiens
ggtaaggtaaggtttttcccccctctctggctttgtccaaaaattcctgtctttgatttttctgcagtgtgtgtgcacgtgtgtgcatgtgcagtgtgtttgtgtgtgtgtgtgtgtgaagtgtgtgcacatgtgtatgcacgtgtgtgtgtgcatgtgtgtatgcatgtgtgtgcgtgtccgtgtgtgtgcatctgtgtg

SEQ ID NO: 231112 - DNA, 201 bp, Homo sapiens
catacacccttgccatcagccaccttcctcccatgcagcaagctcgggcacacccagtgtagaggggagctgcgactcagtggacgctgacactgggcatyggtgggaacagacagcggtgctgtggctcctgctggtgggacgctgggctcggctgacagtcaggaggcaacgcagctgtgcacatccgaagctctcgac

SEQ ID NO: 231113 - DNA, 201 bp, Homo sapiens
gcggcaaggggcggggtgggggcgggacccaggctttgccgtcctttctttttctctgaagcttcccgaggtgactgtaatgtgctatcagagttgaggakctctgggcaagacgatcctgatgaaaccctcccaccctgaaacgccagctgtgctttgtgtaacaaagccaaaggtgcggtgagggaattcagtttcctc

SEQ ID NO: 231114 - DNA, 201 bp, Homo sapiens
aatattctgtgttttgttattaaggctattagctgaagatgtaggaagactgtaaaaatgccacaatttttgcttatacatgcagtgtgagttataatttmcgggagattttacgcacattgtttcacttgagccccacaattccagttgcatcctagactagctaccgtaaagtagcacagggtaaatgggtggcggtga

SEQ ID NO: 231115 - DNA, 201 bp, Homo sapiens
agtgcgcagggcatcaccagtgcccgtgtgggaggcggggctccgtgggaactggctacttaccccccacctgtccccagagcccgtgtgggaggcggggyttggtgggaactggctacttatccctcccctgtccccagtgcccgtgtgggaggtggggcttggtgggaactggctgatcatgtcacttctttaagcctg

SEQ ID NO: 231116 - DNA, 201 bp, Homo sapiens
ttgttattaaggctattagctgaagatgtaggaagactgtaaaaatgccacaatttttgcttatacatgcagtgtgagttataatttccgggagattttaygcacattgtttcacttgagccccacaattccagttgcatcctagactagctaccgtaaagtagcacagggtaaatgggtggcggtgaaagcaagaatttg

SEQ ID NO: 231117 - DNA, 201 bp, Homo sapiens
ggccgtgggtggggacttggggacccagtggggctgcaacaggggaggaggcgcctgggcgctggggctcacggccggctggggctcacctcagcttcccragcacagtctgtgatggcactggcgtggcctggcctctccaggacctgttaggaggtgacggtggacaggcctgtgaacattccgctcttgctggagcca

SEQ ID NO: 231118 - DNA, 201 bp, Homo sapiens
tgacgtgccatgagaggctccacagacactggatctcagcttctgccctggaaggaagccactgtccccagaaccacttccgggccagagtgaaggcagcyggacagcaggaggccaggcatttgcaggggcggtgcctagtctctgcagctgacagctgtatggaaccctgcagtgttcagtacaaagctccaggatgtg

SEQ ID NO: 231119 - DNA, 201 bp, Homo sapiens
ttttgcttatacatgcagtgtgagttataatttccgggagattttacgcacattgtttcacttgagccccacaattccagttgcatcctagactagctacygtaaagtagcacagggtaaatgggtggcggtgaaagcaagaatttgaacagcttgccacagtgtaacaaacgcaacagcaacagaaacatcaagagggcc

SEQ ID NO: 231120 - DNA, 201 bp, Homo sapiens
gggtttctccatgttggtcaggctgatctcaaactcctgacctcgtgatccgcctgcctcagcctcccaaagtgctgggattacaggcatgagccaccgcrcccagccagagtgctgctttaattgatgaagcaagaatggggctcctgggagaggcgtatgctggctatgtgaggtctgtggacctccaggggcctgccc

SEQ ID NO: 231121 - DNA, 201 bp, Homo sapiens
agccaatgatctcagctcacagtgcttaatgttctaagcctcagttttctcatctgtaaagtgggaatcatagcagcagttctcagggatttggtagggtmacccacgtaaacatccatcccagagcctgacgtgccatgagaggctccacagacactggatctcagcttctgccctggaaggaagccactgtccccagaa

SEQ ID NO: 231122 - DNA, 201 bp, Homo sapiens
taggcgttagccaccacgcctggctaattttgtatttttagtagagtcggggtttctccatgttggtcaggctgatctcaaactcctgacctcgtgatccrcctgcctcagcctcccaaagtgctgggattacaggcatgagccaccgcacccagccagagtgctgctttaattgatgaagcaagaatggggctcctggga

SEQ ID NO: 231123 - DNA, 201 bp, Homo sapiens
ctcacccaccactcaccggccactcaacagctcactcacccaccactcacctcctgctgtgcaccccagttcctaacaggccacagactggtgtcagtccrtggcccagaggctggggatgcctggtccagtgggaagacatgggtgggagatctgggatgcccatggacttttacagagtgtgagtttgggggcaaacac

SEQ ID NO: 231124 - DNA, 201 bp, Homo sapiens
caagggtcccagcacgggaggaggacggcccctcggatctaatgagcggacctcacatccaaaaggggctgcgatgttggggtgcccctgccttggccagrgcagacactgccctctgctcacctgtgtgcaccagagaacatggtcgagggatgccgggttgataaggggagcccggccaaaccctcagtcacatggagt

SEQ ID NO: 231125 - DNA, 201 bp, Homo sapiens
gggaacatggtgagttaggctgcgtgattcaccagggaaaagagggcggatcactctgtgtatgtcctctgggtggtgcagggaggacagaaaggccatcragtatctgccatgcatttttttcctacagctggctaagggtgctagtgtattcattacattagcctgtgtatctttttctaggaataaaatagtccattt

SEQ ID NO: 231126 - DNA, 201 bp, Homo sapiens
gagaaagagaaagccctctgagagttcttgtcctgtccagatgtatgtgaccaggtgagaaaggagccggctgggtagctcgggcccgtgtggttcccacrggtggaaatcgtgcataggattgtagctcagagcagacagtgctgctgcttttgttttgttttcttttgttttttggtttttttttttttgttttttgag

SEQ ID NO: 231127 - DNA, 201 bp, Homo sapiens
aggctcttggctggaagaaatgctatttgggaaatgccaacaggtgaggtggagagctggcaagcagaccacttgcaaagggctctccagccaaaatgatytgtgtgagaccggaggccctgtggtgctgggggcaggtgaaatgtcagagctacagtggggtgagaaatccgtagatgttccaatcacatcctaagtcta

SEQ ID NO: 231128 - DNA, 201 bp, Homo sapiens
cagacttgggaggcccagagcttggctcaaaacataactcagacctggcatttgatggacatctggctgaagcaggctttttcttcttttcctccttcaayatgttcagcagagacttaaaaattggcagtattgtcatggagttcataaaaaggaacaaaaggacactgagaatcagcaggtatttactttagacttaaa

SEQ ID NO: 231129 - DNA, 201 bp, Homo sapiens
ttttaaatttcagacgccgtgctcttcacttacagaatgtgtgttggattctgttttaatttccccactctgctgagcagcgggtgcacacatctctccgyggttatggcagctccacaaatggccttgtctcctcgctctaatcatcgactgccctattctcaatttcgggttctgtttttctgcctcctcctgcatctg

SEQ ID NO: 231130 - DNA, 201 bp, Homo sapiens
tcccattctgttcttccaacgatgatcgcttctatgatctgtcttcagattcacaaaccgtttcttccgttatgtccacccgtaatggacataaattttaratttcagacgccgtgctcttcacttacagaatgtgtgttggattctgttttaatttccccactctgctgagcagcgggtgcacacatctctccgtggtta

SEQ ID NO: 231131 - DNA, 201 bp, Homo sapiens
ccccaggggtgactgaggttctgcagaacgtctcccattctgttcttccaacgatgatcgcttctatgatctgtcttcagattcacaaaccgtttcttccrttatgtccacccgtaatggacataaattttaaatttcagacgccgtgctcttcacttacagaatgtgtgttggattctgttttaatttccccactctgct

SEQ ID NO: 231132 - DNA, 201 bp, Homo sapiens
aaggtaaggtttttcccccctctctggctttgtccaaaaattcctgtctttgatttttctgcagtgtgtgtgcacgtgtgtgcatgtgcagtgtgtttgtgtgtgtgtgtgtgtgaagtgtgtgcacatgtgtatgcacgtgtgtgtgtgcatgtgtgtatgcatgtgtgtgcgtgtccgtgtgtgtgcatctgtgtgtgt

SEQ ID NO: 231133 - DNA, 201 bp, Homo sapiens
aggagtcaggctgctacccacagtctcatttaactctcatggttacgggtttcacttctctcgggtaaatacttacgagtccaatttctgggtaatacggragatgtccttttggaaaagactttcctttctctgttgaaacgccctggcgcctttgaaacagtctcctcggagttgtcactgtgccacttcctggacgcg

SEQ ID NO: 231134 - DNA, 201 bp, Homo sapiens
aggtaaggtttttcccccctctctggctttgtccaaaaattcctgtctttgatttttctgcagtgtgtgtgcacgtgtgtgcatgtgcagtgtgtttgtgtgtgtgtgtgtgtgaagtgtgtgcacatgtgtatgcacgtgtgtgtgtgcatgtgtgtatgcatgtgtgtgcgtgtccgtgtgtgtgcatctgtgtgtgtg

SEQ ID NO: 231135 - DNA, 201 bp, Homo sapiens
tgtggatgtggcctccttatccgctctcctgctgccgggcacatggactttagactctgtctgtggaactatgaggagtcaggctgctacccacagtctcrtttaactctcatggttacgggtttcacttctctcgggtaaatacttacgagtccaatttctgggtaatacggaagatgtccttttggaaaagactttcct

SEQ ID NO: 231136 - DNA, 201 bp, Homo sapiens
tctgcagtgtgtgtgcacgtgtgtgcatgtgcagtgtgtttgtgtgtgtgtgtgtgtgaagtgtgtgcacatgtgtatgcacgtgtgtgtgtgcatgtgtrtatgcatgtgtgtgcgtgtccgtgtgtgtgcatctgtgtgtgtgagtgtgaatttgtgtgtgttgtatttacccttcttggtgttctctgagtttcctag

SEQ ID NO: 231137 - DNA, 201 bp, Homo sapiens
gtgctggtgtggatgtggcctccttatccgctctcctgctgccgggcacatggactttagactctgtctgtggaactatgaggagtcaggctgctacccayagtctcatttaactctcatggttacgggtttcacttctctcgggtaaatacttacgagtccaatttctgggtaatacggaagatgtccttttggaaaaga

SEQ ID NO: 231138 - DNA, 201 bp, Homo sapiens
cacttctcatattcatcatgggtatttgagattcattgtctgataattccaatatctctgctatatctgagtctgattctttttctctttgtgattttttycccttttagcatggcttgtaatttttttgttgaaacctagatatgctgtattggataaaagaaactgaggcagattggcctttagcattaggttttatct

SEQ ID NO: 231139 - DNA, 201 bp, Homo sapiens
tgagttcctcacagccccctttttcagcccaaggcgatgcccacagtgtcctggcaccacctcccacccccagcctgtggctgaacccaaagggatggccygggagctgatgggtcacaggccatcccatgtcccacgtgggcttctcaaaggttttggttcccatccctagttttggggcagtggctgtctcacatgggg

SEQ ID NO: 231140 - DNA, 201 bp, Homo sapiens
aacctaaaatgcctacatttcttaatttgtaaaaagcagaaataattcctccgcttctattgtagaggattgtgccgagatccctctagggcagagggtcrcagtgggatccctctagggcagaaggttgcggcgggacctgtctagggtggagggtcgtggtgagacccctctagcgtggagggtggcagcgggaccccc

SEQ ID NO: 231141 - DNA, 201 bp, Homo sapiens
attgatgtggtggtctggtgtggaaggagggcagcatcctctggccctgtgatcaggtctctgtctcagcctgaacctgcacacctgggctgtgacctcamgaggacttctcagctttttcttttcctcccataagtgaaaggaaggccagatgggttggaattgggtattttccatcccacaacattctggacttatttc

SEQ ID NO: 231142 - DNA, 201 bp, Homo sapiens
tttcatgctgtgtttttttttgttattttattattagaatgtaaggattcttaatatctgtgtcattattctagaaatacatattttacatattatgtataataaaatcttatatttctatattttatactttattatctaatataaatactacatattatataatataaatatacatgttacatataaatatatatgtag

SEQ ID NO: 231143 - DNA, 201 bp, Homo sapiens
actgcaggctgcagcccaggcctggtgatgcatttgacgcagacaaaaaacctaaaatgcctacatttcttaatttgtaaaaagcagaaataattcctcckcttctattgtagaggattgtgccgagatccctctagggcagagggtcgcagtgggatccctctagggcagaaggttgcggcgggacctgtctagggtgga

SEQ ID NO: 231144 - DNA, 201 bp, Homo sapiens
ttcatgctgtgtttttttttgttattttattattagaatgtaaggattcttaatatctgtgtcattattctagaaatacatattttacatattatgtataataaaatcttatatttctatattttatactttattatctaatataaatactacatattatataatataaatatacatgttacatataaatatatatgtaga

SEQ ID NO: 231145 - DNA, 201 bp, Homo sapiens
ctgtggtatacacgcacctttaattccggagcacatcttttatcttctctgtgaaacaacgtgagcctgtcagcgtggaaggagctggggcatgggtgccrttgacctgggactgtccagcccttcagccctttgtcacctgcagacaggagtagcggtgaaggcaggctttgctgcggttttaggcatgtttttgtttgt

SEQ ID NO: 231146 - DNA, 201 bp, Homo sapiens
tcatgctgtgtttttttttgttattttattattagaatgtaaggattcttaatatctgtgtcattattctagaaatacatattttacatattatgtataataaaatcttatatttctatattttatactttattatctaatataaatactacatattatataatataaatatacatgttacatataaatatatatgtagac

SEQ ID NO: 231147 - DNA, 201 bp, Homo sapiens
catgctgtgtttttttttgttattttattattagaatgtaaggattcttaatatctgtgtcattattctagaaatacatattttacatattatgtataataaaatcttatatttctatattttatactttattatctaatataaatactacatattatataatataaatatacatgttacatataaatatatatgtagacc

SEQ ID NO: 231148 - DNA, 201 bp, Homo sapiens
atgctgtgtttttttttgttattttattattagaatgtaaggattcttaatatctgtgtcattattctagaaatacatattttacatattatgtataataaaatcttatatttctatattttatactttattatctaatataaatactacatattatataatataaatatacatgttacatataaatatatatgtagacca

SEQ ID NO: 231149 - DNA, 201 bp, Homo sapiens
ccaccatgcccagctaatttttatagttttagtagagacggggttttgccatgttggccaggctggtctcgaagtcctgacctcaagtgactccccacctyggcctcccaaagtgctgggatgacaggtgtgagccaccgtgcccggccaatcacagggtatctatggctgtatcttatggctgctcagtcctagaagttt

SEQ ID NO: 231150 - DNA, 201 bp, Homo sapiens
cagctgcccagtcgggggctctggctctgggactcacatgagggtatggttggcttgctggcctgggctgcgattgagcaggaagctgagggacctcttaygcctgtgcatcacgcactgtattctatgcaacggatgcgagtcataaagtccagcccatacctccaaggaccggcattcagcggcaccccctgcagagag

SEQ ID NO: 231151 - DNA, 201 bp, Homo sapiens
tcagcataagacgtctttgcaaagccactcctgacggcggagatggcggcagcaccacacgggagctgtttgagaagcagatcaggcagagtttcaccgaygtctgagagctagtttcacagccctgtgccagaggagccgtgtcttccacaaaacacacctgagagctggtttcagactttccgggaaactgccctggcc

SEQ ID NO: 231152 - DNA, 201 bp, Homo sapiens
acacattttttgagcaaatgacaatcagtctcacacattttatgtaattgctaaatgctgagccaactgtgcaggatggtctgtgcgcttctcccctctcrccacactgtgaagtgtcatttctgaagaaatggtgggtctttccagaagtgtctgcagtgccgggaaggaaggcttgcttacttgggtgccctggcattg

SEQ ID NO: 231153 - DNA, 201 bp, Homo sapiens
caggatgtagtccataagcataagatttacatatcctcactgcccatcacagcctcggcgtgtggcctttctctttatgctttgctccctctgccacgtcsagtgacgtggtcagcgtacgttaggtgctcaacacattttttgagcaaatgacaatcagtctcacacattttatgtaattgctaaatgctgagccaactg

SEQ ID NO: 231154 - DNA, 201 bp, Homo sapiens
tattttaatttagaaaggctttctgtaaaatataaccgagcagtggttattgacataactctcaagggtgtctaaggaagagaagttgttgttattgtttkgggctgcccttcactgtttataatttttcctgtctgtgatgctcctcctggtgtcctccaggtgctctcgttgagaattaaatgttgctcctgcagcaga

SEQ ID NO: 231155 - DNA, 201 bp, Homo sapiens
atgaactaaggagaaagggctttatttgcagggaaaacccagcccagaatgtcacttgttcctggaaaatgggcctcccaggcgcagggaaggtgcagtcygtgcccctgccttggactgtctggaagaagctgagtcgaggctcacctgcgggtgaatggagcactcagaggagggagaggcaggaaggaaacacttcca

SEQ ID NO: 231156 - DNA, 201 bp, Homo sapiens
aatagctctcaccacaagataggatcagaagaaaacagcattcacggtgcagaaaccaggcaggcagcgcttaacaagtgataccagtgaacgtcaccagyggcaagatggatccgcacacgtgcccttgagctgatgcacaaagaacacaaaagatgatgtccctggtgttctcgacaaagagcaaaacccagtctattc

SEQ ID NO: 231157 - DNA, 201 bp, Homo sapiens
ttcttctcccctgtgagacgggcttgatggcagtgcctttcccctggggttcctgtgagggtaaaaccgggtgagcatctgagatgccgcccatcctgagrcctcacctgtgccgcaggtgcgtcgggctggagaggaaggggttgtgctgaaggaacagagcccggcggggcctttgcttggtagggtttgggcctctgg

SEQ ID NO: 231158 - DNA, 201 bp, Homo sapiens
caggctctgggaagcaggaggtccaaggccggatgctttgctcatcatcgccaagtgaagagtccctgtggcagagcaaagatcaggtcagagtggaaatkaaacaaatgtgattcttttaaacaagtaaaaattgaagtggagtgttctatactatagtgggaaaaaattctacaagccagaggcttccagtcaaatgtg

SEQ ID NO: 231159 - DNA, 201 bp, Homo sapiens
cagcagcagtaggggtttgatgatgctgatggcgggggtgacactgatggtgtggatgctgctgtggatggtgtggatgatgatggtgctgctgctgctgmtgatgatgatggtgggaagctgatggttgaggtgatgatggcagggatcatgttgatggtggaagtgataatggtggggatgctgctgtggatggtgaag

SEQ ID NO: 231160 - DNA, 201 bp, Homo sapiens
ggaggctgcacactgccccggagcccagaccttcaggcggggctggcctggctgtggccccacaggaagggcctcctggccccgagagccccctcccgccytgggacactctacccactggagctcacgctgctgctttctgcacagaggctgggattccgtgctggagacccggagtaacagaactctagaaatgagcac

SEQ ID NO: 231161 - DNA, 201 bp, Homo sapiens
aagctacagccaatctcggggcactgaccgccaccctccctggcacacacaggctgtagaaagcacatgcaggttggtgccgcaggaacgcatcagagtcrccgaccttccgactcatcacagctacaaggcagccaattccgtggtgatccagcagcccagccctctgtgcgcaaagcctcgtttccgccagacacccaa

SEQ ID NO: 231162 - DNA, 201 bp, Homo sapiens
tcttcccaggactcacacaggtagccttttaggctcggaagctacagccaatctcggggcactgaccgccaccctccctggcacacacaggctgtagaaarcacatgcaggttggtgccgcaggaacgcatcagagtcgccgaccttccgactcatcacagctacaaggcagccaattccgtggtgatccagcagcccagc

SEQ ID NO: 231163 - DNA, 201 bp, Homo sapiens
ttccagtgtgcctgcgagccagactgatgtccagctccatgcctgtgagtcagcagccccatgcctgtgagtcagcatagggataaccatggcaccggggwtggcggatagcatggtggccacgcacaagcgacctactgtgtgccggccctgagccggctgcttccacatccccactcacctgttcacacagccacgtca

SEQ ID NO: 231164 - DNA, 201 bp, Homo sapiens
agagacgcgtctcgactccaaatctttaagcctctgtttctctctccatctctcacctcccaggatgtctttggtcaccaggagacccacccattacgctrccatttccataacatggatttttccccctcttccttcaagtgatgagttttttcaagtgataattttattcatgtggggtatttatattttgccgtatgt

SEQ ID NO: 231165 - DNA, 201 bp, Homo sapiens
tacagattgtcctactttgaaaaatcccgtggacaaggacaatgaccacccacggtgacttgtgaaacgctcacattttcttatcgtcagcagccccagcrtcctccttctcccgtgtgggacttcctgtcctgtggaccacacggagttagagctgggggcagtgagagccgtcttcttccttcttggtagagagacgcg

SEQ ID NO: 231166 - DNA, 201 bp, Homo sapiens
aggttggacttgcatgcagaaatgactaatttgaaaaaaaaactgcaggttgaaaatgcatacttaggactgagtttgtgataattaacagaaaaaaaaaagccttcccagtgacagctctaattaatagtatctgtaattaaaatcatgcccttccagcaggaaaattgtttgaatttcttggagtgacctttttgctgt

SEQ ID NO: 231167 - DNA, 201 bp, Homo sapiens
gcggaactcagcctgggcctgcagtcagaggaaacggggtccttcggccacttttagacaggggcctgcagcggacggcaccgtactcatatctgtggacmacccccgcctctgagccctgccccctggggctcgcccccaggttttacagaactaggtttgtgagagaaaagcgccaggcaaggccctctgcaccgagca

SEQ ID NO: 231168 - DNA, 201 bp, Homo sapiens
gagtgagttttaatgagcacacagtcactgtcttctcacatcagaagtccgtgtgctgagaaatgaggattctctttattctggacgttccagaaagcctmgtccaaggggatcgaatggacgcaggagggagagagctcagattttagctctttgttaggttcgtataacccaagtgccctgtgggttccccttgtgtgg

SEQ ID NO: 231169 - DNA, 201 bp, Homo sapiens
ggccaaaagaggctctctcgtcattgcaatgatccacactccactctgctgtcactgaacctgcccccaagcctgcaccctcttcatctcttctttgtctrtagcaaccatccccaatcctgacatcagtgattgtgtgtgttgtgtcttgtctgtcctccatagcaaccgtccccaatcctgacattggtgattgtgtgc

SEQ ID NO: 231170 - DNA, 201 bp, Homo sapiens
gcctgcaccctcttcatctcttctttgtctgtagcaaccatccccaatcctgacatcagtgattgtgtgtgttgtgtcttgtctgtcctccatagcaaccrtccccaatcctgacattggtgattgtgtgcgttgtgtcttgtctgtcctctgtagcaaccgtccccaatcctcacatcagtgattgtgtgtgttgtgtct

SEQ ID NO: 231171 - DNA, 201 bp, Homo sapiens
gagtaaatctccagcgtttcaaatcctcttccccagagggtcacattctcggaccctctgggttccctgagctgtagctgttctcatgctttggttggacrttatttttctggagaaattgtgtgaagagatagaagttacttcagaaacatttctcagtgtgcttttcccccacgtcaagcaaaattcatgtgcacaatt

SEQ ID NO: 231172 - DNA, 201 bp, Homo sapiens
gggtggatcacctaaggtcaggagttcaagatcagcctggccaacgtggtgaagcccgtctctactaaaaatacaaaaattagctgggtgtggtggtgcaygcctataattccagctactcgggaggctgaggcagcagaatcgcttgaacccgggaggcggaggctgcagtgagctgagattacaccactgcactccagc

SEQ ID NO: 231173 - DNA, 201 bp, Homo sapiens
tccctgcaggccattcccggccttatcgctgctcagatgtttgcctgagccacttgctgaatagaaacttggtagcggtgggttcagagcggagcagcgccgggctagagcacccgcccccgttcccaggcggaagcccgcagggagagcgccttcgggcaagagcagcgtccccggccgcgcgttgccttgctgtgggca

SEQ ID NO: 231174 - DNA, 201 bp, Homo sapiens
cctccctgcaggccattcccggccttatcgctgctcagatgtttgcctgagccacttgctgaatagaaacttggtagcggtgggttcagagcggagcagcgccgggctagagcacccgcccccgttcccaggcggaagcccgcagggagagcgccttcgggcaagagcagcgtccccggccgcgcgttgccttgctgtggg

SEQ ID NO: 231175 - DNA, 201 bp, Homo sapiens
ctgggagctccagcccaggtcggtgggaccaggaccagaactcaacactaccccacccagctgtccccatggtgtgccagtgggaacgggggtcccacacwgagggaggtcactgcgaggtggtcgtgccctcaacagcctcttacagatgaagactaagatctattgggaataatctttattaaaaaaaatactgcttga

SEQ ID NO: 231176 - DNA, 201 bp, Homo sapiens
cctgcaggccattcctggccttatcactgccaacctcctccacccaggacccggcttccccatcatcccattcctccctgcaggccattcccggccttatygctgctcagatgtttgcctgagccacttgctgaatagaaacttggtagcggtgggttcagagcggagcagcgccgggctagagcacccgcccccgttccc

SEQ ID NO: 231177 - DNA, 201 bp, Homo sapiens
ccgttcctccctgcaggccattcctggccttatcactgccaacctcctccacccaggacccggcttccccatcatcccattcctccctgcaggccattccyggccttatcgctgctcagatgtttgcctgagccacttgctgaatagaaacttggtagcggtgggttcagagcggagcagcgccgggctagagcacccgcc

SEQ ID NO: 231178 - DNA, 201 bp, Homo sapiens
aaacctcttttatcctaattagtggtaacaattcaggtccacctgacctgtcattggcctttttagaaaactccttggtatttagtctgtagatgtgcatkcgacgtacagggagttcaggatctgttgtgggcctagttaccaaaggtgcctgagcctgctgcctgcggcggtgagtcctgccggcccacagacacatcg

SEQ ID NO: 231179 - DNA, 201 bp, Homo sapiens
gcttcagccccagacacctcctccacccaggacccggcttccccaccatcccgttcctccctgcaggccattcctggccttatcactgccaacctcctccrcccaggacccggcttccccatcatcccattcctccctgcaggccattcccggccttatcgctgctcagatgtttgcctgagccacttgctgaatagaaac

SEQ ID NO: 231180 - DNA, 201 bp, Homo sapiens
gcacaagtccacggctacgtgcaagcatggtcggcagacgctggaggcagggagagggatggaccagtttgcgatcttggaggccccagggtctggtaggkcagccgcacaggcacatgcgtgactatcccaggaggcagcacgggaggcctcatggtggaggctccagtaaggtgctgggcagagtgggcgagaacctgg

SEQ ID NO: 231181 - DNA, 201 bp, Homo sapiens
agagccttcagaaaagcctgcgctggtgatgtgagggaaacatggctggtgcctccggggagccacgtcctgcccatcgtagtgtccagggaagtaggacrcgtctctcacctgcccccaggctcaggggcagcatggggggcttcagccccagacacctcctccacccaggacccggcttccccaccatcccgttcctcc

SEQ ID NO: 231182 - DNA, 201 bp, Homo sapiens
cgtgcaagcatggtcggcagacgctggaggcagggagagggatggaccagtttgcgatcttggaggccccagggtctggtagggcagccgcacaggcacaygcgtgactatcccaggaggcagcacgggaggcctcatggtggaggctccagtaaggtgctgggcagagtgggcgagaacctgggaactctgtagaatgaa

SEQ ID NO: 231183 - DNA, 201 bp, Homo sapiens
aggtgatggccatggcagcatgaagtcaccccgtggacagagggagacagggttccggagctggtcaggctcccgcgttgccgtggacggagggagacggkgttccggagctggtgaggctccccctgccttgccgtggatggagggagacgatgttccggagctggtcaggctcccgcgttgccgtggacggagggagac

SEQ ID NO: 231184 - DNA, 201 bp, Homo sapiens
caggtgatggccatggcagcatgaagtcaccccgtggacagagggagacagggttccggagctggtcaggctcccgcgttgccgtggacggagggagacgrggttccggagctggtgaggctccccctgccttgccgtggatggagggagacgatgttccggagctggtcaggctcccgcgttgccgtggacggagggaga

SEQ ID NO: 231185 - DNA, 201 bp, Homo sapiens
ccacccccaacccaggtgatggccatggcagcatgaagtcaccccgtggacagagggagacagggttccggagctggtcaggctcccgcgttgccgtggayggagggagacggggttccggagctggtgaggctccccctgccttgccgtggatggagggagacgatgttccggagctggtcaggctcccgcgttgccgtg

SEQ ID NO: 231186 - DNA, 201 bp, Homo sapiens
attccttgaggcagcccgtgccagggatggtttctcaggctgcctaaccccatcgtgcgtcctcacacatgtctcccagcccaggcctggcatggctgcaygcttgctctgggaagctccatgcgctctatgagaagtgcgtggagatggcttctgatggcctcatcacagaaactcaacaggccgcgcattcctggtgta

SEQ ID NO: 231187 - DNA, 201 bp, Homo sapiens
cggatccgcagggccggcgctcatgacctgtgcagcgtcaacaccgccaacccaccgtccagcagtgcaagtcaggcagctcagcctgtgctccatgttayggccacacctgctaccccgccaacgtcaacagcagtggtcagagagatctaatataaatgtatcatttggcattcactctggaaggaagctcaccaatgg

SEQ ID NO: 231188 - DNA, 201 bp, Homo sapiens
cacctcaccccgcggaggatggcacccggagctgcagctggaaaaaacagaggccgtcagctttgggcgagtgagagcttcagagggccctgagccccacrgtgatcacgcattcaaaatgtttgctgcactcagctacataaatattacagggaaagagaaagtggagggcaggggagaggcagcctcaccacagccccg

SEQ ID NO: 231189 - DNA, 201 bp, Homo sapiens
aaaaagacataagtaaaagtaggtaaagatattagaaaaaggggaaaagcagatggttagttcactggaatctgtgccacaggcgcctgtaagcaggaggygtccctgcccaggagctggtcgtgctcacggcgtttggtggaaggaagatgctcctggctgggggaccccctgtggatctctgtggagattgtggggcct

SEQ ID NO: 231190 - DNA, 201 bp, Homo sapiens
ggaccagatggattcacagctgaattataccagacactcaaagaattggtaccaattctactgaaactattccaaaggatcagggcagagagaatcctccmtaactaattctatgaagccagtatcactctgacactaaaatcagggataaaataatgaacaaaagcaaactatagaccaatatccctgatgaacatagag

SEQ ID NO: 231191 - DNA, 201 bp, Homo sapiens
aagatattagaaaaaggggaaaagcagatggttagttcactggaatctgtgccacaggcgcctgtaagcaggaggcgtccctgcccaggagctggtcgtgytcacggcgtttggtggaaggaagatgctcctggctgggggaccccctgtggatctctgtggagattgtggggcctgggggaccccctgtggatctctgtg

SEQ ID NO: 231192 - DNA, 201 bp, Homo sapiens
ccgccctccaagaagcagtgagaatctgaagggttttcctcgctgagaagtgaagttccaaaggctctgcagctcctttcaaggaaaaatacgtaggtgcrtaggtggcaagtgttgtggtctgcaccaggccactcctggagagtgactggagtcaggtgggattcgaccagcgctcgcctttcaagacaggtggatcca

SEQ ID NO: 231193 - DNA, 201 bp, Homo sapiens
aggcctcctgcctccactgcggtgcggtgatgcacttccagctgggagctcagcatggcccgcagggctgcagagctggacgggtcagtccgggcttcgaygatagggtcatgtcgacaggctgcagggccatggcatgggaaacagagtccgaagtagaagagagttcatgaggaaaccccaagcaagctcagatcccag

SEQ ID NO: 231194 - DNA, 201 bp, Homo sapiens
ccaagaagcagtgagaatctgaagggttttcctcgctgagaagtgaagttccaaaggctctgcagctcctttcaaggaaaaatacgtaggtgcataggtgscaagtgttgtggtctgcaccaggccactcctggagagtgactggagtcaggtgggattcgaccagcgctcgcctttcaagacaggtggatccaaatcccc

SEQ ID NO: 231195 - DNA, 201 bp, Homo sapiens
ccacagccccggagaaccagagtgaggcaaatgtagttttccgggcctcctgacctgccagtctcggaatcccaaatccagagcagcggcagaggacaagsggccgcggggagtgaggggagcgtgctgaggtgggggttggaccgcaggaaccccaccaggctggccgggaacttgcctttcacctcctgcaggtgcctc

SEQ ID NO: 231196 - DNA, 201 bp, Homo sapiens
tttctggtggcatatgttgtggtattcatttagcaaaaatccatttttaaaaccctggacctgtagactgatcaacagatgaaacagtgagctgagctgcygcctgcctttttgtgttgccagagattattatccaccatatgctggaagcctgatggtgagcctccgccccggggctctcaccaacgccgcagcacgcct

SEQ ID NO: 231197 - DNA, 201 bp, Homo sapiens
attgtgtgcgttgtgtcttgtctgtcctccatagcaaccatccccaatcctgacatcggtgattgtgtgcgttgtgtcttgtctgtcctccatagcaaccrtccccaatcctgacatgggtgattgtgtgcgttgtgtcttgtctgtcctccatagcaaccgtccccagtcctgacatcggtgattgtgtgcattgtgtct

SEQ ID NO: 231198 - DNA, 201 bp, Homo sapiens
gtggaggggcaggtctcggggcttcctgcttggcaccactgccggttaaccccttcagcaggctcgtgtggcccacaggcctcgctctggggtgttcaccrtctgaccaggagagttttgttccgggtgaggatgcaccctttgtgtttaccgaggattataaatcagggaaatttcaaaacatgatggggctggcctcca

SEQ ID NO: 231199 - DNA, 201 bp, Homo sapiens
tgatttttacatctcactcattcttgggctagaaaagtctggttttccacgttttatgcgattccagattcctgtgtggcatttcagcccagactccagggtgtcttgtattaaatgccggcgagtataattagcattcaagacctgggtgcaaggcgttgcaagtgttaatttaacaggaaattatgtgtcttcagtttg

SEQ ID NO: 231200 - DNA, 201 bp, Homo sapiens
ccctgcaagcaggcgctgtggaggggcaggtctcggggcttcctgcttggcaccactgccggttaaccccttcagcaggctcgtgtggcccacaggcctcrctctggggtgttcaccatctgaccaggagagttttgttccgggtgaggatgcaccctttgtgtttaccgaggattataaatcagggaaatttcaaaacat

SEQ ID NO: 231201 - DNA, 201 bp, Homo sapiens
ggtgcctgatttctcatcagaggagtgccagggtcccctgggcccctctcctaaacccaccgatgaaaggtgctggggtctgttcctgcacattgcaaatygtgcaccgtcagagcgtcatttctgtcaggactgagcttggggagagcgaccacctccagcaacacagcctcacttgttctttcttggtgggttacgtgt

SEQ ID NO: 231202 - DNA, 201 bp, Homo sapiens
ttggttattgagtcacgcaaatgccacaaggtcttactcgtccttacaaactcaaggtcgccaagctgcacacactgggccgctgtggctgaaggtgcathgtcgcggatcataaacagagccatcttcgtgattgttaggctgagtctggatcttaaatagaagattttcctttaagtgaagtggctggaaggattggac

SEQ ID NO: 231203 - DNA, 201 bp, Homo sapiens
atcagcagcgcctccggggactgaaggtgccaatagggaagatggaaaggggtgtgtgcaccgggcgctgttcccaggacacagcctgtccagttctcttygctgttcttacacatccccagtcatatgttaattgttgtgagtgtcctttttttttaaccaaataatctttgcaaggagtaaaattcaaattttctgaag

SEQ ID NO: 231204 - DNA, 201 bp, Homo sapiens
acaatcaaaagagttatgtggttacatctacctttcttcttcattcatatttaattacctgttggttattgagtcacgcaaatgccacaaggtcttactcrtccttacaaactcaaggtcgccaagctgcacacactgggccgctgtggctgaaggtgcattgtcgcggatcataaacagagccatcttcgtgattgttag

SEQ ID NO: 231205 - DNA, 201 bp, Homo sapiens
gcccaacacatctgcacctgacttccgcgtctgcacctcactttcctggttcagtacacagtacttcatgcaaagagccgtttgccaacatcacagcttcyagcatccgatatggaaagaaggcgctttcactccacgcagaccttgcttgtcttttctgtagaatagttgtagaggataagcctgctccatgggtgaggc

SEQ ID NO: 231206 - DNA, 201 bp, Homo sapiens
gagtggccccgtgggtgccttcagggccaggcaggcccatgcccagccctcagtgggatggagcctccgtccagctcctcagagtggggagggaattcacragtgccgccgacatcgcagctaaatctacaatcaaaagagttatgtggttacatctacctttcttcttcattcatatttaattacctgttggttattgag

SEQ ID NO: 231207 - DNA, 201 bp, Homo sapiens
cagtaggtacctggtggttatttaaaggacatgcaatggaaaaaaaaaaaggtaaattcacatggaaaagacagtgaggttttagactcctttgaacatgrataccagacacggagggcaggcaggggctggtggggctgatttatgccaagcctggcaccaagggctggcctcatccttgaatctgacacccatgtgaca

SEQ ID NO: 231208 - DNA, 201 bp, Homo sapiens
gggagtggccccgtgggtgccttcagggccaggcaggcccatgcccagccctcagtgggatggagcctccgtccagctcctcagagtggggagggaattcrcgagtgccgccgacatcgcagctaaatctacaatcaaaagagttatgtggttacatctacctttcttcttcattcatatttaattacctgttggttattg

SEQ ID NO: 231209 - DNA, 201 bp, Homo sapiens
gtagaatgaagcacgtctcctcgtggggccgtgggaatatgaatagctgacagctgaggaatgatttgcctgcattcagggactcctaggtgcctgacccrggagagcaagaggacacaatggtgacctgagccgacatcacagggacgaggagattggggtgtctggagatggagaggctctcagacatgaggagacagg

SEQ ID NO: 231210 - DNA, 201 bp, Homo sapiens
tccgtgtggctgcacaagctggtgatgggggccccactggcaagtggctgctttctcagggactctgagcatcattagtgggggccacatgtggctgacasgtccagctgcctcctggatttatgccttcagcacgcagctgtcccatggggcccctggccagccgtgcctggttcttggccttgtcctcgctggccctac

SEQ ID NO: 231211 - DNA, 201 bp, Homo sapiens
ggacacaatggtgacctgagccgacatcacagggacgaggagattggggtgtctggagatggagaggctctcagacatgaggagacaggggctggcatccrgtccttatccgaaagtacaggattgaaacttgaaggaaatctgggttagagaaacggatacagggtgcagatgctcggatccagtggttggaatcatggg

SEQ ID NO: 231212 - DNA, 201 bp, Homo sapiens
gcacggacgagcccccagtcacatcgtcccatggcaggaccgacggttcccactgccagtgaacactgttcttgaggcttcactctgtctctgtcttctckaagtggacccactaactccacagtagggcagccccatgctcccaaggtgccacagggaatcaagggcaggtggaagggccctgtttgaaattaaagggga

SEQ ID NO: 231213 - DNA, 201 bp, Homo sapiens
agctggagggagaattgcaaggatctatttaaggctcgtatttcatatgttaagtggtgtgatgtcccttggaggcaacctgtggtcagttaaacgtgacwgttatacactatctgtaatttgggcttcttgccctaacgaggatctagacttagatgttgagaaggtgaaggtggagccatgccccagggctctgaggca

SEQ ID NO: 231214 - DNA, 201 bp, Homo sapiens
aggggctgccacgcccaggccccattctggggaaagcaaacccctccctgtaggggaacactctggagctcaactcaggaccgtgagtacgaatgggagcrcctgggcccagagaagccaggccaggggatgggaacttgctgctgcgtcctcgcctcaggggataaccagggaagctcagccctcctgcctgcgccccct

SEQ ID NO: 231215 - DNA, 201 bp, Homo sapiens
agacagcactcctggctccactccacagcttagccaggaggattcaggcaggtccaagcccattaccagacctcgctgtggaaggcggctgacattcgaamccactggatgggcatctaagtctctgacctttgctgatggtcggttcccagagctgcctcccctgccctcaccccaagagacctcctgacctgtgagtat

SEQ ID NO: 231216 - DNA, 201 bp, Homo sapiens
cagaggctgcagtgagccgagatcgcgccactgcactccagcctgggcgacagatcctgtctcaaaaaaaaaaaaaattaattaaaagattaaaaaatttrccctggtttacccagataataaattacagagccgagatcctaacctagaacttcattattcactcattcatggaaactcttttggaagtgccactcttcc

SEQ ID NO: 231217 - DNA, 201 bp, Homo sapiens
ggggcttgcatctggattttaacccatggaactgaggaagaagcctcataactgaacaataaagagaacagaggccacagaggagagtgccagccggtgcyaggagcaggagaatgcccaacacaggaacagccagaggagccgctgggtctcaactctgctggaactcggctgccaggctgagcaactcatcagcgcctc

SEQ ID NO: 231218 - DNA, 201 bp, Homo sapiens
gatggcacatcggggagggcagggcagggcttagatgaggctccacagagaagctggcctttgggcagagcacagggactagcgtgggtctcaggggctgmaggtgagaggaatgagaatggtgcagcctggatgtggggtccagtgtgccaaggacatgccagtaagaggctggcaaggtggaattcagaatcggacttc

SEQ ID NO: 231219 - DNA, 201 bp, Homo sapiens
attggactggatcctttgttttctctagtcacatgattacagtgtgcaatacgtcttgtaaataattcatcatttttacagtcgtatgtaaagtaaatatkattattccatcatcagagttacatgggtgggctctcaagctctctccacaaagcgccctccagcaccataccctcctgctgcctgagctccttggagcta

SEQ ID NO: 231220 - DNA, 201 bp, Homo sapiens
gtggggctattcctcaattctgttatattccacgatgttgtcaataatagaattaaagatgcgtcattgggttgagtaaacttttggaccatgcagtgctvggaggaggaggggtggatggagatgagggtctgagtaaggtctcccgctggcaccagaagagccctgcccaagtgcgaccatcagatggaaacgacctca

SEQ ID NO: 231221 - DNA, 201 bp, Homo sapiens
ccagctgggagctcagcatggcccgcagggctgcagagctggacgggtcagtccgggcttcgatgatagggtcatgtcgacaggctgcagggccatggcaygggaaacagagtccgaagtagaagagagttcatgaggaaaccccaagcaagctcagatcccaggtggggtcctggccgtgtcccaagaacacgaaggcag

SEQ ID NO: 231222 - DNA, 201 bp, Homo sapiens
ccaccccatctcatcaggagttgactcagtcctcctctgtgtagcccctgtggtgccccctgcactgtagggtgaggactgtcctctttcaattcccctaygtccaggctgtgttagccaaccctgtggtgccccctgcaccgtacggtgaggactgtcctctttcaattcccctacgtccaggctgtgttagccaacatt

SEQ ID NO: 231223 - DNA, 201 bp, Homo sapiens
cagctgggagctcagcatggcccgcagggctgcagagctggacgggtcagtccgggcttcgatgatagggtcatgtcgacaggctgcagggccatggcatrggaaacagagtccgaagtagaagagagttcatgaggaaaccccaagcaagctcagatcccaggtggggtcctggccgtgtcccaagaacacgaaggcagg

SEQ ID NO: 231224 - DNA, 201 bp, Homo sapiens
aatgaacttggaaggagttttgacggtggctttactgcgactctccccaggccaggctcgccctggagggggaggtctggtgttaacgcccctcaccgtgygctgactggggccgcgcatccgctgtgttcccgcaggccgaggtagcacctttgctaatgaacttggaaggagttttgatgctagttttactgtgactcc

SEQ ID NO: 231225 - DNA, 201 bp, Homo sapiens
ccagagattattatccaccatatgctggaagcctgatggtgagcctccgccccggggctctcaccaacgccgcagcacgcctgccggtggacaggagcctrtggagggcactgagccagccagtgagcgtgggcaggcagccctgtgctccccactgggctgtgagaggtgcacacacctcagcttacttctctgagggga

SEQ ID NO: 231226 - DNA, 201 bp, Homo sapiens
ccaagcaagctcagatcccaggtggggtcctggccgtgtcccaagaacacgaaggcaggagtcccgcagaggaggggcctgagggttacgggctctgggtrgtttctagggtgattaaatggtcggcggtgaggcgacttcagtgtgccacttcccgggattgtttcagaggccgcactgcacatctgagatggtggagct

SEQ ID NO: 231227 - DNA, 201 bp, Homo sapiens
ccgcagtgctttgtgagtgggtcagagtgtaggataaagtctgcatggctgtggccacagaacttcgggtaggaagggtctgggggcagcgctgagtgacrggaggagacgcccctggaaggtgcatctggagctgccggagcagacaccccctggcctcttagagtgtgtgtggtagaagcacagaaatggcagtgctca

SEQ ID NO: 231228 - DNA, 201 bp, Homo sapiens
gtgtgtgggttcgcataggagcctgtgtgttgattgagattctgccactgaccagcttcggatacttcatttacctctcagtactttggttttctcatctrtaaaactggaaaaaaaaatgcatgaattccacggtttctctgggagtgaaaggaaataaaatatgggaaagtagcttgacaggatggagccgctgctgtc

SEQ ID NO: 231229 - DNA, 201 bp, Homo sapiens
gtcttgtctgtcctccatagcaaccgtccccagtcctgacatcggtgattgtgtgcattgtgtcttgtctgtccccacctagaatgtgagtttcataggargagacttgtctgctttgctgagtttctaagtgtctccgtcggttccctgcacatggtcagtgcacaacaaatgtcagttgaatgcttagtacttaggaga

SEQ ID NO: 231230 - DNA, 201 bp, Homo sapiens
gctcattctccttcgcacttctgtggagcagctgctctgggcccagataatgatctctcgagggcaggacttgtggttttatttgcgtcatgagcctttargaagtttggggtcgtgcatgtagagctgaacgtggggacaccgagaacgtgcaccctgcatcccgactgctgagttcacttctctgcaaagcacaaatcg

SEQ ID NO: 231231 - DNA, 201 bp, Homo sapiens
tcacggacaggctcggctgccggggccctgactccgtggcagaagaagggaggctcccctggcattcaggggcggccgtgggccatttgctctccagaagygagcgtggccctgtgttccctgaggtctcacagggctgccccagatgcacccagaccccggagcaccttgtagcggtgccgatcagagacctagcatggt

SEQ ID NO: 231232 - DNA, 201 bp, Homo sapiens
acaaaaataacccattacatatctgaacattttagagcaggacaagaccagcagtgagcatttgacccacccaaataccaacaaaaataacccattacatrtctgaacattttagagcaggacaggaccagcagtgagcattcgacccacccaaataccaacaaaaataacccattatgcatctgaacattttagagcagg

SEQ ID NO: 231233 - DNA, 201 bp, Homo sapiens
aggctgaagtgaaggcgtctgtgctttctagctggaatcttctcactccagcttcctgggttagcttattttgttttctaatcaacctaacattacacccyaaggcactaggaaatgaagaacaaactaagcccaaagttagtggaaggaaggaaataacaatgattagagaagaaacaagtcaaatagcctagaaaaaca

SEQ ID NO: 231234 - DNA, 201 bp, Homo sapiens
acgtccccggcttagatcacggacaggctcggctgccggggccctgactccgtggcagaagaagggaggctcccctggcattcaggggcggccgtgggccrtttgctctccagaagtgagcgtggccctgtgttccctgaggtctcacagggctgccccagatgcacccagaccccggagcaccttgtagcggtgccgatc

SEQ ID NO: 231235 - DNA, 201 bp, Homo sapiens
ccaggggtgcccggggagctacatctcggttgggtgtctggacagcagactctgtagtcctgaagtccaaatgcagggtcttgggaagacccctcatggggaagtgaagagacgggtttggccgaggagaggttggactcagtgtggtcatgacagaggcctcaggagccctcacccctcctcaggggctggggaccagtg

SEQ ID NO: 231236 - DNA, 201 bp, Homo sapiens
ttttgggaaaaatactcttttctactccaagaaagataaattttattacagatggtgaatcattccataaacttcctattagggctgagtttaattttaarctcgggcaaattctattgctctcaagccaccagggtagtgcatggttgtccaacatggagcttctgctgggcgcccagctgcttgagtcctgccctcttc

SEQ ID NO: 231237 - DNA, 201 bp, Homo sapiens
gccccacagcggcatctgaaccaccagccagggccactggagcccactttcctgtttgtgcagccaatggatgaagttttaaaaatttggcatatttgaaytccattttttaatggggtcaggcaatgtactttgaattatttatcagactgaattcaatcttcaaaaattacagaactctcatctctctgcccaggttaa

SEQ ID NO: 231238 - DNA, 201 bp, Homo sapiens
tggatgcccggagcccggccgcgaggttgtgtggggactcgagaaagggctggtgctctgggcgccgcagggatgggggctgagcgagcggagaggccgcytttttcctactgatcttaggctgttccaagactgttccacatttagaagagtgttgaaaattatttttcacttacatgaaacatgtctatatctttaatt

SEQ ID NO: 231239 - DNA, 201 bp, Homo sapiens
aggtgccagtcactggagacgacgctgcagatgaggcacctcccctgcagcttccccgccctttagtgacacggaaagtggaagccagacatcttggatgyagacgtgggagggagctggggtggaggcagctgggccaccccaccacccctgaaggccggccccacagcggcatctgaaccaccagccagggccactgga

SEQ ID NO: 231240 - DNA, 201 bp, Homo sapiens
agtgtcaacatttctagatctcttaaatgcaagagcttcccgagtgccaggcgggacctgccgcgggtgtggggctgtctgaggtgccagtcactggagasgacgctgcagatgaggcacctcccctgcagcttccccgccctttagtgacacggaaagtggaagccagacatcttggatgtagacgtgggagggagctgg

SEQ ID NO: 231241 - DNA, 201 bp, Homo sapiens
aaagtgtcaacatttctagatctcttaaatgcaagagcttcccgagtgccaggcgggacctgccgcgggtgtggggctgtctgaggtgccagtcactggasacgacgctgcagatgaggcacctcccctgcagcttccccgccctttagtgacacggaaagtggaagccagacatcttggatgtagacgtgggagggagct

SEQ ID NO: 231242 - DNA, 201 bp, Homo sapiens
gaggcagaggctgcagtgagccgagatcgcgccactgcactccagcctgggcgacagatcctgtctcaaaaaaaaaaaaaattaattaaaagattaaaaartttgccctggtttacccagataataaattacagagccgagatcctaacctagaacttcattattcactcattcatggaaactcttttggaagtgccactc

SEQ ID NO: 231243 - DNA, 201 bp, Homo sapiens
atgagcggacctcacatccaaaaggggctgcgatgttggggtgcccctgccttggccagagcagacactgccctctgctcacctgtgtgcaccagagaacrtggtcgagggatgccgggttgataaggggagcccggccaaaccctcagtcacatggagtccgcctgccctgaacctcctcatttctcactgcctgtcctc

SEQ ID NO: 231244 - DNA, 201 bp, Homo sapiens
tcggcttagctcatttagcgaatgtgggcagctccgaagtcccaaccctccgacatctgtaaaacattttctcttctggtcttacctgccacccagtccayggtgagctgcgttacctgtcgtccgtcagttcacgttctgagtgtgcaaactcacactaacatgaacctaaaggaagcagtctttagaaagccatttgac

SEQ ID NO: 231245 - DNA, 201 bp, Homo sapiens
tagaacttttcgaggtaactgttcccattacgagggcgtttctgcagatgtcggcttagctcatttagcgaatgtgggcagctccgaagtcccaaccctcygacatctgtaaaacattttctcttctggtcttacctgccacccagtccatggtgagctgcgttacctgtcgtccgtcagttcacgttctgagtgtgcaaa

SEQ ID NO: 231246 - DNA, 201 bp, Homo sapiens
aagggatcatgttctgattcctgctgcatgataaggaaccgtgttggctttcagcatcctcactccccactcccaggagctgcttctaaccaggctcccctagtgcctgcctgtgcccttcaccagatggaccctgggccagcatttgttggataaatggtggtgaaggacagaatgcgtgatctgcccaagcctttgaat

SEQ ID NO: 231247 - DNA, 201 bp, Homo sapiens
cactcacgcaggtgttcttaaacctggctggtagaggcgtctcctatgggaattatcttccttatttaggagcatgctctgggcccttttggtcatgtgcraaaaagcaaaggcctccgtgggggctgtgaagctctgggcggctgagtcctgggtgcagagaccagcggcagagtctgcgggtgagctgggcagggaggg

SEQ ID NO: 231248 - DNA, 201 bp, Homo sapiens
gcgcctggctactcaggaggctgagagagaggatcacctgagcccgggggattgaggctgcagtgagtcatgatcacacacagcactctagcctgggagakagagtgagaccctgtctcaaaaaaaaaaaaccacttttttttcacccttgtaacatgatttttaaaaagaattatctcttagattttcttctttttgctg

SEQ ID NO: 231249 - DNA, 201 bp, Homo sapiens
tgctttcacatttttatatgagaaacaaatgtaccatgttcttcaagcggtggtaataagagctggtgccagcagaggcagcagtccagggccactgcccrtgcctccgtacccactccaagtcaatcactggacatactttttaacaatcttctttctacgctttgtgaattttggaaatgcttccatacagatttgtta

SEQ ID NO: 231250 - DNA, 201 bp, Homo sapiens
ctctgtgcatgcccaggcctccaccagggctccccataaacatggggagtcctgactctgtctctccggggcctgttgggcgttaccgcgacttttccagkgaatctccctggttctgctcttcctttccgtgtggctgcacaagctggtgatgggggccccactggcaagtggctgctttctcagggactctgagcatca

SEQ ID NO: 231251 - DNA, 201 bp, Homo sapiens
acagagcagctccaggcaccagcaaacatgcggttgatgtctggtttcttttgctttttcaggccctcaaaacacagcgttggcagcgagaggaggtacastcgggagggcggtgctgccctggccaacgccctccgacgccacctgcccttcctggaggccctgtcccaggccccagcctcagacgtgctcgccaggacc

SEQ ID NO: 231252 - DNA, 201 bp, Homo sapiens
gaaggatgggcacatgaacttttctaaatctctacttctgtctgaccacctccactctccatggagatgtggctgagcctaaggtctactttcctcttctwctggagagatagaactgagggtttgatttgggtcacagtcacccctacttggagtaaaatctgcatttgccagctccctttcatctaggtgtggccagtg

SEQ ID NO: 231253 - DNA, 201 bp, Homo sapiens
tttctcctttatggttgattttccttcagattcttacaggtgttcactggccttacgagtcatatatgagaggacaaacatggaagtgcttgatatcccgyctgtgggtggaaggatgggcacatgaacttttctaaatctctacttctgtctgaccacctccactctccatggagatgtggctgagcctaaggtctactt

SEQ ID NO: 231254 - DNA, 201 bp, Homo sapiens
aggccctgtcccaggccccagcctcagacgtgctcgccaggacccatacggcgcaggacagaccccccgctgaggtgacccttccacttcctccccgggcyggggttggcttttccttcagggtgcaggtacctgggcatgtttccttagtcgctggctcctcttggctttgcgcctgtttcccgggccagcgggcatcct

SEQ ID NO: 231255 - DNA, 201 bp, Homo sapiens
ttttctttaaaaatgtgatctaggaaaatttggaaatgaaatgagtgtaaagactttctggttggtttagctttgaaatcaccacaaaatgccctttaggraagtactttgattaaagtgggggtttgccccatcacggtggattgtttcccggtgagaaagttctaggtgccgaaccattgtgttgttgtgatttgtgtt

SEQ ID NO: 231256 - DNA, 201 bp, Homo sapiens
agtggacactgaaacctgactgaggtagactgaggggccatgaacatggctggaattagggggcaccaggtgcaactactgcatccaaggaaagctcctgytccccggcaagcctgccccgggggcagcccagggcagcgtaagggctccatctgcctgtgggcatgagggtctgggcaccaaaacacaaggtgatgccct

SEQ ID NO: 231257 - DNA, 201 bp, Homo sapiens
tttctttaaaaatgtgatctaggaaaatttggaaatgaaatgagtgtaaagactttctggttggtttagctttgaaatcaccacaaaatgccctttagggmagtactttgattaaagtgggggtttgccccatcacggtggattgtttcccggtgagaaagttctaggtgccgaaccattgtgttgttgtgatttgtgttt

SEQ ID NO: 231258 - DNA, 201 bp, Homo sapiens
ctggagtagaagctggttcagggagaagccgtgagctcagtgggggacaggtggccagccggggaaaggccaggggacaccaggggaggcattcagccagygctgtgacaggagagcctgcagctcaggccaggccagaccagagctgtccccgtggacattctggtgccagagtgtgggggcagaggccaggagaggcgt

SEQ ID NO: 231259 - DNA, 201 bp, Homo sapiens
gggcctaaccctagagggtctggtccacttaacactattttaaacaggctaaatttaaagtttttattcattaactgagagcaactaagcacgtctggtgygccagacatcctgctggattttgtggatgcagaaggtggatttcatgcagctctgtccttgggtcagaggctcctccacccactgctctggggccagggg

SEQ ID NO: 231260 - DNA, 201 bp, Homo sapiens
tgacctggggggccctcatgttgccaacctctgctaaagcatttgtccgcctcagccctgataatgcacgcacatcattagtgcttgtacagaaccccccmgccccgacccctgtgtgtgtgagtcagagcctgggcttgggaccacagggggcccacgttgtgctcctggggagtaagagagcttttcttaaaatagttt

SEQ ID NO: 231261 - DNA, 201 bp, Homo sapiens
gccacgtgtgaagctcctcatggagtgcccagtcagcaatagctgtaaccgtaactatcgttgataaaataatctttaaaaaatgaaatagaaattaggtygagagtctgaaccaggctcagtggaggtctccgactctgatgagaggaatcagagggcgccaggacactggcaaacatattccctccgcacacctgtgcc

SEQ ID NO: 231262 - DNA, 201 bp, Homo sapiens
attaacttttctcctttatggttgattttccttcagattcttacaggtgttcactggccttacgagtcatatatgagaggacaaacatggaagtgcttgayatcccgtctgtgggtggaaggatgggcacatgaacttttctaaatctctacttctgtctgaccacctccactctccatggagatgtggctgagcctaagg

SEQ ID NO: 231263 - DNA, 201 bp, Homo sapiens
cattaacttttctcctttatggttgattttccttcagattcttacaggtgttcactggccttacgagtcatatatgagaggacaaacatggaagtgcttgrtatcccgtctgtgggtggaaggatgggcacatgaacttttctaaatctctacttctgtctgaccacctccactctccatggagatgtggctgagcctaag

SEQ ID NO: 231264 - DNA, 201 bp, Homo sapiens
tttattgatttcaaataaatttactgtttgtggagctatagagcaggagacttttatcaagtaggagagtcccgtctagatagtaaacaattaccacttgytcctaagggtcttggaatatgggcctgtattagtccattcgtatactgctatgaagaaatacctgagactgagatggcctgggcaggctgtcctgcagca

SEQ ID NO: 231265 - DNA, 201 bp, Homo sapiens
cattggataaaaaatcatgagataccgatacacacctatgacagcagccaaacgctggaacatggacgcctccaagtgtcacccagcgctgccgaggacgygggaacacggacgccacccggcgctgctgaggatgcgggcgacgggggcgccatcacagctgctgggagtgaaaaatggcgtggccaccgttaggctgat

SEQ ID NO: 231266 - DNA, 201 bp, Homo sapiens
tcaatgatgttcaactccatgcttagtgatgccttcagtaaatatttattattccaggcactgtgctgggtagcacaaagaggaataaactcctgtccatrttctcaacaattttataatctagagaggcaaataaatagggaatagatgaatgaaacaaaactaaattgagggagtctttttaaaaaattgagataaaat

SEQ ID NO: 231267 - DNA, 201 bp, Homo sapiens
gtgtctgagggaggagatgccaggaggctgcagtggcccgcagctgggcctggcacaaagtaggcaggcgtcggctgcttatctgggcctggctgggtccrgtgcaggcgtggctcggcctggagagaatcagcctctgcctgtcactgttgtgaaatttttgttgcaggtggtccctgcaggggtgatgagaagataatt

SEQ ID NO: 231268 - DNA, 201 bp, Homo sapiens
atgttaatctgtgtttgcagctgctccccagcactcccatcactgcctcagctccaccttggatcatgaggcattagattctcgtacagagtgtgcagcttctgtccctcctgtgtgcagttcacaatggggtttgcactcctgtaaaatctaacaccactgctgatctgacaggcagcggaactcaggcgggaatgctcg

SEQ ID NO: 231269 - DNA, 201 bp, Homo sapiens
gtttagtgttcctgtttgccaggaaaatcacaagggattatgcgattgtgaatgaactaagggtcaccagtgcaggggctgcgggaaactgatgtgtgacrtgctctccactcatcctggctccattaccacactgaagtggcatccatgagtttggaaatcactaaggcaaagaagtaagggctgaactcctccaaatgt

SEQ ID NO: 231270 - DNA, 201 bp, Homo sapiens
tcacagaagccggtcttagacatgggctgttccagagagaagatgctcattaaaattctgtgtttccttccaatgtctttattttcacaactgtttcctgstttcaatctgacgttatcaggagcagagcaaatgaagaaaatgaatgtctttagtcttaggggagaggcagtccctaagaaaaagggaggcaggaggtcg

SEQ ID NO: 231271 - DNA, 201 bp, Homo sapiens
actacgaggtgcaccccgtaaataagcctggagctccacagactgggccatcttgttggtcgttcagagacttgtcttacaatcagtacaaactgattttyatatctttactttctatgtctatggaagatgcatttaatatgcaatctttatattaatacacatcatgacttgatatttaaaagaattagagatggtcat

SEQ ID NO: 231272 - DNA, 201 bp, Homo sapiens
aatgatcacttttgtttggagatttggacttgacatttcaggccattagctcaccatccatggcctgttatggaaacccactcctgcatccatctgtattmagattgcatttaataaaaaagccatgaattagtgaaaaaccagaaactgagttgagcccatctttccatatgtttgcctgctggcggtctggagctgagt

SEQ ID NO: 231273 - DNA, 201 bp, Homo sapiens
tgttgcccacaccagaccagcccgtgtggggacagccttggcttcccaaaggccaggtctgtccaatagacccacagcacccaccggggacctttacatgytcgataagaatgaatcgatacattgaactaagatcttgatgtggtaagagcaggtctgtgggcagggggcggggggcgggggagcatgtaaaccctcttg

SEQ ID NO: 231274 - DNA, 201 bp, Homo sapiens
tccccgggcctggccgggccaagctgagctgacagggatgccgcagccccctggagtccagtccccccaggacccagagagtgcttcagctgacagggatrccacagccccctggagtccagtccccccaggacccagagagtgcttcagctgacagggatgccgcagccccctggagtccagtccccccaggacccagag

SEQ ID NO: 231275 - DNA, 201 bp, Homo sapiens
ccttgttgcccacaccagaccagcccgtgtggggacagccttggcttcccaaaggccaggtctgtccaatagacccacagcacccaccggggacctttacrtgctcgataagaatgaatcgatacattgaactaagatcttgatgtggtaagagcaggtctgtgggcagggggcggggggcgggggagcatgtaaaccctc

SEQ ID NO: 231276 - DNA, 201 bp, Homo sapiens
gtctcccgcacggctccatttgccttctcttgcatgggctcttggacattgctttggaaagagaaagaaacgtcagaatgaggttcttcttttttctgcaractctttgattgtggtaccagtttctgtatctcagtccacagtgcaaaccgcccccggcctcccctgtggcttatattctgatagaatgagaagccaccc

SEQ ID NO: 231277 - DNA, 201 bp, Homo sapiens
ttatcccttctgccgcctctgcggtgacgtctcgtcaccatccctccagtgtagggtgacttcctcattgtgttggatggaggcaggcctgggtgcagagygggccttgttgcccacaccagaccagcccgtgtggggacagccttggcttcccaaaggccaggtctgtccaatagacccacagcacccaccggggacctt

SEQ ID NO: 231278 - DNA, 201 bp, Homo sapiens
ccgcctctgcggtgacgtctcgtcaccatccctccagtgtagggtgacttcctcattgtgttggatggaggcaggcctgggtgcagagcgggccttgttgyccacaccagaccagcccgtgtggggacagccttggcttcccaaaggccaggtctgtccaatagacccacagcacccaccggggacctttacatgctcgat

SEQ ID NO: 231279 - DNA, 201 bp, Homo sapiens
gtgcgtcacaggctggaactgggggctcgaagccccagggcgttctatgcagcagttggtttgctttgggtctgatcatgccgagcgtctgactgcagctrtgtgttcacctgccctctccaccggcatttctagaacttttcgaggtaactgttcccattacgagggcgtttctgcagatgtcggcttagctcatttagc

SEQ ID NO: 231280 - DNA, 201 bp, Homo sapiens
gcttctgagcctttgtttgcccggctccctccgttgcaccgccccccctcccactttatccctgcagaccctcccatctgtccagccctgtgcagacccchgtcccctgagcttccatctcagcccggggtggcccgtcccatcccgaacaccagggccctattcatccctacctcccctttatcccttctgccgcctctg

SEQ ID NO: 231281 - DNA, 201 bp, Homo sapiens
agcctcttgtccgaatcccacagggcagcggcttggagactttgacagctcttcatgttgccgccatctacagcaggattccatctccttcaggaaacttmgccctggctctgcagcctccgcctggatgagaccatccagcaccattgcctttaagtcagcagattcagcagatggtggtggccaccgcgtcttcccagg

SEQ ID NO: 231282 - DNA, 201 bp, Homo sapiens
aggaaaacaaaggggaaagtagatccctatagaatgtggatttttcccacaagagactttgcagggcaatttccaggtattgcaaggaaatatattttagrgttaaatattttgattttttccctttgtctcataatgttctgccagagtcagactgaaaagtcagtcacgatatatagggtcaaataaaacccatctgat

SEQ ID NO: 231283 - DNA, 201 bp, Homo sapiens
tctgagggtggatttccaggctccccttcctcgccccgggcatgcgtctgtcttgctcaggccttcccgttcccagtgggcccctcgcttctccagggggkgttttcagacacatcttgagatttcaaatcaaccccaagtgaggcggcagagctgacaccccacgtgcgacccgtggcccctgcaccccagtcagcggtg

SEQ ID NO: 231284 - DNA, 201 bp, Homo sapiens
gcttttctgtgttatcttggaaatcactgagtttccttaaaactgctattttgaattcttggtccgagaactcacatattgccatcttattagggccaatygctagttccttactttgtccatttgagaaggccatggtttcccatttgctgctgtttcttgttgatgtgtgtctgtgtccttgcactgaaggattattta

SEQ ID NO: 231285 - DNA, 201 bp, Homo sapiens
gctggggactatagtcccacctcccccttttatctctggctgtcctcagggatgtttcccttcacacatttgcagcgcttcccatgggttgaagcaggaasaggtctccagccagggcccccaagaggttggagaagctgattgtccacctcaccctcactttttccagcatagaagctatgagttgaggggaaatttccc

SEQ ID NO: 231286 - DNA, 201 bp, Homo sapiens
ctttgagattggaattttctccttccttcctcccttccttccttcctttttctttcctctttctttcctcttctttttttttttttttttttttttttgggctcttgcttcatcacctaggccggagtgcagtggcacgatcttggctcactacagcctccacctcttgggttcaagcaattctcttgcctcagcctcctg

SEQ ID NO: 231287 - DNA, 201 bp, Homo sapiens
ataaaatctagatcctgcaatgtgctgaccaccgcctttccccgacacttcttcctcgccacctggggtcttcccgtcacacgtcaggggctcctcctcakccccatttcaaccctgaccacgttcatattttgaaatcagcctctcatttacagctttcctgtaggcaaaataaaatgctaatagatttcatttctgatt

SEQ ID NO: 231288 - DNA, 201 bp, Homo sapiens
tgcacatcaaccagggtgctgtccattctttccacaatgatcatcgccggatccgcagggccggcgctcatgacctgtgcagcgtcaacaccgccaacccrccgtccagcagtgcaagtcaggcagctcagcctgtgctccatgttacggccacacctgctaccccgccaacgtcaacagcagtggtcagagagatctaat

SEQ ID NO: 231289 - DNA, 201 bp, Homo sapiens
tgctttgagattggaattttctccttccttcctcccttccttccttcctttttctttcctctttctttcctcttctttttttttttttttttttttttttkggctcttgcttcatcacctaggccggagtgcagtggcacgatcttggctcactacagcctccacctcttgggttcaagcaattctcttgcctcagcctcc

SEQ ID NO: 231290 - DNA, 201 bp, Homo sapiens
attaccgcgtttgaaatgaataccgcctctctctcacccttgaagctctctcttctcctggctcctgagcacatgaccttgggctgtctgtctttattgtygattttgctcctctgctcagcacctcttttttattgtttttctcctaaaacagatggaggatctatcccatcctctttactttgacagattttctactgt

SEQ ID NO: 231291 - DNA, 201 bp, Homo sapiens
gaaattttaaaaagtgagacagaagagaataaatatgatataataggacacagtgatacgtgagaggctcccacgcgattagggtaagtgctgtgttgtgrgacttccccaggtctcacttcaagatgcatatcttactcttggataccaccggaaaaaaaaaaaaaaaaaagggaagcgctgtcttcgttcctcatatgc

SEQ ID NO: 231292 - DNA, 201 bp, Homo sapiens
tgaggttttcctcccaccaccttctgccatggctccaagggggaggccttccagagccacatggaacaggggtgctctctgctgtgttagcacaatggggrggccttccagagccacatggaacaggcgtgctgtccgctgtgtaagcacaatggggaggccttccagagctacatggaacgggggtgctgtccgctgtgt

SEQ ID NO: 231293 - DNA, 201 bp, Homo sapiens
tgtttttaatgtttagttttgagagttctgtgtatattcctgatactagtcctttgtcagatacgtggtttgccaatatttctccaactctgcgctcattstttcagctcttaagagggcctttccacagagcaaaagtttttaattttgatgaaggccaatttgtcaatttttctttttatggaagatgtttgatgtcaa

SEQ ID NO: 231294 - DNA, 201 bp, Homo sapiens
gccagctgcatttgctggaaagatttttactttgagaattgggttgaaatttgcctctgtctgactaggaattggtagggcacctaaaggcacctcactgycactgcccaacccctgaggttttcctcccaccaccttctgccatggctccaagggggaggccttccagagccacatggaacaggggtgctctctgctgtg

SEQ ID NO: 231295 - DNA, 201 bp, Homo sapiens
ctggggagagttgacatcattattatgttgaatcttctgatctaccaacatggtatgtctgtcatttattttgatctttggtttctttcatcaccattgtktgtgtttcagcacataggtcctgtacgtggtttgttaaatttacacctaggtattctttgagtggttttaaatagtattttaatttcagttttcatgcct

SEQ ID NO: 231296 - DNA, 201 bp, Homo sapiens
aggtaaattttgttgcttattgaaaacttcctgtgtgtatgacatttttctaagtgcagtagcagaaagaggcagtggaaaggaattgaggtcaatgttgagagcacaactgaagttgctcatgccttatcctccctggaaagccttcatcagctcctgccaagctggccttggcccccttcctgctcctaaagcagtttt

SEQ ID NO: 231297 - DNA, 201 bp, Homo sapiens
tacaagaacttattaggtttgagaggtttttatattttttgtagagtccttggggctttctgtgtagataatcaggaaataggacataggtacagtttaayttcttcctttgtgtctgcatatcttttattttttttttatcttgccctattgcactggctggaacttccagctttatgttgaataagattggtgagagca

SEQ ID NO: 231298 - DNA, 201 bp, Homo sapiens
ccatcatccctggtattttacctgtgaattactgttagggaaaatatatcagtagcagagatactgattctgtaatttttcctaaataggcacttactccrgatgaaaccacaaagcctaaataatacattggcatgcgaagctcaccgagctccttccctccgcgccgaccccggtttccatctaaatcgatatctgtgc

SEQ ID NO: 231299 - DNA, 201 bp, Homo sapiens
gaggaaggtttgtgtgaagactccctccttcgtcaggggaggaagcgtttgcatctgagtgggcagcattcctttttggcatttcttccaccctaaatagragtcacctttcacggtaagtgaatttgactgtcaaaaggtggatggttctcccaggaacagtgactcagaaactcctcctgctcttgcatcagacgcttc

SEQ ID NO: 231300 - DNA, 201 bp, Homo sapiens
cctttcacggtaagtgaatttgactgtcaaaaggtggatggttctcccaggaacagtgactcagaaactcctcctgctcttgcatcagacgcttcttaccrtagatgtgcctggcacgaccatcgggacgacactttcaagatctaccctgacgtggccatttacagattcctcatgagatcttcactgcacggtccaggg

SEQ ID NO: 231301 - DNA, 201 bp, Homo sapiens
tctgtgagtgggaggggaaatcggtggggtggcaggaggccgcccgggacaaggttgcaggggcaggtgcgtggcgtgctcagagctcctgggtgaaccarggagaatggggaaggccttgaggagcctggcgacggtgaacccggcaggtccatggtctccactgggagatggggaggacccgctgggcaggggagacag

SEQ ID NO: 231302 - DNA, 201 bp, Homo sapiens
gctggtgccaaatcccatggtttctgatgtgaaggaaatcggaaggaaacctgcagaatttagccaggatgatgagggtaaagggtacgtgtcgtccccartgtgggaagaacctgtttttgtttgcctgtgtgttcagtatagatcatcagtatgtggggtcagccggcttggtttctgcaggctccatggaatcttcta

SEQ ID NO: 231303 - DNA, 201 bp, Homo sapiens
agaatcagcctctgcctgtcactgttgtgaaatttttgttgcaggtggtccctgcaggggtgatgagaagataatttttaaaattatgataatttaaaaaytatatatggcaacatggtaggaccagggaattcccacagcaccggcccactgctgcccttctttgactgtgaagtgagggctcttggtcagaagcagtgc

SEQ ID NO: 231304 - DNA, 201 bp, Homo sapiens
tgcttctgggtgagaaggtttaattctgtaaggatatgaattctctctgaataaacctatacatgtaagttatcacaacagcatattaacaattttttttkaaattaaacgaactagctttaaagtccaggttcagacacaaacatgagactaaacagaaaagttatgaaaaagagaagttgtgtgtggggcgttgagtct

SEQ ID NO: 231305 - DNA, 201 bp, Homo sapiens
gtcccatctgtcagggaatcttcagatgtggtcgagattacagtttcacagatgccgtgtgtaagcttgaagccctgtggctgagctctctgtcctcagcrttgtttcgggggtacatgagtgctgcttgtgttaatgaggactttctcttaattttagaaaaccattcaaccaaaatgttgaaccggtcacaaatatgaa

SEQ ID NO: 231306 - DNA, 201 bp, Homo sapiens
ccagggatgcttgcccgggcctcagcatgcagagtttctattgaggtctcagtgtgcagccagccacacgcagagcattgctgaccagggacgctcacccrggcctcagagtgcagagtttctattgaggtctcagtgtgcagccagccacacgcagagcattgctgggcagggatgctcacctgggcctcagcatgcaga

SEQ ID NO: 231307 - DNA, 201 bp, Homo sapiens
cgggtgatgacagggatggcacatgaaaatcagcccttattctgagcaaaaagaaaattaggaaggtgcaaaagtttcttgtaaaaaaaacagctgcccgytctctacttccacgtcaggcctgggctgctctgaaggcggatgacttgtttcttactgactggctattttaaattgtctgactatgaaactgaaaagcaa

SEQ ID NO: 231308 - DNA, 201 bp, Homo sapiens
aattttagaaaaccattcaaccaaaatgttgaaccggtcacaaatatgaattgatcacctcctgcgtgggtgaggccgtggcagaaatcatcatgcatgcytcaaagagcccatcctgtgctcgggaagaaggaaaacatctataaaacgtctggtgtgccatttgagcactaaatatcaggcactcagggcccttctgga

SEQ ID NO: 231309 - DNA, 201 bp, Homo sapiens
ttgcaaatagggttttggctgacaggcaggctcctgtgtgcacacacaaagcctaccccagaaaagtagagtctgcttctccgaattcaggccactctctkgcagctgaagcctctgctactgctccctgtcagcagctcccagctcttacaccccaagtggcccaggcctcagctacgatgcaactcgactcagccctgt

SEQ ID NO: 231310 - DNA, 201 bp, Homo sapiens
cagcaggggtgggggttccagctgctggcgggactatttcttgagtgctgtttggatgaatattcacttaatattgtttgctatacgatgcgtttttgtgygcatttctctattatatctatgaggttaaaaaaagcaagaatgaatctcagttgtgtttcaccagtgtgtgtgtatgtgtccttgtgtgtgggaagacat

SEQ ID NO: 231311 - DNA, 201 bp, Homo sapiens
ggaagaaggaaaacatctataaaacgtctggtgtgccatttgagcactaaatatcaggcactcagggcccttctggaagactgtggagacagggagaatcrgccactctcacagtgctcactcgggagtagggctttgagagggggtagaactcagcactcatgagcgagtggaacatcgttggcaggagagctgcagtcc

SEQ ID NO: 231312 - DNA, 201 bp, Homo sapiens
aagggcttgcacatggaggagctggccctggctgggagaatgagcaaaaatcccaaggaggaagaccagaggttgggactgaggtatcatgagcagagatrtctgaatcaaaaatacatgtgaggttgaaaggattttgggtgcaaaatccacagcctgggtgtcatatgctgccttgggatgagcctgtggtggagggtg

SEQ ID NO: 231313 - DNA, 201 bp, Homo sapiens
gcaggaggctgtgatgctggtgcagtcggctgccggggcaggtgaaatccagcagaaggccctgtaccctggatgtgcaggagggggttttgctgacggtktgacggtcatggagcacactgtgggcgtcgctgagtttcccaagtattactcttccctgcacatgggtttctgtcttcactgccccaggccccgtggggt

SEQ ID NO: 231314 - DNA, 201 bp, Homo sapiens
agtttcccaagtattactcttccctgcacatgggtttctgtcttcactgccccaggccccgtggggttagagactgacgggaggacggcaggatggctggyggctgtggccaggacacgtatgtcctcctgtggtagccgtcctagcccactggagatgagctgtgctggaggggagtcccaggggagccgcgtctgctgg

SEQ ID NO: 231315 - DNA, 201 bp, Homo sapiens
aggacttggagaatcgggggctcatggccacatggggagtgaatgcctgtgtgtggaccagaggcctggccgtccacctggggcatctgtgcccccgccayacttcccaattcagctggcgtagcagcaggagcattcttgtgcctgggccagatgcttccgagcactgggggctggttgaccgaggagaagtcagctctg

SEQ ID NO: 231316 - DNA, 201 bp, Homo sapiens
tagcataaaattaaccacttaaaaatgaacaattcagtggcacttggtacattcacaacattgtgcaactgccacctgtatgtaacattttcaccatcccraaatgcatcattttactttcaactttggatcctacgtgagtccctaaccgacagcatatatcccttatcttacatacaaagtataccttatcttaaatgc

SEQ ID NO: 231317 - DNA, 201 bp, Homo sapiens
tcagtggcacttggtacattcacaacattgtgcaactgccacctgtatgtaacattttcaccatcccaaaatgcatcattttactttcaactttggatcckacgtgagtccctaaccgacagcatatatcccttatcttacatacaaagtataccttatcttaaatgcttgggacagaggtatttcagattttggatcttt

SEQ ID NO: 231318 - DNA, 201 bp, Homo sapiens
acagcatatatcccttatcttacatacaaagtataccttatcttaaatgcttgggacagaggtatttcagattttggatcttttcaaattttggaacattygtggtcatctcatatatgcagatgattggttctaagacacccgccccctgcaatgtgtaccaaaattcacgcatactcaagtctcaaagttggccctgca

SEQ ID NO: 231319 - DNA, 201 bp, Homo sapiens
ttggattgatcttatgccatttaatagctaatcaattaaaagagtttacaagtgataagtgctgggactattctcacattgatgtataactggactgagtrcctctgaggagagcggaagctggatttgccctctgggtaggcgtttcgtcgctttcagcttttttggtgaagacgatgatgcaggagagtggacaataac

SEQ ID NO: 231320 - DNA, 201 bp, Homo sapiens
cctgcaacctcagcacaggagtctgtctccatcttgacaggcattgctgaagatgtaagtgctcccccagaacatcggggtgtgtaggccctccacgatgygctgcttggacggcggagaccgccgttttctcttggcagtctggcgctgagtggatttgcccaaagtcacagatcaacttgctgttgcagcaggggccgg

SEQ ID NO: 231321 - DNA, 201 bp, Homo sapiens
gaatgcgcctctgtggtgaatggcattatctgtggtgaaatgcattagcctgtcaaaaatggcaaagcccagctcttaacacaacacgtacaccggcatamaaggaggcaagacgctgcgcggggtggtgggatgaggaatgatggctggagccgccacggcatgcaggagctgggtgttacaagaggagaaagcttcggg

SEQ ID NO: 231322 - DNA, 201 bp, Homo sapiens
aacataaaacagaagcatgctgctcgttggggtacagcaagccactccccccatcagacagtagtcattagatcagacttaattaaaatcacagagaccaygcagtgagatatttggaaataaaaaaaaaattggaaagtctgagacataaaatgtggagggctgaattctgtggcttcattttggcactaggccattcct

SEQ ID NO: 231323 - DNA, 201 bp, Homo sapiens
aaaaatccaattttattgacttttattcttttttttcaaattggcatagcctgtcatatatgcatatatgtgtgtatatatatatttatacacacatgtayacacacacacactaaggataatgtgaagacatggaagaattgtgatttttggtaccagtatactttatgcattcttttttcatgtaggtgtcctatttct

SEQ ID NO: 231324 - DNA, 201 bp, Homo sapiens
gggatggaacacctgtggtctcgggtttatcggccatggttcctatctgggaaactggcgtgggccctgattggctatcgtcaccctctcctcgctttatmtctggagagcagcaggagtgtgcagtggctttgaagcctttctttgtctctactgaccatgcaaattacacaccaactacttgtaagcttgagctcctgt

SEQ ID NO: 231325 - DNA, 201 bp, Homo sapiens
agggtgtagagctgcgtcctccctggggttccaaaaggtgaatcctcatgtcctctgttaaacagcagctgggttagtgtcctggcaaggcacttcccgcrtgacctggggggccctcatgttgccaacctctgctaaagcatttgtccgcctcagccctgataatgcacgcacatcattagtgcttgtacagaacccccc

SEQ ID NO: 231326 - DNA, 201 bp, Homo sapiens
gattctataatcacagtgaggttgtggatgataactctcatcactgggttacaaggaaaatggaacaatttgatcttatgctttatttcatggggacatgytggaactactcaattcattgtcttaaagcttctgaaaaataaaaagattattgtgcaaggtaggtgagaggtaggtaacctcggagagagagaatggtag

SEQ ID NO: 231327 - DNA, 201 bp, Homo sapiens
ctaattttttccttcctttttttcacctaaatttttcctgccaaaaaaaggttttacttgaatccatctaagccattggagatccatgttgctgtcagggkcacttggccgtgttatccttgtccacactgtgggcccgtgtttcttccctgcgcagtcacatacctggtcaagtttgttcctaggtatctgaaaattttt

SEQ ID NO: 231328 - DNA, 201 bp, Homo sapiens
cttgggttttctatcacagccatgagtcccctgtgaagtgtaaaaatctgtttgaaaagttttttaaaatattgcaaacataaaacaaatttcaggaaagrtgtcttctcgcattaatgtatttatttctggctcactgaacctgtgtactttgctgattctataatcacagtgaggttgtggatgataactctcatcact

SEQ ID NO: 231329 - DNA, 201 bp, Homo sapiens
tttccaactcatttgccactctaaagcccactgatagggttttcatatgtgtctgcaagcaattgattgattgtgatctctgtgcagtcagacctctctgytcatgttaatctgtgtttgcagctgctccccagcactcccatcactgcctcagctccaccttggatcatgaggcattagattctcgtacagagtgtgcag

SEQ ID NO: 231330 - DNA, 201 bp, Homo sapiens
ctttgaagttagctgagtaacgtgtcaaggactcagacaattgcggttacaaggaaaggatatttactttggtaaatgaagcaggtattaattcattaacrtatccatatctcacttgggttttctatcacagccatgagtcccctgtgaagtgtaaaaatctgtttgaaaagttttttaaaatattgcaaacataaaaca

SEQ ID NO: 231331 - DNA, 201 bp, Homo sapiens
tgagtgaaataagccagtcacaaaaggacaaatactgaatgattccacgcatgtgacgtactaaagatagtcaagttcatagagacagaaggtagagtgayggggccaggggctgggggacagttggggtgtcagtgtttaattggtggagtttcagtttgggacgatggaagagttctgggaatagacggtggtgatgac

SEQ ID NO: 231332 - DNA, 201 bp, Homo sapiens
ttatgctgagtgaaataagccagtcacaaaaggacaaatactgaatgattccacgcatgtgacgtactaaagatagtcaagttcatagagacagaaggtaragtgatggggccaggggctgggggacagttggggtgtcagtgtttaattggtggagtttcagtttgggacgatggaagagttctgggaatagacggtggt

SEQ ID NO: 231333 - DNA, 201 bp, Homo sapiens
acatgatgcgttacaggtttacttttggaaatgtgggtacagccagggtggccccagtcagacccaaacaagtctcttggcctaagggaccctgggcctaycttcctctgagtgacaaggacactcagcgtgcacagccacaccaggtggctcccaagccctggcatctatctccataggggtgggatggcccttaaggaa

SEQ ID NO: 231334 - DNA, 201 bp, Homo sapiens
gaagaagccacgtgaggacacaggaggagacggccgcccgccagcctgcgcagtctcaggagaaaccgaagcccggacctcagacttcagcccccagaacygtgacggagtacatttctgttgtttgagccgctcaggctgtgaggcttgttagggcagccctagggagactagcaggcttcccgccagaggaccacacag

SEQ ID NO: 231335 - DNA, 201 bp, Homo sapiens
tcctgccaggtccatgctgctgtaagccagctgcatttgctggaaagatttttactttgagaattgggttgaaatttgcctctgtctgactaggaattggyagggcacctaaaggcacctcactgccactgcccaacccctgaggttttcctcccaccaccttctgccatggctccaagggggaggccttccagagccaca

SEQ ID NO: 231336 - DNA, 201 bp, Homo sapiens
ggcaaggccagagctgtacgtcccagcccctgcgtgtgcacctcgtgcagcagtgtggcaaggccctgacagtgccttcaaggggtgcttctggcaggccycgggagctgtgtgatgaggaggagacttgggagagcgcgggttaggtcctggcactgtagccgcctcctcttgctgatttcaggggtcagtgttttcagg

SEQ ID NO: 231337 - DNA, 201 bp, Homo sapiens
tcacctgcggccgctgcgctcttcacaggacacaactggctccaaaacagccacacacggtccaggaggactggcttccctgtggctctgtggcttggaargcccatgctgcgctgtcatggtggggggacggcactcgagctgggctccatgctgtcctctgtgtcgcgatggaagcgagtctgcatgctgggcatgcac

SEQ ID NO: 231338 - DNA, 201 bp, Homo sapiens
atacagtcaaattcagaataatactgtaatggtggtgtacaaatcacttaagtctttagcatgaaggtaaaaagagaaaactatcacagtgatagctatgmaatttcttaaataatagctacaacaaaaagatatgaattgtgacattaaagtttatgcgtggggtgggtggagtaaatgtgtagagattttaaaaatgtg

SEQ ID NO: 231339 - DNA, 201 bp, Homo sapiens
cgggaagctttcagggtgggggctctgggtgcagcactgtcctgcggggatggtcccacgtgactctgcccagggcagggtgctggtgtgggcgcttgcaktgccactgggctcacactcacagttccagttggctctggatgtgttggaggcagcaccgagctgcaaaaagatcaatttttcacatttccctgatggaga

SEQ ID NO: 231340 - DNA, 201 bp, Homo sapiens
ggcttcgtcttcaccacacggcgcacgctgagggcggcggctgcttctttccccagaacgccgcacacactgagggcgggggctgcgtctttccccagcawgcggcgcacaccgagggcgggggcttcgtcttcaccacacggcgctcgctgagggcaggggccgtgtctttccccagaacgcggctcacgctgagggcag

SEQ ID NO: 231341 - DNA, 201 bp, Homo sapiens
gcagatagcagggaagcattgcaaatagggttttggctgacaggcaggctcctgtgtgcacacacaaagcctaccccagaaaagtagagtctgcttctccraattcaggccactctctggcagctgaagcctctgctactgctccctgtcagcagctcccagctcttacaccccaagtggcccaggcctcagctacgatgc

SEQ ID NO: 231342 - DNA, 201 bp, Homo sapiens
ccttgggggtgcgctgccagcacctgccccctgccctcctgtgggcagaccccaaccccagcctgctgggccctaacagacccccctgcctgccactgccrcactcagctgcctcccttgcctgctctttgccccagctctgtgctttctctgttctggcatctgggatttctccttccttcctttcacgtttactaatgc

SEQ ID NO: 231343 - DNA, 201 bp, Homo sapiens
ggcctttgggcggtgattgggttagatggggtcttgagggcagggcttccgtgaagggaccagtgctctcgtaagaagaggaagagtcctctctcctccaygtaaggacgcggtgagaagccaggcggaggccatcaccagagcagactgtgctggcacccccatcccagacttccagcctccagaccatgaggacgtttc

SEQ ID NO: 231344 - DNA, 201 bp, Homo sapiens
actctgctgggggcatgttgttgccgacctggcctgtggccttccctgtgagattcatcctgggagtggtcccagaaagcagccctggcggtggagtggcyggagtggggcacgccatgctgggcttggcttcaccctcagcagtgaggccctcttgctgccctgctgagtcggcacctggcctggcccagcatcctcggg

SEQ ID NO: 231345 - DNA, 201 bp, Homo sapiens
gagaggcatttgtgttttcatcaagagcctgagaaagagaggctcttctgcccgcctgcctgtggacgggttgttggcattccttttgtgcagggcaggtrtgcacagtccttgggggtgcgctgccagcacctgccccctgccctcctgtgggcagaccccaaccccagcctgctgggccctaacagacccccctgcctg

SEQ ID NO: 231346 - DNA, 201 bp, Homo sapiens
gggtgatgagaagataatttttaaaattatgataatttaaaaattatatatggcaacatggtaggaccagggaattcccacagcaccggcccactgctgcscttctttgactgtgaagtgagggctcttggtcagaagcagtgctgtgtggacaccatggtgatggataaggcgttctgactccacggagggtagttctgg

SEQ ID NO: 231347 - DNA, 201 bp, Homo sapiens
atgttagatatatgagtattttattatattaggatttgacactcatgtgggatacaggttcaggcttctatttctaatgagaggcatttgtgttttcatcmagagcctgagaaagagaggctcttctgcccgcctgcctgtggacgggttgttggcattccttttgtgcagggcaggtgtgcacagtccttgggggtgcgc

SEQ ID NO: 231348 - DNA, 201 bp, Homo sapiens
tcaatttagaaagtattttggcaaggtgaaggatgcatccatgatacagcctcaggaagtcctgagacttgtgcctgaggtggtcgggggctgaggcatgygcaggaggtggacgggggcctgaggcatgtgcccgaggtggtcgggggcacagtttgcttttatacattttagggagacatgagacgtcaatcaatatgt

SEQ ID NO: 231349 - DNA, 201 bp, Homo sapiens
gtcttagacatgggctgttccagagagaagatgctcattaaaattctgtgtttccttccaatgtctttattttcacaactgtttcctggtttcaatctgaygttatcaggagcagagcaaatgaagaaaatgaatgtctttagtcttaggggagaggcagtccctaagaaaaagggaggcaggaggtcgggtttcagcacg

SEQ ID NO: 231350 - DNA, 201 bp, Homo sapiens
actctctgttccttaggtttcaaatgataaaacaggatgtctgtgctaaacaatctctgaaatctgcaattcagagaccgtctctgaatgtgccagctgckcccacgtcctggggcacacctctctgattcttctttcctctccttcctgtttctcatgtcttgctatggatgtgagtatttagaatgctgacacaaggcc

SEQ ID NO: 231351 - DNA, 201 bp, Homo sapiens
accagagaatgcacaagactctcagcctgacaaactagaaaaaaaccaagaaatttaaggtgagtttcaaaaggagggatagaaaaatatctagtggcccygaattccccaacagagatgagttttctcacctatgattttaaagcaatagctttttctagtttgtctcatatatccatgaatttaaattacatgacaata

SEQ ID NO: 231352 - DNA, 201 bp, Homo sapiens
tcggtccctggaatcctgctgagctgtcatgacctagagccagtcccaggtcccaggagcctctgtccgtgtggagctgcgacccgtgcttcctgggcacycacttcttaataacatgacctgggaagttcccgtttaagacaaggaaagtaaagcatcctggagcaatggttaacaagacctgaatctaaaataaaataa

SEQ ID NO: 231353 - DNA, 201 bp, Homo sapiens
atattgattttataatgagctccggtttgtttaataagaatctgtaatccagacaataaatgaaatgtgtgcttttcttcaatccagattaataaaaaggraaaaaaactttttttctttaaaaatgtgatctaggaaaatttggaaatgaaatgagtgtaaagactttctggttggtttagctttgaaatcaccacaaaa

SEQ ID NO: 231354 - DNA, 201 bp, Homo sapiens
ttttggagcattttagattttggacttttggattagggatattcaacccgtagttggtcatacttttaaaaatgtattctgtcagtctctcttttaattgktgagtttgatcccttttcatttacagtaatttctgttaaggaaggatttacttctgccactttgctgctggtttctgtatgtcttacaccttttttcctc

SEQ ID NO: 231355 - DNA, 201 bp, Homo sapiens
ggcaatctctcctttggaagagtatattatactttagaatgttaagtccatgctatttcccattttgtttatagggatgatattatgtgcatgattgctcygttctgaagcaaatactggccctgtggattatatcaaatagatacattcactaatagaagtgcctgaccctgcatgctgcttttgcctctgatcactttt

SEQ ID NO: 231356 - DNA, 201 bp, Homo sapiens
tgagtgctggctggggtgcccccggctttctctggctgacgcgttgcagagatgcggcctgcacagcctggccgctgtcccactgtccctgtgacgattcrgtctcttttgggcacacggtaaatgcctctggtcagggctgtttaggaggtgagggtgtcgggtctccaacactgagtcaggtggaggggcagcccctgc

SEQ ID NO: 231357 - DNA, 201 bp, Homo sapiens
gaggtgccttgaggatattgactatttcagccccgtgagaacataaatcaatattaaaaaaggaaaatgtcgtgtttgtgtctgatttttaaaatataaaygtggaattcagtaacatgcgctacgatgacagcattttatatttgggatatgagggtttttaaaataacaaggtcttaattggatttttgtgtctgtttt

SEQ ID NO: 231358 - DNA, 201 bp, Homo sapiens
aatgacggtgagaaaaccagccctggctgggcgctgtctcccgttagggagtgcctcctcagcccacgtggcactggctgcccgctgccctgtgcgtgtcycggccttcgctgcctctgcagcctgggagcttggtctctggttggggaggccagggccagcctgcgatgtggctgttgagaagctgtgcgtgcctgggcc

SEQ ID NO: 231359 - DNA, 201 bp, Homo sapiens
ttttctatactctgtgagctctcaggaccctcccccacataaggaatttacacaatctctatgcttaaaagagattgaccacaagacagcttttcctcccrtttcaaaattcctggtattgccattgaatggaggaagcctccagttttctggagagggtcaccagcccggtcaggacgatctttttcttacaaagaaatg

SEQ ID NO: 231360 - DNA, 201 bp, Homo sapiens
caatgacggtgagaaaaccagccctggctgggcgctgtctcccgttagggagtgcctcctcagcccacgtggcactggctgcccgctgccctgtgcgtgtyccggccttcgctgcctctgcagcctgggagcttggtctctggttggggaggccagggccagcctgcgatgtggctgttgagaagctgtgcgtgcctgggc

SEQ ID NO: 231361 - DNA, 201 bp, Homo sapiens
tgaaaaacagccaccactgaaggaaaaagtgatgcctctgactgtcctcttgagcacgctgcaatctgcgatgtgctattttcaaatgatttctgcttctyctttgacgggggttgttccgcagggccctcccgttgtggctccagggccagcacagcgtcctgtggggctgagctttccactttcaagttgcatttggag

SEQ ID NO: 231362 - DNA, 201 bp, Homo sapiens
ccccagtcggtccctctgtccagcgtcccgcccttccctgcagtaagaccctcctcgccctcagccccggcgctgcccgcggtcacgactccccggctgtmcaggtcccgcggccccgcgcggtcgccctccgggcctcccccggcctctcccaggttgcaggaggggcctccttgtggaccggcgcggggaggtgggcct

SEQ ID NO: 231363 - DNA, 201 bp, Homo sapiens
acagtttttccctccgcatcaccctcctgctcagcgctgggtgggacacttgaaaccgtcctgggcgtggagggaagacctctttcttcggtttcttctgyggcgcccgcgggcgggtaggaagcgggtttcccagccgggccctgggatccagcgacttctgtgtcaggccggtggaccccagtcggtccctctgtccag

SEQ ID NO: 231364 - DNA, 201 bp, Homo sapiens
gatgtgtgggtggatgggtggatggaaggaaggaaggaaggcaggctggagggatggatggagaaatggatggatgaatggaaggatgtgtaggtggatgwtggatggatatatagatgaatggtttgctggagaatattcagcaattgcaatagctctgattaatgaacactctcttggaaacttgccaagtctgtgcag

SEQ ID NO: 231365 - DNA, 201 bp, Homo sapiens
gacatcagtatcataaatcttccctgatgtcttaaaacacagtatttctttaaaactgatgttttaggagtgcttaaagatggcaaatagacaatttattrcctttcttgtatattcacttttaagtgtatgcctggaaaaactcaacaaatagcccattttaaaacagtatatcccaacttattttcattaaagtttaca

SEQ ID NO: 231366 - DNA, 201 bp, Homo sapiens
tatccttggctggcgggcagcgccttctggctgtgtcctcacagtgctgtccttctgcacccatctctcggggggagatttatattctgtgctaattaccratatattcccttctttttaaaatgatatcctctgtgtgtgtgcgtgtgcgtgggtgcatacacacacatttatgtatctatttaggtatttggtttttgc

SEQ ID NO: 231367 - DNA, 201 bp, Homo sapiens
accctcagtggccgtccctccggttcctactccttgttatcatgcacacctcgatttacgttcatggcattggaaaaccctcctgtttgattgttactgtmaggccgtggcaccctgcttgtgcttttcaatttgttttgttttgctttgcacagttgtgtgtgcatgtagctgtttttattcactgttatacttttattc

SEQ ID NO: 231368 - DNA, 201 bp, Homo sapiens
ggtgggaggaaggggagtgagttggaggctctcagacataaataaccgtctgccacccagaatatattgccgcaggtgcaccaaggcgtggacgaggaagkgtgctgttctgctggtgaacccgcatggaacctttcaggccctctcacgatttttaaagtgacccaaattgaactgaattggtgccacctcccacccatc

SEQ ID NO: 231369 - DNA, 201 bp, Homo sapiens
ttaaaggatgacctgaagtctcgtggtggaggccgtcaggaaggatggaaaacgctcggaaccgtgtaggaaacggagtcatcatgctgtagggtcagcamtggggaaagtaaaagcactcaggtgatgccccttgagtttcacaatttaaattcatccttgaatgtctcctctcaccatgtctgtggaagctgctgacaa

SEQ ID NO: 231370 - DNA, 201 bp, Homo sapiens
gctgaaagaaaagaatgctaactagcaacatgaaaacatacaaaagtatagaactcactgataaaaataagtatacagtcaaattcagaataatactgtartggtggtgtacaaatcacttaagtctttagcatgaaggtaaaaagagaaaactatcacagtgatagctatgaaatttcttaaataatagctacaacaaaa

SEQ ID NO: 231371 - DNA, 201 bp, Homo sapiens
atttagggcattctttagtgttaatggaaaagcctcaccaggaggcgggctccatctgcttttgaacatcctggaataggggcagtctttgtttaatagawgcttcatttcagacaaggaagaaccgtcaccctcaggagaattagatgtctcaacagaggaggaaattgagacctatcggaactggaagcttaccagatg

SEQ ID NO: 231372 - DNA, 201 bp, Homo sapiens
aacattgagtatgaaggaagagcagatgagtgagctggaagaaggtccctgggaaataatgaggcagagtaacagatcaaaactgagagaaagtacaggayggagtgtatgaggcagaggagatctgttggaaaggtctatatgtgtaggtggagtcccagaagaggagaaggaaaacagcttagaagcaatgtttgaggc

SEQ ID NO: 231373 - DNA, 201 bp, Homo sapiens
gagactccatcaacagatgactcttgggaaaagactgcaggggcttctggcaggaggaaagtaaacccacatggaaaccaggaaacaaggcaggcagggayagcagtgggaactatcaatgggttggtaaatcaacacgaatattggtggcacagaaggtaaaggagttagtgttctcaggttttggcattatccaggatg

SEQ ID NO: 231374 - DNA, 201 bp, Homo sapiens
agcagtgggaactatcaatgggttggtaaatcaacacgaatattggtggcacagaaggtaaaggagttagtgttctcaggttttggcattatccaggatgygataatgcgtgttacactaataagtcagggatccatgttcttttttgtggaaagaacatataacatgagatccaccctcttaacattttaagtgcatggc

SEQ ID NO: 231375 - DNA, 201 bp, Homo sapiens
aaggaaaaccatctcagagaaaattaatattgtgccgagtgtcaggctatgtccacattcctggcacctgttcttgaggataagagcatctttatggagayggagtcccaggcagccccacatggggataggggggtcccaggcagccccatgtggagatggggggtcgtaggtatccttgcatagagacagaggtcccag

SEQ ID NO: 231376 - DNA, 201 bp, Homo sapiens
taatcctgtatggtaaattagtataatgcattttgttaaaattttcatagaataatggagaagggaatactggatatagtatagagcagtaaaattttaamagtagttttaacttacagaattctactggtgctttccttttgctgtagggaagttacatctctttatttagcagattaaagagacggaatcacagaggga

SEQ ID NO: 231377 - DNA, 201 bp, Homo sapiens
tggagagcggaattccaaactcccagcagcagagtgcagagccgtgatttttaaaatgttgttctcaggatcacatcctattattgaaaattactgaagaytccaaagaatttttttttttttttttggtgggttagtgctatccacatttgttaccttagaaattaaaattgccaacactttagaaaagctgtttattaa

SEQ ID NO: 231378 - DNA, 201 bp, Homo sapiens
gggacgaccctgccttcagcatttgctaacgcagcatgtgttgaccagctggctgacacatatgccagggaaacacaagggtggaaggaatggtctcaccrtttcactgatccttatttcacaaccttcagcaagacacctggcaccccgggaccccactctcctgcctctaaagtgggcatgtgaggttaaaccatctcc

SEQ ID NO: 231379 - DNA, 201 bp, Homo sapiens
ccagtggtgagcagggccctgtggatggggcctttggaggcgtccagggtagggagattccatgactcagaaccagtgtcgggaggagcagctgagctctrgcaacagggctggtggcctcggttctcctccaggggctgtgcacctcgccagctgcaggtcagagggggcgtcctcagctttgagcccagggccgccctt

SEQ ID NO: 231380 - DNA, 201 bp, Homo sapiens
tatctcaggaaaatttcctcttgttggtttctgggatcagagtttcttcctggaccatttgcagcagtgacagcctctctgagtttctggggttttatccrtcagttgagggaatgggatggaagccatcaatggtctgacatttggacgtttgcccccaaataatttgagcaaagtcttccaaaggaggtctcgggcctg

SEQ ID NO: 231381 - DNA, 201 bp, Homo sapiens
agcccctttggaagcaggtgaagcatccatcatccataaaattggccactctgtgccccatccccaggaggccctggcactcctttccccagggacacccracagcccagcagtcatcacagagccacgctgtgacttggaggagaatggggttgagccaggagtcagttctgttgcggggagggtgaccctttctcttcc

SEQ ID NO: 231382 - DNA, 201 bp, Homo sapiens
agcgtcatttgggtaaataaatgtcactgctgtgacagcaaggcaggaggaggtgtgggctgggtgctcggctcttcacaggagccttcctggtggcgccrgccagaggctcacggcgacgcggcttcagcggccttttccagggtcctcgctggagtgatcacgcgtgtgtggccgtgcattgccactccatacataatg

SEQ ID NO: 231383 - DNA, 201 bp, Homo sapiens
ccttggtctttattaagctgagtgtttatgcctgcgctgcctgcagcccctttggaagcaggtgaagcatccatcatccataaaattggccactctgtgcsccatccccaggaggccctggcactcctttccccagggacacccgacagcccagcagtcatcacagagccacgctgtgacttggaggagaatggggttgag

SEQ ID NO: 231384 - DNA, 201 bp, Homo sapiens
tactggaaatgtatggagtggctttcagcacaccagggacttaggaggggggagggtttgagggagcttcctaacaggtttgattgataggtttgtttcasgtacctggatgacttctaaggggtgctgtccaggtgacttaggggacagatctgggtaggtgtatatgacataaccttaatgtacagtggacagcaagat

SEQ ID NO: 231385 - DNA, 201 bp, Homo sapiens
atcctaaatgctggggggcaaggctccgtcttaggtgctccagcttcagtcaccctcctgaggccagtgaacacctctggtcgtacagctccccggtctcrgcattcatgatgcactgcccccagcacccagcctggacgccctgctgtggcctctgacctctgcactcacaggcacatcgcccctcagtacccagcctgg

SEQ ID NO: 231386 - DNA, 201 bp, Homo sapiens
ttccataaggaccttttgcattcccacaacagtatacagtcttcaccaatactcatcttttttttttctgataataggtatcctaacaagtttgatatgayagctcattgtagtgctgatttagattttgctggcgattagtgatgtcgagcatttttgttgtatacctgcagtccatttgtatttcttcttgtgagaaat

SEQ ID NO: 231387 - DNA, 201 bp, Homo sapiens
tctagaatagccacaaaaagaatagctaacaagctaagaaagggaatcaaaataataataaaaatactccatccagaagaaagcaataaaggataaaaggraaaataaaacagatgagacaaataaaaaaacaaggtaagatagtcgatataaatcccaatatattagtaatttcattgtaaataaatgagataaatattc

SEQ ID NO: 231388 - DNA, 201 bp, Homo sapiens
gggaatcaaaataataataaaaatactccatccagaagaaagcaataaaggataaaaggaaaaataaaacagatgagacaaataaaaaaacaaggtaagayagtcgatataaatcccaatatattagtaatttcattgtaaataaatgagataaatattccactcaaaaattaaagattgtcactaaaaaacaaaaccaca

SEQ ID NO: 231389 - DNA, 201 bp, Homo sapiens
gtggacagcagtgttggcaggaactggggggccccagaaaggcctaggggaagccaagatcgaggtcccaggaggaggagaatgtgctgggcctgggctgyaccctgctgatggaggcagggtccgggccaggcctttagtgtgagttcttatccagaaacaccctctgctctccccagcccctcactagccctgcccaga

SEQ ID NO: 231390 - DNA, 201 bp, Homo sapiens
gatggacgtgggcacctcttctcagtgcccgcccgcacagctcttcacccacagacactgcgcccacttctgccctgtgtctacacttgccagaccccccmccgccctggaaatttgcaaatccaccatgcccagcaacacctccccagcacctgacccgctacctgtgtcttcccatggagccctgcccaccccagcccc

SEQ ID NO: 231391 - DNA, 201 bp, Homo sapiens
cctgcccgcccctgcccaggctcccactgccatcacccgctgaggtctgaggtcccacccacccctgccggctgagaccagagatgtccacgacaaggcayggacgagcccccagtcacatcgtcccatggcaggaccgacggttcccactgccagtgaacactgttcttgaggcttcactctgtctctgtcttctcgaag

SEQ ID NO: 231392 - DNA, 201 bp, Homo sapiens
aaatatagaaaaacaattcaataaaatcaggaaaacagtaaatgactgcaattagaaattccacagagaggtataaattattttttaaaaattctagaaaytctggatgtggaaaacacaataaatgaaatgaaaaatgcagtagagagtgtcaactgcagaattgatgaaacagaatccgtgaacttaaagacaggttat

SEQ ID NO: 231393 - DNA, 201 bp, Homo sapiens
gtgaggaatttctgtttctgtctccagtagatagatgtggctttcttgtgtttatcgccaagggagacaccaggagttgggcctgcagccacgtcttcccrggggcacgtgcaggacggccgacagccagtgccgctgggactccagggtttaacttgtcagtgtgatgtcatcacggtttccacgcgcacagcccttgct

SEQ ID NO: 231394 - DNA, 201 bp, Homo sapiens
ctccgattagattgaatccaaataagactatactgagatatattataatcaaactgtcaaaaatcaaagacaaagaggatcttaaaagcagtgagagaaargaagcaaatcacatataaaggagttacaggaaggtttatagcagacttctcagcagaaaccctataggcaagagagagtagaatgatatattcaaggtgc

SEQ ID NO: 231395 - DNA, 201 bp, Homo sapiens
gggcacgtgcaggacggccgacagccagtgccgctgggactccagggtttaacttgtcagtgtgatgtcatcacggtttccacgcgcacagcccttgctcrgtgacctcctcgcgggcctggtgcgctgttcgccccttgccacccctgccgtacctgcagggagtcgccgatgcccggggaacttcttcccagcctgggt

SEQ ID NO: 231396 - DNA, 201 bp, Homo sapiens
tgtcatttgctggtctctcctgcagccttgcattagttagcaatgcttggcctttggaatgtcttgttcaccaggagtcctggcaccttctcctgtccctwcatagcacaggatcccccagaccactcttttgtttggcccatgggaccgcgagtgcccttttcttcccacacattctgggcaggagcgcagtgaaggtca

SEQ ID NO: 231397 - DNA, 201 bp, Homo sapiens
tggctttcccgatccctgagctgaggagggcacattttttcccatcactccctggggcgagcccacgaagccggaccacccgccagaaatcaaacccgagktgttcacacccgggagcaggcagctcgtggagttcactcggcagacctgtcatcgactttggcagaacctcctcccttgatggactgtggttttgttact

SEQ ID NO: 231398 - DNA, 201 bp, Homo sapiens
gtcttccaaaggaggtctcgggcctgtctttgaaggaactgacacaggtggaaagacggggatgatgttctttggatttttccaactcaatgtgatgtagygacacgtgctctgcctcgcgaggggaaagagctcccctccacaggccagcgcgcaggtggcgtttcccgaggctcaggcaggtggagcatggttggatgg

SEQ ID NO: 231399 - DNA, 201 bp, Homo sapiens
ccaaaggaggtctcgggcctgtctttgaaggaactgacacaggtggaaagacggggatgatgttctttggatttttccaactcaatgtgatgtagtgacaygtgctctgcctcgcgaggggaaagagctcccctccacaggccagcgcgcaggtggcgtttcccgaggctcaggcaggtggagcatggttggatggtccca

SEQ ID NO: 231400 - DNA, 201 bp, Homo sapiens
tcataaagctgccataagcaccctcatgcaggtttttgtgtgggtataagtctttaacttctactggttaagtaccaaggagtgtaatcactggatcacayagtaagagaatgtttggttttggaagcagccaccaaactgtcttccccagtggctgtggcattctgcattctgcgtgccaccagtggtgaatgagctgct

SEQ ID NO: 231401 - DNA, 201 bp, Homo sapiens
gggcctgtctttgaaggaactgacacaggtggaaagacggggatgatgttctttggatttttccaactcaatgtgatgtagtgacacgtgctctgcctcgygaggggaaagagctcccctccacaggccagcgcgcaggtggcgtttcccgaggctcaggcaggtggagcatggttggatggtcccagggggctggctgcc

SEQ ID NO: 231402 - DNA, 201 bp, Homo sapiens
tgcagctgctccccagcactcccatcactgcctcagctccaccttggatcatgaggcattagattctcgtacagagtgtgcagcttctgtccctcctgtgygcagttcacaatggggtttgcactcctgtaaaatctaacaccactgctgatctgacaggcagcggaactcaggcgggaatgctcgcacacctgctgctca

SEQ ID NO: 231403 - DNA, 201 bp, Homo sapiens
ccggctttgtgtcttcgcagttggtgaaacacattgatctacaatgtgtttctgtagcaccttgatgtggtcagaccccggtgagttgactcctcccccayggacacaaggacagggctgcacccacatgttctgccatcctcactggctgctggggccgtgcccccacgtggagctcttgctggccaagagaagcggctg

SEQ ID NO: 231404 - DNA, 201 bp, Homo sapiens
tgcccctctttcctgagctcaccccccacacccaggggcaacagtagcctctcccacgttgaggtcctgcggcagctgccgcttttccatatggttccacmccatctcatcaggagttgactcagtcctcctctgtgtagcccctgtggtgccccctgcactgtagggtgaggactgtcctctttcaattcccctacgtcc

SEQ ID NO: 231405 - DNA, 201 bp, Homo sapiens
ggatgagccactgcaggatctcagtgtgcagccacatgtctcacggatgagccactgcgggatctcagtgtgcagccaaatgtctcacggatgagccaccrggatctcagtgtgcagccaaatgtctcacggatgagccaccgggatctcagtgtgcagccaaatgtctcacggatgagccaccgggatctcagtgtgcgg

SEQ ID NO: 231406 - DNA, 201 bp, Homo sapiens
agaactttcagggtgttacgaaaatgatatgattgtgtacataaagcactgagcttggaatctggtctgggaggatgatcttttgatttttttttttttttaattaaggagagcaaagtcattactagaatgtatagcaaatatggaggttaactttgtatcgtttaagtcatgtttgtggtaacagagttttaggctgtg

SEQ ID NO: 231407 - DNA, 201 bp, Homo sapiens
ctcttttttccagtgtgattccagtcagcttttcaaccaaaggcctgagagctgtgcaggacatgacaggtgcaccaggggaccaccagccagaatgggascaacaaggggtgcggctggccctcgattccaaagcctggactgaagatctgagccacacacgtctaatggggtacgggaatcctcagtccagaaatgacc

SEQ ID NO: 231408 - DNA, 201 bp, Homo sapiens
gactttctttacatctttcttttgttcttcaagcatttttatgacaattgttttaaagtctttgcctagtacatctgccatcaggtctttttttagagacmattattgttgacttacctttttcctttgaatgggctgtagtttcttgtttctttgtttcttgtttcttgcaattttttgttgaaaactagaaattttaat

SEQ ID NO: 231409 - DNA, 201 bp, Homo sapiens
cttcctccgtcagctgattttagggaactctccaggagactgtaggtgcaggctgggagagagaaggcagcatagcgggagtggggaccgttggcattggyggcacttctttatgtaacttgtgcctttagggcctacttaggcccagacacataccacttccatttgatgatggaatgctgctgtgtacacccaactttc

SEQ ID NO: 231410 - DNA, 201 bp, Homo sapiens
aggaagttccgccgcccgctgtcctgggggctggtgtggcggagaggaagttccgccgcccgctgtcctgggggctggtgtggcggagaggaagttccgcygcccgctctccggggatggtgtggcggagaggaagttccgccgccgctgtcctgggggctggtgtggcggagaggaagttccgccgcccgctgtcctggg

SEQ ID NO: 231411 - DNA, 201 bp, Homo sapiens
gtcaggctccctgtctaggactcagctctgatgccgctgaggagcatgaggtactgtcctgggggtgtgtcctcccgggtctgcagtgccttccctgcacygtggcccccagaacattagccgtgtgctgtctttctccccagaccatcagctcctcagtgcctatctatgtcctgaacccggctcagtgactgcagagaa

SEQ ID NO: 231412 - DNA, 201 bp, Homo sapiens
ctgatgatgcgtctgctgctctgtggctcacggggacaggaggaggtgggagcaggagccatctggggcaaaggagggacaggctgacttggggcagagcrccctctcagggtctcctggccccaccaggcagcatagaccccaagatgcggcaggaagctgttcccttgatgagcagcaggcggctgtctgcgttcagcc

SEQ ID NO: 231413 - DNA, 201 bp, Homo sapiens
aggccgcacatcccccattccagtttcactttctccttcagcttggattcctggggatttcccttaattctgtgaaaggctgactgtgccatttgtccagmattctacgtgtctgtggaggaagacacttcaggttatctccttcttcatatcactggaaacacacatgccatgcaaattacacaaaggaaaacagtgcag

SEQ ID NO: 231414 - DNA, 201 bp, Homo sapiens
ggagggatgcaggaggccctggtgtgcgtgctgtctccaggggcactgttcaggtgccatgagtcacgcacctttgggcactgaaagtaggatattaattwatttatttattattttattttattttttgagatggagtctctctctgtcacccaggctggagtgcggtgacgtgatctcggctcactgcaaactttgcct

SEQ ID NO: 231415 - DNA, 201 bp, Homo sapiens
tgttggctcttcctcaagctctcctccactactgacaaggcctccatcagtcctgttctctctcttttctcccttctgttctcctctctgtccctgcctasgtgagccctatagtcttcatctcctttttcatcttgtgaggggccctgctgctgatcttggtgtcttactatttcctcatctatgacttttttatccatc

SEQ ID NO: 231416 - DNA, 201 bp, Homo sapiens
gatggagctaggatgaggatggagctcggatgcagttcagtgaaactgagtggaattgggatagagttgggatggagctgagggtggagttgggatggagtttgatggagctgagtggagttgggatggagctgagggtggagttgggatggagtttgatggagctgagtggagttgggatggagctgagggtgaagctag

SEQ ID NO: 231417 - DNA, 201 bp, Homo sapiens
ggatggagctaggatgaggatggagctcggatgcagttcagtgaaactgagtggaattgggatagagttgggatggagctgagggtggagttgggatggagtttgatggagctgagtggagttgggatggagctgagggtggagttgggatggagtttgatggagctgagtggagttgggatggagctgagggtgaagcta

SEQ ID NO: 231418 - DNA, 201 bp, Homo sapiens
ttgcaattgcaaaaatatggaaccaacccaaatgcccatcaatcaatgagtagataaagaaatcgtggcacacacacacacacacacacacacacacacacaccccatggaatactattcagccataaaaaggaatgaaataatggcattcacagcaagctggatggaactggagactattattctaaatgaagtaactca

SEQ ID NO: 231419 - DNA, 201 bp, Homo sapiens
atatttgcacacacgtttatagcagcacaatttgcaattgcaaaaatatggaaccaacccaaatgcccatcaatcaatgagtagataaagaaatcgtggcrcacacacacacacacacacacacacacacacaccccatggaatactattcagccataaaaaggaatgaaataatggcattcacagcaagctggatggaac

SEQ ID NO: 231420 - DNA, 201 bp, Homo sapiens
ggaaaaataaaacagatgagacaaataaaaaaacaaggtaagatagtcgatataaatcccaatatattagtaatttcattgtaaataaatgagataaataytccactcaaaaattaaagattgtcactaaaaaacaaaaccacactgcttgcaagggaccaccttcaatgttgagatataaaagtttgaaacgctggaaga

SEQ ID NO: 231421 - DNA, 201 bp, Homo sapiens
ttgaaacgctggaagagaatacaatgaaaacactaccctaaagaaagctggtatatctaaactaatatacaaagtagatgttaaggcaggaagcattttcygagataaaaagggccataataaatataagggttggtctatcaggaacacacagtaattataaatttgatgcacctgatataattttcaaatgtataaagc

SEQ ID NO: 231422 - DNA, 201 bp, Homo sapiens
tctaatggacacactgcaactatcaaaatagaacctgtgttcttttccagtgcacacagcatacatattgaaaatgaccatctattagacggaaatgtttygatcagataaacaaatcttaacatattgctaaagattgaaatcattcggagtatttctttggccaaagaaattaagctaaaaacaaatggaaaaaaaaat

SEQ ID NO: 231423 - DNA, 201 bp, Homo sapiens
ttagaattagggtaggaaacacgagaatgagccccagagagggcatgctgggcacagaagccactccactggctgcacagctacccctgccgggctgtccwtgtgtgttgtgctgggcacaggtcccaccaaggctcaccaggatctaggtcttgccctggggtgggcaacctgtgggggggggggtccgctctgagcgtg

SEQ ID NO: 231424 - DNA, 201 bp, Homo sapiens
tcaccccctcagctgtgtaagctgggaatgccaaatggtgttgggaaggctcagtctctcgatggtgagatgcttgcggtgctgtcgtctgtccagtccawgccaggaaccctggtgaggggcaccgtctctttatgtgctatcaggaaagggctatgctccagctaaactctcttgccagtgttcataagaggcatcttg

SEQ ID NO: 231425 - DNA, 201 bp, Homo sapiens; identical to SEQ ID NO: 42943

SEQ ID NO: 231426 - DNA, 201 bp, Homo sapiens
cgcgagtgcccttttcttcccacacattctgggcaggagcgcagtgaaggtcatttcacaatggcaggatacatttgcagcatggcccaaagcctgggcaygtcagaaatattgtatgttttccactgagagcaacagcaagacagatgcagggagaaaaacaaaacaaaaaacaaacaaaagctcccagggaattactga

SEQ ID NO: 231427 - DNA, 201 bp, Homo sapiens
ctgaggagggcacattttttcccatcactccctggggcgagcccacgaagccggaccacccgccagaaatcaaacccgagttgttcacacccgggagcagrcagctcgtggagttcactcggcagacctgtcatcgactttggcagaacctcctcccttgatggactgtggttttgttactttagatctgacttttctgag

SEQ ID NO: 231428 - DNA, 201 bp, Homo sapiens
gccagcaccaatgcaaagggccccaggcatgccacacacctgagcgtttgcacgggacgtggcaggaggggggtgcaaagccagcacaaatgcgcagggcmccacgcacaccacacacccgagcatttccacgcacctctgtgctcttagccagtctggatctgtgtcttcatagcagactgtgggcatatgacaatgtct

SEQ ID NO: 231429 - DNA, 201 bp, Homo sapiens
ccacacacctgagcgtttgcacgggacgtggcaggaggggggtgcaaagccagcacaaatgcgcagggcaccacgcacaccacacacccgagcatttccaygcacctctgtgctcttagccagtctggatctgtgtcttcatagcagactgtgggcatatgacaatgtctcttatactgtaaagttacatgcaaatggctg

SEQ ID NO: 231430 - DNA, 201 bp, Homo sapiens
agctgccagtggtaggagacagtggaaggatggctggtcccagagcaggcttgccactggtggcatcatttgtaatatatattttcattttgctctgaagyacagcaaataggtttttgtaagcgagtgacctcaggattagctgtgttatttgtgacttagaaagcagtcagttgaaatattgaaagtattttcccaact

SEQ ID NO: 231431 - DNA, 201 bp, Homo sapiens
ccagaaatacaaaacttagctagatttggtggcgcatgcctataatcccagctactcaggaggctgaggcaggagaatcacttgaacccaggaggcagagrttgcagtgagccgagatcacaccactgcactccagcatgggccacagagcaagactctgtcaaaaaaaaaaaaagaaagaaagaaggaaagaaagacatc

SEQ ID NO: 231432 - DNA, 201 bp, Homo sapiens
agctggaggtggcattgtccaagctggaggtggcatcatccaagttggaggtgacatcgtccaagctggaggcggcatcgtccaagctggaggcggcatcktctgacttggaggcggcatcgtccaagctggaggcgccattgtctgaggtggaggcgacattgtccaagttggaggtggcattgttcgagttggaggcgc

SEQ ID NO: 231433 - DNA, 201 bp, Homo sapiens
gtaatttttttaaataggttatattttgcaccagaaacgccaacctggtcgttcagtgaaaaagcaactggaaaggggaggcgatggtaagaagatcagcragaaggctgcagtgacgggccaggagaaaacccacagggcatttcagaggccaggctcaggctttggtgctgccactggctgctgggggctgtggaccaa

SEQ ID NO: 231434 - DNA, 201 bp, Homo sapiens
ccactgggtgacttctgcctgggaagcaggatttgaagaattgtagaaaggcagcttcaaggatgagggtagatctgagtgcaaagtgtgtgttgatctayacagtgtgatgcctgcccatggaaacaggcaagtagggcctcaggcagaagtcctggtggcccctgggcagtcaagtgttttccctgtggctcacaatgg

SEQ ID NO: 231435 - DNA, 201 bp, Homo sapiens
attcaggcctgatgctcacagccacactggccccggctctttctgccagacatcacaccgcagcagacaccgtccccagcctcactgccagacatcacacygcagcggacaccgtccccagcttcactgccagacaacaccccgcagcagacaccatccccagcctcactgccagacaataccccgcagcagacaccgtcc

SEQ ID NO: 231436 - DNA, 201 bp, Homo sapiens
agttcccaaaattagtactttcataatttcttatgcctgtttttactgcagtctctgaacataaattgtgaagatttcatggacatttatcatttccccamtcaatactcttataatttcctatgcctgtctttaatctcttaatcccatcatcttcataagctgaggatgtatgtcacctcgggatcctgtgatgattgc

SEQ ID NO: 231437 - DNA, 201 bp, Homo sapiens
gtgtgcctgcggctgggatatttcacacccgccctgtgtgcgtgcggctgggatattacacacccgccctgtgtgcgtgtggctgggatatttcacacccrccctgtttgtggctgggctgggatatttcacacccaccctgtgtgtgtgcagctgggatatttcacacctgccctgtgtgcatgcggctgggatattaca

SEQ ID NO: 231438 - DNA, 201 bp, Homo sapiens
gggatatttcacacccgccctgtgtgcctgcggctgggatatttcacacccgccctgtgtgcgtgcggctgggatattacacacccgccctgtgtgcgtgyggctgggatatttcacacccgccctgtttgtggctgggctgggatatttcacacccaccctgtgtgtgtgcagctgggatatttcacacctgccctgtgt

SEQ ID NO: 231439 - DNA, 201 bp, Homo sapiens
tgcggctgggatatttcacacccgccctgtgtgcctgcggctgggatatttcacacccgccctgtgtgcgtgcggctgggatattacacacccgccctgtktgcgtgtggctgggatatttcacacccgccctgtttgtggctgggctgggatatttcacacccaccctgtgtgtgtgcagctgggatatttcacacctgc

SEQ ID NO: 231440 - DNA, 201 bp, Homo sapiens
cccgccctgtgtgtgtgcggctgggatatttcacacccgccctgtgtgcctgcggctgggatatttcacacccgccctgtgtgcgtgcggctgggatattwcacacccgccctgtgtgcgtgtggctgggatatttcacacccgccctgtttgtggctgggctgggatatttcacacccaccctgtgtgtgtgcagctggg

SEQ ID NO: 231441 - DNA, 201 bp, Homo sapiens
ccctctctgtgtgcacacggctgggatatttcacacccgccctgtgtgtgtgcggctgggatatttcacacccgccctgtgtgcctgcggctgggatattwcacacccgccctgtgtgcgtgcggctgggatattacacacccgccctgtgtgcgtgtggctgggatatttcacacccgccctgtttgtggctgggctggg

SEQ ID NO: 231442 - DNA, 201 bp, Homo sapiens
ctgcccagcccgagaggcttcatggtgcagccttgactcttttcttgggtgagcctggcctccccgcagggtgtgcagaaacagacacagaacaaggagarcaggcacctggagctagactgtgagcttgggaggaagatgggcagcgaacgcagtgcggggcgcaggctggagacgtgagggggcatcagagcagcagga

SEQ ID NO: 231443 - DNA, 201 bp, Homo sapiens
gctgggatatttcacaccctctctgtgtgcacacggctgggatatttcacacccgccctgtgtgtgtgcggctgggatatttcacacccgccctgtgtgcstgcggctgggatatttcacacccgccctgtgtgcgtgcggctgggatattacacacccgccctgtgtgcgtgtggctgggatatttcacacccgccctgt

SEQ ID NO: 231444 - DNA, 201 bp, Homo sapiens
cagccagaatgttccgtggtcctggctgcagtgattggctcaggaggggtcatgtgaccaaaggggatcctgttagagtggattggactctgaggatgctrgacgagaatctgcatttctgctcaggtgggcttgtcactgctggcacttgagggctggtgttggtgtccagcaggcaggtcagagagagggacgagcagg

SEQ ID NO: 231445 - DNA, 201 bp, Homo sapiens
tgtgcacgcggctgggatatttcacaccccactctgtgtgcgtgcggctgggatatttcacacccgccctgtgtgtgtgcggctgggatatttcacacccrccctgtgtgcgtgcggctgggatatttcacacccgccctgtgtgtgtgcggctgggatatttcacacccgccctgtgtgcggctgggctgggatatttca

SEQ ID NO: 231446 - DNA, 201 bp, Homo sapiens
gctctattggtacctggaaatactgtatttctcagagaattgtgtttggcattcacatatgtaatggcagctctgacagcaagcaccacttctgctggaakgcctaaaccgcaaggacagactcagcctccacctggcggaaaccctgcaaagcctgactccagacaccctgttggggggtcatcgagggccacacaccgt

SEQ ID NO: 231447 - DNA, 201 bp, Homo sapiens
gtagcgtggggagctggggaagggaccactgcctccacgtctctgagccagtagggtggatgggcgggggtcaggagggacctggacacaaagcaaggacrccgcgggatgcaggagacatgccagtcccgtcctccagggacccctgcgtccgcccacccgggccaagagaggatgccccgcgcacgcagccttcccagc

SEQ ID NO: 231448 - DNA, 201 bp, Homo sapiens
ccggtgctggctccccattgtccagacctccaggcctgtcagtgtcttggggacgtcgatgttgccagcagcttttatccactgggggtgcagaggtgtgrgggagatgccaagaggggaacagcccaccccagcccttggcagcttggacggggcccccaggtgcctcccccagccatgagcacaaatgaagtccgaggg

SEQ ID NO: 231449 - DNA, 201 bp, Homo sapiens
ggctgctgcgaatgggtggggttgaaaccatgagggctcatgaggtcactctggcaggaggtgcctggggagggaggagtcagccctgaacacccagcacyggggcctccgcatccctgcacggatccctgctctgtctctgacctctcaccgtgttcctcccacactaaacacatctccatctcacacaggggctggtcc

SEQ ID NO: 231450 - DNA, 201 bp, Homo sapiens
cgtctctacgcagtgtcgggccgcacccgtccggctcccccaggctctctcggctcctcctttcatctcctggttctctctccatctgccctctccacccrgtatctcagggctgctatgaaaggtcttcaaagacctagtttcaaaaaacatcccctggagaggaccaattaaacgcagaaggatggtttgtgtgcagag

SEQ ID NO: 231451 - DNA, 201 bp, Homo sapiens
tgctccagctggagcagatgagcgatcatggtggggtcacagcactgggagctgcacaggctccattcggcacggtgtttatttcagagtctctgtttacygtataaatactaggcaggattcaggagttgtggactgtggactgtgtagtctgtgttgtagacaatgcctgccccccaagaagcatgctgcttcccagct

SEQ ID NO: 231452 - DNA, 201 bp, Homo sapiens
cgacggggttagccaccttctcatggctgctgcctctcttcgcagcttcaggccggagaggacctgctttccgattgggcccgggaaaaccagatgtgctygaaggctgtggatttaggatttggtgttccagatatggaagggacacaattcatattatgcggtctgtgaaacaatgatttgacaggccagttaaagcat

SEQ ID NO: 231453 - DNA, 201 bp, Homo sapiens
cagagtgatgggtggccatggccgatggcgtccgtgccgttatcttctctgcggagcaatggggggccgtggccgatggcatccgtgccgttatgttctcygcagagcgatggggggccatggccgatggcatccgtgccgttatgttctctgcagagcaatggggggccattgccgatggcgtccgtgccattatgttct

SEQ ID NO: 231454 - DNA, 201 bp, Homo sapiens
cattcgcactggaggtgggagctgcatgacagctagaacccatctgtcctgcgggctctgcgagcctcgcagtgctcgggctggtgctgtcgctgtgctgsagatgctacatttcatcagggagaattagctgcatatcataattgggcagaaatattttatcttgagctcaaaccgcagagtgtgtatcaaagccaaatt

SEQ ID NO: 231455 - DNA, 201 bp, Homo sapiens
cgaggtagcacctttgctaatgaacttggaaggagttttgatgctagttttactgtgactccccccaggccaggctcgccctggagagggaggtttggtgktaacgcccctcaccgtgtgctgactggggccgcgcatccgctgtggtcccgcaggccgaggtagcacctttgctttcagggctagtggtgtctgcttatc

SEQ ID NO: 231456 - DNA, 201 bp, Homo sapiens
gggagtcagggtgggtgtggggagcggcgggcacagtgtggagttggggagggtgtggggagcggcgggcatggtgtggaattggggtgggtgtggggagwggtgggcatcgtgcggagtcggggtgggagtgggaagcggcaggcgtcgtgtggagttggggtgggtgtggggagaggtgggcatcgtgcggagtcgggg

SEQ ID NO: 231457 - DNA, 201 bp, Homo sapiens
agatccagtatgcatgggtagatggtgagggctctgccaagacccagtatgcatgagtagatggtgagggctctgccaagacccagtatgcatgagtagayggtgagggctctgccaagatccagtatgcatgggtagacagtgagggctctgctaagacccagtatgcatgggtagatggtgagggctctgccaagatcc

SEQ ID NO: 231458 - DNA, 201 bp, Homo sapiens
ccgcaggccgaggtagcacctttgctaatgaacttggaaggagttttgatgctagttttactgtgactccccccaggccaggctcgccctggagagggagktttggtggtaacgcccctcaccgtgtgctgactggggccgcgcatccgctgtggtcccgcaggccgaggtagcacctttgctttcagggctagtggtgtc

SEQ ID NO: 231459 - DNA, 201 bp, Homo sapiens
gagccggggtgggtgtggggagtggcgggcgtcgtgtgcagttggggtgggtgtggggagcagcgggcatcgtgtggagtccagcaaccaagtgggccagrcgtgggccttggaccctggcgtctcctctcactcagcagttctgattttccttcctctgagctcactttacaagtgcattcccgtgccctctcagccatg

SEQ ID NO: 231460 - DNA, 201 bp, Homo sapiens
atgtaaaatgtgtgttaacaatgcacatatttcacttaacggttgcatggtatgatatgcattgtgcaccgtagcacaacgtcgcaccatggcccaggctygtgagcaaggtgggcatggcccacgcggcgagtgcaaaggcctccgctgccttttgtgcatctgccggtctgggctcaccacctaggtgcgctcctgacc

SEQ ID NO: 231461 - DNA, 201 bp, Homo sapiens
ctgctaagatccagtatgcatgggtagatggtgagggctctgccaagacccagtatgcatgagtagatggtgagggctctgccaagacccagtatgcatgrgtagatggtgagggctctgccaagatccagtatgcatgggtagacagtgagggctctgctaagacccagtatgcatgggtagatggtgagggctctgcca

SEQ ID NO: 231462 - DNA, 201 bp, Homo sapiens
gtgttcccgcaggccgaggtagcacctttgctaatgaacttggaaggagttttgatgctagttttactgtgactccccccaggccaggctcgccctggagmgggaggtttggtggtaacgcccctcaccgtgtgctgactggggccgcgcatccgctgtggtcccgcaggccgaggtagcacctttgctttcagggctagt

SEQ ID NO: 231463 - DNA, 201 bp, Homo sapiens
acatatttcacttaacggttgcatggtatgatatgcattgtgcaccgtagcacaacgtcgcaccatggcccaggctcgtgagcaaggtgggcatggcccaygcggcgagtgcaaaggcctccgctgccttttgtgcatctgccggtctgggctcaccacctaggtgcgctcctgaccctgtgtttccctttcagtcctaca

SEQ ID NO: 231464 - DNA, 201 bp, Homo sapiens
gatggtgagggctctgctaagatccagtatgcatgggtagatggtgagggctctgccaagacccagtatgcatgagtagatggtgagggctctgccaagayccagtatgcatgagtagatggtgagggctctgccaagatccagtatgcatgggtagacagtgagggctctgctaagacccagtatgcatgggtagatggt

SEQ ID NO: 231465 - DNA, 201 bp, Homo sapiens
tccttcaggggtcccgggttcacctctgtccttcaggggtcccgggttcacctctgtccttgagggcgtcccgggttcacctctatccttcagggggtccygggttcacctctgtccttcatggggtcctgggttcacctctgtccttgagggcgtcctgggttcacctctgtccttcaaggggtcccgggttcacctctg

SEQ ID NO: 231466 - DNA, 201 bp, Homo sapiens
tgaccctcctgtgctctcggcacacagaccctctagcaggaacttgtagatagagtcccatcctgtagctggatgaccctcctgtgctcacggcacacagmccctctaggaggagcatgtagatagggccccatcctggagactgtggatgttgccatgctcctgggtttctcggttgcctcttggtggttctatgatgga

SEQ ID NO: 231467 - DNA, 201 bp, Homo sapiens
ttccttctcagtagaatccaggtacaaaggtgagctttgtcaggctgttgctgttctttcatttaattggagcctattttcatacattaaaatatacatargcacttttcttaaagaatatgtgaacaggacatggctaagttatataattgtgaaacaaacatttacctgaattacctgaattattgttctacttttaat

SEQ ID NO: 231468 - DNA, 201 bp, Homo sapiens
agctggatgaccctcctgtgctctcggcacacagaccctctagcaggaacttgtagatagagtcccatcctgtagctggatgaccctcctgtgctcacggyacacagcccctctaggaggagcatgtagatagggccccatcctggagactgtggatgttgccatgctcctgggtttctcggttgcctcttggtggttcta

SEQ ID NO: 231469 - DNA, 201 bp, Homo sapiens
gcttaaagaagcctgaattgtttgaggagaccctgaggagcctcggaacttgcccggccccaggaagtgaatcatcagtgcctgggaaacatctggaaatkgaaccctgttcggccctctccagtcacagtgcttaatcattcatttattgatttcaaataaatttactgtttgtggagctatagagcaggagacttttat

SEQ ID NO: 231470 - DNA, 201 bp, Homo sapiens
cagggtgcggtggctcccgcctgtaattccagcactttgggaggctcaaggtgggcagaccacccgaggttgggagctcaagaacagcctggccaagatgrcaaaaccctgtctttactaaaaatacaaaaaaaaattcactgggcctggtggcagacacctgtaatcccagctactggcagcagaatcatttgaacctgg

SEQ ID NO: 231471 - DNA, 201 bp, Homo sapiens
gtggggctgtctgaggtgccagtcactggagacgacgctgcagatgaggcacctcccctgcagcttccccgccctttagtgacacggaaagtggaagccasacatcttggatgtagacgtgggagggagctggggtggaggcagctgggccaccccaccacccctgaaggccggccccacagcggcatctgaaccaccagc

SEQ ID NO: 231472 - DNA, 201 bp, Homo sapiens
gctgcgatatttcacacccgccctgtgtgcacgcggctgggatatttcacaccccactctgtgtgcgtgcggctgggatatttcacacccgccctgtgtgygtgcggctgggatatttcacacccaccctgtgtgcgtgcggctgggatatttcacacccgccctgtgtgtgtgcggctgggatatttcacacccgccctg

SEQ ID NO: 231473 - DNA, 201 bp, Homo sapiens
aagtaatcacacatctggccgtttctccttccaggcggaatcaccagccaggtgcactgctggagattctgctcacaggagggtttccaatcacctctgtycttcaggggtcccgggttcacctctgtccttcaggggtcccgggttcacctctgtccttgagggcgtcccgggttcacctctatccttcagggggtcccg

SEQ ID NO: 231474 - DNA, 201 bp, Homo sapiens
cacctgtcagaatgtgcgggtttctcccttggtctcctgggttccttccaacctctgactctctttagaaatatgcaaaggctacgtattattggaaatcrcaccaatttgggggttttctcagatgcactatttgagactctcctgacctccacgtattaagacccagagctgggtgcaaactgttccacacccctgggc

SEQ ID NO: 231475 - DNA, 201 bp, Homo sapiens
tctccgactccctatccctctgtctctttctatctctgtctctgtccctctcctgctccctttgtctctctctctgtctctgttcctctgtctctgtctcyctctgtctctgtctctctgtttctgtctcttggtcccagccgtcagctgactttgctgtcctcctgggccctggcagaaccacctggcaggctcccgtcc

SEQ ID NO: 231476 - DNA, 201 bp, Homo sapiens
ggaacttgtagatagagtcccatcctgtagctggatgaccctcctgtgctctcggcacacagaccctctagcaggaacttgtagatagagtcccatcctgyagctggatgaccctcctgtgctcacggcacacagcccctctaggaggagcatgtagatagggccccatcctggagactgtggatgttgccatgctcctgg

SEQ ID NO: 231477 - DNA, 201 bp, Homo sapiens
actggctcgcagccttgtttagtctaacttaggtaaaaccctctcggtagacacctgtgtccacacaccaaatgaacccagatgtggaccggagcgatcayggctacagcagcagcccagcctccccctccagatgtgctccacgtctcttgctgtctccaacacgtcagggagccaaccctgtgtcttctgctccctcac

SEQ ID NO: 231478 - DNA, 201 bp, Homo sapiens
cttttttaatactctaaagccatttggagacaaggacagtcaactggaggagtgatgaggttaaggtgtggagaatcacaagtgaaaaagcttagaaaacrtaagactagatttctggttttctttgggcatatttctgaagacaattccaaatgggaatttcagaaatgactgagcaaggtcgaagtaggtatatcactt

SEQ ID NO: 231479 - DNA, 201 bp, Homo sapiens
ggagcatgtagatagagtcccatcctgcagctggatgaccctcctgtgctgacggcacacaggcactgtagcaggaacttgtagatagagtcccatcctgyagctggatgaccctcctgtgctctcggcacacagaccctctagcaggaacttgtagatagagtcccatcctgtagctggatgaccctcctgtgctcacgg

SEQ ID NO: 231480 - DNA, 201 bp, Homo sapiens
ggaaaagccttccatcttttaccctggagtgttacattagctgcagatttttcatatatggcctttattatgttgaggtgattttctgttactcctagttygttgagcgtttttatcatgaaagagggttgaattttgtcagatgctttttctggatcagttgagatgatgatatgggtcctttccttcattctgttagtg

SEQ ID NO: 231481 - DNA, 201 bp, Homo sapiens
ggtggagccgtgcagacagcgtggccctgcctgtctgatatctgtgctcctgttacagcaaactgttctagttcctgcgagaaagtcgccaccagcgcacrcagccacgcctcgctgtgtgtctggagctggtctctgggttgcccacactccacaactgcaggctggctccaggcggcgctttctccgtgcaggcaccag

SEQ ID NO: 231482 - DNA, 201 bp, Homo sapiens
ctttttgaaagactgatactattattgaattactattcaaagaatagtaactattattaatattattactggggggaggcttggaggctctggcggagacmcgcggagctcagactgcagagaggagtgactccaagcctgcctgagtctgtagctaagaacggagctctcccctgtgaaacatgccctcagtgtgtgggt

SEQ ID NO: 231483 - DNA, 201 bp, Homo sapiens
gggctcctcggcactgctgccggcccctggggacttcattgttctgtctcctctttcctggtaagaacaccctttaccctcagaaggcagctttttgaacyccacaatcagaaagtgctccctattttggggggagacaggactctgctacgccccaggagttgatctgtggtggatttgaatataaaaggcagccaggag

SEQ ID NO: 231484 - DNA, 201 bp, Homo sapiens
ggagcatgtagatagagtcccatcctgcagctggatgaccctcctgtgctgacggcacacaggcactgtagcaggaacttgtagatagagtcccatcctgyagctggatgaccctcctgtgctcacggcacacagcccctctaggaggagcatgtagatagagtcccatcctgcagctggatgaccctcctgtgctgacgg

SEQ ID NO: 231485 - DNA, 201 bp, Homo sapiens
gttctaacagatctcttgtgtaaaatctttatgattttctacctataggatcatatcataagtgaacagaaacaattttatgtcttcttttctcatttagrtgacttttacttatttttcttgcctaattcctgtggctggcacctccaatactgtcttgaataacagtggtgaaagcaggcctcctcatattgttcctag

SEQ ID NO: 231486 - DNA, 201 bp, Homo sapiens
gtctgcatggctgtggccacagaacttcgggtaggaagggtctgggggcagcgctgagtgacgggaggagacgcccctggaaggtgcatctggagctgccrgagcagacaccccctggcctcttagagtgtgtgtggtagaagcacagaaatggcagtgctcacacgatgcctgtgaccacattctatggaaaatagagaa

SEQ ID NO: 231487 - DNA, 201 bp, Homo sapiens
ccttatgaactgcaccaggtccgtggctttggcggtggaggccccatcactgcaactcttcttctgggagttcggctctgcctgccacacgtggaggtgckcagggtgggggccagccctggcaaacccaccccacataacgtagtacctcgattctcaccaaagaacaaaaattacttgcgattacgtgcaattagcaat

SEQ ID NO: 231488 - DNA, 201 bp, Homo sapiens
tggagctggatgaccctcctgtggtctcggcacacagcccccgtaggaggagcatgtagatagagtcccattctgcagctggatgaccctcctgtggtctyggcacacagaccctctagcaggaacttgtagatagagtcccatcctgtagctggatgaccctcctgtgctcatggcacacagcccctgtagcaggaacat

SEQ ID NO: 231489 - DNA, 201 bp, Homo sapiens
ccgtgtcagttacaccagcaccgaccgggctttcttataaatgcacagcccgcgtcagttacaccagcacctacccggctctcttacaaacccacagcccstgtcagttacaccagcattgacccggctctcttataaacgcacagcccacgtcagttaagagtgagaagctttcatacctagaaccgcagtgctttgtga

SEQ ID NO: 231490 - DNA, 201 bp, Homo sapiens
cctgaagtcagggagaccatgaacccaccggaagaaagaaactctggacacacctgaaggaacaaactctggacacaccatctttaaaaactgtaacactcaccgcgagggtccgcggcttcattcttgaagtcagcgagaccaagaacccaccaattccggacacaacatgtccatctacatcaggaagttgtgggttct

SEQ ID NO: 231491 - DNA, 201 bp, Homo sapiens
cagagactccgcaggtctcacctcataactccgtctggctgctgattccactttacgtgttctttgaaggcaaatgtgtttcccatgaagcaaattggttyggctgcgacttagtgccactcgctgcatgggaataacttcttagtcgagttcattgctgttccaggtgccggctgcccctggctgcaaggagaggccatt

SEQ ID NO: 231492 - DNA, 201 bp, Homo sapiens
ccgggctttcttataaatgcacagcccgcgtcagttacaccagcacctacccggctctcttacaaacccacagcccgtgtcagttacaccagcaccgaccrggctttcttataaatgcacagcccgcgtcagttacaccagcacctacccggctctcttacaaacccacagcccgtgtcagttacaccagcattgacccgg

SEQ ID NO: 231493 - DNA, 201 bp, Homo sapiens
tcctgaagtcagggagaccatgaacccaccggaagaaagaaactctggacacacctgaaggaacaaactctggacacaccatctttaaaaactgtaacactcaccgcgagggtccgcggcttcattcttgaagtcagcgagaccaagaacccaccaattccggacacaacatgtccatctacatcaggaagttgtgggttc

SEQ ID NO: 231494 - DNA, 201 bp, Homo sapiens
gtgggaggacacggcccagggcgacggcgcctctgagttcaaggggacatgcctctgtgcacactcagcagccgggggatgagaggacagggtggtggggyggggatggagctggggcacaaagaagatcggtttgaataaacgcagctgagtatcgtgtagacgtttgagaggcttcatccctccgtaggatcctcctgt

SEQ ID NO: 231495 - DNA, 201 bp, Homo sapiens
gacggaaaagaccagttactcaattgttggtttttatatcttgggtttactatgctgagtgacgatttgtctgaaaatagaaaggaaaaaaaaaaaaaaaaggcagagccactcctgagacagttgggttcttagcggcaaaggaccctgttaacacaggctcagtttgacttgagttcagggcttctcaggagaggatcc

SEQ ID NO: 231496 - DNA, 201 bp, Homo sapiens
gacgagccgtttgtgtctcgctgctgtgtgtgggagcacaaggagggatcagccgtctgtcctgctgctgtgctcacttcagcagtgctgtctccttcagractcaacatgccctgcagagtaagtatggctgccacagctcacaaactcagccgcagcctcgaccccgctgctctgcccgcggcttcctggctgtggaca

SEQ ID NO: 231497 - DNA, 201 bp, Homo sapiens
ggagagcaggaaggacagaacttgcgtttagcccgttttctattctgggaatgcgacgcgtgatgatttatccgtgcatctgtgttgtcatccgtgttctygcagggcctggttccagcagccaggctggtggctgagtctagaattgcatttgtgacggcggcagccgttattgcaaatgtacctttcttgtgtattgat

SEQ ID NO: 231498 - DNA, 201 bp, Homo sapiens
ttagtagagacggagtttcaccatgttagccgggatgatctcgatctcctgacctcgtgatccgcccgcctcagcctcccaaagtgctgggattacaggcrtgagccaccgcgcccagcctcttccctgctttttactggttcttctcttctttggcagaactctgtttgaacactgggatttgcgaatggcagagaggct

SEQ ID NO: 231499 - DNA, 201 bp, Homo sapiens
gaaggggggtcccagagaccgtgatggagccccatgggaccctcctgttgacagactgtgaaggccttagtcccttcctatgagcatcagcagcgcctccsgggactgaaggtgccaatagggaagatggaaaggggtgtgtgcaccgggcgctgttcccaggacacagcctgtccagttctctttgctgttcttacacat

SEQ ID NO: 231500 - DNA, 201 bp, Homo sapiens
ttggcggccaacaccgttgatgattaaagcttccatcagggtgccgtggacatgctgtgaccccggcgggtggccacagcaaggtccctatgtccttgtcacctgcatgccattccctccaccatgggcagctgcagactccacgacgtggccagtcagagctcccgtccctgcggcaagcccctggttctactgagaagc

SEQ ID NO: 231501 - DNA, 201 bp, Homo sapiens
gagcctcctgagagctgaatttctgaggctcatgaagcccgaaacccagtctctctgaccttgtacaagatgtctgtgcccagggggcctggatgtcccakggtgggtctggctgccccgggaccaccaggagggaacgtgcccaacaggcagcttagaaacagtagaagccagcggcaccgggcggggagcttctcgagg

SEQ ID NO: 231502 - DNA, 201 bp, Homo sapiens
ggctggctctgggagacctgcactttcaggatggtcctagccctgataaaaattacagagatcttttatacacatgcatggacgtatgtccctgcacagayggccaggagcccctctctgctaactcttacacagtggcttgctgtggctgctctggtttcaagtacccagagacctgggtctactgaagaatcgcttgca

SEQ ID NO: 231503 - DNA, 201 bp, Homo sapiens
gtcagaggagggggctcagctgcctgctgtacccaggcaagagcaggtccagcctcctggggcccgcctgcaggagcagcatggatggaggaggacctgagcgctcagctctgcttgtgctggggttgggcgggagagttgaagccggcgtgggcacatccctgtccttctgaggagagtggctattgtcatttgctggtc

SEQ ID NO: 231504 - DNA, 201 bp, Homo sapiens
agagaagcccaggccgccccttttctctccggcagagacctgaccctggaggcctcccacgagcctcctgagagctgaatttctgaggctcatgaagcccraaacccagtctctctgaccttgtacaagatgtctgtgcccagggggcctggatgtcccagggtgggtctggctgccccgggaccaccaggagggaacgtg

SEQ ID NO: 231505 - DNA, 201 bp, Homo sapiens
gagatcttttatacacatgcatggacgtatgtccctgcacagatggccaggagcccctctctgctaactcttacacagtggcttgctgtggctgctctggkttcaagtacccagagacctgggtctactgaagaatcgcttgcagtgtcatgggggagggagttagatttgcagtgtcacggaggggggagggtgttatat

SEQ ID NO: 231506 - DNA, 201 bp, Homo sapiens
acacaccctcgagctgaaggcagctggtgctgggacgcggagacctcggctgagctccctgggggtggagatgggcttctctccactgctggctaatgtcmgccagagccacagcaaagaggggacccaggagaggtggccccggggagctgaaactcagggagatggcccagggctgggctggcctgagtatagcaagta

SEQ ID NO: 231507 - DNA, 201 bp, Homo sapiens
ccccacccccgaaaacacaccctcgagctgaaggcagctggtgctgggacgcggagacctcggctgagctccctgggggtggagatgggcttctctccacygctggctaatgtccgccagagccacagcaaagaggggacccaggagaggtggccccggggagctgaaactcagggagatggcccagggctgggctggcct

SEQ ID NO: 231508 - DNA, 201 bp, Homo sapiens
tcagggttctgtaggctgtacaggaagcatggtggcctctgctcctggggaggcctcaggaagtatccagtcatggcggaaggcaaaggggagccaagacstcacatggcaggtgcaggagggagagaacagatggggagtgccgcacacttttaacaacaccatctcaggaaagcctgctcactatcctgaggacagcgc

SEQ ID NO: 231509 - DNA, 201 bp, Homo sapiens
tccgcccggtcatgctttgaagttgaagcgcagtgcccatcgattgcacacattaaatgaccagccacgctgtagaacgtacagctcatgaataagaagtrcccaagccctcctagtcactggaaagcctcaggtccagccatcacggggcagcctccgggtggcccatctgcgggctgtaggagcagagacccccggccc

SEQ ID NO: 231510 - DNA, 201 bp, Homo sapiens
cctctttcccagggtggcctgaccacaaccccggccgggcaagggagtagggaggaccgtacagagtttctcttccccagctcattgttttggagacagayttggaggcaaggccagagctgtacgtcccagcccctgcgtgtgcacctcgtgcagcagtgtggcaaggccctgacagtgccttcaaggggtgcttctggc

SEQ ID NO: 231511 - DNA, 201 bp, Homo sapiens
actatcctgaggacagcgccaaggggatggtctaaaccacccatgagaaaccaccctgtgacccagccacttcccaccaggccccacctccagccctgggsctacatttcaacatgagactggccaggacacagatccaaaccacatcacaaggccatgcggaggcagcgcctactgtgtgcctggcaaacagttggcatt

SEQ ID NO: 231512 - DNA, 201 bp, Homo sapiens
cactgctgattaatcccaaactggggtcccttgcctccactttagaaaaagagatgagttttaaactcggcacccgcggccctgggagattgatccgcccrgtcatgctttgaagttgaagcgcagtgcccatcgattgcacacattaaatgaccagccacgctgtagaacgtacagctcatgaataagaagtacccaagc

SEQ ID NO: 231513 - DNA, 201 bp, Homo sapiens
aagcttggtcctggaggaggcctgtgtttgtgttttggggacagtgacgcttgcgaatgaaattactttggcctgtgggaacagtgctctaaggaccactrtttaaaacaaattaccaagataaatgagctctttttcttatttctccaaaaatccaaccacagaaaatgctcaatattttctttcaaatgaaagaaactg

SEQ ID NO: 231514 - DNA, 201 bp, Homo sapiens
ctatcctgaggacagcgccaaggggatggtctaaaccacccatgagaaaccaccctgtgacccagccacttcccaccaggccccacctccagccctggggstacatttcaacatgagactggccaggacacagatccaaaccacatcacaaggccatgcggaggcagcgcctactgtgtgcctggcaaacagttggcattc

SEQ ID NO: 231515 - DNA, 201 bp, Homo sapiens; identical to SEQ ID NO: 42941

SEQ ID NO: 231516 - DNA, 201 bp, Homo sapiens
gtttatttagctcacagttgtggaggctgggaagtccgagggcatggcagcagctctgacaagggctttcttactgcgccatgccctggaagaagggccartgagcatgtataatgagacgacaagcatgaggggctgggctcgccttacagcagccctccctgcctgcggcagcccactcccacaagaattatcacactc

SEQ ID NO: 231517 - DNA, 201 bp, Homo sapiens
cccagaggcagtggggtccagccttctgtctgcacagtgaaggggttgcgtcctagaactctgaaatgtggggccccctggttcactgagtccctgagatyggagttctgtggggtccagccttctgtctgcacagtgaagggggttgcatcccagaactctgggggtgtgaggccccccagttcgttgagtccctgatat

SEQ ID NO: 231518 - DNA, 201 bp, Homo sapiens
ctgcagggaagacagagggagaaggcacgaagccgtcatcgaggagcacctgggggttaggcttccgcgcagaggcacgggcagtgtctgtttgccggaasggtttatgatgttggattggcggcatccttgggcatgcacagtaagtttggcagttaaacacgttagcggctgtgcttatgtgcgtgtatgagttagcag

SEQ ID NO: 231519 - DNA, 201 bp, Homo sapiens
catcgaggagcacctgggggttaggcttccgcgcagaggcacgggcagtgtctgtttgccggaagggtttatgatgttggattggcggcatccttgggcaygcacagtaagtttggcagttaaacacgttagcggctgtgcttatgtgcgtgtatgagttagcagctgtgcacgtgtttctgtataaggattgacatgtac

SEQ ID NO: 231520 - DNA, 201 bp, Homo sapiens
tttaaatgtccttttggcattgtttattttagtgtatagaagtacaaatgatttctgtatattgattttataccctgcaactttactaaatttgttaatamattctattaagttctaacagatctcttgtgtaaaatctttatgattttctacctataggatcatatcataagtgaacagaaacaattttatgtcttcttt

SEQ ID NO: 231521 - DNA, 201 bp, Homo sapiens
ctcctgtgctgacggcacacagcccccgtagcaggaacatgtagatagagtcccatcctggagctggatgaccctcctgtggtctcggcacacagcccccstaggaggagcatgtagatagagtcccattctgcagctggatgaccctcctgtggtctcggcacacagaccctctagcaggaacttgtagatagagtccca

SEQ ID NO: 231522 - DNA, 201 bp, Homo sapiens
ctgccaccacgcccggttaatttttttgtatttttagtagagacggggtttcactgtgttagccaggatggtcttgatctcttgacctcgtgatccacccycttcggcctcccaaagtgctgggattacaggcatgagccaccgcgcccggcctttatgctgtaagattttattgctcatagaaccaagaaaaaaatgaaa

SEQ ID NO: 231523 - DNA, 201 bp, Homo sapiens
cttaaacacccccagcccgctattctacagcgtgcacacaggaaggaaaggatgccgcagaagggagggactgtctctgactgcaggtccacctgaggccrggagactgcccggctcagcctgcaggcttgcatctgacttgcaccgtggctgtcaaagctgagagtgtgcatctgctgagcacgtctgtgctgggcgctg

SEQ ID NO: 231524 - DNA, 201 bp, Homo sapiens
tctcataaatgcacagcccacgtcagttacaccagcacctacccggctctcttacaaacccacagcccgtgtcagttacaccaggaccgaccgggctttcwcacaaaggcagagcccgcaacagttacaccaggaccgaccaggctttcttataaatgcacagcccacgtcagttacaccagcaccgaccgggctttctta

SEQ ID NO: 231525 - DNA, 201 bp, Homo sapiens
ggcatggcaatgatggcgatggtaaggatgatgatggtgatgatgatggtgaagatagtgatgatatggtgatgacgatgatggtgatgatgatgatgatrgtgttgatgataacaatgatggtgataacaatgatgatggtgacggtgatattgacaacaatgatgatgacaatgaggatggtgataacaatgatgatga

SEQ ID NO: 231526 - DNA, 201 bp, Homo sapiens
ggggacctcactgagaagcggcatcgtctgccctggggatggggtgagggcatgaccacagatctcccccctgcagacttctctcccaggcccgaactgtrgcctgtttccactcaaggctgcctggccattatggaaattctttatgtgtggaacacattctcagagaacgtgtgaagtaattacatccaagctgatggg

SEQ ID NO: 231527 - DNA, 201 bp, Homo sapiens
ttctgggggatgtgatccgcgtttatccagaaggcacctgggtcagattcactcaattcccagcattctgggggatgtgatccgcatttatctggaaggcwctgaggtcagattcactcaattcccagcattctgggggatgtgatccgcattgatccggaaggcacctgggtcagattcactcaattcccagcattctgg

SEQ ID NO: 231528 - DNA, 201 bp, Homo sapiens
aatggcatggcaatgatggcgatggtaaggatgatgatggtgatgatgatggtgaagatagtgatgatatggtgatgacgatgatggtgatgatgatgatratagtgttgatgataacaatgatggtgataacaatgatgatggtgacggtgatattgacaacaatgatgatgacaatgaggatggtgataacaatgatga

SEQ ID NO: 231529 - DNA, 201 bp, Homo sapiens
gtatctttgctcttaagttgtcttgattcttatgtgtcttccagggcctttctcaggagtctttgagcctgagattcacctgacctccattgtcttcatcstggccttcctcaggccttctgatgcctcagactgctctggggagggcatagtgaggaagcacagaaaagaaatctcaggcaggatgccctgatgctccat

SEQ ID NO: 231530 - DNA, 201 bp, Homo sapiens
aggatgtggtccgcctttatccagaaggcacctgggtcagattcactcaattcccagcattctgggggatgtgatccgcattgatctggaaggcacctggrtcagattcattcaattcccagcattctgggggatatggtccgcgtttatccggaaggcacctgggtcagattcactgaattcccagcattctgggggatg

SEQ ID NO: 231531 - DNA, 201 bp, Homo sapiens
gaagtgattacttactaaatggcatggcaatgatggcgatggtaaggatgatgacggtgatgatgaagtgattacttactaaatggcatggcaatgatggygatggtaaggatgatgatggtgatgatgaaggattatttattaaatggcatggcaatgatggcgatggtaaggatgatgacggtgatgatgaagtgattg

SEQ ID NO: 231532 - DNA, 201 bp, Homo sapiens
catttggaccagttccacttggcttgagatgggcttcactctagaccctcctctgccagctcagcacgaagtgtgcatagtcacctgatggcaccctgtgrtcattttcacgttgtaggaggaaaaatcgttttaaaattggcttaaatgaggagggaacaacctgaccgtcttttgatggtgcagcttttaaccctaaaa

SEQ ID NO: 231533 - DNA, 201 bp, Homo sapiens
cacattgatctggaaggtgctggggtcagatttgctcaattcccagcattctggaggaatgtggtccacgttaatccggaaggcacctgggacagattggytcagttcccggcattctagggggatgtggtccacgttgatttggaaggcactggggtgagattcactcagttcctggcattctggagggatgtggtcaca

SEQ ID NO: 231534 - DNA, 201 bp, Homo sapiens
tgcaattctcatccttgaccgttggtaccgggcagttgcaaaaggctgagcaagtacagcccaggcagggagaccacagggcctgcccgggccccggagamgcggctctccgaagacaagacgtcccggggggctgtttttccatttggaccagttccacttggcttgagatgggcttcactctagaccctcctctgccag

SEQ ID NO: 231535 - DNA, 201 bp, Homo sapiens
tgtcagaggagggggctcagctgcctgctgtacccaggcaagagcaggtccagcctcctggggcccgcctgcaggagcagcatggatggaggaggacctgagcgctcagctctgcttgtgctggggttgggcgggagagttgaagccggcgtgggcacatccctgtccttctgaggagagtggctattgtcatttgctggt

SEQ ID NO: 231536 - DNA, 201 bp, Homo sapiens
actaaatggcatggcaatgatggcgatggtaaggatgatgacggtggtgatgaaggattatttactaaatggcatggcaatgatggtgatggtaaggatgrtgacggtgatgatgaagtgattacttactaaatggcatggcaatgatggcgatggtaaggatgatgacggtgatgatgaagtgattacttactaaatggc

SEQ ID NO: 231537 - DNA, 201 bp, Homo sapiens
atgaaggattatttactaaatggcatggcaatgatggcgatggtaaggatgatgacggtggtgatgaaggattatttactaaatggcatggcaatgatggygatggtaaggatggtgacggtgatgatgaagtgattacttactaaatggcatggcaatgatggcgatggtaaggatgatgacggtgatgatgaagtgatt

SEQ ID NO: 231538 - DNA, 201 bp, Homo sapiens
ggtatgtgtctgtgtgtatgtgtggtgtgtgtgtttctgtgtatgtgtgtgcgaggtacttgtctatgtgaatgtggttgtgtgtgtgcgtgtatgctgtrtctgtgtgtgtttgtggtatgtgtgctgtgtataaaaggacaacccacagcactaaacctgaatctatagattcccaggtacctgcgtatcagaaaatat

SEQ ID NO: 231539 - DNA, 201 bp, Homo sapiens
gtgtcagaggagggggctcagctgcctgctgtacccaggcaagagcaggtccagcctcctggggcccgcctgcaggagcagcatggatggaggaggacctgagcgctcagctctgcttgtgctggggttgggcgggagagttgaagccggcgtgggcacatccctgtccttctgaggagagtggctattgtcatttgctgg

SEQ ID NO: 231540 - DNA, 201 bp, Homo sapiens
catggcaatgatggcgatggtaaggatgatgacggtgatgatgaaggattatttactaaatggcatggcaatgatggcgatggtaaggatgatgacggtgrtgatgaaggattatttactaaatggcatggcaatgatggtgatggtaaggatggtgacggtgatgatgaagtgattacttactaaatggcatggcaatga

SEQ ID NO: 231541 - DNA, 201 bp, Homo sapiens
gcgtgtaacccggctgccccggaacctccggcgcgtggggctctcgcgtgtaacccggctgccccggaacctccggcgcgtggggctctcgcgtgtaaccyggctgccccggaacccctcctgcacatgggcgggctgagggccaggcgcaagggcacctgtgcccaggcggcaggcagtaggcaccagtccatggtgggc

SEQ ID NO: 231542 - DNA, 201 bp, Homo sapiens
ctggagggcatgtttcccgatggctgttgataaatgttcattctcgtggtctgccctgctgcttgttaatcccaacaccaggaattggttgtgtttagcttgctgcatagcagacacctctgtgtggctggatccaacctcagaggtgtgtggagctctctctgtgaaacctttggtgtcctctgaggggtgtggacacag

SEQ ID NO: 231543 - DNA, 201 bp, Homo sapiens
aatggcatggcaatgatggcgatggtaaggatgatgacggtgatgatgaaggattatttactaaatggcatggcaatgatggcgatggtaaggatgatgayggtggtgatgaaggattatttactaaatggcatggcaatgatggtgatggtaaggatggtgacggtgatgatgaagtgattacttactaaatggcatggc

SEQ ID NO: 231544 - DNA, 201 bp, Homo sapiens
ccggctgccccggaacctccggcgcgtggggctctcgcgtgtaacccggctgccccggaacctccggcgcgtggggctctcgcgtgtaacccggctgcccyggaacctccggcgcgtggggctctcgcgtgtaacccggctgccccggaacccctcctgcacatgggcgggctgagggccaggcgcaagggcacctgtgcc

SEQ ID NO: 231545 - DNA, 201 bp, Homo sapiens
gctggagggcatgtttcccgatggctgttgataaatgttcattctcgtggtctgccctgctgcttgttaatcccaacaccaggaattggttgtgtttagcttgctgcatagcagacacctctgtgtggctggatccaacctcagaggtgtgtggagctctctctgtgaaacctttggtgtcctctgaggggtgtggacaca

SEQ ID NO: 231546 - DNA, 201 bp, Homo sapiens
atgaaggattatttactaaatggcatggcaatgatggcgatggtaaggatgatgacggtggtgatgaaggattatttactaaatggcatggcaatgatggygatggtaaggatgatgatggtgatgatgaaggattatttactaaatggcatggcaatgatggtgatggtaaggatgatgatggtgatgatgaaggattat

SEQ ID NO: 231547 - DNA, 201 bp, Homo sapiens
accggacctccggcgcgtggggctctcgcgtgtaacccggctgccccggaacctccggcgcgtggggctctcgcgtgtaacccggctgccccggaacctcyggcgcgtggggctctcgcgtgtaacccggctgccccggaacctccggcgcgtggggctctcgcgtgtaacccggctgccccggaacctccggcgcgtggg

SEQ ID NO: 231548 - DNA, 201 bp, Homo sapiens
agtccctacttcccaaaatgtgcagacatcaacgtaaggcaacaacaacaacaacaacaacaaacatgaaaaaccaaggagacacaacaccaccaaaaaccacaataatctcccagcagcagactccaaagaaatggagataaacaaatggcccgataattcaaagtaagtgtttgaaggaagttcatgaacttcaagaaa

SEQ ID NO: 231549 - DNA, 201 bp, Homo sapiens
ccgtgtgcaggtgcacaaaccggacctccggcgcgtggggctctcgcgtgtaacccggctgccccggaacctccggcgcgtggggctctcgcgtgtaaccsggctgccccggaacctccggcgcgtggggctctcgcgtgtaacccggctgccccggaacctccggcgcgtggggctctcgcgtgtaacccggctgccccg

SEQ ID NO: 231550 - DNA, 201 bp, Homo sapiens
cctcggaaaggtgggtgaaccacgcgcatggagagtggtgcagtgtctgggcagacaggcagggtcagcgggccccatgggcttagaccctcagaaaggcrggtgaaccacgatgtggtgcagtgtctgggcagacaggcagggtcagcgggtgccatgggctctgaccctcggaaaggcgggtgaaccacgatgtggtgc

SEQ ID NO: 231551 - DNA, 201 bp, Homo sapiens
aatatgcattcatggtaataaatattcatatttgtctgctcaggagatgaaaatctaatcaaggggctattgaagctctggctttttttttttttttttttaacaaagacgtttcatctaaattgggtttgatatggaaattagtctcactcaaagtcctccaggccacgagtaagccgggctcacgtggggtgaggtggc

SEQ ID NO: 231552 - DNA, 201 bp, Homo sapiens
ccctcggaaaggtgggtgaaccacgcgcatggagagtggtgcagtgtctgggcagacaggcagggtcagcgggccccatgggcttagaccctcagaaaggyaggtgaaccacgatgtggtgcagtgtctgggcagacaggcagggtcagcgggtgccatgggctctgaccctcggaaaggcgggtgaaccacgatgtggtg

SEQ ID NO: 231553 - DNA, 201 bp, Homo sapiens
gcttagaccctcggaaaggtgggtgaaccacgcgcatggagagtggtgcagtgtctgggcagacaggcagggtcagcgggccccatgggcttagaccctcrgaaaggcaggtgaaccacgatgtggtgcagtgtctgggcagacaggcagggtcagcgggtgccatgggctctgaccctcggaaaggcgggtgaaccacga

SEQ ID NO: 231554 - DNA, 201 bp, Homo sapiens
tgaggggccaccacagaaagaaggcacaatacatctcttttctaatgaacttgcatttcagagcttaaatccaaagtaattggatttcacagtcaaagtgygctttcacttcgtgtggtctatggacacggctgcgtgtcctccacatgcgtcgcagcctgggctgatcttaaaaacaactttatgtacagcaggtgtgtc

SEQ ID NO: 231555 - DNA, 201 bp, Homo sapiens
gcagggtcagcgggccccatgggcttagaccctcataaagatgggtgaaccacgcacatggagagtggtgcagtgtctgggcagacaggcagggtcagcgrgctccatgggcttagaccctcggaaaggtgggtgaaccacgcgcatggagagtggtgcagtgtctgggcagacaggcagggtcagcgggccccatgggct

SEQ ID NO: 231556 - DNA, 201 bp, Homo sapiens
gtttcattctgtgaggaatcactcactgaagtgtggtgtggcctcagtggccgcacctgcctcctgccgagggcttcggggcccaggtgtggcccttcggrcgcctgtttcccttcagcttctcttcgcagactttgaggcccaggcactgccctgcctgcatctggagcccttctccttccaggggcccgcctcacgttg

SEQ ID NO: 231557 - DNA, 201 bp, Homo sapiens
caactgggtgctatggagatgtggggcagcatctgggcagacaggcagggtcagcgggcgccgtgggcttggaccctcagaaaggcgggtgaaccgtgcgsatggagagtggtgcagtgtttgggcagacaggcagggtcagcaggcaccgtgggcttagaccctcagaaaggcaggtgaaccacgatgtggtgcagtgtc

SEQ ID NO: 231558 - DNA, 201 bp, Homo sapiens
agggtccaggggcttcttgttcagtgtggacaggggtgctccttgccgagacctgcagagtgaagccgacacaggggagaggtggctacatcctggggtcrggggaatcctccgaaagtattttctgtggggagaaggctgctgtggagctggggttctccagagaaacagactcagcagggggtttgtatgtgtgtataa

SEQ ID NO: 231559 - DNA, 201 bp, Homo sapiens
tcactttcattcctgtgaaacaaaggatctattaaaagtctaattagggttgtgtgtgtgcaaacccttttactgaagtgccaatctatttttttttttttaatgagatcataaagcaaaaagaacattcttaagaagtaactttcttctgttgacaagcacttggacttaacgttccacgaaaacaggaaatcctctcct

SEQ ID NO: 231560 - DNA, 201 bp, Homo sapiens
gtttaatgcaacttaaacacgtcacatttaatttgtctatgtggtaagactaatagtaaaaattgaggtcttcagtgcaaagcagatctgggttcacatcytgcctttgggtgttgttgtgtgaccctgagcagacaggcagcctccctgggcctctccttcccatctgcagagggtgggcagtggtctgcacgtggcatg

SEQ ID NO: 231561 - DNA, 201 bp, Homo sapiens
ttaatgcaacttaaacacgtcacatttaatttgtctatgtggtaagactaatagtaaaaattgaggtcttcagtgcaaagcagatctgggttcacatcttrcctttgggtgttgttgtgtgaccctgagcagacaggcagcctccctgggcctctccttcccatctgcagagggtgggcagtggtctgcacgtggcatggc

SEQ ID NO: 231562 - DNA, 201 bp, Homo sapiens
gctcaagaacctttcagcaggatccccagggcagaagcaggtgcctctgagagctggcagggatgacactgcaggcatgtgcagctgtcccatggctgacvctcctgtgcgatgtctcccctgcatctccactgcagttcagatgtaatttccaaccagtgggtgctgcagtttttctgagacagccaactattcaaagca

SEQ ID NO: 231563 - DNA, 201 bp, Homo sapiens
ctttcatgtggactacagggtttctttttcttctttttccttctttctatcttccttttattttactttctttgagacatgtaagagtatgtgtgtgcatmtgaaatgagaatctggcagcattcagagttttccggctcaattccgtgtccagatttgaaattcagaaaatcagatggtgttggaagctgccattgatgg

SEQ ID NO: 231564 - DNA, 201 bp, Homo sapiens
aatttcagttccatctcatttacatcaaacagagcatatggctcccaaagcagcccagaacatgctgcggagaaaactagcaatttactccacgattcagyttcatttttctttcattttcatggaaaccataagattgtttttgtgtttcaaatcaaacatgtttttgagcaaagagtacattacccagctgtcctaaaa

SEQ ID NO: 231565 - DNA, 201 bp, Homo sapiens
acttgcaccgtgtagcggaatcagatgagaggcacaagacgcattgtgacaccacataagcaccacaaagagaaagctgtggattgggtattgggtattcmtatatatgtgcatatatatatgtgtgtgtgtgtgtatatatatgtgtatatatatgtgtatatatgtgtatatatatgtgtatatatatgtgtgtgtata

SEQ ID NO: 231566 - DNA, 201 bp, Homo sapiens
taaaataaataggaaaactccaagaaacaaactcagccttacatgttcatttcctaccagggtgggtgtcactaatatccacaggctgagctcttttttcmagtgtgattccagtcagcttttcaaccaaaggcctgagagctgtgcaggacatgacaggtgcaccaggggaccaccagccagaatgggaccaacaagggg

SEQ ID NO: 231567 - DNA, 201 bp, Homo sapiens
ctttcagcgtcggttcagtttctggtctggcgtaacttgcaccgtgtagcggaatcagatgagaggcacaagacgcattgtgacaccacataagcaccacraagagaaagctgtggattgggtattgggtattcatatatatgtgcatatatatatgtgtgtgtgtgtgtatatatatgtgtatatatatgtgtatatatg

SEQ ID NO: 231568 - DNA, 201 bp, Homo sapiens
acaagcatgaggggctgggctcgccttacagcagccctccctgcctgcggcagcccactcccacaagaattatcacactcctgcaagaaaccatcagtccytcttaatgacctaatcacctcttaaaggccccacctccaacactgccacaatggtaatcaaatttcagcatgagtttcagatggtataaaccatatttga

SEQ ID NO: 231569 - DNA, 201 bp, Homo sapiens
catgagtttcagatggtataaaccatatttgagccacagcaggatggtacattctgtgggtttgggcaagtgtatgatgacacgtatccatcatcatagcrtcaaacagagtggtttccctgtcatgaaagcctctgtgctctgctggtacctctctcttcccccaactcctcattacctccaccacaacttacactgtct

SEQ ID NO: 231570 - DNA, 201 bp, Homo sapiens
accacaacttacactgtctccatcctttgttcttttccagaacgtcttagcgttggaatcatgcagtgtgtagcctttccaggatggcttctttcacttakcaagaggcatttaaggttcctgcaagccctgtgtcatggtttgacggctcattccgttttagccctgaatgatatcctattatatggatacaccacggtt

SEQ ID NO: 231571 - DNA, 201 bp, Homo sapiens
tgccgtggggagagcacttccagcgggaggggcaagcatccctgagtgcagccagaacccagacggggctgctgaggcctctgagctttcagtgcctcttkgcataaagaggtgtgcacagaggaaggaacaggacttattttcttggtaggcaggtacttgaggagatggagactggcatggaagagtcgtgtgggggac

SEQ ID NO: 231572 - DNA, 201 bp, Homo sapiens
gtctgtttgccggaagggtttatgatgttggattggcggcatccttgggcatgcacagtaagtttggcagttaaacacgttagcggctgtgcttatgtgcrtgtatgagttagcagctgtgcacgtgtttctgtataaggattgacatgtacacatatatttgcacacgagtgttttgatggtgacagtagccaaggacgg

SEQ ID NO: 231573 - DNA, 201 bp, Homo sapiens
aatggcatggcaatgatggcgatggtaaggatgatgacggtggtgatgaaggattatttactaaatggcatggcaatgatggcgatggtaaggatgatgayggtgatgatgaaggattatttactaaatggcatggcaatgatggcgatggtaaggatgatgacggtggtgatgaaggattatttactaaatggcatggca

SEQ ID NO: 231574 - DNA, 201 bp, Homo sapiens
atggtgacgatgaagtgattgtttactaaatggcatggcaatgatggtgacggtatggttgatgacggtgatgatgaagtgattacttactaaatggcatkgcaatgatggcgatggtaaggatgatgatggtgatgatgaaggattatttattaaatggcatggcaatgatggcgatggtaaggatgatgacggtggtga

SEQ ID NO: 231575 - DNA, 201 bp, Homo sapiens
cacatatgccccctgaggttaacccggcagaactgctgcgtcccagtgacggagaccagggtcccagggatgcagccagcttggccaccccgggggcttgycctcaggcctaggccctgcattagacagctgcctgcaaggccagaagacaaagaggagagcaggaggtctgccggggtcaggtgggcctgaggaagggaa

SEQ ID NO: 231576 - DNA, 201 bp, Homo sapiens
ttactaaatggcatggcaatgatggtgatggtaaggatgatgatggtgacgatgaagtgattgtttactaaatggcatggcaatgatggtgacggtatggwtgatgacggtgatgatgaagtgattacttactaaatggcattgcaatgatggcgatggtaaggatgatgatggtgatgatgaaggattatttattaaatg

SEQ ID NO: 231577 - DNA, 201 bp, Homo sapiens
acacatatgccccctgaggttaacccggcagaactgctgcgtcccagtgacggagaccagggtcccagggatgcagccagcttggccaccccgggggcttstcctcaggcctaggccctgcattagacagctgcctgcaaggccagaagacaaagaggagagcaggaggtctgccggggtcaggtgggcctgaggaaggga

SEQ ID NO: 231578 - DNA, 201 bp, Homo sapiens
aatggcatgccaatgatggcgatggtaaggatgatgatggtgatgatgaaggattatttactaaatggcatggcaatgatggcgatggtaaggatgatgayggtggtgatgaaggattatttactaaatggcatggcaatgatggtgatggtaaggatgatgatggtgacgatgaagtgattgtttactaaatggcatggc

SEQ ID NO: 231579 - DNA, 201 bp, Homo sapiens
atgaatgctgaaataacaaagtcggtagaaaatgacggccatgggagagacacatatgccccctgaggttaacccggcagaactgctgcgtcccagtgacrgagaccagggtcccagggatgcagccagcttggccaccccgggggcttgtcctcaggcctaggccctgcattagacagctgcctgcaaggccagaagaca

SEQ ID NO: 231580 - DNA, 201 bp, Homo sapiens
aagacccaaacacaagatctgaaactgtaaaactctgaaaacatacaggaagagctccttgacattggtctcggcaagaagttttggacaagacccaaaarcacaggcaacaaaagcaaaataaatgagtgggactatatcaaactgaaaagctgccgtgcggtaaaggaaaccatcaaaatgaaaaggcagcctacaggg

SEQ ID NO: 231581 - DNA, 201 bp, Homo sapiens
aatgaatgctgaaataacaaagtcggtagaaaatgacggccatgggagagacacatatgccccctgaggttaacccggcagaactgctgcgtcccagtgasggagaccagggtcccagggatgcagccagcttggccaccccgggggcttgtcctcaggcctaggccctgcattagacagctgcctgcaaggccagaagac

SEQ ID NO: 231582 - DNA, 201 bp, Homo sapiens
tataaaaatacagaattagtcgggcatggtggtgcacgcacgtaatcccagctacttgggaggttgaggcaggagaatcgcttgaaccttggaggcagagkttgcagtgagctgagatctcaccaccgcactccagcctgggtgacagagcaagacctcatctaaaaaaaaaaaaaatccatgtgatctataaaatctcac

SEQ ID NO: 231583 - DNA, 201 bp, Homo sapiens
cagtgttcccgcagagtctacgtggccaggcagtgttcccgcagagtctgtgtgaccaggcagtgttcccgcagagtctacgtggccaggcagtgttccckcagagtctacgtggccaggcagtgttcctgcagagtctgtgtgaccaggcagtgttcccgcagagtctacgtggccaggcagtgttcctgcagagtctac

SEQ ID NO: 231584 - DNA, 201 bp, Homo sapiens
tgcacaactgggtgctatggagatgtggggcagcatctgggcagacaggcagggtcagcgggcgccgtgggcttggaccctcagaaaggcgggtgaaccgygcgcatggagagtggtgcagtgtttgggcagacaggcagggtcagcaggcaccgtgggcttagaccctcagaaaggcaggtgaaccacgatgtggtgcag

SEQ ID NO: 231585 - DNA, 201 bp, Homo sapiens
cgcagccttgaactcctagtctcaagtaatcctctcacctcagcctccctagtagctgggactacaagcacacaccatcatgcctggctatttaaaaaaawttttttttttgcagtgatggagtctcactatgtttcccaggctagtcttgaactcgtgacctcaagtggtcctcccaccttgacctcccgaagtgctggg

SEQ ID NO: 231586 - DNA, 201 bp, Homo sapiens
gcagtgttcccgcagagtctacgtggccaggcagtgttcccgcagagtctacgtggccaggcagtgttcccgcagagtctacgtggccaggcagtgttccygcagagtctacgtggccaggcagtgttcctgcagagtctacgtggccaggcagtgttcccgcagagtctgtgtgaccaggcagtgttcccgcagagtcta

SEQ ID NO: 231587 - DNA, 201 bp, Homo sapiens
gaggctgaggcaggagaattgcttgaacctgggaggcagaggttgcagtgagccaagaccatgccattgcactccagcctgggcaacagagtgagactccmtctcaaaaaaaaaaaaaaaattgcttcctgagagccctgcgtgcatctgcagaaaggtgggaaggacagacttgcatggcagtttccccagggcagccca

SEQ ID NO: 231588 - DNA, 201 bp, Homo sapiens
caggaggggcgcagagaggggtggccgagcaggaggggcgcagagaggggtggccgagcaggaggggcgcagagaggggtggccgagcaggaggggcgcagagaggggtggccgagcaggaggggcgcagagaggggtggccgagcaggaggggcgcagaggggtggccgagcaggaggggcgcagagaggggtggccgag

SEQ ID NO: 231589 - DNA, 201 bp, Homo sapiens
cagtgttcccgcagagtctacgtggccaggcagtgttccctcagagtctacgtggccaggcagtgttcccgcagagtctacgtggccaggcagtgttccckcagagtctacgtggccaggcagtgttcccgcagagtctacgtggccaggcagtgttcccgcagagtctacgtggccaggcagtgttcccgcagagtctac

SEQ ID NO: 231590 - DNA, 201 bp, Homo sapiens
aatcaattgaacttgggaggcagaagttgcagtaggctgggatcacaccactgcactccagcctggatgacagagcaagactctgtctaaaaaaaaaaaamcaaaaaaaaaaaaaacaaaaaacagctcatttaaagtctttgtcttgtaagccatttggcttccccaagaacagcttctattgttttcctgtggaagagg

SEQ ID NO: 231591 - DNA, 201 bp, Homo sapiens
gcaggaggggcgcagagaggggtggccgagcaggaggggcgcagagaggggtggccgagcaggaggggcgcagagaggggtggccgagcaggaggggcgcagagaggggtggccgagcaggaggggcgcagagaggggtggccgagcaggaggggcgcagaggggtggccgagcaggaggggcgcagagaggggtggccga

SEQ ID NO: 231592 - DNA, 201 bp, Homo sapiens
ctgtgagtccccgtgcagtgagaggtaacagcagtgttcctgcagagtctaagtggccaggcagtgttcctgcagagtctacgtggccaggcagtgttccygcagagtctacgtggccaggcagtgttcccgcagagtctacgtggccaggcagtgttccctcagagtctacgtggccaggcagtgttcccgcagagtcta

SEQ ID NO: 231593 - DNA, 201 bp, Homo sapiens
gatgctgcacttgagtgagtgctgctggagcattgatggtgctgtttgctacgggagctgcccgcctggagtggccactttccctccggcacctctccctstggggcgacgtctcctctgttctaagccatgctctactccgagaaaccccttttcttgatggccctgcctcctgcacttgcgtgggtactagacaccatc

SEQ ID NO: 231594 - DNA, 201 bp, Homo sapiens
gagctgggggctggggagctggaggccggggagctggggccggggagctgggggccggggagctgggggccagggagctggaggccggagagctgggggcyggggagctgaggccggggagctggaagccggagagctgggggccggagagctgggggccggggagctggaggcccgggagctgaggccaaggagctgggg

SEQ ID NO: 231595 - DNA, 201 bp, Homo sapiens
cagctgagaaaccaagagtggctgcagtgtcaccgcggacgcctggacgtgctgagactcaccccggggccatggagagtggctgcagtgtcaccgcagaygcctggacgtgctgagactcaccctggggccatggagagtggctgcagtgtcaccgcggatgcctggacatgctgagactcaccacggggccaccgagag

SEQ ID NO: 231596 - DNA, 201 bp, Homo sapiens
cctctatccttcagggggtcccgggttcacctctgtccttcatggggtcctgggttcacctctgtccttgagggcgtcctgggttcacctctgtccttcarggggtcccgggttcacctctgtccttgagggcgtcccgggttcacctctgtccttcagggggtcccgggttcacctctgtccttcagggggtcccgggtt

SEQ ID NO: 231597 - DNA, 201 bp, Homo sapiens
ctctgtccttcaggggtcccgggttcacctctgtccttcaggggtcccgggttcacctctgtccttgagggcgtcccgggttcacctctatccttcagggrgtcccgggttcacctctgtccttcatggggtcctgggttcacctctgtccttgagggcgtcctgggttcacctctgtccttcaaggggtcccgggttcac

SEQ ID NO: 231598 - DNA, 201 bp, Homo sapiens
accccagctctcagcttccacacacttggatccacagaaagatgccaaacgtccaggagccacttcagcagcagctcccagtcacgcccggttttgattgytcctctcagttttggagtctggagatccactttcttcctgtgctctcggctttgtgcccctcagagttgatgccatgcgtcatgcgggatttcgatgtgc

SEQ ID NO: 231599 - DNA, 201 bp, Homo sapiens
ctcctctgctgaggtcactctttggagaacattcacacgggacattcatatcttagtacttcataccacttcatagacgtctatctaatatgtctcttccycagttgcccttgtcaacaatgtttccaaccatattctctccgagtccctggccctccagccaaaccactggccacagcccattaattcataagtaatcac

SEQ ID NO: 231600 - DNA, 201 bp, Homo sapiens
tccacaggaactcacaccccagctctcagcttccacaggaactcacaccccagctctcagcttccacaggaactcacaccccagctctcagcttccacagraactcacaccccagctctcagcttccacaggaactcacaccccagctctcagcttccacacacttggatccacagaaagatgccaaacgtccaggagcca

SEQ ID NO: 231601 - DNA, 201 bp, Homo sapiens
gcggaggcagccaagcagcaggcatagcactgacctgctcccagaacaggaaggggctttgcaaggctcaggcaatgctggggacagagatgatgagcctygttgatgagagcacccaacgctgcagggaagacagagggagaaggcacgaagccgtcatcgaggagcacctgggggttaggcttccgcgcagaggcacgg

SEQ ID NO: 231602 - DNA, 201 bp, Homo sapiens
tgcacggagctgctcccttagcctggagtgtcctcgatgtcctcaggtcggccgctgttcgttctctgaccgctgggtgaggtcagtgccctctgtcaggygctctcgtgcccttttttgcagcctgtccacaattataaccgaaccatcagtggtgaacatctgttgccccaggatcctggaagctctggagcatggagc

SEQ ID NO: 231603 - DNA, 201 bp, Homo sapiens
gggctggatgctgccatgcacggagctgctcccttagcctggagtgtcctcgatgtcctcaggtcggccgctgttcgttctctgaccgctgggtgaggtcrgtgccctctgtcaggtgctctcgtgcccttttttgcagcctgtccacaattataaccgaaccatcagtggtgaacatctgttgccccaggatcctggaag

SEQ ID NO: 231604 - DNA, 201 bp, Homo sapiens
acaggaagccaaggaccaagcactttctgtgcggccgttctgttcttccactaagcgggcgttttccttcccagaaccctcggtggaggcattcagcagcygcctctcctgtgaatttttcttaaatatcatttggcaataaatcatagcgtgcccatcaaatttttccctagagaaaattattatttttaggcctttaaa

SEQ ID NO: 231605 - DNA, 201 bp, Homo sapiens
atggctgacgctcctgtgcgatgtctcccctgcatctccactgcagttcagatgtaatttccaaccagtgggtgctgcagtttttctgagacagccaactrttcaaagcaaaggaaacctttcataaagtgtaatctgtgcgtgcatttggcagcaccatgcggggggcccacttcgaggtgacctcctctcaccagagca

SEQ ID NO: 231606 - DNA, 201 bp, Homo sapiens
  misc_feature (1)...(201): n = A,T,C or G
tgcagttcagatgtaatttccaaccagtgggtgctgcagtttttctgagacagccaactattcaaagcaaaggaaacctttcataaagtgtaatctgtgcntgcatttggcagcaccatgcggggggcccacttcgaggtgacctcctctcaccagagcactgtgccctgcagtgggtggctcttagctttgaacagccgg

SEQ ID NO: 231607 - DNA, 201 bp, Homo sapiens
acctttcattcctgatgagctgcgatcttttcccttttcttcagaccttcagttgatgatgtatttgcacacgcacacacacacacacacacacacacacmggagtatatatattttttctatgcttcttaaagaaacaacaagtccttttaaaacacctttcaaatgcacagtataagaagcactgtgggggagaggaac

SEQ ID NO: 231608 - DNA, 201 bp, Homo sapiens
gggaaatgattgcaccccacaaaggagctaaaagcagcagctgagagaccctgaacagagaccccctctcaggaggctgcgaatcacgaggggcaccaggratgttttattatgcaacgtttgtgataaaataagagtgaaccagactttcattgccatcacttaacacgctgtatgctattaatattttagaattgtggt

SEQ ID NO: 231609 - DNA, 201 bp, Homo sapiens
ggcatgcacagtaagtttggcagttaaacacgttagcggctgtgcttatgtgcgtgtatgagttagcagctgtgcacgtgtttctgtataaggattgacaygtacacatatatttgcacacgagtgttttgatggtgacagtagccaaggacgggtggacagggagcccacagttttcataggcaaacctgttctcatctc

SEQ ID NO: 231610 - DNA, 201 bp, Homo sapiens
cctggctccataaggcatctggcttgtcgcaacacgttcctctttggactgactcagctttcgaaaccttcttacttatcctaagcaacagtacccacaaattcatgtttttgatgtactattttgctttttctcgtgcacattaaaataaagttttaaaaattgcccacattccacataaaagcaagtgacacagcacac

SEQ ID NO: 231611 - DNA, 201 bp, Homo sapiens
tccacagcatttgattaggcagggttggaccttcttgttccatccaccctgtctcagcaccctctgtcgcgccttcacctctccctccctcgatgctacaygacagattatttcctgaaattgtctcccacgttccttcctcctctgtctaatctgctgtaaaactcaaatgctgggtacttttctcttggttactgtatt

SEQ ID NO: 231612 - DNA, 201 bp, Homo sapiens
ttgccaaggattgggcagctctgtttgtgcggctgactcttaacttttggcttataaaatgtattgataaaacacaagtggtttgggaagtctcaaacatytcagcatttgtcctcgctggctagaacttcgtgttcaaaagaagaagcaggcaggacgttcagacaacatggggggccttggtgtaggctcagagccttt

SEQ ID NO: 231613 - DNA, 201 bp, Homo sapiens
gctgactcttaacttttggcttataaaatgtattgataaaacacaagtggtttgggaagtctcaaacatttcagcatttgtcctcgctggctagaacttcrtgttcaaaagaagaagcaggcaggacgttcagacaacatggggggccttggtgtaggctcagagcctttgctgtatcctcagacccaccaatggattgcc

SEQ ID NO: 231614 - DNA, 201 bp, Homo sapiens
aatggacaagtgaaacgtggtccatccacatgatggaatagtacgcagccttgaagaggaagtgagtgctgacactcgctgaaacatggggggagcttgargctgttatgctgagtgaaataagccagtcacaaaaggacaaatactgaatgattccacgcatgtgacgtactaaagatagtcaagttcatagagacagaa

SEQ ID NO: 231615 - DNA, 201 bp, Homo sapiens
gaagagctgtttgcacacccatattcatagcagttaatgcacaacagccaaaggcgaaagcagcccagtgtccactgatgggcgaatggacaagtgaaacrtggtccatccacatgatggaatagtacgcagccttgaagaggaagtgagtgctgacactcgctgaaacatggggggagcttgaggctgttatgctgagtg

SEQ ID NO: 231616 - DNA, 201 bp, Homo sapiens
ggagctggaggccagggagctgggagctggggagctggggccggggagctgggagccagggagctggggccggggagctgaggccgaggagctggaggccrgggagctgggggctggggagctggaggccggggagctggggccggggagctgggggccggggagctgggggccagggagctggaggccggagagctgggg

SEQ ID NO: 231617 - DNA, 201 bp, Homo sapiens
ttacccgtttgattatagaagttttatgttcgtaattcctgttttatttgtgaattacaagagaaaatgaacagtttcaggctgctatttgtaagcaagcktctgcaaataaatgtgtttcaggtgggggtagcctaaatgtcacgtaaaccagcgcaattcagatgggggaagcctaaattccacccacaccagcacaat

SEQ ID NO: 231618 - DNA, 201 bp, Homo sapiens
tggatatccagttctcctgggaggcgagggtctggccgcagtcctctgcgtgtggatatccagttctcctgggaggcgagggtctggctcactcctctgcrtgtagatatccagttctcccagaaccacctgttgaggaaaccgtcctttcccccacaggttttttaaaagtcagtttatttttgtttagtatgggaaaaa

SEQ ID NO: 231619 - DNA, 201 bp, Homo sapiens
gggtctggctcactcctctgcatgtggatatccagttctcctgggaggcgagggtctggccgcagtcctctgcgtgtggatatccagttctcctgggaggygagggtctggctcactcctctgcgtgtagatatccagttctcccagaaccacctgttgaggaaaccgtcctttcccccacaggttttttaaaagtcagtt

SEQ ID NO: 231620 - DNA, 201 bp, Homo sapiens
ccgtcgcccaccggggctggatgctgccatgcacggagctgctcccttagcctggagtgtcctcgatgtcctcaggtcggccgctgttcgttctctgaccrctgggtgaggtcagtgccctctgtcaggtgctctcgtgcccttttttgcagcctgtccacaattataaccgaaccatcagtggtgaacatctgttgcccc

SEQ ID NO: 231621 - DNA, 201 bp, Homo sapiens
gggtctggccacactcctctgggtgtaggtatccagttctcctgggaggccagggtctggctcactcctctgcatgtggatatccagttctcctgggaggygagggtctggccgcagtcctctgcgtgtggatatccagttctcctgggaggcgagggtctggctcactcctctgcgtgtagatatccagttctcccagaa

SEQ ID NO: 231622 - DNA, 201 bp, Homo sapiens
accagggccaggtgctgccatgcacggagctgctccctccccgttgcccactggggccaggtgctgccatgcacggagctgctccctcctggccgcccacyggggccaggtgttgccatgcacggaactgctccctccccgtcgcccaccggggctggatgctgccatgcacggagctgctcccttagcctggagtgtcct

SEQ ID NO: 231623 - DNA, 201 bp, Homo sapiens
cagctgctaaggaccagcgtggagagcctagcaccaccttcctaaggtttcctttgtgccggctgtggatctgctggaacgtgttcttccctggagatgtkggggagctcctgctgtggagagaggtctcagatgctgcctcccagtgctctcggcttcaggaaagcctctcgactgggtgacagccccaccctgcccctg

SEQ ID NO: 231624 - DNA, 201 bp, Homo sapiens
tagatatccagttctcctgggaggcgagggtctggccacactcctctgggtgtaggtatccagttctcctgggaggccagggtctggctcactcctctgcrtgtggatatccagttctcctgggaggcgagggtctggccgcagtcctctgcgtgtggatatccagttctcctgggaggcgagggtctggctcactcctct

SEQ ID NO: 231625 - DNA, 201 bp, Homo sapiens
gggccaggtgctgccatgcacggagctgctccctcccggccgcccaccagggccaggtgctgccatgcacggagctgctccctccccgttgcccactggggccaggtgctgccatgcacggagctgctccctcctggccgcccactggggccaggtgttgccatgcacggaactgctccctccccgtcgcccaccggggct

SEQ ID NO: 231626 - DNA, 201 bp, Homo sapiens
gccgcgctgagccgtgcgaggccccgcaaaccacagagcgcttctgggaacatgcccagggtccacaaaccccagagcatttctgtgaatgtgcctggggyggttttcatcttcaccagagacttcccacaagtggtaccgacttccgggtctacaggcccctcagcctgtgagcgccagcaggctgctctccctcacctc

SEQ ID NO: 231627 - DNA, 201 bp, Homo sapiens
ggtctggctcactcctctgtgtgtagatatccagttctcctgggaggcgagggtctggccacactcctctgggtgtaggtatccagttctcctgggaggcsagggtctggctcactcctctgcatgtggatatccagttctcctgggaggcgagggtctggccgcagtcctctgcgtgtggatatccagttctcctgggag

SEQ ID NO: 231628 - DNA, 201 bp, Homo sapiens
agggccaggtgctgccatgcacggagctgctccctcccggccgcccaccagggccaggtgctgccatgcacggagctgctccctccccgttgcccactggggccaggtgctgccatgcacggagctgctccctcctggccgcccactggggccaggtgttgccatgcacggaactgctccctccccgtcgcccaccggggc

SEQ ID NO: 231629 - DNA, 201 bp, Homo sapiens
ggctcactcctctgcatgtggatatccagttctcctgggaggcgagggtctggctcactcctctgtgtgtagatatccagttctcctgggaggcgagggtmtggccacactcctctgggtgtaggtatccagttctcctgggaggccagggtctggctcactcctctgcatgtggatatccagttctcctgggaggcgagg

SEQ ID NO: 231630 - DNA, 201 bp, Homo sapiens
cagggccaggtgctgccatgcacggagctgctccctcccggccgcccaccagggccaggtgctgccatgcacggagctgctccctccccgttgcccactggggccaggtgctgccatgcacggagctgctccctcctggccgcccactggggccaggtgttgccatgcacggaactgctccctccccgtcgcccaccgggg

SEQ ID NO: 231631 - DNA, 201 bp, Homo sapiens
tatccagttctcctgggaggtgagggtctggccgcagtcctctgcgtgtggatatccagttctcctgggaggtgagggtctggctcactcctctgcatgtrgatatccagttctcctgggaggcgagggtctggctcactcctctgtgtgtagatatccagttctcctgggaggcgagggtctggccacactcctctgggt

SEQ ID NO: 231632 - DNA, 201 bp, Homo sapiens
ggggctgaccagggccaggtgctgccatgcacggagctgctccctcccggccgcccaccagggccaggtgctgccatgcacggagctgctccctccccgttgcccactggggccaggtgctgccatgcacggagctgctccctcctggccgcccactggggccaggtgttgccatgcacggaactgctccctccccgtcgc

SEQ ID NO: 231633 - DNA, 201 bp, Homo sapiens
ttattttatggtctcgttcagaccctctggccgtttcctagtcttcgctttctacagctcctgctcatcacatctgctgaccccctcctgtgggggaggggtcctcttttgtggttgatgaagtctttttttagaattgtgagcttaccctcagcagggattggtgatactgaagtgtgaatttctatgtgagagtttctg

SEQ ID NO: 231634 - DNA, 201 bp, Homo sapiens
tggggctgaccagggccaggtgctgccatgcacggagctgctccctcccggccgcccaccagggccaggtgctgccatgcacggagctgctccctccccgttgcccactggggccaggtgctgccatgcacggagctgctccctcctggccgcccactggggccaggtgttgccatgcacggaactgctccctccccgtcg

SEQ ID NO: 231635 - DNA, 201 bp, Homo sapiens
tggcttattttatggtctcgttcagaccctctggccgtttcctagtcttcgctttctacagctcctgctcatcacatctgctgaccccctcctgtgggggrggggtcctcttttgtggttgatgaagtctttttttagaattgtgagcttaccctcagcagggattggtgatactgaagtgtgaatttctatgtgagagtt

SEQ ID NO: 231636 - DNA, 201 bp, Homo sapiens
tctccactgcccactggggctgaccagggccaggtgctgccatgcacggagctgctccctcccggccgcccaccagggccaggtgctgccatgcacggagctgctccctccccgttgcccactggggccaggtgctgccatgcacggagctgctccctcctggccgcccactggggccaggtgttgccatgcacggaactg

SEQ ID NO: 231637 - DNA, 201 bp, Homo sapiens
ctctcattcccatcacggtcctgacgcctccacagcatttgattaggcagggttggaccttcttgttccatccaccctgtctcagcaccctctgtcgcgccttcacctctccctccctcgatgctacatgacagattatttcctgaaattgtctcccacgttccttcctcctctgtctaatctgctgtaaaactcaaatgc

SEQ ID NO: 231638 - DNA, 201 bp, Homo sapiens
gtctccactgcccactggggctgaccagggccaggtgctgccatgcacggagctgctccctcccggccgcccaccagggccaggtgctgccatgcacggagctgctccctccccgttgcccactggggccaggtgctgccatgcacggagctgctccctcctggccgcccactggggccaggtgttgccatgcacggaact

SEQ ID NO: 231639 - DNA, 201 bp, Homo sapiens
aagaaaatcccaatttctgactagaaattcaagccagctgtggaaatttgcctaagtaacaaggagccaaatgtgaatccctgagacaatagggaaaatgkctccagggcatgtcagaggtcttcacagcagcccctcccatcacaggccctgaggcccaggaggaaaaagtggttttgtgggttgggcccagggtcccca

SEQ ID NO: 231640 - DNA, 201 bp, Homo sapiens
tgtctccactgcccactggggctgaccagggccaggtgctgccatgcacggagctgctccctcccggccgcccaccagggccaggtgctgccatgcacggagctgctccctccccgttgcccactggggccaggtgctgccatgcacggagctgctccctcctggccgcccactggggccaggtgttgccatgcacggaac

SEQ ID NO: 231641 - DNA, 201 bp, Homo sapiens
gaaggcacatcacagaacgtgtatgttattatgtcatcttatgcagtattttgtttagggatacacacataggtgaaaaaaaaagtctacatacagaaactatgcacccagaattcatgaaagttattagctttgataggaccgagaagagctcacagagagtatcaaagataattttaatgttttatctcttttcagagt

SEQ ID NO: 231642 - DNA, 201 bp, Homo sapiens
gtttgcacaacgctggtttccaaacggaattctcaacataccagccctgggctaccgctccgggaactcaacctccatttctgtgaagcccagctacccayctgtggtgggtcagacaggtgaaatcacgggcctccttggctatacgttaaatggaagttaaatggaaattggccagcacccggctaccaagggtgacac

SEQ ID NO: 231643 - DNA, 201 bp, Homo sapiens
gatgtctaccctgttgtggcccacgaaggatttagacacctcttaaaaggaatatatgcactaaatgaatgctgaaataacaaagtcggtagaaaatgacrgccatgggagagacacatatgccccctgaggttaacccggcagaactgctgcgtcccagtgacggagaccagggtcccagggatgcagccagcttggcca

SEQ ID NO: 231644 - DNA, 201 bp, Homo sapiens
cagtcctccagaccccaaaatggtagatctaccaacaactggcactgtgtgcctggaaaagtctcagacactcaatgccagcccgtgaaggcagctgggarggaggctttactctgcaaagccacaggggcagagttgcccaagaccatgagaacccacctcttgcatcaccatgacccagatgtttgacatggagtcaaa

SEQ ID NO: 231645 - DNA, 201 bp, Homo sapiens
cacattaatgaaaagagaaaaaaattattatctcaatagatacaggtaaaaacatttgctaaatattaacattcattcataataaaaatgttgaataaagtaagactagtttgttcttattttgattttttaaagaccctacagaaacatcatgcttcccagcaaaacactggaaatattctcttgaacaccagaaataag

SEQ ID NO: 231646 - DNA, 201 bp, Homo sapiens
agggactcacgctgtggacaagcccagtttccagtgccatccacagctgggacagtgcccaggagtgctttgtgaatgggacgaagatcacagcaaatgascccacctctgggggcttttcccagaagtacaataaataatcttccttcttagacttcatggtccttaaactttataacaattcagatacttaggcagttt

SEQ ID NO: 231647 - DNA, 201 bp, Homo sapiens
caaactataaattgcatttgtgatgtgattcaacaggctccgaaaaacagtgtgcacgatggcatgattattacagtctgcgtcacccaggctgagcgacrggtgatggcccagagctgagcgtctgagctgggacgggtgtctaggtccaggcttggacccgctgatgtggactgaattcgcttcatgcctggccccaag

SEQ ID NO: 231648 - DNA, 201 bp, Homo sapiens
tggcatgattattacagtctgcgtcacccaggctgagcgacgggtgatggcccagagctgagcgtctgagctgggacgggtgtctaggtccaggcttggayccgctgatgtggactgaattcgcttcatgcctggccccaaggcagccagcgcgttggtgggggctgccttcagattcattacaataagcgtgccgacctc

SEQ ID NO: 231649 - DNA, 201 bp, Homo sapiens
ctgaaaggaagatgggaccagaggtggcaaatgtggtaaaaggaggggaattccagggcaaaaactatgaccagcctctgttgggctgccaggctgcggcrgaggctgtgctgggtgggcgtctgagcttaagcatgggaaacgatccggtggcttcctcctaaaaggaacaaaccgaggactgaagccctcaggagtcgc

SEQ ID NO: 231650 - DNA, 201 bp, Homo sapiens
cttctggtcacaatcatcttcaacaagccttattgctgagtatttactagaataaaggacacccacatcatgaagtcctttaaatacggagataaggatgmatatcattgttgaaaaatgcattggataaaaaatcatgagataccgatacacacctatgacagcagccaaacgctggaacatggacgcctccaagtgtca

SEQ ID NO: 231651 - DNA, 201 bp, Homo sapiens
gatgaggttgcctgggaaggggatcctcagctgcatgttgcgaagcgttggctactcacagatgtgcttctcttatatttggcaccaaatcaccaagcccygtgtgcagacacccggagtggccgagtggggcccggaccagccaggctctgccatgccctgagctggccacgcacgtccaccccgggggtgcattttcca

SEQ ID NO: 231652 - DNA, 201 bp, Homo sapiens
ggacgttcagacaacatggggggccttggtgtaggctcagagcctttgctgtatcctcagacccaccaatggattgccaagcgtgtccttgtaaactgtgractgcgcttggtgctggcgctcctgggaggtgctgacttgagaatcttttattcctcaaagttttgagagaactttccagtcacacttagggccttgtgc

SEQ ID NO: 231653 - DNA, 201 bp, Homo sapiens
acagcctcctacacacccaggttgtatgggacagcgctgctaggctacaaacctgcacaacatgttactatactaatactgtaggcaggtgtaacacagcrgtaggcatttgtgtatcatttgcacatagaaaaggtaatgctttgcactgtggctttacgatggctgtgacgtcgcaaggtgacaggaatttgtcagctc

SEQ ID NO: 231654 - DNA, 201 bp, Homo sapiens
aatgctttgcactgtggctttacgatggctgtgacgtcgcaaggtgacaggaatttgtcagctccgtcatactcttatgggaccaccacttgtgggtgtaygtggttcatcactgaccaaaacgttagtacgtggtgcatgactataaatagatatataaatggtcttaagggcttataagtcttaaatttccactgcatc

SEQ ID NO: 231655 - DNA, 201 bp, Homo sapiens
gggtctggctcactcctctgcgtgtggatatccagttctcctgggaggtgagggtctggccgcagtcctctgcgtgtggatatccagttctcctgggaggygagggtctggctcactcctctgcatgtggatatccagttctcctgggaggcgagggtctggctcactcctctgtgtgtagatatccagttctcctgggag

SEQ ID NO: 231656 - DNA, 201 bp, Homo sapiens
tggatatccagttctcctgggaggcgagggtctggctcactcctctgcgtgtggatatccagttctcctgggaggtgagggtctggccgcagtcctctgcrtgtggatatccagttctcctgggaggtgagggtctggctcactcctctgcatgtggatatccagttctcctgggaggcgagggtctggctcactcctctg

SEQ ID NO: 231657 - DNA, 201 bp, Homo sapiens
ctctgcgtgtggatatccagttctcctgggaggcgagggtctggctcactcctctgcgtgtggatatccagttctcctgggaggtgagggtctggccgcastcctctgcgtgtggatatccagttctcctgggaggtgagggtctggctcactcctctgcatgtggatatccagttctcctgggaggcgagggtctggctc

SEQ ID NO: 231658 - DNA, 201 bp, Homo sapiens
cctctgcgtgtggatatccagttctcctgggaggcgagggtctggctcactcctctgcgtgtggatatccagttctcctgggaggtgagggtctggccgcmgtcctctgcgtgtggatatccagttctcctgggaggtgagggtctggctcactcctctgcatgtggatatccagttctcctgggaggcgagggtctggct

SEQ ID NO: 231659 - DNA, 201 bp, Homo sapiens
ctcctctgcgtgtggatatccagttctcctgggaggcgagggtctggctcactcctctgcgtgtggatatccagttctcctgggaggtgagggtctggccrcagtcctctgcgtgtggatatccagttctcctgggaggtgagggtctggctcactcctctgcatgtggatatccagttctcctgggaggcgagggtctgg

SEQ ID NO: 231660 - DNA, 201 bp, Homo sapiens
cctctgcgtgtggatatccagttctcctgggaggcgagggtctggttcactcctctgcgtgtggatatccagttctcctgggaggcgagggtctggctcastcctctgcgtgtggatatccagttctcctgggaggtgagggtctggccgcagtcctctgcgtgtggatatccagttctcctgggaggtgagggtctggct

SEQ ID NO: 231661 - DNA, 201 bp, Homo sapiens
cagtttgtccaggaccacgcgttgaaaattgctgaagataaacattgtattttaaattactccaggcaaccaggcagactgaaaaaaaatcatttgaacaattgaaaactgaaatgttgatatcagatattaaattaatgtaagtgagattgaaacaatatctaattaaaataatttgaaaaatgacttggaaattggagc

SEQ ID NO: 231662 - DNA, 201 bp, Homo sapiens
gggactcacgctgtggacaagcccagtttccagtgccatccacagctgggacagtgcccaggagtgctttgtgaatgggacgaagatcacagcaaatgagsccacctctgggggcttttcccagaagtacaataaataatcttccttcttagacttcatggtccttaaactttataacaattcagatacttaggcagtttt

SEQ ID NO: 231663 - DNA, 201 bp, Homo sapiens
tcctctgcgtgtggatatccagttctcctgggaggcgagggtctggttcactcctctgcgtgtggatatccagttctcctgggaggcgagggtctggctcmctcctctgcgtgtggatatccagttctcctgggaggtgagggtctggccgcagtcctctgcgtgtggatatccagttctcctgggaggtgagggtctggc

SEQ ID NO: 231664 - DNA, 201 bp, Homo sapiens
taaccctatatcgttgtctggaattttataatctaatctaacattagtctatttattccactttaatcaataacttttaaacaaattgcacattttcttgrtgtcgacgccatgacgccttctctccttccattcgtatgtctgatagattttcccggccgcgtcagtttgtaatctttctggacggcgttgttttcgata

SEQ ID NO: 231665 - DNA, 201 bp, Homo sapiens
actcctctgcgtgtggatatccagttctcctgggaggcgagggtctggttcactcctctgcgtgtggatatccagttctcctgggaggcgagggtctggckcactcctctgcgtgtggatatccagttctcctgggaggtgagggtctggccgcagtcctctgcgtgtggatatccagttctcctgggaggtgagggtctg

SEQ ID NO: 231666 - DNA, 201 bp, Homo sapiens
cactcctctgcgtgtggatatccagttctcctgggaggcgagggtctggttcactcctctgcgtgtggatatccagttctcctgggaggcgagggtctggctcactcctctgcgtgtggatatccagttctcctgggaggtgagggtctggccgcagtcctctgcgtgtggatatccagttctcctgggaggtgagggtct

SEQ ID NO: 231667 - DNA, 201 bp, Homo sapiens
agggtctggctcactcctctgcgtgtggatatccagttctcctgggaggcgagggtctggttcactcctctgcgtgtggatatccagttctcctgggaggygagggtctggctcactcctctgcgtgtggatatccagttctcctgggaggtgagggtctggccgcagtcctctgcgtgtggatatccagttctcctggga

SEQ ID NO: 231668 - DNA, 201 bp, Homo sapiens
agagtggggttttcagcataactggatgaagactgggcagcttgactcagggcattcgcaatagagggggcctgtggggagcagctcactgtggggagagracagggggctgaagtcatcctcggatgcaggcctgtggtcaccatgagtcactgggacctgcggttcccccttcagaaccattgctgtgtttctgtggaa

SEQ ID NO: 231669 - DNA, 201 bp, Homo sapiens
tcccgtccccgtccccatggagagcccagcccccagcagtcccgccgtccccgtccctgtccccatggagagcccagcccccagcagtcccgccgtccccrtccccgtggagaacccagctcccagcagtcccgccgtccccatggagaccctgtgcccagcagccccgctgtccccgtggagagcctgtgcccagcagcc

SEQ ID NO: 231670 - DNA, 201 bp, Homo sapiens
attgctgtgtttctgtggaaaaggagcttaagtccctagtgggtccagggccctcctgcaccaagaaggaggtgcctggggaagcctctgggcagcaggckgggcttgcaggcccctttaggaaaactcatgccctggggagcgaatgtcaagagctgaggggacagcctccaaccattatgtaaaaaagccattgtcaag

SEQ ID NO: 231671 - DNA, 201 bp, Homo sapiens
agcagacatcttattctggtggatctttcagtgcttttaaagtaaataacaataaagaaattttcatttctatttcaaagttttactgtaggcattgcatrcagactgattataaatgagcgagcctgcccttcccactgggatgtgaagttcgctgaattatgtcagcagcccaggaatgactgctgtgcctaagcacac

SEQ ID NO: 231672 - DNA, 201 bp, Homo sapiens
tcaaggtcaagggttgtcctgaggccaatagcttttatttgcttttgtgtcaggtttgttcaggtttgtataatcatatgatttgtatgcagtaaaatgcrgtttctaagtgcacagctggaggagtcaggaggaggtgtatagtcccggagccagggccaggacctgccgtgtcacacctggaaaacccacagctggcat

SEQ ID NO: 231673 - DNA, 201 bp, Homo sapiens
gccgcagacccgaagggtgagagcgagtggttgccacacacggcgtcctgcagagtggcgccatcttcccaagtcacatctgagcctacactgccgtgacrgagtgaggcgttccgagactgttcgcgttttcatgaaacgtttctccttcctgaggactgagggactccctggcatgtggacgttttcaggccctcagac

SEQ ID NO: 231674 - DNA, 201 bp, Homo sapiens
cagtcccgccgtccccgtggaaagcctgtgcccagcagtcctgccgtccttgtggagagcctgtgcccagcagtcccgccgtccccgtggagagccagccyccagcagtcccgccgtccccgtggagagccagcccccagaagtcccgccgtccccgtgaagagcccagcccccagcagtcccgccgttcccgtccccgtc

SEQ ID NO: 231675 - DNA, 201 bp, Homo sapiens
tgggcgtctgagcttaagcatgggaaacgatccggtggcttcctcctaaaaggaacaaaccgaggactgaagccctcaggagtcgcgccagggtctcccgrtgctgcaggaacccacagaggagttgacatttgtgtctcctgaatgcctgtccagcatccccaccgtaaggcagggttgctgaaggtagtcagaggagca

SEQ ID NO: 231676 - DNA, 201 bp, Homo sapiens
cctgtccatcacggacggtggggggcgccgggctctgcagacgcgtccccgagagccctccgcctttgtgtggcctcgcaggcatctcgggccggctctcrgacaggaggcagcgcggccgggctgcacggagggaaacggcgcgggcctggcgtctcctccttgccattgtccgcccgcccgcgcagctgccaggctgcc

SEQ ID NO: 231677 - DNA, 201 bp, Homo sapiens
cggacggtggggggcgccgggctctgcagacgcgtccccgagagccctccgcctttgtgtggcctcgcaggcatctcgggccggctctcagacaggaggcrgcgcggccgggctgcacggagggaaacggcgcgggcctggcgtctcctccttgccattgtccgcccgcccgcgcagctgccaggctgcctcccggattcc

SEQ ID NO: 231678 - DNA, 201 bp, Homo sapiens
cggtggggggcgccgggctctgcagacgcgtccccgagagccctccgcctttgtgtggcctcgcaggcatctcgggccggctctcagacaggaggcagcgyggccgggctgcacggagggaaacggcgcgggcctggcgtctcctccttgccattgtccgcccgcccgcgcagctgccaggctgcctcccggattccctgg

SEQ ID NO: 231679 - DNA, 201 bp, Homo sapiens
ttggacattccctagggaggagggcagccctgtcttggcatcactctgtcagtccttcccctggggagcactggcagctctgaaccagctgcttttgttcrctgtgtgcaggctgatgcccacgcaagaaatagcaactggtagacccaaagagggctagggatagccagtcaattgttgagtgcacattgagtcgaacag

SEQ ID NO: 231680 - DNA, 201 bp, Homo sapiens
tgacgtcataaatggagtgcctactttgtttactgtccttctctcttatcatcatggaagctctcagtattcgaaacccacctccggggaatcatttcggyatctcccacagcctttattattctctaactattttgtaatttagtttccatttccttcttaacctaagaattattgaaaataatatttttaatacccaaa

SEQ ID NO: 231681 - DNA, 201 bp, Homo sapiens
acgtcataaatggagtgcctactttgtttactgtccttctctcttatcatcatggaagctctcagtattcgaaacccacctccggggaatcatttcggtayctcccacagcctttattattctctaactattttgtaatttagtttccatttccttcttaacctaagaattattgaaaataatatttttaatacccaaatg

SEQ ID NO: 231682 - DNA, 201 bp, Homo sapiens
ttaatttctaatttattagattttgcttagagaatgcaacatttatgatttttatgatttaaaaaacatgaagtccttttttgaggcttaatatctgatcrgttccattctggtttctagaccatagagcttgatcagtcgctattgaattctctttgtcatgttctcgggcccgctgtaggacccttgtgggagctaggg

SEQ ID NO: 231683 - DNA, 201 bp, Homo sapiens
cactcctctgcatgtggatatccagttctcctgggaggcgagggtctggctcactcctctgcgtgtggatatccagttctcctgggaggcgagggtctggytcactcctctgcgtgtggatatccagttctcctgggaggcgagggtctggctcactcctctgcgtgtggatatccagttctcctgggaggtgagggtctg

SEQ ID NO: 231684 - DNA, 201 bp, Homo sapiens
tatccagttctcctgggaggcgagggtctggccacactcctctgcgtgtggatatccagttctcctgggaggcgagggtctggctcactcctctgcatgtrgatatccagttctcctgggaggcgagggtctggctcactcctctgcgtgtggatatccagttctcctgggaggcgagggtctggttcactcctctgcgtg

SEQ ID NO: 231685 - DNA, 201 bp, Homo sapiens
aaagggtaactgtgctgggcgcatgggacgggaaagggtaactgtgctgggcgcatgggacgggaaagggtaactgtgctgggcgcatgggacgggaaagrgtaactgtgctgggcgcgtgggaaggaagagtaacacaggccctgtccccagggagacctctggacttacttatttgttctgtccatgggttttgtactg

SEQ ID NO: 231686 - DNA, 201 bp, Homo sapiens
tgggacggaaaagggtaactgtgctgggcgcatgggacgggaaagggtaactgtgctgggcgcatgggacgggaaagggtaactgtgctgggcgcatgggrcgggaaagggtaactgtgctgggcgcgtgggaaggaagagtaacacaggccctgtccccagggagacctctggacttacttatttgttctgtccatgggt

SEQ ID NO: 231687 - DNA, 201 bp, Homo sapiens
gcgcatgggacgggaaagggtaactgtgctgggcgcatgggacggaaaagggtaactgtgctgggcgcatgggacgggaaagggtaactgtgctgggcgcrtgggacgggaaagggtaactgtgctgggcgcatgggacgggaaagggtaactgtgctgggcgcgtgggaaggaagagtaacacaggccctgtccccaggg

SEQ ID NO: 231688 - DNA, 201 bp, Homo sapiens
gcggaaaagggtaactgtgctgggcgcatgggatggaaaagagtaactgtgctgggcgcatgggacgggaaagggtaactgtgctgggcgcatgggacggraaagggtaactgtgctgggcgcatgggacgggaaagggtaactgtgctgggcgcatgggacgggaaagggtaactgtgctgggcgcatgggacgggaaag

SEQ ID NO: 231689 - DNA, 201 bp, Homo sapiens
ggcgttccgagactgttcgcgttttcatgaaacgtttctccttcctgaggactgagggactccctggcatgtggacgttttcaggccctcagactctgctsacagcagttaggatgcaaggccaccttctcatcttccctgactttgctttcattgtgtcactgttctcatcaagaactttcagagactctggcatgtaag

SEQ ID NO: 231690 - DNA, 201 bp, Homo sapiens
ggggtggaaaagagtaactgtgctgggcgcctgggacgggaaagggtaactgtgctgggcgcatgggacgggaaagggtaactgtgctgggtgcatgggayggaaaagggtaactgtgctgggcgcatgggacgggaaagggtaactgtgctgggcgcatgggacggaaaagggtaactgtgctgggcgcatgggacggga

SEQ ID NO: 231691 - DNA, 201 bp, Homo sapiens
aaacattcaatctaaggaattttagctcagttttgaaaagaatataatctagttatgaaaatacaatatatatactatactgaacatcaactattaaataygtgccttatggcattattctgtaaataataaaatattagatctttacaaatacgttgattaaaagtaatagatcctctatactagaatctagacagtgaa

SEQ ID NO: 231692 - DNA, 201 bp, Homo sapiens
aaaaaattgaaagggcattccatggcaaaactctgcactttaaactggcagccacaaagggtgagggcaatctctcctttggaagagtatattatactttrgaatgttaagtccatgctatttcccattttgtttatagggatgatattatgtgcatgattgctccgttctgaagcaaatactggccctgtggattatatc

SEQ ID NO: 231693 - DNA, 201 bp, Homo sapiens
aaagagtaactgtgctgggtgcatggggtggaaaagagtaactgtgctgggcgcctgggacgggaaagggtaactgtgctgggcgcatgggacgggaaagrgtaactgtgctgggtgcatgggacggaaaagggtaactgtgctgggcgcatgggacgggaaagggtaactgtgctgggcgcatgggacggaaaagggtaa

SEQ ID NO: 231694 - DNA, 201 bp, Homo sapiens
gggagcatggggtggaagagtaactgtgctgggcgcatgggacggaaaagagtaactgtgctgggtgcatggggtggaaaagagtaactgtgctgggcgcmtgggacgggaaagggtaactgtgctgggcgcatgggacgggaaagggtaactgtgctgggtgcatgggacggaaaagggtaactgtgctgggcgcatggg

SEQ ID NO: 231695 - DNA, 201 bp, Homo sapiens
atctccatgctcttggccccatgtggactgtggagtgtagggaggcccatgatctccatgctcagggtcccatgaggactgtggggtctaggggaggcccrtgatcttcatgctcagggtcccatgaggactgtggggtgtagggaggcccatgatctccatgctcttggccctgtgaggactgtggggtgtagggaggac

SEQ ID NO: 231696 - DNA, 201 bp, Homo sapiens
ctctcccaccctctgccctgccctttctcctgccctctatccctgtgccctgccatctgccccgctctctctcccatccctatctcccaccctctcatctyccaccctctgcccccctccccaccccacccctatcccgccctctgtgctgccctctcttcatagtcggaacttgcactcccagccctggtgcttcaaact

SEQ ID NO: 231697 - DNA, 201 bp, Homo sapiens
aagaagagtgttcagggcctaccatttttctctttggccccagccccctaaacccagggaaaggaaccagaccagttctatctttctcagggaggctgggygcatcctgctggctgtgggatctccaggcgaccaagagcagagaggcctgatgccgcccgctctactaaggaccacccaagccaggcagttagtcccggg

SEQ ID NO: 231698 - DNA, 201 bp, Homo sapiens
ccaggctttctcataaatgcacagcccacgtcagttacaccagcacctacccggctctcttacaaacccacagcccgtgtcagttacaccaggaccgaccrggctttcacacaaaggcagagcccgcaacagttacaccaggaccgaccaggctttcttataaatgcacagcccacgtcagttacaccagcaccgaccggg

SEQ ID NO: 231699 - DNA, 201 bp, Homo sapiens
ccattctcctgcctcagcctcccgagtagctgggactacaggcctctgccaccatgttcagctaatttttctgtatttttagtagagacggggtttcaccrtgttagccaggatggttttgatgtcctgacctcatgatccgcctgccttggcctcccaaagtgctgggattacaagcctgagccaccgtgcccagcctga

SEQ ID NO: 231700 - DNA, 201 bp, Homo sapiens
cgctcaggaaagagaattccaggaggacggaggccctgggccgtctcagaggctgccggccacactgacatttcaagaatgagcccgttcaatttcaggayactccctttgccacaggctcagtttaggagctcttcttatttctctatttttccaaactttcgatacttccttttctccccttcatcttaatttaaggct

SEQ ID NO: 231701 - DNA, 201 bp, Homo sapiens
caggcacttggtggatatcaggaatggagtcttttaaaagggctggtttctgttcagccctcagagaaggaagcctggtggtgattagttgagaggggggyggtaaccaggcgggtctgaacccagggaaggaagcctggtgatgattaatgatgggggcgggtaaccaggcgggtctgaccttcatcctgtcacggtccc

SEQ ID NO: 231702 - DNA, 201 bp, Homo sapiens
caaggcagtgtcaggactccaggatcgcaggttctgctcctggacagaacaaggcagtgtcaggatgccaggatcgcaggttctgctcctggacagaacamggcagtgtcaggacgtcaggatcgcaggttctgctcctggacagaacaaggcagtatcaggacgtcaggatcgcaggttctgctcctggacagaacgagg

SEQ ID NO: 231703 - DNA, 201 bp, Homo sapiens
cctgcgccccgaggaaggaaggcggctggtggaggacgtcgcccgcctcctgcaggtgcccagcagtgcgttcgctgacgtggagtaagtacggggccctrgggtttctgtttggctcctgttgctcggtcgcagagactgggtgggagggaaggagctgcgagcccatggctcttgttaattacatgagggaacctgttt

SEQ ID NO: 231704 - DNA, 201 bp, Homo sapiens
ttggtcaagagtaggtcattccgtcagttggggcttcggactttatttttctcagtggaattgcaagtgagttttttcctttgtccaaaagtttttatatkatttctgacttcttattttgaaaccattatagattcacagggaattgcaaagttataacaaagaagtctcatgtatcccttacccagtgaggttttcccc

SEQ ID NO: 231705 - DNA, 201 bp, Homo sapiens
atgtgaggagccccagcaggtgggagaggccggctgcaccgtctggggggcaggctcagcaccaagagcggagactttctgtgacaaaggacacatgtggsagggtggaggctgcacactgccccggagcccagaccttcaggcggggctggcctggctgtggccccacaggaagggcctcctggccccgagagccccctc

SEQ ID NO: 231706 - DNA, 201 bp, Homo sapiens
ccccacatgtttctacatggtctgtaagataaggagagtttctgatgctatagagctctcacattgcagagatgaaaaggcaccatttccccaatattttrtgatgaaaatatacaaacagaaaagttgaaagaatggtactgacctgtgtgtgtgtgtgtgtgtgtgtatacatatgtgtattcatgtatgagtttctat

SEQ ID NO: 231707 - DNA, 201 bp, Homo sapiens
tggtggaggacgtcgcccgcctcctgcaggtgcccagcagtgcgttcgctgacgtggagtaagtacggggccctggggtttctgtttggctcctgttgctyggtcgcagagactgggtgggagggaaggagctgcgagcccatggctcttgttaattacatgagggaacctgtttagagaagtgaaaggtgatttcagcag

SEQ ID NO: 231708 - DNA, 201 bp, Homo sapiens
tcagcctggccctgggcaaatgtgtttctgctaattacacttgttgcatttgaatggctttcttcagccaagctgcacggcgaaacctagtgaacaataaragagaccatttccccttccgccccgcccgaagctgcagatggccgccctgtgtggaagcagtagcgcctgaattaaccttttgtgtgcaccaaagaaggt

SEQ ID NO: 231709 - DNA, 201 bp, Homo sapiens
ctgcggccaaaccccagcccccaccctgcaccccacttgcggccagacaccagccccaccctgctccccacctgcggccaaaccccagcccccaccctgcwccccacctgcggccgaacaccagcccccaccctgcaccccacctgcggccagaccccagccccaccctgctccccacctgcggccggacaccagccccca

SEQ ID NO: 231710 - DNA, 201 bp, Homo sapiens
ctcatttttttttttttttttttttgagacggagtctcgctgtgtctcccaggttggagtgcagtggcgggatctcggctcactgcaagctccgcctcccvggttcatgccattctcctgcctcagcctcccaagtagctgggactacaggcgcccgccaacacgcccggctaattttttgtatttttagtagaaacgggg

SEQ ID NO: 231711 - DNA, 201 bp, Homo sapiens
aggtcctattggattggggccccctcaggacctcatttttttttttttttttttttgagacggagtctcgctgtgtctcccaggttggagtgcagtggcgsgatctcggctcactgcaagctccgcctcccgggttcatgccattctcctgcctcagcctcccaagtagctgggactacaggcgcccgccaacacgcccgg

SEQ ID NO: 231712 - DNA, 201 bp, Homo sapiens
gaggcttaatatctgatcggttccattctggtttctagaccatagagcttgatcagtcgctattgaattctctttgtcatgttctcgggcccgctgtaggrcccttgtgggagctagggagacttgtttctaataaggctctgtgttttactagccctgtgactttaggtaagttgcttaaccccctggaaaactcagtcc

SEQ ID NO: 231713 - DNA, 201 bp, Homo sapiens
ctcagaatcaaaaccataattattcactcagactctggtgtctgtgcaagggaagcctgtgggttgatgtttttcattcttcaatgaccagaggattaatwgaggggccaccacagaaagaaggcacaatacatctcttttctaatgaacttgcatttcagagcttaaatccaaagtaattggatttcacagtcaaagtgc

SEQ ID NO: 231714 - DNA, 201 bp, Homo sapiens
tcacgttagagtgagtttctacttcctaatgttaatgaattaatttcactctgtttatactttcttatattctctttttttttttttttttttttttttgkttttgaaacaaagtctccctcttgtctgccaggctggagtgcagtcgcatgatctcggctcactgcaacctctgcccctgggttcaaatgattctcctgc

SEQ ID NO: 231715 - DNA, 201 bp, Homo sapiens
gacgcaggcctcagaatcacccgcacaccccacagctcagggacgcaggcctcagaatcacctcaacagcccacagctcagggacacaggcctcagaatcrcctcaacagcccacagctgagagacgcaggcctcagaatcacccggacagcccagagctcagggacgcaggcctcagaatcacctcaacagcccacagct

SEQ ID NO: 231716 - DNA, 201 bp, Homo sapiens
agggacgcaggcctcagaatcacccgcacaccccacagctcagggacgcaggcctcagaatcacctcaacagcccacagctcagggacacaggcctcagartcgcctcaacagcccacagctgagagacgcaggcctcagaatcacccggacagcccagagctcagggacgcaggcctcagaatcacctcaacagcccaca

SEQ ID NO: 231717 - DNA, 201 bp, Homo sapiens
gacgcaggcctcagaatcacctcaacagcccacagctcagggacgcaggcctcagaatcacccgcacaccccacagctcagggacgcaggcctcagaatcrcctcaacagcccacagctcagggacacaggcctcagaatcgcctcaacagcccacagctgagagacgcaggcctcagaatcacccggacagcccagagct

SEQ ID NO: 231718 - DNA, 201 bp, Homo sapiens
agctcggggacacaggcctcagaatcacccggacaccccacagctcagagatgcaggcctcagaatcacccagacaccccacagcgcagggacacaggccwcagaatcacctcaacagcccacagctcagggacgcaggcctcaaaatcacccaggcaccccacagctgagggacgcaggcctcagaatcacccacacacc

SEQ ID NO: 231719 - DNA, 201 bp, Homo sapiens
acgtgaacagcccacagctcggggacacaggcctcagaatcacccggacaccccacagctcagagatgcaggcctcagaatcacccagacaccccacagckcagggacacaggcctcagaatcacctcaacagcccacagctcagggacgcaggcctcaaaatcacccaggcaccccacagctgagggacgcaggcctcag

SEQ ID NO: 231720 - DNA, 201 bp, Homo sapiens
ttgtctgtcctccatagcaaccatccccaatcctgacatcggtgattgtgtgcgttgtgtcttgtctgtcctccatagcaaccatccccaatcctgacatsggtgattgtgtgcgttgtgtcttgtctgtcctccatagcaaccgtccccagtcctgacatcggtgattgtgtgcattgtgtcttgtctgtccccacctag

SEQ ID NO: 231721 - DNA, 201 bp, Homo sapiens
cagtctacagctcagggacacaggcctcagaatcacgtgaacagcccacagctcggggacacaggcctcagaatcacccggacaccccacagctcagagaygcaggcctcagaatcacccagacaccccacagcgcagggacacaggcctcagaatcacctcaacagcccacagctcagggacgcaggcctcaaaatcacc

SEQ ID NO: 231722 - DNA, 201 bp, Homo sapiens
catctctgctgcctttgctgtcctccaggcatcggagtggagtcaccaggtccagtggcgctcaggaaagagaattccaggaggacggaggccctgggccrtctcagaggctgccggccacactgacatttcaagaatgagcccgttcaatttcaggacactccctttgccacaggctcagtttaggagctcttcttattt

SEQ ID NO: 231723 - DNA, 201 bp, Homo sapiens
gcgttgtgtcttgtctgtcctccatagcaaccatccccaatcctgacatcggtgattgtgtgcgttgtgtcttgtctgtcctccatagcaaccatccccartcctgacatgggtgattgtgtgcgttgtgtcttgtctgtcctccatagcaaccgtccccagtcctgacatcggtgattgtgtgcattgtgtcttgtctgt

SEQ ID NO: 231724 - DNA, 201 bp, Homo sapiens
tgagtatcccattggtccagcaccatctgctgaaaagctggtcccttccccattgagttcccttgctgctttgccaaggattgggcagctctgtttgtgcrgctgactcttaacttttggcttataaaatgtattgataaaacacaagtggtttgggaagtctcaaacatttcagcatttgtcctcgctggctagaacttc

SEQ ID NO: 231725 - DNA, 201 bp, Homo sapiens
cagaagaagagaccatgttccttgaccagttattatttcaggccttttacctccactctgacttgtcctcatggttcctctagaggaagcctcccccgtcrgactggtcctctcatctttggaagcctccccactcggactggtcccctcatcttgggcagatttctacttcccattgttgactcgaagacctcccctgtc

SEQ ID NO: 231726 - DNA, 201 bp, Homo sapiens
agcccacagcacagagaagcaggcctcagagtcacccgaacagtctacagctcagggacacaggcctcagaatcacgtgaacagcccacagctcggggacrcaggcctcagaatcacccggacaccccacagctcagagatgcaggcctcagaatcacccagacaccccacagcgcagggacacaggcctcagaatcacct

SEQ ID NO: 231727 - DNA, 201 bp, Homo sapiens
ggtacaatctcggctcactgcaacctccacctcctgggttcaagcaattcttctgcctcagcctcctgagtagctgggactacaggcgcatgccaccatgyccagctaatttttttgtatttttagtagagacggggtttcaccatattggccaggctggtctcgaactcctgacctcgtgatccgccccctgggcctccc

SEQ ID NO: 231728 - DNA, 201 bp, Homo sapiens
ctgacttcaacttggatcagtccagttattgttaccatcatcacaaagagtccagaactggatgaggcggacacaagccccaccaaccaggacctgggggytgaggttcgggaacaaagacaccaatgggcagagaaattgaggctgaggaagatacagctccaaggaacagaggcaacacagacagagggaggcactggg

SEQ ID NO: 231729 - DNA, 201 bp, Homo sapiens
aaacatctcaatatttacatatttacatctttcataaagatttttaagagtaaaattataatattgtctgggtgtggtggctcacgcctgtaatcccagcrctttgggaggccaaggcaggcagattgctgagcccaggagtttgagaccagcctgggcaacatggagaaaccctgtctctacaaaaattataaaaattag

SEQ ID NO: 231730 - DNA, 201 bp, Homo sapiens
tattgttaccatcatcacaaagagtccagaactggatgaggcggacacaagccccaccaaccaggacctgggggctgaggttcgggaacaaagacaccaaygggcagagaaattgaggctgaggaagatacagctccaaggaacagaggcaacacagacagagggaggcactgggccaaagtctgggtgagagggccctgg

SEQ ID NO: 231731 - DNA, 201 bp, Homo sapiens
acctggccaacatggtgcaacccgtctctattaaaaatacaaaaattagctgggcgtggtgacggacacctgtaatcccaggtacttcgggaggctgaggyaggagaatcacttcaacctgagaggcagaggctgcagtgagccgagatcgcgccactgcactccagcctgggcgacagatcctgtctcaaaaaaaaaaaa

SEQ ID NO: 231732 - DNA, 201 bp, Homo sapiens
ttttgtttatctttcttttaaattttttgtaggctgtctttgtgccaaggatcagcctgaggtgtaaacttgtggtattatctgagcctttccctgagcawgtgtggtgactttctaattttccctgtatattcagttacttttgaatattctggtctttaatttctggctcccaaaagcggaaaaagagaaaaatgaagg

SEQ ID NO: 231733 - DNA, 201 bp, Homo sapiens
catatgaactttaaagtagtttttttccaattctgtgaagaaagtcattggtagcttgatggggatggcattgaatctataaattaccttgggcagtatgrccattttcacgatattgattcttcctacccatgagcatggaatgttcttccatttgtttgtatcctcttttatttccttgagcagtggtttgtagttctc

SEQ ID NO: 231734 - DNA, 201 bp, Homo sapiens
gggttagcattgccatccctgaagggtacttagcgggcacgtatgttaactgagcttatgacatcaattcatgggaagctaatatagtgtcgactctatcyccacgtgtgtggggggggtgtccatgcacgtgtgatgtgtgcttgagttggtgtttactatatgcctatgtgtgtgtgaatgtggttgtgtgtgtgctgt

SEQ ID NO: 231735 - DNA, 201 bp, Homo sapiens
ggcaccccgcctggaaggcagggaatggaagcaggagggaactggcaccagggagctggcagcagaggagaggatgtgcctgagcttcagaagggaaggcracactcagaggcacacggcacggggcagaatcagagctaaaagaaagggtgcccatccgaggcaaagcacctttctccagcctcagccctggaaggccac

SEQ ID NO: 231736 - DNA, 201 bp, Homo sapiens
aaggaaaagaaccaaccttactgcagatgccctttttccttcccagcaaaaggagcttatattgagaaacccatgggaacaaagtcattcttgctagtttgtgtccaactaaagagaacatttatcttgtttaaatcagcacttagcagtggtaagtttgctcttgttttccatccataattttcaatgcaattccaattc

SEQ ID NO: 231737 - DNA, 201 bp, Homo sapiens
aaggaacgagtctctgtggccagctctgagtgctgcaggtcctggctgaagggtcgtgggcagatggtgatgcttgcacaagcagagagataatcgtaagrggacacagggtggcaccccgcctggaaggcagggaatggaagcaggagggaactggcaccagggagctggcagcagaggagaggatgtgcctgagcttca

SEQ ID NO: 231738 - DNA, 201 bp, Homo sapiens
attagctgtgttatttgtgacttagaaagcagtcagttgaaatattgaaagtattttcccaactcaggctggtttcagcggtgccgcagcgtgccgtgacrtcgagcttgctaatgaataataaagacgattgccgctggtgatgtggaaggaaaagaaccaaccttactgcagatgccctttttccttcccagcaaaagg

SEQ ID NO: 231739 - DNA, 201 bp, Homo sapiens
ggagtaccttctgccacctgcaggtactcctgaatggccgagagccactcacaccactgcccaacctttaggatgatctggacagtccctgtggaaggaaygagtctctgtggccagctctgagtgctgcaggtcctggctgaagggtcgtgggcagatggtgatgcttgcacaagcagagagataatcgtaaggggacac

SEQ ID NO: 231740 - DNA, 201 bp, Homo sapiens
atttttctctttggccccagccccctaaacccagggaaaggaaccagaccagttctatctttctcagggaggctgggtgcatcctgctggctgtgggatckccaggcgaccaagagcagagaggcctgatgccgcccgctctactaaggaccacccaagccaggcagttagtcccgggggcagcatggctgagtgtgggct

SEQ ID NO: 231741 - DNA, 201 bp, Homo sapiens
agagcattatcaatcacacagtgccgtcacggctgcgttttcatgtggaatgctgaattgctttagaatgcataaagcagggagccgcttgtgactatgcrtgtgtggttttacggaagttggggcacacatgaggcctgccctggttctggtcatctcagacaggaacacggagctcatgaaccttctcagtctcaccga

SEQ ID NO: 231742 - DNA, 201 bp, Homo sapiens
gggaaaggaaccagaccagttctatctttctcagggaggctgggtgcatcctgctggctgtgggatctccaggcgaccaagagcagagaggcctgatgccrcccgctctactaaggaccacccaagccaggcagttagtcccgggggcagcatggctgagtgtgggctctgggtcgggtcctgtatctgcctatggccctg

SEQ ID NO: 231743 - DNA, 201 bp, Homo sapiens
ctttcatggagccatacgtggcttgttattgaattgtgactatgaccatctcatgtttgatgtaaaggataaagaaatgatggacctgtgggtgattatarccattctttggtttatggacccgtaagtctcacggagagcattatcaatcacacagtgccgtcacggctgcgttttcatgtggaatgctgaattgcttta

SEQ ID NO: 231744 - DNA, 201 bp, Homo sapiens
gctgagtgtgggctctgggtcgggtcctgtatctgcctatggccctgccctggttttacggtcttgggtgggcctcagagtcctcatctgcaccttccttytggattgtggtgagagttaaacgtgtgaattcacataaagtgctgcaacagtgcatgttcccagtaagtgctctataaatgccacctgtcatgttcccag

SEQ ID NO: 231745 - DNA, 201 bp, Homo sapiens
gatattggaacaatgtgtgtgtctagttctatctcattttacctttagtaccattttttacaacctaaataaagagaaaatatgtaaccaaaggaaaggcrtttacacacacattagcaaatgtggggacctgaggggagcagccaccatctgggacatggcggcccccgtcacccattgaccgtggttgctgtgggaaac

SEQ ID NO: 231746 - DNA, 201 bp, Homo sapiens
gcctgtgtttggggattcaagagaaggggcattggatgttggggggtgggggggcgcaggatgggctggtggggcagagagcacggccacacgttcctgayggggcccctggagcaggagcttggaggagcagctcccaggaggaagagaagctcacgtggtcagaggtaggtttgtcagaatggagcgaaagcggtgggt

SEQ ID NO: 231747 - DNA, 201 bp, Homo sapiens
cttgaaacagagttgatcctgtgcttctgcctgtcgtcttcatccaggccacttcttgcaggtgcagttgtcagattcattgacagacagctgcttgcgcrgccttcagagtcttctgcacgaagaggagggtaaatgggagttaatttcacaaccttcttcctccaggtagatgtgtacatcacagaacaaaatacgttc

SEQ ID NO: 231748 - DNA, 201 bp, Homo sapiens
tcagggctcgccctccgtgggacttgcgctctgtccggctcagggctcgccctccgtgggacttgcgctctgtccggctcagggctcgccctccgtgggayttgcgctctgtccggctcagggctcgccctccgtgggacttgcgctctgtccggctcagggctcgccctccgtgggatttgcgctctgtctggctcaggc

SEQ ID NO: 231749 - DNA, 201 bp, Homo sapiens
atggaactggagagtgggggtgcttccttgggccctcattaaaggatgacctgaagtctcgtggtggaggccgtcaggaaggatggaaaacgctcggaacygtgtaggaaacggagtcatcatgctgtagggtcagcactggggaaagtaaaagcactcaggtgatgccccttgagtttcacaatttaaattcatccttga

SEQ ID NO: 231750 - DNA, 201 bp, Homo sapiens
gattctccctcggtggccctgttggggtggggcccatttcctctttgaaaatgacatcccagtcatcttactttctcggctgtgaacactcacaatatgtkccacaggatgccagggctctgctccgctggagaaacctccgtcccaaactctgtcttgctttctcaatcatatttttagaaagtgaggctgggtggcttg

SEQ ID NO: 231751 - DNA, 201 bp, Homo sapiens
ttctcattacagattgttttctacgtggtttataattttttattacatgcttgtctttgatgtctttcttttcttatgagaatcctgtggaagtcccaagyactctcattgttggaaaggttcctccaacattttataattagcaattcaaatcaatgtgttatgttagatatatgagtattttattatattaggatttga

SEQ ID NO: 231752 - DNA, 201 bp, Homo sapiens
agcattaggtatatctcccattgctatccctcccccctccccccaccccacaacagtccccagagtgtgatattccccttcctgtgtccatgtgatctcawtgttcaattcccacctatgagtgagaatatgcggtgttcggttttttgtttttgcgatagtttactgagaatgatgatttccaatttcatccatgtccct

SEQ ID NO: 231753 - DNA, 201 bp, Homo sapiens
ttcccaaggggggccctgatacccctccctgcatgcggtgcctggggccaccatgctcccacctctctcctttggctctgaaaagttttttcttttttctyttttttttttattattatactttaagttttagggtacatgtgcacattgtgcaggttagttacatatgtatacatgtgccatgctggtgcgctgcaccca

SEQ ID NO: 231754 - DNA, 201 bp, Homo sapiens
tagactctggttctgtaacttttaattccttcagtggttcctgtctgaattggtttttgctctcgtttggtttgaattggggtatttttttttttttttttgctgtggtgtaaagatttttctaaaggtcctttaatgttatacaagtcaattatgcatcaatattatggattaaaccattttcctcagcagtggttgaaa

SEQ ID NO: 231755 - DNA, 201 bp, Homo sapiens
tttcacttttcttcttgaatgaaaacagggcagtgttcaagcctcagagggcctggagcaaagatgaaatgtgaacagcctccggaggaaatcactcaaaagtagggtcatacgaatccacatgggaaagtccctgttccgagtaagtgggagtggggcgggaggctgaatccaggacccacaggtgggacaggccttcct

SEQ ID NO: 231756 - DNA, 201 bp, Homo sapiens
cacacatactacacacaccacatacacatcacaccacatatactacacacacaaacataccacatactacacacatcacacacacaccacacacataccayatacacacacaccacacatataccccacacacaccacacatgtaccccacagacacacacaccataccacacacgccacacacacatacccccacacaca

SEQ ID NO: 231757 - DNA, 201 bp, Homo sapiens
atatgtgtatatatgtgtatatatatgtgtatatatatgtgtgtgtatatgtatatgtgtgtatatatatgtgtgtgtatatatatatatgtatatatatwttttttttgaaacggagtctctctctgttgcccaggctggagtgcagtggtgcgatctcggctcactgcaagctccgcctcccgggttcacgccattctc

SEQ ID NO: 231758 - DNA, 201 bp, Homo sapiens
tcctgactacatatcaataactgcatttgcctgacgtgctaaacgcaggtgcctgcatcctgactacatttcaataactgcatttgcctgacgtgctaaaygcaggtgcctgcatcctgactacatttcaataactgcatttgcctgacgtgctaaatgcaggtgcctgcatcctgactacatttcaataactgcatttgc

SEQ ID NO: 231759 - DNA, 201 bp, Homo sapiens
gtgtgtatatatatgtgtatatatatgtgtatatatgtgtatatatatgtgtatatatatgtgtgtgtatatgtatatgtgtgtatatatatgtgtgtgtrtatatatatatgtatatatatattttttttgaaacggagtctctctctgttgcccaggctggagtgcagtggtgcgatctcggctcactgcaagctccgc

SEQ ID NO: 231760 - DNA, 201 bp, Homo sapiens
gattctggaagattctggaggggatttaacctactaaagcaacgtgctaaatgcaggtgcctgcatcctgactacatatcaataactgcatttgcctgacrtgctaaacgcaggtgcctgcatcctgactacatttcaataactgcatttgcctgacgtgctaaatgcaggtgcctgcatcctgactacatttcaataact

SEQ ID NO: 231761 - DNA, 201 bp, Homo sapiens
caagacgcattgtgacaccacataagcaccacaaagagaaagctgtggattgggtattgggtattcatatatatgtgcatatatatatgtgtgtgtgtgtrtatatatatgtgtatatatatgtgtatatatgtgtatatatatgtgtatatatatgtgtgtgtatatgtatatgtgtgtatatatatgtgtgtgtatata

SEQ ID NO: 231762 - DNA, 201 bp, Homo sapiens
gcatgaccaaggaggcttgtcctgaagagagaggggtcagaaaagcggaggtggaggacccctgcctccgtctgctgcgagtgcctagaacgaggtcctcrcgatgagctgctggttggaaactgtagcatcttgatggtcccagcactgaggatgatgtgtggacatctgtgcaaggcaccttctcacccaggcctggat

SEQ ID NO: 231763 - DNA, 201 bp, Homo sapiens
ccaaaggaagctggagggagaggggccaggccaggttgggacccgggaccacgaggaaggtgaacccatgaagggctattgtgacagccgtgatttggacrtagcaaatgtgggcatttagattttggggattctggaagattctggaggggatttaacctactaaagcaacgtgctaaatgcaggtgcctgcatcctgac

SEQ ID NO: 231764 - DNA, 201 bp, Homo sapiens
tatataccagacatctatagacacatatgcacacatacatgcacacatatacatatatacagatacatctgtatgtacatatgtgcatatttttgtacacrtgcatgaatacatatgtagatatacatatatacacatatatacatgcacctacaggttgagcatcccagatctaaaacccaaaatgcccccaaatcgaaa

SEQ ID NO: 231765 - DNA, 201 bp, Homo sapiens
gagcaggcggcccaggaagaccccgccagtacccagtgtacacccggagtcggcatgcagcctggaccatatcacccaggcctccagctccacggctccargccacaccctggacagccacccgtggcctagcagcacatgggacctcgcacaaaggagctggggcgcagaggccagagaagaaagaagatgcaaaagcga

SEQ ID NO: 231766 - DNA, 201 bp, Homo sapiens
ttgtgatgacattttttaaagccctcatgtgggtgagttgtggtgatcctggtgctgtgggagatggaggcgggggaatcattgagcccaggaggtggagrctgcagtgagtcgtgattgtgtcaccgccgtccagcctgggcaacagagtaagaccccgtctcccctaaataaaataaaatgagataagtcctcatttgc

SEQ ID NO: 231767 - DNA, 201 bp, Homo sapiens
aagaccccgccagtacccagtgtacacccggagtcggcatgcagcctggaccatatcacccaggcctccagctccacggctccaagccacaccctggacasccacccgtggcctagcagcacatgggacctcgcacaaaggagctggggcgcagaggccagagaagaaagaagatgcaaaagcgaccaaagactcaatgtg

SEQ ID NO: 231768 - DNA, 201 bp, Homo sapiens
gctctggtttcaagtacccagagacctgggtctactgaagaatcgcttgcagtgtcatgggggagggagttagatttgcagtgtcacggaggggggagggkgttatatttgcagtgtcatggtggggaggatgttagatttgcagtgtcatgggggagggtgttagatttgcagtgtcatgattgggagggtgttagattt

SEQ ID NO: 231769 - DNA, 201 bp, Homo sapiens
aggaattccatgcatcacaaacatgatggtaccctcccctgtgttccttggaattgcttttctccaccaaattacctgtgatccagcacaaatatagagtmtgtttggcaaaaagaggtagcttaatcagcagtgaagagatgtgcctggatagaaaattcgcagctacaccaagctgctttttagtgtgaggcacaaatc

SEQ ID NO: 231770 - DNA, 201 bp, Homo sapiens
caggcagtgtttgcctgcagccaaaggaagctggagggagaggggccaggccaggttgggacccgggaccacgaggaaggtgaacccatgaagggctattstgacagccgtgatttggacgtagcaaatgtgggcatttagattttggggattctggaagattctggaggggatttaacctactaaagcaacgtgctaaat

SEQ ID NO: 231771 - DNA, 201 bp, Homo sapiens
acgtggctcctgccctcaatgagtttgcagtttgtagggggaggcaggattaaaatatgaaagtactggagaccttttaaaataagtcatgagctgagtgrtgctgatcaaagcacacagggagttttagggaaagcctgaagagcagcagtttctgtctttgctgattggagtggtgtggtcggtcctagccttctccac

SEQ ID NO: 231772 - DNA, 201 bp, Homo sapiens
gaaactcttgaaaaccaaaagttttcacaactcactttgcagcaaatcatgccctgaacagattgatggaaggctctgtgccctcctcacttactgcagaygatgccagtcagcacaggcatcacaggtgctgcccaaggccacagaggctgaaatgcagtgagtggaatggacaccattctgaaagctctgcattcctag

SEQ ID NO: 231773 - DNA, 201 bp, Homo sapiens
gaagtgttttctgaggcaccgcgctttgaagagtggcccgtgttttcctctgtttaccatcacgtcactggttcctgattgtctcggtggctggtgattcrgcgtcgtttctctgtgacgcgtctctaggactgaccctgacccacagctctgggttcacctgcaagctggcttgaacagctggaccttctgcatcagggt

SEQ ID NO: 231774 - DNA, 201 bp, Homo sapiens
ggcagcaggtgccccaagaagggagaggttcacagcagaagccttggtgaaaaggagctttgaacatgtttatttgggcagtggctgctgctagtaccacmtttccatcagatttgacatgagcattccaaagaaattcagatgcaggcagaaacccctcagcctctaaggttttactttccttcatgatcccatagagtt

SEQ ID NO: 231775 - DNA, 201 bp, Homo sapiens
tccgctccttcgtgaaggggagcgaggcgtgctctgcagagcagcaggtgtgtgccatgtgagggctggagggcacagcccacgagagctgcttcgtgggkctctcaccagttctgtggctccatgtccagaccagttctgtggctccgtgtccgtagcaaagctggatctggccacagctgtcgggaatgtctgagggat

SEQ ID NO: 231776 - DNA, 201 bp, Homo sapiens
tctggcgtgggcagcctgatgctttgctgcatcattaaaagccagaggctgccccagacagagtgcccaggtgcctgggccttggctatgaacacattacrggctgccccagacagagtgcccgggtgccggggccttggctatgaacacattacgggctgccccagacagagtgcccgggtgccggggccttggctatga

SEQ ID NO: 231777 - DNA, 201 bp, Homo sapiens
acctctgtgggcctcagctcttatggtgagagtgtgggtgtgagtgacgtctgcagatgtcacctcttatcgttagagtgtgggtgtcagtgacgtttgckgttgtcagctcttatggagagagtgtggatgtgagtgacgtcttcagttgtcagctcttatcgtgggagtgtgagtgtgagtgacgtctgcgggcgtcag

SEQ ID NO: 231778 - DNA, 201 bp, Homo sapiens
ccgtagcccatatttatggcggtttgccacatcctccgaagccccctgtctggatttcatgctgctcaccatgcactagctgaacagtgtcggcctcgagrtgactgctctgccaagaccgtggcttccggtgtcgctacctgagttaagccacgtcagggcgggcccaggggagaagggcgtttgcaggttcctgcgact

SEQ ID NO: 231779 - DNA, 201 bp, Homo sapiens
cctgttgactgtgctgtgtagtcaccatccagctccagacagagcccttggcagcccagaccctcccctcagcatctcctcccaagtgagacccaaagcgrgaggttagcggattcagacatcatgcactccatgtgtctggcttctctaactcaccatacatctgtgatactcacctgctgtggtacagagtagacactt

SEQ ID NO: 231780 - DNA, 201 bp, Homo sapiens
ggaggaacgtgctgcaggtgtaagggcagccttgctcccgagacagtgaacatggagccaagcccaccctggtgggggctgtcgttccagccttgagaccrccctggcatcacattttccataatcacttatcagggcagccactgagcatccaggccaactcaggtaccccttttgcttgagccagtggcctcaagctac

SEQ ID NO: 231781 - DNA, 201 bp, Homo sapiens; identical to SEQ ID NO: 42954

SEQ ID NO: 231782 - DNA, 201 bp, Homo sapiens
tgcctcctgtactgtttattgtatgtcaattatatctcagtagtgctccaaagggaaaagaggcaagcaatcccatgcaaaaatgtataaaaactttgaayggatacttcataaaaagatatacaaatggccaatgaaggcatcaaaggtgcttagcatccttattcacaaaaccataaagaacaaccacttcatgtcact

SEQ ID NO: 231783 - DNA, 201 bp, Homo sapiens
agagcccagcccccagcagtcccgccgttcccgtccccgtccccatggagagcccagcccccagcagtcccgccgtccccgtccctgtccccatggagagyccagcccccagcagtcccgccgtccccgtccccgtggagaacccagctcccagcagtcccgccgtccccatggagaccctgtgcccagcagccccgctgt

SEQ ID NO: 231784 - DNA, 201 bp, Homo sapiens
ccgccgtccccgtgaagagcccagcccccagcagtcccgccgttcccgtccccgtccccatggagagcccagcccccagcagtcccgccgtccccgtcccygtccccatggagagcccagcccccagcagtcccgccgtccccgtccccgtggagaacccagctcccagcagtcccgccgtccccatggagaccctgtgcc

SEQ ID NO: 231785 - DNA, 201 bp, Homo sapiens
ttttgggtttttttttttgagatggagtctcgctctgtcatccaggctggggtatagtggtgcgatctccgctcactgcaagctccacctcccgggttcaygccattctcctgcctcagcctcccgagtagctgggactacaggtgcccgccaccacgcccggctaattttttgtgtttttagtagagatggggtttcact

SEQ ID NO: 231786 - DNA, 201 bp, Homo sapiens
tacatgtgtgtgcatatatatatatatatatatatatatatagagtagattacaaaaatccatgagttttttttgttttatttttttgggtttttttttttgagatggagtctcgctctgtcatccaggctggggtatagtggtgcgatctccgctcactgcaagctccacctcccgggttcatgccattctcctgcctca

SEQ ID NO: 231787 - DNA, 201 bp, Homo sapiens
atacatgtgtgtgcatatatatatatatatatatatatatatagagtagattacaaaaatccatgagttttttttgttttatttttttgggtttttttttttgagatggagtctcgctctgtcatccaggctggggtatagtggtgcgatctccgctcactgcaagctccacctcccgggttcatgccattctcctgcctc

SEQ ID NO: 231788 - DNA, 201 bp, Homo sapiens
ggagaggagacgcatctacttcacgtggagatttggggtgaagtcattttgatactaaaacatacatgtgtgtgcatatatatatatatatatatatatatatagagtagattacaaaaatccatgagttttttttgttttatttttttgggtttttttttttgagatggagtctcgctctgtcatccaggctggggtata

SEQ ID NO: 231789 - DNA, 201 bp, Homo sapiens
ggacggcccctcggatctaatgagcggacctcacatccaaaaggggctgcgatgttggggtgcccctgccttggccagagcagacactgccctctgctcayctgtgtgcaccagagaacatggtcgagggatgccgggttgataaggggagcccggccaaaccctcagtcacatggagtccgcctgccctgaacctcctca

SEQ ID NO: 231790 - DNA, 201 bp, Homo sapiens
ttcgcggctgccattgtatttccgctccttcgtgaaggggagcgaggcgtgctctgcagagcagcaggtgtgtgccatgtgagggctggagggcacagccyacgagagctgcttcgtggggctctcaccagttctgtggctccatgtccagaccagttctgtggctccgtgtccgtagcaaagctggatctggccacagct

SEQ ID NO: 231791 - DNA, 201 bp, Homo sapiens
aaaatacttgttttgtgtctattgaacacttagcgtggaaaacttagaaaatgcttactatttgatattcttttaggatgtgtgtgtgtgtgtgtgtgtgkctttattttgcttttcagtttgtatgtgtgccttatcaaattgtctttaaaatatgcttctgaggaacactttggtctttatgtggttctgctgtaagtt

SEQ ID NO: 231792 - DNA, 201 bp, Homo sapiens
aagacataatcactcaattgaaagcttggagcagataatgcatcttagtagccagagcttcgcggctgccattgtatttccgctccttcgtgaaggggagmgaggcgtgctctgcagagcagcaggtgtgtgccatgtgagggctggagggcacagcccacgagagctgcttcgtggggctctcaccagttctgtggctcc

SEQ ID NO: 231793 - DNA, 201 bp, Homo sapiens
aaaataagagtgaaccagactttcattgccatcacttaacacgctgtatgctattaatattttagaattgtggtcaagtgaacctgggggaggagaagcgygggacttctagtttatagctcccaccctggaacctgccaggtgccccaagacacccctctgtgggcctcgtgctatctctgcaggaaggttccggaaaac

SEQ ID NO: 231794 - DNA, 201 bp, Homo sapiens
taaaatacttgttttgtgtctattgaacacttagcgtggaaaacttagaaaatgcttactatttgatattcttttaggatgtgtgtgtgtgtgtgtgtgtgtctttattttgcttttcagtttgtatgtgtgccttatcaaattgtctttaaaatatgcttctgaggaacactttggtctttatgtggttctgctgtaagt

SEQ ID NO: 231795 - DNA, 201 bp, Homo sapiens
gaggtagtgagctcacctaagaatgtcatcgtcatatagtcagcaagaataagatatagaagacgatgccttcgtggctttacacacctcaaaatgtggasctgtatcatttatgtgattcttttaagacataatcactcaattgaaagcttggagcagataatgcatcttagtagccagagcttcgcggctgccattgta

SEQ ID NO: 231796 - DNA, 201 bp, Homo sapiens
ctggcatggctgcacgcttgctctgggaagctccatgcgctctatgagaagtgcgtggagatggcttctgatggcctcatcacagaaactcaacaggccgygcattcctggtgtagcccctctcagtcctgtttgaccagctctgaagctgtcttgtgacttttcccatcgtgggtcacgtgcaccatcagtggattccgg

SEQ ID NO: 231797 - DNA, 201 bp, Homo sapiens
ccgcagtctatgctaagctctagtcatttattcaatttagcttaccaaagctacacctctaactgtctcggtaactcactgaaaatgtcccctcgtcatgtaagagccagagcttacctgcatttttctgatgcatttgtgactcactgagatgcctctgaagcccccagaggcttgtgaaacagttttagagttaatgct

SEQ ID NO: 231798 - DNA, 201 bp, Homo sapiens
tccatacactgtgtctgtcaaactcagtgatgcacacaggtttaaacattgttttttatgtgttttaatttttcatagccttctaacgtgacctgtgagaygtctctgcagagttgatgccatgaggtagtgagctcacctaagaatgtcatcgtcatatagtcagcaagaataagatatagaagacgatgccttcgtggc

SEQ ID NO: 231799 - DNA, 201 bp, Homo sapiens
atggttttgcagtgggttccttgtggaagcaacaggcgcggcaatcacccggtgactggaaacggaaggttctgttgagtgcttcctcctttctacgaaaygcagcataaaacacttctgtgaaaggagcacgttgttaaaagaaacacacgaaagtgtatttaatgggcagagccccgcccgctgtgctggccccggtca

SEQ ID NO: 231800 - DNA, 201 bp, Homo sapiens
agaccccgccagtacccagtgtacacccggagtcggcatgcagcctggaccatatcacccaggcctccagctccacggctccaagccacaccctggacagscacccgtggcctagcagcacatgggacctcgcacaaaggagctggggcgcagaggccagagaagaaagaagatgcaaaagcgaccaaagactcaatgtgt

SEQ ID NO: 231801 - DNA, 201 bp, Homo sapiens
tgaggtcgcaagcccagccctgcacagggcgaaaggaaggaccactcagactgtcctggcctgggtcaggtgccaccccacaggtagtaactcatcaaagrtgcgcagtttaacggactgtactatactgacagtaaaacgaactaatctggcatccatacactgtgtctgtcaaactcagtgatgcacacaggtttaaac

SEQ ID NO: 231802 - DNA, 201 bp, Homo sapiens
gttatctatacctttctcaagtttcagaaagttttctgttactgtttctttgagtaagtttggtacctcttgttctcactcagctccctcttgaacaccartaattcttggatttggtgttttgaggtaattttctctatcttgtaggttgtctttcattctttgttctttttcctcctctgattgtgtatttgagctcac

SEQ ID NO: 231803 - DNA, 201 bp, Homo sapiens
ggctcgccccaaagagggcttgtctacatagctggcacattgtggtggcagttgtggagctcagccagggctgtggctgggagctctgggcctctgcatgkggagcctccacaaggctgcttgggcttcctcacagaatggcagcgagtttcccaagaacaagtgtcccaagagaggaaatgggagctgccagtctctcga

SEQ ID NO: 231804 - DNA, 201 bp, Homo sapiens
aggtaatttataacaggttaaaagagagacctcaccactcacagaaaaacgaagcattcccctccccagagtggagacgtggctttctggggaatgtggcycagggccctggccgcctgcccacacgcgtagaaatacatgaaatggctgcgcatgtttcagtcacttagagaaataccgaaaaatggcttcatataaacc

SEQ ID NO: 231805 - DNA, 201 bp, Homo sapiens
tgtgtggccctcttcagcacacccagcaatgaatctgaatgcaggcgcctcatgaccttgctgtgtctggagctggctgaacgctcttcccgaggatgtcygtctacccgagctggagggatgtattagaggatacgaaggaagatttgatgcttttttcagatctgctctgtcattgggcaaaataagctcccctatagc

SEQ ID NO: 231806 - DNA, 201 bp, Homo sapiens
cggcagctgagaaaccaagagtggctgcagtgtcaccgcggacgcctggacgtgctgagactcaccccggggccatggagagtggctgcagtgtcaccgcrgatgcctggacgtgctgagactcaccctggggccatggagagtggctgcagtgtcaccgcggatgcctggacatgctgagactcaccacggggccaccga

SEQ ID NO: 231807 - DNA, 201 bp, Homo sapiens
ctggtggtgccatgcagctgagaagaaattgctcctataagcgaatatctgacaccccagccaaaagtcttattctttcccctaaattccaaaggaatttyctctctattttccagtcgattggagtcgtttccatcggtggctgtcttaccagtgggtgatgagtctgagaaataggaaccatgtcttatttatctgtat

SEQ ID NO: 231808 - DNA, 201 bp, Homo sapiens
gggtagctaccaactgaacctaaggaaattcagttccatgataagccaagaagggtcaacagcgtctctcgctaacactgcagatatctggactggccccrgggcctggtccctggtggtgccatgcagctgagaagaaattgctcctataagcgaatatctgacaccccagccaaaagtcttattctttcccctaaattc

SEQ ID NO: 231809 - DNA, 201 bp, Homo sapiens
gctttctaatgttttgctcagggcagatagcagggaagcattgcaaatagggttttggctgacaggcaggctcctgtgtgcacacacaaagcctaccccasaaaagtagagtctgcttctccgaattcaggccactctctggcagctgaagcctctgctactgctccctgtcagcagctcccagctcttacaccccaagtg

SEQ ID NO: 231810 - DNA, 201 bp, Homo sapiens
tgcgttccgatctctgacagtcatttttggggtggtgtgttccaatctccgacagtcttttctggggtggtgtgttctggtctctgacagtcatttttggrgtgttgtgttctggtttctgacagtcattttggggtggcatgttctggtctccaacagtcattttggggtggtgtgttctggtctccaacagtcattttg

SEQ ID NO: 231811 - DNA, 201 bp, Homo sapiens
ttggggtggcatgttctggtctccaacagtcattttggggtggtgtgttctggtctccaacagtcattttggggtggtgtgttctgttctctgacagtcgkttttagggtgacgtgttctgatctccaacagtcatttttggggtggtgtgttctggtctctgacagtcatttttggggtggtgcattccgatctccaaca

SEQ ID NO: 231812 - DNA, 201 bp, Homo sapiens
acagtcatttttggggtggcatgttctgttctccaacagtcgttttggggtggtgtgttctgttctccaacagtcatttttggggtggtatgttctgatckccaacaatcatttttggggtggtgtgttctgatctccaacagccattttgggggtggcatgtttttatctccgacagtcattttggggggtggtgtgttc

SEQ ID NO: 231813 - DNA, 201 bp, Homo sapiens
acatgtggctcagaatacatttcttcaaatagttttcagagtttgaccctcttcatcaacaggagcagtagttgtcagccctgacgttatattaaaataayttgggagcctcggaaaccatggtgtctggggcttacccttcaaagattctgaattgatttgtctcatatgaggcctgccatcagcatctcctaaaaattc

SEQ ID NO: 231814 - DNA, 201 bp, Homo sapiens
gagtgagagagggctctgtagacatcgggcacgcatgatggagtgagagagggctctgtagacatcgggcacgcatgatggagtgagagagggctctgtaracatcgggcacacatgatggagtcagagagggctctgtaaacatcgggcacagaagatgtaatgagagagggctctgtaaacatcggccacacatgatgt

SEQ ID NO: 231815 - DNA, 201 bp, Homo sapiens
catccaccctccccattcacccatggtccacacagtgatgggaaaccacattccaaaatcaacacttttccaaaacagtgggcagaaaaagctggtggcayggccactccggacgcacatctcagagggtttgctgctggcgcttcagggtccactgtgctagtattttttttttttttttttttgagagacttgctgtgt

SEQ ID NO: 231816 - DNA, 201 bp, Homo sapiens
tgggggcgcattcagcccatcacagggccagtgaaccacgctgcagtttttaaagaattatatttatatctcaaagttttgaattacttttaatttttttyttttgaaaaccagttggtggtataaggtttcttgggcacaagtctggcccagccaggtgttcagcatcaactgtgacttcacaccccgagctagtagcat

SEQ ID NO: 231817 - DNA, 201 bp, Homo sapiens
ctgtgttctggagctgagtgcacatgtgtagacatgggtgtgtgtgcatttttgtgggtgtgtgggtgtgtaggtatttaggggtctgtgtgtgtgtgtgkatgtgtgcatatgtgtgggaaggcatatgtgtatgtatgtgtatatgtgtgttagggaaatgttaaccctaagacattactagtttataataggaaaaaa

SEQ ID NO: 231818 - DNA, 201 bp, Homo sapiens
ggccgagcaggaggggcgcagagaggggtggccgagcaggaggggcgcagagaggggtggccgagcaggaggggcgcagagaggggtggccgagcaggagrggcgcagagaggggtggccgagcaggaggggcgcagagaggggtggccgagcaggaggggcgcagaggggtggccgagcaggaggggcgcagagaggggt

SEQ ID NO: 231819 - DNA, 201 bp, Homo sapiens
gaggcgctgtgtatgtgtgtgtggggaggacactgggtgtgtgtggggaggcgctgggtatgtgtgtgtggagaagcgctgtgtatgtgtgtgtggggagsacactgggtgtgtgtggggaggcgctgggtatgtgtgtgtggggaggacactgggtgtgtgtggggaggcgctgggtatgtgtgtgtggggaggacactg

SEQ ID NO: 231820 - DNA, 201 bp, Homo sapiens
aggtgggaaggaggcacatgaaggaaccaccattccctttgagctcagaaaggaggagaggcctgtgcaggaggggtgcagagaggggtggccgagcaggmggggcgcagagaggggtggccgagcaggaggggcgcagagaggggtggccgagcaggaggggcgcagagaggggtggccgagcaggaggggcgcagagag

SEQ ID NO: 231821 - DNA, 201 bp, Homo sapiens
gtgtgcggaggcactggatatgcgtgtgtggggaggacactggatatgcgtgtgtggggaggacactggatatgcgtgtgtggggaggacactgggtatgygtgtgtgggaaagacactgggtatgtgtgtggggggaggacactgggtatgtgtgtggggggaggacactgggtatgtgtgtggggggaggacactgggt

SEQ ID NO: 231822 - DNA, 201 bp, Homo sapiens
ccagccatgcaacgcttcgcgtggttattcccaagttcactcattcattcagaaagcacttgcgaagtcccggccaatcacacgggctcctgattctcccragttcactcattcactcagaaagcacttgcgaagtcccggccaatcacacgggctcctgattctcccgcgttcactcattcattcaggaagcacttgcga

SEQ ID NO: 231823 - DNA, 201 bp, Homo sapiens
tccatgtgtgcggaggcactggatatgcgtgtgtggggaggacactggatatgcgtgtgtggggaggacactggatatgcgtgtgtggggaggacactggrtatgtgtgtgtgggaaagacactgggtatgtgtgtggggggaggacactgggtatgtgtgtggggggaggacactgggtatgtgtgtggggggaggacac

SEQ ID NO: 231824 - DNA, 201 bp, Homo sapiens
agaaagactggaaatgagggtctcggctttgccacaggaatgggtgggattctgcctgtttctccatctttttgtaatttctattataaagagtgaggcaygctcaccatttgccgttatccttgaaggagtttctccccagaaagcgcttgatggagacgagggcacctgctcctggtgtgggaagaggtagctcgtgga

SEQ ID NO: 231825 - DNA, 201 bp, Homo sapiens
tggaagaacttgtttctgctgccggccgtgcaactctccagccatgcaacgcttcgcgtggttattcccaagttcactcattcattcagaaagcacttgcraagtcccggccaatcacacgggctcctgattctcccgagttcactcattcactcagaaagcacttgcgaagtcccggccaatcacacgggctcctgattc

SEQ ID NO: 231826 - DNA, 201 bp, Homo sapiens
gagtgtgtctccgtgtgtatatgtgcatgagtgtgtctctgtgtgtgtccatgagtgtgtctctgtgtgtatatgtgtatgagtgtgttcgtgtgtgtgtgcatgagtgtgtgtctgtgtatgtgcatgagtgtgtctctgtgtgtgtgtgcatgagtgtgtgtctgcttgggttactttgctacctgcaagcaaacccct

SEQ ID NO: 231827 - DNA, 201 bp, Homo sapiens
agagcacacacaccacggctgcatcctgagcggctgtgatagtcagctctgtggacccacgtccatcccgctgtcctgacacctccccgagcccccacacytacctccccaacatggggcctctgtcagaagtaatgagaccttcctcaactcgcgaggggctttcaccttgtcacacttaagaaacactcctgcgtcccg

SEQ ID NO: 231828 - DNA, 201 bp, Homo sapiens
gcccagcacagacagggttatgtagcagaaacactccctggaattggcaaaggcaccgctttgctgttttaaatcctatttgctttccttgtgacgtcttyggtcattttcatggtttatttccattcacaatacccctggaaacagaaaccagctaaacgactgcagctttggatctctggtaaccagaagcaaagacaa

SEQ ID NO: 231829 - DNA, 201 bp, Homo sapiens
aggctggcgagctgctgtccatggtgctggccatctggccccagggaaagggctttcgagagtggtgctccacgggtcctgtccccctcggctcatgacgygcggtgcataatcctgcggagacacctggggccgcctctgttccacggatcatggggaccagggccacctacaacatggtggcctgaattgcgattgtgt

SEQ ID NO: 231830 - DNA, 201 bp, Homo sapiens
cgagtgtgtctccgtgtgtatatgtgcatgagtgtgtctctgtgtgtgtccatgagtgtgtctctgtgtgtatatgtgtatgagtgtgttcgtgtgtgtgtgcatgagtgtgtgtctgtgtatgtgcatgagtgtgtctctgtgtgtgtgtgcatgagtgtgtgtctgcttgggttactttgctacctgcaagcaaacccc

SEQ ID NO: 231831 - DNA, 201 bp, Homo sapiens
acatgaagggatgtggatgggagactttccgacgagggaagccccttgcagaccaggcacccctgacatttctgaagaagcaaatctcccttgtggatgcrgcacccagagcaacactaatgggcctacaccgtgcccgttgtgtgttcttagcaggaattttctgtgccggggaacagctgtttctttctattcctttat

SEQ ID NO: 231832 - DNA, 201 bp, Homo sapiens
gtgagagcaaaacagagaagccccatcctcctgctgcatcttcctgctctgccgagagacaggtaaggagtctgtggctgcagggtggtggagagcagacmaggacactcccagatgcagagatggcagcttcactcacgggctgtcctggggctcaggaggacccacagaaagcttttcactgaatggaagggggcccaa

SEQ ID NO: 231833 - DNA, 201 bp, Homo sapiens
tccttaggacaagtcccagcaaatgtggcagaagaaccacccatggtccgcagcaccacgtccttccagccgtgtatgtctcggtggatggaggggctgcyggggctctgcgttcggggaaacaaggcgctgtgggcttgttcccgggttgccatggcgattcctcattatctccagtcacagagccgtgtgcagggtatt

SEQ ID NO: 231834 - DNA, 201 bp, Homo sapiens
ccgtgtgtgtatgtgcacgagtgtgtctccgtgtgtatatgtgcatgagtgtgtctctgtgtgtgtccatgagtgtgtctctgtgtgtatatgtgtatgagtgtgttcgtgtgtgtgtgcatgagtgtgtgtctgtgtatgtgcatgagtgtgtctctgtgtgtgtgtgcatgagtgtgtgtctgcttgggttactttgct

SEQ ID NO: 231835 - DNA, 201 bp, Homo sapiens
tggacgctgacactgggcatcggtgggaacagacagcggtgctgtggctcctgctggtgggacgctgggctcggctgacagtcaggaggcaacgcagctgygcacatccgaagctctcgacgtgtggagatgctttggcatggacactcgtcccctgacacttcatcctaaggacacaattctttgagatgtgcaaagaat

SEQ ID NO: 231836 - DNA, 201 bp, Homo sapiens
ggagtgataccgcgtctgcgcttccgtgactgttatatgtcactttgcataatgccttcgaggttggcctgtgtcgtggtgtgtgtcagcactaacttccwttttatgactgactcatattccatggcatggatggaccgcactttgtggattcatttgtgtattaatggacagtgccgttgtttccggctttgggctgtt

SEQ ID NO: 231837 - DNA, 201 bp, Homo sapiens
gggatgctgtgggtgtgtgggtgtgtgtgcgtgtgcacgcgtgcattgggctgtggcttctcccagggatgctgtgggtgtgggtgtgtgtgcgtttgcaygcgtgcattgggctgtggcttctcccggggatgctgtgggtgtgtgtgtgcatttgcacacgtgcattgggctgcagcttctcccagggatgctgtgggt

SEQ ID NO: 231838 - DNA, 201 bp, Homo sapiens
tagaggggagctgcgactcagtggacgctgacactgggcatcggtgggaacagacagcggtgctgtggctcctgctggtgggacgctgggctcggctgacrgtcaggaggcaacgcagctgtgcacatccgaagctctcgacgtgtggagatgctttggcatggacactcgtcccctgacacttcatcctaaggacacaat

SEQ ID NO: 231839 - DNA, 201 bp, Homo sapiens
gaagagggtgcctgtgtggccccaggtaccatggaggccatgccaagcagacaccgtatgatcccccagcagctgtggctgttgacaaggtgcagagtgastctggggtgactcatttcttttgtctggcaggagccacagaccgggaattttgtgttccaatatgaatccccacggcttgtgagcccatgctggagcgac

SEQ ID NO: 231840 - DNA, 201 bp, Homo sapiens
aagtcctttgcctttctgaggtctgatgggcagaattgtcacattgccttaattaggccatctttaattacaaataaagtcaaatttttcttctctctctstgagtaaatgagttgtggacatttttttcttcctgtgctttggggccagggtggcctgaggaaagtgccgggcacaggggctctgtcccttcatcctctt

SEQ ID NO: 231841 - DNA, 201 bp, Homo sapiens
atgttcctgctaaaaggacaagagaggtgggaaggaggcacatgaaggaaccaccattccctttgagctcagaaaggaggagaggcctgtgcaggaggggygcagagaggggtggccgagcaggcggggcgcagagaggggtggccgagcaggaggggcgcagagaggggtggccgagcaggaggggcgcagagaggggtg

SEQ ID NO: 231842 - DNA, 201 bp, Homo sapiens
agccctaggcagaaacccggctctccagggcaggcaggtcctctcagcctctccccaaacatctgtgaggaaaccgtgctgcagccacagtgtggagacayacacccttgccatcagccaccttcctcccatgcagcaagctcgggcacacccagtgtagaggggagctgcgactcagtggacgctgacactgggcatcgg

SEQ ID NO: 231843 - DNA, 201 bp, Homo sapiens
tggccaaacttccacggcattcccaccagggtctgcgcctgggccggaagagggtgcctgtgtggccccaggtaccatggaggccatgccaagcagacacygtatgatcccccagcagctgtggctgttgacaaggtgcagagtgactctggggtgactcatttcttttgtctggcaggagccacagaccgggaattttgt

SEQ ID NO: 231844 - DNA, 201 bp, Homo sapiens
gcctgctgttaggagacccggaataggagcgagtgtctggcctattggcccagggtggcctgtctgtaactgggtggcctggcgcaggccctggtgcggcraaagcagctgccatgttccagaaacagagtaacaggcagagagagccaggcagctgcagctcagaaaggttaatgtctccattcgaaaaatctatctctg

SEQ ID NO: 231845 - DNA, 201 bp, Homo sapiens
tgatgcttttttcagatctgctctgtcattgggcaaaataagctcccctatagcgctaatttttaacaaagatttctccccaaaggagagagtaggatcaygtatttggaaaagctcacataccattgaatgaaaatgaaaagaaattagcttcacgcattcataattcctacattctctgggtgcacagggcctgacaac

SEQ ID NO: 231846 - DNA, 201 bp, Homo sapiens
caggaggagccctaggcagaaacccggctctccagggcaggcaggtcctctcagcctctccccaaacatctgtgaggaaaccgtgctgcagccacagtgtsgagacatacacccttgccatcagccaccttcctcccatgcagcaagctcgggcacacccagtgtagaggggagctgcgactcagtggacgctgacactgg

SEQ ID NO: 231847 - DNA, 201 bp, Homo sapiens
aatctgggaagcgcttacacgtgtcatttctgtggcagcagatgcgtttctaactcaccgataatagacgattgtgtaggaatctgtttttaggtagcctrttcctctctcattgaagggcttggctcacatgtagcaaaacatgtttttttcaagcaagatattttccaaggttgtgccttttacttttttgtcagtgac

SEQ ID NO: 231848 - DNA, 201 bp, Homo sapiens
ccggctgcctgcatgccagggcaggtgttcacatggagttgttgagttgcactctcttgcccttgagaaggatgaggcgttaataaggtcattccttctgycatttcactcgtaggtaaccatgtttcgtgtagtaagaaacgcggggctaaagtgcccgtaatgttttagcattctttaaaaggccacttactttcacaa

SEQ ID NO: 231849 - DNA, 201 bp, Homo sapiens
aagtgttcaaaaagttgttaataacgtcggaaaatgcaggtgggagaaagtaaatgaaaaactcaggatccaaaactgagcatctaatacgatgacagccrtgcgaaaatgtggatagcagaaaaagctcaaagaaatacaccacactgtgaatagtggctctctctgggtagtgacttttattttcttcatatttctctg

SEQ ID NO: 231850 - DNA, 201 bp, Homo sapiens
atttttaacaaagatttctccccaaaggagagagtaggatcatgtatttggaaaagctcacataccattgaatgaaaatgaaaagaaattagcttcacgcrttcataattcctacattctctgggtgcacagggcctgacaacagcagaaagcctccggtttaacgtaaagaggtgggacctgctgagaccctcacctcag

SEQ ID NO: 231851 - DNA, 201 bp, Homo sapiens
tttaacatctgcagtgcatagaacttccacagtggctggcaggtcacttgggtgggatgacagcgtctccggggacaaggatggacaggtggatgggtgargagcatgaggtgaggaaggcctgggctgtggtagagaaaggagaggagggagaaagtgcttgggaacacagccggcgagcgcagtgacatgctggtgtgg

SEQ ID NO: 231852 - DNA, 201 bp, Homo sapiens
cttctcccctcacttggattctcccagcccgcgtccttcctccccctctcacatccgccatcctttcctctcgccggcccccgtaagcaggaaggaaatgractgtcactagctttgttgtgggtcgggcttccgtgtggacggcagcactttcatttctctccttctgttggcagtgacggtgcaggccggagcggcacc

SEQ ID NO: 231853 - DNA, 201 bp, Homo sapiens
ataacagtttgatgctgacacatcaacacagcattccccaaagcagcttttcatttcgtaatgggataactgtgggctctggaagaggctcaggtgtgccrttgttctctgcagggatttccaggcagttgacggaactggcacctgaatgggccacaggtgtgccgggtgggatttggaaacgctgggggagagaatgag

SEQ ID NO: 231854 - DNA, 201 bp, Homo sapiens
taagcagacattaaaagagaagtgttcaaaaagttgttaataacgtcggaaaatgcaggtgggagaaagtaaatgaaaaactcaggatccaaaactgagcrtctaatacgatgacagccgtgcgaaaatgtggatagcagaaaaagctcaaagaaatacaccacactgtgaatagtggctctctctgggtagtgactttta

SEQ ID NO: 231855 - DNA, 201 bp, Homo sapiens
tgacaacagcagaaagcctccggtttaacgtaaagaggtgggacctgctgagaccctcacctcagaaagtgcttaattgaaaatccagtttctccacatgmtgctgctaagaatatttaattagcgttatcattaagcaagggtagttgttatactgacatcatgcattctgtgactgacacacttaaaccagcagaaacc

SEQ ID NO: 231856 - DNA, 201 bp, Homo sapiens
gtcctgccaccttgcttgttcttaaaccctgtggtcccatgacacagaaacatcgagacaatggtttcagcctgttgcattgtctcaaccaccaggacgtycagcagaggctcagaaccctctgcagatggtgagaaatgcttggggccagttatgtacagggacgaaatctgtcattacaggaggtacagccacctccag

SEQ ID NO: 231857 - DNA, 201 bp, Homo sapiens
tccacattgtattcataaatcatagcattgccttgtacccattgatatggtttggctctgtgtccccacccacatctcaccttgagttgtaatccccagcrttggggagggacctggtgggaggtgactggatcatgcgggtggtttccaccacgctgttctcgtgatagtgagggagttctcatgagagctgatggttta

SEQ ID NO: 231858 - DNA, 201 bp, Homo sapiens
gacttgtcttggacttcatagaggtttctccgtaatttagatatccttaccaaaagctgacgggtcacaaatgcccttgaagatgctgtttttagacagtrtggaaataacagttttcaatatgatgtctggactgtaagaaattttgagcataaattgcaaaactcaaaaattttagtgaagaatcaagatgtagtgtaa

SEQ ID NO: 231859 - DNA, 201 bp, Homo sapiens
ttagttttttttcacactgctgataaagacatatctgagactgggcagtttacaaaataaagaggtttaatggacttacagttccatgtggctggggaggmctcacaatcatggtggaaggcaaggaggagcaagtcccgtcttacatggatggcagcaggcaaagtgcagggaaactcccccttataaaaccaccagatc

SEQ ID NO: 231860 - DNA, 201 bp, Homo sapiens
ctttgcatgacggtgcgctctcgcccggtgacccctgggttggtttgtatcactaatcgttctttctcagtgaattcctgttgtggaagtttctatgataycaacttttcttactgttggagaccttttgctcactgattctttgttctgatggagtcaaatgagacggctgtgtcaccttcctgaataactcgtggtcta

SEQ ID NO: 231861 - DNA, 201 bp, Homo sapiens
gggggacatagtccccgagcagccatctcagctctgcagggggtcaggtgcttgcgcagagctgcctcatcctgcgggttctcgggtgcggtgaaggatcygtcctggggatgcaccatgcctgcttctggtgaattattttctgcagtcttctacctttaagagggacctggctccagacagaaggtacaattgccctaa

SEQ ID NO: 231862 - DNA, 201 bp, Homo sapiens
ccatctcagctctgcagggggtcaggtgcttgcgcagagctgcctcatcctgcgggttctcgggtgcggtgaaggatccgtcctggggatgcaccatgccygcttctggtgaattattttctgcagtcttctacctttaagagggacctggctccagacagaaggtacaattgccctaaggaaatgaggtcaccaggcggg

SEQ ID NO: 231863 - DNA, 201 bp, Homo sapiens
tccccagctctaacctttcaacctataactactccctactgtaatttttgtgggatttgctgatattgaaggaagatgattgaaaatctgcttaagatttygtctttatttcccgcttgacaggcctagggccccactgaggaagtgtttctctctgcagagccctcagccaccccatatgtcccagggatgtgctcaagt

SEQ ID NO: 231864 - DNA, 201 bp, Homo sapiens
aaccaagaggcagtggtggacatggtgcattttccaagggtttccgcagaatttggtgactagctggatattcctggcataaggaagccaaagggaatatycgtaaggttagaatgctgtttgctcctcagagcaggcgctgattcaagggagaccttgttgagttcaaagtgatgctaagacgtccacatggaatattca

SEQ ID NO: 231865 - DNA, 201 bp, Homo sapiens
catttggccgagccattgaccctgcgatgaagccatcgtgagcctcccatcattccacctcatggggtccccggaggcgtcagattcatagaagcctagtrtgaatctagggggtagtagccaggggctcagggaggggacagtgcagaggggcttgatggtgacagggcttccatttgggaagatgagaatgctctgaag

SEQ ID NO: 231866 - DNA, 201 bp, Homo sapiens
tattaatcccccactgcaatttgattcgcaaatcttttccccctttatatgggttgtcttttcgctctctggatggtgcgctttgacgcacaaacgttttsagtgtcatcaaacccaatttatctatttttttcttttgtgcctgtgtttttggtgttatatccaggaaatcgtggccaaatccaatgtcataaaggtctt

SEQ ID NO: 231867 - DNA, 201 bp, Homo sapiens
cctggcttcgtgggacccggacaccccaggcctccgggctgcatgtgtctgcccagctgagctgacctccttgccagaccctcgctgggtacccaccgggyaccaggtggccctcaggagcccctctgggcctccaggtgtagacgggagaggcagagcccacagacgtctgcagggtgggagctggggggcccacagatg

SEQ ID NO: 231868 - DNA, 201 bp, Homo sapiens
agagtgtaatcccttagtctggtacaaatgttttaagactttgtatttctaaaatccaatttgagttatccttgaactttaaagctgttttgtccactgarccaagggccccgggatgcagacaagtgtggcccagcccctcgcccccgtgaaaccccagccgccatgggcgccaggagccctgtcagaggcaggaggcac

SEQ ID NO: 231869 - DNA, 201 bp, Homo sapiens
agcttttcttgcctgccttacctggcaccgcccagcgtttcggccaaggccacctttcatgtgttatctggacagtgggtttgagcgaacacattctcagraagcttcacacttagacaagcattgccggtggctggttttctgtataaaatagccaccccgatttcagcgacaggaaaggtgagaccccttctgaagaca

SEQ ID NO: 231870 - DNA, 201 bp, Homo sapiens
ccaggcaaaggaaggagccgcagacaggcaggttttgaggccccaatttaaaatctgagctacctttccccacctcttcaaaagcctttctgtggataagwtaagagtgtaatcccttagtctggtacaaatgttttaagactttgtatttctaaaatccaatttgagttatccttgaactttaaagctgttttgtccact

SEQ ID NO: 231871 - DNA, 201 bp, Homo sapiens
acttcagtgcgttaacactgggaaggtgggagggggccgcgaagccgagggaacccacctgcgctgtaaaatgtgccctcttcgcagcgcccccttctctsgtcagacgtggccctgggttcctcagtgcctgaggttcggttcacaatgtccacacctgtctctgtcccctccctccgctcctccctgccaggtgaacct

SEQ ID NO: 231872 - DNA, 201 bp, Homo sapiens
cagcgccgtctccctcgaggctgtttcctggtctccttgggacatttatgaggagagctgattaaggtggtgccactcctggacccagagaaagagttctycatgcctgggctcagtggggctcatggaagtctcttctgggggatttgaggttctggtctgggattgggaattcattcctttttgttccaatttcattaa

SEQ ID NO: 231873 - DNA, 201 bp, Homo sapiens
caagaatgaagtaaataaacgtgggtgattaagccagcactagaatgcatgctttgattctgtttggcattaaatgagtgagaatgccaaagctccacagyaggaagcgagttagaggctcaagtgtgaaccttaaaccacacagctgtggccttggggttcctgcagaaatgcttaggcccggaagtgcctgcgctgggg

SEQ ID NO: 231874 - DNA, 201 bp, Homo sapiens
cagactccagccactgtgctcaagacagctcatgggttcccacctgcctcccaaaacaaatctgggccaagtggattagagttttaaattcattctttttwaaaaatacatgaagattcaaagatgggcagatgcagaaaatgaaatactctatattgtatttaataggaattctgtccaaaaaaaaaaacagagatgggt

SEQ ID NO: 231875 - DNA, 201 bp, Homo sapiens
ttggagtttcgtggctggatcatgtgacctttttatttgaggataacctgctcaccagtttatttatctggctggattttctgcccccatcaagaatgaastaaataaacgtgggtgattaagccagcactagaatgcatgctttgattctgtttggcattaaatgagtgagaatgccaaagctccacagtaggaagcgag

SEQ ID NO: 231876 - DNA, 201 bp, Homo sapiens
tttgcattttagcagcggaaacatttcctcaaagagaagtcttcccaggagtccctatgcacggagctgctgaagatggagctgtccacgggagcagagtkgggggtccgggacctgaaggcatccagccctccagagcccagggttccagccaccgcacagactccagccactgtgctcaagacagctcatgggttccca

SEQ ID NO: 231877 - DNA, 201 bp, Homo sapiens
gatgaaggctccaatctctaccacatctatgaggtactccgaccagagccacccaggccaggacccaccagccggacgaggacgggccctgctcctcctcygaatgggattcgttagggccccccagggccgcatgcagggaggctcagcgcaccccatgttcaggggatggaggctgagccacccccgagggccgcatgc

SEQ ID NO: 231878 - DNA, 201 bp, Homo sapiens
cctcgcggagaacggcgtccggcagtgctaccactactggccggatgaaggctccaatctctaccacatctatgaggtactccgaccagagccacccaggscaggacccaccagccggacgaggacgggccctgctcctcctccgaatgggattcgttagggccccccagggccgcatgcagggaggctcagcgcacccca

SEQ ID NO: 231879 - DNA, 201 bp, Homo sapiens
gtcggggtgtgtatcctaaagcccagtaagccatgatgcctgcaccagaggccacagccccacatgtgctttcaggccatctgccgggtcttgggaagaayaaagtgtgcaaaggggcgggtggcagggaggggcccatggcagcccccagggaatccaggtgaggagcgcctgggatagtgttttagatgtgaagcctgc

SEQ ID NO: 231880 - DNA, 201 bp, Homo sapiens
agcagagttaagaatagagactgtttatttggggcgtctcggctgaatcaccatttagtcactgggatgttgctaaaatatttgtacatctctggggctgraagatgttgaaattgtttctttgcctgcctttttccatccattacaaacccaaagagctgaaatttaccttaaaggtagactcattatattcaagcatgc

SEQ ID NO: 231881 - DNA, 201 bp, Homo sapiens
ggggataaatcaccggcatgtgttggtccttgcttggcacgggcaaagcgtgtggggggcggaataatgaggacattcaaccgctgccctcggtggacacygggctggccgcggtggaggcgttgtcatgacgatggctgggtgcaggcaaacgctcctcccgttcgctgtggttaatgaagatgatcatgaaaaattatg

SEQ ID NO: 231882 - DNA, 201 bp, Homo sapiens
tcgccggccgaaccacgggagcaacacaggactgtggccacaggagccgtgttcagctgagcacacggcgctccccagcaggtctgggagacaggtccacsaggccaggtgctctcggtgccagcggcaccactaaccgtcctgctgcagttggcatcacagccagaatttgtttggggagatgggactcctgcatcgagg

SEQ ID NO: 231883 - DNA, 201 bp, Homo sapiens
acctttaagagggacctggctccagacagaaggtacaattgccctaaggaaatgaggtcaccaggcgggctctgcactctgacctggtcacagggagcacrcctggcccgtgctttccactgggaccccaggtgatgttgcttctgtccaggaaaaatgcttctaatctaacaaaatagtattagaattatcattgttatt

SEQ ID NO: 231884 - DNA, 201 bp, Homo sapiens
aaatcataggattggccttaagtttaagggacacttagaggagacagaggacaggatatgaaccccatgccctagcaagtggatacggaccccgtgccccyggcgagaggatacggaccccgtgcccccggcgagaggatacggaccccgtgcccccggcgagtggatacggaccccgtgcccccggcgagtggatacgga

SEQ ID NO: 231885 - DNA, 201 bp, Homo sapiens
accacagccccacgcaatggtgacgctcggcatgcgtgcaagaaaggacacgggctgtgtgggcctctcctgcggcccccacgtgaaatacggggccatgkatgggtcacatgcttcttcatagcataggggtctgggtctttggactctgaggaaccaagaacctcctcacagcctttagagaaaactttcagcacgtga

SEQ ID NO: 231886 - DNA, 201 bp, Homo sapiens
ttcgcgtggttattcccaagttcactcattcattcagaaagcacttgcgaagtcccggccaatcacacgggctcctgattctcccgagttcactcattcaytcagaaagcacttgcgaagtcccggccaatcacacgggctcctgattctcccgcgttcactcattcattcaggaagcacttgcgaagtcccggccaatca

SEQ ID NO: 231887 - DNA, 201 bp, Homo sapiens
ctatgcctgtgtcctgggtactctgtaaacatttgctgaatgagggactaaatgagcagtgaatcacatgacaagccctctgctgatgccctgtgggcacytgcctggtataattctggtgagttgggagctgtggggaggcccagtgctgccaggtttaggcacctttctgacttcatgctctggccggccactgcctct

SEQ ID NO: 231888 - DNA, 201 bp, Homo sapiens
gagatggctgggtttggccacaccaggagcttgagcctggctgccttgcatgctctcctaaaatgtctgccccaagacacagctgccttgtctgctgcccwcattgtgcctggactatgcctgtgtcctgggtactctgtaaacatttgctgaatgagggactaaatgagcagtgaatcacatgacaagccctctgctgat

SEQ ID NO: 231889 - DNA, 201 bp, Homo sapiens
gagacacctggggccgcctctgttccacggatcatggggaccagggccacctacaacatggtggcctgaattgcgattgtgtctccagtggcgtcgttttsagacttctctttaattctgactcttaattctgactcaaggtccccagagggacggtgactgagccagtcccatctggggctttggggctactgcccctgg

SEQ ID NO: 231890 - DNA, 201 bp, Homo sapiens
aaagggctttcgagagtggtgctccacgggtcctgtccccctcggctcatgacgtgcggtgcataatcctgcggagacacctggggccgcctctgttccayggatcatggggaccagggccacctacaacatggtggcctgaattgcgattgtgtctccagtggcgtcgttttcagacttctctttaattctgactcttaa

SEQ ID NO: 231891 - DNA, 201 bp, Homo sapiens
gctggccatctggccccagggaaagggctttcgagagtggtgctccacgggtcctgtccccctcggctcatgacgtgcggtgcataatcctgcggagacasctggggccgcctctgttccacggatcatggggaccagggccacctacaacatggtggcctgaattgcgattgtgtctccagtggcgtcgttttcagactt

SEQ ID NO: 231892 - DNA, 201 bp, Homo sapiens
cagtccagggccactgcccgtgcctccgtacccactccaagtcaatcactggacatactttttaacaatcttctttctacgctttgtgaattttggaaatkcttccatacagatttgttactccttactttaaaatgttcttctgtggcttactaaacactatggattttttctttgaaatatttgccgtctgagtgatgt

SEQ ID NO: 231893 - DNA, 201 bp, Homo sapiens
tgttagtgaaatctttttttattgattttgttaaacaaagatgcttaagtagttgcaatctgaagtagagtttgtctttccagtttgttcttgtttttacygtttggaagatcaatattagtcgccacactgcagagtgtgtgactcacagtggcaattctctttttaccgctcggtgtcagcaataagcaggaatcgtgt

SEQ ID NO: 231894 - DNA, 201 bp, Homo sapiens
atggccaatgtggctgtgcacatgaacacggagcttcgccggccgaaccacgggagcaacacaggactgtggccacaggagccgtgttcagctgagcacayggcgctccccagcaggtctgggagacaggtccaccaggccaggtgctctcggtgccagcggcaccactaaccgtcctgctgcagttggcatcacagccag

SEQ ID NO: 231895 - DNA, 201 bp, Homo sapiens
ttcctgtgacctctctcccgggcttgtggacagcatcttctccccatgtcctcacacggcctttccctggtgcaggcacggggtgtctctcactcttcttrtaaggacaccagtcctgtaggatcggggccgcccttttggcctcattgaaccttaattagctccttggaggtcctgtctccaaatataggcacatgggga

SEQ ID NO: 231896 - DNA, 201 bp, Homo sapiens
aagcgtcagctcagtctgcatgtgagtgaccagccgctggctgcaccacaaacaacccgggaccagcaccggcagcctgcgtccctcccacccacctctcrgataaggctcccatcagagaggagcctccagaggctgagaaacttcacaggatgccaaatgcttccatgagtccctggtcttgaccctgccctcctccct

SEQ ID NO: 231897 - DNA, 201 bp, Homo sapiens
aaagtcaaaagataaacataccacctcacacccattaggatggctagtattaaaaaacccctgaaaatcggtgttggtgagaatgtggagaaattgaacamttgtgcgctgctgatgggaatgtaaaatggcgtcgttgctgagggaaacagtatggtggtttcctaaaaaattaaaaatagagtttttaatttgcctcag

SEQ ID NO: 231898 - DNA, 201 bp, Homo sapiens
ccctaatgcgaagttaaatcttaaaatcaaatccttccaggtgctctgtctcctgggctgcacccctctctcctgactcttttccatcttcctccaaaccmaagtcgctggggatgtgtgggtggctggtgggacagccctaatttgacctgtgagcatcctaaggacatgatgcccctaccccttcatggaactagaaat

SEQ ID NO: 231899 - DNA, 201 bp, Homo sapiens
ccggaacatggaggattaaccgtgtgaccttgggtgagtcccccccggctgtggctcttcatgtctgcagtgggttttagagaaaggcctgtctccctatstcacagagatttgggaacaagaaatgaaaactgatgcagaaaccactcaaagctccttggaataaagatactatctgaattgcaggagcctatgaagaaa

SEQ ID NO: 231900 - DNA, 201 bp, Homo sapiens
gagccatggagtttgctttaatctccggaacatggaggattaaccgtgtgaccttgggtgagtcccccccggctgtggctcttcatgtctgcagtgggttktagagaaaggcctgtctccctatgtcacagagatttgggaacaagaaatgaaaactgatgcagaaaccactcaaagctccttggaataaagatactatct

SEQ ID NO: 231901 - DNA, 201 bp, Homo sapiens
ttcaggggcaattcagaggcatgaagtttcagacgagactgagagccatggagtttgctttaatctccggaacatggaggattaaccgtgtgaccttgggygagtcccccccggctgtggctcttcatgtctgcagtgggttttagagaaaggcctgtctccctatgtcacagagatttgggaacaagaaatgaaaactga

SEQ ID NO: 231902 - DNA, 201 bp, Homo sapiens
gcttccgtggtccccttaaattggtagggtccaaggataaatctggtacaaggcgttcataagccacagatggatgatggacgtggagtgctgtgtgcccrgcacagcctggctacttcatgtcaacctccctgcagccagggaagctcagtaccttgcccagagctcctcatctacactgcaagtgccaggatttgaatc

SEQ ID NO: 231903 - DNA, 201 bp, Homo sapiens
aggagaccatcttttcctcccctcatagacgaataagctacaacgcaggtgcccctgggccgcaaacccatctccaaaggctgcgagactctggaggcagrtgccggggtgagagagtagtcaggaagaagaggcattttaccagtttccctcggctgtcccagccaacatcacatctgctgctgcttatatttgtgtcca

SEQ ID NO: 231904 - DNA, 201 bp, Homo sapiens
gcagccaggctctcctccaactacctcgtctgctggtgcctgtcagtgagttcttctgccggtgtgctcctcttgacatccagcccttgtgtctttgcccrctagggtcttggggagctgcttgtgtctctgcctgctagggtctcagggtttttataggcacaggatagaggcgtggtggaccagggtggtcttgggaaa

SEQ ID NO: 231905 - DNA, 201 bp, Homo sapiens
tggggcagtggccacacagcagaggcccagcagcccctaaccctgcccggtgcagcctcctcctaccactgccggggctctcctgccctcaggagactccrgcaagtgactgcactgcgaagagaggaccagccaccagccctcagcatccaagggaggaattaattccgaatgaagaggaaaccaagcagtgaggcaggc

SEQ ID NO: 231906 - DNA, 201 bp, Homo sapiens
ctaccctcaatttcttgctggcactttaacattttttacaggagaccatcttttcctcccctcatagacgaataagctacaacgcaggtgcccctgggccrcaaacccatctccaaaggctgcgagactctggaggcagatgccggggtgagagagtagtcaggaagaagaggcattttaccagtttccctcggctgtccc

SEQ ID NO: 231907 - DNA, 201 bp, Homo sapiens
attgaggttgaatcacaactgtgaaaatatgggagtgaaaaacacagtggagacacaaaaggagcatcgtgtcaggatagaggattgtggagggtgcccaygtgttcccactgcagctggccccaaggttctccctaaggtttttggtcccatctctttccctctggaactcacgatttggccaagaatgagcactctcag

SEQ ID NO: 231908 - DNA, 201 bp, Homo sapiens
tcagtgacgtttgcggttgtcagctcttatggagagagtgtggatgtgagtgacgtcttcagttgtcagctcttatcgtgggagtgtgagtgtgagtgacrtctgcgggcgtcagctcttatggtgagagtgtgggtgtgagtgacgtctgcgggtgtcagctcttatggtgagaatctggttgttagtgtcgtctgcggg

SEQ ID NO: 231909 - DNA, 201 bp, Homo sapiens
ggtgctgccccagatggagacagccaggaacacctctaggccactgcagtggtgatggccaaggcatacctgccctgctgaccctctgcagccccgtgccygccctggggatgcctggcctgggggctcggcccctcctgaccctctgcagcccggtgcccaccctggggatgcctggccttggggctcggcccctcctga

SEQ ID NO: 231910 - DNA, 201 bp, Homo sapiens
tctcactgatgttccctgggcagacaactcaggatgagcctctgtgagtgctggacttgtgttccatccagctcctccccaagagaggggcaggggctggkgccccaaagcaccagcaccccacatggactggcacattttgaaagatataacacaaagaacttccattataatcgctgcccaggcgaccattctcaacgc

SEQ ID NO: 231911 - DNA, 201 bp, Homo sapiens
acaacactccaagatactaccctcaatttcttgctggcactttaacattttttacaggagaccatcttttcctcccctcatagacgaataagctacaacgmaggtgcccctgggccgcaaacccatctccaaaggctgcgagactctggaggcagatgccggggtgagagagtagtcaggaagaagaggcattttaccagt

SEQ ID NO: 231912 - DNA, 201 bp, Homo sapiens
agtaaaccaagttggccacacaattcagcctctaaaatctgacattgttttctggggaaggcggccgtgctgggggtgccaggagagacttggggatgtcrgtatctctcagcatggccgagaacaaacacccatccagttgtatcataccatgggggcctttgtctgctttttaaaatattaacaatgtattttggatgt

SEQ ID NO: 231913 - DNA, 201 bp, Homo sapiens
gtccctctcctgctccctttgtctctctctctgtctctgttcctctgtctctgtctctctctgtctctgtctctctgtttctgtctcttggtcccagccgkcagctgactttgctgtcctcctgggccctggcagaaccacctggcaggctcccgtcctgtgccatcctggacccttcaccattgttcctactctggctca

SEQ ID NO: 231914 - DNA, 201 bp, Homo sapiens
gccattgcactgcagcctgggtgacagtgcgagactccgtctgaaaacaaaaacaaaaacaaaacaaaaaaaacacagatggggtggccctggtccttcgrgaatggcgagcgttctgctgctcctggtgagatccggcccacccctgtgctgggggaacaagggtcttctcttgggactggtcatgccacccagcaggtg

SEQ ID NO: 231915 - DNA, 201 bp, Homo sapiens
ttcacgatgtccatttgagttttttaaaagtttgccccctcatgtgattgttcttatgacctttggtgggaagcggagctctggtggaaaattggccccarggcatggtgttctgctcccagcatacacagtagcatctgaggcagagcaggttgatgcatgctggccaccgtcatcctgactgtctcccctggtttcctc

SEQ ID NO: 231916 - DNA, 201 bp, Homo sapiens
acttacttttctatgccatttgggtaaatacaattgggcgttgcttgtattatgtctgtataaactgcacatggcttgctttttttttttttttttttttwaactctgttgcccacgctgcagtgcaatggcgtggtctcgtcaggctcactgcaacctccacctcccgggatcaagcgattgcgcccgccaccacgcccg

SEQ ID NO: 231917 - DNA, 201 bp, Homo sapiens
aaaatctttctcaggcaattttaacatctcggtcatctcagtgttggtttctgtggattgtctcttttctatttattttgtgatcttctttgttctttgtrtaaccagttattttcttttgaaatctggacatttttgtattatgtcatgattctggatctcatttaaaccttgcattttaactgtctctttttggacact

SEQ ID NO: 231918 - DNA, 201 bp, Homo sapiens
tttctctgtgttgttgacattgagtaattcctactgttttatcctcacttcactgattctttcctctgtctctccatccttctgttatgtgcatccactgmgttgtttattttggttattgtatctttcagtaataatatttcaatttggcttttatttacatcatctattttctgagacatcctactttttcatttgttt

SEQ ID NO: 231919 - DNA, 201 bp, Homo sapiens
ggatacacatctccttgcctacggggatggatcacttccgttcttctttgtttccgcgaatctgaatatactacgcacctcatctaagtggagtgataccscgtctgcgcttccgtgactgttatatgtcactttgcataatgccttcgaggttggcctgtgtcgtggtgtgtgtcagcactaacttcctttttatgactg

SEQ ID NO: 231920 - DNA, 201 bp, Homo sapiens
ttttgatggaggagaagcatcctagacaagatgaacagcgttagcaaacacacggggaagggatgatggggctctaggtgccgaagagccttcagtggggractaagagcaggccgggcacccatgggagggaggtccacaggcaatgccttccttcaccaattctcagtcttgggcttgttggccggaaacagccagcag

SEQ ID NO: 231921 - DNA, 201 bp, Homo sapiens
agccctcgataactttggcccttttgatgctcaaatcagtgaccacattcacatgagttacaggtgattggaaaaagcctagttgtaagcattgagcacastcagtcaccgtagagagatacatctagaagggaatcgtgctggattatttaggtgtttgtcaacacagggccagaccatccacacagaaagagcgctggt

SEQ ID NO: 231922 - DNA, 201 bp, Homo sapiens
ttttcaagacagattaaactgagtagtgggatggtcctcttccttggctacttatgagtatttaatatcaatactttggaattacaagcaaaaggtattargaagaagaaactaagctccaagttggtatcatctcactgagactgtgtctttctgcccaatgtgtcaagctcatgaataaaagatcaagaggacagttaa

SEQ ID NO: 231923 - DNA, 201 bp, Homo sapiens
tggaggaaggatgagtcacaaaagcagggtaatgtggcctatcccgtgcctgtatcgctggcaggtgggaagcctaattcttaggccctaagcatagcccrccgcaccgattgcaggctggtcccaccgtgagcagacagcactcctggctccactccacagcttagccaggaggattcaggcaggtccaagcccattacc

SEQ ID NO: 231924 - DNA, 201 bp, Homo sapiens
gtgcatttccgaagggtagtctacttttgcttaaacttgagtttgccgtagaagtcagatttccatggatgacccctccttctgcacctccacatgcacasgtggatcctcccctctgacaggaggtgctacgccgcctgctcatgtggacgctgaggcaaagcaggctgcccatgccctttgcggggctggcaagccctt

SEQ ID NO: 231925 - DNA, 201 bp, Homo sapiens
gccaacctggaaataactatcccagccacggccttgccagaagcccagctcagccaacctggagattgttatcccagccacagccttgccgagagcccaamtcagccaacccagagatagctatcccagccacggacttgccagaagcccagctcagccaacctggagatcgttaccccagccatggccttgccaggaacc

SEQ ID NO: 231926 - DNA, 201 bp, Homo sapiens
aaacttgagtttgccgtagaagtcagatttccatggatgacccctccttctgcacctccacatgcacacgtggatcctcccctctgacaggaggtgctacsccgcctgctcatgtggacgctgaggcaaagcaggctgcccatgccctttgcggggctggcaagcccttggtccacacccagatgcacgttcaggggctga

SEQ ID NO: 231927 - DNA, 201 bp, Homo sapiens
taatcgctgcccaggcgaccattctcaacgcgtacattatttgttaaagtaatttttaaagcctcaaagtcatgagtccagaacttgcagatctgaacacsaacatcattgaccaataacagcaaccgctgaagataaaaagccaggccgccccggacagtgagccccacatgtctgagtcacacgtgtccgtcttccatt

SEQ ID NO: 231928 - DNA, 201 bp, Homo sapiens
agtcgtgccccggagcacgtctcctgcagcagcatcgccccgtcacggcaccgcctcacagctcccaccacgacacatgcaacgtgcaaagaggacacagsgagctgcgacttccgtggctggtggcaaagaaatggggcagcactttcacagccatgccaggaacctaattcagccaacctggaaataactatcccagcc

SEQ ID NO: 231929 - DNA, 201 bp, Homo sapiens
tgccgtagaagtcagatttccatggatgacccctccttctgcacctccacatgcacacgtggatcctcccctctgacaggaggtgctacgccgcctgctcrtgtggacgctgaggcaaagcaggctgcccatgccctttgcggggctggcaagcccttggtccacacccagatgcacgttcaggggctgaaaggccccatc

SEQ ID NO: 231930 - DNA, 201 bp, Homo sapiens
aaggttaaaggctgggcgcagtggctcacacctgtaatcccagcactttgggaggctgaggtgggcagctgagaccaacctggccaacatggtgcaacccrtctctattaaaaatacaaaaattagctgggcgtggtgacggacacctgtaatcccaggtacttcgggaggctgaggcaggagaatcacttcaacctgaga

SEQ ID NO: 231931 - DNA, 201 bp, Homo sapiens
catgcggattcccacactgcctcaccatccccctcaactgctcagcagaccaggcagctgaacggaagagatctgcctttaatgggcatcttctgctctaraaactgctgaggactgtgggtgcagggcagtcccgtgatctccatactcagggccccgtgaagactgtggggtgtatagaggcccgtgatctctatgctg

SEQ ID NO: 231932 - DNA, 201 bp, Homo sapiens
ttctctctcaacagctcactgggtactcgacactggagccggagggagaggacaactgaaagcctcaggagtttgacattttgaacttttgccaaaacctrtttccaaaataaactggagacactccaagaaatgccagatacaactgccatcctcgggccagccttcctagcttgcaagaactgttcactcagatattgg

SEQ ID NO: 231933 - DNA, 201 bp, Homo sapiens
ttcctcttaaaaatctaaatgtgtgtgtttcactagagatcttgaagttacggagggctgcagagcgattatttcagctgagtggacagctcagggaaccygtgttcttctgattgatttgcttcttggaaggaactgactgtaggtttgctgagactgaccagtcaattaagtcagcactggccatccagatgcctgggt

SEQ ID NO: 231934 - DNA, 201 bp, Homo sapiens
aacgtggctcagtgtcctgacggctcgtgagtccacaggagcagcagcacaggccacattccccacacggactcagcctccaggcctgagtttgcttctcycaggactcaggccccacaggcttcctcgggaagggcccgcaccaggccctgctcttcctgagcccacagtggacgattgttttcacaccccaactcctcg

SEQ ID NO: 231935 - DNA, 201 bp, Homo sapiens
gcattgaatctgggtcctggatggccggtgtggtttggagcaggaccgcggccaatggctggacctgaggagcagggtctgggatccagggatgtctggcraagctgagggactggtaaaacagtggaaaaccgtgtcctgcggatgccgggggccgctgtgctgtgtctgtgcggccccagccacaccaaggccgagctg

SEQ ID NO: 231936 - DNA, 201 bp, Homo sapiens
tcacccatgcggcagaatccaggcagggaggtgcctgtcgcagcagtgacgctgggatcaggctgcagcctcctggcgatccacagcccgggcctcctggygatccaaagcccgggcctcctggcgatccacagcccgggcgcctgtgcagcactggggtgagacatttcctgatgtcgctgtgcaccggagttggtaaat

SEQ ID NO: 231937 - DNA, 201 bp, Homo sapiens
gctgagctatgaggatgtgaaggcttaagaatgacataaggactttggagactcagggaaaagggtggcaggagggtgcaccaaaatctcacacatcaccrttagagaacttactcatgtaactcaacactgcctgttcccaaaacctatggaaaataaaaataaataaagaaggaataagtttatttcatgaacacaatg

SEQ ID NO: 231938 - DNA, 201 bp, Homo sapiens
agctaccgtaaagtagcacagggtaaatgggtggcggtgaaagcaagaatttgaacagcttgccacagtgtaacaaacgcaacagcaacagaaacatcaasagggccttccccaggggctcccaggtctttggcagcagaattacccaagttttggccagtgacttaaacacacgccatgtaaaaggatgagatgggaaca

SEQ ID NO: 231939 - DNA, 201 bp, Homo sapiens
tagcacagggtaaatgggtggcggtgaaagcaagaatttgaacagcttgccacagtgtaacaaacgcaacagcaacagaaacatcaagagggccttccccrggggctcccaggtctttggcagcagaattacccaagttttggccagtgacttaaacacacgccatgtaaaaggatgagatgggaacagaacaaagagccc

SEQ ID NO: 231940 - DNA, 201 bp, Homo sapiens
gtcaactaggtgtgaagcagactctggggtaagagccgtctctttaaatggtttcggggaaactggacatccacactcaaaagaatgaaatgggaccttaycttacaccgttctcaaaaatctgcccaaaattggttaaagacccaaacacaagatctgaaactgtaaaactctgaaaacatacaggaagagctccttgac

SEQ ID NO: 231941 - DNA, 201 bp, Homo sapiens
tcggggcatgtccgcctgcccccagctcagagcactgccactgctttgctagacaggcccatgctggagaagcaccaggtaacgtggctcagtgtcctgayggctcgtgagtccacaggagcagcagcacaggccacattccccacacggactcagcctccaggcctgagtttgcttctcccaggactcaggccccacagg

SEQ ID NO: 231942 - DNA, 201 bp, Homo sapiens
ctcactcaactcaatagcaaaacaaacaaacaaacaacacacacaaaaaaacccaaaagccaaaaaacccccaaaccctccaattttaaaaagggcaaagracctgaatagaacatttttccaaagaggacatacagatggctgacaggtatgggaaaggtgctgagcatcactaatcattggaaacgcacatcagagccc

SEQ ID NO: 231943 - DNA, 201 bp, Homo sapiens
gtacttcgggaggctgaggcaggagaatcacttcaacctgagaggcagaggctgcagtgagccgagatcgcgccactgcactccagcctgggcgacagatmctgtctcaaaaaaaaaaaaaattaattaaaagattaaaaaatttgccctggtttacccagataataaattacagagccgagatcctaacctagaacttca

SEQ ID NO: 231944 - DNA, 201 bp, Homo sapiens
accgctgttgagtggatgggcgagtgggcaggtgggtgagggagggagtgagcaagggaaggcatagcccctcatctcgagggctcagagttatttccccrgccagtcctcaggctgggaaatgggctgcacctttttctccatgtgtcatactttcttccctttaaaaaatttaaccagttcttggcattggtagttttg

SEQ ID NO: 231945 - DNA, 201 bp, Homo sapiens
ctcgtctatcaggaacagggtttttttttttttttcctcccttctcctgacatagtcacccataaatggtttggccttaattcctatgaaggtaaggacaytgctgatgttccttgagtccccacgctagcagcttctcatgcctttccctgctaagctccgtgctgtattgcttccattgcgcagtgagagcagcgcagg

SEQ ID NO: 231946 - DNA, 201 bp, Homo sapiens
gactcagccttcacccatggccaattctgctgtgggttcctcgacggtctctgcctgcacggtgcagcctcagctgcaaggctaggtttttctatgtcgtmacaataatgatctctttagggggtgggggaggttttaaaaaaaaacttttatcttgtgagccgcatagcataccatagtccatccactgcccgtttgctt

SEQ ID NO: 231947 - DNA, 201 bp, Homo sapiens
accgagcacagggtccgtttcatgctgcgcggctcccccggcattgccaggcacagccaggcctgcagatgtggggtccctgagaccaggtgggacttggrggggacacagcccgctcaccatcttccactgaacactaactctacagcctggtttgctcaatataggtcttgtctatgatgggacctcaaaaaatcctgc

SEQ ID NO: 231948 - DNA, 201 bp, Homo sapiens
ccgcaccggcaaggctgtccctcccgcaaacccctggcttcaccacgtttgccctggggctgccccgtggatgatccaccacgtggtgctgccttttcagygcaccagagagctgcttcagggccctgcgggagatccagcactgccttcttgtgcgcggtgtctcgggcgtcaggggcggagcctggttcattcgcgggg

SEQ ID NO: 231949 - DNA, 201 bp, Homo sapiens
aaacagttaatcacgaggccttgtgggcatcctgtgcagccccatccctggcctctaccgcgctgtctgacacggtcactccagctcacgtccttgtagcyacccttaaagagaggcggcgtcagaaacaccacggcctctgccccctccttctatcgcatgtcctatccatgtgctatttaattacatgccgattgattt

SEQ ID NO: 231950 - DNA, 201 bp, Homo sapiens
atcatccatatttggatgtggtcggcattagtacctgtccagtcaattacgacaccggcccttttcttccccgcaaccggcccactgcagccacgccgggmgctacggggagcacatcccatcccgcgaccgcatctcccgctccgtcaatcccgcgcgtcccctgcgccgtcagtcccgagaccgcgtcccccgcaccgg

SEQ ID NO: 231951 - DNA, 201 bp, Homo sapiens
ctatccatgtgctatttaattacatgccgattgatttagcatatatttgttcattggaaataatgcttgaaacaaaataaatatcatttggtgacaaaacrcactctattacagaaacagccccaggatcggggaggcccctgcagctgtggtctgagtggcattttgccagtgctgggagcccgtggtgggaggatgggc

SEQ ID NO: 231952 - DNA, 201 bp, Homo sapiens
gcgcagaaccccctgagcacgtgggaaactgatcaccacgtgggggatgtttgttagagagattcagtgggtgatgtgggggcagaaggaggcccctagarcagagtatggcatctgttctgaatgccgatatggcgttggggggacagcaccctggcggcctgcagcaccctctgtgaacagggaaggctggaaggaagg

SEQ ID NO: 231953 - DNA, 201 bp, Homo sapiens
tgcaagggactccgtggccatggcgattccactcccaactcatcctggagagcgagagactcggggccatgagcagcccctctttccagagaacgtgtcgycatgcagtctttgatcacgtttaaatgaacaaaatttgggtgttttgttttcatggaactcacctttagggtggccttctcacagcaatgattctgcttt

SEQ ID NO: 231954 - DNA, 201 bp, Homo sapiens
tctgagtcactgcattcggtgcttttgggcatatgcccctggtggaactgctgggtcctgggctgattctgtggttagttttttgaggacccactaacagygactgcatcatgctatattcctccctgcagagtgtgccagttacgattcctcagcattctcgccagcacgtttttgttgtgtgtgtgtgtttagttacgg

SEQ ID NO: 231955 - DNA, 201 bp, Homo sapiens
acttcagtgctatgttgtataaaaatggtgaaagtgaacatccttgtcttgctccaaatgttagagaaaaggctttcagtgtttccccattcattatggtrttagctgtggatttgtcatatatagcgtttattattttgaggtatgttctttctatacccattttgatgagtgttttatcataaagggatgttgaatttt

SEQ ID NO: 231956 - DNA, 201 bp, Homo sapiens
agcggagattgtgccattgcactccagcctgggagacagagcaagactccgtctcaaaagaaaaaaaaagccattttaacgggagtgggatgatatctcaytgtgattttgatttgtatttctctgatgactatatctgttggccatttgtaagtttttatttgatgactatatctgtttaccacctatatgtttttattt

SEQ ID NO: 231957 - DNA, 201 bp, Homo sapiens
tagcatatatttgttcattggaaataatgcttgaaacaaaataaatatcatttggtgacaaaacgcactctattacagaaacagccccaggatcggggagrcccctgcagctgtggtctgagtggcattttgccagtgctgggagcccgtggtgggaggatgggcctgcgtgagcccttcggtggtccggctgcaagtgct

SEQ ID NO: 231958 - DNA, 201 bp, Homo sapiens
atgcctggctatttaaaaaaaattttttttttgcagtgatggagtctcactatgtttcccaggctagtcttgaactcgtgacctcaagtggtcctcccacyttgacctcccgaagtgctgggattacaggcatgagccattgcgcccggccaactcctatactttaaaaggctgagttatgtggtatatgaattatgtttc

SEQ ID NO: 231959 - DNA, 201 bp, Homo sapiens
ggcgtgggcagtgattccagctggactctggaggacagtccacaagctcggctgtcctgtggccacggtgcctgggggctcctggtggagtgtgaccccccacatctgcctctgctccctgctctctgttgggccaccccaacccctccaggggacccccagataaaggcttgtgtgcactggtgttttccagagcagaaa

SEQ ID NO: 231960 - DNA, 201 bp, Homo sapiens
ctgggagtgacccggccgccacgcgtctgtctcctggcgtctgtgtgtccccttcaaggggcctgcgtgggcaaaactgaagatactgtctatgcttcctsagcagaaggagccaaaaggtcttcccatcgcatacttcttcttagatttaggcgtgggcagtgattccagctggactctggaggacagtccacaagctcg

SEQ ID NO: 231961 - DNA, 201 bp, Homo sapiens
ccccagtgacttaccctctcacacctgtgagaatggcttttatcaaaaagacagaagataacaagtgttggcaagtgtgtagagaaaagggacacttggaygctttgtttgagacagtctcgctctgtcctacagtggcacgatctcagctcactgcaacctctgcctcctgggttcaagtgattctcctgcctcagcctc

SEQ ID NO: 231962 - DNA, 201 bp, Homo sapiens
atgttgcacgcctcaaatgtacatccaaaaattttacaaaatgatgagttggattttgttatctgctttaaggatgtccattttattactgcatggatgcrtcatgcaacaggaagtggggtgtgtgaggcgtgaggcagggatctgggttcaaggcctgaaagtatgtaaagctgctcagcacatgtgactgcgggtccc

SEQ ID NO: 231963 - DNA, 201 bp, Homo sapiens
gaggggctggctgtgggttctctggcatgaggctcacgtttacaggaggtcctcttggtgggcatagtgtaggggccagggcggacccctacggccgctcrgaggaacagccaggatcggacccgggaccgccccacactgtcagcactgtaggggtcactgttgctgcagctcacagtcccctggcccccggatgcctcg

SEQ ID NO: 231964 - DNA, 201 bp, Homo sapiens
attactgcatggatgcgtcatgcaacaggaagtggggtgtgtgaggcgtgaggcagggatctgggttcaaggcctgaaagtatgtaaagctgctcagcacrtgtgactgcgggtccccaggcaaagtagcttagcccacatgactgcacccataactgctggctttctgggttctaggcttacgtgatcagagaccaggtt

SEQ ID NO: 231965 - DNA, 201 bp, Homo sapiens
ggaaggcatagcccctcatctcgagggctcagagttatttccccggccagtcctcaggctgggaaatgggctgcacctttttctccatgtgtcatactttyttccctttaaaaaatttaaccagttcttggcattggtagttttgctaaattaaaccagggaggacctggaagacagcagcgcagccctgacactcacaag

SEQ ID NO: 231966 - DNA, 201 bp, Homo sapiens
gttgtagcctgcatccaaaatctctgccttttcagtgctgagtaatattcccatgtgtgggtggaccacatgatgtttatcttttcttccattggtggacrcttgggtggcctcacctcttggcttctgtgagcgctgctgctatgaacatgggcgtgcgaatctctctctgagtcactgcattcggtgcttttgggcata

SEQ ID NO: 231967 - DNA, 201 bp, Homo sapiens
actctaaggaccccatacgagtggaatcacacagtgtttatcatattgtgactggcttatttcacttagcataacatcttcaaggttcatccatgttgtarcctgcatccaaaatctctgccttttcagtgctgagtaatattcccatgtgtgggtggaccacatgatgtttatcttttcttccattggtggacgcttggg

SEQ ID NO: 231968 - DNA, 201 bp, Homo sapiens
tccactgtgaagacaacactgggaagacagcagatcctcctggcactcgctgagggtctccactgccctccagatgccgagctcccgccttccttcccccracccccgacaggctcggcacagtcagaccagctttgcagggtccgtcgtggccccacggtgagggtcctgcttgcgagctgaagctgagatggacgtgtg

SEQ ID NO: 231969 - DNA, 201 bp, Homo sapiens
gtgtgtgtctgtgtctgcatgtgtgtctgtttgtgtctgtatctgcgtctgtttgtgcgtctgtgtgtgttcgtgtgtgtctgtgtgtttgtgtgtctgcrtgtgtgtctgtgtgtttgtgtgtctctgactgtgtgtgtgcactgccctttgcactgctttgccagcacattttccctgtgccgtgtgtgtctttctcct

SEQ ID NO: 231970 - DNA, 201 bp, Homo sapiens
gtgccctctgctgtaccatgaggctgagtcactctggggtcctggatccagcccaaggccagcttcctaaccccttaaccgcagttacagctctgagcccygagcccacttttgccgacactgtcaccctccacgcacactgtcttgtgcacatgagccggtgtgtggtctcacaacctagattatgaactgcgtgcagag

SEQ ID NO: 231971 - DNA, 201 bp, Homo sapiens
aaatgtcaggcagcttcctgttaagaaataaagaggaggaggaagaaggaaaggtgtgcagggcgttagtggtgaccaggtgctttcatcccggcctctcsacggctttctcgtgttgggtgattccagctgagaaccctctggcctgaaaccaagcatgcatggccctggggcttttaaacccttctcttacgggccttg

SEQ ID NO: 231972 - DNA, 201 bp, Homo sapiens
gttcgcgttttcatgaaacgtttctccttcctgaggactgagggactccctggcatgtggacgttttcaggccctcagactctgctgacagcagttaggaygcaaggccaccttctcatcttccctgactttgctttcattgtgtcactgttctcatcaagaactttcagagactctggcatgtaagtagcagaagaagag

SEQ ID NO: 231973 - DNA, 201 bp, Homo sapiens
cattcggcggcacctgtattcacgtggacatgtttatgtgggcattcggcacccgtattcacgtggacatgtttacgtgggcattcggcacctgtattcasgtggacatgtttacatgggcgttcagtgcatgtattcacatggacatgtttacgtgggcatccagtgcctgtattcatgtgtacatgtctacataggcat

SEQ ID NO: 231974 - DNA, 201 bp, Homo sapiens
ttgaatccaggaggtggaggttgcagtgagcggagattgtgccattgcactccagcctgggagacagagcaagactccgtctcaaaagaaaaaaaaagccrttttaacgggagtgggatgatatctcattgtgattttgatttgtatttctctgatgactatatctgttggccatttgtaagtttttatttgatgactata

SEQ ID NO: 231975 - DNA, 201 bp, Homo sapiens
acctttagaaaaccttacaatttttgttcatctgccacattcttttcagcagaaactgtatttgctctgcagagggaacagcaggggactctcggctgggygcctgtgcctgagcccgtcctgggcagctccaggccctcattctcccgaccacaaccgcagctgcagatgcagctgcgcccccttcctctccccgggcac

SEQ ID NO: 231976 - DNA, 201 bp, Homo sapiens
aagtgcacgtcactagtataggctaaaaatgtgaagctcccagaagttagcatttccaggcagatccagcttcacggttttctacgtcacaaacagggatktatatgctcccggttataaattccatcagagcatgcacgctacgcctgtcttctctggccaccttagccgtgtgttagaaacatcatacaggcaagagcc

SEQ ID NO: 231977 - DNA, 201 bp, Homo sapiens
tgaaacatacatacattattgttaactctagtcaccctgttgatctatcaaacactaggttttatttcttctgtctatttgtagccattagtcaatgtctctccttccttcctcccagctccccttcccatcctctggtaaccaccaatctcaacggaggcaccctcatgagatccatttgttagctcccacatatgagtg

SEQ ID NO: 231978 - DNA, 201 bp, Homo sapiens
aggctgggtgtcttcaggctccttgagctgctttgcagtaagtgacacaataaaaaatgtaaaatacagaaggcacccacttttcccacttacggttttastgggtgttcacagaggcgatgaagaaatgaaatccccacatttaaacaaagcggagagtgacagtgagggtgatagtcctattgtataattgcctccttt

SEQ ID NO: 231979 - DNA, 201 bp, Homo sapiens
ttgtggaggtgccgagtgtagaaaaatgggctctctagaaagcttttctatattgatacagaatcgatgtacatattttcagggtacatgtgataatttaataccattgtataatttgtaaagatcaaatcagggtgattgggatcttcacctaaaatattcatcttttctttgtgccaggaacagtcaagctgttctctt

SEQ ID NO: 231980 - DNA, 201 bp, Homo sapiens
caagggccacagatagacagcaccttgggaagaggttgagagttaaagagcagtggttcccagcctcagccccctggggagggtgagcaaacagacggtgmtgaggccccatgtggagtcggagattttgcaggctgtggctggggcccagctttgctgcagctcctgggggcctcccaggtgcataggtgaggggctttt

SEQ ID NO: 231981 - DNA, 201 bp, Homo sapiens
ttaaaaagtgaggctttaaaaacatactgagtgcctgacagctcgggtggcacatggggaccaccagtctccctgggcgaatgggctgtgggccgagtccyggcactcaggcgtctgttctcaaatactggctggagcctcctgcatgtctgggctgtgcctgtgctggcctgatggtgatggaggccctgactgtcatgc

SEQ ID NO: 231982 - DNA, 201 bp, Homo sapiens
ccagccaggaagggtaggggtgtgcaccatagggcctctcccaagttcgcctcggcgcctgcccccctccatcacggtgatcaggtgtggccttagccccrggtttctgagggcgtcagcatcacatgtgtttgttctgcttcatgggctccctccgtcaggcaggtcagggtgtgacatgcaccccttggtgaccgatgg

SEQ ID NO: 231983 - DNA, 201 bp, Homo sapiens
gagaggagaagctggggctcctctgaagacattgcctgcctgtgtggcaggcaccacgtagcaatgtcagcagcatcttcatttagccaagcgtttccacmccatcccctaacgtaccgtaaggggctctgtttgcgatgaccagagatgacggccagcaatggcaaggacgatggtgatggtgcctgggatctactcaca

SEQ ID NO: 231984 - DNA, 201 bp, Homo sapiens
gtgctggcgttcatttgcaaatgcaccttgctatcgttttaaagcaaaaaatgcatttcaagaagcaccactgggccctttgccatggcgtttgttaacgytattaatctgatttaaatgaaaattatcctttatattgcttcccacataggcacactttttttctctttaaaattggaaggttataccaaacgcaatgtt

SEQ ID NO: 231985 - DNA, 201 bp, Homo sapiens
tgcacaacaaatgtcagttgaatgcttagtacttaggagacatgaggctttcaattttcctcagttaatttgtatgacagtaatgcatatatatggttcayttaaaagccgagtaatatagggcttaaaataagaagcaacagatcctgcccctctttcctgagctcaccccccacacccaggggcaacagtagcctctcc

SEQ ID NO: 231986 - DNA, 201 bp, Homo sapiens
attcacgcactcactgagcagattgttttaaacatctgcttccgaaaggcacgtgtcagacactaagaacagtgcacaaagatgtgtggttcttgcccccracacgtgggactctctcagccaaggagtgggagggagcagttatccaacaatttcaggacgaatggctctcctacaaactcgggatcggcgcagcttcat

SEQ ID NO: 231987 - DNA, 201 bp, Homo sapiens
ggacgcaggcctcaaaatcacccaggcagctcacagctcagggacgcaggcctcagaattgcccggacacccctctgctcagagatgcaggcctcagaatyccccagacaccccacagctcagggacgcaggcctcagaatcacccgggcagctcctacctcagggacgcaggcctcagaattacctcaacagctcacagc

SEQ ID NO: 231988 - DNA, 201 bp, Homo sapiens
aacttatgattgtgctggttctcaggagagaggacagcactgttcacaggtgagttgccttcttccacctacattcagcagaggcagcaaagtacacccgrgtggcattggcacaaggatgctgggtgtgtcatctgcacctagatcctgccatgcctgccttggggtcacacaagctgtccagtatgcctggcctcatcc

SEQ ID NO: 231989 - DNA, 201 bp, Homo sapiens
aggcctggaaatgctggtgttgggtggagaggggataacctgagctctgtttgttatgaatgttctcttttcctcccataaaagattttcaagcaaatttkatctggcaatttatttaaaccaaaagcatatgagtagaaagtggtataaactgaaataaaaaacgtgtaagatgctccaatccttggaagaccatccctg

SEQ ID NO: 231990 - DNA, 201 bp, Homo sapiens
ggccgtgcctgttgagaagaaggctctgaagttaccccatgccacaggcctttccgttgcaggcccggctcggccgtcatcatgtgagcgtgagcctctgrgtctccatcttgctcatgcccctcatgactacatgactcctcggaatgcaaggggcagtgtggtgttgccagtgagctgcttcttgtttcctaccaggaa

SEQ ID NO: 231991 - DNA, 201 bp, Homo sapiens
tggagcgaaagcggtgggttcagcagtatctgaaggaagagatcacagctcctgaggctctggacagtggatctaaaaagcctgaggtgtcagagttcacrgggttccttgggtaaggtgactgagctgagcttgcgaaggtaacagtgcgtttgatggtaatgctgggtcacaccaaggatagaagcctggggggaccac

SEQ ID NO: 231992 - DNA, 201 bp, Homo sapiens
agggctctaggcagcaggtgtgtgtgaagactccctctttcatcaggggaggaaggtttgtgtgaagactccctctttcatcaggggaggaaggtttgtgwgaagactccctccttcatcaggggaggaaggtttgtgtgaagactccctccttcgtcaggggaggaagcgtttgcatctgagtgggcagcattccttttt

SEQ ID NO: 231993 - DNA, 201 bp, Homo sapiens
tcataatgaaaaaatgccctcatgagcttctgtctactgcagggataaagtggtaaataaatgatgtgtacaggagatacagtaagggagtaaggggtgtsgtatgaatgaagaaccaagaaagcattttaagaattcaaaggggtcacggggtgggaaagaagagacatccagtgggagaatcgagacagtctctggggg

SEQ ID NO: 231994 - DNA, 201 bp, Homo sapiens
agggagtaaggggtgtcgtatgaatgaagaaccaagaaagcattttaagaattcaaaggggtcacggggtgggaaagaagagacatccagtgggagaatcragacagtctctgggggagtaatcatgatggatcttgataggactggatttgaaggctggagagccaccagagtgtcacttcgcacaaactctgcaagatg

SEQ ID NO: 231995 - DNA, 201 bp, Homo sapiens
cagtctgcgataagaacaccatagcctctgtaactagctgtgttatcctaagaaaattacttagcctttctgaacttcaactcccttatctctaaaatggrgataatacattgatctgaaggtcaatgataatgagcataagggtgtagcacagaatctggcactggtgatatttactcattggcatggcaatgatagcga

SEQ ID NO: 231996 - DNA, 201 bp, Homo sapiens
gactgcggaatgcgtcagctgggcagtgccaacctgcagcccctcaggggccacccccacagtgcccggctcccgtctcacctagggacctccatttcccrgcagcagcacttgggaaggagcctgcgtgggccagacccagggagtgcaccgctcctctccatttcggtggccagagtcaacccccctgcccacccagcc

SEQ ID NO: 231997 - DNA, 201 bp, Homo sapiens
gctgtgggccgagtcccggcactcaggcgtctgttctcaaatactggctggagcctcctgcatgtctgggctgtgcctgtgctggcctgatggtgatggargccctgactgtcatgcaggcctgcgaggggcacgggctgtgaccgatgctgggagccttttttgagccccgggagggtctgatctcactcctgctcagcg

SEQ ID NO: 231998 - DNA, 201 bp, Homo sapiens
ccacccagccacacatgcacacacagccacgtgcccaggaggggagtgcttggatttgggcctatgtggcacagccttgggctggacctcagagacacagrtcctaccacgaccccacacaggtgcctgccagctgtgagcccttgtgcaggttgggggtcagggagggcctgagatggcggcattttatgcgggggcaga

SEQ ID NO: 231999 - DNA, 201 bp, Homo sapiens
tagtccacgtgctttgtgccccaggcagccccagctcctgagcaccggcccagcaacatgagaggctgtttcctgggacttcactgggaaggggaccagcrtgtcctactgtcagcaccgccctgagccctgacccccagcctgccctgctcccccatccaccgatgtctcctcccttgccttgtgtcgctctccccctgc

SEQ ID NO: 232000 - DNA, 201 bp, Homo sapiens
gggctgtggcaccttgaccgagcaaacaccaggctcgggtggcagctgcctgcctggctttccgctcccctccacggccctcacgagagcctctgaggccrgcaccctcttctccattcaggagtctggggagccgcgtggcttagcataggccagcctgtcctgggggcgtcctgggggctgcgtggccttcacacctct

SEQ ID NO: 232001 - DNA, 201 bp, Homo sapiens
tcttgcccccgacacgtgggactctctcagccaaggagtgggagggagcagttatccaacaatttcaggacgaatggctctcctacaaactcgggatcggsgcagcttcatccacattcagaaaaggaagctcttctcaccgaagttgattctgaagtctttggtgagttatggaatatttgatctcttattgttgtagtt

SEQ ID NO: 232002 - DNA, 201 bp, Homo sapiens
agcaggagtgtcggttcccaggtgacagttatctcttttcaaagtcggtggggtgcaggctctagtagagaagagtagctgggagagcacgttcagctctyactggtggctttcatggagccatacgtggcttgttattgaattgtgactatgaccatctcatgtttgatgtaaaggataaagaaatgatggacctgtggg

SEQ ID NO: 232003 - DNA, 201 bp, Homo sapiens
gtgctgatgtatgacagtcatttttggggtggtgtgttctgttcttcaacagtagtttgtggggtggcatgtgctgatgtatgacagtcatttttggggcrgcatgttctgttcttcgacagttgtttttggggtggcatgttctgatgtatgacagtcatttttggggtgatgtgttctcatctcctacattagaaactg

SEQ ID NO: 232004 - DNA, 201 bp, Homo sapiens
tctcagcttccacaggaactcacaccccagctctcagcttccacaggaactcacaccccagctctcagcgtccacaggaactcacaccccagctctcagcktccacaggaactcacaccccagctctcagcttccacaggaactcacaccccagctctcagcttccacaggaactcacaccccagctctcagcttccacag

SEQ ID NO: 232005 - DNA, 201 bp, Homo sapiens
aaattgtctcccacgttccttcctcctctgtctaatctgctgtaaaactcaaatgctgggtacttttctcttggttactgtatttttcacttagaaaaaartttttatttagtaatttatcaaatctgttattttgccttctactttgattatgtgtttgatatcttcttttatcttttcaatcattttaaacctacttat

SEQ ID NO: 232006 - DNA, 201 bp, Homo sapiens
cttgattattctaaatactaacagggtgtgatctgttggcctgctgttaggagacccggaataggagcgagtgtctggcctattggcccagggtggcctgwctgtaactgggtggcctggcgcaggccctggtgcggcaaaagcagctgccatgttccagaaacagagtaacaggcagagagagccaggcagctgcagctc

SEQ ID NO: 232007 - DNA, 201 bp, Homo sapiens
gtcatctacgttcccttcatccacctgctcagatccgtgattgtttatagcatcctccagtgccccggccaggattagcaaggatttcgtgacccaatggscgtggaggaagcgtggctttctttcatttcaccaggaaatgactgacgtcttgtcttggcgtgcatccagatgtgggaagtgcagcgttgcttgataaca

SEQ ID NO: 232008 - DNA, 201 bp, Homo sapiens
agccaaggagtgggagggagcagttatccaacaatttcaggacgaatggctctcctacaaactcgggatcggcgcagcttcatccacattcagaaaaggawgctcttctcaccgaagttgattctgaagtctttggtgagttatggaatatttgatctcttattgttgtagtttttcaaccaaaaaaagaaagaaaccatg

SEQ ID NO: 232009 - DNA, 201 bp, Homo sapiens
gagggagcagttatccaacaatttcaggacgaatggctctcctacaaactcgggatcggcgcagcttcatccacattcagaaaaggaagctcttctcaccsaagttgattctgaagtctttggtgagttatggaatatttgatctcttattgttgtagtttttcaaccaaaaaaagaaagaaaccatgatttgaccaagaa

SEQ ID NO: 232010 - DNA, 201 bp, Homo sapiens
ctccgtcggttccctgcacatggtcagtgcacaacaaatgtcagttgaatgcttagtacttaggagacatgaggctttcaattttcctcagttaatttgtrtgacagtaatgcatatatatggttcatttaaaagccgagtaatatagggcttaaaataagaagcaacagatcctgcccctctttcctgagctcacccccc

SEQ ID NO: 232011 - DNA, 201 bp, Homo sapiens
gtgagacagaaaattagatgacagttttttcaaaccccttgtccccgattattagtttgtaggataagttcccaaaaaccacagaggggacaaaatataargtgtagtttcctactttcattttcactttcagtgttatataattttatatcctcctttgcttatagctccttaagaacctaagcatcatgatatgttctt

SEQ ID NO: 232012 - DNA, 201 bp, Homo sapiens
tgcttagcagtagttagtactaagtagacactgatacttaggagatatatagtagtgactagtgcttagtacttagcagagactatgactcaggaggtacytagtactaagcagagactacaacttaggaggtacttagtacttagcactaagtagagactactgccaaggagcagagcctgctctctgtgtggatggatc

SEQ ID NO: 232013 - DNA, 201 bp, Homo sapiens
ccgaattaatctttctcgtctaaaaaagtgaaaataaggtaattaccaccttagaggggagttgtgaggattaaaggaaatgatacatgcaaactacagascacagcagaactccgtgcaaagcagttttcaggattccattccagtgttggccgtaaagggactgtaatgtcccagtttctctttcctcatctagaaaat

SEQ ID NO: 232014 - DNA, 201 bp, Homo sapiens
agaaagaatgagatgatattgaagatgaatcctatagtggcagaccccctcatcaatttgcaaggaaaaaattaaccttgtttatatcctaattggagagraccaacaattaacagcagaaacagcagccaacaccatagacatctcggctggttcagcttacataattctggctggaaaattaaagttgagcaaactttc

SEQ ID NO: 232015 - DNA, 201 bp, Homo sapiens
gtgtcatttttgtgtctgtcctaatggacttccttttctttggtaaggacatgagtaattataaaaatggaattgtagtgtttcttgtgacttttaccctrcattttaaacctcattaccttaattaggtgactttttgtgctagctaaaggcataaagcaaatattcatttccccctttccagccatcatggttttttcc

SEQ ID NO: 232016 - DNA, 201 bp, Homo sapiens
agcatccgatatggaaagaaggcgctttcactccacgcagaccttgcttgtcttttctgtagaatagttgtagaggataagcctgctccatgggtgaggcrgctgcacagcaatggcagattttgttgtcaccaccagaagcagaaatcacaaataacaaaggaatctagagacgtcagagaaatgggaggtcatagagca

SEQ ID NO: 232017 - DNA, 201 bp, Homo sapiens
ttctcagaaggaaacatttactagagatacaggaacagaagccacacctgtgtctccatggcgtgagatgagatgatggctccctcacccctagacccacrgctctgcaccacaggggaggggctgctcagggagccagcctatcacctacccacgttccaccacggagtcagcgtctccctccccaccctcgcctgtctc

SEQ ID NO: 232018 - DNA, 201 bp, Homo sapiens
tggaataacactcctgctgaagtgtggccattcacattcggatctcatcctgctggcagcagcgtgttttcatcgaccaggaaacacacaaatatttgtartcgtttatgctaatacgcaaacattttaaaagcactttgcttctccttaaatttcaaagaaaaatagaagactctggatttttcaaattagaaaatgacc

SEQ ID NO: 232019 - DNA, 201 bp, Homo sapiens
cccgagactaaacttcccctagaagttcagtttcacaaagatagaaaaattatttgggcaaaatgctgctgtccaatctgaatgcttgcttctacgaagcmaagaggaggcgcctgcagctcctttgaacggaggaagtcacgtcgcctggtttggaactgaagacaaggaaagagcgagccgtcgagggtgagcacccgg

SEQ ID NO: 232020 - DNA, 201 bp, Homo sapiens
gacatttggttccaacgtgtgtcctccccaggcctccccgccacccctgccgttccctcctagctgcccgcagttctgacttggaggtgcttcgcaggcayctgctgtgacttggaggtgcttcgcaggcacctgctaccctgctgggatgatcctcctggagcctgagcccccactggcttcacagttgccaccccatga

SEQ ID NO: 232021 - DNA, 201 bp, Homo sapiens
aggagggctgagagctccccgtctcttgagtcagactatttataccacacttgcttctcctgaggttcatgactcctgagacagaaagctgaggggtcccygtagaagccgctgctgtcctcgtgcctggaaggcttcagagaacataactgattggatttcactgtctcccagaagagtttgctcacgagatctgtgagg

SEQ ID NO: 232022 - DNA, 201 bp, Homo sapiens
ggatccggcgcccggcctggccgcacccatgcccaggagggcacgagagcgggcaggatccggcgcccggcctggccgcacccatgcccaggagggcacgmgagcgggcaggatccggcgcccggcctggccgcacccatgcccaggagggcacgcgagcgggcaggatccggcgcccggcctggccgtacccatgctcag

SEQ ID NO: 232023 - DNA, 201 bp, Homo sapiens
acggccgaaaggcaacacggagatgctcactcagagcaaggctcgggactctgaaaagcaaggacgtgatgaaggcgacttcgcaggacggttatcaaagyggctgcgtgttaatcatctgcggggacgtggcttctcaagaaatcctgtcacatccttttgtaagataaagaatcatcgagttttttcaagatctgtttc

SEQ ID NO: 232024 - DNA, 201 bp, Homo sapiens
gatgcccctcattctgcttctgactccagtggttcctgttctgtcctggggcttcctcaggaggtgctgagaaggaaagaaagggaacacctgaggggcamctgccctccctccacgtgtgcccagaagcgaatgtggggagccaggaggtggtagggtgcccaggagagcgggagcagcatggggcagggcgggcccagc

SEQ ID NO: 232025 - DNA, 201 bp, Homo sapiens
tctccatcttgacaggcattgctgaagatgtaagtgctcccccagaacatcggggtgtgtaggccctccacgatgcgctgcttggacggcggagaccgccrttttctcttggcagtctggcgctgagtggatttgcccaaagtcacagatcaacttgctgttgcagcaggggccggcctgtttctggagtggtttagattt

SEQ ID NO: 232026 - DNA, 201 bp, Homo sapiens
gctgcacctgtccccgtccctcccctctgtgctccaggtcactcgcctgcttgggaagctgtgtcgctacacgaccctggatcctgcttatgatctgttgractccacgagtgcccggtcttccccggtggcgctcatgaattatttatctgggcccgctctgccctgggctcgcactcacattaactcgtgtccccagct

SEQ ID NO: 232027 - DNA, 201 bp, Homo sapiens
tatttggagcgcagaagagcaacttgcatttttcttcatagagggatggagggcaggttttgttgagaaatacaaatttgatttatttccaagaaaacaayttttactgtcaaagaagggacacgaagcagctctgcatttggcagcccccagaagagttttctttgcagctaatgaggaggagggggagaaggcaggtca

SEQ ID NO: 232028 - DNA, 201 bp, Homo sapiens
gggcagggcggggtgggatgcgggggcagagaccttggccgagtgtggaaggaacacagccagcaggcgggggattgggcagaaggcctgccctgacctcycaatgctgcttcccttgagctacctgagccccggtttcccatctgtgaagtggggtggacgtgacaaggatgtgtcattccggcccgtcaggtacccgaa

SEQ ID NO: 232029 - DNA, 201 bp, Homo sapiens
acagactgctatttaggaggtacttagtgcttagcagtagttagtactaagtagacactgatacttaggagatatatagtagtgactagtgcttagtactyagcagagactatgactcaggaggtacctagtactaagcagagactacaacttaggaggtacttagtacttagcactaagtagagactactgccaaggagc

SEQ ID NO: 232030 - DNA, 201 bp, Homo sapiens
tccctaataatggggggataaaggcctccccctcccgctcctctctccaggctggggtcttgtgcgaggtatggttaagaacacagatggtaggctgggcrcggtggatcatgcctgtaatcccagcactttgggaggccaaggtgggtggatcacctgaggtgaggagttcgagaccagcctggccaacatggggaaaac

SEQ ID NO: 232031 - DNA, 201 bp, Homo sapiens
gggacctcagtcctgtggggcctcttggtggcttcaccctccatggcactcaggaaataacagagctcagacctcactgtagctctcccatgggtggcaartcacaggatgggcatggaactagcttgattttttatttttatgtgagtaaatctccagcgtttcaaatcctcttccccagagggtcacattctcggaccc

SEQ ID NO: 232032 - DNA, 201 bp, Homo sapiens
cagcagggacctcagtcctgtggggcctcttggtggcttcaccctccatggcactcaggaaataacagagctcagacctcactgtagctctcccatgggtrgcaaatcacaggatgggcatggaactagcttgattttttatttttatgtgagtaaatctccagcgtttcaaatcctcttccccagagggtcacattctcg

SEQ ID NO: 232033 - DNA, 201 bp, Homo sapiens
tcactcattctctcccattttcaaggagtctctaattctttaccctcagaaacgatgtgctgtgattttatgagacaagcctttgggatctccctaataayggggggataaaggcctccccctcccgctcctctctccaggctggggtcttgtgcgaggtatggttaagaacacagatggtaggctgggcgcggtggatca

SEQ ID NO: 232034 - DNA, 201 bp, Homo sapiens
ctgcaggtgccattgcggcctagccttggggcctgagcctctcctgcctaaagctttctttgacctcaagttcagggagggtcccctcctcccggccccamggcaccccttcccacgaacgcccaacacgtgctgttgctgtcattcccatcgcttcttgcggtcactcgtgcccagctctgggtggcgtgggagtgctcg

SEQ ID NO: 232035 - DNA, 201 bp, Homo sapiens
cagccggggtacctatttagagagaaacgctgaccacagtgaaataacctaagtcagtggattctgaagccatcttaattgtgaggtggttttggcgaagscttcactttgctttttcatgacgtgaactgctcggtacgatggggtttttttttgccgtgagttaactttgtcgatcacgtgagacccccagagctgggt

SEQ ID NO: 232036 - DNA, 201 bp, Homo sapiens
cttctctctcctcctcctccttcctcgccccgtggaagctcttacgcacctccaggccccatgcctgctcacacctccccatctctgcaggtgccattgcrgcctagccttggggcctgagcctctcctgcctaaagctttctttgacctcaagttcagggagggtcccctcctcccggccccacggcaccccttcccacg

SEQ ID NO: 232037 - DNA, 201 bp, Homo sapiens
acggtcggcaatgttacttcaagcttgtagacatcgggtacatcccatgtccaaaaagaaggctcgccctggaaaagcacattccgaaagcagtcgcggcrtggatgcagagcgctgtgcccgcagcactgcccacccaggaggctgtagggagtggcggccccttctctctcctcctcctccttcctcgccccgtggaag

SEQ ID NO: 232038 - DNA, 201 bp, Homo sapiens
acacctgtgcacaccacacgtgcaccatagacatccattgcacacctgcacacaccacacgtgcaccatagacatccattgcacacctgtgcacaccacaygtgcaccatagacatccattgcacacctgcacacgccccacatgcaccatagacatccattgcacacctgcacacaccccacaggcaccatagacatcca

SEQ ID NO: 232039 - DNA, 201 bp, Homo sapiens
ataaaaggcctggggtctgacttcaggaagctgtagtcttaacattgatgaaaataatctgtgtattaaatagtgtaaaaactaagcacccttggtctgcwgtcctggatcagggtgtcctctaataatgagagacctgctggtgaccgagtttgacaattctattcctctgtgtatctgaacatatgcattaaagtcaac

SEQ ID NO: 232040 - DNA, 201 bp, Homo sapiens
tgtctctgactgcaggtccacctgaggccaggagactgcccggctcagcctgcaggcttgcatctgacttgcaccgtggctgtcaaagctgagagtgtgcrtctgctgagcacgtctgtgctgggcgctgcgctggctgagtgtctgccgtgtggacttgcttctctgcatgctgccttgcgaggtggcctcatcacccca

SEQ ID NO: 232041 - DNA, 201 bp, Homo sapiens
caggcctcaaaatcacccaggcagctcacagctcagggacgcaggcctcagaattgcccggacacccctctgctcagagatgcaggcctcagaatcccccrgacaccccacagctcagggacgcaggcctcagaatcacccgggcagctcctacctcagggacgcaggcctcagaattacctcaacagctcacagctcagg

SEQ ID NO: 232042 - DNA, 201 bp, Homo sapiens
agagattcctgcccccagccgggagggcagcgtcaggtttatcaaactgacgtttgcagcaggtgtggagattttgagtgaagtcaaatcaggttttcagrgagaaacaaacactggccgtgggtggggacttggggacccagtggggctgcaacaggggaggaggcgcctgggcgctggggctcacggccggctggggct

SEQ ID NO: 232043 - DNA, 201 bp, Homo sapiens
tttctgcacggatgtggcctggtgtggccctcaccggcagcgcctcaccgtcctctatctctggggaccatagtgaggctcctgagagtgggagcgagccyggtcctcaccccgtcaccaactacctggggacagccactctgtgcttccagcctcaagggactcacgctgtggacaagcccagtttccagtgccatccac

SEQ ID NO: 232044 - DNA, 201 bp, Homo sapiens
agtgtgtgtgtgtgtgtgtgtgtgtgtgtgggagtgtgtgtgatgggtgtgggtgttgtgtgggcctatgcatgccgtgtgtacctgtgtgtgcatgcacrtaggtgtgtgcatgtgtgtggtgtatgagtgtgtgatatgggtgtggaatgtttgtgtgcagtgtgagctgtgagtgttctgtgtgtatgcatgtgtatg

SEQ ID NO: 232045 - DNA, 201 bp, Homo sapiens
ctgatgacacggatggctctggggcagggaagtggtcccgaggggcacagctgtgggtgccgagggcttgcggaagtgggggcaagtcttgtatccgatcrctgttccgtccatgggctctgtagtcaacgtggcctcttctgtggttgctcgtgaagacacagctcagcatctacagtctgtagcaaggtggacagtctg

SEQ ID NO: 232046 - DNA, 201 bp, Homo sapiens
ctgtagacattgggcacacatgatggagtgagagagggctctgtaaacatctgtaaacatccggcatgcatgacagagtgagagagggctctgtagacatygggcacacatgatggagtgagagagggctctgtagacatcgggcacgcatgatggagtgagagagggctctgtagacatcgggcacgcatgatggagtga

SEQ ID NO: 232047 - DNA, 201 bp, Homo sapiens
gctctgtaaacatcaggcacacatgatgtaatgaaagagggctctgtaaacatcgggcatacatgatggagtgagagagggctctgtagacatcgggcacrcatgatgtaatgagagagggctctgtaaacatcgggcacacatgatgtaatgagagagggctctgtagacatcgggcacacatgatggagtgagagaggg

SEQ ID NO: 232048 - DNA, 201 bp, Homo sapiens
aagtggtataaactgaaataaaaaacgtgtaagatgctccaatccttggaagaccatccctgagggacggggagcctggctatctcatgtcgtccccaggrcacggcacacacgggccccagctgccatcagggccagcggtgaagggtctgtgccgtcttcccctcctccatggtgatcgaaccctaagtttagctaaaa

SEQ ID NO: 232049 - DNA, 201 bp, Homo sapiens
cgggggcagagaccttggccgagtgtggaaggaacacagccagcaggcgggggattgggcagaaggcctgccctgacctcccaatgctgcttcccttgagytacctgagccccggtttcccatctgtgaagtggggtggacgtgacaaggatgtgtcattccggcccgtcaggtacccgaaggtgaggtggcacccgcccc

SEQ ID NO: 232050 - DNA, 201 bp, Homo sapiens
ctgtttgttatgaatgttctcttttcctcccataaaagattttcaagcaaatttgatctggcaatttatttaaaccaaaagcatatgagtagaaagtggtwtaaactgaaataaaaaacgtgtaagatgctccaatccttggaagaccatccctgagggacggggagcctggctatctcatgtcgtccccagggcacggca

SEQ ID NO: 232051 - DNA, 201 bp, Homo sapiens
cagccctgcccagggtgcagcccagcactgacattctgcaccccactgggggccaggaaacaacccctttcttgtaggtggttttttagaaagtgtggacrtgcatgacctgtggaccgggtcatgggcatttctcgcctgtgcatccctcccccggttccctccagcccccctgtgctccctggggcttgcagactgagt

SEQ ID NO: 232052 - DNA, 201 bp, Homo sapiens
atctagagacgtcagagaaatgggaggtcatagagcaaaaataccacccaaataccgacaaaaataacccattacatatctgaacattttagagcaggacragaccagcagtgagcatttgacccacccaaataccaacaaaaataacccattacatatctgaacattttagagcaggacaggaccagcagtgagcattcg

SEQ ID NO: 232053 - DNA, 201 bp, Homo sapiens
ttgtaggtggttttttagaaagtgtggacgtgcatgacctgtggaccgggtcatgggcatttctcgcctgtgcatccctcccccggttccctccagccccsctgtgctccctggggcttgcagactgagtcttccaaagggtttgcacccgtctgactcactgttgttacttatagtagcactaagaagggtccctgattc

SEQ ID NO: 232054 - DNA, 201 bp, Homo sapiens
ttcatatgcgtttcatccttgtctctgagagtgaggctggttggtcaggggacggcacctggggcatgggagggtttcctgggttggggtcctgccaggartacgtgctctcaagagtagggtgtgggcagcaggtaagataaagctgtgttggatgaaatcaaactaaaacaaatgaaggtcaaccagctgggaatattg

SEQ ID NO: 232055 - DNA, 201 bp, Homo sapiens
caccccgtctcaggatgcacactacccaccctcgcctgtctccccccgtgtcccccaccccgtctcaggcatgcacactacccacccttgcctgtcccacyctcgcctgtctcccttcgtgtcccccaccctgtctcaggcgtgcacactaccccaggttcctcccacccatccctgcaccgggcactcttccactcttca

SEQ ID NO: 232056 - DNA, 201 bp, Homo sapiens
tcccacctacttcccaaagtgctgggattacaggcgtgagccaccacgcccgactaccgttctgtattttaaactcaccacacagaatggtacttagagtrttcgtagtggcgatggccatttctgtcactggctgacaggagcccccgctctgtgccctgggcccccacagaagtctgataatgaacgcaggtgatacgg

SEQ ID NO: 232057 - DNA, 201 bp, Homo sapiens
gttggaggcagcaccgagctgcaaaaagatcaatttttcacatttccctgatggagagtttctgcgcctgggtgcggacgcgctgggtttaccgttcctgwcaaacgctgccccgtggggagggtgttaggtcgtgaggcactagcatcacattgagttttgcggtggagcatttccatttagggcaacagtggaagacgc

SEQ ID NO: 232058 - DNA, 201 bp, Homo sapiens
aagggtcatttctgtatttatcataaaatagaattgcagaggattgatgatagatgctcccgcgtccacaggtgctgagcggaatcgggagctgggcagcrtccccgagttgccaataaccacagagggcgtgaccttggggtcgctgggtgggtctagtgcatcttttgtttttgtttgtgaattttaaaagcttgatgg

SEQ ID NO: 232059 - DNA, 201 bp, Homo sapiens
agggactctcactccgccagcccaagggtgagggaagattaaggtctcctttgagaaaccaggctctgctttgtgatatggggtcgttttccggcatgttratctccccatcaatcgggggtggtgggggtggctcatgttggggaggattggatttggggagtgagaggttcgttctctggctttgcatgtgatgcggct

SEQ ID NO: 232060 - DNA, 201 bp, Homo sapiens
gaggtctggtccggggaaaccacaccctccgcatgccagcctcagttctgagtgccgtgggcatgacaggaggaacctcgggccacagggactctcactcygccagcccaagggtgagggaagattaaggtctcctttgagaaaccaggctctgctttgtgatatggggtcgttttccggcatgttaatctccccatcaat

SEQ ID NO: 232061 - DNA, 201 bp, Homo sapiens
tgaaccacttttaatcctgaagctgtcgtgctgaggcaagttcaggttaaatttcagcaaggtggttcggccgcggatctttggtggtggagtggccgatsctcttgttccccacaggaaggcagcattccctgttccctgtggccgtggactcctgccctgggcctactttcttccagagcccggcccctggaggctgaa

SEQ ID NO: 232062 - DNA, 201 bp, Homo sapiens
caggagggcccattggcctcatcagctggcgagcccagggcagccagaaaagagtggccaggagcttggtgcatggggtgggagggtgggtcagggcccastgcaagggtgcggcggacagcacagccccagcgggaatggagtcctcgaaactgtgagactcatagtttggtaaaaacatttccaaagcatcctgaatgg

SEQ ID NO: 232063 - DNA, 201 bp, Homo sapiens
ggcctcccccgaaggtcctgcagtagacacgggacatccctggatgagacagaacacacagcacctgcagggttctgatcacggcatccaaaatcaaaccygctgagaagctggagtcagcactggctctcccagcaaggggtttcctgtggcatctaagtctgaggacagaggtagttctgaggctgggtagttctgagc

SEQ ID NO: 232064 - DNA, 201 bp, Homo sapiens
tttgtatgtttaatgtattttgtcactttatccattttataaaaatgagacctttgcactactgtgagttaacctttgtgatacattttgtaataaagccrggagaaaccagtagaactgtgtgccacacacggcttgctggttgtctgcggcaaactcatgtaagagggttgaaggctgagcctcggaggcaccggcctg

SEQ ID NO: 232065 - DNA, 201 bp, Homo sapiens
gtagattttatgtttagtgcagttttacatttacagaaaaatagagcagacagtccagagggttcccacgtgccctgccttccactccacaccccgtctcyccattgctcccatctgtattaggatggtctgtttgtcacagttgatgagcccacattcattccatggtttacatcagggttcactcctgctgttctctta

SEQ ID NO: 232066 - DNA, 201 bp, Homo sapiens
gaaccagtggagaaaaaacacagaatgactgacgtgagttttgacacgattttcgttaggaccttggcatgctgggtgccagagaacctgttctagtgaaygccttttacacttccaagctgtgcaatcttgtgatatgctccattttcttctgccttgatagccaaatgccaatcattggggagaaaaattctgctgctg

SEQ ID NO: 232067 - DNA, 201 bp, Homo sapiens
tctccagctccctcacccccaggagtttcaaaatcattgaagacaaaattgacgggcagattctgggtgcagacggcagtcagacaccagaagcaggcccrcagtcagcatcttctgagcagcctctccatccttctgaggtttcattccaacctccctgcacttcctgggtgaagcaggtaccctgtacatgtttcctgg

SEQ ID NO: 232068 - DNA, 201 bp, Homo sapiens
ttgattattctaaatactaacagggtgtgatctgttggcctgctgttaggagacccggaataggagcgagtgtctggcctattggcccagggtggcctgtmtgtaactgggtggcctggcgcaggccctggtgcggcaaaagcagctgccatgttccagaaacagagtaacaggcagagagagccaggcagctgcagctca

SEQ ID NO: 232069 - DNA, 201 bp, Homo sapiens
atcatgtgtgtttcagatcacaggatctcgtgtgtttctcttctaacactgaaggccaccagatgtcagtgtaacttaacaaatcacatcctacatgtcaygttgacttcagcatttggtctaagtgttgccttttcctttcctatttcaacttctgaagatgaagagggactttaagggaatttgcacacaagctccata

SEQ ID NO: 232070 - DNA, 201 bp, Homo sapiens
tgttttactgatttccctctgttatatttggttgctattattttttgagaaatggaattcccttattttcattgtgttactgtttttcagtgctagtatcraagtaatactcatctcataaagtaaattgtgtcctagactgaaaaatctaaaatccgcataggaggaaacagatgttgcttgaagctttagtaacagtgt

SEQ ID NO: 232071 - DNA, 201 bp, Homo sapiens
tatctgttagcagcagccactctttccttcctcagactgaccaggtcttctgtgccctctccacgctcatgcctgggtaggtcctgggtaggtccacgctyatgcctgggtaggtcctctcctaagctgaggactgcccacctccccagcctgctcactgcctgctcctgcacacatctccccatatgctgccagggccag

SEQ ID NO: 232072 - DNA, 201 bp, Homo sapiens
tccccgatccagccccacacacacccctacaacggcacagccatcctccccgatccagccccacacacatccctgcaacagcacagccagcctccccgatscatacctttctcagggcctcagcagcccccaaggccccgagggacatggcagcctgctctgtgaaacgtcctgtctgttctgcattgtcctgggcctcct

SEQ ID NO: 232073 - DNA, 201 bp, Homo sapiens
tatgaaaaaagactgattgggttttttgttgaatttcgatttaatgtatagtttagtttggacaaaactgtacaaaagtacagtcattgccacataacagygtttcagtcaactactgactgcatacatgagggtggtctcctaagattataatcacatactttaactataccttttttattagatgtgttcagacacaaa

SEQ ID NO: 232074 - DNA, 201 bp, Homo sapiens
ggcctctgacctctgcactcacaggcacatcgcccctcagtacccagcctgggcaccctgctggggcctctgacctctgcacacatggatgcactgccctyagcacccagcctggatgccccgctggggcctttgacctctgcactgacagacacgtcgcccctcagcacctagcctggacgccctgctggggtccccatg

SEQ ID NO: 232075 - DNA, 201 bp, Homo sapiens
agggtcccctcctttaccgacagtcacctgatggtggatggtagttataactacagaatgccttctccgaaacacccgggccccagacctggtgagctggyatgggagattaggctgatggttaatgcctgtgggccccgagatccccggaccttcttgagggtgctgagcacacctggcgtgggagattaagctgatggt

SEQ ID NO: 232076 - DNA, 201 bp, Homo sapiens
agcatagtattttattataaaatgtatgtaattatatttgaatactagttcttggtcagtgcattatatatgttataaaaatagagatatagcttatcttytatcttttttatggtgtctttttaatcagtgttttccatttgaagtctttgggtttcatcatggcatctttctctagtgatttcataaaaatatttgccc

SEQ ID NO: 232077 - DNA, 201 bp, Homo sapiens
cccatcctcatctctctggaccaatctgaggcccggcccttctccttcttggaattcttgccagctcgctgcttgcctctgtcacagtccttttcattctsttttgccagttcccctcattgccctaaatgctggggggccctcaatgctggggggccctaaatgccggggggccctcaatgctgggggatcctaaatgct

SEQ ID NO: 232078 - DNA, 201 bp, Homo sapiens
ttctcccttaggaattaccagccattcgtccttttgttttcctttcagccccttcaaattttgtctcgggaataattttgtgcattatcagatcatcaagrtattttactaaagacatttcttcctaagaatttagttattaaactagcatttccctttttgagttcctcttatggtaacagctcttcactagaatgcctg

SEQ ID NO: 232079 - DNA, 201 bp, Homo sapiens
caccctattagtgaccggacactacgcccccattaatgacctgtcatctcaccccgtttagtgaccgatcaccccattagtgaggggtcatattgcccccrttagtgaccggttgtctcacccccactagtgactggtcatcacgccccctttccctttagtgactggtaacctcgccccctttagtgaccggtcatcttg

SEQ ID NO: 232080 - DNA, 201 bp, Homo sapiens
aggaaccagctttcattgtcatttatcttctctatttttttctcacttaaattacattgatttcttttcttatccttattatttattttcttctactttayttgggtttattgtgttctcctttattacagattcttaaagaattcagattattgatttgagactttctcttttatttttcttttgacttttgttttcggt

SEQ ID NO: 232081 - DNA, 201 bp, Homo sapiens
gatgaggatccagttttattcttctacatgtggcttgccaattatcccagcaccatttttgaatagagtgtcctttccccactttgtttttgtttgctttrtcgaagatcagttggctgttaagtagttgagtttatttctgggttctctattctgttccattggtctgtgtgcctatttttataccagtaccatgctgtt

SEQ ID NO: 232082 - DNA, 201 bp, Homo sapiens
ctgcagctggatgaccctcctgtgctgacggcacacaggcactgtagcaggaacttgtagatagagtcccatcctgtagctggatgaccctcctgtgctcwcggcacacagaccctctagcaggaacttgtagatagagtcccatcctgtagctggatgaccctcctgtgctcacggcacacagcccctctaggaggagca

SEQ ID NO: 232083 - DNA, 201 bp, Homo sapiens
gcaccttaccttaagggaggaagagatttcagaagcagatctggacacttcgtgcttcctaatcccaggaagaaatggaatctctgtgttgccgaccaagygtgggcggcgtgctggggcagtgcagctgtttcatggctggctgtgaccttcacgggctcattccccactggctggtggagggggatcatcactccctag

SEQ ID NO: 232084 - DNA, 201 bp, Homo sapiens
ttttctcacttaaattacattgatttcttttcttatccttattatttattttcttctactttatttgggtttattgtgttctcctttattacagattcttraagaattcagattattgatttgagactttctcttttatttttcttttgacttttgttttcggtttgagggtacatatgcatgggtgaattgtgtgttgtt

SEQ ID NO: 232085 - DNA, 201 bp, Homo sapiens
ccaaacaatggtgccctcctcctttcctgcacctctgtgatgagaagcagcaatcagcagtgagattgcagattcccaatatttggaggacaacatctgtrttgcctgttctggctcctgccagtgtgtgcaggctgctccaggaacatgtgcacagctgcttgccacagggctgaaggtgagtagcggtagctcctactg

SEQ ID NO: 232086 - DNA, 201 bp, Homo sapiens
aggacagaggcttcaggaccacagtgatggatctgaggggggcctgaatcttaaaccctatccgtatagtctccaagcagggatcatatatggtataactrcattttcatctctaatcactggggcggcatgtcagtatcttctctttctttcccattttgagtgacatagtgtgatatgtctaatgacaactagaacaaa

SEQ ID NO: 232087 - DNA, 201 bp, Homo sapiens
aatcacacatttggctatttctctttccaagcaaagtaaaccagatgtacagcctatagttctgcccattggagaatttcccttcaccgctgtccttttarggatgttccagaaaggggcagtagtgctgcagttgtccactaacgtgggggcctgcatatcatgcagaaccatctgtaaaccaggcccaggtcttcctcc

SEQ ID NO: 232088 - DNA, 201 bp, Homo sapiens
gggaataacgctcccgctgggggaataacgctcccgctggtggaataacactcctgctgaagtgtggccattcacattcggatctcatcctgctggcagcrgcgtgttttcatcgaccaggaaacacacaaatatttgtagtcgtttatgctaatacgcaaacattttaaaagcactttgcttctccttaaatttcaaaga

SEQ ID NO: 232089 - DNA, 201 bp, Homo sapiens
ctccactggtcctgagatacagaccccagccccagcgtggcccaggctgaccagcagctctgcaggtgcatcttggggacactccaccaggccctccctcygccccggcagctgggctcctgcagaaggtcccagctctgcacctgtcccgtctgggaggcagcttcctgttcacgtcttctccccattcagagaggtctg

SEQ ID NO: 232090 - DNA, 201 bp, Homo sapiens
tgtgcaggctgcacctgaccccgggtgtgtaggtaccaataaaaggcctggggtctgacttcaggaagctgtagtcttaacattgatgaaaataatctgtrtattaaatagtgtaaaaactaagcacccttggtctgcagtcctggatcagggtgtcctctaataatgagagacctgctggtgaccgagtttgacaattct

SEQ ID NO: 232091 - DNA, 201 bp, Homo sapiens
gaaagcgcagtcctcacctctgtagaggcccctcctgagggcggacatgccctgccttgtcacttgctcctctttgctttgtggtcttaaaagaatatctktagcatgatggatttattatcatttaagaagatttcaggtggtgtggggttatagccccgatgggtaaacatgttcacggttgcttgtacattagaagag

SEQ ID NO: 232092 - DNA, 201 bp, Homo sapiens
tcctcaaatcacgccatctcattgtaacgctgaggagaaaagaatcagccaaatctgggatgtagactctctgaacatttggttcctgtgtaagtttttaatttaaaggaaggatcctaccccagaaacacgccacaggtttctgtgatcaaacctgaggggtcgggttccgcgtctgactgcgtcctgagcagccgtgtg

SEQ ID NO: 232093 - DNA, 201 bp, Homo sapiens
gttccaatcctagtggctgcccaggaggcctcaccgctcaggagcccctcaggggttcagcgagaagagcgcatcacgagaaccagcagggtgccaggacrgggtgcagccgaggtccggactgatgcttcctgctcgtccttccttgttagagtaaaggaaaccctgaggatgctgaagatggattctgtgtttctggcg

SEQ ID NO: 232094 - DNA, 201 bp, Homo sapiens
ctccaacagaggggaagttggccttcaccatccagcgaggcagggtcctggggtcgggcatctttgagccaggggctggggcagtcctgacagctccaccygctcatgccatgccttgcagcctccctgcccgtccgatcgcctgagtcaggcgtggtcctggcctctcttgccccatttgttttttcaaaaacctgcaag

SEQ ID NO: 232095 - DNA, 201 bp, Homo sapiens
atgatgagacccatcccactctcagctcatgtgatgagctgaggcagcgctcagaggaagagctgctgtcaccgcgaagccagggtactgtcagctgacagcaaggagcccagcaggggagggcatgggctgtggccctcaccagctcctctgcaggcgggctcacccctggcacgcacgccatccctgtgattctcatca

SEQ ID NO: 232096 - DNA, 201 bp, Homo sapiens
cttggatttccggcaactcaggcaagaggtggcaacttcggagccttctgtgccttcggggagaagccatgcctggcgctgccctggagccgcgggagccsctgggctgagccacggaagatgggcttggagcgtcctccgcagcctccgctcctgcctctgcccacaaagacccgctcgcccagtgacctgtggccacct

SEQ ID NO: 232097 - DNA, 201 bp, Homo sapiens
ttagtttctctccctttaagaacctttggtcgtgaatacaaggccgaaggatgaagaaccgttctaagcaacagcagtgacattgcatggttctgggaaayccagttttgggggtggagaaagaagagtctttggttagtcattctctcctcagattctcttactggttagtggttccatgcctgttggcaagtgcaggaa

SEQ ID NO: 232098 - DNA, 201 bp, Homo sapiens
caggcttctgagcccagcccttgccttcatgtcgggggatgacagtctcgccatcagcagcacccaatgtaggccctgtccagggagtcagtgctgcatcrtcagtgatgggagagggaggcggaggcagggaaatgcacagagccagtggccttggctgctgtgacagcatagcagacggggcggcgcaaaccgcagatt

SEQ ID NO: 232099 - DNA, 201 bp, Homo sapiens
ggaaatgtggtgtgtggacgtcgggaatgctccaggagaaatcccaggtgagaaggagccggggcagccatgctgtgagctgttcttacgtgcccgcttgragattagttctatttgggtctcttaaactgtcaggctcccgcccagttatcttacctgaagcagagtaggattcaggctgcaaagtgaaaactgcctctc

SEQ ID NO: 232100 - DNA, 201 bp, Homo sapiens
atatctggagagcagcaggagtgtgcagtggctttgaagcctttctttgtctctactgaccatgcaaattacacaccaactacttgtaagcttgagctcckgtgagctggccgagctcgggaagattattgagaccatgtccgaatggtggccccagaagccggcagtgtcagcccaggtgtgacggagaccacatcccaa

SEQ ID NO: 232101 - DNA, 201 bp, Homo sapiens
tgcacagcttgaaggtggtccagaccttaatgtggggggattttcaccaaaaccctgtggtgtctccaaacagagcgagaatgaaccccctgggaagcatrtgaagaagccgtgggaggcaaacggagctgtgtttggttgtaagggatggggctgctcatgggttttcagtgccagctctgggaagggtccctttgctgt

SEQ ID NO: 232102 - DNA, 201 bp, Homo sapiens
gcaggtgctatgagtgaatgagtcaatgactgccctggacgtcaaggaaaagaaccaaagttaggtctgtttttgcagttctcatcctgctcctctgaagwcatacctgttttctgggtcctggtttctaggaggcgtccatggtggccccgttgcctctgtctcagggcagctttgtggaggtgcagagactctcctaag

SEQ ID NO: 232103 - DNA, 201 bp, Homo sapiens
tccgttttctcactagagcacttctcatattcatcatgggtatttgagattcattgtctgataattccaatatctctgctatatctgagtctgattctttktctctttgtgatttttttcccttttagcatggcttgtaatttttttgttgaaacctagatatgctgtattggataaaagaaactgaggcagattggcctt

SEQ ID NO: 232104 - DNA, 201 bp, Homo sapiens
attgatagatcctcattctcactgattattcctcagctatgtctgctctaccaatgagcccatcaaaggcattcctcatctctgttacagtgattttgatytctaacatttccttttgattttttcttagagtttccagctctcaaatcacccatctgttcctacacattgtccgttttctcactagagcacttctcatat

SEQ ID NO: 232105 - DNA, 201 bp, Homo sapiens
ggcataaggaaatgggaccatgcgaaagtcaccatcacatcttaatccgtgactgcgctgcccaacatcgccccgagactaaacttcccctagaagttcartttcacaaagatagaaaaattatttgggcaaaatgctgctgtccaatctgaatgcttgcttctacgaagccaagaggaggcgcctgcagctcctttgaac

SEQ ID NO: 232106 - DNA, 201 bp, Homo sapiens
ctctactcgcttcttcctaaaaagaagtccagcataattctctccgtgcttttctatgggtaaggtaaggtttttcccccctctctggctttgtccaaaawttcctgtctttgatttttctgcagtgtgtgtgcacgtgtgtgcatgtgcagtgtgtttgtgtgtgtgtgtgtgtgaagtgtgtgcacatgtgtatgcacg

SEQ ID NO: 232107 - DNA, 201 bp, Homo sapiens
gccagagaacctgttctagtgaacgccttttacacttccaagctgtgcaatcttgtgatatgctccattttcttctgccttgatagccaaatgccaatcaytggggagaaaaattctgctgctgaatgaggcagcgcacgatttgccctctggaaattgaacatttaccttaagtggtaaaaggtgttttccataccttga

SEQ ID NO: 232108 - DNA, 201 bp, Homo sapiens
gttattcgtgctgaataaaataaatgtaacccccaagttgttgcactgctatttgaaataatttatgttattgattttcttcaataaaactgagctgtgtrtggatttgcctgaaggggtctgtgtcccaaccttcaactcatcctctgttttcctggatccccacacaatcgtaggcagcttagcttgtagttttgcgga

SEQ ID NO: 232109 - DNA, 201 bp, Homo sapiens
ttccaagctgtgcaatcttgtgatatgctccattttcttctgccttgatagccaaatgccaatcattggggagaaaaattctgctgctgaatgaggcagcrcacgatttgccctctggaaattgaacatttaccttaagtggtaaaaggtgttttccataccttgatataagtttgcataggactctctgctttcatagtt

SEQ ID NO: 232110 - DNA, 201 bp, Homo sapiens
aacctgtcatcagcacaggttttacgtgagaaacacagggcctgaggcagctatatgacacgtctcagggtggaaggaggggagaggaattcattgaggarccactcctttttgtcttagttttaaggcagtaaatgacttgtcatcctcaggaaagctaacaggcaggtgttccctctttctctaccaccattttcatgg

SEQ ID NO: 232111 - DNA, 201 bp, Homo sapiens
gcatcaagagatggaggcccctcacaggctctttcgtgggcagaaagtgcgtgtccagccgcacgatctactgggcctgtgatcgttcttgtgatacagayatctttcttttgacattggtctttgctgaggcttaaagcaggtacatttttacataaagaattcaaaatgatgtgattactaagagtgttgcaagataca

SEQ ID NO: 232112 - DNA, 201 bp, Homo sapiens
gctgaatgaggcagcgcacgatttgccctctggaaattgaacatttaccttaagtggtaaaaggtgttttccataccttgatataagtttgcataggactstctgctttcatagttctcacttgggtatgcagaactgacatctttgtgaattattctcttttctttcactggagtgtttaatatgcattttaaaattgct

SEQ ID NO: 232113 - DNA, 201 bp, Homo sapiens
gaagccctgggcctggcctgcccctgccctcccgaagcttgcaggcaggataccagcagcacacagcaaaaacgtgaactcagccgtgacgggatactgcraagatgttaagtgcggggaaagtaaatggaaatgttatatttaggattagttcacagttccatggatctctcatctctttctgaataaatgattcatgcg

SEQ ID NO: 232114 - DNA, 201 bp, Homo sapiens
aagaagggcccagtcgcaggcgatgtccacgagctagacactggccttccctgttaagtcttttagcctcttagtttctctccctttaagaacctttggtygtgaatacaaggccgaaggatgaagaaccgttctaagcaacagcagtgacattgcatggttctgggaaacccagttttgggggtggagaaagaagagtct

SEQ ID NO: 232115 - DNA, 201 bp, Homo sapiens
ttttttgacaaaataattcccacataaatataactttccttggttctgttggctgagaccctaagtcatttctggcgtattttaaaaatccagactcctcrgcgggcaccgctgcaaacagacctgcctctaaggctgataacgtgaaggtgtcgttttcaacacaaaaggctctgcacagaggttttttcttctgagcgg

SEQ ID NO: 232116 - DNA, 201 bp, Homo sapiens
ctgaaggattccagaacctccaagagtgttttgctttgtattgaaatatggaatttataaatgaggaaactgttacaagcttttcttttaattatgaaaamagcataatacaaataaattcagaggcagttcataaaacctgttttctagtagtttcagccgtaagtctctgcaagccagtactccctttcttccctggca

SEQ ID NO: 232117 - DNA, 201 bp, Homo sapiens
tccaggcacccaggggctgaacggcagtgcgggctttgacaccacacgagccgccagagaggcggcacactcagccacacacactgcgtacacccacacayctgcacactgcgcacacccacatgcagccagggacactgcacacccacacacctgcacacacccatgcatacatccacacacacctacacacccactcac

SEQ ID NO: 232118 - DNA, 201 bp, Homo sapiens
tttttgttggatatacaatttcagaataaaagggtttctttcctttaacactttaaataacaatcccgtttcctggcctgtaaagtttccactgaaaagtytgctgccagatgtactgcagctccattgtatttttgtttgtttgtttattttcttttgcagattttaggattctttcttcattcctgacctttgggagtt

SEQ ID NO: 232119 - DNA, 201 bp, Homo sapiens
tcctttaactagtaggagaggcgctggaggccacctcccctcctttcctttatgcttgggattatagctcacttcgccagttcccactcttagtctgtgtrttgcccgcaccacaccctcaacgtgtcatctacgttcccttcatccacctgctcagatccgtgattgtttatagcatcctccagtgccccggccaggatt

SEQ ID NO: 232120 - DNA, 201 bp, Homo sapiens
ggcaggggccgcagggatgcagacaaagccacgtccccattggtcctgctgctgtgagaatggggaggaaagtgactgcacaccctctggaaccttctgayggccaggggactttgaatagtttgccccacacggcaggagggtgggggccgcgctacggagcgttggcttgtggactgaaacaaagcgccccaggaaaga

SEQ ID NO: 232121 - DNA, 201 bp, Homo sapiens
taaatataactttccttggttctgttggctgagaccctaagtcatttctggcgtattttaaaaatccagactcctcagcgggcaccgctgcaaacagaccygcctctaaggctgataacgtgaaggtgtcgttttcaacacaaaaggctctgcacagaggttttttcttctgagcgggtggttatttgagtaacacgtcct

SEQ ID NO: 232122 - DNA, 201 bp, Homo sapiens
tccagtcttcccagcaccatttatagaagagactgtcctatccccaggacagttgacgattgttgacgatttttgcatcaatattcatcagggatattggygtgaagttttattttttgatgtgtctttggttttggtatcagggtaatactggcttaatggaatgaatttggaagtgtttcctcctcctctatcttttgg

SEQ ID NO: 232123 - DNA, 201 bp, Homo sapiens
gactgcaggtagccctcgcaccctcagtgactgcaggcagccctcacatgctcagtgactgcaggcaggcctcacacgctcagtgactgcaggcaggcctygcacagcacaagtggcctctccttccctgaggtgtgcagtggctccagcctctttggttgtggttactaagattgcccttggacatgatgtgtgtatact

SEQ ID NO: 232124 - DNA, 201 bp, Homo sapiens
cgcccacagctctgaccacagtgaaggggacggctgggcagagcacgaaggatggggagcaggcaggggccacctggcctgaccttgggcactggcgtgcrggctgcagtctgcaggtgtcttggaggtgccagcagtgggatttggtgatggattggacagaggggaagatacaggaattaatggtgcccgcgcccccag

SEQ ID NO: 232125 - DNA, 201 bp, Homo sapiens
tgcctcggcacctgggtggcttaccgcccacagctctgaccacagtgaaggggacggctgggcagagcacgaaggatggggagcaggcaggggccacctgrcctgaccttgggcactggcgtgcaggctgcagtctgcaggtgtcttggaggtgccagcagtgggatttggtgatggattggacagaggggaagatacagg

SEQ ID NO: 232126 - DNA, 201 bp, Homo sapiens
tgattggtgtatttataaaccttgagctagacacagagtgctgattggtgtgtttacaaaccattagctagacacaagagtgctgattggagtatttacarccccttagctagagataaatgttctccaagtcctcactagactcaggagcccaactggcttcacctagtggatcctgcaccagggccgcaggcggagctg

SEQ ID NO: 232127 - DNA, 201 bp, Homo sapiens; identical to SEQ ID NO: 42949

SEQ ID NO: 232128 - DNA, 201 bp, Homo sapiens
ttaatttatctgccaaatatggagtaagcccctggcacgtgggatattggagtctcagcagtgtgcacagcagagtcttgtctccatggagttggagggcrctgactcccaccaacgtaaattcagtgcagatgcaaaattagcagagaagagggcgtggggtgcactggccaacagcatgagccagccccacctccgaga

SEQ ID NO: 232129 - DNA, 201 bp, Homo sapiens
catttcttttccaaaattacttctctctatctggaatttaattaatcgaaatgaatttatctgaatataggaagcatatgcctacttgtaatttctaactmcttatgtttgaagagaaacctccggtgtgagatatacaaatatatttaattgtgtcatattaaacttctgatttcacattcaggtggtctttatttgggg

SEQ ID NO: 232130 - DNA, 201 bp, Homo sapiens
tgcatgtgtgtacagaggttgtacccccagatttccaatttggggaggtgctggggcatgtgcctcctagtgccgtggacagctcaaaagtcagcacctgkataccctggtcctgtgtctggctggtccctgagtcccacaagatgtatgtggacttgttgtgagccactctcccaccgggctgtcctccggggttctccc

SEQ ID NO: 232131 - DNA, 201 bp, Homo sapiens
ggtatggctactccccccgcaccagcccagtactgcatcatccctgccctgcaaacggtccctcctgaagccaccctgggggcctggtggaggactctcgrctcacaggcgggctccctgtctcaaaggtgctcattcctgagggcgtcatcccaggtggcaaatctgtttgcttttaaattctggtgagagcagtgctgc

SEQ ID NO: 232132 - DNA, 201 bp, Homo sapiens
gctacggagcgttggcttgtggactgaaacaaagcgccccaggaaagaacaagctccgggataccagctccgggctccttgctggctgcaacttgaacgtrgtctgagagtcttggttagagctggaggtcgcgtctgctccaacagagagaactgctgactcttccctgcacagagagacagtgccccaaggggaatagc

SEQ ID NO: 232133 - DNA, 201 bp, Homo sapiens
accaccattttcatggccgagacaggaccaggcaccccttaattttcacatatcatctctaggactctgtgtgttttctgtcaaatgcaagtacggtatcrcatcatgtgagagcagaaggtgtgacagaggccgggtgtggtatagatgatgccagcacaccagacaaatgccagatagtagaagccacaggggcctccg

SEQ ID NO: 232134 - DNA, 201 bp, Homo sapiens
gccctctggaaattgaacatttaccttaagtggtaaaaggtgttttccataccttgatataagtttgcataggactctctgctttcatagttctcacttgkgtatgcagaactgacatctttgtgaattattctcttttctttcactggagtgtttaatatgcattttaaaattgcttctgtacatatgcagtggataaat

SEQ ID NO: 232135 - DNA, 201 bp, Homo sapiens
ctgaggtttctgcaccatcctgctgtttggaaaaggcgcagaggaacatcgaccctctggctggcctcagagaaggccctcggtcctcagggcatggtggyggcccccaccccggggtgatgggggctgtggcaccttgaccgagcaaacaccaggctcgggtggcagctgcctgcctggctttccgctcccctccacggc

SEQ ID NO: 232136 - DNA, 201 bp, Homo sapiens
tttcactggagtgtttaatatgcattttaaaattgcttctgtacatatgcagtggataaattaaggtacagaagaaggtttctcagtctacaccatccctrgggagttctttttgcttcacttcaagtagtagctattgtcgcctctggcagtgaagtctctgttactttaccaatgctctcattactgcattctaaaacg

SEQ ID NO: 232137 - DNA, 201 bp, Homo sapiens
gctgagttgattctttcctgactccttgattagagagaggctgctttagttgtgtgtgtgtgtgtgtgtgtgtgtgtgtgtgtgtacacgctggtgtttcyggattgcggcctctttgactccaagtctgaggtacctgaggcaaaaagaaaacccagggaatccaccaccatgtccttctctgctctgccttcgtattgc

SEQ ID NO: 232138 - DNA, 201 bp, Homo sapiens
gggagccgcgtggcttagcataggccagcctgtcctgggggcgtcctgggggctgcgtggccttcacacctctgctctcacctctgcccttgtagccaccrtgtcagggtccctggttttgtctcccttcatggggccttgttgctccagacttgcaggggagtcctccttgctgtacctaccaggacctggtctgcccct

SEQ ID NO: 232139 - DNA, 201 bp, Homo sapiens
gatctcttgacctcgtgatccaccctcttcggcctcccaaagtgctgggattacaggcatgagccaccgcgcccggcctttatgctgtaagattttattgytcatagaaccaagaaaaaaatgaaagactgggaatttggaaatttgaggtttcttctatgcttcttgaccaggtcacttctgatcttaagtgaagccaca

SEQ ID NO: 232140 - DNA, 201 bp, Homo sapiens
ttaatcaaagtgtgcaagaaatgcacttaatcgtaaaacagggtggcagttttacaagatgcttcagttaattagcacggaattgctggggaacgttccargggggttcctggtctccattacatcaaatgagtttgctgtgattaatgttatcataggaaataccaaagaaattaataacgattaagccattacttccaa

SEQ ID NO: 232141 - DNA, 201 bp, Homo sapiens
agaaaccgtgaatgtggctggattaagagggacagtggctgagggcggaagaaaggtttctgatgagcggcagagaccagaagccttgctgtggcttcctyccttcctgtgccccgcgtctcgcctgctgtgcttttggtgccacccacaccccccgctttattttatagtaactggcaggacctgcttggcccagggcag

SEQ ID NO: 232142 - DNA, 201 bp, Homo sapiens
ctcagctacggctcttggaccatgggcagcggtgctgaaatgacaatcctggagccacaggcttcctccgtccacagccagtgtgctcacggacgacacamgtaattgtggacaccactttgccaccacgactgtttatgctgcagccccaggggccacagcagcagctggtctctcctcaatgatggttcagcgccgagt

SEQ ID NO: 232143 - DNA, 201 bp, Homo sapiens
gggctctgtttgcgatgaccagagatgacggccagcaatggcaaggacgatggtgatggtgcctgggatctactcacagctcacccagccccttcaacaaygctgtgggctctgcactgtcgtccttgggggagttctgggattctccttcttcagtcaccctgcagtttcccccacgacgtctccgtgtcctagaatgct

SEQ ID NO: 232144 - DNA, 201 bp, Homo sapiens
tgtgttgtgcctggggtctgagccacagcggcaggtggatgggagagattccctcggaacaggtgtctggagcaggtgggttgcggggccactgtcaagcrcgtggggactgtgcctgtggcttcatccctgcgtggactcagtcctccccttgttttaagtggtccctgggtcctttgtgcacatcagtaattgcagagg

SEQ ID NO: 232145 - DNA, 201 bp, Homo sapiens
agagctgctgcttttttctaaaaaaagagtgattggttgtgattatttagtttcctccaggtgcacgctttttatgtggaatgcactggatggcttaaatkcaagtagggcccaaacatctgatgtcactttgttaaagggagtgttgagtgagcacagtcgacgctcccagaattgtggagaggatggctgcagcagaaa

SEQ ID NO: 232146 - DNA, 201 bp, Homo sapiens
gcgcgtggggactgtgcctgtggcttcatccctgcgtggactcagtcctccccttgttttaagtggtccctgggtcctttgtgcacatcagtaattgcagrggcgggacgcgcactctctgagcggagcagcttggctgggcttgtccctttaatttgcgatgcatcacaacaaatgattgtaatcagtcaccgcccgacg

SEQ ID NO: 232147 - DNA, 201 bp, Homo sapiens
taaatgcaagtagggcccaaacatctgatgtcactttgttaaagggagtgttgagtgagcacagtcgacgctcccagaattgtggagaggatggctgcagsagaaagctgtcagtcaaggcccatgaaccaagaggagtgctagagaccaccacctgcaggtgggatttggaaaaggggaaagaagtgtgggcgctcagcc

SEQ ID NO: 232148 - DNA, 201 bp, Homo sapiens
agaaaagtgaacagcctcaccgcgtggtcagctcgtggctgctgagcacagcccggtgtcagagagcaggactgagagtcagcttcatggagggcgcggcrggaacagcgccagcccccagcacccagcaaccatcactcaccactcacagggcccctggcattcacaccctggcctaggtttgggaaccttccagccaga

SEQ ID NO: 232149 - DNA, 201 bp, Homo sapiens
cacatcactgtctgccaaattccgcatgtgagagaaggctggaaggaccacactgttacaggagaggctctttgcctccacacggcctgattgctcagggrttttgttagggtttcaaatgtggagagcagaaaacactcaggcacctagagctgggcggtctctgcagagcagggacacaaggtgcccttggcgggtgtg

SEQ ID NO: 232150 - DNA, 201 bp, Homo sapiens
tcccatactggatccttcaccctttcttacagcggatagggacgctggactgaggcaggttctgtgcccggaacctcagtgatggcaaagtcgctgttccrtgcaccaggagatgacagggaggggcctccataggttgggtttcagagactttccatcagactatatttgtattaaagaaagcgcatttttattcatgag

SEQ ID NO: 232151 - DNA, 201 bp, Homo sapiens
gcggatagggacgctggactgaggcaggttctgtgcccggaacctcagtgatggcaaagtcgctgttccgtgcaccaggagatgacagggaggggcctccrtaggttgggtttcagagactttccatcagactatatttgtattaaagaaagcgcatttttattcatgagccatatttgtatgaatgttcaaatgcctgtt

SEQ ID NO: 232152 - DNA, 201 bp, Homo sapiens
gagagggctctgtagacatcgggcacgcatgatggagtgagagagggctctgtagacatcgggcacgcatgatggagtgagagagggctctgtaaacatcrggcacacatgatggagtcagagagggctctgtaaacatcgggcacagaagatgtaatgagagagggctctgtaaacatcggccacacatgatgtagtgag

SEQ ID NO: 232153 - DNA, 201 bp, Homo sapiens
aggagttttgagaccagccagggcaacatagcaagacctcgtctctgcaaaaccagaaccagaaagtatacactcctacgctccttgaaggcagggcctcrgtctgtattgctcaatcatgcgtcatcagtgactagagtgtttctggcccataacaggggcttatttgttgaatgagtgaatgaatgattccacgaaaga

SEQ ID NO: 232154 - DNA, 201 bp, Homo sapiens
aagtcccagctatttatcattgtttttgttgcatttgctattgggttctttgtcatgaagtctttgcctaagccaatgtctggaagagtttttccaatgcyatttcctagaaattttatggtttcaggtcttagatttaagtccttgatccatcttgagttgatttttggataaggggagagatgaggatccagttttatt

SEQ ID NO: 232155 - DNA, 201 bp, Homo sapiens
gacatcattcactcactgtccccttcacataggggtgacgtcattcactcactgactctttacacgggtgacatcattcactcactggctccctcacacckgggtaacgtcattcactcactgacgcttcacacaggggtgatatcattcactcagtgactcatcacacaggggtgacgtcattcactcactgtctccctc

SEQ ID NO: 232156 - DNA, 201 bp, Homo sapiens
ggtatttatccaaaggaagtaaaatcagcatgttgaagagagatctgcaccctcatgtttactgcagcactgtccacaatggccatgacatagaatcaacstaaatgtccatcgacagatggatggataaagacacagtgggatactattcagtcttaaaaaggaaggaattctgtgatttccagcatcatggatggaatt

SEQ ID NO: 232157 - DNA, 201 bp, Homo sapiens
gacatttgggttggttccaagtctttactattgtgaatagtgccacaataaacatatgtgtgcatgtgtccttagggtagcatgatttatagtcctttttyttagttcacatatatattgttttttcttcgctgctaaagagtatgaattgggaagagaaaagaaaacaggtttcatccacaccctggtgggagtggcccc

SEQ ID NO: 232158 - DNA, 201 bp, Homo sapiens
gctgaggctctcacctcttttctccaagagcccgtttgtgaaaactaagatgtggccaggaacaaaggagagcaggaaggacagaacttgcgtttagcccrttttctattctgggaatgcgacgcgtgatgatttatccgtgcatctgtgttgtcatccgtgttcttgcagggcctggttccagcagccaggctggtggct

SEQ ID NO: 232159 - DNA, 201 bp, Homo sapiens
tttatgtacagcaggtgtgtcgtgtttcattctgtgaggaatcactcactgaagtgtggtgtggcctcagtggccgcacctgcctcctgccgagggcttcrgggcccaggtgtggcccttcggacgcctgtttcccttcagcttctcttcgcagactttgaggcccaggcactgccctgcctgcatctggagcccttctcc

SEQ ID NO: 232160 - DNA, 201 bp, Homo sapiens
gacctgcagagtgaagccgacacaggggagaggtggctacatcctggggtcaggggaatcctccgaaagtattttctgtggggagaaggctgctgtggagytggggttctccagagaaacagactcagcagggggtttgtatgtgtgtataaatagagatgtgtgtgtataaatagatatatgtgtgtgtaaatagagata

SEQ ID NO: 232161 - DNA, 201 bp, Homo sapiens
tctgccttacacggccacaccgtgcagatctcagctctgtcttggcttgctttttttgccaataatggatttcattttctactgtggggtttttttttttyctaacacactaatggctctggaatactttcttctcaagaatagaggcacattataatcattgatattttactatggagatgacctgcaaaaccgtgccct

SEQ ID NO: 232162 - DNA, 201 bp, Homo sapiens
ctaggcaggctttgccagccaaaggtgggtggaacatttcttgcatcaacatcagaataagctcgatcatgaacgatggttgaggaagggagctggggccrtggcttgactttcccatgggaccgtgcaggacagagcagatgaattctcatcagatggcactgcgtatgcttggtgactgtgagctttcatttccggaca

SEQ ID NO: 232163 - DNA, 201 bp, Homo sapiens
aagaatgagcttagaattagggtaggaaacacgagaatgagccccagagagggcatgctgggcacagaagccactccactggctgcacagctacccctgcygggctgtccatgtgtgttgtgctgggcacaggtcccaccaaggctcaccaggatctaggtcttgccctggggtgggcaacctgtgggggggggggtccgc

SEQ ID NO: 232164 - DNA, 201 bp, Homo sapiens
aagggagctggggccgtggcttgactttcccatgggaccgtgcaggacagagcagatgaattctcatcagatggcactgcgtatgcttggtgactgtgagytttcatttccggacagctggatgaccctcctgtgctgacggcacacagcccccgtagcaggaacatgtagatagagtcccatcctggagctggatgaccc

SEQ ID NO: 232165 - DNA, 201 bp, Homo sapiens
accaccgcctttccccgacacttcttcctcgccacctggggtcttcccgtcacacgtcaggggctcctcctcagccccatttcaaccctgaccacgttcayattttgaaatcagcctctcatttacagctttcctgtaggcaaaataaaatgctaatagatttcatttctgattcttatcactctgatttatctctcagta

SEQ ID NO: 232166 - DNA, 201 bp, Homo sapiens
taaaataagagtgaaccagactttcattgccatcacttaacacgctgtatgctattaatattttagaattgtggtcaagtgaacctgggggaggagaagcrtgggacttctagtttatagctcccaccctggaacctgccaggtgccccaagacacccctctgtgggcctcgtgctatctctgcaggaaggttccggaaaa

SEQ ID NO: 232167 - DNA, 201 bp, Homo sapiens
tcacaggggttgcaaatggtgctactgaacagactgtcctggggctcacgtcactaggcacaaggggatgggtgacgagcagattgcagatacgcaggackgttcagacagactctgtggtgtctttgtaaatatgaatccattcatccttttctagctctttaggccaacaggcagttggcctttccaggccccggctca

SEQ ID NO: 232168 - DNA, 201 bp, Homo sapiens
ccatcacaggggttgcaaatggtgctactgaacagactgtcctggggctcacgtcactaggcacaaggggatgggtgacgagcagattgcagatacgcagsactgttcagacagactctgtggtgtctttgtaaatatgaatccattcatccttttctagctctttaggccaacaggcagttggcctttccaggccccggc

SEQ ID NO: 232169 - DNA, 201 bp, Homo sapiens
gcaagctgcacattcatcttccgtaaagagcattttgagcatgagtttactgctgattagagtgccactgtatttttttatatagtcgtgaattctactcrtaaaatctagatcctgcaatgtgctgaccaccgcctttccccgacacttcttcctcgccacctggggtcttcccgtcacacgtcaggggctcctcctcag

SEQ ID NO: 232170 - DNA, 201 bp, Homo sapiens
tctgtgcaagctgcacacgggtacagtcaacatggtgcatgcacaggacccccagatgtcgctgaggacttctcgagccagagggctcaccccgtgggtcyggtggttcctggcactggacggctcaccctgtggtcaggtggttcctggcactggacagctcaccctgtggtcaggtggctcctggaactggatagctca

SEQ ID NO: 232171 - DNA, 201 bp, Homo sapiens
gcccaggccttcagctgcctggagggtgcaggctggggatggggctggggcctggacggcttctacagagaagtgggaatgtagaatctccttcagagagygtgtggccgtctcaccacccgccaaggccagtccctcctgttccctttcctgcagagacacgtgctgcacaccacctcctgtgtgtggggcttgcacact

SEQ ID NO: 232172 - DNA, 201 bp, Homo sapiens
ggatgtgagcccggctcagcattctagataggtctcccagctgcaaggaattccatgcatcacaaacatgatggtaccctcccctgtgttccttggaattrcttttctccaccaaattacctgtgatccagcacaaatatagagtatgtttggcaaaaagaggtagcttaatcagcagtgaagagatgtgcctggatagaa

SEQ ID NO: 232173 - DNA, 201 bp, Homo sapiens
cataaagaaatacagttggagaaaacagtgacaccatcttcgttcctgaattggtgactccaaacggcttgcccttggaggtcacttttatagggggttaygcaaataaaactgagtggcgttgttaaaattctccactactggacctttttagccaaagtgggcatttcgggagtcggcaacacagacagaccctgtctt

SEQ ID NO: 232174 - DNA, 201 bp, Homo sapiens
cccagagctgggtgcaaactgttccacacccctgggctaatgaagggatgggaatgcagagcccaggcaaaccccgcagggtgtccgccctagcaccctgyggggctgagctgcggtgccgccttgccctctttgtctttctcttctgagctgtgccctgccacttaaaaccacaatggttgggagttgtctgaagaagag

SEQ ID NO: 232175 - DNA, 201 bp, Homo sapiens
actgtgaatgttcttaccttaaaccagccgtccctaggcttttctcatcaaacagccataaacaacagtgtactaaatgccagcacgtaggaagaataaartctcatccaaacacaagagaaacacatcctagtttcagcagcacacgaatggcctggggcagtgtcccagcagctgacatcctgatgagaaaacgcacct

SEQ ID NO: 232176 - DNA, 201 bp, Homo sapiens
tttcttttgttcttcaagcatttttatgacaattgttttaaagtctttgcctagtacatctgccatcaggtctttttttagagacaattattgttgacttacctttttcctttgaatgggctgtagtttcttgtttctttgtttcttgtttcttgcaattttttgttgaaaactagaaattttaatctaactctggaaatc

SEQ ID NO: 232177 - DNA, 201 bp, Homo sapiens
acagtgacatgaggttttcctggaaataaggaatgtcaaggaaatgtcacagtacgtcaaaactccccgtcccgtctttaagatgagacaacaagggaagrccactgtggatttgcaaataataattctgtttgagtgaaaggtggcatttctcaggttaagtgaatcccatgatttgattaaagatatttgtgtttaaaa

SEQ ID NO: 232178 - DNA, 201 bp, Homo sapiens; identical to SEQ ID NO: 42946

SEQ ID NO: 232179 - DNA, 201 bp, Homo sapiens
actgagggtgccccacccacaggcttacgtgaggactcagtgtgttcatgcagataacgcatttagtacagtgcctttgtgtgctggaagagctcagtcgwtgcaaatttgttattattattattattatttagtgttcattgcttctagagggctggggtgggatcttgatatcacacagtttatttttaaaaatatcaa

SEQ ID NO: 232180 - DNA, 201 bp, Homo sapiens
ctcattgcacacaccagagatcagtgtcccacaggctgagcgtgcaagccaggctgtgtactcattgcacccaccagagatcagtgtcccacaggctgagygtgcaagccagggctcgtactcatcacacccacctgagatcagtgccgcatgggccaagtgtgcaagtcaggctgtgtacttgttgcacccacctgagat

SEQ ID NO: 232181 - DNA, 201 bp, Homo sapiens
ctcgttgcacccacctgagatcagtgtcccacgggccgagtgtgcaagccaggctgtgtactcgttgcacccacctgagatcagtgtcccacgggccgagygtgcaagccaggctgtgtactcattgcacacaccagagatcagtgtcccacaggctgagcgtgcaagccaggctgtgtactcattgcacccaccagagat

SEQ ID NO: 232182 - DNA, 201 bp, Homo sapiens
tgtactcgttgcacccacctgagatcagtgtcccacgggccgagtgtgcaagccaggctgtgtactcgttgcacccacctgagatcagtgtcccacgggcygagtgtgcaagccaggctgtgtactcattgcacacaccagagatcagtgtcccacaggctgagcgtgcaagccaggctgtgtactcattgcacccaccag

SEQ ID NO: 232183 - DNA, 201 bp, Homo sapiens
cccctgtggcgagtgcttaggtgggtgatcgggccgtgtggagtcgtgttcatcatggaggatgtggaagcaccttcccattcatctcccagggtggcagrttgctaacaccttcccattcatctcctagggtagcagatttgctaaaaccctggagagctgcattaacacttgaaaccaccacagcaagagctgggagtc

SEQ ID NO: 232184 - DNA, 201 bp, Homo sapiens
gctgtgtactcgttgcacccacctgagatcagtgtcccacgggccgagtgtgcaagccaggctgtgtactcgttgcacccacctgagatcagtgtcccacrggccgagtgtgcaagccaggctgtgtactcattgcacacaccagagatcagtgtcccacaggctgagcgtgcaagccaggctgtgtactcattgcaccca

SEQ ID NO: 232185 - DNA, 201 bp, Homo sapiens
catcatggaggatgtggaagcaccttcccattcatctcccagggtggcaggttgctaacaccttcccattcatctcctagggtagcagatttgctaaaacyctggagagctgcattaacacttgaaaccaccacagcaagagctgggagtcgatgcagtaggagcctgtgaagggctgggctttctgttttttgttgcctg

SEQ ID NO: 232186 - DNA, 201 bp, Homo sapiens
ccctgaaaatggtcaaggttctcaacaggaagtaaccatccaaacagtggcattttcaagccaaggactcaagtgaaaaggattccttcagtgtgatcacrctttccggagcatagtggctctcatatgccaaagggtttaaaatactaatgacgttattacgtaattctgtaaaaaagtcattaacatcacaaactggcc

SEQ ID NO: 232187 - DNA, 201 bp, Homo sapiens
taatcccatctacttgggaggccgaggcaggagaatcacttgaccccaggaggcagtggttgcactgagctgagatcacgctactgcactccagcctgggsgacagagtgagagtccatctcgaaagaaaacaaaaacaaaacaaaagcccacacacctggtctttctgctgtggcaggctgtcctggtcgtattcgaggt

SEQ ID NO: 232188 - DNA, 201 bp, Homo sapiens
tttttgagatagagtcttactctgtcacccaggctggaatgcagtggtgtgatcttggctcactgcaacctttgcctcctgggttcaagccattctcctgmctcaacctcctgggtagctgggattacaggcacctgccatcatgcccggctaattttgtattttttgtagagatagggttttgccatgttggccaggctg

SEQ ID NO: 232189 - DNA, 201 bp, Homo sapiens
aaagactcaatgtgtttacgtgtttgttcaaaaagatgttctcccaccccccacaggggtccccccagacccggccaagagacccaacgctgagacccaaygccgagagcctcgtgtgtcctctggggtcgccctgggtgccagctccacctgattcatcctagagagagtgtggagctgaggccgcccgcagcaggattc

SEQ ID NO: 232190 - DNA, 201 bp, Homo sapiens
cctttcccgacctggaatcacctttcctggcctgtaaaacgcaccctgaaaccagagatcggatgttcctgagtgggaggaaatacaatgcagatttttttgcaaaacaaaatactaaattggatggaaactggagctggtgtgtgagtttcagaattatttctgtccccatcccagggatttcttattctctaccagatt

SEQ ID NO: 232191 - DNA, 201 bp, Homo sapiens
aaaatttaaatttaaattttatttatttattaattctttttttgagatagagtcttactctgtcacccaggctggaatgcagtggtgtgatcttggctcaytgcaacctttgcctcctgggttcaagccattctcctgcctcaacctcctgggtagctgggattacaggcacctgccatcatgcccggctaattttgtatt

SEQ ID NO: 232192 - DNA, 201 bp, Homo sapiens
tacgccaagacattggacaatctggaagaaatggagcccttcctagacacatacaacctaccaagactgaatcatgaagaaacagaaaaacagactgtaaygagtaaggagattgaatcagtaataaaatgtctcagccaaaataatgcccacgaacggatgttttcattgctgaatcctaccagacacttccagaagaac

SEQ ID NO: 232193 - DNA, 201 bp, Homo sapiens
ttttcttgcctaattcctgtggctggcacctccaatactgtcttgaataacagtggtgaaagcaggcctcctcatattgttcctagtcttaaaggaaaagycttccatcttttaccctggagtgttacattagctgcagatttttcatatatggcctttattatgttgaggtgattttctgttactcctagttcgttgagc

SEQ ID NO: 232194 - DNA, 201 bp, Homo sapiens
tgcgggcccctggagcccgttcgtcccaggcaggggctctggattctggatcccgttcgtcccaggcgagggctctggattctggagcccgttcgtcccargcgggtgctctggattctggagcccattcatcccaggcagtgggggctctggattctggagcccgtttgtcccaggcagtgggggctctggattctggag

SEQ ID NO: 232195 - DNA, 201 bp, Homo sapiens
ctttggagaaatgtctattccaatccttgcttctttgttgttgggtgtaggagtcttacatatgttctagatactcctaatcagatatgtaattttcaaaygttttctctcattctttgggttactttttaactgtttagataatgttttttaatacacagaaggttttaattttgataaagtgcaataaagtgcaatttg

SEQ ID NO: 232196 - DNA, 201 bp, Homo sapiens
cccctggagcccgttcgtcccaggcaggggctctggattctggatcccgttcgtcccaggcgagggctctggattctggagcccgttcgtcccaggcgggkgctctggattctggagcccattcatcccaggcagtgggggctctggattctggagcccgtttgtcccaggcagtgggggctctggattctggagcccatt

SEQ ID NO: 232197 - DNA, 201 bp, Homo sapiens
gcagaagggagggactgtctctgactgcaggtccacctgaggccaggagactgcccggctcagcctgcaggcttgcatctgacttgcaccgtggctgtcaragctgagagtgtgcatctgctgagcacgtctgtgctgggcgctgcgctggctgagtgtctgccgtgtggacttgcttctctgcatgctgccttgcgaggt

SEQ ID NO: 232198 - DNA, 201 bp, Homo sapiens
gagcacctgggacagtgtgtgggtctaatgagcattgcttccacgatgctttctatttgcctgcagatgaccttgggtacttgtgtgctggtgtttctcartgtgtgtcctgagctcttggggagttcatagggcaaaggtggcaagtatattgtgcagttatccctaaattattatttccaacagtgtggccccagtgtc

SEQ ID NO: 232199 - DNA, 201 bp, Homo sapiens
ttaaaattggcttaaatgaggagggaacaacctgaccgtcttttgatggtgcagcttttaaccctaaaagaatgtcaaacgaattcatttttgtatataaktacaaattacttattagtcacaattgccatagcgactgaaggtttgtgtccgcctaccccacgcctccagttcctacatggaaatcctcacccaaggcca

SEQ ID NO: 232200 - DNA, 201 bp, Homo sapiens
cccatgactgcccacagtggctctatccagaacagccccaaactgtcaccacccagatgtggtcaacaagcccaccttcccctatccctgtttctggaggrgggccacctagagagattgtgcagagatagcacagcttccctcacagccctctgcttagccatgccacctggaggagcaggtgtggaggcacacagcgat

SEQ ID NO: 232201 - DNA, 201 bp, Homo sapiens
agcaagtccagcccagggcagccacaccaaggctccggtgtcaccctgtgatggccgcggcaccctgtcctctctctcctgtgcccccacagatgttgccrtctcctgcctctcgtgtcttccccacgtgtgtcctttgccaatgctccctgcagtttcccttgtctggcctgtgctgcgtggagggtgcacctctgaaca

SEQ ID NO: 232202 - DNA, 201 bp, Homo sapiens
gcaagatgaattacaagggtgtgttattaaatctgtgatagaggcacaggcagaggaagaggtggtgaactttctctaggattatttcagctgactttackgggtaaatgggatttcagctgcttccaaaaatggtgcagatttgccaggcagatggaagtcatgtgatggagtggtgcctcgtgcgtgcagggacaagcc

SEQ ID NO: 232203 - DNA, 201 bp, Homo sapiens
agtcacctgatggcaccctgtggtcattttcacgttgtaggaggaaaaatcgttttaaaattggcttaaatgaggagggaacaacctgaccgtcttttgayggtgcagcttttaaccctaaaagaatgtcaaacgaattcatttttgtatataagtacaaattacttattagtcacaattgccatagcgactgaaggtttg

SEQ ID NO: 232204 - DNA, 201 bp, Homo sapiens
aaccataaagaacaaccacttcatgtcactagattggctaaaattaaaaaaaaatccataaaaccaactcttgatgaggacatagaaattctcaaattagsgggaatgcaatgcaagctgttataacctgtatttggaagctgcttaaaggctaaagatacgtctgtccttggactcagcagttcccctctggatgtctat

SEQ ID NO: 232205 - DNA, 201 bp, Homo sapiens
gagtgcccgtggtctctgaagccctgctctcgtggtgtggagtgcccgtggtctctgaagccctgctctcgtggtgtggagttcccgtggtctctgaagcyctgctctcgtggtgtggagtgcccgtggtctctgaagctctgctctcgtggtgtggagttcccgtggtctctgaagccctgctctcgtggtgtggagttc

SEQ ID NO: 232206 - DNA, 201 bp, Homo sapiens
cttcctctgagtgacaaggacactcagcgtgcacagccacaccaggtggctcccaagccctggcatctatctccataggggtgggatggcccttaaggaakccattgccgtccacagctgcaaagaaatgaggttgtggaaatggcaagtgagtgataagtgtgtctgcatcccgggcggctcttccctcgccagatcttt

SEQ ID NO: 232207 - DNA, 201 bp, Homo sapiens
gctcatagatccaaatcagaaatttaaatgcttggttggtgttacctcgtgtgctgtttccaacaaagctcaaagattgatctctttatcatgtgctatayacccagaaagagctgcgcccaggcaggaaggaggtttggaactcccaggataagctttgctttttggccagaatttaaatgtgtccttatactcagcttg

SEQ ID NO: 232208 - DNA, 201 bp, Homo sapiens
ttatttgtgtgtctgtgggttcactctctagatgtctctgtagcacctacaatgtctgaggcctgaagtaggtgctgagctggtggatgggtgagcagagraaggaaaggacggacctggaggatcctggccccccaggatctcgtggtagtggaggaaaatgaactccgtcctcccgtgttgaggctttaccttgtgctg

SEQ ID NO: 232209 - DNA, 201 bp, Homo sapiens
agggtcgtcagggacaggactgcccagcttgaatagttccagccgctccggggccaggggctgcccgtgtctggtccttgccccagggtgactagggcagyggcctggagtctgagcccacagaggcggaggcgggcgtgggctccggatcgcagggtttgcatgtggaaagcctgcgtggagtgggtgactgttcactat

SEQ ID NO: 232210 - DNA, 201 bp, Homo sapiens
aagtgtgcatagtcacctgatggcaccctgtggtcattttcacgttgtaggaggaaaaatcgttttaaaattggcttaaatgaggagggaacaacctgacygtcttttgatggtgcagcttttaaccctaaaagaatgtcaaacgaattcatttttgtatataagtacaaattacttattagtcacaattgccatagcgac

SEQ ID NO: 232211 - DNA, 201 bp, Homo sapiens
ttgtctggattctctctaaatgtaggacgctgccaatactgagtcttgtgagtccggtgcacacttggattgcacctgtgcacgacacacattggacacawaaacacacaggcaaacaagtgtgtgtgtaaacgcgcttgagagaattgaagagcatcagtccatgttggaaaatccaacgacatcgaatatagctatgaa

SEQ ID NO: 232212 - DNA, 201 bp, Homo sapiens
tggaccagttccacttggcttgagatgggcttcactctagaccctcctctgccagctcagcacgaagtgtgcatagtcacctgatggcaccctgtggtcaytttcacgttgtaggaggaaaaatcgttttaaaattggcttaaatgaggagggaacaacctgaccgtcttttgatggtgcagcttttaaccctaaaagaat

SEQ ID NO: 232213 - DNA, 201 bp, Homo sapiens
gcatgggggtggggcaggaaaaagaggaagaagaagtaaacaaaaactctcccaaacctcagcatccccgacagtccagcccatcctgctgggagcggccrtgggaagtacgcgaggcaggggggtggccgtgggagggacgcgaggcagggggcggctgtgggagggacttgaggcagggaggtggccctgggagggact

SEQ ID NO: 232214 - DNA, 201 bp, Homo sapiens
aacagcagtgacattgcatggttctgggaaacccagttttgggggtggagaaagaagagtctttggttagtcattctctcctcagattctcttactggttwgtggttccatgcctgttggcaagtgcaggaagaaaacatcagcagttctggttttgaatatccatcagaaatgatgggacctgctgtctgagctgtggag

SEQ ID NO: 232215 - DNA, 201 bp, Homo sapiens
gtcttccagaacagacattcagctctgtttttacattttagaaaacccaggaagactgggaaaatattaaaggccacagtggtccagtttatcagcaagtrgtgttttattcatcattcttgtccctggtttgtcaaattaaacacattatctgtggaccttcagcagatactgcagatttatcactcgaggatattattc

SEQ ID NO: 232216 - DNA, 201 bp, Homo sapiens
aaatcttttttgacagactctcatatttttgacacttaccaggatatcaaccccatcagataatccagccaagtttaatttgctcagactggagcaaaaawtgggtgtattaactttcagaataactgaaatatattcttaaaggtcatttgtttaacagactactcgcaccaaacttctccccattgttttagtaaatgt

SEQ ID NO: 232217 - DNA, 201 bp, Homo sapiens
aagcaggtattaattcattaacgtatccatatctcacttgggttttctatcacagccatgagtcccctgtgaagtgtaaaaatctgtttgaaaagttttttaaaatattgcaaacataaaacaaatttcaggaaaggtgtcttctcgcattaatgtatttatttctggctcactgaacctgtgtactttgctgattctata

SEQ ID NO: 232218 - DNA, 201 bp, Homo sapiens
gagacagtgcatgtgcacatgcgtgaaatgatgagcagtccgtagcactcacatgttctgaaggtgagggactcagcattcgacctcaaacaaatgaaagkccccgagcccaccgctgagccagccagggttcctcgatggggagagagtgtgcaggagagggtgagggtgccctcgcggccgctgaccaggggctcctgg

SEQ ID NO: 232219 - DNA, 201 bp, Homo sapiens
caaagggtttaaaatactaatgacgttattacgtaattctgtaaaaaagtcattaacatcacaaactggccgtagttgtttgctgctactgtgtgcctctytgagacatatgtgtgcgtgaagacacctgagcaggtgggctcttgttggggtttccataaactctcacactgagactcttctgcaattgaacacaaaccc

SEQ ID NO: 232220 - DNA, 201 bp, Homo sapiens
aaaagtcattaacatcacaaactggccgtagttgtttgctgctactgtgtgcctctttgagacatatgtgtgcgtgaagacacctgagcaggtgggctctwgttggggtttccataaactctcacactgagactcttctgcaattgaacacaaacccacacctttctttcctgaccacttaaagttcttttgtccttctgt

SEQ ID NO: 232221 - DNA, 201 bp, Homo sapiens
ccacctctccttctgccggcggcacctccccgatggccctcacacctatgaggccctggtttcacctcactctgcagtctggtgaaagggatctggcagaygcgactgtctccatcctgagggcttatcccggcagtggcgctgagacctcccctcacctggtgctccgagatttgactctgtgaggttggctcctgcctg

SEQ ID NO: 232222 - DNA, 201 bp, Homo sapiens
aaaatgcctgtcctcgcctaggcccatgggaaaggtccaggggtagagcccttgccagagacccgcccttctccacccagcacttccctgcccatctcccrtatcagaagcaatccaaactcatctttctgtttatttaactaagcaaccatctcagacaaggtgcctgatgatgtgaaaatgaaaagtgagaaaatgagg

SEQ ID NO: 232223 - DNA, 201 bp, Homo sapiens
gacatccagcccttgtgtctttgcccgctagggtcttggggagctgcttgtgtctctgcctgctagggtctcagggtttttataggcacaggatagaggcrtggtggaccagggtggtcttgggaaatgcaacatttgggcacaaaaacaaaaatgcctgtcctcgcctaggcccatgggaaaggtccaggggtagagccc

SEQ ID NO: 232224 - DNA, 201 bp, Homo sapiens
tggaagtaactctcagcaggagccagagggagatggactgggaaggcagttttcccctggagtcgggccgctcagcagccaggctctcctccaactacctmgtctgctggtgcctgtcagtgagttcttctgccggtgtgctcctcttgacatccagcccttgtgtctttgcccgctagggtcttggggagctgcttgtgt

SEQ ID NO: 232225 - DNA, 201 bp, Homo sapiens
tcttccatgaataaaatgggactaacactctctgaagcttgttttatataccaacaatatgaatggctttcttcttattcctgtcttaaatttttatccasctgttttaaggtttacacattgcaagcttaatgacattttaatcctgtatggtaaattagtataatgcattttgttaaaattttcatagaataatggaga

SEQ ID NO: 232226 - DNA, 201 bp, Homo sapiens
ctccccttcgtcccacagccctgggtcttgtcttccttgtggctggagttgcagctacagcacagagctcttcccctttacattctgagctgtttggaggyccatggccactttcatattccctgatgctcaataaatgatgaatgagtgaaacgagagtcccaaaccgtgggactgtcagcagagtctgcatgcaccggg

SEQ ID NO: 232227 - DNA, 201 bp, Homo sapiens
gccaggggtctttcaatgagaatgggcgtgactctttcagaacttcccctgagcgtaatttcagcccggctctaggtatgtatgtagctatcaccatgtgytggcaactggcactgaacatcatcacgtttctgtgctatcctgtgctgagatgtggcgggggcagcgtgccggagttcacctgagctcccttgtcatggg

SEQ ID NO: 232228 - DNA, 201 bp, Homo sapiens
agtgtctaatacaaaactgagctggtagagccctggccctgtgggaaacaaatgtcttttacctttccctgtgtgttcctggaactgagcctctgcaactyccttgccagggccaccaatttccccaggccagcccagtgatgtttttcctggactcatcctctcacctgcattttcttggtggctgtgttaagtccctgc

SEQ ID NO: 232229 - DNA, 201 bp, Homo sapiens
ttatggacagagtgtggatgtgagtgatgtctgcaggtgtcacatcttatggtgagagtgtggatgtgagtgacatctgcaggtgtcggctcttatggtgrgagtatgggtgtgagtgacctctgtgggcctcagctcttatggtgagagtgtgggtgtgagtgacgtctgcagatgtcacctcttatcgttagagtgtgg

SEQ ID NO: 232230 - DNA, 201 bp, Homo sapiens
ctttctcctgtgcaagctccaggcctgttcaggagcttttctgcttgggcctttctccaccatgcacagcccaatctgtctaagccaaactcccaggtgcycaaggtttctgctcccaccaggactcaactccagcttcaggctcagccacccccattcagaccctgtccacagcttccttccaagcatctcgcctcctcc

SEQ ID NO: 232231 - DNA, 201 bp, Homo sapiens
ggggcctgagtcctctctccccttcgtcccacagccctgggtcttgtcttccttgtggctggagttgcagctacagcacagagctcttcccctttacattmtgagctgtttggaggtccatggccactttcatattccctgatgctcaataaatgatgaatgagtgaaacgagagtcccaaaccgtgggactgtcagcaga

SEQ ID NO: 232232 - DNA, 201 bp, Homo sapiens
tcagtaagaaattatttttgctttagacaaaaaacagaattgtgaaagtctttatcatcctttcccagagcatagcaacgtatactgagctaaatatattkttccatattatcttattttgtactcaaaactatgtggtaattactaatgtcatacaaacgatgtggtaatgtcatacataccatggactaatgtcatacc

SEQ ID NO: 232233 - DNA, 201 bp, Homo sapiens
tgattctctgggtgtgtcagacaaggacctggcctccctgttatgtgctggaggtcagggaggtcaggagcagggctggcacctctaactcccatcccccscttgtgtgcctggtggtcctgcccggctgagagcctttctcttagactctgccgcagccgtgatgccagacaggagaagccagggagggcatgggctgct

SEQ ID NO: 232234 - DNA, 201 bp, Homo sapiens
gtcctccagtcctcaggcagcttcagttatgcacatccaggctcagtcgcctggaaaatgagactggcccaggtagatctggtggatctgccagtttattrgaagaaaaggctcatgtatttatttaagtcctcccagcattagtgcttgacacatatttaaagcacttggctaaaaaacagattggaactgtggttgggt

SEQ ID NO: 232235 - DNA, 201 bp, Homo sapiens
tcggtgtgtacctgcctgcaggtgtgcccacaggtgtgtgcccacaggtgtgtgcccgcaggtgggtgcctgcctgcaagtatgtgcccataggtatgtamctgcctgcaggtgtgcatccacaagtgtgcccctgcaggtgtgtgcctgcaggtatgtgctcgtgtctgtgtcaggggcctctggggaccactctgagcc

SEQ ID NO: 232236 - DNA, 201 bp, Homo sapiens
tcaaaatatactatgaaactataataaccaaaacaacgtggtactggcaacaacaaaacaaaatagacacatcaactaatggaacagaatagagagccagraaatgaatccatgcatttatgctcaattcattttcagcaaaagtggcaagaacacataatgggaaaaggacagtgtcttcaataaatggtgccagaaaaa

SEQ ID NO: 232237 - DNA, 201 bp, Homo sapiens
tgctgtctggaagcagacgcaggtgcagaattgaggagttgcttctctcaggggatctgtgatgggcctgcggtgctttcccaggttttgccttcagagargttgaaatggcttaaaaattactggtaagccctcccctggctgctgatgagacctagaaatatctcccacccagggggatgtgagcccggctcagcattc

SEQ ID NO: 232238 - DNA, 201 bp, Homo sapiens
tctctttagaaatatgcaaaggctacgtattattggaaatcacaccaatttgggggttttctcagatgcactatttgagactctcctgacctccacgtatkaagacccagagctgggtgcaaactgttccacacccctgggctaatgaagggatgggaatgcagagcccaggcaaaccccgcagggtgtccgccctagcac

SEQ ID NO: 232239 - DNA, 201 bp, Homo sapiens
atctgcaaggatgaccctggagatgtgccaaatagagaagtcagtgtttcaggtctgaggagcccagccccagccggcacctgctgagtggtcgcagacaygcggctccagcgttcaagccttgttagatcccctggaaaaacagaaggaggctggttcacatccattcacacaaccccgagacccagaaactcttgaaaa

SEQ ID NO: 232240 - DNA, 201 bp, Homo sapiens
tgtgtgaagtgggggcctagaccctgccaccttcctttaaggggcttttccggcagcagttactttcttggacgaggctttgaccctgtgtggctgtgtttagatgtaattagagttggtccatgctgggcagggtgtgctgggcagggtgtgctgggcagggtgtgctgggcagggtgtcctgggcagggcgctgtcctt

SEQ ID NO: 232241 - DNA, 201 bp, Homo sapiens
gtaatttcgaggagcagaaaggtgccctctggcagtgcagaggggagagagacggggcgcaggcagacacatctccccgggtcccaccctgaggtggccgmcaggctcagttgactcctttaataataggttctaacacgtacactaagaggccgcgtggccacactaccaaaggcaggtagagtccagcagaccattccg

SEQ ID NO: 232242 - DNA, 201 bp, Homo sapiens
tgccacaggaagaggacggtccaccatcccagagcccccgtgggcactgctgctccggaggcagtcagaagaagggcccagtcgcaggcgatgtccacgarctagacactggccttccctgttaagtcttttagcctcttagtttctctccctttaagaacctttggtcgtgaatacaaggccgaaggatgaagaaccgtt

SEQ ID NO: 232243 - DNA, 201 bp, Homo sapiens
cagcagacgccgtccccagcctcactgccagacatcacaccgcagcagacactgtccccactggtcctccagaccaggggtccccaacccctggggaggcraaggagccctgcgcctctgtggggtctgagcatgctagagagagaagctgggcaaacagatggggtggacgcagcccccacgcagactctgattctgtgt

SEQ ID NO: 232244 - DNA, 201 bp, Homo sapiens
gactgctccccatccctgctgtcatccgcagccccctgcgccccgaggaaggaaggcggctggtggaggacgtcgcccgcctcctgcaggtgcccagcagygcgttcgctgacgtggagtaagtacggggccctggggtttctgtttggctcctgttgctcggtcgcagagactgggtgggagggaaggagctgcgagccc

SEQ ID NO: 232245 - DNA, 201 bp, Homo sapiens
acgggtcctggctgggatggcatccggggagctgctgctggggacgtgcttgccggcacaggtcaggggagccgggttctgcctcctccttgcccactctmtttgcgccctccctgtgctcgcctgtcttgttttacctcccatcctgggcccttggagcttggaggctttccttcttgctgagaggagctgagatccacc

SEQ ID NO: 232246 - DNA, 201 bp, Homo sapiens
taaatttaaagacagtttgcactctatcaacaccttgtcttattacagttgtaatccatgagaaagcaagttaagaatgagaagtcatgggcaaaagtaaytacacaatttcctcatgtggtataaaatggtacaaattgaaaatcccatcagcttcacagcccttgaccgaccaaaatgacatcccccaatgaatgctgg

SEQ ID NO: 232247 - DNA, 201 bp, Homo sapiens
ccctaccaagtcctggaactgatttagggagcagtggagaatataaagtaggagaagcagtagaaagagccctgtgtgcattcccagtctccagcatggaytggggaagccattctgcctcacaggggaccttgcggaagtctgccaaccaactcagtcagtggccacgggttgagagaagctcccaactgaaatttgcaa

SEQ ID NO: 232248 - DNA, 201 bp, Homo sapiens
ttactgctccccactgtgcacagatgcaccggtgcttcctgatgtagctttgacgtcctcctgtgactatgcaactcccctccctctgttcctgcactgcmcccacctccctccccatgtcatacaccatcccctgagtgcaccactcagtgccacagccccaagtcccttcccatgctactccgttatcttagagttcct

SEQ ID NO: 232249 - DNA, 201 bp, Homo sapiens
cactcacatgttctgaaggtgagggactcagcattcgacctcaaacaaatgaaaggccccgagcccaccgctgagccagccagggttcctcgatggggagrgagtgtgcaggagagggtgagggtgccctcgcggccgctgaccaggggctcctggtgtggggaaggcatgcaggggaggtctggaggcgcccctgtgtgt

SEQ ID NO: 232250 - DNA, 201 bp, Homo sapiens
tggccgtgggtggggacttggggacccagtggggctgcaacaggggaggaggcgcctgggcgctggggctcacggccggctggggctcacctcagcttccygagcacagtctgtgatggcactggcgtggcctggcctctccaggacctgttaggaggtgacggtggacaggcctgtgaacattccgctcttgctggagcc

SEQ ID NO: 232251 - DNA, 201 bp, Homo sapiens
tctaagtcggccattcagaaaggaccgtctggggcatgggagggggcatgggaagtccctgagaccctctgggggtccgcagagtaagacattttcctagmaaagccccaaagttctttgcctgtttatcctctggtgagattctgcatcgcttccccaggctgtgagatgtgcgaggatgcggcttcgaggctagtggaa

SEQ ID NO: 232252 - DNA, 201 bp, Homo sapiens
catgtgtggagggtgggccgaggacccccgtgtgcgaaggtgtgctaaggacccccatatttgaaggtgtgctggggacccccgtgtgtggagggtgtgcygtggacccctgtgtgttgctgcaggggaccaaccacttagcaaaagtcctgcagagagcgctgtgtcctgtgaggagatgggcactcagcctggccacac

SEQ ID NO: 232253 - DNA, 201 bp, Homo sapiens
gccactgttgctcctctgggacctgcttttgacgcgtccagtgtggaagccggacaccagcctcgcgctcggttattcagctcagcggtgggcagcgtgcytcctgagtggtgggtggggcaggtctcattttcatgaccatctctggatgtagcagggctttctggatatgagccccagcctgtcccagtctgcccagat

SEQ ID NO: 232254 - DNA, 201 bp, Homo sapiens
ccgtagttgtttgctgctactgtgtgcctctttgagacatatgtgtgcgtgaagacacctgagcaggtgggctcttgttggggtttccataaactctcacmctgagactcttctgcaattgaacacaaacccacacctttctttcctgaccacttaaagttcttttgtccttctgttttgatgactttagttttatcttga

SEQ ID NO: 232255 - DNA, 201 bp, Homo sapiens
cctgtccacagcttccttccaagcatctcgcctcctccacaactcccaactccatggctacccctggcccccacctcaggaggttctgatgaaacccaggmagcacccagcctgccaccacctcccagctccccactcatgcccttctcatgatgatttcacttgagaaatcagaggtgggcaagtggccactgacaagtg

SEQ ID NO: 232256 - DNA, 201 bp, Homo sapiens
gttttgtttctctcgggctagtgtccaggagtggagtttctgcgctgttgatattgaggtgtgtgtctatgaggagctgcagggtctggtttcacaggagygagtgagtgtgtgggtggctctgcagccttttgccagtgtgttcttggcctgcagcattggccttttgagttggtgtttgtggagagttccatttccagt

SEQ ID NO: 232257 - DNA, 201 bp, Homo sapiens
agacgggcttgatggcagtgcctttcccctggggttcctgtgagggtaaaaccgggtgagcatctgagatgccgcccatcctgaggcctcacctgtgccgmaggtgcgtcgggctggagaggaaggggttgtgctgaaggaacagagcccggcggggcctttgcttggtagggtttgggcctctgggcctgcattctctac

SEQ ID NO: 232258 - DNA, 201 bp, Homo sapiens
ttgtagcgcatgagaggcccctggtcttccagccacagtcccacgggggaagctccagtctccccgcactggtgagctgagcgtgcggcgagcactatgargctggccggtgtctgggccctgggctgtcacctgccacagcccggactgccgtctatctgctgcacgagttggtgacgaaccttcgaggcctgacggaga

SEQ ID NO: 232259 - DNA, 201 bp, Homo sapiens
acaaaaatacacgtgtgcagagtctcaaggcgcagaatatgtgaaagtcaaagtcctcagagacaggagataaagtgacgctttctccaggtgccgagacytccccacggggaagcaaggtctgcaccttcccggggacgtggccccacagtgcgtccccagcccagtcatgtcctggtgcacagggcagctgtcgcagag

SEQ ID NO: 232260 - DNA, 201 bp, Homo sapiens
cggtgactggaaacggaaggttctgttgagtgcttcctcctttctacgaaacgcagcataaaacacttctgtgaaaggagcacgttgttaaaagaaacacrcgaaagtgtatttaatgggcagagccccgcccgctgtgctggccccggtcagtcctcgagtcctcaggcccccgcccgctgtgctggccccggtcagtcc

SEQ ID NO: 232261 - DNA, 201 bp, Homo sapiens
aaatcagagggtcatggctgtgaccctttccatgcgagaccctggtgggggatggggtgcagcagagagtgttcagaaatgaagcaaaacacttcaaaaaatgtgtccttacagccgtgtagcaagacgccccctgaagaaccagcttcaattaatgggcaagagagactgcacttaaaaaattttcactcaaagaaccca

SEQ ID NO: 232262 - DNA, 201 bp, Homo sapiens
cgtggggcatactggactgtgaatggggaccccagggtggctctggggctgtgaatggcgaccccagggtggctctggggctgtgaatggggaccccaggktggctctggggctgtgaatggggaccccagggtggctctggggctgtgaatggagaccccagggtggctctggggctgtgaatggggaccccagggtggc

SEQ ID NO: 232263 - DNA, 201 bp, Homo sapiens
ccgtgctgtatcctgtgacctagtctgcaaaggggagcacgtgagcgctagtaacgcccttgttcttggacatcaggaagggggtgggcctcatgtggccyggggggccctcagggaccacccagggagcacagtgacgtgggccatcctcagcactgccctcaggggccacccaggggtgcagtgatgtgggccaccctc

SEQ ID NO: 232264 - DNA, 201 bp, Homo sapiens
aggcctcagaatcacccggacaccccacagctcagagacgcaggcctcagaatcacctcaacagcccacagctcagggacgcaggcctcagaatcacccgsacaccccacagctcagggacgcaggcctcagaatcacctcaacagcccacagctcagggacacaggcctcagaatcgcctcaacagcccacagctgagag

SEQ ID NO: 232265 - DNA, 201 bp, Homo sapiens
accacaaccccggccgggcaagggagtagggaggaccgtacagagtttctcttccccagctcattgttttggagacagacttggaggcaaggccagagctrtacgtcccagcccctgcgtgtgcacctcgtgcagcagtgtggcaaggccctgacagtgccttcaaggggtgcttctggcaggccccgggagctgtgtgat

SEQ ID NO: 232266 - DNA, 201 bp, Homo sapiens
acaaccccggccgggcaagggagtagggaggaccgtacagagtttctcttccccagctcattgttttggagacagacttggaggcaaggccagagctgtaygtcccagcccctgcgtgtgcacctcgtgcagcagtgtggcaaggccctgacagtgccttcaaggggtgcttctggcaggccccgggagctgtgtgatgag

SEQ ID NO: 232267 - DNA, 201 bp, Homo sapiens
gactacacggaccatgtgaaatgtgagtttttagaagccagatcctgagtcatcgcggatgcttattgtttattttgatagatactgccacattccctgcmataatctttgccaagatggcgtccccctagtgccatagacatggtacctctgtcccaggtctcccagcctcaggtatcagcgaacctttgagctttgccg

SEQ ID NO: 232268 - DNA, 201 bp, Homo sapiens
ttccctgccataatctttgccaagatggcgtccccctagtgccatagacatggtacctctgtcccaggtctcccagcctcaggtatcagcgaacctttgarctttgccgctggtaggtgggaagggctgcatccaagtggttttcacttctgtttctctggcttgcgtgagactgagcatactttctcatgtttgggagcc

SEQ ID NO: 232269 - DNA, 201 bp, Homo sapiens
atggttccttccaagagtggttttggacacagtcctcatggcagcaaggccagcagcctcgaaagcctgccaagtgcaagtgtggcacgtccacgcaacaycaatcacaggtgctgtcacggaaatggacgtggcagtgaaactgttctgctcctgttcgtctcctccgtgtccgtcatcacagccacagtcacctctgag

SEQ ID NO: 232270 - DNA, 201 bp, Homo sapiens
aacctcatccccggggccacgacggacgctgagtgcgctacgtccagctgtgtgaggttcatctctcccttttagaaaattacatccatgggtttatattycttttttcaataagtactatatcttgagcatgtcacgttatctgttttataaatatgatatttaatgtggtgtaatttaattattcacctacagttggaa

SEQ ID NO: 232271 - DNA, 201 bp, Homo sapiens
tgctgagtttcagtagacactggacgatggggttgaggcctcagggcctcacctttgctaacccaagattatgggttttggcaaattaggttcatatgcakatgatggccccactggggatgtggctgtgtccacagggtgaatcctggcacttggtgagctccacccacaacacacagcactgagagtgacctggtctgc

SEQ ID NO: 232272 - DNA, 201 bp, Homo sapiens
ctgtccagctctcctctcctgcagccagaggcctggtctctagagcagctctgttctagcactttctgtggcaacagaatggcccacatgtgtgctgtccwgcaggacagccaccagcccctgtggccgctcagtgatggaaaccttgctagtgagacaggagacctgcgtgctttattttatcttattgtaattcagaat

SEQ ID NO: 232273 - DNA, 201 bp, Homo sapiens
ctcctctcctgcagccagaggcctggtctctagagcagctctgttctagcactttctgtggcaacagaatggcccacatgtgtgctgtcctgcaggacagmcaccagcccctgtggccgctcagtgatggaaaccttgctagtgagacaggagacctgcgtgctttattttatcttattgtaattcagaatttggatactg

SEQ ID NO: 232274 - DNA, 201 bp, Homo sapiens
atccccggggccacgacggacgctgagtgcgctacgtccagctgtgtgaggttcatctctcccttttagaaaattacatccatgggtttatatttcttttytcaataagtactatatcttgagcatgtcacgttatctgttttataaatatgatatttaatgtggtgtaatttaattattcacctacagttggaaattcct

SEQ ID NO: 232275 - DNA, 201 bp, Homo sapiens
tgtggtcccagctacctgggaggttgaggcaggcagatcgctttagcctgggaagtggtggctgcagtgagctatggttgtaccattgcactccagcctgrgtgacagagcaagatgaaaaaaaaaaggaaacattgatgccatggatattgcaagatgttaacccttcatgtgcagcatctgacatgtgcagtacagact

SEQ ID NO: 232276 - DNA, 201 bp, Homo sapiens
ttatatttcttttttcaataagtactatatcttgagcatgtcacgttatctgttttataaatatgatatttaatgtggtgtaatttaattattcacctacrgttggaaattcctttgtttctcaatgtctgattcttagtaagcacatctttgaaaacgaacggttttccgcatatgaatcgtttccttagaacattcccc

SEQ ID NO: 232277 - DNA, 201 bp, Homo sapiens
cattgatgccatggatattgcaagatgttaacccttcatgtgcagcatctgacatgtgcagtacagactctcataatttatcctggattaaaaatttcaaygagtatacatttcaaaaggaaattcctttgtggctacctggacaaggaggtctcttgctgtttcttcggcaccttccactgagccgacagaggtcacttc

SEQ ID NO: 232278 - DNA, 201 bp, Homo sapiens
gcttgaacctgggaggcagaggttgcagtgagccaagaccatgccattgcactccagcctgggcaacagagtgagactccatctcaaaaaaaaaaaaaaaattgcttcctgagagccctgcgtgcatctgcagaaaggtgggaaggacagacttgcatggcagtttccccagggcagcccaggtctgcaagctattcagta

SEQ ID NO: 232279 - DNA, 201 bp, Homo sapiens
aggtggccctgggagggactcgagacagggaggcggccgtgggaggcacttgaggcaggggggtggccatggttgggcctgagccatgtctcgccagcccrgcagctcagtgggctctgtgccccacccggctccctccatggccagctgtctcccctcctatggctccatccatgctgtctccccttctcccctcttccc

SEQ ID NO: 232280 - DNA, 201 bp, Homo sapiens
atgagaaggactgtgggctgcccacctcccctccctccacacggccacgttcagcataaatggtggcttatgtgggaaagcaatgtgagtgggagagagggtgggacccttggtcgtttgtgtttcttagaacactgttgcactttgtggtttgcagcaagctctgggtaagcagaggagtggcctcttagggccacatga

SEQ ID NO: 232281 - DNA, 201 bp, Homo sapiens
aaaccggtaaccaacctgttagaaccctttctttcatcatcttggttctgcgccctccagagcctggatgggaattacaagtccctaattcacatcatgaygactgacttttggttctgaatttcacattgcaacctcatcccaacatacctgatatttcttctattcaggtgtcttattatactatcgcttgtatggcca

SEQ ID NO: 232282 - DNA, 201 bp, Homo sapiens
tgaaggttcacataactcaaaccagcaagagctggggagtggtgtgtaggttaaccgggaagctgataaatacagagcattctgctaagcacctcgggagmtaagacgatgactcagaattgggagttctagttagctgcttgggaattctgaataaatacatctgttcagcttcttacaattgagcgcatattaatgcaa

SEQ ID NO: 232283 - DNA, 201 bp, Homo sapiens
agccgggcgctgggctcatgggtgcttcctactgggatcgtccgttcctgggtttggaggagcccaggcctgctgcctcctgtgtctgagggaggagatgmcaggaggctgcagtggcccgcagctgggcctggcacaaagtaggcaggcgtcggctgcttatctgggcctggctgggtccagtgcaggcgtggctcggcc

SEQ ID NO: 232284 - DNA, 201 bp, Homo sapiens
cagactgaaaaaagcagcaagaaccagacagagaggaaggggcctcggcccggactccatccacaggcagtggggtctggaacagggccccgttagaagtrtcgctctgtgtagggtccagccccacagggtcagtgggtttttctccccgtgtgtggagacgagagatcatagaaataaagacacaagacaaaaagataa

SEQ ID NO: 232285 - DNA, 201 bp, Homo sapiens
gaaggtctgcattagagcagagcaagagcctccaaagattccagactgaaaaaagcagcaagaaccagacagagaggaaggggcctcggcccggactccayccacaggcagtggggtctggaacagggccccgttagaagtatcgctctgtgtagggtccagccccacagggtcagtgggtttttctccccgtgtgtggag

SEQ ID NO: 232286 - DNA, 201 bp, Homo sapiens
acctgcgggagttaccaaggccaatacgaaggcaggaggagcttccaggtggagggagtgtgtgggagaaggtctgcattagagcagagcaagagcctccraagattccagactgaaaaaagcagcaagaaccagacagagaggaaggggcctcggcccggactccatccacaggcagtggggtctggaacagggccccgt

SEQ ID NO: 232287 - DNA, 201 bp, Homo sapiens
cctggtttgattggatgtttgggctccagagaaggtgggtgatggtccagagagtctgcgggagaaagaggtaagctgctgtgatgcagcttggcctttgsctgccggggcgattggcttaggtaaatggcacccactgtcccgcagccctgcgttttagctgcttttttttttttttttttttttttttttttgctgttt

SEQ ID NO: 232288 - DNA, 201 bp, Homo sapiens
aatctacttaaatgatggaaggatatgagagaggtgagagagaaggcctgcagaagcttaggctgtgcccacaacggctctaaccaggagctctcaggggygaggggcaggcccccaggccacggtgatcccgctcagatgctcagtcacccccgtgtaagggttcccactgccacctccttgaggtggaaggtggggtgt

SEQ ID NO: 232289 - DNA, 201 bp, Homo sapiens
ctggtttgattggatgtttgggctccagagaaggtgggtgatggtccagagagtctgcgggagaaagaggtaagctgctgtgatgcagcttggcctttggstgccggggcgattggcttaggtaaatggcacccactgtcccgcagccctgcgttttagctgcttttttttttttttttttttttttttttttgctgtttc

SEQ ID NO: 232290 - DNA, 201 bp, Homo sapiens
aatttaattattcacctacagttggaaattcctttgtttctcaatgtctgattcttagtaagcacatctttgaaaacgaacggttttccgcatatgaatcrtttccttagaacattcccctagaagtgaaattcctaggtcacttggtgtgtgcatttttgagagttgctgaattttccttccgagaacttgcataaagtt

SEQ ID NO: 232291 - DNA, 201 bp, Homo sapiens
ctcactagtgtctgatgctcttccaaatattgtccttgaaaaaataactactggtggttaatacatttcaactcagagtcatccatatttgtctgtggaartgtctttgttcttaaattatctcaatgccaactactatgctttactaggaggctgacctctcaaaacatcttgttttcaaaatgcactcattgttacttt

SEQ ID NO: 232292 - DNA, 201 bp, Homo sapiens
agaagccacccaacgaaggctactgtggcgttatcccagaatattccacgttgatgacagaggaggatccagtggatgctttcttgaatctataggagtgwgtgtttgtggcgtgtgcagtgtgtgtgtgtctgtgatgtgtgtatgtgtgtgtggtgtgtgtgtctgtgacgtgtgtgtggtgtgtgtgtgtctgttaca

SEQ ID NO: 232293 - DNA, 201 bp, Homo sapiens
gctccgccttgctctggggtcgccggccccgtggccgccccaggacccccagacggcagggtctgcgtccccctagccctgtccgaggcccagggtggccrcgtgcggtctgcgccgccgtggagactgaggggctggacacggcctggccgagggagacggctaccggccactcctggccacctcggagagctcccggcc

SEQ ID NO: 232294 - DNA, 201 bp, Homo sapiens
ccacgaggttccccggagcctttctttttctcacgaatgcattttcacctcttctgttgagctccagttctcttataaactttttctgggtatcatttcaytttgcagactcagggtacaggtatattttcatcaggcaataggacgggctatcctaacacagtggttagaacactttcaaaacgagattgttggtcagac

SEQ ID NO: 232295 - DNA, 201 bp, Homo sapiens
ctccgccttgctctggggtcgccggccccgtggccgccccaggacccccagacggcagggtctgcgtccccctagccctgtccgaggcccagggtggccgmgtgcggtctgcgccgccgtggagactgaggggctggacacggcctggccgagggagacggctaccggccactcctggccacctcggagagctcccggccg

SEQ ID NO: 232296 - DNA, 201 bp, Homo sapiens
atcacagtctcaaaatatcaaaatcccaaaaatgtaattctggaaaaaattatttaaaagacatttatttacatttttaaaagggaatttatttgcaaaayatataaaatcgtgacaaaacacttcataggccattttacacaataaaataagcaataataacattcgtatttttgcagacataagccctcagatatcttg

SEQ ID NO: 232297 - DNA, 201 bp, Homo sapiens
gtttgtctgtttgttctgaagagatagggtctcactctgtcgcccaggctggagtgcagtggcacaatcacagtgcactgcagcctcgacctcctaggctyaaggggtcctcccaagtagctgggactgtaagtgtgagccaccacatctggctaatttttaaaaaaaatttaatagagataggatctcaatatgttgccc

SEQ ID NO: 232298 - DNA, 201 bp, Homo sapiens
ctgacgtgatcgtgatggacgctgactggccagcacgttcacgccacataagggaggtggcccgtgacccggcaatctgatgtgtgagaatatgccccaakaaaataatccattacccaaaatactaaagaaaacttgaagcacaaagctgctctctgcagtggtgtttgtattaattttaaaacagtagacaaatcatta

SEQ ID NO: 232299 - DNA, 201 bp, Homo sapiens
ctagctgggactacaggttcacaccaccacatccagctccagtgtttcactatttcagattgatcatcttcccttaaatcaggtctctgtggggcttcagragagcttattttaagagtgtgtgtgtgtgtgtgtgtgtgtgtgtgtgtgtgtgtgtgtgtgtgtgtgtttgagacagagtctcgctctgtcacccaggct

SEQ ID NO: 232300 - DNA, 201 bp, Homo sapiens
tcgggaagtgagctggtcgctttcacgccctgctggtgggagcatggcctgacgtgatcgtgatggacgctgactggccagcacgttcacgccacataagsgaggtggcccgtgacccggcaatctgatgtgtgagaatatgccccaataaaataatccattacccaaaatactaaagaaaacttgaagcacaaagctgct

SEQ ID NO: 232301 - DNA, 201 bp, Homo sapiens
caggtttcaaagaatttttaaagcggatttgatttcatggttgataactttaaatgggacacatccaaacacaggtggtatgtcctaaacattctaaaggyataataatcaactactccacaatagaaaaaaggaaaacaaatctatgaagattaaaatagatcacgcttatgtcgggaagtgagctggtcgctttcacgc

SEQ ID NO: 232302 - DNA, 201 bp, Homo sapiens
ttagatgctgttacatgggcatcctaaatatgaggaaaacaggtttcaaagaatttttaaagcggatttgatttcatggttgataactttaaatgggacayatccaaacacaggtggtatgtcctaaacattctaaaggcataataatcaactactccacaatagaaaaaaggaaaacaaatctatgaagattaaaataga

SEQ ID NO: 232303 - DNA, 201 bp, Homo sapiens
aatcacataatcctggaacagcttgtagaaaagagagtttagatgctgttacatgggcatcctaaatatgaggaaaacaggtttcaaagaatttttaaagyggatttgatttcatggttgataactttaaatgggacacatccaaacacaggtggtatgtcctaaacattctaaaggcataataatcaactactccacaat

SEQ ID NO: 232304 - DNA, 201 bp, Homo sapiens
cccaggagggtccgggagtgcccccaaggtccatggtgggcatctgctaacagcctgtcctgagggcagggctggctccggggctccagatcgtctgtggstcagctctctctggagggctgtttgggtctcaggtctgaatattggagcccagggcttcagtggaactgggcagtggggatttctgccaggtgtggatgg

SEQ ID NO: 232305 - DNA, 201 bp, Homo sapiens
ctgaatcacacagctcggtcagccaagagccagagtccaggagaaatcaaacaagccttggaaagagacaccggtggcatatttgcttggttttctttaayttcaaatggattctttcattgtgacagatagttttaatactttaatactaatattcttttaatggcttttgtttaatggttaacattttttatctaaagc

SEQ ID NO: 232306 - DNA, 201 bp, Homo sapiens
aatcaagcagaatgtggtgcgtggtggccgtggggtacacggtggctgtggggtgtgtggtcagtgaccacagggtgtgcagtggccatagagtgcatggytcctgtagggtatgtggtggctgtggagtgtgtggtggtcatggggtgtgtgccagctgtgggttgggtgctggctgtggggtgtgtggtggccgtgggt

SEQ ID NO: 232307 - DNA, 201 bp, Homo sapiens
ctccaggtggcgtcggttggtcagtggagtccgcctgtctccgctgggctgcgtcggttggttagtggagtccacctgtctcctccttgctcctggcttgyggttctctcctctgccgtctctggctgggccttgcaggctccggctgcttctcctgcagttcattttgttgttctttcctctctcgtctgaaatggcctc

SEQ ID NO: 232308 - DNA, 201 bp, Homo sapiens
gcgtcggttggtcagtggagtccgcctgtctccgctgggctgcgtcggttggttagtggagtccacctgtctcctccttgctcctggcttgcggttctctyctctgccgtctctggctgggccttgcaggctccggctgcttctcctgcagttcattttgttgttctttcctctctcgtctgaaatggcctctgtcctaga

SEQ ID NO: 232309 - DNA, 201 bp, Homo sapiens
gaagtggaatcaagcatccaactcatacttgttgaattaaattgggtaaccaaacattaaacttggtaaaagttaacaggtccacgaattaacggttgtgrgaggaaacacttgaagctggtgcataaagtcaggtctggaaagtgctcattcgtgcagcgttttctgagcacccagtgacggacggagacgtccacaggc

SEQ ID NO: 232310 - DNA, 201 bp, Homo sapiens
gctgggctgcgtcggttggttagtggagtccacctgtctcctccttgctcctggcttgcggttctctcctctgccgtctctggctgggccttgcaggctcyggctgcttctcctgcagttcattttgttgttctttcctctctcgtctgaaatggcctctgtcctagattcaggagggaaaggaggaaaccggtggggcct

SEQ ID NO: 232311 - DNA, 201 bp, Homo sapiens
tgcagaggttttttcacttgatgtgatcccatctgtccagttttgctttggttgcctgtgcttgtggagcattactcaagttgctttggctgcctgtgctyatggggtattactaaataaatctttacactatccagtgtactagggagttttcccagtgttttcttttagtcgtttcatagtttgaggtcttagatttat

SEQ ID NO: 232312 - DNA, 201 bp, Homo sapiens
ttgcttttttttgctaaacaatttctttctgcgaaatggcccggggagctgatgctgcgttgggaaggggggacgccgctttcatctgcagggagccgacrctgtggcaggagtcggggggacgccgctctcattggcacttctctcgtttctcgccctgcaggagcagtttgagttcgcgctgacagccgtggctgagga

SEQ ID NO: 232313 - DNA, 201 bp, Homo sapiens
cttcctgatcgctatgtctgatggtggttcctttgtgggccgctccttcctgattaacctttactgttttggagtttccttgtgtcctgtcttggtaaggrcttattttatttttaatttttgctccaaacttactgtgattcctgaatctgagaattcctttctccagctaatcctaaaaaattataaaccatatataat

SEQ ID NO: 232314 - DNA, 201 bp, Homo sapiens
agggcggaagaatatgaaaggagaaactgtcttttgtctcagaatgagcatcacgttattttgactttctgatgtctcggttcaagctattttccatcttkctgttatgcactaaacattcaaaactggaaattaatcatcgtttttggcttggggctgccctgttccttaaatgatcaagtattggagctgtcaacaggg

SEQ ID NO: 232315 - DNA, 201 bp, Homo sapiens
ggcactgaggaccacctttcctttgtgactgtgtgttggcctcgccaaatgacctcttggccaatgtgataccaaattaagtttcttgaaaaaacatccaytatttaaagcattcatttcgtgcttgaggtctgatcctattcaaatcagaagccaagacattttcaacgttagtgatggtcgcctctgtagacttgtgtc

SEQ ID NO: 232316 - DNA, 201 bp, Homo sapiens
tcagttgactcctttaataataggttctaacacgtacactaagaggccgcgtggccacactaccaaaggcaggtagagtccagcagaccattccgtcagcrtcagggcggaagaatatgaaaggagaaactgtcttttgtctcagaatgagcatcacgttattttgactttctgatgtctcggttcaagctattttccatc

SEQ ID NO: 232317 - DNA, 201 bp, Homo sapiens
cctactggaggggttcactcatgggcagaggacgccagtgacgccgcagtttctcgcctctcgcgcccccgccgagccgcaccgggcctcctgcagcccgytcaggcctgcgggaaccatggcccgatgcgaggccacttctttgccctggagctttatgaagcgctctggccttgccctataaatacaaaaataaatgcg

SEQ ID NO: 232318 - DNA, 201 bp, Homo sapiens
tggagttccccctgcccgtcccctcccccatagcatggatattgggctttcctgttggatgccgcaagtggctgcctgagaggccgctgggcagctctgcrggattagcactggccctgggggtggagcgctttccagcctccactgcatgatggggctgcggggcggcagcgcttctctattcttccctttaaagatcat

SEQ ID NO: 232319 - DNA, 201 bp, Homo sapiens
gataaacttgttacagcaactcattaatggtctctaaaactgacttctaagttttaagagaaaaaggtatttataatttagtaatttaaatgcacacaaasataggatgaggctgggactgaaatctgattccttagaaatgatacaaatgaaagcatcaacaatgttagaagtttaacattaactggcaccgagcacctg

SEQ ID NO: 232320 - DNA, 201 bp, Homo sapiens
atctgttgctgttgtattttactcctttgaaataaactcctatcataaaagttatccaaatgctggggttttcccagcctacccgggatctagagcatggktctaggtgatacttgctcagcggattctgctcagaacgtggccacagaccttcgaggacccacagggcttgggtgctacatcccggcgccgcatgcagct

SEQ ID NO: 232321 - DNA, 201 bp, Homo sapiens
aaaaaagatgcccctcaggagagctgtttcctccctggaatttgggtcgaatagaaaatatttcaccagcgcccacctgagcatttggcaactcagtcccmgaccacaaactccatcatcttagaagagaagtccaggcacccaggggctgaacggcagtgcgggctttgacaccacacgagccgccagagaggcggcaca

SEQ ID NO: 232322 - DNA, 201 bp, Homo sapiens
ggagacacctcccagaaacacccaaaatgaagctttactggatttctaggtattccttaacccagtcaagttgacacctaaaacgaagtctatggtttcaycccttgtcaacttggcactcacacacaactccttaagttatgcttaatttccaaataaagacaataacaagctaatagctccacccagcaggatgcaact

SEQ ID NO: 232323 - DNA, 201 bp, Homo sapiens
ggtcactcgggctaaggacccaccacagccatgctcacggcaagttccaggtgcccagatgcagaaggagcataaagatattgtcagacccacggtgttcrggggtccggagggcttcccagagaaggtggcccaggccaagtctgggagatgaagagaaattgccccagtgaagggggttgacatgcgggtgagaggggc

SEQ ID NO: 232324 - DNA, 201 bp, Homo sapiens
cacttataaatgacagctgaacaatgagaacacatggacactgggaggggaatagcacacactggggcctgtcagtggggaagggggatggggagcatcasgatgatagctaatgcatgcggagcttaattcctcggtgatggattcatgggtgcggcaaaccaccatggcatacgtttacctatgtaacaaagctgcccg

SEQ ID NO: 232325 - DNA, 201 bp, Homo sapiens
gccagacccacaggccacagttgagaggctgctcaggagggcccagtggcacctgggccatatttgtgtttttcctgatcatggactgtgtttcctggttkgttgaaatcacccctcatggtggagggtgggggtcttcagccctcgtggaagtacagggtcacagggctctgtgggccccaggtctccctctaaggttag

SEQ ID NO: 232326 - DNA, 201 bp, Homo sapiens
caattggaactatgaaactgcagcctctgcacatgctcatttaacgtaatcgaatgcttcagctgtaagggttttaggccagctccctcaggaggaagtcrtgattggaaactttaaagtgaccctgggggtcaattccttggtaattcataactctggagtaactttggttattatagaaaaaactgtaagggttctgga

SEQ ID NO: 232327 - DNA, 201 bp, Homo sapiens
gggctaaggacccaccacagccatgctcacggcaagttccaggtgcccagatgcagaaggagcataaagatattgtcagacccacggtgttcaggggtccrgagggcttcccagagaaggtggcccaggccaagtctgggagatgaagagaaattgccccagtgaagggggttgacatgcgggtgagaggggcaggcagaa

SEQ ID NO: 232328 - DNA, 201 bp, Homo sapiens
gaactggacgtgaggttgacgtgtgtctggcctctctgtaccaaggagttccaggttttgtgccatggaagggtccaaccttggaagggtccatcttgcckcactgaccatcctcctgtactggctgcctagcagtaaaagaggtggccttgtcaaggctggcacataccaccttctggctggccctgcatcccgtgagct

SEQ ID NO: 232329 - DNA, 201 bp, Homo sapiens
tacacttaagaatggctaagatggtaaattttaatgtgacgtatattttaccacaatatgcaattggaactatgaaactgcagcctctgcacatgctcatytaacgtaatcgaatgcttcagctgtaagggttttaggccagctccctcaggaggaagtcgtgattggaaactttaaagtgaccctgggggtcaattcctt

SEQ ID NO: 232330 - DNA, 201 bp, Homo sapiens
acattctacaagagaaaaaatactttttacagaatattgcagaaagaatactttttacagatgagaaagaggctatgtttaggaaaattcccatgactggscatggcggaaagacaggggagaggtgggaaaatggcatgaatgaccgaaaggatggcctcatacactccctgcgaacttgaaaattctccagagggcatg

SEQ ID NO: 232331 - DNA, 201 bp, Homo sapiens
caccaccgaactgtacacttaagaatggctaagatggtaaattttaatgtgacgtatattttaccacaatatgcaattggaactatgaaactgcagcctcygcacatgctcatttaacgtaatcgaatgcttcagctgtaagggttttaggccagctccctcaggaggaagtcgtgattggaaactttaaagtgaccctgg

SEQ ID NO: 232332 - DNA, 201 bp, Homo sapiens
gtcctctccccaaggggtccctgagtgtaagtcatggatagagaatgcctggggtctccagccctggtgccagttctgttaccattctcctactcctgcckaaggcctctgcctgctctgggcacacacagccatgccctacatccagcaccttgtctcatcactcctatccctatgctagcatcctagacgtcttccagc

SEQ ID NO: 232333 - DNA, 201 bp, Homo sapiens
ggaatagacggtggtgatgactgatcaacagtgtgaatgtaattaacaccaccgaactgtacacttaagaatggctaagatggtaaattttaatgtgacgyatattttaccacaatatgcaattggaactatgaaactgcagcctctgcacatgctcatttaacgtaatcgaatgcttcagctgtaagggttttaggccag

SEQ ID NO: 232334 - DNA, 201 bp, Homo sapiens
ccaacctgttctttatccaggggagggaacttttgttgttgttgttgttgttattttggatatggggtcttgctctttcacccaggctgggatgcagtggwtattcacaggtgcaatcatagctcattgcagccttgagctcctggactccagtgatcttggctcctcagccttctgagtagctgggaccaggagagtggg

SEQ ID NO: 232335 - DNA, 201 bp, Homo sapiens
gggaatagacggtggtgatgactgatcaacagtgtgaatgtaattaacaccaccgaactgtacacttaagaatggctaagatggtaaattttaatgtgacrtatattttaccacaatatgcaattggaactatgaaactgcagcctctgcacatgctcatttaacgtaatcgaatgcttcagctgtaagggttttaggcca

SEQ ID NO: 232336 - DNA, 201 bp, Homo sapiens
cacacttatttggaggcattttgggaagtgcacttttgggttaagtttttggtaatgagggggctcttatttttgaagcagcacaattcttcagaaagtcrtaaaataagactctgaaatgctatctgagcatctaaatgttgagttgggtgtggggcagagagtgagcagtgatttaggagaggggaaagagaagaaaga

SEQ ID NO: 232337 - DNA, 201 bp, Homo sapiens
ctggaagcatcgcacttgcctgccaggagggtttggcttggagcagggaggctggttggatgcaagtctggagttcccagcagcctgggctggtctcagcyggggtggagctgagccggctgtggtgggtcattgctctgtccagctgcagcctgagtttgtctttgtagccccgcctggctcccttccctgttgcctccc

SEQ ID NO: 232338 - DNA, 201 bp, Homo sapiens
ggagtcaaaaactaagtatttagcacaaagtgggtactcaaagagtgctagctccctttccaactctctcccacaaatctacctccatatcctgttttcargtccctgtctggagatccctttcttggtgttctggaatttcctattgaatgaaagcatgtcacctactgatgaaggggccggtgtccctgtttgcctggg

SEQ ID NO: 232339 - DNA, 201 bp, Homo sapiens
ttgtctccactgcccactggggctgaccagggccaggtgctgccatgcacggagctgctccctcccggccgcccaccagggccaggtgctgccatgcacggagctgctccctccccgttgcccactggggccaggtgctgccatgcacggagctgctccctcctggccgcccactggggccaggtgttgccatgcacggaa

SEQ ID NO: 232340 - DNA, 201 bp, Homo sapiens
acagtcggtccgcattggctaggtggtggtgcttagtgaataaaccaccacaaggaaaatgaaattgtcaaaagcatcagtgacgaagctctaaattgtayagaatatgtcttacatttaactgatcagaagtctacctattgaggaaaagagacaaatatccaaacaaggagaataagaagaaaaaatgcatttgaatcc

SEQ ID NO: 232341 - DNA, 201 bp, Homo sapiens
aaccatccagcccagcagttgccaacatcttgctgatgaattagcctggggggtggggtccagcttccacatctctacatcgcccccagtgatcctctgtrcgtgtggggcggaccccagtctggcctagtgtttctgtagacgtgggtgtgtggagcatctgggagctccagcccaggtcggtgggaccaggaccagaac

SEQ ID NO: 232342 - DNA, 201 bp, Homo sapiens
cttgtctccactgcccactggggctgaccagggccaggtgctgccatgcacggagctgctccctcccggccgcccaccagggccaggtgctgccatgcacggagctgctccctccccgttgcccactggggccaggtgctgccatgcacggagctgctccctcctggccgcccactggggccaggtgttgccatgcacgga

SEQ ID NO: 232343 - DNA, 201 bp, Homo sapiens
gacgaagctctaaattgtatagaatatgtcttacatttaactgatcagaagtctacctattgaggaaaagagacaaatatccaaacaaggagaataagaasaaaaaatgcatttgaatccaatgccatgccccactatcataaagtgacttgattcttaacagttactcattctcgagtctacagttatgtaactggaggg

SEQ ID NO: 232344 - DNA, 201 bp, Homo sapiens
aggccttgtctccactgcccactggggctgaccagggccaggtgctgccatgcacggagctgctccctcccggccgcccaccagggccaggtgctgccatgcacggagctgctccctccccgttgcccactggggccaggtgctgccatgcacggagctgctccctcctggccgcccactggggccaggtgttgccatgca

SEQ ID NO: 232345 - DNA, 201 bp, Homo sapiens
aaggccttgtctccactgcccactggggctgaccagggccaggtgctgccatgcacggagctgctccctcccggccgcccaccagggccaggtgctgccatgcacggagctgctccctccccgttgcccactggggccaggtgctgccatgcacggagctgctccctcctggccgcccactggggccaggtgttgccatgc

SEQ ID NO: 232346 - DNA, 201 bp, Homo sapiens
caaggccttgtctccactgcccactggggctgaccagggccaggtgctgccatgcacggagctgctccctcccggccgcccaccagggccaggtgctgccatgcacggagctgctccctccccgttgcccactggggccaggtgctgccatgcacggagctgctccctcctggccgcccactggggccaggtgttgccatg

SEQ ID NO: 232347 - DNA, 201 bp, Homo sapiens; identical to SEQ ID NO: 42947

SEQ ID NO: 232348 - DNA, 201 bp, Homo sapiens
aactgcaaggccttgtctccactgcccactggggctgaccagggccaggtgctgccatgcacggagctgctccctcccggccgcccaccagggccaggtgctgccatgcacggagctgctccctccccgttgcccactggggccaggtgctgccatgcacggagctgctccctcctggccgcccactggggccaggtgttg

SEQ ID NO: 232349 - DNA, 201 bp, Homo sapiens; identical to SEQ ID NO: 42950

SEQ ID NO: 232350 - DNA, 201 bp, Homo sapiens
gaactgcaaggccttgtctccactgcccactggggctgaccagggccaggtgctgccatgcacggagctgctccctcccggccgcccaccagggccaggtgctgccatgcacggagctgctccctccccgttgcccactggggccaggtgctgccatgcacggagctgctccctcctggccgcccactggggccaggtgtt

SEQ ID NO: 232351 - DNA, 201 bp, Homo sapiens
cctctcctgcctgatccagaactgcaaggccttgtctccactgcccactggggctgaccagggccaggtgctgccatgcacggagctgctccctcccggccgcccaccagggccaggtgctgccatgcacggagctgctccctccccgttgcccactggggccaggtgctgccatgcacggagctgctccctcctggccgc

SEQ ID NO: 232352 - DNA, 201 bp, Homo sapiens
gtcctctcctgcctgatccagaactgcaaggccttgtctccactgcccactggggctgaccagggccaggtgctgccatgcacggagctgctccctcccggccgcccaccagggccaggtgctgccatgcacggagctgctccctccccgttgcccactggggccaggtgctgccatgcacggagctgctccctcctggcc

SEQ ID NO: 232353 - DNA, 201 bp, Homo sapiens
aatgggaattctcagtgggtggctctgatgtatgacttacagctgagcccggagaacatctaatttcctttgcagctctcttcctcacagatgcaattackagtgaaatctggtccaggaggatgggatgggattctattttaaggttatttctttccttcttaggcctgaatagccattgttaaccgcccgggcaccctc

SEQ ID NO: 232354 - DNA, 201 bp, Homo sapiens
ctttaaataaaaaagtaatcctatgcaatcaaagttaaagttcgtatatggctccctatgaggtactacattccctgaagtgtcacaaaaaaaaaaaaaaagaaaagaaagaaaagaaaaccagtacagctttggtttctgacggtgacggcctgctgttggtaagcatcttataacaatttttcagcccagctttctgga

SEQ ID NO: 232355 - DNA, 201 bp, Homo sapiens
tgtcctctcctgcctgatccagaactgcaaggccttgtctccactgcccactggggctgaccagggccaggtgctgccatgcacggagctgctccctcccggccgcccaccagggccaggtgctgccatgcacggagctgctccctccccgttgcccactggggccaggtgctgccatgcacggagctgctccctcctggc

SEQ ID NO: 232356 - DNA, 201 bp, Homo sapiens
ggatccggcgcccggcctggccgcacccatgcccaggagggcacgcgagcgggcaggatccggcgcccggcctggccgcacccatgcccaggagggcacgmgagcgggcaggatccggcgcccggcctggccgtacccatgctcaggagggcaccagagcgggcaggatacggcgcccagcctgagcctggctatccaggg

SEQ ID NO: 232357 - DNA, 201 bp, Homo sapiens
tgtgggagcacgtggtcctgatctgctgtgtgtggtgaagcgggagcacgtggtcctgatctgctgtgtggtgatgtgggagcacgtggtcctgatctgckgtgtgtggtgatgcgggagcacgtggtcctgatctgcgtgtggtgacatgggagcacgtggtcctgatctgctgcgtgtggtgacgtggagcacgtggtc

SEQ ID NO: 232358 - DNA, 201 bp, Homo sapiens
gtatttccttaaacaagaggataagagtctccccagaaccgcagtgcagccacagagcgtgggagggaactcaggagtctttccagtaccctcttcctctrctgaaacactgagaccgtcccgcaccccatccccgggcacacaccttctactgtgtctcccatattcacgcatcacccctcaaaacctccttgggaacat

SEQ ID NO: 232359 - DNA, 201 bp, Homo sapiens
tggggtggtccgaaggctcacctgggcgcccgggtttacctgctcatgctgagtgtcctggcttctcacatgcggtggtccgagggctcacctgggcgccrgggtttaccttctcacatggggtggtctgagggctgacccggaggcttctgagcactgacatggtcttgccagtgtccactgatgatgcgtctgctgctc

SEQ ID NO: 232360 - DNA, 201 bp, Homo sapiens
cctggccgcacccatgcccaggagggcacgagagcgggcaggatccggcgcccggcctggccgcacccatgcccaggagggcacgcgagcgggcaggatcyggcgcccggcctggccgcacccatgcccaggagggcacgcgagcgggcaggatccggcgcccggcctggccgtacccatgctcaggagggcaccagagcg

SEQ ID NO: 232361 - DNA, 201 bp, Homo sapiens
tctttcctctctcgtctgaaatggcctctgtcctagattcaggagggaaaggaggaaaccggtggggcctggccgctgcttctcctggccttgttcttcargctccctttgaaggtttcgagcttctgctcttgctctcctgcctcttcctccatgcctgctgcttctgcgagctgtagtttacattctggctggccgcag

SEQ ID NO: 232362 - DNA, 201 bp, Homo sapiens
cctggtccactaacacgagagaggtgggtcttcctgggtgtcccaggcacgagggtgcagcccaacccaaactgacttggccggtgctcaccacactgggrcgcccgccacactggggcgcccgccacactggggtgctgagcaagatggcagcctgcgtcacttccctgtagattcccgacatggacaactcgaattaaa

SEQ ID NO: 232363 - DNA, 201 bp, Homo sapiens
tctggccatcttggatcatagacgaattattcacaagagggtctctgcctaaaactcaccatggtggctttcttggtgtacttttcatgtctaaaatgtawgtaaagttcaaactttaaggctgcagaaggaagtgaaggcttttgatgctgtttacaaatctctggtttctgactcaagaccatgacggtatgggggaac

SEQ ID NO: 232364 - DNA, 201 bp, Homo sapiens
atctgctgtgtgtggtgtggtgatgtgggagcacatggtcctgatctgctgtctgtggtgatgcaggagcacgtggtcttgatctgtggcatgtggtgacrtgggagcacgtggtcctgatctgctgtgtgtggtgatgtgggagcacgtggtcctgatctgctgtgtgtggtgatgtgggagcacgtggtcctgatctgt

SEQ ID NO: 232365 - DNA, 201 bp, Homo sapiens
tgcagaaggaagtgaaggcttttgatgctgtttacaaatctctggtttctgactcaagaccatgacggtatgggggaacccaggcctgaccttctcccagktttgggggagctgcctcctgcgattctccctcggtggccctgttggggtggggcccatttcctctttgaaaatgacatcccagtcatcttactttctcgg

SEQ ID NO: 232366 - DNA, 201 bp, Homo sapiens
cttttaagggcaggcccaagtagtagatggaaagttgcctgtgggaagcgagaggggccatggagcagagagcctgctgcctcgagcgtgtgcgggagcaygtggtcctgatctgctgtgtgtggtgtggtgatgtgggagcacatggtcctgatctgctgtctgtggtgatgcaggagcacgtggtcttgatctgtggca

SEQ ID NO: 232367 - DNA, 201 bp, Homo sapiens
cctcgccaaatgacctcttggccaatgtgataccaaattaagtttcttgaaaaaacatccactatttaaagcattcatttcgtgcttgaggtctgatcctrttcaaatcagaagccaagacattttcaacgttagtgatggtcgcctctgtagacttgtgtctggttaaagttgtgagtattgatagcgtcttcccacctg

SEQ ID NO: 232368 - DNA, 201 bp, Homo sapiens
tccagcctgggcaacaagaaagaaactccatctcaaaaatatattttttttttcttgtgcttttagtatcatacccaagatatattggccaaatccaaggwcacaaagaccttctgctatctgttcttagatttcctcctatattctcttaacttttaagggcaggcccaagtagtagatggaaagttgcctgtgggaagc

SEQ ID NO: 232369 - DNA, 201 bp, Homo sapiens
ggccatggccttgctgatggggcctcccagatgctgcctgccttcctgtggttggattagctatgctggggccttgaggtcatgctcatcatcaacctcayagtccagactccttagagtggggatggcgtccctcccatccagtttctcatttattcagtaaaccttttatcacttcttaaagactttcagtaacttata

SEQ ID NO: 232370 - DNA, 201 bp, Homo sapiens
ctgtccaggtcccgcggccccgcgcggtcgccctccgggcctcccccggcctctcccaggttgcaggaggggcctccttgtggaccggcgcggggaggtgrgcctggggcggctcccacccctcctctgctgggacagcgcgggcctaggcagcagggagccgggcgaggttggtggagacaggactccagggcactgggg

SEQ ID NO: 232371 - DNA, 201 bp, Homo sapiens
gcttcctgccctgggaccaggcccttctttctccccggaatggtccctggaaccttacgggacataagagctgggtcccggttgcttggcagtggctgctrcaggcttgctgatggctgacggctgcacagataagctgccttcctcctctcctgccgcttttcttagcacccgcagctgacggtgcctgtgtgacgccct

SEQ ID NO: 232372 - DNA, 201 bp, Homo sapiens
gcatgtgatgtcaattctcctttgagagtgggctcagctttggacaatacgcatgcagccatgtggaaatggccaaagagggctggcctggggccttttckgagattggtgaccctcctcctgttcttgacctgctcctctttccctggggtgtgtgcggtgtgaaattccctgacccgggtcccaggccacagtctcagg

SEQ ID NO: 232373 - DNA, 201 bp, Homo sapiens
ttcactccccgagtcattgtgcagggcgcgcggtctgcggggcggccttcccattttcctgtggcgtccttaattgttgctaatataccttctaatgaagytaatgaggggagagccgtgcaactatttgcacgtggagacaagtgaaatgcaccgaaagggctttctcatattttcaccagccctacccccgccctccaa

SEQ ID NO: 232374 - DNA, 201 bp, Homo sapiens
ggcctgggcccttgacccacggaagtccggcatccagggtcagggtcccacggcagccccgagacctagaatgtggcaaacgcccctgtgcttgggtttcytggtctctggagtggcagccgcagtgtgtggctcctggactgtggagagatgaacggggctcaggtggagcagagcccgggccacgtgcagaggatgcag

SEQ ID NO: 232375 - DNA, 201 bp, Homo sapiens
aacgtgtgatgtggtgagttgctgggggcacctgtgattccaatggaacctgcccatccagggaccagaagcacaggcaggcggccggacgcaggtgaccscagcgtgcgtctccacagggatgggatggagcctgggttctgagtggctcaggttcactccacagagaaggaaacatggagaagtatgtcctgggttcga

SEQ ID NO: 232376 - DNA, 201 bp, Homo sapiens
gaagctaatgaggggagagccgtgcaactatttgcacgtggagacaagtgaaatgcaccgaaagggctttctcatattttcaccagccctacccccgcccyccaagaagcagtgagaatctgaagggttttcctcgctgagaagtgaagttccaaaggctctgcagctcctttcaaggaaaaatacgtaggtgcataggtg

SEQ ID NO: 232377 - DNA, 201 bp, Homo sapiens
gattctttaccatcaaaagatcacctataggattccagtcatttcttgggatcacagacggcatagaaagcagaaccgaaagtgtgatatctgctgggtaktcacatctttcttgaagtcttgaaatggaaacatttattcgttttccggaaagtcacaattgattttgctaggattataaatgtaaaaggtcctctgttt

SEQ ID NO: 232378 - DNA, 201 bp, Homo sapiens
cgggagaacagggagaggtggtgggaatccaggagacagaggtgcctccgtggaagagaaacaggtggggtggccagagagctacagggaggatgctcgcrgggcctggtggagtgagggacacaggcagaggggaggaatgagcccagtagagtctggtttgggatgtcgtgtgaacgtgacaggggcacagagcccata

SEQ ID NO: 232379 - DNA, 201 bp, Homo sapiens
ttttttttttttttttaaactctgttgcccacgctgcagtgcaatggcgtggtctcgtcaggctcactgcaacctccacctcccgggatcaagcgattgcrcccgccaccacgcccggctaattttttttgtatttttagtagagacgaggtttcaccatttggtcaggctggtctcgaactcctgacctcaaatgatcca

SEQ ID NO: 232380 - DNA, 201 bp, Homo sapiens
gtagatccataggaacaggcttgtccaacgtggttgagcttagagacgtcacaaacttgccactgtccttcagaactgaaagactctagagagaggagacrccatcttcagctttgaaagtcctttccactgccctcacaggcactcctagctctgaccctgaccccataaaagttctcatgcctgtttctcttctacggc

SEQ ID NO: 232381 - DNA, 201 bp, Homo sapiens
cgttaatgaatctgacatttgatgctttgctttgtacaagtgttgtgttttcttcaagtgatagaattggtgtttcaaagagaaggacgtgtctgcctggmtgtacacacacccacacgtttgtatgtgtgtgtatatgagtgtatgttgggtaggtgtgtgtgtgtatgagtgtgtatgttgggtagatgtgtgtgtatc

SEQ ID NO: 232382 - DNA, 201 bp, Homo sapiens
gccactgcctctgattcctgcaggctctgcacaatctgcttgagtggcttgaccagcttggtgtcctctcctgcctgatccagaactgcaaggccttgtcyccactgcccactggggctgaccagggccaggtgctgccatgcacggagctgctccctcccggccgcccaccagggccaggtgctgccatgcacggagctg

SEQ ID NO: 232383 - DNA, 201 bp, Homo sapiens
gtacgtgctcctgtgtgtgtgtctgcataatcaagtgcatgcaaatgagtgtgtgcacacttgtgtgtgtgtacatgtgttggaatgttcacgtgggtgcrtgtgagtgtgtgtatgtgtgagtgtcccgtgcatgggagaagtgtgtgaaaatgtgtgtgttggttcatgcaggtatgaatgtgcatacatgcaccgtgt

SEQ ID NO: 232384 - DNA, 201 bp, Homo sapiens
gaacccgggaggcggaggttgcagtgacctgagatcgcaccattgcgctccagcctgggcaacaagaaagaaactccatctcaaaaatatattttttttttcttgtgcttttagtatcatacccaagatatattggccaaatccaaggacacaaagaccttctgctatctgttcttagatttcctcctatattctcttaac

SEQ ID NO: 232385 - DNA, 201 bp, Homo sapiens
atgtgggagcacgtggtcctgatctgctgtgtgtggtgaagcgggagcacgtggtcctgatctgctgtgtggtgatgtgggagcacgtggtcctgatctgytgtgtgtggtgatgcgggagcacgtggtcctgatctgcgtgtggtgacatgggagcacgtggtcctgatctgctgcgtgtggtgacgtggagcacgtggt

SEQ ID NO: 232386 - DNA, 201 bp, Homo sapiens
tgtgtgcacgtttgcaaatgtgtgagtgtgtacgtgctcctgtgtgtgtgtctgcataatcaagtgcatgcaaatgagtgtgtgcacacttgtgtgtgtgtacatgtgttggaatgttcacgtgggtgcgtgtgagtgtgtgtatgtgtgagtgtcccgtgcatgggagaagtgtgtgaaaatgtgtgtgttggttcatgc

SEQ ID NO: 232387 - DNA, 201 bp, Homo sapiens
gtggtgtgtggtgatgtgggagcacgtggtcctgatctgtggtgtgtggtgatgcgggagcacgtggtcctgatctgctgtgtgtggtgatgtgggagcaygtggtcctgatctgctgtgtgtggtgaagcgggagcacgtggtcctgatctgctgtgtggtgatgtgggagcacgtggtcctgatctgctgtgtgtggtg

SEQ ID NO: 232388 - DNA, 201 bp, Homo sapiens
gtgtgtgcacgtttgcaaatgtgtgagtgtgtacgtgctcctgtgtgtgtgtctgcataatcaagtgcatgcaaatgagtgtgtgcacacttgtgtgtgtgtacatgtgttggaatgttcacgtgggtgcgtgtgagtgtgtgtatgtgtgagtgtcccgtgcatgggagaagtgtgtgaaaatgtgtgtgttggttcatg

SEQ ID NO: 232389 - DNA, 201 bp, Homo sapiens
tgttttgataccatttcaattttcttaaataggcatgcattatgctataaatgtataacaataaataacctatatgcattagaaagaatctgaaaattatrcaacagtaggaatgagagaatatccacattcatacatcctaaaaatgagggcttaagtgtcctactttatctgagctcaggttagaggcagggaccaccc

SEQ ID NO: 232390 - DNA, 201 bp, Homo sapiens
gatctgtggtgtgtggtgatgtgggagcacgtggtcctgatctgtggtgtgtggtgatgcgggagcacgtggtcctgatctgctgtgtgtggtgatgtggragcacgtggtcctgatctgctgtgtgtggtgaagcgggagcacgtggtcctgatctgctgtgtggtgatgtgggagcacgtggtcctgatctgctgtgtg

SEQ ID NO: 232391 - DNA, 201 bp, Homo sapiens
gtaaactgacatggcatattggtgggtgagacttatggaaacctgcttccaccttggccctgttttaactagtcctcaatttggttcagtaacccagccckgcctctgaagttgagtcctgcctcctacctcattatctcttaccttatacaaaaatcaactcaagatggatcaacaacttaaatctaagacctgaaacca

SEQ ID NO: 232392 - DNA, 201 bp, Homo sapiens
aaagcaaaacctgagtctgggttaagagcagatggagaggggatgaggatggggaggccggttcccttttgctgttctgtgcaatttctgccttgttttgrtaccatttcaattttcttaaataggcatgcattatgctataaatgtataacaataaataacctatatgcattagaaagaatctgaaaattatgcaacagt

SEQ ID NO: 232393 - DNA, 201 bp, Homo sapiens
gctgtgtgtggtgatgtgggagcacgtggtcctgatctgtggtgtgtggtgatgtgggagcacgtggtcctgatctgtggtgtgtggtgatgcgggagcaygtggtcctgatctgctgtgtgtggtgatgtgggagcacgtggtcctgatctgctgtgtgtggtgaagcgggagcacgtggtcctgatctgctgtgtggtg

SEQ ID NO: 232394 - DNA, 201 bp, Homo sapiens
ggtcatcaggtcattgccatggaaaggggcagttactccttggtgttgtcatggcaagtgtaaactgacatggcatattggtgggtgagacttatggaaasctgcttccaccttggccctgttttaactagtcctcaatttggttcagtaacccagcccggcctctgaagttgagtcctgcctcctacctcattatctctt

SEQ ID NO: 232395 - DNA, 201 bp, Homo sapiens
ttaatggacagtgccgttgtttccggctttgggctgttgtgagtaatcctgctgtgaatgtggatgtgagggtgtccacccacatccctggatatgtccckggggcggaatcgccacatcgaccgtaattctcttatctcttggctgtttgattacagccatcccagtggatgtgagtggatctcaatgtggttttagcat

SEQ ID NO: 232396 - DNA, 201 bp, Homo sapiens
gcctcactttgaaatactaaattaagtgatcatattgtattcattaattcccaagtcctgttatatttccataaataaataagaaatgttaaaaaaaaaaagacataagtaaaagtaggtaaagatattagaaaaaggggaaaagcagatggttagttcactggaatctgtgccacaggcgcctgtaagcaggaggcgtcc

SEQ ID NO: 232397 - DNA, 201 bp, Homo sapiens
attaatggacagtgccgttgtttccggctttgggctgttgtgagtaatcctgctgtgaatgtggatgtgagggtgtccacccacatccctggatatgtccytggggcggaatcgccacatcgaccgtaattctcttatctcttggctgtttgattacagccatcccagtggatgtgagtggatctcaatgtggttttagca

SEQ ID NO: 232398 - DNA, 201 bp, Homo sapiens
tgcctcactttgaaatactaaattaagtgatcatattgtattcattaattcccaagtcctgttatatttccataaataaataagaaatgttaaaaaaaaaaagacataagtaaaagtaggtaaagatattagaaaaaggggaaaagcagatggttagttcactggaatctgtgccacaggcgcctgtaagcaggaggcgtc

SEQ ID NO: 232399 - DNA, 201 bp, Homo sapiens
gattacggtttgttatccttacagagtagagtagaacatcttttttacccacaaatgtatcaagacaagcaacacttagttggaagatttttgaagtatatcttaaaatattcatgtgaatatatgctgtgcataggagacaagtgagaaaggcactcagcaaccagaatgctcaccgtggccctttgaaatgagcagtga

SEQ ID NO: 232400 - DNA, 201 bp, Homo sapiens
tgtgtgtgcatgtgagagtgtgtgagcatgtgtgaaaacgtgtgcatgtgagaatgtgcatgtgtgtgagaacgtgtgcctgtgagagcatgtgtgaggaygtgtatgtgagaatgtgcatgcattatgtggttgtgtgtctgcatatgtgcatgtgtctgcatacattgtgtgtgcatgctgtgaatgtctgtgtacgtg

SEQ ID NO: 232401 - DNA, 201 bp, Homo sapiens
cctttgcagctctcttcctcacagatgcaattactagtgaaatctggtccaggaggatgggatgggattctattttaaggttatttctttccttcttaggyctgaatagccattgttaaccgcccgggcaccctcctggatccgtcctttggggcttaatgctccagcccgttaattctgctctttaaattctcacaggtg

SEQ ID NO: 232402 - DNA, 201 bp, Homo sapiens
agattacggtttgttatccttacagagtagagtagaacatcttttttacccacaaatgtatcaagacaagcaacacttagttggaagatttttgaagtatatcttaaaatattcatgtgaatatatgctgtgcataggagacaagtgagaaaggcactcagcaaccagaatgctcaccgtggccctttgaaatgagcagtg

SEQ ID NO: 232403 - DNA, 201 bp, Homo sapiens
gtgcatgcgagaatgagcatgtgtgtgagaatgtatgcatgtgagagcatgtgtgaggatgtgtgcatgtgtgagaatgtgcatgtgtgtgcatgtgagtgtgtgagcatgtgtgaaacgtgcatgtgagaatgtgcatgtgagaatgtatgcatgtgagagcatgtgtgaggatgtgtgcatgtgtgagaatgtgcatgt

SEQ ID NO: 232404 - DNA, 201 bp, Homo sapiens
ggtcgccatggagcccacacggggctttcccgttcaggcctcttgagccctgccatcttctgggaggggagtcggaaaaggttaaggacaagagatcctcmtctgtgttagtcacaggcccagagtggacagtggccagtttcctagttgagaagaggacttggccaattgggggccatgttaggcccactgcattttatt

SEQ ID NO: 232405 - DNA, 201 bp, Homo sapiens
aaatagattacggtttgttatccttacagagtagagtagaacatcttttttacccacaaatgtatcaagacaagcaacacttagttggaagatttttgaagtatatcttaaaatattcatgtgaatatatgctgtgcataggagacaagtgagaaaggcactcagcaaccagaatgctcaccgtggccctttgaaatgagc

SEQ ID NO: 232406 - DNA, 201 bp, Homo sapiens
ctctataatttcatatgctaataaaaatctacaaatgccacatcagtgtgccccacaggattagtggttttgggtagttaggctgtaaatgttaagatgtrggtttacagccacaagtagccagttgtgtttgcaaagaaacgaggtcagaggactttgtgtctttgtaatttctgtgggtttaaatgtgcttttgtttat

SEQ ID NO: 232407 - DNA, 201 bp, Homo sapiens
aaaatagattacggtttgttatccttacagagtagagtagaacatcttttttacccacaaatgtatcaagacaagcaacacttagttggaagatttttgaagtatatcttaaaatattcatgtgaatatatgctgtgcataggagacaagtgagaaaggcactcagcaaccagaatgctcaccgtggccctttgaaatgag

SEQ ID NO: 232408 - DNA, 201 bp, Homo sapiens
cgagaaagggctggtgctctgggcgccgcagggatgggggctgagcgagcggagaggccgcttttttcctactgatcttaggctgttccaagactgttccrcatttagaagagtgttgaaaattatttttcacttacatgaaacatgtctatatctttaatttttgttttgagaaaacatcttgcgaaatgggaagaactc

SEQ ID NO: 232409 - DNA, 201 bp, Homo sapiens
aaaatccagactcctcagcgggcaccgctgcaaacagacctgcctctaaggctgataacgtgaaggtgtcgttttcaacacaaaaggctctgcacagaggktttttcttctgagcgggtggttatttgagtaacacgtcctcttgtcaatctttaggaaaacgggtgttgcccgcagcgaggtgggcggaggcacaagtga

SEQ ID NO: 232410 - DNA, 201 bp, Homo sapiens
ttgcctgacacatggaggctgtttcctccaaaacccgtctagcagcacccagtcttgtgacccagtgactgtccttaatgctccaaccctaaatggtctcrtaggatgagctagaaaacaccatgagacagggactggcaggatggattcagaaacgggagaaggatgacaggggaaaccttagattgagttcatatctct

SEQ ID NO: 232411 - DNA, 201 bp, Homo sapiens
aagcagacagaaggacttctgctcttgagtgtgggaggcaggggtatggacgtgaaaataactaggaaacagcacacgcctggatgcccggagcccggcckcgaggttgtgtggggactcgagaaagggctggtgctctgggcgccgcagggatgggggctgagcgagcggagaggccgcttttttcctactgatcttagg

SEQ ID NO: 232412 - DNA, 201 bp, Homo sapiens
ttcctgagtccccgtagctttctccatgaatggtttgatctaggaattcactcttccacaagcacatcatgtctaggccctcaggaagtatgagaatttgrgaaggttggagacaccttttcactcagggcttatctagaaacagcttaagtaaaattcccttaatggagtttaaaaatatgaaaatgtcagactgagttc

SEQ ID NO: 232413 - DNA, 201 bp, Homo sapiens
tggactgtggagaatgagggagatgtgaaaaaaggagaagagttgtggaggagacttgtagagaagagctctctgaactgttgcccttccaaatttatacractgctgttaggttcaggttgttacaggaacactcaatgagctgacacctgtctgtcatgagttacagtgatgtttgctgggcaaccccagaaaggaaga

SEQ ID NO: 232414 - DNA, 201 bp, Homo sapiens
cggcgcaacattcaaacatgttttgcatcacgtcaaaaaacagacgagagagaaaccacaacaattcgggggtttgagattttgcaaagaaaatatacctstcttataaaaatcgttgttttctatcacttctgtttctgtgtggatgtgggggggatgtgtgtgtacgtgtgtgtgtgcatatgtatggaatgtgtgtgt

SEQ ID NO: 232415 - DNA, 201 bp, Homo sapiens
ttaggaggacacatttatgactggttgaaaatgatatgaaatagtgatagcacagtgctgctaagagtcagctgatgttgatttgaaggaatcaggactayggcgcaacattcaaacatgttttgcatcacgtcaaaaaacagacgagagagaaaccacaacaattcgggggtttgagattttgcaaagaaaatatacctg

SEQ ID NO: 232416 - DNA, 201 bp, Homo sapiens
tatcttagtttggccactactactgaaaagtgccagagttgcgagatcatttggcgtgtaggtgtttgaagatgtctcaaaaatcatcggcttcctcgggrtcttctgtgaaaagatcctttgacctgcccagttgccaccctgtgctgttgtccggtccagtgaagcctaacgctgaccaggggaaggtgacccacacgc

SEQ ID NO: 232417 - DNA, 201 bp, Homo sapiens
accaatgagggttccaaagcaccccagggacctcagcaggcaggacgggagcccagttctttgaccctgagcacttgttcccattctcctgaagatgagcrcattattaccgtcatgctgtgtggttcttgagagcctgctaagtaacagtacgctttgtgcgtgtcccattaccctttctatgcattaggatttcatgcc

SEQ ID NO: 232418 - DNA, 201 bp, Homo sapiens
agggagccctgcttgtgtgtccccaacaatggaatggaggcttcaagtcacaggtccagttttacagcgtttcaggatttgcacacttactgtgctgagcrtactctgggctttattaaggtgtgtgtctgtgctctatacgcatgtgaggtaatgagggggacacacacatgcatacgtgcaccatatacatccattgca

SEQ ID NO: 232419 - DNA, 201 bp, Homo sapiens
catgggggctgaaaagagcaacctggccgtggcttggctgagctttcagttgctttttccagaaaggcagcagggggcctatccacatcccaggccaggcygaaaacctggggtgaggggtgggtgatgctgccttggaaatagacatggatttcttgaacttacaggaagcatacactattggggtgtcaaagagttttt

SEQ ID NO: 232420 - DNA, 201 bp, Homo sapiens
gccgcagaggtgatggggacgaggcagagttgtcaggccactggtgctcaagtgctctcgcgttcccacccactccgagcagctgaggcttgaggctgtgyggcaaccagagcagagttgccatggcaactggagaggcaggctgcttaggcgaaggatggatggagggaccaactttgtgtttctggtaaaatgggcgtg

SEQ ID NO: 232421 - DNA, 201 bp, Homo sapiens
ggtcacgcatttcactgtaacatgagcgggaagatgtactgagcctgttctccacctcggtgaatgctccgaccccctcttgcctcacctcccactgtatrcatttgttcctttttaattttttgaagactggtcaagtgcagtagtgagaagggggaaggggtacaacaaggagctagattgggaactgactgagcagcc

SEQ ID NO: 232422 - DNA, 201 bp, Homo sapiens
gacgagccttaaagccagacacagttaaagagcaactctgattccaggacatgtgtccagccacagtgacacagcttcaccccgagtgcccggggggggggcaggggtggtggcctgagtgggactcaggtgccatccccaggggtctcagaacccagaattgccaggctctgtccctacttggttaaaattttatgcgaa

SEQ ID NO: 232423 - DNA, 201 bp, Homo sapiens
aatgcttaggcccggaagtgcctgcgctggggttcacatcagcgcgactccgtgagccttttgcttttcctgctctagacccgggtgtgcgcagctgcgayggagtctcacttagagtggaaccactgagcagaacatgtagtcgtgtcgctgcttttgttgaaaagtgtaatttttctctggttcctttttttgagggtt

SEQ ID NO: 232424 - DNA, 201 bp, Homo sapiens
ttaattgtcaataacaactgctacctccattacaaaaggaattgaaagcaaaaataagacccggacaatagaacgtaaacggaagagcaaatcccactccrgattggaattgtctgccgggctcgttaatccctggcctggcgctgggagtgtgggtgccgcttttcttagggtttgctttctgatcttgtgtcaattact

SEQ ID NO: 232425 - DNA, 201 bp, Homo sapiens
gcttctgcgactgctctgattctcgccgcagaggtgatggggacgaggcagagttgtcaggccactggtgctcaagtgctctcgcgttcccacccactccragcagctgaggcttgaggctgtgcggcaaccagagcagagttgccatggcaactggagaggcaggctgcttaggcgaaggatggatggagggaccaactt

SEQ ID NO: 232426 - DNA, 201 bp, Homo sapiens
aaatgagtgagaatgccaaagctccacagtaggaagcgagttagaggctcaagtgtgaaccttaaaccacacagctgtggccttggggttcctgcagaaaygcttaggcccggaagtgcctgcgctggggttcacatcagcgcgactccgtgagccttttgcttttcctgctctagacccgggtgtgcgcagctgcgatgg

SEQ ID NO: 232427 - DNA, 201 bp, Homo sapiens
aggcgcggctctcccactctgaaatgatgcctttctcttctgagctcctaaagtgcagggtgtttttcagactcaaaggtcaagtccttcttagaataggsctgcatgtgtctttgtccagtgcatgtttgcctgctttcctcggggcacctgtcactgcaaagcccagctgcccgcttacccatctgagaagaaaagctt

SEQ ID NO: 232428 - DNA, 201 bp, Homo sapiens
ggggtggtggggccttcctaccctgtcctgtcctgccatcctttggagaaacgtgtctcttgtttgtctttggtaactggtgcagggctggggctgggggktagtgagggatagggctccgggctatcaggtccgcctggagtgctcaccaacccacacactaattcaggagcagtatgcttgggtctgcctgcctagaaa

SEQ ID NO: 232429 - DNA, 201 bp, Homo sapiens
tggctggatcatgtgacctttttatttgaggataacctgctcaccagtttatttatctggctggattttctgcccccatcaagaatgaagtaaataaacgkgggtgattaagccagcactagaatgcatgctttgattctgtttggcattaaatgagtgagaatgccaaagctccacagtaggaagcgagttagaggctca

SEQ ID NO: 232430 - DNA, 201 bp, Homo sapiens
gcgcggctctcccactctgaaatgatgcctttctcttctgagctcctaaagtgcagggtgtttttcagactcaaaggtcaagtccttcttagaatagggcygcatgtgtctttgtccagtgcatgtttgcctgctttcctcggggcacctgtcactgcaaagcccagctgcccgcttacccatctgagaagaaaagcttat

SEQ ID NO: 232431 - DNA, 201 bp, Homo sapiens
ggcgggtggctgtgaggaggaatcgtggagtcgtagggtcagaaggacagggcagtacgcaggaaccgttgccttctcgctgcttctgtgggcagcttctycccgcagggggaaagatgaggcttttctagtgcgagagaagctcaaacatgtgtcactgttgtgtctcccaaaccgaagggtacactgtcctttctaagg

SEQ ID NO: 232432 - DNA, 201 bp, Homo sapiens
gggcatgcactatcctctgtgcagggttggaagcatgagtactcggccacgctgtcctctgttagggatggaaccttcaagtcctccctctgcacctgcckctcccaccgcgtcctttccgcgtgctcaccgggaactcccaggtctatggaaagggtcctcgggaccacccctcccttctctcatgccccgccttcccca

SEQ ID NO: 232433 - DNA, 201 bp, Homo sapiens
tgtgcatgcgagaatgagcatgtgtgtgagaatgtatgcatgtgagagcatgtgtgaggatgtgtgcatgtgtgagaatgtgcatgtgtgtgcatgtgagtgtgtgagcatgtgtgaaacgtgcatgtgagaatgtgcatgtgagaatgtatgcatgtgagagcatgtgtgaggatgtgtgcatgtgtgagaatgtgcatg

SEQ ID NO: 232434 - DNA, 201 bp, Homo sapiens
gtgtgcatgcgagaatgagcatgtgtgtgagaatgtatgcatgtgagagcatgtgtgaggatgtgtgcatgtgtgagaatgtgcatgtgtgtgcatgtgagtgtgtgagcatgtgtgaaacgtgcatgtgagaatgtgcatgtgagaatgtatgcatgtgagagcatgtgtgaggatgtgtgcatgtgtgagaatgtgcat

SEQ ID NO: 232435 - DNA, 201 bp, Homo sapiens
tgaaaatagattacggtttgttatccttacagagtagagtagaacatcttttttacccacaaatgtatcaagacaagcaacacttagttggaagatttttgaagtatatcttaaaatattcatgtgaatatatgctgtgcataggagacaagtgagaaaggcactcagcaaccagaatgctcaccgtggccctttgaaatg

SEQ ID NO: 232436 - DNA, 201 bp, Homo sapiens
cgtgtgcatgcgagaatgagcatgtgtgtgagaatgtatgcatgtgagagcatgtgtgaggatgtgtgcatgtgtgagaatgtgcatgtgtgtgcatgtgagtgtgtgagcatgtgtgaaacgtgcatgtgagaatgtgcatgtgagaatgtatgcatgtgagagcatgtgtgaggatgtgtgcatgtgtgagaatgtgca

SEQ ID NO: 232437 - DNA, 201 bp, Homo sapiens
atgaaaatagattacggtttgttatccttacagagtagagtagaacatcttttttacccacaaatgtatcaagacaagcaacacttagttggaagatttttgaagtatatcttaaaatattcatgtgaatatatgctgtgcataggagacaagtgagaaaggcactcagcaaccagaatgctcaccgtggccctttgaaat

SEQ ID NO: 232438 - DNA, 201 bp, Homo sapiens
gtgtgaatgtgtgcgtgtgtgcatgtgtgagaatgtgtatgtgtgtatgtgagaacgtgtgagcatgtgcatgtgtgagaatgtgtgcatgtgtgagaacrtgtgcatgcgagaatgagcatgtgtgtgagaatgtatgcatgtgagagcatgtgtgaggatgtgtgcatgtgtgagaatgtgcatgtgtgtgcatgtgag

SEQ ID NO: 232439 - DNA, 201 bp, Homo sapiens
gatgaaaatagattacggtttgttatccttacagagtagagtagaacatcttttttacccacaaatgtatcaagacaagcaacacttagttggaagatttttgaagtatatcttaaaatattcatgtgaatatatgctgtgcataggagacaagtgagaaaggcactcagcaaccagaatgctcaccgtggccctttgaaa

SEQ ID NO: 232440 - DNA, 201 bp, Homo sapiens
agaatgtgtatatatgtgagaatgcatgtgtgtgcatctgagaatgtgtatgtgcgtgtgaatgtgtgcgtgtgtgcatgtgtgagaatgtgtatgtgtgyatgtgagaacgtgtgagcatgtgcatgtgtgagaatgtgtgcatgtgtgagaacgtgtgcatgcgagaatgagcatgtgtgtgagaatgtatgcatgtga

SEQ ID NO: 232441 - DNA, 201 bp, Homo sapiens
ggatgaaaatagattacggtttgttatccttacagagtagagtagaacatcttttttacccacaaatgtatcaagacaagcaacacttagttggaagatttttgaagtatatcttaaaatattcatgtgaatatatgctgtgcataggagacaagtgagaaaggcactcagcaaccagaatgctcaccgtggccctttgaa

SEQ ID NO: 232442 - DNA, 201 bp, Homo sapiens
ttgtgtgagaatgtgcatgggtgagaatgagtgcatgtgagaatgtgtgcatgtatgtgcagatgagaatgtgtacatgtgcatgtgtgagaatgtgtatwtatgtgagaatgcatgtgtgtgcatctgagaatgtgtatgtgcgtgtgaatgtgtgcgtgtgtgcatgtgtgagaatgtgtatgtgtgtatgtgagaacg

SEQ ID NO: 232443 - DNA, 201 bp, Homo sapiens
aggatgaaaatagattacggtttgttatccttacagagtagagtagaacatcttttttacccacaaatgtatcaagacaagcaacacttagttggaagatttttgaagtatatcttaaaatattcatgtgaatatatgctgtgcataggagacaagtgagaaaggcactcagcaaccagaatgctcaccgtggccctttga

SEQ ID NO: 232444 - DNA, 201 bp, Homo sapiens
tgtgagcacgtgtgtgcatgtgagaatgtgtgcatgtatgtggatatgagaatgtttacgtgtgtgtttgagaatgtgtgcatgtgtgagaatgtgagcaygtgtgtgtgcatgtgagaatgtgtgcacgtgtggatatgagtgtgtatgtgtgtgcttgtgtgagaatgtgcatgggtgagaatgagtgcatgtgagaat

SEQ ID NO: 232445 - DNA, 201 bp, Homo sapiens
ggaggatgaaaatagattacggtttgttatccttacagagtagagtagaacatcttttttacccacaaatgtatcaagacaagcaacacttagttggaagatttttgaagtatatcttaaaatattcatgtgaatatatgctgtgcataggagacaagtgagaaaggcactcagcaaccagaatgctcaccgtggcccttt

SEQ ID NO: 232446 - DNA, 201 bp, Homo sapiens
ttgggaagatgagaatgctctgaagagcgtggtgacggtgacggttgtagaacggtgggaaggcccttactgccgctgcactgtgcacttacaaacggtawattatatgttaggtatcttttactacaattaaaatagagatatacagagtgagcccaattctacccaggatgaagctgtggcccagagagccataaggac

SEQ ID NO: 232447 - DNA, 201 bp, Homo sapiens
gaatgtgtacatgtgtgagcatgtgtgagcacgtgtgtgcatgtgagaatgtgtatgtgtgagaatgtgtacatgtgtgagcatgtgtgagcacgtgtgtrcatgtgagaatgtgtgcatgtatgtggatatgagaatgtttacgtgtgtgtttgagaatgtgtgcatgtgtgagaatgtgagcacgtgtgtgtgcatgtg

SEQ ID NO: 232448 - DNA, 201 bp, Homo sapiens
cacctcccgggatcaagcgattgcgcccgccaccacgcccggctaattttttttgtatttttagtagagacgaggtttcaccatttggtcaggctggtctygaactcctgacctcaaatgatccaccgacctcggcctcccaacgtgctgggattacaggcgtgagccaccgcgcgaggcctcacatggaatattttctag

SEQ ID NO: 232449 - DNA, 201 bp, Homo sapiens
gcatgtgataatgtgtgtgtgagaatgtgtacatgtgtgagcatgtgtgagcacgtgtgtgcatgtgagaatgtgtatgtgtgagaatgtgtacatgtgtgagcatgtgtgagcacgtgtgtgcatgtgagaatgtgtgcatgtatgtggatatgagaatgtttacgtgtgtgtttgagaatgtgtgcatgtgtgagaatg

SEQ ID NO: 232450 - DNA, 201 bp, Homo sapiens
tgttcaggggatggaggctgagccacccccgagggccgcatgcagggaggctcagcgcaccccatgttcaggggacggaggctgagtcacccccgagggcygcatgcccgtgtggatggttcacacggctgtgtgctcatgaaccagaccctgggagtgtggtgtggtttttatcttttagatttttctaaatccaaatga

SEQ ID NO: 232451 - DNA, 201 bp, Homo sapiens
tgcatgtgataatgtgtgtgtgagaatgtgtacatgtgtgagcatgtgtgagcacgtgtgtgcatgtgagaatgtgtatgtgtgagaatgtgtacatgtgtgagcatgtgtgagcacgtgtgtgcatgtgagaatgtgtgcatgtatgtggatatgagaatgtttacgtgtgtgtttgagaatgtgtgcatgtgtgagaat

SEQ ID NO: 232452 - DNA, 201 bp, Homo sapiens
gccagattctgcaggacagttctgaatgtcggcatgctctgtgagggcacctgttcttcagagcgagggtctgagggggcctgcgcgatccctacctggcyccttccctggcaggtgaggttgaaagccagtggaggttttctgttgttagagacccccggaaccctcacagccaccctttggttcacatagaggaggggc

SEQ ID NO: 232453 - DNA, 201 bp, Homo sapiens
ttcccttaaatcaggtctctgtggggcttcaggagagcttattttaagagtgtgtgtgtgtgtgtgtgtgtgtgtgtgtgtgtgtgtgtgtgtgtgtgtgtttgagacagagtctcgctctgtcacccaggctggcgtgcagtggcatgatctcagctcactgcaacctctgccttccaggcacaagcagttctcctgcct

SEQ ID NO: 232454 - DNA, 201 bp, Homo sapiens
cttcccttaaatcaggtctctgtggggcttcaggagagcttattttaagagtgtgtgtgtgtgtgtgtgtgtgtgtgtgtgtgtgtgtgtgtgtgtgtgtgtttgagacagagtctcgctctgtcacccaggctggcgtgcagtggcatgatctcagctcactgcaacctctgccttccaggcacaagcagttctcctgcc

SEQ ID NO: 232455 - DNA, 201 bp, Homo sapiens
tatagtaaaacattccaagttccttatgctcctttttggagaagttcttccaagtttcagaagattcaaaggcagtgttttggatgcccatcatcaaaatraaatgtttacctataatataaatcacttgtagagatttccagattatgcattattattccacagatattggctgagtgcttgctgcctgtgctgagcagc

SEQ ID NO: 232456 - DNA, 201 bp, Homo sapiens
atgctagtctaggcacccttggtaatttttttaaataggttatattttgcaccagaaacgccaacctggtcgttcagtgaaaaagcaactggaaaggggargcgatggtaagaagatcagcgagaaggctgcagtgacgggccaggagaaaacccacagggcatttcagaggccaggctcaggctttggtgctgccactgg

SEQ ID NO: 232457 - DNA, 201 bp, Homo sapiens
gaacgtggctggtggaggatggccgccgtcaggcccttccgtccctcaggctgcgagtggcatctctttgtactgtgatcacttcttccttattaatttckatgtttatttcttggcacacaccagttcattaaccctatatcgttgtctggaattttataatctaatctaacattagtctatttattccactttaatcaa

SEQ ID NO: 232458 - DNA, 201 bp, Homo sapiens
gtgtgctcccaaggctcaaggtgtggtgggggaaaagcgttcgctgcgtggagcaggcagtcggtgcggcttctcaacggcactggagtccctctgctttycccaactagctcaagcagggccatggtgggggtgacagtgacaacctgggacctcccaacagacggccttagagtgcccaccctgagccaggcgattgtc

SEQ ID NO: 232459 - DNA, 201 bp, Homo sapiens
tgtgccaccatgcctagctaatttttatatttttagtagagatggggtttcaccgtgttggccaggctggtcttgagctcctgacctcaagtgatccaccygcctcagcctcccaaaattctgggattacaggcgtgagccactgcacctggccaacttgcacactgtttatggaaacagtgtgtaggttcctcaagaaat

SEQ ID NO: 232460 - DNA, 201 bp, Homo sapiens
ggagaatcacttcaacctgagaggcagaggctgcagtgagccgagatcgcgccactgcactccagcctgggcgacagatcctgtctcaaaaaaaaaaaaaattaattaaaagattaaaaaatttgccctggtttacccagataataaattacagagccgagatcctaacctagaacttcattattcactcattcatggaaa

SEQ ID NO: 232461 - DNA, 201 bp, Homo sapiens
cgtggagtagaaatgaggcacagactggcactctgcagtgctcatgaagaaaggtcagctgaccgcctagaccccctgggtatctggagctgaattgtttycctctgctctatctgagcctctcatttcagcaacccacttttatctgagggatttgcaagatacaagggaagaaaaagagagacaaatgagagagcaaaa

SEQ ID NO: 232462 - DNA, 201 bp, Homo sapiens
gaataataaagcacaaatatcagtgtaaatataaatatagagagagattttgcaggtgagagtaaagcctaaaatgttaccatttggagaatcgggtgacragtgtctgagattcttgtatgatagtcttacaacttttctataaatctgacgtatgttaaaataacatatttttaaaggggggaggggaagcaacttaga

SEQ ID NO: 232463 - DNA, 201 bp, Homo sapiens
atgtgtgagcatgtgtgtgcatgtgataatgtgtgtgtgagaatgtgtacatgtgtgagcatgtgtgagcacgtgtgtgcatgtgagaatgtgtatgtgtgagaatgtgtacatgtgtgagcatgtgtgagcacgtgtgtgcatgtgagaatgtgtgcatgtatgtggatatgagaatgtttacgtgtgtgtttgagaatg

SEQ ID NO: 232464 - DNA, 201 bp, Homo sapiens
catgtgtgagcatgtgtgtgcatgtgataatgtgtgtgtgagaatgtgtacatgtgtgagcatgtgtgagcacgtgtgtgcatgtgagaatgtgtatgtgtgagaatgtgtacatgtgtgagcatgtgtgagcacgtgtgtgcatgtgagaatgtgtgcatgtatgtggatatgagaatgtttacgtgtgtgtttgagaat

SEQ ID NO: 232465 - DNA, 201 bp, Homo sapiens
tcttcccttaaatcaggtctctgtggggcttcaggagagcttattttaagagtgtgtgtgtgtgtgtgtgtgtgtgtgtgtgtgtgtgtgtgtgtgtgtgtgtttgagacagagtctcgctctgtcacccaggctggcgtgcagtggcatgatctcagctcactgcaacctctgccttccaggcacaagcagttctcctgc

SEQ ID NO: 232466 - DNA, 201 bp, Homo sapiens
tgagaacgtgtacatgtgtgagcaggtgtgtgcatgtgagaatgtgtgtgagaacgtgtacatgtgtgagcatgtgtgagcatgtgtgtgcatgtgataatgtgtgtgtgagaatgtgtacatgtgtgagcatgtgtgagcacgtgtgtgcatgtgagaatgtgtatgtgtgagaatgtgtacatgtgtgagcatgtgtga

SEQ ID NO: 232467 - DNA, 201 bp, Homo sapiens
atcttcccttaaatcaggtctctgtggggcttcaggagagcttattttaagagtgtgtgtgtgtgtgtgtgtgtgtgtgtgtgtgtgtgtgtgtgtgtgtgtgtttgagacagagtctcgctctgtcacccaggctggcgtgcagtggcatgatctcagctcactgcaacctctgccttccaggcacaagcagttctcctg

SEQ ID NO: 232468 - DNA, 201 bp, Homo sapiens
gtgagaacgtgtacatgtgtgagcaggtgtgtgcatgtgagaatgtgtgtgagaacgtgtacatgtgtgagcatgtgtgagcatgtgtgtgcatgtgataatgtgtgtgtgagaatgtgtacatgtgtgagcatgtgtgagcacgtgtgtgcatgtgagaatgtgtatgtgtgagaatgtgtacatgtgtgagcatgtgtg

SEQ ID NO: 232469 - DNA, 201 bp, Homo sapiens
catcttcccttaaatcaggtctctgtggggcttcaggagagcttattttaagagtgtgtgtgtgtgtgtgtgtgtgtgtgtgtgtgtgtgtgtgtgtgtgkgtgtttgagacagagtctcgctctgtcacccaggctggcgtgcagtggcatgatctcagctcactgcaacctctgccttccaggcacaagcagttctcct

SEQ ID NO: 232470 - DNA, 201 bp, Homo sapiens
tgtgagaacgtgtacatgtgtgagcaggtgtgtgcatgtgagaatgtgtgtgagaacgtgtacatgtgtgagcatgtgtgagcatgtgtgtgcatgtgataatgtgtgtgtgagaatgtgtacatgtgtgagcatgtgtgagcacgtgtgtgcatgtgagaatgtgtatgtgtgagaatgtgtacatgtgtgagcatgtgt

SEQ ID NO: 232471 - DNA, 201 bp, Homo sapiens
ttcacaccaccacatccagctccagtgtttcactatttcagattgatcatcttcccttaaatcaggtctctgtggggcttcaggagagcttattttaagartgtgtgtgtgtgtgtgtgtgtgtgtgtgtgtgtgtgtgtgtgtgtgtgtgtttgagacagagtctcgctctgtcacccaggctggcgtgcagtggcatga

SEQ ID NO: 232472 - DNA, 201 bp, Homo sapiens
gtgtgagaatgttcatgtgtgtgagaacttgtgcatgtgagaatgtatgtgtgagaacgtgtacatgtgtgagcaggtgtgtgcatgtgagaatgtgtgtgagaacgtgtacatgtgtgagcatgtgtgagcatgtgtgtgcatgtgataatgtgtgtgtgagaatgtgtacatgtgtgagcatgtgtgagcacgtgtgtg

SEQ ID NO: 232473 - DNA, 201 bp, Homo sapiens
aggttcacaccaccacatccagctccagtgtttcactatttcagattgatcatcttcccttaaatcaggtctctgtggggcttcaggagagcttattttaagagtgtgtgtgtgtgtgtgtgtgtgtgtgtgtgtgtgtgtgtgtgtgtgtgtgtttgagacagagtctcgctctgtcacccaggctggcgtgcagtggca

SEQ ID NO: 232474 - DNA, 201 bp, Homo sapiens
tgtgtgagaatgttcatgtgtgtgagaacttgtgcatgtgagaatgtatgtgtgagaacgtgtacatgtgtgagcaggtgtgtgcatgtgagaatgtgtgtgagaacgtgtacatgtgtgagcatgtgtgagcatgtgtgtgcatgtgataatgtgtgtgtgagaatgtgtacatgtgtgagcatgtgtgagcacgtgtgt

SEQ ID NO: 232475 - DNA, 201 bp, Homo sapiens
gtgcagggccgcccaccacccggcaccagtggctcgtctgcctgtctgcctgtttgtctgcctgtctgtctgcctgtctcgctgtctgcctgtctgcctgygtgtcttgtctctgtctgcctgcctgtcttgtctctatctgcctgtcttgtctgtctgcctgcctgtctgcctgtctgcctgcctgtgtatctgcctgtc

SEQ ID NO: 232476 - DNA, 201 bp, Homo sapiens
acatgtacatgtgtgagcatgtgagaacagatagtgtgtacatgtgcatgtgtgtgagaatgttcatgtgtgtgagaacttgtgcatgtgagaatgtatgtgtgagaacgtgtacatgtgtgagcaggtgtgtgcatgtgagaatgtgtgtgagaacgtgtacatgtgtgagcatgtgtgagcatgtgtgtgcatgtgata

SEQ ID NO: 232477 - DNA, 201 bp, Homo sapiens
aacatgtacatgtgtgagcatgtgagaacagatagtgtgtacatgtgcatgtgtgtgagaatgttcatgtgtgtgagaacttgtgcatgtgagaatgtatgtgtgagaacgtgtacatgtgtgagcaggtgtgtgcatgtgagaatgtgtgtgagaacgtgtacatgtgtgagcatgtgtgagcatgtgtgtgcatgtgat

SEQ ID NO: 232478 - DNA, 201 bp, Homo sapiens
gaacatgtacatgtgtgagcatgtgagaacagatagtgtgtacatgtgcatgtgtgtgagaatgttcatgtgtgtgagaacttgtgcatgtgagaatgtatgtgtgagaacgtgtacatgtgtgagcaggtgtgtgcatgtgagaatgtgtgtgagaacgtgtacatgtgtgagcatgtgtgagcatgtgtgtgcatgtga

SEQ ID NO: 232479 - DNA, 201 bp, Homo sapiens
tcgcttgaacccaggaggcagaggttgcagtgagccaagattgcaccactgcactccagcatggatgacagggtgaggctccatctcaaaaaaaaaaaaaagtaaaaacagaattatactgttaattgtacttgccttctggctgttgattttcatgaagtcacttggagtgagtcacactggattctctgtggtaccggc

SEQ ID NO: 232480 - DNA, 201 bp, Homo sapiens
ccaaccttctcagttgtgtccagagttaggggtgcgttctagcttcttagcatcatgatagagcagagaggtcccctgcccagcgttctagcttctaagcrtcgtgatagacacagaggtcccctgcccagcgttctagcttctaagcgtcgtgatagacacagaggtcccctgcccagcgttctagcttctaagcgtcgt

SEQ ID NO: 232481 - DNA, 201 bp, Homo sapiens
gggcaggagcttgggtgagaaggcaaggccaggagggagaagtaattttatggtacattttgtgtctttcctttatttcataccacaattcttttttttttccaaatttgggttgtaagaatgaagcagaagaaatcgatggtgcctcttctttatgaaatagctgaaggtacaatgataattaccttcctagcagcagct

SEQ ID NO: 232482 - DNA, 201 bp, Homo sapiens
tctctgtccagtgtgggatgaggtcagaggtcttcagatggttattcaaggagccctgggggctccaaggcagttgggtgtgaatccctgctcagctcackctaccctcacactccggctcagcaaggtccaggcttctgttgcctgctgctcactgggcttctgggtgagactttgttccaagaaaggattctgtagcca

SEQ ID NO: 232483 - DNA, 201 bp, Homo sapiens
ctgtgcccccacagatgttgccatctcctgcctctcgtgtcttccccacgtgtgtcctttgccaatgctccctgcagtttcccttgtctggcctgtgctgygtggagggtgcacctctgaacatcacgcagtcctcagggggccctgggatcaaaggtgtgtccacggttagtgtgctgaggtctcactctgtgctggttg

SEQ ID NO: 232484 - DNA, 201 bp, Homo sapiens
ggaccgtgcctttgtcaggcacattaaatgtttcaggtggatccaggtggatggatgaggctcttggctggaagaaatgctatttgggaaatgccaacagrtgaggtggagagctggcaagcagaccacttgcaaagggctctccagccaaaatgatttgtgtgagaccggaggccctgtggtgctgggggcaggtgaaat

SEQ ID NO: 232485 - DNA, 201 bp, Homo sapiens
atccgcacaaccctggctgaggaataatgacatggaaagcgacgtcctctttcccctgagcagtttctcgtctatcaggaacagggtttttttttttttttcctcccttctcctgacatagtcacccataaatggtttggccttaattcctatgaaggtaaggacactgctgatgttccttgagtccccacgctagcagct

SEQ ID NO: 232486 - DNA, 201 bp, Homo sapiens
ctctcatttcagcaacccacttttatctgagggatttgcaagatacaagggaagaaaaagagagacaaatgagagagcaaaaagggaaaagatgatattcrggagaagttcttattctcttaaaaattaggaaatgaaagtaagcttttgcactaaaaatacttcataaaaacaatcaaatcttttttgaaacaagaggaa

SEQ ID NO: 232487 - DNA, 201 bp, Homo sapiens
actcccgagtgactggtgttgttggggtggatataaccaaacagggatttaaggaatgcagccagcaattgcccaaagccacgtcccctggggagcccccrtcctcacgggtcctggtgtcttcatcctgtggactggctcagcctggcctcagcgcctgccccggggtcagcaggttaaggggtccacagcccctgcagc

SEQ ID NO: 232488 - DNA, 201 bp, Homo sapiens
acaaatgagagagcaaaaagggaaaagatgatattcgggagaagttcttattctcttaaaaattaggaaatgaaagtaagcttttgcactaaaaatacttsataaaaacaatcaaatcttttttgaaacaagaggaaagacagatggagataggtataggtgggggatggatggatgaatgaacaggtgaatgggtgggta

SEQ ID NO: 232489 - DNA, 201 bp, Homo sapiens
ttgtaatctttctggacggcgttgttttcgatatgttgcttgtagataatgagtagtttgatgcgagtgaaggcacctgtcctaggaagatgacttcccckgctcccacgcgtcgtcctcactgtgtgtgtttctcgttaatcacaccggcccacgccttccagctcctcagcttccctcctgttccttcgatggtttacc

SEQ ID NO: 232490 - DNA, 201 bp, Homo sapiens
gccatttggggccactgttgctcctctgggacctgcttttgacgcgtccagtgtggaagccggacaccagcctcgcgctcggttattcagctcagcggtgrgcagcgtgcctcctgagtggtgggtggggcaggtctcattttcatgaccatctctggatgtagcagggctttctggatatgagccccagcctgtcccagt

SEQ ID NO: 232491 - DNA, 201 bp, Homo sapiens
ctttacatttaccatttcagaaggcacgtctttaccagcatccgtgctaatgtctgaagaaaaggacaaactaagaaaacgcagaacctaaggctatttgyggcagtgcgtccaggaagaatcttttaggggtaggtttgagggctgtgactgaaaattctcagaaaatgtgtagatgggggaatgtggccatttattcag

SEQ ID NO: 232492 - DNA, 201 bp, Homo sapiens
acccacctcttgcatcaccatgacccagatgtttgacatggagtcaaaggagatcattttggagctttaagatttgactgccctgctagatttcagacttrcgtggggcctgtagcctctttgttttggccaagttctcccatttggaatggctgtatttaacaaatacctatgcctccattatgtctaggaagcaagtaa

SEQ ID NO: 232493 - DNA, 201 bp, Homo sapiens
ggggggaggggaagcaacttagagtaacaatagaaagccatgaccaacctaaaataatttctcctggcggtggtagaatcccaattttgtgcacatgctcrtgctcaggagaagctctgccatgttgccccgccctgcacggcagccgtaattcctactgaagcccagaccgcagtctatgctaagctctagtcatttatt

SEQ ID NO: 232494 - DNA, 201 bp, Homo sapiens
agaacatgtacatgtgtgagcatgtgagaacagatagtgtgtacatgtgcatgtgtgtgagaatgttcatgtgtgtgagaacttgtgcatgtgagaatgtatgtgtgagaacgtgtacatgtgtgagcaggtgtgtgcatgtgagaatgtgtgtgagaacgtgtacatgtgtgagcatgtgtgagcatgtgtgtgcatgtg

SEQ ID NO: 232495 - DNA, 201 bp, Homo sapiens
gcctggttcttgtactggttcatggcccgggggttggggactcctgctgtaagaatagaatggggctggaaaaattgtttttgcagaagacagatttatgyatttctttccttcatggcgactttctgaggagagaagaggggagtggggaggagaacagtcgcattcatgggatactttgcaaattccatgctgttttac

SEQ ID NO: 232496 - DNA, 201 bp, Homo sapiens
atgtctgcaggtgtcacatcttatggtgagagtgtggatgtgagtgacatctgcaggtgtcggctcttatggtgagagtatgggtgtgagtgacctctgtrggcctcagctcttatggtgagagtgtgggtgtgagtgacgtctgcagatgtcacctcttatcgttagagtgtgggtgtcagtgacgtttgcggttgtcag

SEQ ID NO: 232497 - DNA, 201 bp, Homo sapiens
tctcgtacagagtgtgcagcttctgtccctcctgtgtgcagttcacaatggggtttgcactcctgtaaaatctaacaccactgctgatctgacaggcagcrgaactcaggcgggaatgctcgcacacctgctgctcacctcctgctgtgtggcctggttcttgtactggttcatggcccgggggttggggactcctgctgt

SEQ ID NO: 232498 - DNA, 201 bp, Homo sapiens
tcggctctgctggtctcagcggccactgatggcggacggtgctcagctctcggctctgctggtctcagcggccactgatggtggagggtgctcagctctcrgctctgctggtctcagcacacctgtgggataaagcacgctgggaagatgtccacatgcctgagccagtcccgttttcccgcaattcgtggcccacacagt

SEQ ID NO: 232499 - DNA, 201 bp, Homo sapiens
cctcagctcttatggtgagagtgtgggtgtgagtgacgtctgcaggtgtcacctcttatggtgagagtgtgggtgtgagtgacgtctgcaggtgtcagctsttatgttgagagtatgggtgtgagtgacatctgcaggtgtcacctcttatggtgagagtgtgggtgtgagtgtcctctgtgggcctcagctcttatggtg

SEQ ID NO: 232500 - DNA, 201 bp, Homo sapiens
ggtgctcagctctcggctctgctggtctcagcggccactgatggcggacggtgctcagctctcggctctgctggtctcagcggccactgatggtggagggygctcagctctcggctctgctggtctcagcacacctgtgggataaagcacgctgggaagatgtccacatgcctgagccagtcccgttttcccgcaattcgt

SEQ ID NO: 232501 - DNA, 201 bp, Homo sapiens
tctcaacaaactcggcacagaagggacttacctcaaaataataaaagccatgtatgataaacccacaaccaacattatatggaatggggaaaagttgaaarcatcccccctgcgaactgaaagaagacaaggatgcccactctcaccacttctattcaacatagtactggaagtcctagccagagcagtcagaaaacagaa

SEQ ID NO: 232502 - DNA, 201 bp, Homo sapiens
ggcggccactgatggcagacggtgctcagctctcggctctgctggtctcagcggccactgatggcggacggtgctcagctctcggctctgctggtctcagyggccactgatggtggagggtgctcagctctcggctctgctggtctcagcacacctgtgggataaagcacgctgggaagatgtccacatgcctgagccagt

SEQ ID NO: 232503 - DNA, 201 bp, Homo sapiens
atgcaggaaaagcattcaataaaacccagcatcacttcatgataaaaactctcaacaaactcggcacagaagggacttacctcaaaataataaaagccatrtatgataaacccacaaccaacattatatggaatggggaaaagttgaaaacatcccccctgcgaactgaaagaagacaaggatgcccactctcaccacttc

SEQ ID NO: 232504 - DNA, 201 bp, Homo sapiens
tggcagacagtgctcagctctcggctctgctggtctcggcggccactgatggcagacggtgctcagctctcggctctgctggtctcagcggccactgatgrcggacggtgctcagctctcggctctgctggtctcagcggccactgatggtggagggtgctcagctctcggctctgctggtctcagcacacctgtgggata

SEQ ID NO: 232505 - DNA, 201 bp, Homo sapiens
gggtttcatcccagggatgcagggatggtttaacacatgcaagtcagtaaatgtgatacgtcacataaacagttaaaaacaaacaccatacgattatctcratagatgcaggaaaagcattcaataaaacccagcatcacttcatgataaaaactctcaacaaactcggcacagaagggacttacctcaaaataataaaag

SEQ ID NO: 232506 - DNA, 201 bp, Homo sapiens
tgccgtggggtgtggggggccctgccctggccggggtgtgccgccggagctgctcccacccgcttccccgcttcaccccagcgcctctgtggatgccctttgaccgcgacccctcccgtgcggcggaagtgagttgctcccgcgagctgtttgggcgttttccacacctgcccatcagttacgcctctagggagctaatgt

SEQ ID NO: 232507 - DNA, 201 bp, Homo sapiens
tgtcggcctcgagatgactgctctgccaagaccgtggcttccggtgtcgctacctgagttaagccacgtcagggcgggcccaggggagaagggcgtttgcrggttcctgcgactctttgtgatatggagaaggttccgacccatttatttcccaacagccttttcccaagaccatcctgcagtgggttctgataaaacatg

SEQ ID NO: 232508 - DNA, 201 bp, Homo sapiens
agctgaacagtgtcggcctcgagatgactgctctgccaagaccgtggcttccggtgtcgctacctgagttaagccacgtcagggcgggcccaggggagaarggcgtttgcaggttcctgcgactctttgtgatatggagaaggttccgacccatttatttcccaacagccttttcccaagaccatcctgcagtgggttctg

SEQ ID NO: 232509 - DNA, 201 bp, Homo sapiens
tacagggggcgagcgtggcggccttccccatcgcggggcgagcgtggcggccttcccagtacagggggcgagcgtggcggccttccccctacagggggcgrgcgtggcggccttcccagtacagggggcgagtgtggtggctgcctctgcactaggacatcccttccgttgggagctcgtgacggggccactgggggttca

SEQ ID NO: 232510 - DNA, 201 bp, Homo sapiens
tcactggggcatcgtgagccagcgtcgcccgtgctctgcgctgcagctgcgtgaacggcgtcctaaccacggcatcactggggcatcgtgagccagcgtcscccgtgctctgcgctgcagctgcgtgaacggcgtcctaaccacggcatcactggggcatcgtgagccagcgtcccccgtgctctgcgctgcagctgcgtg

SEQ ID NO: 232511 - DNA, 201 bp, Homo sapiens
catacagggggcgagcgtggcggccttccccatcgcggggcgagcgtggcggccttcccagtacagggggcgagcgtggcggccttccccctacagggggygagcgtggcggccttcccagtacagggggcgagtgtggtggctgcctctgcactaggacatcccttccgttgggagctcgtgacggggccactgggggtt

SEQ ID NO: 232512 - DNA, 201 bp, Homo sapiens
ccgggggcaggaagcctgggttacgggcggtggaaactggccgtgctgacctgtacataccaggcccgagggcaggaggccagggttccgggcggaggaamctggccgtgctgacctgtgtgtaccagccctaggggcaggaggccagggtgacaggagtgggaacctggccgtgctgacctgtgtgtaccagccccgggg

SEQ ID NO: 232513 - DNA, 201 bp, Homo sapiens
aggcgcccgccaccacgcctggctaattttttgtatttttagtagagacagggtttcaccgtgttagccaggatggtctcgatctcctgacctcgtgatcygcccgcctcagcctcccaaagtgctgggattcttaattctcagtgagtgaatttatttttcaatgatgaaaaagttttaaataaagcagatagttcagta

SEQ ID NO: 232514 - DNA, 201 bp, Homo sapiens
cagggtgaatgagtctaactctttagaaggcaggacagcagtggtcatctgcaaaccaacaaacaaaaactcttcccctttggctcagtaatcaaactccragaaatgtatcctaagaagacactccatccagcaaggaaatcagaaaaacaaaaccttcaccaaaaaaaaaaaactgacttaaaatataaaactatagca

SEQ ID NO: 232515 - DNA, 201 bp, Homo sapiens
caggacagcagtggtcatctgcaaaccaacaaacaaaaactcttcccctttggctcagtaatcaaactccaagaaatgtatcctaagaagacactccatcsagcaaggaaatcagaaaaacaaaaccttcaccaaaaaaaaaaaactgacttaaaatataaaactatagcaaggtaactcatcattaacaatcaaataaat

SEQ ID NO: 232516 - DNA, 201 bp, Homo sapiens
ttaaaaattaggaaatgaaagtaagcttttgcactaaaaatacttcataaaaacaatcaaatcttttttgaaacaagaggaaagacagatggagataggtrtaggtgggggatggatggatgaatgaacaggtgaatgggtgggtagatggatggatgtgtggtggatggatgtgtgggtatatggacgggtggatggatg

SEQ ID NO: 232517 - DNA, 201 bp, Homo sapiens
ctgccccggggtcagcaggttaaggggtccacagcccctgcagcaggaggttttaatgcctgaactggagaaccttcaaaggcacacacagaatctctgtmtcctcagcatcctcccatcaaagtctgtccgcatgtgttcctggctagtggctcaggaaaggtctgacgtcttcccacgtgtgacacagcagcacaaacc

SEQ ID NO: 232518 - DNA, 201 bp, Homo sapiens
aggcgggtctgaccttcatcctgtcacggtcccaactcagttttaaggtttctctggggtcctcttggtcaagagtaggtcattccgtcagttggggcttyggactttatttttctcagtggaattgcaagtgagttttttcctttgtccaaaagtttttatatgatttctgacttcttattttgaaaccattatagattc

SEQ ID NO: 232519 - DNA, 201 bp, Homo sapiens
tggtcttgaaggatgggtgggagacagtgcctactcagtgggtttggctggtgcccatggtggggcaggatggcatggggaattctgggaatggcgtggcrtagatcagtgatgatgagtgtggaaatccaagagtttcaagtgtgcagtgagtgtgtcattagcaatgctcatagatccaaatcagaaatttaaatgctt

SEQ ID NO: 232520 - DNA, 201 bp, Homo sapiens
ggtggggcctgcatgtcagggtggaatccttgccactcctgcctgcagcctggtggagacatgctcttcaggtcagctctggttatttacgttttcacatyagtacggcagggcctgcatgggtgcgtttgtgtctttcacttggcttcctgctggtgaggggtctgctggcagaggtgctcacatgtgctcccctggcct

SEQ ID NO: 232521 - DNA, 201 bp, Homo sapiens
cagaaatttaaatgcttggttggtgttacctcgtgtgctgtttccaacaaagctcaaagattgatctctttatcatgtgctatacacccagaaagagctgygcccaggcaggaaggaggtttggaactcccaggataagctttgctttttggccagaatttaaatgtgtccttatactcagcttgatgtcgtggtttttat

SEQ ID NO: 232522 - DNA, 201 bp, Homo sapiens
gccccttcaaattttgtctcgggaataattttgtgcattatcagatcatcaagatattttactaaagacatttcttcctaagaatttagttattaaactarcatttccctttttgagttcctcttatggtaacagctcttcactagaatgcctgggacccagtgtgtcatggcaaccatggggctgtcccatggcagcccc

SEQ ID NO: 232523 - DNA, 201 bp, Homo sapiens
tatagagggcaggaggcactaggaaatcctgatatggtaaggctaatagaagacatgccacatggagctgggacccccaagaaccatgactgcagggtaayggtgaccgatgatagagtgtcttctcagctctccattgggctggaggatggtaaactgcttgcgttcagcgctgttcctggatgtgtgtgtgtgtggcgg

SEQ ID NO: 232524 - DNA, 201 bp, Homo sapiens
aaggcagatcctctctggaggaatcctttctttccccttctactcataaagaatacctgcaagtaaaattccaagaaatttgagtccacaataaaaaattktaaaacataccaggtaacaggacaaaagttaattgaaagaatggacaacaaaagaaagcctcagatattgtaactattggacatagatcataaatttaaa

SEQ ID NO: 232525 - DNA, 201 bp, Homo sapiens
aagtgattttaaaaaagagaggagggaatcataaacaatattgagaattaaaattggaatgctaatatagatgctttggcatataaaagaataacaagggktcatcatgaacaatttatggccatatatttgaaatgttagataacatgaccaaaataccagaatgaaaaactccaatagccctgtagccaaggaagaact

SEQ ID NO: 232526 - DNA, 201 bp, Homo sapiens
tgaccaacctaaaataatttctcctggcggtggtagaatcccaattttgtgcacatgctcatgctcaggagaagctctgccatgttgccccgccctgcacrgcagccgtaattcctactgaagcccagaccgcagtctatgctaagctctagtcatttattcaatttagcttaccaaagctacacctctaactgtctcggt

SEQ ID NO: 232527 - DNA, 201 bp, Homo sapiens
gtggtagaatcccaattttgtgcacatgctcatgctcaggagaagctctgccatgttgccccgccctgcacggcagccgtaattcctactgaagcccagamcgcagtctatgctaagctctagtcatttattcaatttagcttaccaaagctacacctctaactgtctcggtaactcactgaaaatgtcccctcgtcatgt

SEQ ID NO: 232528 - DNA, 201 bp, Homo sapiens
atacaaggcggcgagcgtggcggccttccccctacagggggcgggcgtggcggcctttccagtacagggggcgagcgtggcggccttccccatcagggggygagcgtggcggccttccccatcagggggcgagcgtggcggccttccccctcagggggcgagcgtggcggccttccccatacagggggcgagcgtggcggc

SEQ ID NO: 232529 - DNA, 201 bp, Homo sapiens
catttcatcctcactttcacgttcatttagaattcataccctgatcagggagaagagcccccagggcctccagcttcccctccacctcgggagccacgtcrgcacgtctactgcgaggggctgactgtcacaggtggccacgggagctcacccctagttggctggggtttgggagcagcctagataaacacccatagaaat

SEQ ID NO: 232530 - DNA, 201 bp, Homo sapiens
tctagtgaccctcctgcctccacttcccaaagtgccaggattatagctgcgagcccccatgccggcctcacattatattccttttttttttttttttttttgagacagagccttgctggaatgtggaggtggggtgcagtcactcacgcaggtgttcttaaacctggctggtagaggcgtctcctatgggaattatcttcc

SEQ ID NO: 232531 - DNA, 201 bp, Homo sapiens
aattctctctttttttttttttttttgagacggagtctcgctctgtcgcccaggctggagtgcagtggcacaatctcggctcactgcaagctccgcctccygggttcacgccgttctcctgcctcagcctcctgtgtagctgggactacaggtgcccaccaccacgcctggctaattttttgtatttttagcagagacggg

SEQ ID NO: 232532 - DNA, 201 bp, Homo sapiens
ctctagtgaccctcctgcctccacttcccaaagtgccaggattatagctgcgagcccccatgccggcctcacattatattccttttttttttttttttttttgagacagagccttgctggaatgtggaggtggggtgcagtcactcacgcaggtgttcttaaacctggctggtagaggcgtctcctatgggaattatcttc

SEQ ID NO: 232533 - DNA, 201 bp, Homo sapiens
aaattaatgaggccaggcgttgtagctcatgcctataatcccagtactgtgggaggccaaggcaggcagatcacccgaggtcaggagtttgagcccagccyggccaacatggtaaaaccctgtctctactaaaaatacaaaaatttcgttttcgtatgatggtttgcacctgtagtcctagctacttgggaggctgaggca

SEQ ID NO: 232534 - DNA, 201 bp, Homo sapiens
gctctagtgaccctcctgcctccacttcccaaagtgccaggattatagctgcgagcccccatgccggcctcacattatattccttttttttttttttttttttgagacagagccttgctggaatgtggaggtggggtgcagtcactcacgcaggtgttcttaaacctggctggtagaggcgtctcctatgggaattatctt

SEQ ID NO: 232535 - DNA, 201 bp, Homo sapiens
ggtcttcctctgttgcctgaggctggagcacagcggcgctatcgtagcttactgcagcctcaagttcctgggctctagtgaccctcctgcctccacttcccaaagtgccaggattatagctgcgagcccccatgccggcctcacattatattccttttttttttttttttttttgagacagagccttgctggaatgtggag

SEQ ID NO: 232536 - DNA, 201 bp, Homo sapiens
gaaagaggtaagctgctgtgatgcagcttggcctttggctgccggggcgattggcttaggtaaatggcacccactgtcccgcagccctgcgttttagctgyttttttttttttttttttttttttttttttgctgtttcttgacttggtagacccttcttatagtgtgtgaatggggcatgatagaagaagtggaatcaag

SEQ ID NO: 232537 - DNA, 201 bp, Homo sapiens
cctagcctctccctggcctgagagaagcagatggcagctgaccgcacctgtaaagcctgttatgagggaggcctgagtcttgtgctggcagtggggcatgrcgccggggcctgtggcgtctggaccgtccactgcagcacaagtcggacctgaagtgattggtcatcgctgagcatggctctcagcgggaaggggatttgg

SEQ ID NO: 232538 - DNA, 201 bp, Homo sapiens
gctcgggcccgtgtggttcccacgggtggaaatcgtgcataggattgtagctcagagcagacagtgctgctgcttttgttttgttttcttttgttttttgktttttttttttttgttttttgagatggagtttcactcttgttgcccaggctggagtgcaatggtgtgatctcggctcactgcaacctctgcctctcgggt

SEQ ID NO: 232539 - DNA, 201 bp, Homo sapiens
aatagcagattagacactgtggtagaaaatattagtgaacttgaagacacagcaataggaactatccataaggaaacaaggaaggataattaaaaaaaaataaaaaacaccagtgagctatgggacacatctaaaggccaaatatctgtataactggagtcccaaggcgggagagacaggaacagaaaaatcatttgaaga

SEQ ID NO: 232540 - DNA, 201 bp, Homo sapiens
agttcagtgcacgctggatgggtccgacccaccgagttcagtgcacactggatgggtctgacccaccgagttcggtgcacagtgaatgggtccgacccacygagttcggtgcacgctggatgggtctgacctcccagtggctgccatggcctttgggcccggtgcagacccaagtatccgtcctcacaccctaacttgctt

SEQ ID NO: 232541 - DNA, 201 bp, Homo sapiens
atgtgtattcagagcattctgagcttcacagctgaacaagaatccaccatgggccagtgacatagtagctggtgttctttacataaggcagttaatctccmgagattgagtaacttgctgaaaaccaatcatccattcatgaaataaaggcgacattagaatgaagtcttcagaatccccagccctgtttttgggcttacc

SEQ ID NO: 232542 - DNA, 201 bp, Homo sapiens
tgcatgctggatgggtccaacccaccgagttcagtgcacgctggatgggtccgacccaccgagttcagtgcacactggatgggtctgacccaccgagttcrgtgcacagtgaatgggtccgacccaccgagttcggtgcacgctggatgggtctgacctcccagtggctgccatggcctttgggcccggtgcagacccaag

SEQ ID NO: 232543 - DNA, 201 bp, Homo sapiens
atgctttgagattggaattttctccttccttcctcccttccttccttcctttttctttcctctttctttcctcttctttttttttttttttttttttttttgggctcttgcttcatcacctaggccggagtgcagtggcacgatcttggctcactacagcctccacctcttgggttcaagcaattctcttgcctcagcctc

SEQ ID NO: 232544 - DNA, 201 bp, Homo sapiens
acccaccgagttcagtgcacagtgaaagggtctgacccaccgagttcagtgcatgctggatgggtccaacccaccgagttcagtgcacgctggatgggtcygacccaccgagttcagtgcacactggatgggtctgacccaccgagttcggtgcacagtgaatgggtccgacccaccgagttcggtgcacgctggatgggt

SEQ ID NO: 232545 - DNA, 201 bp, Homo sapiens
tatgctttgagattggaattttctccttccttcctcccttccttccttcctttttctttcctctttctttcctcttctttttttttttttttttttttttttgggctcttgcttcatcacctaggccggagtgcagtggcacgatcttggctcactacagcctccacctcttgggttcaagcaattctcttgcctcagcct

SEQ ID NO: 232546 - DNA, 201 bp, Homo sapiens
ctggatgggtccgacccaccgagttcagtgcacagtgaatgggtctgacccaccgagttcagtgcacagtgaaagggtctgacccaccgagttcagtgcaygctggatgggtccaacccaccgagttcagtgcacgctggatgggtccgacccaccgagttcagtgcacactggatgggtctgacccaccgagttcggtgc

SEQ ID NO: 232547 - DNA, 201 bp, Homo sapiens
accaagttcagtgcacagtgaaagggtcccacccaccgagttcagtgcacgctggatgggtccgacccaccgagttcagtgcacgctggatgggtccgacycaccgagttcagtgcacgctggatgggtctgacccaccgagttcagtgcacagtgaatgggtccgacccaccgagttcagtgcacactggatgggtccga

SEQ ID NO: 232548 - DNA, 201 bp, Homo sapiens
cctggccccaacaggacttcctcctgtcggcctggaaaactagagcccgggaggaacatctgcctaatacagcccatccccaggtgtcagcatccggggcmcgtccccaggtggagcccgggaggaaacatctgcctgatacagcccgtccccaggtgtcggcatctggggcctctggatggtgcccagtgaacctcgggt

SEQ ID NO: 232549 - DNA, 201 bp, Homo sapiens
agccttccttgctcacgggatgagcctgggtctgaggggcttggagcccgccttccaggtgaactgtcagagggtcaggaacccggagagcccctggcacygcaggcatcactgctgcctccgtcatcaggccccacgtccctcttgtgcttgctggtggcggtgccgctttctcttttagattctgcatctcgtgcgtgt

SEQ ID NO: 232550 - DNA, 201 bp, Homo sapiens
ccttcatcctgtcacggtcccaactcagttttaaggtttctctggggtcctcttggtcaagagtaggtcattccgtcagttggggcttcggactttatttytctcagtggaattgcaagtgagttttttcctttgtccaaaagtttttatatgatttctgacttcttattttgaaaccattatagattcacagggaattgc

SEQ ID NO: 232551 - DNA, 201 bp, Homo sapiens
tccgccgtgtaagccgccaccacgcgcgcgggacaggttcatctgtttatgaggaaggacagaactgagttgaaatgcacagacctggcggggagcccccrcggccttctctgtaaacaaagccctgcgttttggtgtctcactcctgttttctttctcctgaaaatgaaaataagaatgggcaattattccatattttcc

SEQ ID NO: 232552 - DNA, 201 bp, Homo sapiens
cctcagtggccgtccctccggttcctactccttgttatcatgcacacctcgatttacgttcatggcattggaaaaccctcctgtttgattgttactgtcargccgtggcaccctgcttgtgcttttcaatttgttttgttttgctttgcacagttgtgtgtgcatgtagctgtttttattcactgttatacttttattctg

SEQ ID NO: 232553 - DNA, 201 bp, Homo sapiens
ttgggagttggcatcatgacagggcggtcctgaggctgctgatggttttcggccgttttaccatctactacactgcctgcgtctgtctgcatggtgggagygcccgtgaggctgaagtgccgccctcccggtcctcaggtccccctgctgtgcatgtccccagccgtggactcaggccctgtggtcctgaggggtcatggg

SEQ ID NO: 232554 - DNA, 201 bp, Homo sapiens
gatggttttcggccgttttaccatctactacactgcctgcgtctgtctgcatggtgggagtgcccgtgaggctgaagtgccgccctcccggtcctcaggtycccctgctgtgcatgtccccagccgtggactcaggccctgtggtcctgaggggtcatgggtataggaggtaggtttggaatcagctgtacctgcttccag

SEQ ID NO: 232555 - DNA, 201 bp, Homo sapiens
taaacaatattgagaattaaaattggaatgctaatatagatgctttggcatataaaagaataacaaggggtcatcatgaacaatttatggccatatatttsaaatgttagataacatgaccaaaataccagaatgaaaaactccaatagccctgtagccaaggaagaacttgagttaatagttaaaagtcttcccacaaag

SEQ ID NO: 232556 - DNA, 201 bp, Homo sapiens
acatcttgaggcaaactataaattgcatttgtgatgtgattcaacaggctccgaaaaacagtgtgcacgatggcatgattattacagtctgcgtcacccakgctgagcgacgggtgatggcccagagctgagcgtctgagctgggacgggtgtctaggtccaggcttggacccgctgatgtggactgaattcgcttcatgc

SEQ ID NO: 232557 - DNA, 201 bp, Homo sapiens
tccgtgtgtgtatgtgcacgagtgtgtctccgtgtgtatatgtgcatgagtgtgtctctgtgtgtgtccatgagtgtgtctctgtgtgtatatgtgtatgagtgtgttcgtgtgtgtgtgcatgagtgtgtgtctgtgtatgtgcatgagtgtgtctctgtgtgtgtgtgcatgagtgtgtgtctgcttgggttactttgc

SEQ ID NO: 232558 - DNA, 201 bp, Homo sapiens
tctccgtgtgtgtatgtgcacgagtgtgtctccgtgtgtatatgtgcatgagtgtgtctctgtgtgtgtccatgagtgtgtctctgtgtgtatatgtgtatgagtgtgttcgtgtgtgtgtgcatgagtgtgtgtctgtgtatgtgcatgagtgtgtctctgtgtgtgtgtgcatgagtgtgtgtctgcttgggttacttt

SEQ ID NO: 232559 - DNA, 201 bp, Homo sapiens
tgtctccgtgtgtgtatgtgcacgagtgtgtctccgtgtgtatatgtgcatgagtgtgtctctgtgtgtgtccatgagtgtgtctctgtgtgtatatgtgtatgagtgtgttcgtgtgtgtgtgcatgagtgtgtgtctgtgtatgtgcatgagtgtgtctctgtgtgtgtgtgcatgagtgtgtgtctgcttgggttact

SEQ ID NO: 232560 - DNA, 201 bp, Homo sapiens
gtgtctccgtgtgtgtatgtgcacgagtgtgtctccgtgtgtatatgtgcatgagtgtgtctctgtgtgtgtccatgagtgtgtctctgtgtgtatatgtgtatgagtgtgttcgtgtgtgtgtgcatgagtgtgtgtctgtgtatgtgcatgagtgtgtctctgtgtgtgtgtgcatgagtgtgtgtctgcttgggttac

SEQ ID NO: 232561 - DNA, 201 bp, Homo sapiens
ttattattgataggtaagaacttactcttgccattttgttatttgttttctgattgttttgtggtcttctctttcttatttctttccttacttttttttttaagtgaaagtgattttctttggtggtatgttttaatttctagctttttactttttgttgtatctgtttatgttttttgatttgaggttacaataaggctt

SEQ ID NO: 232562 - DNA, 201 bp, Homo sapiens
tgtgtctccgtgtgtgtatgtgcacgagtgtgtctccgtgtgtatatgtgcatgagtgtgtctctgtgtgtgtccatgagtgtgtctctgtgtgtatatgtgtatgagtgtgttcgtgtgtgtgtgcatgagtgtgtgtctgtgtatgtgcatgagtgtgtctctgtgtgtgtgtgcatgagtgtgtgtctgcttgggtta

SEQ ID NO: 232563 - DNA, 201 bp, Homo sapiens
cccacaaaaaacccaaattaagacaaaacccaaagtaagacaaaaaacctgtcttcccgttggccaggagacaggcagttaggttttctctccttgttaaygtctagtcactcagatgacttctttagtttcaaggctctgctgggaggggtgtttatgccatcatagttgagcagacataggcctagaccatcagtcacg

SEQ ID NO: 232564 - DNA, 201 bp, Homo sapiens
agtgtgtctccgtgtgtgtatgtgcacgagtgtgtctccgtgtgtatatgtgcatgagtgtgtctctgtgtgtgtccatgagtgtgtctctgtgtgtatatgtgtatgagtgtgttcgtgtgtgtgtgcatgagtgtgtgtctgtgtatgtgcatgagtgtgtctctgtgtgtgtgtgcatgagtgtgtgtctgcttgggt

SEQ ID NO: 232565 - DNA, 201 bp, Homo sapiens
atgcttagttttgtgggatatgaaatccttgattggaattttttttctttaaggatgctgaaaatagggcccccagtctcttctggcttgtaagcttttttctgacatgtctgctatcagcctggtgggttctctttgtaactgacctgccctttctctatagctgcttttaagagtttttctttcacaacaaccttggag

SEQ ID NO: 232566 - DNA, 201 bp, Homo sapiens
gtccaagctgtcttctgcctaaagctctgttttgggtatcgtccatcagcttctgggttctcacctcacagggctgacaggacatgtgcaaaccaacaggraagcagtgatttccagggaaacagatgcacaagctggtgcctgatttctcatcagaggagtgccagggtcccctgggcccctctcctaaacccaccgatg

SEQ ID NO: 232567 - DNA, 201 bp, Homo sapiens
gagtgtgtctccgtgtgtgtatgtgcacgagtgtgtctccgtgtgtatatgtgcatgagtgtgtctctgtgtgtgtccatgagtgtgtctctgtgtgtatatgtgtatgagtgtgttcgtgtgtgtgtgcatgagtgtgtgtctgtgtatgtgcatgagtgtgtctctgtgtgtgtgtgcatgagtgtgtgtctgcttggg

SEQ ID NO: 232568 - DNA, 201 bp, Homo sapiens
cccaccgagttcagtgcacagtggatgggtccgacccaccgagttcagtgcacactggatgggtctgacccaccaagttcagtgcacagtgaaagggtccmacccaccgagttcagtgcacgctggatgggtccgacccaccgagttcagtgcacgctggatgggtccgactcaccgagttcagtgcacgctggatgggtc

SEQ ID NO: 232569 - DNA, 201 bp, Homo sapiens
ttgtgtcttctctcttgttttttgttagtcttgatagagatttgtcaattttactgatttttttcaaggaaccagctttcattgtcatttatcttctctayttttttctcacttaaattacattgatttcttttcttatccttattatttattttcttctactttatttgggtttattgtgttctcctttattacagattc

SEQ ID NO: 232570 - DNA, 201 bp, Homo sapiens
gttcttttgcataccccagttatgggcctgttgccactctgtactcctctccccaggccagccgctcagcccgctcctttcaccctctgcaggagagcctsgtggcaggccagtggagggacatgatggactacatgctccaaggggtggcgcagccgagcatggaagagggctctggacagctcctggaagggcacgtgc

SEQ ID NO: 232571 - DNA, 201 bp, Homo sapiens
agccgctcagcccgctcctttcaccctctgcaggagagcctcgtggcaggccagtggagggacatgatggactacatgctccaaggggtggcgcagccgascatggaagagggctctggacagctcctggaagggcacgtgcacatggctgcagtggacctcctgatcggtggcactgagaccacagcaaacaccctctcc

SEQ ID NO: 232572 - DNA, 201 bp, Homo sapiens
cctcgtggcaggccagtggagggacatgatggactacatgctccaaggggtggcgcagccgagcatggaagagggctctggacagctcctggaagggcacbtgcacatggctgcagtggacctcctgatcggtggcactgagaccacagcaaacaccctctcctgggccgtggtttttttgcttcaccaccctgaggtgcg

SEQ ID NO: 232573 - DNA, 201 bp, Homo sapiens
atggctgcagtggacctcctgatcggtggcactgagaccacagcaaacaccctctcctgggccgtggtttttttgcttcaccaccctgaggtgcgtcctgsggacaagcaaaaggctccttcccagcaacctggccagggcggtgggcaccctcactcagctctgagcactgtgcggctggggctgtgcttgcctcaccgg

SEQ ID NO: 232574 - DNA, 201 bp, Homo sapiens
cttcaccaccctgaggtgcgtcctggggacaagcaaaaggctccttcccagcaacctggccagggcggtgggcaccctcactcagctctgagcactgtgcrgctggggctgtgcttgcctcaccggcactcaggctcactgggttgctgagggagcggctggaggctgggcagctgtgggctgctggggcaggactccacc

SEQ ID NO: 232575 - DNA, 201 bp, Homo sapiens
ccaccctgaggtgcgtcctggggacaagcaaaaggctccttcccagcaacctggccagggcggtgggcaccctcactcagctctgagcactgtgcggctgrggctgtgcttgcctcaccggcactcaggctcactgggttgctgagggagcggctggaggctgggcagctgtgggctgctggggcaggactccacccgatc

SEQ ID NO: 232576 - DNA, 201 bp, Homo sapiens
caggaggtgttaaaaacctggagccactggtccatccaaattgtggacgtgattccctttctcagggtgaggacctggagcctagacacccctgggttgtrggggagaggctggggtggagggagaggctccttcccacagctgcattctcatgcttcctgccgcagttcttccccaatccaggtctccggaggctgaagc

SEQ ID NO: 232577 - DNA, 201 bp, Homo sapiens
cctccttttctggcaggacgacaacttaatgcctgcctattacaaatgtatccaggaggtgttaaaaacctggagccactggtccatccaaattgtggacvtgattccctttctcagggtgaggacctggagcctagacacccctgggttgtaggggagaggctggggtggagggagaggctccttcccacagctgcattc

SEQ ID NO: 232578 - DNA, 201 bp, Homo sapiens
tgtccacccgcccgcagatcgcttcctggagccaggcaagaactccagagctctggccttcggctgcggtgcccgcgtgtgcctgggcgagccgctggcgygcctggagctcttcgtggtgctgacccgactgctgcaggccttcacgctgctgccctccggggacgccctgccctccctgcagcccctgccccactgcag

SEQ ID NO: 232579 - DNA, 201 bp, Homo sapiens; identical to SEQ ID NO: 43001

SEQ ID NO: 232580 - DNA, 201 bp, Homo sapiens; identical to SEQ ID NO: 43000

SEQ ID NO: 232581 - DNA, 201 bp, Homo sapiens
ggtatgtggggggccgggggcctgccgtgaaaatgtggtggaggctggtccccgctgccgctgaacgcctccccacccacctgtccacccgcccgcagatygcttcctggagccaggcaagaactccagagctctggccttcggctgcggtgcccgcgtgtgcctgggcgagccgctggcgcgcctggagctcttcgtggt

SEQ ID NO: 232582 - DNA, 201 bp, Homo sapiens; identical to SEQ ID NO: 43005

SEQ ID NO: 232583 - DNA, 201 bp, Homo sapiens; identical to SEQ ID NO: 43006

SEQ ID NO: 232584 - DNA, 201 bp, Homo sapiens
  misc_feature (1)...(201): n = A,T,C or G
ctgactcagaaattcgggcccatctacaggctccaccttgggctgcaaggtgagaggctgatctcgctctggccctcaccataggagggggcggaggtganggagagggtcctctctccgctgacgctgctttggctgtctcccagatgtggtggtgctgaactccaagaggaccattgaggaagccatggtcaaaaagtg

SEQ ID NO: 232585 - DNA, 201 bp, Homo sapiens
agatgtggtggtgctgaactccaagaggaccattgaggaagccatggtcaaaaagtgggcagactttgctggcagacctgagccacttacctgtaagggcbgggggcattttttctttcttaaaaaaatttttttttaagagatgggttcttgctatgctgcccaggctggtcttaaattcctagtctcaaatgatcctcc

SEQ ID NO: 232586 - DNA, 201 bp, Homo sapiens
ggtggtgctgaactccaagaggaccattgaggaagccatggtcaaaaagtgggcagactttgctggcagacctgagccacttacctgtaagggctgggggmattttttctttcttaaaaaaatttttttttaagagatgggttcttgctatgctgcccaggctggtcttaaattcctagtctcaaatgatcctcccacctc

SEQ ID NO: 232587 - DNA, 201 bp, Homo sapiens
gaggaccattgaggaagccatggtcaaaaagtgggcagactttgctggcagacctgagccacttacctgtaagggctgggggcattttttctttcttaaamaaatttttttttaagagatgggttcttgctatgctgcccaggctggtcttaaattcctagtctcaaatgatcctcccacctcagcctcaagtgtgagcca

SEQ ID NO: 232588 - DNA, 201 bp, Homo sapiens
gcagactttgctggcagacctgagccacttacctgtaagggctgggggcattttttctttcttaaaaaaatttttttttaagagatgggttcttgctatgytgcccaggctggtcttaaattcctagtctcaaatgatcctcccacctcagcctcaagtgtgagccacctttggggcatccccaatccaggtccctggaag

SEQ ID NO: 232589 - DNA, 201 bp, Homo sapiens
gcggcccgttgtgcccttagccttgccccaccgcaccacacggcccagcaggtgactcccgagggttggggatgagtgaggaaagcccgagcccagggagrtcctggccagcctctaactccagcccccttcagcatctccggctacgacatccctgagggcacagtcatcattccgaacctccaaggcgcccacctggat

SEQ ID NO: 232590 - DNA, 201 bp, Homo sapiens
ggcctggtatgtggggggccgggggcctgccgtgaaaatgtggtggaggctggtccccgctgccgctgaacgcctccccacccacctgtccacccgcccgsagatcgcttcctggagccaggcaagaactccagagctctggccttcggctgcggtgcccgcgtgtgcctgggcgagccgctggcgcgcctggagctcttc

SEQ ID NO: 232591 - DNA, 201 bp, Homo sapiens; identical to SEQ ID NO: 43015

SEQ ID NO: 232592 - DNA, 201 bp, Homo sapiens
gcctgctgaactcacactgtttctccacagcgcatgagagcccagcccggcacccctgtggccattgaggaggaattctctctcctcacctgcagcatcawctgttacctcaccttcggagacaagatcaaggtgcctcacagcccctcaggcccacccccagcccctccctgagcctctccttgtcctgaactgaaagta

SEQ ID NO: 232593 - DNA, 201 bp, Homo sapiens; identical to SEQ ID NO: 43016

SEQ ID NO: 232594 - DNA, 201 bp, Homo sapiens
agccatggtcaaaaagtgggcagactttgctggcagacctgagccacttacctgtaagggctgggggcattttttctttcttaaaaaaatttttttttaaragatgggttcttgctatgctgcccaggctggtcttaaattcctagtctcaaatgatcctcccacctcagcctcaagtgtgagccacctttggggcatccc

SEQ ID NO: 232595 - DNA, 201 bp, Homo sapiens
aaatttttttttaagagatgggttcttgctatgctgcccaggctggtcttaaattcctagtctcaaatgatcctcccacctcagcctcaagtgtgagccayctttggggcatccccaatccaggtccctggaagctcttgggggggcatatctggtggggagaaagcaggggttggggaggccgaagaaggtcaggccctc

SEQ ID NO: 232596 - DNA, 201 bp, Homo sapiens
ctttggggcatccccaatccaggtccctggaagctcttgggggggcatatctggtggggagaaagcaggggttggggaggccgaagaaggtcaggccctcrgctgccttcatcagttcccaccctccagcccccaactcctcctgcagacaagctggtgtctaggaactacccggacctgtccttgggagactactccctg

SEQ ID NO: 232597 - DNA, 201 bp, Homo sapiens
atccccaatccaggtccctggaagctcttgggggggcatatctggtggggagaaagcaggggttggggaggccgaagaaggtcaggccctcagctgccttsatcagttcccaccctccagcccccaactcctcctgcagacaagctggtgtctaggaactacccggacctgtccttgggagactactccctgctctggaaa

SEQ ID NO: 232598 - DNA, 201 bp, Homo sapiens
tccccaatccaggtccctggaagctcttgggggggcatatctggtggggagaaagcaggggttggggaggccgaagaaggtcaggccctcagctgccttcrtcagttcccaccctccagcccccaactcctcctgcagacaagctggtgtctaggaactacccggacctgtccttgggagactactccctgctctggaaag

SEQ ID NO: 232599 - DNA, 201 bp, Homo sapiens
cagtggtggagcagctgacccaggagttctgtgaggtaaggctgggctcctgaggccacctcgggtcagcctcgcctctcacagtagcccccgccctgccbgctgcacagcggcctgctgaactcacactgtttctccacagcgcatgagagcccagcccggcacccctgtggccattgaggaggaattctctctcctcac

SEQ ID NO: 232600 - DNA, 201 bp, Homo sapiens
gggagaggctccttcccacagctgcattctcatgcttcctgccgcagttcttccccaatccaggtctccggaggctgaagcaggccatagagaagagggaycacatcgtggagatgcagctgaggcagcacaaggtggggactgtgtgtggacggcctcccctcggcccacagccagtgatgctaccggcctcagcattgc

SEQ ID NO: 232601 - DNA, 201 bp, Homo sapiens
cctttcaccctctgcaggagagcctcgtggcaggccagtggagggacatgatggactacatgctccaaggggtggcgcagccgagcatggaagagggctcyggacagctcctggaagggcacgtgcacatggctgcagtggacctcctgatcggtggcactgagaccacagcaaacaccctctcctgggccgtggtttttt

SEQ ID NO: 232602 - DNA, 201 bp, Homo sapiens; identical to SEQ ID NO: 43023

SEQ ID NO: 232603 - DNA, 201 bp, Homo sapiens; identical to SEQ ID NO: 43026

SEQ ID NO: 232604 - DNA, 201 bp, Homo sapiens
tccccgctgccgctgaacgcctccccacccacctgtccacccgcccgcagatcgcttcctggagccaggcaagaactccagagctctggccttcggctgcrgtgcccgcgtgtgcctgggcgagccgctggcgcgcctggagctcttcgtggtgctgacccgactgctgcaggccttcacgctgctgccctccggggacgc

SEQ ID NO: 232605 - DNA, 201 bp, Homo sapiens
ataggaagcaaacaaaaacaggccaaggaaacccagtacagggggctgcagggcccagggagtgggtccctcatctctcctccccacgcttggccaggtcyccacctcccgggagtgcgtgggctttgaggctgtgcaggaagtgccggtggggctggtgcagccggccagcgcaaccctgtacgactactacaaccccgg

SEQ ID NO: 232606 - DNA, 201 bp, Homo sapiens
ctccatgggggtggcgaaggtggaatgagaggatctacacagagtccccagcctgggctcaccctgcaccttctcttcccctctgaccacttttgcgcacrtcatccccgcagccaaggatgtcaaggccgctgctaatcagatgcgcaacttcctggttcgagcctcctgccgccttcgcttggaacctgggaaagaata

SEQ ID NO: 232607 - DNA, 201 bp, Homo sapiens
ccacctcagcctcaagtgtgagccacctttggggcatccccaatccaggtccctggaagctcttgggggggcatatctggtggggagaaagcaggggttgrggaggccgaagaaggtcaggccctcagctgccttcatcagttcccaccctccagcccccaactcctcctgcagacaagctggtgtctaggaactacccgg

SEQ ID NO: 232608 - DNA, 201 bp, Homo sapiens
gctgctgctgctgcccctgctggctggcgcccgcctgctgtggaactggtggaagctccggagcctccacctcccgcctcttgccccgggcttcttgcacytgctgcagcccgacctccccatctatctgcttggcctgactcagaaattcgggcccatctacaggctccaccttgggctgcaaggtgagaggctgatctc

SEQ ID NO: 232609 - DNA, 201 bp, Homo sapiens
tggctggcgcccgcctgctgtggaactggtggaagctccggagcctccacctcccgcctcttgccccgggcttcttgcacctgctgcagcccgacctcccmatctatctgcttggcctgactcagaaattcgggcccatctacaggctccaccttgggctgcaaggtgagaggctgatctcgctctggccctcaccatagg

SEQ ID NO: 232610 - DNA, 201 bp, Homo sapiens
agcctcaagtgtgagccacctttggggcatccccaatccaggtccctggaagctcttgggggggcatatctggtggggagaaagcaggggttggggaggcmgaagaaggtcaggccctcagctgccttcatcagttcccaccctccagcccccaactcctcctgcagacaagctggtgtctaggaactacccggacctgtc

SEQ ID NO: 232611 - DNA, 201 bp, Homo sapiens
ggggcatccccaatccaggtccctggaagctcttgggggggcatatctggtggggagaaagcaggggttggggaggccgaagaaggtcaggccctcagctkccttcatcagttcccaccctccagcccccaactcctcctgcagacaagctggtgtctaggaactacccggacctgtccttgggagactactccctgctct

SEQ ID NO: 232612 - DNA, 201 bp, Homo sapiens; identical to SEQ ID NO: 43039

SEQ ID NO: 232613 - DNA, 201 bp, Homo sapiens
aacgcctccccacccacctgtccacccgcccgcagatcgcttcctggagccaggcaagaactccagagctctggccttcggctgcggtgcccgcgtgtgcytgggcgagccgctggcgcgcctggagctcttcgtggtgctgacccgactgctgcaggccttcacgctgctgccctccggggacgccctgccctccctgca

SEQ ID NO: 232614 - DNA, 201 bp, Homo sapiens
ttgggggggcatatctggtggggagaaagcaggggttggggaggccgaagaaggtcaggccctcagctgccttcatcagttcccaccctccagcccccaaytcctcctgcagacaagctggtgtctaggaactacccggacctgtccttgggagactactccctgctctggaaagcccacaagaagctcacccgctcagcc

SEQ ID NO: 232615 - DNA, 201 bp, Homo sapiens
gagaggccacatgagttctggcctggtatgtggggggccgggggcctgccgtgaaaatgtggtggaggctggtccccgctgccgctgaacgcctccccacycacctgtccacccgcccgcagatcgcttcctggagccaggcaagaactccagagctctggccttcggctgcggtgcccgcgtgtgcctgggcgagccgct

SEQ ID NO: 232616 - DNA, 201 bp, Homo sapiens
ctgtactcctctccccaggccagccgctcagcccgctcctttcaccctctgcaggagagcctcgtggcaggccagtggagggacatgatggactacatgcyccaaggggtggcgcagccgagcatggaagagggctctggacagctcctggaagggcacgtgcacatggctgcagtggacctcctgatcggtggcactgag

SEQ ID NO: 232617 - DNA, 201 bp, Homo sapiens
tgccgctgaacgcctccccacccacctgtccacccgcccgcagatcgcttcctggagccaggcaagaactccagagctctggccttcggctgcggtgcccrcgtgtgcctgggcgagccgctggcgcgcctggagctcttcgtggtgctgacccgactgctgcaggccttcacgctgctgccctccggggacgccctgccc

SEQ ID NO: 232618 - DNA, 201 bp, Homo sapiens
gatgggtgattaattttttttgaaatacggacgtcccaaggccaatgagactggtgtcattccagaaaagggccactctgtgggtgggtcggtgggaaggyacctgagggtggggtcaagggaggccccaaaacagtctacacagcaggagggatggctggggctcttgagctataagtggcacctcagggccctgacggg

SEQ ID NO: 232619 - DNA, 201 bp, Homo sapiens
aggatgtcaaggccgctgctaatcagatgcgcaacttcctggttcgagcctcctgccgccttcgcttggaacctgggaaagaatatttgatcatgggtctrgatggggccacctatgacctcgagggacagtgagtcatctggtcccctcagtctcttgtcctccccatgcctcgccacctaggccttgcccctcagaagc

SEQ ID NO: 232620 - DNA, 201 bp, Homo sapiens
cacgaactgggccctggtgcctccagctcccgggtcccctacaaggaccgtgcacggctgcccttgctcaatgccaccatcgccgaggtgctgcgcctgcvgcccgttgtgcccttagccttgccccaccgcaccacacggcccagcaggtgactcccgagggttggggatgagtgaggaaagcccgagcccagggaggtc

SEQ ID NO: 232621 - DNA, 201 bp, Homo sapiens
ccacgaactgggccctggtgcctccagctcccgggtcccctacaaggaccgtgcacggctgcccttgctcaatgccaccatcgccgaggtgctgcgcctgyggcccgttgtgcccttagccttgccccaccgcaccacacggcccagcaggtgactcccgagggttggggatgagtgaggaaagcccgagcccagggaggt

SEQ ID NO: 232622 - DNA, 201 bp, Homo sapiens; identical to SEQ ID NO: 42993

SEQ ID NO: 232623 - DNA, 201 bp, Homo sapiens
ctagaccacgaactgggccctggtgcctccagctcccgggtcccctacaaggaccgtgcacggctgcccttgctcaatgccaccatcgccgaggtgctgcrcctgcggcccgttgtgcccttagccttgccccaccgcaccacacggcccagcaggtgactcccgagggttggggatgagtgaggaaagcccgagcccagg

SEQ ID NO: 232624 - DNA, 201 bp, Homo sapiens
gctagaccacgaactgggccctggtgcctccagctcccgggtcccctacaaggaccgtgcacggctgcccttgctcaatgccaccatcgccgaggtgctgygcctgcggcccgttgtgcccttagccttgccccaccgcaccacacggcccagcaggtgactcccgagggttggggatgagtgaggaaagcccgagcccag

SEQ ID NO: 232625 - DNA, 201 bp, Homo sapiens
cccgatcattccccagattcagcagcgactgcaggaggagctagaccacgaactgggccctggtgcctccagctcccgggtcccctacaaggaccgtgcayggctgcccttgctcaatgccaccatcgccgaggtgctgcgcctgcggcccgttgtgcccttagccttgccccaccgcaccacacggcccagcaggtgact

SEQ ID NO: 232626 - DNA, 201 bp, Homo sapiens
gccagccgctcagcccgctcctttcaccctctgcaggagagcctcgtggcaggccagtggagggacatgatggactacatgctccaaggggtggcgcagcygagcatggaagagggctctggacagctcctggaagggcacgtgcacatggctgcagtggacctcctgatcggtggcactgagaccacagcaaacaccctc

SEQ ID NO: 232627 - DNA, 201 bp, Homo sapiens; identical to SEQ ID NO: 42996

SEQ ID NO: 232628 - DNA, 201 bp, Homo sapiens
cagtcatcattccgaacctccaaggcgcccacctggatgagacggtctgggagaggccacatgagttctggcctggtatgtggggggccgggggcctgccrtgaaaatgtggtggaggctggtccccgctgccgctgaacgcctccccacccacctgtccacccgcccgcagatcgcttcctggagccaggcaagaactcc

SEQ ID NO: 232629 - DNA, 201 bp, Homo sapiens
cttgggggggcatatctggtggggagaaagcaggggttggggaggccgaagaaggtcaggccctcagctgccttcatcagttcccaccctccagcccccavctcctcctgcagacaagctggtgtctaggaactacccggacctgtccttgggagactactccctgctctggaaagcccacaagaagctcacccgctcagc

SEQ ID NO: 232630 - DNA, 201 bp, Homo sapiens
ctccacccgatcattccccagattcagcagcgactgcaggaggagctagaccacgaactgggccctggtgcctccagctcccgggtcccctacaaggaccrtgcacggctgcccttgctcaatgccaccatcgccgaggtgctgcgcctgcggcccgttgtgcccttagccttgccccaccgcaccacacggcccagcagg

SEQ ID NO: 232631 - DNA, 201 bp, Homo sapiens
agaggccacatgagttctggcctggtatgtggggggccgggggcctgccgtgaaaatgtggtggaggctggtccccgctgccgctgaacgcctccccaccyacctgtccacccgcccgcagatcgcttcctggagccaggcaagaactccagagctctggccttcggctgcggtgcccgcgtgtgcctgggcgagccgctg

SEQ ID NO: 232632 - DNA, 201 bp, Homo sapiens
agcaggggttggggaggccgaagaaggtcaggccctcagctgccttcatcagttcccaccctccagcccccaactcctcctgcagacaagctggtgtctargaactacccggacctgtccttgggagactactccctgctctggaaagcccacaagaagctcacccgctcagccctgctgctgggcatccgtgactccatg

SEQ ID NO: 232633 - DNA, 201 bp, Homo sapiens; identical to SEQ ID NO: 43003

SEQ ID NO: 232634 - DNA, 201 bp, Homo sapiens
ctgctgggcatccgtgactccatggagccagtggtggagcagctgacccaggagttctgtgaggtaaggctgggctcctgaggccacctcgggtcagcctygcctctcacagtagcccccgccctgcccgctgcacagcggcctgctgaactcacactgtttctccacagcgcatgagagcccagcccggcacccctgtgg

SEQ ID NO: 232635 - DNA, 201 bp, Homo sapiens
tacctcaccttcggagacaagatcaaggtgcctcacagcccctcaggcccacccccagcccctccctgagcctctccttgtcctgaactgaaagtactccmtccttttctggcaggacgacaacttaatgcctgcctattacaaatgtatccaggaggtgttaaaaacctggagccactggtccatccaaattgtggacgt

SEQ ID NO: 232636 - DNA, 201 bp, Homo sapiens
ggggaggccgaagaaggtcaggccctcagctgccttcatcagttcccaccctccagcccccaactcctcctgcagacaagctggtgtctaggaactacccsgacctgtccttgggagactactccctgctctggaaagcccacaagaagctcacccgctcagccctgctgctgggcatccgtgactccatggagccagtgg

SEQ ID NO: 232637 - DNA, 201 bp, Homo sapiens
gccgaagaaggtcaggccctcagctgccttcatcagttcccaccctccagcccccaactcctcctgcagacaagctggtgtctaggaactacccggacctktccttgggagactactccctgctctggaaagcccacaagaagctcacccgctcagccctgctgctgggcatccgtgactccatggagccagtggtggagc

SEQ ID NO: 232638 - DNA, 201 bp, Homo sapiens
ctgctcctgggcctgctgctgctgctgcccctgctggctggcgcccgcctgctgtggaactggtggaagctccggagcctccacctcccgcctcttgcccygggcttcttgcacctgctgcagcccgacctccccatctatctgcttggcctgactcagaaattcgggcccatctacaggctccaccttgggctgcaaggt

SEQ ID NO: 232639 - DNA, 201 bp, Homo sapiens; identical to SEQ ID NO: 43010

SEQ ID NO: 232640 - DNA, 201 bp, Homo sapiens
ggttgtaggggagaggctggggtggagggagaggctccttcccacagctgcattctcatgcttcctgccgcagttcttccccaatccaggtctccggaggytgaagcaggccatagagaagagggatcacatcgtggagatgcagctgaggcagcacaaggtggggactgtgtgtggacggcctcccctcggcccacagcc

SEQ ID NO: 232641 - DNA, 201 bp, Homo sapiens
ctcccgcctcttgccccgggcttcttgcacctgctgcagcccgacctccccatctatctgcttggcctgactcagaaattcgggcccatctacaggctccwccttgggctgcaaggtgagaggctgatctcgctctggccctcaccataggagggggcggaggtgacggagagggtcctctctccgctgacgctgctttgg

SEQ ID NO: 232642 - DNA, 201 bp, Homo sapiens; identical to SEQ ID NO: 43013

SEQ ID NO: 232643 - DNA, 201 bp, Homo sapiens
  misc_feature (1)...(201): n = A,T,C or G
tgctgggcatccgtgactccatggagccagtggtggagcagctgacccaggagttctgtgaggtaaggctgggctcctgaggccacctcgggtcagcctcncctctcacagtagcccccgccctgcccgctgcacagcggcctgctgaactcacactgtttctccacagcgcatgagagcccagcccggcacccctgtggc

SEQ ID NO: 232644 - DNA, 201 bp, Homo sapiens
gtatccaggaggtgttaaaaacctggagccactggtccatccaaattgtggacgtgattccctttctcagggtgaggacctggagcctagacacccctggrttgtaggggagaggctggggtggagggagaggctccttcccacagctgcattctcatgcttcctgccgcagttcttccccaatccaggtctccggaggct

SEQ ID NO: 232645 - DNA, 201 bp, Homo sapiens
cctcttgccccgggcttcttgcacctgctgcagcccgacctccccatctatctgcttggcctgactcagaaattcgggcccatctacaggctccaccttgrgctgcaaggtgagaggctgatctcgctctggccctcaccataggagggggcggaggtgacggagagggtcctctctccgctgacgctgctttggctgtct

SEQ ID NO: 232646 - DNA, 201 bp, Homo sapiens
ctctggccctcaccataggagggggcggaggtgacggagagggtcctctctccgctgacgctgctttggctgtctcccagatgtggtggtgctgaactccwagaggaccattgaggaagccatggtcaaaaagtgggcagactttgctggcagacctgagccacttacctgtaagggctgggggcattttttctttcttaa

SEQ ID NO: 232647 - DNA, 201 bp, Homo sapiens
tctggtggggagaaagcaggggttggggaggccgaagaaggtcaggccctcagctgccttcatcagttcccaccctccagcccccaactcctcctgcagamaagctggtgtctaggaactacccggacctgtccttgggagactactccctgctctggaaagcccacaagaagctcacccgctcagccctgctgctgggca

SEQ ID NO: 232648 - DNA, 201 bp, Homo sapiens
gtttctccacagcgcatgagagcccagcccggcacccctgtggccattgaggaggaattctctctcctcacctgcagcatcatctgttacctcaccttcgsagacaagatcaaggtgcctcacagcccctcaggcccacccccagcccctccctgagcctctccttgtcctgaactgaaagtactccctccttttctggca

SEQ ID NO: 232649 - DNA, 201 bp, Homo sapiens
ggcactcaggctcactgggttgctgagggagcggctggaggctgggcagctgtgggctgctggggcaggactccacccgatcattccccagattcagcagygactgcaggaggagctagaccacgaactgggccctggtgcctccagctcccgggtcccctacaaggaccgtgcacggctgcccttgctcaatgccaccat

SEQ ID NO: 232650 - DNA, 201 bp, Homo sapiens
actcaggctcactgggttgctgagggagcggctggaggctgggcagctgtgggctgctggggcaggactccacccgatcattccccagattcagcagcgamtgcaggaggagctagaccacgaactgggccctggtgcctccagctcccgggtcccctacaaggaccgtgcacggctgcccttgctcaatgccaccatcgc

SEQ ID NO: 232651 - DNA, 201 bp, Homo sapiens
ggactacatgctccaaggggtggcgcagccgagcatggaagagggctctggacagctcctggaagggcacgtgcacatggctgcagtggacctcctgatcdgtggcactgagaccacagcaaacaccctctcctgggccgtggtttttttgcttcaccaccctgaggtgcgtcctggggacaagcaaaaggctccttccca

SEQ ID NO: 232652 - DNA, 201 bp, Homo sapiens
caggctcactgggttgctgagggagcggctggaggctgggcagctgtgggctgctggggcaggactccacccgatcattccccagattcagcagcgactgyaggaggagctagaccacgaactgggccctggtgcctccagctcccgggtcccctacaaggaccgtgcacggctgcccttgctcaatgccaccatcgccga

SEQ ID NO: 232653 - DNA, 201 bp, Homo sapiens
ctcgtggcaggccagtggagggacatgatggactacatgctccaaggggtggcgcagccgagcatggaagagggctctggacagctcctggaagggcacgkgcacatggctgcagtggacctcctgatcggtggcactgagaccacagcaaacaccctctcctgggccgtggtttttttgcttcaccaccctgaggtgcgt

SEQ ID NO: 232654 - DNA, 201 bp, Homo sapiens
agcatctccggctacgacatccctgagggcacagtcatcattccgaacctccaaggcgcccacctggatgagacggtctgggagaggccacatgagttctrgcctggtatgtggggggccgggggcctgccgtgaaaatgtggtggaggctggtccccgctgccgctgaacgcctccccacccacctgtccacccgcccgc

SEQ ID NO: 232655 - DNA, 201 bp, Homo sapiens
gtactcctctccccaggccagccgctcagcccgctcctttcaccctctgcaggagagcctcgtggcaggccagtggagggacatgatggactacatgctcyaaggggtggcgcagccgagcatggaagagggctctggacagctcctggaagggcacgtgcacatggctgcagtggacctcctgatcggtggcactgagac

SEQ ID NO: 232656 - DNA, 201 bp, Homo sapiens
cccacagctgcattctcatgcttcctgccgcagttcttccccaatccaggtctccggaggctgaagcaggccatagagaagagggatcacatcgtggagawgcagctgaggcagcacaaggtggggactgtgtgtggacggcctcccctcggcccacagccagtgatgctaccggcctcagcattgctatgaggcgggttc

SEQ ID NO: 232657 - DNA, 201 bp, Homo sapiens
ctccttcccacagctgcattctcatgcttcctgccgcagttcttccccaatccaggtctccggaggctgaagcaggccatagagaagagggatcacatcgwggagatgcagctgaggcagcacaaggtggggactgtgtgtggacggcctcccctcggcccacagccagtgatgctaccggcctcagcattgctatgaggc

SEQ ID NO: 232658 - DNA, 201 bp, Homo sapiens
  misc_feature (1)...(201): n = A,T,C or G
ccttcggagacaagatcaaggtgcctcacagcccctcaggcccacccccagcccctccctgagcctctccttgtcctgaactgaaagtactccctcctttnctggcaggacgacaacttaatgcctgcctattacaaatgtatccaggaggtgttaaaaacctggagccactggtccatccaaattgtggacgtgattccc

SEQ ID NO: 232659 - DNA, 201 bp, Homo sapiens
ttccccttaaggaggtagctcccagcactcaaccaacctccccgcagagctcccttcctgaccctccgctgcagaggattgaggcttaattctgagctggycctttccagccaataaatcaactccagctccctctgcgaggctggcatgattgttccatttcacccagccactcagtcccttgcctgttacactgtgggg

SEQ ID NO: 232660 - DNA, 201 bp, Homo sapiens
caagatcaaggtgcctcacagcccctcaggcccacccccagcccctccctgagcctctccttgtcctgaactgaaagtactccctccttttctggcaggasgacaacttaatgcctgcctattacaaatgtatccaggaggtgttaaaaacctggagccactggtccatccaaattgtggacgtgattccctttctcaggg

SEQ ID NO: 232661 - DNA, 201 bp, Homo sapiens
cggcccagcaggtgactcccgagggttggggatgagtgaggaaagcccgagcccagggaggtcctggccagcctctaactccagcccccttcagcatctcyggctacgacatccctgagggcacagtcatcattccgaacctccaaggcgcccacctggatgagacggtctgggagaggccacatgagttctggcctggta

SEQ ID NO: 232662 - DNA, 201 bp, Homo sapiens
agttcttccccaatccaggtctccggaggctgaagcaggccatagagaagagggatcacatcgtggagatgcagctgaggcagcacaaggtggggactgtrtgtggacggcctcccctcggcccacagccagtgatgctaccggcctcagcattgctatgaggcgggttcttttgcataccccagttatgggcctgttgcc

SEQ ID NO: 232663 - DNA, 201 bp, Homo sapiens
gttcttccccaatccaggtctccggaggctgaagcaggccatagagaagagggatcacatcgtggagatgcagctgaggcagcacaaggtggggactgtgygtggacggcctcccctcggcccacagccagtgatgctaccggcctcagcattgctatgaggcgggttcttttgcataccccagttatgggcctgttgcca

SEQ ID NO: 232664 - DNA, 201 bp, Homo sapiens
ctaccggcctcagcattgctatgaggcgggttcttttgcataccccagttatgggcctgttgccactctgtactcctctccccaggccagccgctcagccygctcctttcaccctctgcaggagagcctcgtggcaggccagtggagggacatgatggactacatgctccaaggggtggcgcagccgagcatggaagaggg

SEQ ID NO: 232665 - DNA, 201 bp, Homo sapiens
caggccaccctgccactcacccagcacacggcaaaatgcagaggactacctttccctggtccgccccctggccgccccttggggaatgcaaacttcgtgtyctgctgcggagccagacgcctgtattgggaagtggggagaatcaaggcggggaaatcggacttttgggtcgctgggggcaacgaagcctggagaggcctt

SEQ ID NO: 232666 - DNA, 201 bp, Homo sapiens; identical to SEQ ID NO: 43102

SEQ ID NO: 232667 - DNA, 201 bp, Homo sapiens
ccaggtgcttggtttgtgtgtacggtgtgaaggtatatagctaggggttttttttgtttgtttgttttgtttgtttttttgagacggagtcttgctctgtygcccaggctagagtgcagtggcatgatcttggttcactgcaacctctgcctccagggttcaagggattctcctgcctcagcttcccgagtagctgggatt

SEQ ID NO: 232668 - DNA, 201 bp, Homo sapiens; identical to SEQ ID NO: 43104

SEQ ID NO: 232669 - DNA, 201 bp, Homo sapiens; identical to SEQ ID NO: 43105

SEQ ID NO: 232670 - DNA, 201 bp, Homo sapiens
tcaggtgatttgccctccttggcctcccaaagtgctgcaattacaggcgtgtgccactgcgcccggccagattttctccagctcttctgataacctccccscaaatctctttgtagcttctttggtttctatgatgcaaatgagaccgtcctggagatggaggagcaactggtgagccccctgggattacttccccttcta

SEQ ID NO: 232671 - DNA, 201 bp, Homo sapiens
atgctggggctctgggggcagcggctccccgcggcgtgggtcctgcttctgttgcctttcctgccgctgctgctgcttgcagcccccgcgccccaccgcgmgtcctacaagccggtcatcgtggtgcatgggctcttcgacagctcgtacagcttccgccacctgctggaatacatcaatgaggtctggcaggggacacct

SEQ ID NO: 232672 - DNA, 201 bp, Homo sapiens; identical to SEQ ID NO: 43124

SEQ ID NO: 232673 - DNA, 201 bp, Homo sapiens
tgttggccaggctggtcttgaactcctgacctcaggtgatccaccctccttggtctcccaaagtgctgggattacaggcatgagccaccacacctggcctyttttttttttttttttgagacaaagtctcactctgtcgccaggctggagtgcagtggcgccatcccggctcactgcaacctttgcgtcccagaatcaagc

SEQ ID NO: 232674 - DNA, 201 bp, Homo sapiens
ggtgttatccctgtatttatggaaataaagttccatttcctcagtgtgacttggctcatttccaggtggaggggacctggctccccaaggagggtgggggyggagcctgaggcctgggtgcccagatgcctggtctagggtggggacccccttggtgtttccgctctctctcaatgcccattctttgtgggttcctggttc

SEQ ID NO: 232675 - DNA, 201 bp, Homo sapiens; identical to SEQ ID NO: 43125

SEQ ID NO: 232676 - DNA, 201 bp, Homo sapiens; identical to SEQ ID NO: 43127

SEQ ID NO: 232677 - DNA, 201 bp, Homo sapiens
atgtaccatatgtgaatgaatgtgcctgtgttccagtaaaacttcatttacaaaaacaagtagcaggctggatttggtcctttggtcacagtttgccaacytctagaccagaccatggggccagaatacttgggtttgaatcttgaccctattgggtgcctttgggcaagttacttaaccattctgttactcagttttcct

SEQ ID NO: 232678 - DNA, 201 bp, Homo sapiens; identical to SEQ ID NO: 43130

SEQ ID NO: 232679 - DNA, 201 bp, Homo sapiens; identical to SEQ ID NO: 43106

SEQ ID NO: 232680 - DNA, 201 bp, Homo sapiens
gcctgaagagctgcagccagaacaggtggctgagctgtggggccggggtgaccggatcgaatctctcagcgaccaggtgctgctgctggaggagaggctakgtgcctgtgagtcctcacactcctcccgccttgacttctattccccaactttccccaagacccctctccattcaggcattccctctttcctccaagcccc

SEQ ID NO: 232681 - DNA, 201 bp, Homo sapiens
ataatcccagcactttgggaagccgaggcgggtggatcacctgaggtcaggagttcgagaacagctggctaacattgagaaaccccatctctactaaaaayacaaaaattagtgggcctggtggcgcacgcctgtagttccagctactcaggaggctgaggcaggagaacttgaaaccaggaggcggaggttgcaatgagc

SEQ ID NO: 232682 - DNA, 201 bp, Homo sapiens
gagtggggtttactcagagccttagggtgggcatgagttgcggggtgttttgttggagcaagggatgtgcatttagggcgttatgtgacggtgtgggtatrtgaggggagtagcagtgtgtgaaaggtgtggagtttccaggtgcttggtttgtgtgtacggtgtgaaggtatatagctaggggttttttttgtttgtttg

SEQ ID NO: 232683 - DNA, 201 bp, Homo sapiens
tgaggtacgagaattgcttgagcctaggaggccaaggctgcagtgagccgagatctcaccattgcactcctgcctgggtgacagagtaagaccctgtctcaaaaaaaaaaaaaaaagttaccaaaatagcaaaaagcagtcatttatactcctcacctagatttcgcaaatgttaacattttgtcatgtttacattaatat

SEQ ID NO: 232684 - DNA, 201 bp, Homo sapiens
ctggagtgcagtggcgccatcccggctcactgcaacctttgcgtcccagaatcaagcaattctcctgcctctgcctcctgagtagctgggattacaggcgyccaccacgcccagctaattttgtatttttagtagagacagggtttctccgtgttggccaggctggtctcgaattcctgacctcagatgatccaccctcct

SEQ ID NO: 232685 - DNA, 201 bp, Homo sapiens
tcttctcctctccatccctatcaccccctcccccactttataaaaacttttaattttgaaattcttatagattcataggaaattgcaaagatagtatagcraggcccttcacccagcttcccccagtggttgcatcctatgtaattatagcacagtatcaaaaccaggaaattcacattggttcaatgtgtgtgtgtagtt

SEQ ID NO: 232686 - DNA, 201 bp, Homo sapiens
tgagtgggcaggagtacgggccacccgagggactcgggacgggcgtccgggctcgggtagtggtcacactcttggtctcctttgtccctagttcgggaggmggaaaaagatgagcgcgctctgaagcaggagattcacgagctgcgagggcgcctggagcggctggagcaggtgagccaagcctgctgggtggggcgaggc

SEQ ID NO: 232687 - DNA, 201 bp, Homo sapiens
aggcctgaccagtgcgagtgcgcccccggctggggagggaagcactgtcatgtgggtgagtcagcttgtcctccccacctacccaggtgcttgcccccgcyccctctctcagccccttccttttttcggtaactagacgtggatgaatgtaggaccagcatcaccctctgctcgcaccattgttttaatacggcaggcagc

SEQ ID NO: 232688 - DNA, 201 bp, Homo sapiens
aggagattcacgagctgcgagggcgcctggagcggctggagcaggtgagccaagcctgctgggtggggcgaggccagacgtcactgtcaataccctgaggsatctcttcctttctagtgggccggtcaggctggggcctgggtcagagcggtgctgcccgtgccgcctgaagagctgcagccagaacaggtggctgagctg

SEQ ID NO: 232689 - DNA, 201 bp, Homo sapiens
gttaggcctgaccagtgcgagtgcgcccccggctggggagggaagcactgtcatgtgggtgagtcagcttgtcctccccacctacccaggtgcttgccccygccccctctctcagccccttccttttttcggtaactagacgtggatgaatgtaggaccagcatcaccctctgctcgcaccattgttttaatacggcaggc

SEQ ID NO: 232690 - DNA, 201 bp, Homo sapiens
ggccctgtctgttctggcatggggggtggtggctgactcaattctgttccccctaagccctaacaaatgtcatgaagagaggggggcagttttccccttgstgccctgggctgcccccctgcccctttgtgacgacttgcccttctagctttcctcagctgatcttgctttttctcccataacctgaactgctttgttccc

SEQ ID NO: 232691 - DNA, 201 bp, Homo sapiens; identical to SEQ ID NO: 43116

SEQ ID NO: 232692 - DNA, 201 bp, Homo sapiens
tgcgtcccagaatcaagcaattctcctgcctctgcctcctgagtagctgggattacaggcgcccaccacgcccagctaattttgtatttttagtagagacrgggtttctccgtgttggccaggctggtctcgaattcctgacctcagatgatccaccctcctcggcctcccaaagtgctgggattacaggcttgagccacc

SEQ ID NO: 232693 - DNA, 201 bp, Homo sapiens; identical to SEQ ID NO: 43107

SEQ ID NO: 232694 - DNA, 201 bp, Homo sapiens; identical to SEQ ID NO: 43117

SEQ ID NO: 232695 - DNA, 201 bp, Homo sapiens; identical to SEQ ID NO: 43118

SEQ ID NO: 232696 - DNA, 201 bp, Homo sapiens; identical to SEQ ID NO: 43100

SEQ ID NO: 232697 - DNA, 201 bp, Homo sapiens
gaagcggcacccgggggcgctcacctgtgaaggtgaggctgggtcttccgggccttgcgggaggcgcgccccacggagctggggagctgggtcgtcggttygagtctgaaccccacttcctctgtcctcagccatctgcgccaagccttgcctgaacggaggcgtctgcgttaggcctgaccagtgcgagtgcgcccccgg

SEQ ID NO: 232698 - DNA, 201 bp, Homo sapiens
gagatgggaccccaagaaccccaactaggacccgtactcagggtcctgagccgggcgctgtgttccaggaccatgtaccgcgttatgtggcgggaggtgargcgggaggttcagcagacccatgcagtgtgctgccagggctggaagaagcggcacccgggggcgctcacctgtgaaggtgaggctgggtcttccgggcct

SEQ ID NO: 232699 - DNA, 201 bp, Homo sapiens; identical to SEQ ID NO: 43120

SEQ ID NO: 232700 - DNA, 201 bp, Homo sapiens
gccaacctctagaccagaccatggggccagaatacttgggtttgaatcttgaccctattgggtgcctttgggcaagttacttaaccattctgttactcagwtttccttatctgtaaaatattatagcatgtacttcaccaggtggttgtaaggattaaataaataaatgaatgcaatgtactttgaatagtacctggctca

SEQ ID NO: 232701 - DNA, 201 bp, Homo sapiens
gagtgggcaggagtacgggccacccgagggactcgggacgggcgtccgggctcgggtagtggtcacactcttggtctcctttgtccctagttcgggaggcrgaaaaagatgagcgcgctctgaagcaggagattcacgagctgcgagggcgcctggagcggctggagcaggtgagccaagcctgctgggtggggcgaggcc

SEQ ID NO: 232702 - DNA, 201 bp, Homo sapiens; identical to SEQ ID NO: 43123

SEQ ID NO: 232703 - DNA, 201 bp, Homo sapiens; identical to SEQ ID NO: 43126

SEQ ID NO: 232704 - DNA, 201 bp, Homo sapiens; identical to SEQ ID NO: 43128

SEQ ID NO: 232705 - DNA, 201 bp, Homo sapiens
acccagcacacggcaaaatgcagaggactacctttccctggtccgccccctggccgccccttggggaatgcaaacttcgtgttctgctgcggagccagackcctgtattgggaagtggggagaatcaaggcggggaaatcggacttttgggtcgctgggggcaacgaagcctggagaggccttctttccattcccagaata

SEQ ID NO: 232706 - DNA, 201 bp, Homo sapiens
ccacagatgggacagtatggaggtgagtgggcactagactccatagaatgccctgagttttgggggaacagaggtttatggtcacttagcattgccattcrcttgccagacacggactacttgaagtggctgttccccacctccatgcggtctaacctctatcggatctgctatagcccctggggccaggaattctccatc

SEQ ID NO: 232707 - DNA, 201 bp, Homo sapiens
ccctctctgtgactcctgagctgaagggttcaccctgtggggaggaggtccaggatcccagcagtaactcactttgtctctccttgtgtctctcttccatrcttccacgccccttcgaccaccttgaaggtttatctgcgggattcttttgggttgaagactctattggcccggggggccatagtgaggtgtccaatggcc

SEQ ID NO: 232708 - DNA, 201 bp, Homo sapiens
gcttgattgccgggcgtctgttccgagggaggagggtgttgccatctccctcacatgcccttatcacccctttctcaggcgggagcatgctggggctctgsgggcagcggctccccgcggcgtgggtcctgcttctgttgcctttcctgccgctgctgctgcttgcagcccccgcgccccaccgcgcgtcctacaagccgg

SEQ ID NO: 232709 - DNA, 201 bp, Homo sapiens
tactggtggtgttacagagctcatagcttctgatctggggagtccagaaataggggcctcagagggttggaaagatacttctagggagccctttgctgggrtggggatgagggtagtgggacttgaccctactgagctgaccctgctggagctaaggaggaggcttgtgggagggggcaggaatgggaggactctctggcc

SEQ ID NO: 232710 - DNA, 201 bp, Homo sapiens
agtacagcgttattagtctttttatttgcttattgcatcttgggagcgcgtgggtgggtgaagggagcgaggataggaagtctatggagatttacaccagtttttttttttttttaaacaaaaacacagccagataatcattattcttcccttacgtccccccagcccccacctggggcagtcgctctcccggctgcgtcc

SEQ ID NO: 232711 - DNA, 201 bp, Homo sapiens
ccctggccgccccttggggaatgcaaacttcgtgttctgctgcggagccagacgcctgtattgggaagtggggagaatcaaggcggggaaatcggactttygggtcgctgggggcaacgaagcctggagaggccttctttccattcccagaatatgtttgctgctttttcctctccccactggcctaaatggatcgctccg

SEQ ID NO: 232712 - DNA, 201 bp, Homo sapiens; identical to SEQ ID NO: 43251

SEQ ID NO: 232713 - DNA, 201 bp, Homo sapiens
gaagaggtggaacaagagaaggttaaaccctcacaggattggcccacccccgtcccgccgcgtgctgcgcaggcgcgttttacctaaccaccattttccgkcaagttttagccaatgagttgatttggagccatacgctccaaagtccaatagcaatccggacattctctaaaagaggaagcgaaggaaagaaaggggctt

SEQ ID NO: 232714 - DNA, 201 bp, Homo sapiens; identical to SEQ ID NO: 43253

SEQ ID NO: 232715 - DNA, 201 bp, Homo sapiens
ggcgcgttttacctaaccaccattttccgtcaagttttagccaatgagttgatttggagccatacgctccaaagtccaatagcaatccggacattctctaraagaggaagcgaaggaaagaaaggggcttatagtgggcgaggtctataggtagtcccgagcaaattgcttatggctttggttatgactgacaactactca

SEQ ID NO: 232716 - DNA, 201 bp, Homo sapiens
ttgatcttcaaaggtgggcaaagttccctctgactcttcccccactccccatcttactgatttaatttaatttttcactccccagagtctaatatggattytgactcttaagtgcttccgccccctcactacctcctttaatacaaattcaataaaaaaggtgaaatatattgatgggatctcttcccaagttcgccccca

SEQ ID NO: 232717 - DNA, 201 bp, Homo sapiens
ttcaaaggtgggcaaagttccctctgactcttcccccactccccatcttactgatttaatttaatttttcactccccagagtctaatatggattctgactyttaagtgcttccgccccctcactacctcctttaatacaaattcaataaaaaaggtgaaatatattgatgggatctcttcccaagttcgcccccacccccg

SEQ ID NO: 232718 - DNA, 201 bp, Homo sapiens
actccaccccgcccccagggccagagaccagctccggagagcagaggggtgagtcttcttgtccagttgtgtcccttccttgacagatttgccggcttccygtctgactttttctgcctccctagggattccagccatttggtgataccgggggcttccacttctcatttggtgttggtgcttttccctttggctttttca

SEQ ID NO: 232719 - DNA, 201 bp, Homo sapiens
cggtgtggaagatgggaggagaaaaatccctgttaactttctctctccacttcctcagattaaaaactccaccccgcccccagggccagagaccagctccrgagagcagaggggtgagtcttcttgtccagttgtgtcccttccttgacagatttgccggcttcccgtctgactttttctgcctccctagggattccagcc

SEQ ID NO: 232720 - DNA, 201 bp, Homo sapiens
agcccgacaggagacataagactttgctggtatgtgtgggtgggagtataacggtcgagatctgtggaaagaaaggtcttaggaaccaggagctgaggcaygtgatgtgctgagaagagaaggtggggcggggagtggcaggacaatgtgagacccgagccaccttaccccagagaagtgaggggtcttagctgtgcaggt

SEQ ID NO: 232721 - DNA, 201 bp, Homo sapiens; identical to SEQ ID NO: 43259

SEQ ID NO: 232722 - DNA, 201 bp, Homo sapiens
ggagccctgtgaatcccctcaggccccctcccagcctaggagcatatgcttccacagctttcctctctcccacaggtgtggatctgggacagggtcacccrgcctccagctggcaggattccctcttcctgtttctcgccatcttcttctttttttggctgctcagtatttgagctatgtctgcttcctgcccacctccag

SEQ ID NO: 232723 - DNA, 201 bp, Homo sapiens
tgtgggtgggagtataacggtcgagatctgtggaaagaaaggtcttaggaaccaggagctgaggcacgtgatgtgctgagaagagaaggtggggcggggartggcaggacaatgtgagacccgagccaccttaccccagagaagtgaggggtcttagctgtgcaggtggaaacaagtgagacacaaaggttaagggaggca

SEQ ID NO: 232724 - DNA, 201 bp, Homo sapiens; identical to SEQ ID NO: 43249

SEQ ID NO: 232725 - DNA, 201 bp, Homo sapiens; identical to SEQ ID NO: 43250

SEQ ID NO: 232726 - DNA, 201 bp, Homo sapiens
gatggggttggggttgaaaagaggagacccagaaagaggtggctgaaggaaattagaaattaacttgaaaggcagaaaagagagggcacgaaaatttgtaygtgtttgttggggagaggagaaaggagagggttgagtgtgttgaggatggacagagctttaggtgttggaagatcagacaagcaggaaggctaactaagt

SEQ ID NO: 232727 - DNA, 201 bp, Homo sapiens
gggaagctgtggtcagtgtgtgtggccacctgtactggtgagaatcgaggaggggggcgggaggtggtgggtctcgcttatatactggagaggctaggagmgaataatcatacagtcatacagataatcggagggcacgttcccataggtgaagcccgacaggagacataagactttgctggtatgtgtgggtgggagtat

SEQ ID NO: 232728 - DNA, 201 bp, Homo sapiens
ggagctgtaagaccctcttgtatactggaaaccaccttttttctccccagtggctggagacacggccagaacggcaagagtgtccagtatgtaaagctggkatcagcagagagaaggttgtcccgctttatgggcgagggagccagaagccccaggatcccaggtgagagactggaggtgttgcttagggaagattgaagg

SEQ ID NO: 232729 - DNA, 201 bp, Homo sapiens
gttgcttagggaagattgaaggcttctgcccttggaaaacggtgtggaagatgggaggagaaaaatccctgttaactttctctctccacttcctcagattraaaactccaccccgcccccagggccagagaccagctccggagagcagaggggtgagtcttcttgtccagttgtgtcccttccttgacagatttgccggct

SEQ ID NO: 232730 - DNA, 201 bp, Homo sapiens
tttggtgttggtgcttttccctttggctttttcaccaccgtcttcaatgcccatgagcctttccgccggggtacaggtaagagtcacactcagctcccatsagggagccctgtgaatcccctcaggccccctcccagcctaggagcatatgcttccacagctttcctctctcccacaggtgtggatctgggacagggtcac

SEQ ID NO: 232731 - DNA, 201 bp, Homo sapiens
gatagggacattattgagcttgaaagtgagtaatgggggaatgtgctagtaaaggggtttggtttggagtgatggggttggggttgaaaagaggagacccrgaaagaggtggctgaaggaaattagaaattaacttgaaaggcagaaaagagagggcacgaaaatttgtatgtgtttgttggggagaggagaaaggagagg

SEQ ID NO: 232732 - DNA, 201 bp, Homo sapiens; identical to SEQ ID NO: 43264

SEQ ID NO: 232733 - DNA, 201 bp, Homo sapiens; identical to SEQ ID NO: 43279

SEQ ID NO: 232734 - DNA, 201 bp, Homo sapiens; identical to SEQ ID NO: 43280

SEQ ID NO: 232735 - DNA, 201 bp, Homo sapiens
atcctgtctccacagtggcatgatgaggggtgggaacatcaggttcagaaaaggtctttctgctctcagcttctcacaagcttaactgaagccccccgccyggggtgatagaagatatgacttcccctgagtttggtagaggcaagcatttccctttgaaagcttgttggtcattggtcatctccgtggtctcttctaaac

SEQ ID NO: 232736 - DNA, 201 bp, Homo sapiens
tagatcctgtctccacagtggcatgatgaggggtgggaacatcaggttcagaaaaggtctttctgctctcagcttctcacaagcttaactgaagccccccscctggggtgatagaagatatgacttcccctgagtttggtagaggcaagcatttccctttgaaagcttgttggtcattggtcatctccgtggtctcttcta

SEQ ID NO: 232737 - DNA, 201 bp, Homo sapiens
ttgccccacgatagtaaccactatcctgatttctactggttttgtttatttttatattttacgtagatggaatcagaatcagacagaattccccccccccctttgtttttttgagacggagtctcgctttgtggcccaggctggaatgcagtggagtgatctcggctcacttgcaagctctgcctctcgggttcacaccat

SEQ ID NO: 232738 - DNA, 201 bp, Homo sapiens
agtgtatgtttggtaaatataagttgactgattgtatatatatgaatatatgtgaattccttagtaagagatgtaatgactaatggatgtgtcaaattaaytcttagagagtaaatcttgacagatttcatcagtgaattctgcctaaagtcagttttaattccaagttcattggtttgtatatcttctatactgaatttt

SEQ ID NO: 232739 - DNA, 201 bp, Homo sapiens
gcaaagccttacatgctccagctcctgtctacctctaactgcatttctacttcttggtctctatgctgctgtttactgttcattggtctacttcctgccaygggtctttgtccttagaattttcagtctgtatgccctttatctttttcatgcatgtctatctccctatctgttaggtctgggtttaattaaataccctat

SEQ ID NO: 232740 - DNA, 201 bp, Homo sapiens
atccctctttattttttacttttttttagagacagagtcttgctctgtttcccaggctaaagttccgtggcacaatcacggctcactgcatcctcaacctyatccttccaagtagctcagactataagcacacgccccacactgggctattttttttatttttagtagagacaaggtcttgctgtgttgcccaggctgctt

SEQ ID NO: 232741 - DNA, 201 bp, Homo sapiens
ggtcaagttgatcttctgcattactgggactttgccctggaccaagtaagtctagatatttggtccccatcagcctatcctgtgtgtctgcagggaacatrctcctggcactctggagagtagaacaaaatcaactgagtgacatcattaccttggtggcaaaatgcagtctggagatacaggagaaatttgggatctatc

SEQ ID NO: 232742 - DNA, 201 bp, Homo sapiens
agtttgttggaagttttcaattgactttttaaaatagaaagctatggagaaagtgtatacatgaatgaattttaaaaatagttacttccaatgttaacatygaatcagattggtttgcttgccacaacttattcaaaatggataaaaattatatcaaacatgtacatagtactttaacatttatagaatactttagtatat

SEQ ID NO: 232743 - DNA, 201 bp, Homo sapiens
gcctccagggttcaagcaattcttctgcctaagcctcctgagtagctgggattataggtgtgcaccaccacgcctggctaattttttttttttttttttgkatttttagtagagacagggtttcaccatgttggtcaggctagtctcgagttcccaacctcaggtcatctgcccgtctcagcctcccaaagtgctgggatt

SEQ ID NO: 232744 - DNA, 201 bp, Homo sapiens
caattgtcctggaaagatgttggagatttggtctagagcagtggttctcaacctcagctgtggttgcctgaggagctttttaattgttttttcttttttctttttttttttttttttttgtaagagactggggtctcagtatgttgccaagtttgtcttgaactctagagcttaaaagattcttctgcctcaacctctcaa

SEQ ID NO: 232745 - DNA, 201 bp, Homo sapiens
tcctattgtttcccatagctaggcagcctaagagagtaggggaaagagctggctccagatgaaaagggcaccatctccagctcttggaagcagagagggtggtcctttggattcccagtggcagcagcaaccaacctggcccttagtagtttctaagttacaccatgttaatggataaaggaattactcagcttgaaggga

SEQ ID NO: 232746 - DNA, 201 bp, Homo sapiens
tattttgatcctgtgaggaaggaataggtgttttcttattttctgccatgtattaagcttttagatatttgccagatatccagtatctggaaaaaactcatttatgtagtacccatgttttgagtacctaccctgtgacatggactgtaataggtgcaggcagggcaagaacccactcttgaactttttagttaggcctac

SEQ ID NO: 232747 - DNA, 201 bp, Homo sapiens; identical to SEQ ID NO: 43285

SEQ ID NO: 232748 - DNA, 201 bp, Homo sapiens
cactgttccaggaaattgatcaactcttccaatgggacattgatgatcacattctgccctttactacaggacagaaaccacttagtttttaataagtggcycagtattacaattgcagcgatgcctggcaaattgaagttgcaagcctttgtcttactctttcagtcaggacctatttcagactgttgatgacattgacat

SEQ ID NO: 232749 - DNA, 201 bp, Homo sapiens; identical to SEQ ID NO: 43286

SEQ ID NO: 232750 - DNA, 201 bp, Homo sapiens
gtgggaggacatcttttgggatgaaccggctcagtccttgagctcaccccaaagatgatgaaattgaaactcagaggaaaggatttttacaggaccacgcsccgggctttgaacccgtttttcccaaccccgagcattttctattaagcgttctgtttcaattattttattcgttcagttaattcgttcttggcgtcataa

SEQ ID NO: 232751 - DNA, 201 bp, Homo sapiens; identical to SEQ ID NO: 43284

SEQ ID NO: 232752 - DNA, 201 bp, Homo sapiens
tgggaggacatcttttgggatgaaccggctcagtccttgagctcaccccaaagatgatgaaattgaaactcagaggaaaggatttttacaggaccacgccscgggctttgaacccgtttttcccaaccccgagcattttctattaagcgttctgtttcaattattttattcgttcagttaattcgttcttggcgtcataag

SEQ ID NO: 232753 - DNA, 201 bp, Homo sapiens
tgaattccttagtaagagatgtaatgactaatggatgtgtcaaattaattcttagagagtaaatcttgacagatttcatcagtgaattctgcctaaagtcrgttttaattccaagttcattggtttgtatatcttctatactgaattttcttttaagtttttgctgagacccataagttgttttctcatacataccatgaa

SEQ ID NO: 232754 - DNA, 201 bp, Homo sapiens
cctcctaggcgtccatgtgacgggtgagggcgacggccggcacttgcacttaagtctcctggcctgcgggagaggcggccgttgggtctaagcccctggakgcctcgacggttacaggcctagcctcccgcgagctaaggcacagtttaacttcgtgctgcggcttccttaggaaactttgagtatcttcgttttagcgtg

SEQ ID NO: 232755 - DNA, 201 bp, Homo sapiens
tccaatagagcctgctaggcggattggctgctacgcggctgggccctgtttccggtacctaggcgggcagccatggtgaccggcgagcggcatgcgacgcmgcctctgtggcctgtggaggcccgcttggcggcgctgcttcccgacctactggtctttcggaagcctcggggatgggaacccgagctcgccacggcccag

SEQ ID NO: 232756 - DNA, 201 bp, Homo sapiens
ctattgtttcccatagctaggcagcctaagagagtaggggaaagagctggctccagatgaaaagggcaccatctccagctcttggaagcagagagggtggwcctttggattcccagtggcagcagcaaccaacctggcccttagtagtttctaagttacaccatgttaatggataaaggaattactcagcttgaagggatc

SEQ ID NO: 232757 - DNA, 201 bp, Homo sapiens; identical to SEQ ID NO: 43287

SEQ ID NO: 232758 - DNA, 201 bp, Homo sapiens; identical to SEQ ID NO: 43288

SEQ ID NO: 232759 - DNA, 201 bp, Homo sapiens
tttatcgtaggagcgtcttcgcctcccccgtttccagtagaaaagacagctttgctcctttgaaagcgcagaccgccgcacctccagccccttctccccgsggaagtaggccccgctaagaatgtgggaaggtggtggggcggcgactgaagtcgcttccgattggcgttgtcccaaggaagcctgcgcggattgatcggc

SEQ ID NO: 232760 - DNA, 201 bp, Homo sapiens
tcacaataaaagtagcccatacaaagtaaaaaagagttggatttcaaaggacaaacacaatttaagactttttccctttgacattgatttctttcggtacrtcagccaatacataaaaacatgtccaccttatcaaggccaaaggttaactaccaagagcttcattgattccacaaatatttattgttcatcagtcctatg

SEQ ID NO: 232761 - DNA, 201 bp, Homo sapiens
tctactgaaaatacaaaaaataaaaaataaataaataaccagatgtggtggcgcacacctgtaatcccaggtacttgggaggctgaggtgagaggatcgcytgaagccgggaggtggaggttgcagtgagccgagatcgcaccactgcactccagcctggaggacagagtgagactccatctcaaataataatcataatta

SEQ ID NO: 232762 - DNA, 201 bp, Homo sapiens
ctcatacgtgcaggtttacttcatttcattttagttgtgtttttgttgtttgttttttgttgttgttgttgtttttgagacggagtctcactctgttgccraggctggagtgcagtggcacagtctcggctcactgcaacctccgcctcctgggttcaagtgattctcctgcctcagcctcccaagtagctgggataacag

SEQ ID NO: 232763 - DNA, 201 bp, Homo sapiens
tttttcaggtccatggatctctcagcttgaagtcaaggtctcactttcttcttacagacctgccccttcccctttccagctggcaaagaagcaggctgctmctgccaggtttcagaaaccatggtcatttgatggtgcaagaagtcagactgtttttctacaagcggcagaaagctctggggatcctgcctagggggagct

SEQ ID NO: 232764 - DNA, 201 bp, Homo sapiens
aattgctactagtaatagggcacttttttcactagctttatacaattgttactagtaatagaataccattttctcttagtaataatggacttcctgaaacmactggacccttagaaacttttagtgaactagagaaatgcaaatcaaaaccacaatgagataccatctcataccagtcagaatagttactaccaaaaagtc

SEQ ID NO: 232765 - DNA, 201 bp, Homo sapiens
gaaaaactttcttaggaggttagatattaatatgttatcctcaaaacttgaaacaatttttctgaaaaaagaaacttttaatgagcttatgttttccattyggcttcatataaatagagccaggcaatttgaaagcccaactcaaaatattacttttccctgaagctggatgtattagtcggccgagactgccataacaaa

SEQ ID NO: 232766 - DNA, 201 bp, Homo sapiens
ggcctccccagccacgtggaactgtgagtccattaaacctctttcctttataagttatccagtctcaggtgtgtttttattagcgatgtgagaacacactratacaggaggtttttcttttataaggaatggtcatggaaagccataaaagtcatagttgagcaatgatctgaaggaagcagggaaccagctatgcagata

SEQ ID NO: 232767 - DNA, 201 bp, Homo sapiens
ggggagttattagaaggttttgagcaaaggaataacatggtttgacatgtgttaaaatgctcactcaggttattgtgttgaaaatagactaagtgaggggyggtggagaaatctaagcaggtatgctagttgcattaatcaagttgggaggtaagagtgggttggcaaaaaaaaaaaaaaagtcaaagcggtgaagatggt

SEQ ID NO: 232768 - DNA, 201 bp, Homo sapiens
ttaagacaaagaagttagcctagctctactcatcttttccttccttgcttttctttcatacattctgagatgttaggtcaagatttttttttttgagatgsaatcttgctctgccacaagactccagtcaagctggagtgcagtggcacaatctcagctcactgcagcctccacctcctggattcaagagattctcctgcc

SEQ ID NO: 232769 - DNA, 201 bp, Homo sapiens
gttttgtttttgagacagcgtctcgctctgttgcccaggctggagtgtagtggcacaatctcagctcactgaaacctctgcctcccaggttaaaacaattmtcctgcctcagcctcccgagtagctgggcttacaagcacacatcaccatgcctggctaatttttgtatttttagtagagatggggttttgccatgttggc

SEQ ID NO: 232770 - DNA, 201 bp, Homo sapiens
acatgccctcatatccctccttacccagtgtacaggttttggtgtagtaacagaactatttccttcctaacaccctcttgcgccaaccttctattctgctyactgactaacctccaatctgcttaaccaaactatctgcctactttgaactactatctcaatttaaattcatgacaacccatgtcaaaggggaattcaaca

SEQ ID NO: 232771 - DNA, 201 bp, Homo sapiens
aaggtgccactggcgctctttgccttgaaccggcagcgccggtgtgagcggctgcggaagaaccctgctgtgcaggccggctcagtagtagtcctgcaggsctaagaggagactcagcgctactgcacctacaccggggtcctcttccgccaggagtccttctttcactgcgcattcggtgtcaccgagccaggctgctac

SEQ ID NO: 232772 - DNA, 201 bp, Homo sapiens
agtacatgccaccatgcctggctaattttttgtatttttagtagagatggggtttcaccatgttggtcaggctggtctcgaactcctgacctcgtgatgcrcccacctcagcctcccaaagtactgggattacaggcatgagccactgcacccggcccgtattatttatttaaatttttctttttaaaggaaagggtttta

SEQ ID NO: 232773 - DNA, 201 bp, Homo sapiens
ctgtggtgaagaatggctgatgaatttcagcacaaagctatctaatgttcagtttcaagttgctatctacatgatgctatgccatcatccctccattactkcaaagcttcagtaaaagagagaaagaaagttaacagcagaaatgaggagcaatatttaggaagcataacggggcataaagacatgtaaactctacaaaat

SEQ ID NO: 232774 - DNA, 201 bp, Homo sapiens
ttagctaaattctacttatccttcaggtcataggttaaatgttgcttctgcatggaagcttttttgacccacactgggacacgctgtcctcttaccctctrtttgtcccttataaactgatttccactgttcttaaatggcgaattgtgcaattatctgtttaaaggctatctttcctgctagactacctgcttctctgtc

SEQ ID NO: 232775 - DNA, 201 bp, Homo sapiens
gctacctgggggctaggcgtgtgcaccatggaagctccatcttcccttttttgttagcacgtgtacagtaagaaaaaaatgggcaacatggcacagctcargcagggaacccacttgcataatagaagattggcatgggggcggccagagatttgtgccataggcaaatggcacacctggtcctaaccagatttttgcacc

SEQ ID NO: 232776 - DNA, 201 bp, Homo sapiens
tctcttacagcagcatgtgaagacctaatcttaatattgttaagtttggggagaagagacagctttttcgcagagagtaattaaactcattttccatttctttttttttttttctccactaggatgaaattagagcctactattccctcctagttctctgaaagtttgcagagaaatgacaacgtatgtcagacatgtata

SEQ ID NO: 232777 - DNA, 201 bp, Homo sapiens
tacttctctaggatatttgtcttcctttttgtcaaaataactatttcaaaaattcacctcttttaaaatatacagtacatttcctccactcaaattctgckaatgatcttaactcattcctcggtgagagaaaaaaaaaaaaaacccaaatatcagatgaaacaaacctcatattctcaccaccaaagctgttctaaacct

SEQ ID NO: 232778 - DNA, 201 bp, Homo sapiens
tcttttgataaatggaagcattgtccctacctctagttccacgtttcctctggatttcatcgctgttcaaggaacttttccttttctctctcatattatcyttttctctctcatacaacttttccttttctctctcatattatcacttgccctttcacaactcacaacccatgggctcgcatgatgctttcatatcactca

SEQ ID NO: 232779 - DNA, 201 bp, Homo sapiens
gacagagtgagactgtctcaaaaaaaaaaaaaaaaaaaaaaaaggaagactgttcacattcctcactttctctttcctacattttggcctgttatataaaytttatgcttttggtctcttgatacacaaagccaatattttgtagttctaaaaatggcctttgctttcccccacaatgcctggctcaaagtctatggactt

SEQ ID NO: 232780 - DNA, 201 bp, Homo sapiens
aattttctttcatcccatgcgttttcttcatggagccatacctgagaagaaagagccaggaaccaagctcaagtctataaggggcaagcaccaaaataaartagaagaggatctaaaagagcttggtatacctcctggtttgctgcaagccacatctggttttattcacacattagataggtagtatgttagtttcctagg

SEQ ID NO: 232781 - DNA, 201 bp, Homo sapiens
atatattgaatgtatgtatttctttttttgtttgtttgttttcaggacaaatactgacacctttttattgcgttttgcactcttagaggtagaaaacaagscactaacttggttgtggcagcattaatgagtatccttgtggaaggggtgagggggatgttgggctatgaaaccagatttagacaggcagtgtaaatacaa

SEQ ID NO: 232782 - DNA, 201 bp, Homo sapiens
gccatacctgagaagaaagagccaggaaccaagctcaagtctataaggggcaagcaccaaaataaaatagaagaggatctaaaagagcttggtatacctcmtggtttgctgcaagccacatctggttttattcacacattagataggtagtatgttagtttcctaggactgctataccaaaatgccacaaaatgaatgact

SEQ ID NO: 232783 - DNA, 201 bp, Homo sapiens
tcatctgtcaaatgtaactggataagagtgacttcagacttcacgtgacgccggtgctgggcgaacagggcggcggccactggaccctcgttttggctggrgaaggaaaccctgaaggtgccactggcgctctttgccttgaaccggcagcgccggtgtgagcggctgcggaagaaccctgctgtgcaggccggctcagta

SEQ ID NO: 232784 - DNA, 201 bp, Homo sapiens
tggtatacctcctggtttgctgcaagccacatctggttttattcacacattagataggtagtatgttagtttcctaggactgctataccaaaatgccacaraatgaatgacttaaaataatggaatttattctctcacagttgtggagactgaaagtctggaatcaagatgtcagcagggttgtttacttctggaggctct

SEQ ID NO: 232785 - DNA, 201 bp, Homo sapiens
caagatgtcagcagggttgtttacttctggaggctctgagggagggtctgtcccaggcctgtcttccagtttctggtggtggcctgcagtccttggcattmcatggcttgcaagatgtctcgctccgatctctctctatctttccatagcatctcctccctgtgtgtctctgtgccctcacacagcctgcttataaggaca

SEQ ID NO: 232786 - DNA, 201 bp, Homo sapiens
ccaaaaaataaactgatggacatatggtatatcaggtggcaaagaataataaataatgtaaaaaagtactgatagggagctatcgtattatttatttatttttttttttttttttttttgagacggagcctcactctgtcgcccaagctggagtgcagtggtgcgatctcggctaactacaacctccacctcccgtgttct

SEQ ID NO: 232787 - DNA, 201 bp, Homo sapiens
tgtttacttctggaggctctgagggagggtctgtcccaggcctgtcttccagtttctggtggtggcctgcagtccttggcattccatggcttgcaagatgyctcgctccgatctctctctatctttccatagcatctcctccctgtgtgtctctgtgccctcacacagcctgcttataaggacaccagtcattggattaag

SEQ ID NO: 232788 - DNA, 201 bp, Homo sapiens
attggattaagggcacattacttctccagtgaaatctcacccttaactaattatatctgccaagaccctatttccaaataaggccacattctgagattccmggtggatgagtttgaggggagacattattcaacccagtatagatggaaagaaagacttttaagttgcgacaaaatatggcagtatttctccagaggctgc

SEQ ID NO: 232789 - DNA, 201 bp, Homo sapiens
gaaatctcacccttaactaattatatctgccaagaccctatttccaaataaggccacattctgagattccaggtggatgagtttgaggggagacattattmaacccagtatagatggaaagaaagacttttaagttgcgacaaaatatggcagtatttctccagaggctgccaggtgaggctcccaagtgagccacctgct

SEQ ID NO: 232790 - DNA, 201 bp, Homo sapiens
attaaaggaactaacatatataattcattcaaaatggtgctagctataaattagaatggccttgttggccacatttgtttcctttctctatctccagttttttgtttgttttcccaaatcaaaacaaatcaattacagctctgtaattggtgtggtggctcacgcctgtaatcccagcagtttgagaagtcgaggcaggcg

SEQ ID NO: 232791 - DNA, 201 bp, Homo sapiens
ttaaaggaactaacatatataattcattcaaaatggtgctagctataaattagaatggccttgttggccacatttgtttcctttctctatctccagttttttgtttgttttcccaaatcaaaacaaatcaattacagctctgtaattggtgtggtggctcacgcctgtaatcccagcagtttgagaagtcgaggcaggcgg

SEQ ID NO: 232792 - DNA, 201 bp, Homo sapiens
taaaggaactaacatatataattcattcaaaatggtgctagctataaattagaatggccttgttggccacatttgtttcctttctctatctccagttttttgtttgttttcccaaatcaaaacaaatcaattacagctctgtaattggtgtggtggctcacgcctgtaatcccagcagtttgagaagtcgaggcaggcgga

SEQ ID NO: 232793 - DNA, 201 bp, Homo sapiens
aaaggaactaacatatataattcattcaaaatggtgctagctataaattagaatggccttgttggccacatttgtttcctttctctatctccagttttttgtttgttttcccaaatcaaaacaaatcaattacagctctgtaattggtgtggtggctcacgcctgtaatcccagcagtttgagaagtcgaggcaggcggat

SEQ ID NO: 232794 - DNA, 201 bp, Homo sapiens
taaaactacaaaaaattagccgggcgtggtggcaggtgcctgtaatcccagctacttagggggctgaggcaggagaattgcttgaaaccgggaggcggagkttgcagtgagccaagactgtgccattgcactccagcctgggtgacagagtgagactgtctcaaaaaaaaaaaaaaaaaaaaaaaaggaagactgttcaca

SEQ ID NO: 232795 - DNA, 201 bp, Homo sapiens
ggttttcttctgaagggcaacagcaccttgagaatgagtaccatcagaaactagcattattcccaggtctgttatgtacaaggtgttttactaaagtaagycagtcaatcccttagaaaatccaataagaaatgtattgctctccccactttacacaggtggaaagtaagactcagagaagttatgtgctttttgtcagtc

SEQ ID NO: 232796 - DNA, 201 bp, Homo sapiens
tcaagaaaaaatgctctggtactgaaagatagagatttatagattatatggaaccagcccaaatgcccatcaatcaatgagtggataaagaaaatgtgatrtatacacacaccatggaatactactcaaccacaaaaagaaacaaaataatggcatttgcagtaacctggatggaattggagaccattgattctaagtgaa

SEQ ID NO: 232797 - DNA, 201 bp, Homo sapiens
gcatttggttttgttcattattgcctttctcacttttctagcatctacagcatctttccctctttcactttccattctatctagtcaatagttccagcgcaaaaaaaaaaaaaaaaaaaaaaaaaaaaacactagactagaattcaaaaacattgctttaatgtcttgcttctgtcatttactatctgtttggactcgaga

SEQ ID NO: 232798 - DNA, 201 bp, Homo sapiens
catttggttttgttcattattgcctttctcacttttctagcatctacagcatctttccctctttcactttccattctatctagtcaatagttccagcgcaaaaaaaaaaaaaaaaaaaaaaaaaaaaacactagactagaattcaaaaacattgctttaatgtcttgcttctgtcatttactatctgtttggactcgagaa

SEQ ID NO: 232799 - DNA, 201 bp, Homo sapiens
atttggttttgttcattattgcctttctcacttttctagcatctacagcatctttccctctttcactttccattctatctagtcaatagttccagcgcaaaaaaaaaaaaaaaaaaaaaaaaaaaaacactagactagaattcaaaaacattgctttaatgtcttgcttctgtcatttactatctgtttggactcgagaaa

SEQ ID NO: 232800 - DNA, 201 bp, Homo sapiens
aaccaaaaaataaactgatggacatatggtatatcaggtggcaaagaataataaataatgtaaaaaagtactgatagggagctatcgtattatttatttatttttttttttttttttttttgagacggagcctcactctgtcgcccaagctggagtgcagtggtgcgatctcggctaactacaacctccacctcccgtgtt

SEQ ID NO: 232801 - DNA, 201 bp, Homo sapiens
tggcctttctttgggggatcctgctccactaggaaagaaaagcaccatggtatgaggctggctaagggacactggggagagaccactagactttccatagrgacaaactgctccctatcgtggctccaattctctcagcacatgtatcccgcttgatgaaggaagtgagagctctgtcttacttgctgttttctcgtcacc

SEQ ID NO: 232802 - DNA, 201 bp, Homo sapiens
cattgtatttttttcagcattttctctacttccacacatactctttctgtcccatcaaactggccatttaacttttccaaaaactgccttgtgtttgccacctcttcatttttgttgctggcctgcctctcacctggaacactcgcctctttcctctctattcttattcttttggtgcagtatagccccatcttacccctt

SEQ ID NO: 232803 - DNA, 201 bp, Homo sapiens
caaaaaataaactgatggacatatggtatatcaggtggcaaagaataataaataatgtaaaaaagtactgatagggagctatcgtattatttatttatttttttttttttttttttttgagacggagcctcactctgtcgcccaagctggagtgcagtggtgcgatctcggctaactacaacctccacctcccgtgttcta

SEQ ID NO: 232804 - DNA, 201 bp, Homo sapiens
aaaaataaactgatggacatatggtatatcaggtggcaaagaataataaataatgtaaaaaagtactgatagggagctatcgtattatttatttatttttwtttttttttttttttgagacggagcctcactctgtcgcccaagctggagtgcagtggtgcgatctcggctaactacaacctccacctcccgtgttctagc

SEQ ID NO: 232805 - DNA, 201 bp, Homo sapiens
aaaataaactgatggacatatggtatatcaggtggcaaagaataataaataatgtaaaaaagtactgatagggagctatcgtattatttatttattttttwttttttttttttttgagacggagcctcactctgtcgcccaagctggagtgcagtggtgcgatctcggctaactacaacctccacctcccgtgttctagca

SEQ ID NO: 232806 - DNA, 201 bp, Homo sapiens
catccacctttaccactcaaatttaacagtgtgctgtagtgcttgaggatgggctctagagcttaacagaaccagattccactcctggctgcatcgttgaytggatggaaatgttggacaatgcacttaccctttctgagctttaattttctcatctgtcaaatgtaactggataagagtgacttcagacttcacgtgacg

SEQ ID NO: 232807 - DNA, 201 bp, Homo sapiens
tcgaataatgttgaatggccaatttcatcttagactcaggtaccaaagataagatgatttgtcttaaaagataagtagttatttttccagaagaaccaaartatgttggaatcttgaagggtaggacaggagatggccttttagaagaagaaataacaaaaacaaagcttgaaagcaaaataattagagtccattggttgt

SEQ ID NO: 232808 - DNA, 201 bp, Homo sapiens
attatatctgccaagaccctatttccaaataaggccacattctgagattccaggtggatgagtttgaggggagacattattcaacccagtatagatggaargaaagacttttaagttgcgacaaaatatggcagtatttctccagaggctgccaggtgaggctcccaagtgagccacctgcttgattacaagtaggaggct

SEQ ID NO: 232809 - DNA, 201 bp, Homo sapiens
gttattgtttttacctatgtcaccctgtcatccgtcccagtttgcctattgccaagtttttttctttatttagcagcccctgctttggccactagatggcrccagaggaaagttccttaaagacagcaaaagaaggaaagatgggtgaggttagccccagtatgaataaaggagccacccaggttaattaagtaaaacaag

SEQ ID NO: 232810 - DNA, 201 bp, Homo sapiens
aatgagaaaactccatgatcatccaaaagccattattgtccatttcctgatcctgatgggaaggaaaattggaccataaatcttagacttacacatggtcrtggtctcttaatgccctctgctggcgaggaggcagactgcagctgcctgcactgtgttatagtggacaaactgcatagtacctctaggcttcatttccct

SEQ ID NO: 232811 - DNA, 201 bp, Homo sapiens
gagccacccaggttaattaagtaaaacaagcacccagcatttcaccgaagacattgcaaggaagtgaagccttcatgagactggacttcaaatgaactttsagcactggtggaaacagaaacaaaaaactctctgctaatagaaataagatactggaaccaaagacaatagccttgaacaaaacattccgggacaccacgg

SEQ ID NO: 232812 - DNA, 201 bp, Homo sapiens
tttttgaatcatggccaatttttatgctacaagaatagctttccatgttgcctttacacttctggatttcatatcatgagggtaaattgctgaaaatgtayacacaaaagaaaaagaacataaaaaacatatacatattctatttgtttgagttctaatgttgctttcaggtcagacattctggattttcatggttttggc

SEQ ID NO: 232813 - DNA, 201 bp, Homo sapiens
gcatttcaccgaagacattgcaaggaagtgaagccttcatgagactggacttcaaatgaactttgagcactggtggaaacagaaacaaaaaactctctgcyaatagaaataagatactggaaccaaagacaatagccttgaacaaaacattccgggacaccacgggtatcagcagaatgggggcaatctaagaagacaggc

SEQ ID NO: 232814 - DNA, 201 bp, Homo sapiens
ggtgacataaagcatgattgaataaggaagaatgggtctgaagaaagcctgccgatagcatctgattcatttttgaatcatggccaatttttatgctacargaatagctttccatgttgcctttacacttctggatttcatatcatgagggtaaattgctgaaaatgtacacacaaaagaaaaagaacataaaaaacatat

SEQ ID NO: 232815 - DNA, 201 bp, Homo sapiens
tgccttcaggaagaaaaagctatgtccttgcaagcacaaaattaattctctgaatctgtcggacttaaaaccttggacagtgttgaattctgtgttgaatrccccctggaatagctcttcacagatcaccaaagccctggtgaccgcatattggcccattttcttcacgtcctttttttctacttttatagccatgattct

SEQ ID NO: 232816 - DNA, 201 bp, Homo sapiens
  misc_feature (1)...(201): n = A,T,C or G
aggttaaatgttgcttctgcatggaagcttttttgacccacactgggacacgctgtcctcttaccctctatttgtcccttataaactgatttccactgttnttaaatggcgaattgtgcaattatctgtttaaaggctatctttcctgctagactacctgcttctctgtcttatcactgccatatcccctttgcttagtgt

SEQ ID NO: 232817 - DNA, 201 bp, Homo sapiens
caactatatatttcatgtagcttgttaaacaaatttataactgtaaccaaagctaaatatatgtaatgatggtattttaagacattcaagttaaattccaytaaaagtaaatcactaaactggggtgacataaagcatgattgaataaggaagaatgggtctgaagaaagcctgccgatagcatctgattcatttttgaat

SEQ ID NO: 232818 - DNA, 201 bp, Homo sapiens
gtcgctgggccccactggccaaaggggcctggcctttctttgggggatcctgctccactaggaaagaaaagcaccatggtatgaggctggctaagggacaytggggagagaccactagactttccatagagacaaactgctccctatcgtggctccaattctctcagcacatgtatcccgcttgatgaaggaagtgagagc

SEQ ID NO: 232819 - DNA, 201 bp, Homo sapiens
ggattacaggtgtgagccacagcgcctggccttttttactttaatttttgattataaaatatttcaggcatttagaaaagtgcactggtatattttaagakttgacacattttaataagatataatggatgataaaatgttgctatttttatttcatgtctctctctcttccccacccccactacccctcctcctccaaaa

SEQ ID NO: 232820 - DNA, 201 bp, Homo sapiens
tgagccacagcgcctggccttttttactttaatttttgattataaaatatttcaggcatttagaaaagtgcactggtatattttaagatttgacacatttwaataagatataatggatgataaaatgttgctatttttatttcatgtctctctctcttccccacccccactacccctcctcctccaaaataaaatgctttt

SEQ ID NO: 232821 - DNA, 201 bp, Homo sapiens
agagctctgtcttacttgctgttttctcgtcaccttctttgtgacaaaagtaactgtttaaggtaagaagcccaaagtggtctttagtcaaattctccaartgcaaactgtcagcaatgctgtagtataatgaagttggttactggtacatttctgatgttgctgtccttgcaactcacaggagagaatgacttttgagaa

SEQ ID NO: 232822 - DNA, 201 bp, Homo sapiens
tcagaagattatattttctcttaagtatgtgatttaaaaactatattgaaaacccttcagaggaaatttgttttctttatgagcaagaagccatcttcacttttttttttttttttttttttgttctgagacagagccttgcccttatcacccaggctgaagtgcaatggcacgatctcggctcactgcaacctccgcctc

SEQ ID NO: 232823 - DNA, 201 bp, Homo sapiens
cagaagattatattttctcttaagtatgtgatttaaaaactatattgaaaacccttcagaggaaatttgttttctttatgagcaagaagccatcttcacttttttttttttttttttttttgttctgagacagagccttgcccttatcacccaggctgaagtgcaatggcacgatctcggctcactgcaacctccgcctcc

SEQ ID NO: 232824 - DNA, 201 bp, Homo sapiens
atgcctaatgctgccacctaaagcagcctatgtaagcattccgaagtagaagtcagtggttcagagccaaggaacttaaattgtgttttgttttgttttgttttgttttgttttgttttgttttgttttgtttttgagacagcgtctcgctctgttgcccaggctggagtgtagtggcacaatctcagctcactgaaacct

SEQ ID NO: 232825 - DNA, 201 bp, Homo sapiens
gaagctcacattaagaaaagggcaggttcatatatatatatatatatatatatatatatatattcctaggaatatatatataaaatatgtatatattttaygggaatatatagagagaatatatatattgaatgtatgtatttctttttttgtttgtttgttttcaggacaaatactgacacctttttattgcgttttgca

SEQ ID NO: 232826 - DNA, 201 bp, Homo sapiens
tgcctaatgctgccacctaaagcagcctatgtaagcattccgaagtagaagtcagtggttcagagccaaggaacttaaattgtgttttgttttgttttgttttgttttgttttgttttgttttgttttgtttttgagacagcgtctcgctctgttgcccaggctggagtgtagtggcacaatctcagctcactgaaacctc

SEQ ID NO: 232827 - DNA, 201 bp, Homo sapiens
cactaatagctcatatttacaccagtaaaccaaatggttgcatttagggctaatccagcagccagaggggtcccttaggcttgtgttggtaaaagcaccastcatgcccaacccagggtttctccagtgccttgtaaagggactgccagcagagctctttaatttttatgtttatcaaatgatgttctgtgtttcttctta

SEQ ID NO: 232828 - DNA, 201 bp, Homo sapiens
gcctaatgctgccacctaaagcagcctatgtaagcattccgaagtagaagtcagtggttcagagccaaggaacttaaattgtgttttgttttgttttgttttgttttgttttgttttgttttgttttgtttttgagacagcgtctcgctctgttgcccaggctggagtgtagtggcacaatctcagctcactgaaacctct

SEQ ID NO: 232829 - DNA, 201 bp, Homo sapiens
taatagctcatatttacaccagtaaaccaaatggttgcatttagggctaatccagcagccagaggggtcccttaggcttgtgttggtaaaagcaccagtcrtgcccaacccagggtttctccagtgccttgtaaagggactgccagcagagctctttaatttttatgtttatcaaatgatgttctgtgtttcttcttatga

SEQ ID NO: 232830 - DNA, 201 bp, Homo sapiens
ccacctaaagcagcctatgtaagcattccgaagtagaagtcagtggttcagagccaaggaacttaaattgtgttttgttttgttttgttttgttttgtttygttttgttttgttttgtttttgagacagcgtctcgctctgttgcccaggctggagtgtagtggcacaatctcagctcactgaaacctctgcctcccaggt

SEQ ID NO: 232831 - DNA, 201 bp, Homo sapiens
tttttcatgtgttttttggctgcataaatgtcttcttttgagaagtgtctgttcatgtccttcgcccactttttgatggggttgtttgtttttttcttgtmaatttgtttgagttcattgtagattctggatattagccctttgtcagatgagtaggttgcgaaaattttctcccattttgtaggttgcctgttcactctg

SEQ ID NO: 232832 - DNA, 201 bp, Homo sapiens
gtactggttgttcctttccatgtttagcgcttccttcaggagctcttttagggcaggtctggtggtgacaaaatctctcagcatttgcttgtctgaaaagkattttatttctccttcacttatgaagcttagcttggctggatatgaaattctgggttgaaaattcttttctttaagaatgttgaatattggcccccactc

SEQ ID NO: 232833 - DNA, 201 bp, Homo sapiens
ttttaagccggtctgaaaagcgcaatattcgggtgggagtgacccgattttccaggtgcgtccgtcacccctttctttgactcggaaagggaactccctgrccccttgcgcttcccaggtgaggcaatgccttgcttcggctcgcgcactgtgcgcgcacccactggcctgcgcccaccgtctggcactccctagtgagat

SEQ ID NO: 232834 - DNA, 201 bp, Homo sapiens
tctctaaaaaaaaaaaatggatataatcttaagatggtcaaggtttagaatcacacacataaagtatctggcatattgtgatatttcaaaaaaaatgaggccactaccagcaaataagatgaaaataagtagaggacttcatgacctgctggctagagacagctcaggatagtttagacacatttatgggggtgttgaggg

SEQ ID NO: 232835 - DNA, 201 bp, Homo sapiens
aggcagaggttgcagtgagccgagatcccatcatcgcactcgagcctgggcaacaagatcaaaactctgtttaaaaaaaaaaaaaaaaaaaaaaaaaaaatatatatatatatatatatatatatatatatatatatatgattaatcaccagaagattggtttaagtcaaaataagaagaatgcagtatgacatatataac

SEQ ID NO: 232836 - DNA, 201 bp, Homo sapiens
cgtcaacacagacagcagcagcgtctgcagggaggcttccttcgagggcatcagcaagttcaaagtcaacaacaccattcttcacccagagatcgtttagwgccgagtgtttaagacggacatagagctggaggttctgcactacaccaataaaatctccagtgagacccactgtgaggtaataatgaagactgtaaaagt

SEQ ID NO: 232837 - DNA, 201 bp, Homo sapiens
acaaaggacatgaactcatcatttttatggctgcatcgtattccatggtgtatatgtgccacattttcttaatctagtctatcattgttggacatttgggktggttccaagtctttgctattgtgaatagtgctgcaataaacatacgtgtgcatgtgtctttacagcagcatgatttataatcctttgagtatataccca

SEQ ID NO: 232838 - DNA, 201 bp, Homo sapiens
ttggcatgggggcggccagagatttgtgccataggcaaatggcacacctggtcctaaccagatttttgcaccctatgtaaatcagacaccacctccccacyagctcatctataaaaacccctgcattttgctgtggaccagcaacctattttttcaggactactctgtgtagcagagagctattctttttcttttcccaat

SEQ ID NO: 232839 - DNA, 201 bp, Homo sapiens
caccaaggtgcaatgtgtctccctttacatgaccctaattcaatgagatcccccgagactgaagttcttagcccatatcctcctattccccaaactgctgmcttcatggatgagtacagcccctcctcttctcctacccagagttcatcccctcaaatgccaagaagactacttgatgttactatctctggatagcagtca

SEQ ID NO: 232840 - DNA, 201 bp, Homo sapiens
attgaaaactcattgaaagaattctgagaccccacagcttggtgtatctgtccccagaacactgcctgctctcccttcactctctttgttgatgttgaatkgtatgttttttcccctgttcattagtctatttccaaaatttttgaattattatctccattgtgtgtatttttattaaccctcccttccctgagctcagag

SEQ ID NO: 232841 - DNA, 201 bp, Homo sapiens
ggctggtctcgaactcccgacctcaggtgatccgcccacctcggcctcccaaagtgctgggtttacaggcgtgagccaccgcgctcagccaccatcttcasttttataatgaaaatataaactgaatgaagaaacaccataaattcacaggcagtttctaagaacctaccctttatatattatatacttatattcccatga

SEQ ID NO: 232842 - DNA, 201 bp, Homo sapiens
cttcatttttgttgctggcctgcctctcacctggaacactcgcctctttcctctctattcttattcttttggtgcagtatagccccatcttaccccttttycacagcctacttcaactgccacatcctccaggcagccttctgaaaggtgaattctccatccctgaattcattgttttcttatcactttccaccatgcatt

SEQ ID NO: 232843 - DNA, 201 bp, Homo sapiens
actcagcagggtaaggcagaaagatcgcttgagccaaggaatttgaggctgcagtgagccatgatcacattactctctaccctccagcctgggtaacagakcacggccctgtctctaaaaaaaaaattttttttaattaccagcaaggaaataagcccagaagaaattgcgatttcttcccaagaatatttggcctcagag

SEQ ID NO: 232844 - DNA, 201 bp, Homo sapiens
aggaaaccctgaaggtgccactggcgctctttgccttgaaccggcagcgccggtgtgagcggctgcggaagaaccctgctgtgcaggccggctcagtagtrgtcctgcagggctaagaggagactcagcgctactgcacctacaccggggtcctcttccgccaggagtccttctttcactgcgcattcggtgtcaccgagc

SEQ ID NO: 232845 - DNA, 201 bp, Homo sapiens
tgcacctacaccggggtcctcttccgccaggagtccttctttcactgcgcattcggtgtcaccgagccaggctgctacggcttcatcgacgctgacactgkgaagtcggccctgtttgtgcccaggcttcctgccagccatgccacctggatgggaaagatccattccaaggagcacttcaaggagaagtatgccgtggac

SEQ ID NO: 232846 - DNA, 201 bp, Homo sapiens
ctctaaaaaaaaaaaatggatataatcttaagatggtcaaggtttagaatcacacacataaagtatctggcatattgtgatatttcaaaaaaaatgaggccactaccagcaaataagatgaaaataagtagaggacttcatgacctgctggctagagacagctcaggatagtttagacacatttatgggggtgttgagggg

SEQ ID NO: 232847 - DNA, 201 bp, Homo sapiens
tctaaaaaaaaaaaatggatataatcttaagatggtcaaggtttagaatcacacacataaagtatctggcatattgtgatatttcaaaaaaaatgaggccactaccagcaaataagatgaaaataagtagaggacttcatgacctgctggctagagacagctcaggatagtttagacacatttatgggggtgttgagggga

SEQ ID NO: 232848 - DNA, 201 bp, Homo sapiens
ctgaaccctttctgccttggagtgcccatctaggtgattatatagtctttcttctaaaagatggtatagggagtgttggggagaagcgtcttctcagggayacactaacatctaatctcttgtcacctccccttagaattcctttttcaaatcttcctcaagaataggaaggctggccagttgcagtggctcatgcctgta

SEQ ID NO: 232849 - DNA, 201 bp, Homo sapiens
caatgcacttaccctttctgagctttaattttctcatctgtcaaatgtaactggataagagtgacttcagacttcacgtgacgccggtgctgggcgaacakggcggcggccactggaccctcgttttggctggggaaggaaaccctgaaggtgccactggcgctctttgccttgaaccggcagcgccggtgtgagcggctg

SEQ ID NO: 232850 - DNA, 201 bp, Homo sapiens
gtctatttccaaaatttttgaattattatctccattgtgtgtatttttattaaccctcccttccctgagctcagagaaacgtatgtatttactttgagatktactgaacctcttctttccatcaggacctgtgtggaaataaagagaaatgagtgtcatgaccctgccatatgatctttgccgcccaacagaaggaagcag

SEQ ID NO: 232851 - DNA, 201 bp, Homo sapiens
agattccgtgggcgtaggaccctcagagccaggtgtgggatatagtctcgtggtgcgccgttttttaagccggtctgaaaagcgcaatattcgggtgggartgacccgattttccaggtgcgtccgtcacccctttctttgactcggaaagggaactccctgaccccttgcgcttcccaggtgaggcaatgccttgcttcg

SEQ ID NO: 232852 - DNA, 201 bp, Homo sapiens
gacattcaaatactgccttatttttgtttccttatggaattaggactccctttttccagtatgttttaattcattactcttctatcatgcacatttgtatkaaagcaaatgtagtgttttggcttaatttggatgatagctttgggaaggacccaaaccaaacacttccaaggcaaggaaagggagggagataaatggaga

SEQ ID NO: 232853 - DNA, 201 bp, Homo sapiens
ccatgctgttttggttactgtagccttgtagtatagtttgaagtcaggtagcatgatgcctccagctttgttcttttggcttaggattgacttggtgatgygggctcttttttggttccatatgaactttaaagtagttttttccaattctgtaaagcaagtcattggtagcttgatggggatggcattgaatctgtaaat

SEQ ID NO: 232854 - DNA, 201 bp, Homo sapiens
tttactgagtcccgcatcacccagggtccactgagatctccctgctcttcagctttggggaagatggcctcaattccactcacgcttaagccctgccctgwgaaaatccaaagtcttcctcaagttgtctgtgaattcctcaagaggtagatccttttggtctactctgactctcaactaccgcttccactgagctaacca

SEQ ID NO: 232855 - DNA, 201 bp, Homo sapiens
tattcatgatatcatttaatcctcatgctcccctgtgagatagtcacatctaaaactagttcaaagattaagaagtagaggctcatagaacagctcgagtktgcacaaggccatgcagtttatccatgtaagaagcaggatttgaactcaattctagatgggtcacctcctaccatctgttttttcacagctattaaagag

SEQ ID NO: 232856 - DNA, 201 bp, Homo sapiens
atcctagtcttggataaaacagactttaaaccaacaaagatcaaaagagacaaagaaggccattacatagtggtaaagggatcaattcaacgagaagaacyaactatcctaaatatataggcacccaatacaggagcacccagattcataaagcaagtccttggtgacctacaaagagacttagactcccacacaataata

SEQ ID NO: 232857 - DNA, 201 bp, Homo sapiens
atgactgtcattgaagggtttactgagtcccgcatcacccagggtccactgagatctccctgctcttcagctttggggaagatggcctcaattccactcaygcttaagccctgccctgagaaaatccaaagtcttcctcaagttgtctgtgaattcctcaagaggtagatccttttggtctactctgactctcaactaccg

SEQ ID NO: 232858 - DNA, 201 bp, Homo sapiens
ggctcatagaacagctcgagtgtgcacaaggccatgcagtttatccatgtaagaagcaggatttgaactcaattctagatgggtcacctcctaccatctgytttttcacagctattaaagagcaggaataaacctatggttgttccaccaaccccatctctctcctctgctagaattgcatgcctaggaagttgctccgta

SEQ ID NO: 232859 - DNA, 201 bp, Homo sapiens
actgtctctcagaccacagtgcaatcaaactagaactcaggattcagaaactcactcaaggctgggcgcggtggctcacgcctgtaatcccagcactttgrgaggccaaggtgggcagatcacgaggtcaggagattgagaccatcctggctaacatggtgaaaccctgtctctactaaaaatacaaaaaattagccgggc

SEQ ID NO: 232860 - DNA, 201 bp, Homo sapiens
ctattgtcgcacatgctccatgaggacctggggatgttctcagccagcaaggaccagcgggatggctgcttcttcctcaagcatccctcagtgagacctcrgggagccccaagtgcctctctccaagttcctatgacatgcatttgcctttattcttacttccttctttctgtctccctcacattttatctacccctgtct

SEQ ID NO: 232861 - DNA, 201 bp, Homo sapiens
tattcccaggtctgttatgtacaaggtgttttactaaagtaagtcagtcaatcccttagaaaatccaataagaaatgtattgctctccccactttacacakgtggaaagtaagactcagagaagttatgtgctttttgtcagtcacacagctagtgagaatctgtgtctgctctgtttgatccccagcacatgatctcttc

SEQ ID NO: 232862 - DNA, 201 bp, Homo sapiens
tcctgcctcagtctccccattaactgggattacaagtgcatgccaccatgcaggctaattttttgtgtttttagtagagacggggttttgtcatgttggayaggctgatcttgaactcctgacctcaagtgatccacccgcctcggcctcccagagtgctgggattacaggtgtgagccaccacgcccgacctgtttaaca

SEQ ID NO: 232863 - DNA, 201 bp, Homo sapiens
ttattctctcacagttgtggagactgaaagtctggaatcaagatgtcagcagggttgtttacttctggaggctctgagggagggtctgtcccaggcctgtsttccagtttctggtggtggcctgcagtccttggcattccatggcttgcaagatgtctcgctccgatctctctctatctttccatagcatctcctccctgt

SEQ ID NO: 232864 - DNA, 201 bp, Homo sapiens
ctgtttaacattttgtgcatcaattaacttcctgagcctttttcctcaactaaaaaaatgatatataccttgagcccaggagtctgagatgaggctaggcsacatagcaagacctcatctctaaaaaaaaaaaatggatataatcttaagatggtcaaggtttagaatcacacacataaagtatctggcatattgtgatat

SEQ ID NO: 232865 - DNA, 201 bp, Homo sapiens
ggatgtaatcttattttgaaatagtgtcattaccggtataattagttaagatgaggtcacactggagtatggtgggcccctaatccaataggactgtgtckttataaaaagggaattttggacacagatatacatgcatatgaagaatggagttatgcaatcacaagccaaggaactatcaaaaggtagaagagaggcttg

SEQ ID NO: 232866 - DNA, 201 bp, Homo sapiens
tgaggcaggagaatggcgtgaacccaggaggcagagcttgcagtgagctgagattgtgccactgcactccagcctgggcgacagagccagactccatctcaaaaaaaaaaaaaaagaaaaaaaaagaaactcactcaaaaccgctcaactacatggaaactgaacaacctgctcctgaatgactacagggtacataacgaa

SEQ ID NO: 232867 - DNA, 201 bp, Homo sapiens
gaaagatattatggggttcaagcacaaaactattagagtgaagcaaagacagttcggaattatccctaaagtatccaagtctcttccgataccccatatayacttcaaaagccacttagtgaatgccagacacctcatttaatcttcctgaagatttgtaagaggaggaaccgttatttttattttagaaacaagggagtt

SEQ ID NO: 232868 - DNA, 201 bp, Homo sapiens
cacttagtgaatgccagacacctcatttaatcttcctgaagatttgtaagaggaggaaccgttatttttattttagaaacaagggagtttgagactgtcaygcaaacacctttaggttgaaagggtgggatcagcagaatccagggatcctgacttttagtcctgagtttacactataactttatagctgcccagaatcca

SEQ ID NO: 232869 - DNA, 201 bp, Homo sapiens
ctgcccagaatccatgcagagcaacaggatgattcagcaaggtgggtgcagaaaagtcacacttttgagatctgtctctccctgccatcacttttggggartgcaaaataacataatctctttgattagaacaattcctgagaactagagggcagacacagacaagtattgcccaagaggagcaagaacagtctctttctc

SEQ ID NO: 232870 - DNA, 201 bp, Homo sapiens
cagaatccatgcagagcaacaggatgattcagcaaggtgggtgcagaaaagtcacacttttgagatctgtctctccctgccatcacttttggggaatgcamaataacataatctctttgattagaacaattcctgagaactagagggcagacacagacaagtattgcccaagaggagcaagaacagtctctttctcattac

SEQ ID NO: 232871 - DNA, 201 bp, Homo sapiens
tgcagattaaaatattgcactgagtatccagcacaatgaattttttacaaacccacattaacacacatcattgtgaaaattcaaattcaggggaaaaaaaatagtatatataaaatattgtgaataatatcagccttctttacaggaactcttgaagcttaaagacaaagaagtaatgtcttcaagattcggagaaataat

SEQ ID NO: 232872 - DNA, 201 bp, Homo sapiens
ataagcaacttcagcaaagtctcagtatacaaaatcaatgtacaaaaatcacaagcattcttatacaccaataacagacaaaccgagaatttgctagagcrttttaaagtcaaatcccagatatcatgtcattgtacctgtaaatacctcagtagatatttcagttgaagagaactatttttacttttacataaccaccat

SEQ ID NO: 232873 - DNA, 201 bp, Homo sapiens
aacgagtccttagcagagcttcccttcaaacaaaaagcagcccaaaaaatcatttctttcccaacaaagagcagcctgaaaaatcaagctgcaaatatagrtaagcaagctggaagcttgcacaggggaatgccagcagctgtaccaataggaaagggctacctgggggctaggcgtgtgcaccatggaagctccatcttc

SEQ ID NO: 232874 - DNA, 201 bp, Homo sapiens
catttctttcccaacaaagagcagcctgaaaaatcaagctgcaaatatagataagcaagctggaagcttgcacaggggaatgccagcagctgtaccaatargaaagggctacctgggggctaggcgtgtgcaccatggaagctccatcttcccttttttgttagcacgtgtacagtaagaaaaaaatgggcaacatggcac

SEQ ID NO: 232875 - DNA, 201 bp, Homo sapiens
ttgcacaggggaatgccagcagctgtaccaataggaaagggctacctgggggctaggcgtgtgcaccatggaagctccatcttcccttttttgttagcacrtgtacagtaagaaaaaaatgggcaacatggcacagctcaggcagggaacccacttgcataatagaagattggcatgggggcggccagagatttgtgccat

SEQ ID NO: 232876 - DNA, 201 bp, Homo sapiens
tatgagcacatttctgccctcgtttcagttgattccatagtagcattccacatagtcaatcactcctaccattttggaactccctcctatattggcttttrtgacactcttcagtcttggttttcattatataccattgcctactccttgcctgtctcctttactcctcttctacccaatctttaaatgttggcacttctc

SEQ ID NO: 232877 - DNA, 201 bp, Homo sapiens
tgatataacccagtcgttctcaacagggtgtgattttgccccctagaggacatttgccaatgactagagacatgttttactgtgacaactgggagtatgtyactggcatctaaaggacagaggctggaaatactactaaacattgatggtgagtatacaatcctaaaatgcacagcacagcctcccacaactaagaattat

SEQ ID NO: 232878 - DNA, 201 bp, Homo sapiens
tctctaaaatgaagtcagcaagccctagcccacccatagagattcaggttttcttggaggagagaagtttaagaaataactcaagaaaaaatgctctggtrctgaaagatagagatttatagattatatggaaccagcccaaatgcccatcaatcaatgagtggataaagaaaatgtgatatatacacacaccatggaata

SEQ ID NO: 232879 - DNA, 201 bp, Homo sapiens
tgtaatcactaccttgagttcctctctaaacttcagatttataaattaactacctacttgatatgtattcttgcatatctcccagaatctcaaacttaacrttttcaaaatgaagctattgatttcaccaccaaaccacccctctttggcctttcctccactcaataaatggctagaaattgtaagtcatccttcatcacc

SEQ ID NO: 232880 - DNA, 201 bp, Homo sapiens
gaagaatcaaatagacacaataaaaaatgacaaaggggatatcaccaccgatcccacagaaatgcaaactaccatcagagaatactataaacacctctacrcaaataaactagaaaatctagaagaaatggataaagtccttgacacatacactctcccaagactaaaccaggaagaagttgaatctctgaatagaccaat

SEQ ID NO: 232881 - DNA, 201 bp, Homo sapiens
ttttgagatctgtctctccctgccatcacttttggggaatgcaaaataacataatctctttgattagaacaattcctgagaactagagggcagacacagayaagtattgcccaagaggagcaagaacagtctctttctcattacgtcatcttccctgaagacactagtgattgagatacagaaagtatgagatcacttatt

SEQ ID NO: 232882 - DNA, 201 bp, Homo sapiens
aggagctggtaccattccttctgaaactattccaatcaatagaaaaagagggaatcctccctaactcatttgatgaggccagcatcatcctgataccaaakccgggcagagacacaacaaaaaaagagaattttagaccaatatcgttgatgaacattgacgcaaaaatcctcagtaaaatactagcaaaccgaatccaga

SEQ ID NO: 232883 - DNA, 201 bp, Homo sapiens
caagaggagcaagaacagtctctttctcattacgtcatcttccctgaagacactagtgattgagatacagaaagtatgagatcacttattatctacctctrttgtacagttatttcgactttgactttcttgggctgccagtgttccagataagggttttgtaacaccaggattgagaaagattttagctatttcacatcc

SEQ ID NO: 232884 - DNA, 201 bp, Homo sapiens
agctggtaccattccttctgaaactattccaatcaatagaaaaagagggaatcctccctaactcatttgatgaggccagcatcatcctgataccaaagcckggcagagacacaacaaaaaaagagaattttagaccaatatcgttgatgaacattgacgcaaaaatcctcagtaaaatactagcaaaccgaatccagaaac

SEQ ID NO: 232885 - DNA, 201 bp, Homo sapiens
ttccttctgaaactattccaatcaatagaaaaagagggaatcctccctaactcatttgatgaggccagcatcatcctgataccaaagccgggcagagacasaacaaaaaaagagaattttagaccaatatcgttgatgaacattgacgcaaaaatcctcagtaaaatactagcaaaccgaatccagaaacacatcaaaaag

SEQ ID NO: 232886 - DNA, 201 bp, Homo sapiens
taggctgatcttgaactcctgacctcaagtgatccacccgcctcggcctcccagagtgctgggattacaggtgtgagccaccacgcccgacctgtttaacrttttgtgcatcaattaacttcctgagcctttttcctcaactaaaaaaatgatatataccttgagcccaggagtctgagatgaggctaggccacatagcaa

SEQ ID NO: 232887 - DNA, 201 bp, Homo sapiens
ggcactccagcctgaatgagagtaagaccctgtctcaaaaaacaaaacaaaacaaaaatttagatccatgtataccaaagtcccttacttggccgggcgcrgtggctcacacctgtaatcccagcactttgggaggccgaggcgggcggatcacgaggtcaggagatcgagaccatcctggccaacatggtgaaacgccgt

SEQ ID NO: 232888 - DNA, 201 bp, Homo sapiens
cttcctaaaatagttccttactaactagagcttacgccgctccctctcctggaaatactaacccttcagcattaaatccacacccaaacccacatgcacaygtgtgtgcactcacacacacacacactcacatcattcagtttcatttaaataactacagtcatgtgtcgcttaacgacagggatacattctgagaaatgc

SEQ ID NO: 232889 - DNA, 201 bp, Homo sapiens
ttcctaaaatagttccttactaactagagcttacgccgctccctctcctggaaatactaacccttcagcattaaatccacacccaaacccacatgcacatstgtgtgcactcacacacacacacactcacatcattcagtttcatttaaataactacagtcatgtgtcgcttaacgacagggatacattctgagaaatgca

SEQ ID NO: 232890 - DNA, 201 bp, Homo sapiens
tgaggcgggagaatggcgtgaacccgggaggcggagcttgcagtgagctgagatcgcgcggctgcactccagcctgggcgaaagagcgagactccgtctcaaaaaaaaaaaaagaaaatcccttatatacacacatacacatacttctgctaaccccatcttcttgatattataatttttggataagtaaaaattcatcat

SEQ ID NO: 232891 - DNA, 201 bp, Homo sapiens
gatttcactgttgtgcaaacagcatagattgaacttacacaaacctagatggcatagcctcctacacacctagaccatatcgtatagtctattgctcctaygctacaaacctgtaccaaatactgtaggcaaatgtaacacaatagtatttgtgtatctaaacataggaaaggtacagtaaaaatacgatatcataatctt

SEQ ID NO: 232892 - DNA, 201 bp, Homo sapiens
gctgttgatcgttggccaaaaggtcattactcagcttatgactaaatttcctttcaacctttactataccctaaaccagtggttcaccaaccacagagtcrgcacaaattatctgggaatattgctaaaatttttaattttcaggcctcaccctcagaaattcagtatccataaatctgaggaaggggtcaaaaatctgta

SEQ ID NO: 232893 - DNA, 201 bp, Homo sapiens
ggccaaaaggtcattactcagcttatgactaaatttcctttcaacctttactataccctaaaccagtggttcaccaaccacagagtcggcacaaattatcygggaatattgctaaaatttttaattttcaggcctcaccctcagaaattcagtatccataaatctgaggaaggggtcaaaaatctgtatgttaaacaacca

SEQ ID NO: 232894 - DNA, 201 bp, Homo sapiens
ttactcagcttatgactaaatttcctttcaacctttactataccctaaaccagtggttcaccaaccacagagtcggcacaaattatctgggaatattgctmaaatttttaattttcaggcctcaccctcagaaattcagtatccataaatctgaggaaggggtcaaaaatctgtatgttaaacaaccacttgaaatgaaag

SEQ ID NO: 232895 - DNA, 201 bp, Homo sapiens
aacaaatttactccaaactaaaatgctatttgtttgctgttttttcttctgtaattaagaaaatttaaacctagtcctttgccaaaataatagttagaaawtttttttctttattatctaatcgtctgtgctgctgagtattgctacaggtaagttaaattagccagaaaattatccaaagaatttatactcagggcctga

SEQ ID NO: 232896 - DNA, 201 bp, Homo sapiens
atttcctttcaacctttactataccctaaaccagtggttcaccaaccacagagtcggcacaaattatctgggaatattgctaaaatttttaattttcaggyctcaccctcagaaattcagtatccataaatctgaggaaggggtcaaaaatctgtatgttaaacaaccacttgaaatgaaagaaaataaagtccttattct

SEQ ID NO: 232897 - DNA, 201 bp, Homo sapiens
tatgaccattaatctcacaaattgtgtcagctcttaaactcaagaacacatagagattttctcttatctgtcacaatacatacaaaaactgaatcctgatyttggccattcacaaatatctcccttctggatccacattatgaatcatttcttttgtgaccgattggttcatttcttcgcccctgactgctggttcccatg

SEQ ID NO: 232898 - DNA, 201 bp, Homo sapiens
ttcctttcaacctttactataccctaaaccagtggttcaccaaccacagagtcggcacaaattatctgggaatattgctaaaatttttaattttcaggccycaccctcagaaattcagtatccataaatctgaggaaggggtcaaaaatctgtatgttaaacaaccacttgaaatgaaagaaaataaagtccttattctca

SEQ ID NO: 232899 - DNA, 201 bp, Homo sapiens
ataataaaagctcttttttattgtttagaaacttgttcttgaaattaaaaatattaatttgagaatcaatttattctgtagaattgaaaaagcaaattaawgttatatacatttaaaaatcagataaattacaatccaggaattcagaactctaaccccagaccatttggccaaggaaggttggcacattacacttacatt

SEQ ID NO: 232900 - DNA, 201 bp, Homo sapiens
accaaaaaataaactgatggacatatggtatatcaggtggcaaagaataataaataatgtaaaaaagtactgatagggagctatcgtattatttatttatttttttttttttttttttttgagacggagcctcactctgtcgcccaagctggagtgcagtggtgcgatctcggctaactacaacctccacctcccgtgttc

SEQ ID NO: 232901 - DNA, 201 bp, Homo sapiens
taaccccagaccatttggccaaggaaggttggcacattacacttacattttttttttcattttcctgtttatcatcatgcttcatttcccaaattatttgraattcagaatgcatattggaatttagcatctttggatcagtaaaatctctttagtcatatttcctctgttcgttatgaacaatgaaaacagaaagattga

SEQ ID NO: 232902 - DNA, 201 bp, Homo sapiens
aggagaacaaaaaaagaaaaaaaaacaacaacccaggaactgaggtcctattatcacctttttcctatttgcccctgccacttacctttctacagcatgaygtttacttgcttttattttaaaccttcattaattgtgtcttatttttaaatatagctttattttttaatggaattataagttgcacaactgcaaggttcc

SEQ ID NO: 232903 - DNA, 201 bp, Homo sapiens
gtcagatggggacaagtgccatagaaaataagcagaataaaggagaaaaggagtggcccagggatggaggtgacatgatttggctgtgtccccacccaaayctcacctcaaattgtaataatccccacatgtcaagagcagggctaggtggagataattgaatcacaggggcagtttgccccatactgttttcatggtact

SEQ ID NO: 232904 - DNA, 201 bp, Homo sapiens
tcttccaatctcagccttgaccccagtggcccagcatcttctaggtacccaatacataccttctaaataaattgcattacaaaatagcctccaaaccatcaataataataataaagcatgccaagttaagaagtgacccaagataggtggtcatttatacactttttaatttttggcctaagaaatttcaataactatgag

SEQ ID NO: 232905 - DNA, 201 bp, Homo sapiens
cttccaatctcagccttgaccccagtggcccagcatcttctaggtacccaatacataccttctaaataaattgcattacaaaatagcctccaaaccatcaataataataataaagcatgccaagttaagaagtgacccaagataggtggtcatttatacactttttaatttttggcctaagaaatttcaataactatgagt

SEQ ID NO: 232906 - DNA, 201 bp, Homo sapiens
ttccaatctcagccttgaccccagtggcccagcatcttctaggtacccaatacataccttctaaataaattgcattacaaaatagcctccaaaccatcaataataataataaagcatgccaagttaagaagtgacccaagataggtggtcatttatacactttttaatttttggcctaagaaatttcaataactatgagta

SEQ ID NO: 232907 - DNA, 201 bp, Homo sapiens
aatcacttgaacccagaaggcagaggttgcagtgagctgagatggtgccactgcactccagcctgggtgacagagtgagactctgtctcaaacaacaacamcaccaacaaaactagtgaaaatataactacctagcagtactatcatatgttttgtgaatcctagtttttatagtaggacataataaaagactggaatcta

SEQ ID NO: 232908 - DNA, 201 bp, Homo sapiens
tctcatctgcacatttgcagagtagcatcagatccatggagatgctgctcactgaaaaagtaacacccattgtgttggacctcacctacgtgacctttccrgggcatagtctggaaggacatggaaaattaaaagagaagttaaacactgcacaattaagtgagaagaactttgaatctcagtgaataactcaggcaagac

SEQ ID NO: 232909 - DNA, 201 bp, Homo sapiens
gatggagtaacaggtgattggatttactctttcactaaacaaccaaaaaaaacaaacatgtaacagtggttttcaagcagtagacatcaggcactataggrcagagatacttgaaactcagagaaacaaacaaggtaatcactgttgccctagtttactgcccgaacagatacttctgtccaggcaacactgcaggggtgt

SEQ ID NO: 232910 - DNA, 201 bp, Homo sapiens
cgcccgccaccatgcctagctaatttttgtatttttagtagagatggggtttcactctgctggccaggctgttctcaaactcctgaccttttgatccgccygccttggcctcccaaagtgctgggattacaagcgtgagccaccgcgcccagcctctcctgcatttttaactgcgtctggggcagtctgtattaattagct

SEQ ID NO: 232911 - DNA, 201 bp, Homo sapiens
tttactgcccgaacagatacttctgtccaggcaacactgcaggggtgtagcacccacgcagagcccagctgtcaccctgaattgaggagagagagctcggygtctgagaaggcaaaggtggctagaatttgcaagacaggtccctggagagaaattatgcgcgcagagaaaaagattgagctccagaaatattcaaaaggt

SEQ ID NO: 232912 - DNA, 201 bp, Homo sapiens
aactgcgtctggggcagtctgtattaattagctctacaatctcttagattcccatcccagttgctaaaagggaaaccttctgcctccaccaatatttcaaytgccaaaggaggaccatagggcgtagtgtgtaaatggcagagaggaaggtgaagtccacatcattctgagttcctagagcagcaccaactgttttcacat

SEQ ID NO: 232913 - DNA, 201 bp, Homo sapiens
tgccatgattgtgaggcctccccagccacgtggaactgtgagtccattaaacctctttcctttataagttatccagtctcaggtgtgtttttattagcgaygtgagaacacactgatacaggaggtttttcttttataaggaatggtcatggaaagccataaaagtcatagttgagcaatgatctgaaggaagcagggaac

SEQ ID NO: 232914 - DNA, 201 bp, Homo sapiens
gagcccagctgtcaccctgaattgaggagagagagctcggcgtctgagaaggcaaaggtggctagaatttgcaagacaggtccctggagagaaattatgcrcgcagagaaaaagattgagctccagaaatattcaaaaggtccccctcaaatgttcagctgcatattgacaggtgcatgcatgtgagaaaactgtatgaga

SEQ ID NO: 232915 - DNA, 201 bp, Homo sapiens
aaattgggttcctatcctggctacatacaatccattccaaatgaccttttgccaaatccccatggagtttagagatccttctggggatttttaaagctttrttgttttcagatcaaactttctcttttatttctctttcctcgctagggcttaggaggagaactcagctttcagtttgatggtgaaatattagttaaacac

SEQ ID NO: 232916 - DNA, 201 bp, Homo sapiens
aaataactaaaatagtagaatcaaaatgttcctaacacaaagaaataataaatgcttgaggtgatggatattccagttaccctgacttgattattacacaytgtatgcttgtatcaaaatatcacatgtagccccataaatatgtacaattattatgtatccataataattacaaataactacaaacaatatttttaaata

SEQ ID NO: 232917 - DNA, 201 bp, Homo sapiens
atgcaaagacataggaataatacaatggactttggggatttggggagaaagagtggaagagggggtgagggataaaagactatacattgagtacaatgtayactggttgggtgatgggtgcaccgaaatctcagaaattaccactattcatgcaaccaaacaccacttgttccccaaaaacctattgaaatagaaaagaga

SEQ ID NO: 232918 - DNA, 201 bp, Homo sapiens
tgctgggattacaggcgtgagccaccgtgccaggctcacatctggatacttttgtattttttgtatagagggcatttcaccatgtcacccaggctgttctkgaactcctagactcaagtgatccacacatctcagcctcccaaagtgttgggattacaggcatgagccactgctcccagcctggatatatagtatgaaata

SEQ ID NO: 232919 - DNA, 201 bp, Homo sapiens
tcccaaagtactgggattacaggcatgagccaccacacccagcccctcatgtggtgtttttgctgagtatgcacatccctgctgtctccctgtgtggtctmatttcctcttcttcaaaggacaccttaatggcctcatggtaacttaatcatgtctttaaaggccctatctccaaatacagtcacattctgaggttaggga

SEQ ID NO: 232920 - DNA, 201 bp, Homo sapiens
cacaaagaaataataaatgcttgaggtgatggatattccagttaccctgacttgattattacacattgtatgcttgtatcaaaatatcacatgtagccccrtaaatatgtacaattattatgtatccataataattacaaataactacaaacaatatttttaaatatataaaattatatttaaaatttaaaaataaattaa

SEQ ID NO: 232921 - DNA, 201 bp, Homo sapiens
tgcctgcactgtgttatagtggacaaactgcatagtacctctaggcttcatttccctcatctataacatggggataataatagtctttctcggccgggcgmggtggctcacacctgtaatcccagcactttgggaggtcgagacgggtggatcacctgagctcaggagttcaagaccagtctggccaacatggtgaaacac

SEQ ID NO: 232922 - DNA, 201 bp, Homo sapiens
ggtctgatcttttaaaacttaaattatatacttatacattgcaacctataaatacatttgttttcttaataacattggcaaaatgtgtgtcacatataccstttaaactctcaacttgttttcatgtgaacagctaactatgataggagtcttcatcctatcttctataatcagcattttgaacctcagtgcaatatttta

SEQ ID NO: 232923 - DNA, 201 bp, Homo sapiens
acaaacaaaatgcatgacaacactaagaacatgtcagatggggacaagtgccatagaaaataagcagaataaaggagaaaaggagtggcccagggatggakgtgacatgatttggctgtgtccccacccaaacctcacctcaaattgtaataatccccacatgtcaagagcagggctaggtggagataattgaatcacagg

SEQ ID NO: 232924 - DNA, 201 bp, Homo sapiens
tcacaaacaaaatgcatgacaacactaagaacatgtcagatggggacaagtgccatagaaaataagcagaataaaggagaaaaggagtggcccagggatgraggtgacatgatttggctgtgtccccacccaaacctcacctcaaattgtaataatccccacatgtcaagagcagggctaggtggagataattgaatcaca

SEQ ID NO: 232925 - DNA, 201 bp, Homo sapiens
actaggacctctttcctcattataatatttctctaatcccctgccaagatctttttttatcaccattatttcctaatattggaagagatgtgtttgtgaayggcttattcattccccaaatatatattcaatgcttagaatgtgcctgccatgctctgggcccgtgtacagggatacaatgaatacaacaaacttcctgcc

SEQ ID NO: 232926 - DNA, 201 bp, Homo sapiens
tacataataattattctctggaaacaatggcaaagcattcctagcaacagacaaatcaaatagctactggagtattatggctgtcatttgttaattactcycagatagctgcaaaacacacatgctcttcggcaaaaactgaaaccccaaaccccttagagaaaaaaggaggatcaggtgctacaatgcaaagagcaccaa

SEQ ID NO: 232927 - DNA, 201 bp, Homo sapiens
aaaaacttcaaaagaaggtgacaattggagccagttttgaagaatccatgagggttcaccaagccaaaaggagggcaagggcatgaacttacaagtaactrccacattattgagggaagtttggtcatgtggggaggtcagcggaagaaaagggaaaggcaggcagcgttggggttgtggagatgtttgcatgcttgagat

SEQ ID NO: 232928 - DNA, 201 bp, Homo sapiens
cactactagggggtagggccacagtaggaataacaaatggtcacaatgtagttagggaaagagaaatgaaaacaaaactggaagccggtatatacaccagrccaagacaatataaggaggttatcaaaagcctctggcatgggaagatacaaaaacttcaaaagaaggtgacaattggagccagttttgaagaatccatga

SEQ ID NO: 232929 - DNA, 201 bp, Homo sapiens
atttgaaatacagaaaattcagcatgagatccaaaggccaaaagtagctcaatagaccatgtgctaagtccttctttttctgaacatgttgttaaacattktatgcccccatttcctcaactgtataagggaaatgctacttgtacctacctcatatggtggttgtggggtagttattacatagtaagtgcttggaagagt

SEQ ID NO: 232930 - DNA, 201 bp, Homo sapiens
tctgcaaagagctaaggaaaaatatttgtccatctatattcccacactcaactaaattctcatgaaaaaaaatgagggcaaagtaaatatatcttcaggcaaaaaaaaaaaaaaactgagtttctaagtcctcacttaaactgcttctaaagaatatagttcagctaaaagaacccaaaacccagatgtaaagaggtggat

SEQ ID NO: 232931 - DNA, 201 bp, Homo sapiens
gagtgcagtggctcgatctaggctcactgcaacctgcacctcccaggttcaagcaattctcctgcctcagcctcctgagtagctgggaatataggcacccrccaccacacccagctaatttttgtatttttcgtagagacagggttttgccctgtcagccaggttggtcttgaactcctgacctcatgatccgcctgcctc

SEQ ID NO: 232932 - DNA, 201 bp, Homo sapiens; identical to SEQ ID NO: 43297

SEQ ID NO: 232933 - DNA, 201 bp, Homo sapiens
ccttcctgatttctctcatttctacttggggcccccttcctaggactctcccaccccaaactccaacctgtatcagatgcagcccccaagcccttagactytaagcccagttagcaaggtgccgggtcaccctgcaggttcccataaaaacgatttgcagccagaaggaggaggatatcgttattatttatttcccatcct

SEQ ID NO: 232934 - DNA, 201 bp, Homo sapiens
gtggtgcccttgtagtcccagctactcaggtggctgaggtgggaggatcgtttgagcccaggaagtcaaggctgccatgagctatgtacacaccactgcactacagcctgggcaacattgcaagatgctgtctcaaaaataaataaataaataaataaataaataggccaggtccagtagctcacagctgtaatcccagca

SEQ ID NO: 232935 - DNA, 201 bp, Homo sapiens
atttgtttgtttgttggagacagggtctctctctgtcgcccaggctggaggacagtggtgtgatctcagctcactgcaacctccacctcctgggttcaagygattctcgtgcctcagcctcctgagtaactgggattacaggtgcgggccacaaaaccagctaaatttcataatttttggtagctatgcttctgactgcaa

SEQ ID NO: 232936 - DNA, 201 bp, Homo sapiens
gtcacacctctccaaggctcttagcacatttaacatgtggatggaaatgaataagtccctcaaagtgggtcaactggaactgatttttctgtctctttttyttgtaagtgtcactgaggctggagtgcagtggtgtgatctcggctcactgcaacctcagcctaccgagttcaagccattctcctatctcagcctcccgag

SEQ ID NO: 232937 - DNA, 201 bp, Homo sapiens
agatcgagaccatcctggctaacacggtgaaaccccatctctactaaaaatacaaaaaaatagctgtgcgcggtggcgggtgcctgtagtcccagctactygggaggctgaggtgggagaatggcgtgaacccaggaggcggagcttgcagtgagccgagatcgcgccactgcactccagcctgggtgacagagcaagact

SEQ ID NO: 232938 - DNA, 201 bp, Homo sapiens
tttttaacttttttgtagagacagggtctttctatgctgctcaggctggtctcgaactccttgcctcaagctgggattacaggcatgagctactgcacccrtccaataattaccttttgaggctacttggtttctggactctagacgacctgataccaagtagctctagagtgtcacacactctatagttcaaccatgtat

SEQ ID NO: 232939 - DNA, 201 bp, Homo sapiens
tcactatgttgttcaggcaggtctcaaactcctgagctatagcggtctgcctgcctcggccacccaaagtgctcggattacaggcgtaagccaccatgtcyggcctatcttttttcattcattgccaacatttcacaagacagatttcacataaaccaccacatttcttgtttctcttagaaagttggtcaagttgggctg

SEQ ID NO: 232940 - DNA, 201 bp, Homo sapiens
tgctgctcaggctggtctcgaactccttgcctcaagctgggattacaggcatgagctactgcacccatccaataattaccttttgaggctacttggtttcyggactctagacgacctgataccaagtagctctagagtgtcacacactctatagttcaaccatgtatagccaatcactaatcaatgtgatgtctgtaaacc

SEQ ID NO: 232941 - DNA, 201 bp, Homo sapiens
ttgtattttttgtagagttgggggtctcactatgttgttcaggcaggtctcaaactcctgagctatagcggtctgcctgcctcggccacccaaagtgctcrgattacaggcgtaagccaccatgtccggcctatcttttttcattcattgccaacatttcacaagacagatttcacataaaccaccacatttcttgtttct

SEQ ID NO: 232942 - DNA, 201 bp, Homo sapiens
aggtccttgtgggaggttcacttgaggtcaggagttcaagacagctggggcaatacagcgaaaccccccatctctacaaaaagtttaaaaaattaggcgtrgtggtgcccttgtagtcccagctactcaggtggctgaggtgggaggatcgtttgagcccaggaagtcaaggctgccatgagctatgtacacaccactgca

SEQ ID NO: 232943 - DNA, 201 bp, Homo sapiens
atttttagcagagatggggttttgccatgttggccaggctggtctcgaactcctggcccaagtgatccacccatcccggcctcccaaagtgctgggattayaggtgtgagccactgcacctggccttcctgtgacagatttctatgccaagtttctcccaagaaaccaagcctggtgcctctgaaggcagccttcaaggag

SEQ ID NO: 232944 - DNA, 201 bp, Homo sapiens
ggggtttcaccatgttagccaggatggtctcgatcttctgacttcatgatctgcctgccttggcctcccaaagtgctgggattacaggcatgagccaccgyacccagcagatttctgttttttcttttctttctttctttttttttgagatggagtttcgctcttattgcccaggttggagtgcaatggtgtgatcttggc

SEQ ID NO: 232945 - DNA, 201 bp, Homo sapiens
tagcggtctgcctgcctcggccacccaaagtgctcggattacaggcgtaagccaccatgtccggcctatcttttttcattcattgccaacatttcacaagrcagatttcacataaaccaccacatttcttgtttctcttagaaagttggtcaagttgggctgggcacggtggctcacgcctgtaatcccagcactttggga

SEQ ID NO: 232946 - DNA, 201 bp, Homo sapiens
ctacaggcgcatgccaccgcacccagctaattttttttgtattttttagtagagacggggtttcaccatgttagccaggatggtctcgatcttctgacttyatgatctgcctgccttggcctcccaaagtgctgggattacaggcatgagccaccgcacccagcagatttctgttttttcttttctttctttctttttttt

SEQ ID NO: 232947 - DNA, 201 bp, Homo sapiens
tgggttcaagggattctcctgactcagcctcccgagtagctgggactacaggcgcatgccaccgcacccagctaattttttttgtattttttagtagagayggggtttcaccatgttagccaggatggtctcgatcttctgacttcatgatctgcctgccttggcctcccaaagtgctgggattacaggcatgagccaccg

SEQ ID NO: 232948 - DNA, 201 bp, Homo sapiens
ttcgagactagcctgggcaacatagtgaaaccctcgtctctacaaaaaatacggaaattacctgagcatggtggtgcgcctcaggtacttgggaggctgargcgggaggattgctttgttgtaaccgagcgagttatagagaaacgccacactctgagacaagatcaggagtcctttattagccggcagcccagagacggc

SEQ ID NO: 232949 - DNA, 201 bp, Homo sapiens
ggctcccagcccctcttccctcagacccaggagtccaggctctggcacctcctccctcagacccaggagtccaggcccccaggccctactttctcagaccmaggagtccagacctcagcccctcctccctcagacccaggagtccaggctcccagcccctcctccctcagacccaggagtccaggcccccatcccctcctc

SEQ ID NO: 232950 - DNA, 201 bp, Homo sapiens; identical to SEQ ID NO: 109608

SEQ ID NO: 232951 - DNA, 201 bp, Homo sapiens; identical to SEQ ID NO: 43295

SEQ ID NO: 232952 - DNA, 201 bp, Homo sapiens
tggatcacttgagctcaggagtttgagaccagcctggctaacctagtgaatccctgtctctactaaaaagtacaaaaattagccgggcgtggtggcagtcrcctgtaatcccagctacttgggaggctgaggtaggagagttgcttgaacgcaggaggctgaagttgcagtgagccaagatcgtgccaatgcactccagcc

SEQ ID NO: 232953 - DNA, 201 bp, Homo sapiens; identical to SEQ ID NO: 43298

SEQ ID NO: 232954 - DNA, 201 bp, Homo sapiens; identical to SEQ ID NO: 43296

SEQ ID NO: 232955 - DNA, 201 bp, Homo sapiens; identical to SEQ ID NO: 43299

SEQ ID NO: 232956 - DNA, 201 bp, Homo sapiens
ggcgcggtggcgggctcctgtagtcccagctacttgggaggctgaggcaggagaatggcgtgaacccgggaggcggaggttgcagtgagccgagattgcaycactgcactccagcctgggcaatagagcgagactccgtctcaaaaaaaaaaaaagaaaaaaaaaaggaaggagaagggttggtcacggtggctcacacct

SEQ ID NO: 232957 - DNA, 201 bp, Homo sapiens
ggaggccgaggccggcggatcacgaggtcaggagatcgagaccatcttggctaacgcggtgaaaccccgtctctactaaaaatacaaaaaattagctgggygcggtggcgggctcctgtagtcccagctacttgggaggctgaggcaggagaatggcgtgaacccgggaggcggaggttgcagtgagccgagattgcatca

SEQ ID NO: 232958 - DNA, 201 bp, Homo sapiens
agtgctgggaggcgtgagccaccgcacccagcccagatcatacaattttatcagtaggaacttcatgcgtaccataccaccagtgtattagaatgcttttwatttttattttgacataatttaagacttacaaaatattcctagaatagtacagataattcatgtgtactgaaactccccattgttcttttcttttctttc

SEQ ID NO: 232959 - DNA, 201 bp, Homo sapiens
tgcgtaccataccaccagtgtattagaatgctttttatttttattttgacataatttaagacttacaaaatattcctagaatagtacagataattcatgtrtactgaaactccccattgttcttttcttttctttctttctttctttttttttttgtctttctttagagtcttgctctgtcgccaggctggcatgcagtga

SEQ ID NO: 232960 - DNA, 201 bp, Homo sapiens
cccattgttcttttcttttctttctttctttctttttttttttgtctttctttagagtcttgctctgtcgccaggctggcatgcagtgacacgatctcagytcactgcaatctctgcctcccgggttcaagctattctcctgcctcagcctcccgagtagctgggattacaggcacgcaccactacaccgggctaattttt

SEQ ID NO: 232961 - DNA, 201 bp, Homo sapiens
ctgcacccggctttttttttttttttttttctgagatggggtctcactctgtcgcccaggctggagtgcagtggctcgatctaggctcactgcaacctgcrcctcccaggttcaagcaattctcctgcctcagcctcctgagtagctgggaatataggcacccgccaccacacccagctaatttttgtatttttcgtagag

SEQ ID NO: 232962 - DNA, 201 bp, Homo sapiens
cctcccgagtagctgagatttcaggcatgtgccaccacacctggctaattttgtatttttagtagagacggtgtttctccatgttggtcaggctggtctcraactcccaacctcagatgatccgcccgcctcagcctcccaaagtgctgggattacaagcatgagccaccgtgtctggctaatttttgtagttttagtaga

SEQ ID NO: 232963 - DNA, 201 bp, Homo sapiens
caagtcctaaaacatgtttttccttgaaaagtaagaaataatgtaatgcatgtctcaattgaataactgtctttgtttctcgctgctataatatgcttccscctgcacagatctccccctaccccacgaaatacttaaaatgtaacttgactctttgttcggtgctcagtctttttcgatgttaatctgactgggccagtg

SEQ ID NO: 232964 - DNA, 201 bp, Homo sapiens
aagccatagtaggctggtaggagcaaggagtcaggtctcactgtcctggcctgaccttcagctctgtggaggagaggtaagtgaggagcagcattgacagycaactgcaggaggcccttccaggctcaatgtgcctgagaaccaagaggcaggggcctccctggcgggtggggggaagagtagataagtcattttaatcac

SEQ ID NO: 232965 - DNA, 201 bp, Homo sapiens
ccgctgggtcttgtctgtctggaagggaggcaggacttggagctctgggagcaaccagggcatcaagggtttgtctcagccagtcgcgagcgtagagcttrgactgttggttggaactgagtgtccatgggcagtgggcaagtctcctggtcctcctctccttctctttgtgaggtggaggtgtcctggtggcttcaggag

SEQ ID NO: 232966 - DNA, 201 bp, Homo sapiens
caagggccggaagttcgagcgtgccagaggccgacgggccagccgaggctacaaaaactaaccctggatcctactctcttattaaaaagatttttgctgamagtgctctgtgtgtgttattgggggatgggttggagaattggttcctgcgggtgagaatgcatttggtttggggacagggacgtcatgccagtgaagacc

SEQ ID NO: 232967 - DNA, 201 bp, Homo sapiens
gtggttgtggggaccataactgatgatgtgcgggttcaggaggtacccaaactgaaggtgagctggcgggggctgggcagacccatcagacccttgctgtrctgtgctgtgctgtgctgtgctgtgctgtgctgtgctggtccatcctcagtcttgccaccgctggtgaggcaagcatcctgcctgtctgagtggctttga

SEQ ID NO: 232968 - DNA, 201 bp, Homo sapiens
tagtagagacggggtttcaccgtgttagccaggatggtctcgatctcctgacctcgtgatccgcccatctcggcctcccaaagtgctgggattacaggcgygagccactgcgcccggcccgagattgagtcctttaaaaattaactgcctgtttttctgtttgtggctagtgagccttatctaactccctttcccaggcat

SEQ ID NO: 232969 - DNA, 201 bp, Homo sapiens
cgtggttttgggctaggggcacgctggagggcggcagggggtctgcggctgcccggagggagcaattcccgatactggggacctactctgggggccaggaragcagggatgggtcagtcatagcctaccgcccccacttagtagatgaccaagtggaggtactcggaggctgatatgactgggtttacaaagccaggaagt

SEQ ID NO: 232970 - DNA, 201 bp, Homo sapiens; identical to SEQ ID NO: 43304

SEQ ID NO: 232971 - DNA, 201 bp, Homo sapiens
gtgaccacgcaggggtctgacccgccagccttgtcctctccaccaggtatgtgcactgcgcgtgaccagccgggcccgcagccgcatcctcagggcagggkgcaagatcctcactttcgaccagctggccctggactcccctaagggctgtggcactgtcctgctctccggtgagtgatacgtggtcgacgggtttggact

SEQ ID NO: 232972 - DNA, 201 bp, Homo sapiens
gtggcagagccaggattccgacccaggtggctggacccgcagccactcttagttatttggctttgctgcctttatctggacctgtcactttctagtatgaraagtcgggttcgatgggggccgcggcgggtgagaggatcgagagccgaataactggatttggggaccaggcaggtctctgagtctcaggccccttcccac

SEQ ID NO: 232973 - DNA, 201 bp, Homo sapiens
gtcctggcagcccctgggtgaccacgcaggggtctgacccgccagccttgtcctctccaccaggtatgtgcactgcgcgtgaccagccgggcccgcagccrcatcctcagggcagggggcaagatcctcactttcgaccagctggccctggactcccctaagggctgtggcactgtcctgctctccggtgagtgatacgtg

SEQ ID NO: 232974 - DNA, 201 bp, Homo sapiens
ctcgggagtggagccaggattttctaggtccttggccaggaaggacctgggccagctttctccctctaggtcggtgggttgggggaaagggataaagattvttttagtccagatcatcatgtgtttgccccttcactggaaggctgcgggggagcaggctgtcccagcttctcactgtcttcccgtccctccagttataca

SEQ ID NO: 232975 - DNA, 201 bp, Homo sapiens
ggaaggctgcgggggagcaggctgtcccagcttctcactgtcttcccgtccctccagttatacaggtttctggccagaagaaccaactccacattcaaccwggttgtgttgaagaggttgtttatgagtcgcaccaaccggccgcctctgtccctttcccggatggtgagtggctggtccagagagcacggtagacctggg

SEQ ID NO: 232976 - DNA, 201 bp, Homo sapiens
cattaggagacaaggacagagctcactagaaagtgacaaatgtaggctgtaggccaggcgtggtggcttacgcctgtaatcccagcactctgggaggccgmggcgggtggatcgccaggtcaggagtccgagaccagcctgaccaacatggagaaacccccgtctctctctcttttttttttttttttttttgagatggag

SEQ ID NO: 232977 - DNA, 201 bp, Homo sapiens
taaaagaaattaaagaatgtgtaagcaaaaactcagttgtatgtaaaaaacccaattccccctgaggaagagaaagagattgagtcctttatttttttttattttttttttttttgagacggagtttcgctctgtcgcccaggctggagtgcagtggcgcgatctcgactcactgcaagctccgcctcccgggttcacgcc

SEQ ID NO: 232978 - DNA, 201 bp, Homo sapiens
aggcggaggttacagtgagccgagatgatgccactgcactccagcctgggcaacagaccaagactctgtctcaaaaaaaaaaaaaaaaaaaaaaaaaagasagacaaatgtaggaagaagtttgcttattgccaaatcatgtacctagcatccaacccacagtagcaacagcaccagatagtatgtgccaaggaatgacac

SEQ ID NO: 232979 - DNA, 201 bp, Homo sapiens
agggccggaagttcgagcgtgccagaggccgacgggccagccgaggctacaaaaactaaccctggatcctactctcttattaaaaagatttttgctgacartgctctgtgtgtgttattgggggatgggttggagaattggttcctgcgggtgagaatgcatttggtttggggacagggacgtcatgccagtgaagaccag

SEQ ID NO: 232980 - DNA, 201 bp, Homo sapiens
ccctggccctgggtcttaagccatagtaggctggtaggagcaaggagtcaggtctcactgtcctggcctgaccttcagctctgtggaggagaggtaagtgmggagcagcattgacagccaactgcaggaggcccttccaggctcaatgtgcctgagaaccaagaggcaggggcctccctggcgggtggggggaagagtaga

SEQ ID NO: 232981 - DNA, 201 bp, Homo sapiens
cgggtgagaggatcgagagccgaataactggatttggggaccaggcaggtctctgagtctcaggccccttcccaccttgtgatggtttttgagcctttgcmccagtgtctggctgttcgttgggtacacagtaatctcatctgacaagtttgtgaatttgggaagaaataattcacaggagatgctcatcacggggttttg

SEQ ID NO: 232982 - DNA, 201 bp, Homo sapiens
gtctcgctctgtcgcccaggctggagtgcagtggcgtgatctcggctcactgcaacctctgcctcctgggttcacgccattctcctgcctcagcctctccsagtagctgggactacaggcgcccgccaccacgcccagctaattttttttttgtatttttagtagagacggggtttcaccgtggtctcgatctcctgacct

SEQ ID NO: 232983 - DNA, 201 bp, Homo sapiens
ggtgacctgtgcctgtagtcccagctacttgggaggctgagacaggagaattgattgaacccaggaagcagaggttgcaatgagcaaagattgtaccactrcactctagcctgggcaacagagcaagctgtctcaaaaaaacgaaaacaaaaaaaaatgaccagcctgggcaacatagtgagacctcgtcagaaactagcc

SEQ ID NO: 232984 - DNA, 201 bp, Homo sapiens
acacccagctactttttgtattttgagtagagacagagtttcgccatgttggtcaggctggtctcaaactcctggcctcaagtgatccgcctgcctcagcstctcaaaatgctgggattgcaagtgtgagccacggcgcccaggccctgggttttgttttctaatacatctcgtaagtctcctttcacctctgattccctc

SEQ ID NO: 232985 - DNA, 201 bp, Homo sapiens
tcttgaactcctgacctcgtgatccgccatccttggcctcccaaagtgctgggattacaggttccagccaccgcgcctggcttttttttttttttttttttgagatggggttttgcttttgtttcccaggctggagtgcggtggtgcattgtcggctcaccacaaccccctgggttcaagcaattcttcctcctcagcctc

SEQ ID NO: 232986 - DNA, 201 bp, Homo sapiens
aaaccgggctgctgagagttggttgagaatgcagacacctggccaccatgcaggattcccattcatcagggcccgcccggcatcggcacagtttctttgctgtttttattttttgagactgggtctcactgttgcccaggctggagtgcagcggcatcatcacagctcactgcagcctctacttctctgggctcaagcaat

SEQ ID NO: 232987 - DNA, 201 bp, Homo sapiens
gtcaacaagtcgattcttgtgtttgtatcttcttggctcatggagcaggcggtgaccccttctccgagccaggccctggggtttattcagaggccctgctytcagggttcctgcacagtcaaggtggggggtccgatgagaaacagatgggcagatgcgggtggcgcatgggagagggcagagagaggatggagcaggcca

SEQ ID NO: 232988 - DNA, 201 bp, Homo sapiens
caaaccgggctgctgagagttggttgagaatgcagacacctggccaccatgcaggattcccattcatcagggcccgcccggcatcggcacagtttctttgytgtttttattttttgagactgggtctcactgttgcccaggctggagtgcagcggcatcatcacagctcactgcagcctctacttctctgggctcaagcaa

SEQ ID NO: 232989 - DNA, 201 bp, Homo sapiens
ctcttccacgagcaccctgacctcattgttggattcaacgcttttcttcccctcggatatagaatagacattcccaagaatggcaagttaaacatacagtygcctctgacaagccaggtatgccactacagtggttcgggtgatctcagccttcaccgagtatgtcttgctactcaggttgggccacgtgtctctcctgta

SEQ ID NO: 232990 - DNA, 201 bp, Homo sapiens
gatttgattcgcccattctggacatttcagatgggtggaatgtcaccatatgtggcctttgtgtctggctcctctcactcagcatcatgttttcaaggttyatccatgtcgtaccgtggatcagtgctcattccttttcctggctgaatcatattctgttagatggatgagccacattctgtttatccgtattctgttgat

SEQ ID NO: 232991 - DNA, 201 bp, Homo sapiens
gctgctgtgtgagggccgcagggagaagggcagcgaccccgccatggagctgcggctgaagcagcccagtaaggctccaaagcctgccgggaggccccggsgggtgcctggggttaggggtcacagctcatgatctgacatgtcctgttacttttctttctggcttttcattttaagagaattctgtgatttcaaatggga

SEQ ID NO: 232992 - DNA, 201 bp, Homo sapiens; identical to SEQ ID NO: 43317

SEQ ID NO: 232993 - DNA, 201 bp, Homo sapiens
ctgtggagggttgtgcgtccgccacagtgaagatactgaacggctccaggactgtcaagttctggccttgaccttttatctccatcccaaaaccctgcctyagccggagtctgttccaaacccctggcaactacttatctgttctctagacaatgttacagtaatggaactgtacaggaggaaccctctgggagaaacctt

SEQ ID NO: 232994 - DNA, 201 bp, Homo sapiens
tctgttccaaacccctggcaactacttatctgttctctagacaatgttacagtaatggaactgtacaggaggaaccctctgggagaaaccttccccccccsccccccagcaaaattccctggagattcacctgataaatacttttaaaaattctaacacttgggccgggtgcggtggctcgtgtgtaatcccagcactttg

SEQ ID NO: 232995 - DNA, 201 bp, Homo sapiens
aagttgaatcaaccctggggacaggtgctgtgtgagcccttttgcattaacttaaaaaaaatatgtgtgtgtgtgtgtgtgtgtgtgtgtgtgtgtgtgtrtatatacacataaacatttttctaatgtaaaataaagcacagatccaagaaaccacatggccaacaaatggcttgaatctttattaagcagtcacccatg

SEQ ID NO: 232996 - DNA, 201 bp, Homo sapiens
tggcccagagcagcagcgatggtgtccccgaggctaggcggggggtagggtcctcaccgagggcgcagcagctgggaggcgcgggctccaggggcgcggcytggcggcaggcggcctcccgcaggcggcaggcgctggcgtagaccaccccgtcggagccgcacaccgggttcccctgggcgccgcagtcgtggtcgcagc

SEQ ID NO: 232997 - DNA, 201 bp, Homo sapiens
caccagccaagcgcaggccgcgcagcatccagagaccctccctctgcaggccacaggctctccttgaggcctggtgggtggggttgcctccctccctgctyccccaccaggctctcttctgtgccccctctccaaagagcagaccactcctcctgagcaagcggttgtgtcccagggcaggaggggaaccaagccacctct

SEQ ID NO: 232998 - DNA, 201 bp, Homo sapiens; identical to SEQ ID NO: 43335

SEQ ID NO: 232999 - DNA, 201 bp, Homo sapiens
tttcattttaagagaattctgtgatttcaaatgggaaattgcaaacaggaagttgccagcataagacagaggtctcacgtacccctcgcccaggctcccckggccgtggcacctgtcctgggtgtagcaccctctcctgactggggaacatttgtttctcatgggctttctcgtggagccgtcatggcccagctccacagt

SEQ ID NO: 233000 - DNA, 201 bp, Homo sapiens
ccaaaccgggctgctgagagttggttgagaatgcagacacctggccaccatgcaggattcccattcatcagggcccgcccggcatcggcacagtttctttkctgtttttattttttgagactgggtctcactgttgcccaggctggagtgcagcggcatcatcacagctcactgcagcctctacttctctgggctcaagca

SEQ ID NO: 233001 - DNA, 201 bp, Homo sapiens
aggagaatcacttgaacccgggaggcaaaggttgcagtgagccgggatcataccactgcactccagcctgggagacagagcaagactccatctcaaaacaraaagaacaaatcccgccaccaaggagaaattgttttagaatcgtggctgctctgcgtcttgtatttctgcttttctcagctgagactttctagaattgtc

SEQ ID NO: 233002 - DNA, 201 bp, Homo sapiens
actaaaaatagaaaaattagccagcgtggtcgcacggcacctgtgatcccagctactcaggagaatcacttgaacccgggaggcaaaggttgcagtgagcygggatcataccactgcactccagcctgggagacagagcaagactccatctcaaaacaaaaagaacaaatcccgccaccaaggagaaattgttttagaatc

SEQ ID NO: 233003 - DNA, 201 bp, Homo sapiens
gggaggaggtggaggaaccgggaagccggccacattggctctgtaaggccatcacgccctccctctgacgtgcacagagcccactgcacagactaggctgsgagctggctgggcctgggtcctggacccccagtcaagtcccagaggaagacaggccagccctgggatgcttcagggaggatgccctggcttgtccctggt

SEQ ID NO: 233004 - DNA, 201 bp, Homo sapiens; identical to SEQ ID NO: 43318

SEQ ID NO: 233005 - DNA, 201 bp, Homo sapiens
aaaaaaaaaaaaattctgctgcttctctgtgcaagaccctctctgccatcagcctgttgtctcctgaaagccaaggagcgagtctcagggttttttttttkccttttttgagaaggagtctcgctctgtcacccaggctggagttcagtggcgcaatctcggctccctgcaacctccacctcctgggttcaagagattctc

SEQ ID NO: 233006 - DNA, 201 bp, Homo sapiens
ttggctcctggggcatgcagcgtcattcacggcatttcctcttggtgcaggtactgaacgacacctgggtctccttcccttcctggtctgaggactccacrttcgtcagctccaagaagacaccgtacgaggagcagcttcaccgctgtgaggacgagcgcttcgaggtgtgtgtgctgctgtggccgggtcccccggcat

SEQ ID NO: 233007 - DNA, 201 bp, Homo sapiens
aaagaccttgctgataaaacaggttgcagtaaagaagccggccaaaatctacccaaatcaaaatgacctctggtggtcctcactgctacactcccaccagygccaagacagtttagaaatgccatggcaacgtcaggaagttaccctctatggtctaaaaagaggaggcatgaataatccaccccttgtttagcatatcat

SEQ ID NO: 233008 - DNA, 201 bp, Homo sapiens
ctggagtgcagtggtgtgatctgggctcactgcagcctccgcctcccgggtgcaagtgattcttgtgcctctgcctcctgagtagctgggactgcaggcaygcaccaccactccaagttcgtttttgtatttttagtacagacagggtttcaccatgttgaccagtctggtctcgaactcttgacctcaggtgatctgcct

SEQ ID NO: 233009 - DNA, 201 bp, Homo sapiens
tagagacaaaagcctgcagagactcaacatttggcttctccagggtcttcccagtgccaccctcttcctgtccgcttcttgttgctgtcttggctctcagracaaaacagggaaaggattctgagattgtcgtagccaggggcacatcccccttgcctttctgatgctgtggcactcttgcctgttacccaaagccctacc

SEQ ID NO: 233010 - DNA, 201 bp, Homo sapiens; identical to SEQ ID NO: 43327

SEQ ID NO: 233011 - DNA, 201 bp, Homo sapiens; identical to SEQ ID NO: 43328

SEQ ID NO: 233012 - DNA, 201 bp, Homo sapiens
cctttgtttttttttagcatcttaatgaattcatggacttaaaatatatttgatgcgtttcaataccgtttctagtccttttaaaggtgaggggccaggcrtggtggctcatgcctataatcccagtactttgggaggccgagggggaaggatcacttgcatccaggagtttaagaccaaggccgggcctggtggctcacg

SEQ ID NO: 233013 - DNA, 201 bp, Homo sapiens; identical to SEQ ID NO: 43329

SEQ ID NO: 233014 - DNA, 201 bp, Homo sapiens
aaacacatgagatgattttgcaggcccagaatcaaggaagattacagatagatgggaaaccctgggatcatgcccttgtttttataggagactcactgagrtttggagtgggtaagggacccacctaagtggcagaggtgtcactagaactcagaccctctgactcagattcttggaagtcacatgcttaccatactgctg

SEQ ID NO: 233015 - DNA, 201 bp, Homo sapiens
  misc_feature (1)...(201): n = A,T,C or G
acatcagagatggagctgggggcccggagctggggagggggaggccgggaagttgcgggcttcagcccagcccactctgtatcccgtctctgaccccatanggctgggctattcccttgagtgtcatgtccagctgtttcccaccagggcagaccccaggctctgagcacctccctccctgctgcttctcgtcacctgccg

SEQ ID NO: 233016 - DNA, 201 bp, Homo sapiens
gtggaggtccaggtgaggccctggccccagtctgtgccacgcataccagggagcgcctgagggcagcagcatggggctcccaccagccaagcgcaggccgygcagcatccagagaccctccctctgcaggccacaggctctccttgaggcctggtgggtggggttgcctccctccctgctcccccaccaggctctcttctg

SEQ ID NO: 233017 - DNA, 201 bp, Homo sapiens
gaggctgcggtgggaggatctcttgagcccacgagtttgaggttgcagtaagctgagatcatgccactgcccttgagcctgggcaacagagtaagacactmtctctaaaaagaaaataccaaaccaaacaaaacacaggcagtgtgcagactggctgtggcttgccactccctggcctgaagcctggcctcttccagtcag

SEQ ID NO: 233018 - DNA, 201 bp, Homo sapiens
taaaaggagtagcagtgtatttacagccaagcatttaggggaaaggaacagcctgcactcaggccaccttcagctcattcctgggtttgctttggaacatwtttttccgtgtcttttctgtgtgtttctcacacccgggcagggtttgctggtctggcctggtctgttttgttcaggtctggtctggtctagttttggtct

SEQ ID NO: 233019 - DNA, 201 bp, Homo sapiens
ccgcgtggcagccagggtggatcgggttgagcattcccttcagagcagtcacgatttgcgtttatcccagcagtagcctcaggcatctctgcagctttttygttggtctctttccttcctacgtttccatcggcttgtgggttttccttgtgagcagggttggcatagggttcttaaatacggggaacgacggagcccaca

SEQ ID NO: 233020 - DNA, 201 bp, Homo sapiens
aaatccgaaacactgctggtccccccagcatttcggataagggatccttgacccgtatgcgcgcgcgcgcgcgcacgcacacacacacacacacacacacrcgcgcgcgtgcgcccgcgcacagctgttcgctggtgggtgttgcgtgggccagggtggagggaggatgaatgtcccactttgtccccaggaactctgagc

SEQ ID NO: 233021 - DNA, 201 bp, Homo sapiens
agctgttcttgtttccatgtttcagcagtagagactcgtatggggaagggcgtttggggaagggtctgtatggagcaaggtccagaattgaagcgggcctctgcgtgtgcttgacacgaggcctggttgggttaggagcgttcaccaccatgtggcgttcctccgcgtgttcaacctgcggtcaagtgctcagctgggctg

SEQ ID NO: 233022 - DNA, 201 bp, Homo sapiens
atcgccatcagcactcactccccactcccccagcccctggcaaccacaaatctttccaactctacggatttgcctgttctgggcatttcatgtcaatggawtcatgtactctgtggccttttgtgtctggcttctttcactcagcatcatgtttctgaggttcatccatgctgtagcatggatcaatgcttcgctccttcc

SEQ ID NO: 233023 - DNA, 201 bp, Homo sapiens
ctatataatgcaagcattctgaaatgtgaaaaaatctgaaatccgaaacactgctggtccccccagcatttcggataagggatccttgacccgtatgcgckcgcgcgcgcgcacgcacacacacacacacacacacacacgcgcgcgtgcgcccgcgcacagctgttcgctggtgggtgttgcgtgggccagggtggaggg

SEQ ID NO: 233024 - DNA, 201 bp, Homo sapiens
gagacaggagaattgattgaacccaggaagcagaggttgcaatgagcaaagattgtaccactgcactctagcctgggcaacagagcaagctgtctcaaaamaacgaaaacaaaaaaaaatgaccagcctgggcaacatagtgagacctcgtcagaaactagccagaagtggtggcgtgtacctgtacctactttggaggtt

SEQ ID NO: 233025 - DNA, 201 bp, Homo sapiens
tctactaaaaataaaaaaattagccagacatggtgacctgtgcctgtagtcccagctacttgggaggctgagacaggagaattgattgaacccaggaagcmgaggttgcaatgagcaaagattgtaccactgcactctagcctgggcaacagagcaagctgtctcaaaaaaacgaaaacaaaaaaaaatgaccagcctggg

SEQ ID NO: 233026 - DNA, 201 bp, Homo sapiens
ctcccaacgtgctgagattatgggcgtgagccaccatgcctggccatgattcttttttttaatggttcttgcacatggtgggtgcacatattaacatgatyagtccattcagtccttagcccttttcccatttaccccagggatagtagttgacagcacttgtggctgtagcgttcaccccaagataactttgccatgaag

SEQ ID NO: 233027 - DNA, 201 bp, Homo sapiens
gtcacttgggcagtctgagcctctgtttccttgctgtaaaatggggatagtaaatgtaccgacctatgtggggttcctgagagctgcaggtgggcgctacytgcagggcccttcaaatacaatagaatctcacaaataaaaggaaaagacgattttttcggcagaaggaaatgatgtaagtcacaaacttggatctttcct

SEQ ID NO: 233028 - DNA, 201 bp, Homo sapiens
ttgacctctgggctctagctgtcctctcacctcagccttccaagtagctgggaccacaggtgtgcaccaccacacctttttgtagagatgaggtttcatcrtgttgcccaggctggtctcgaactcctgggctcaaacaatcctcccgcctcagcctcccaaagtgttgggattacaggcgtgagtccctgcacccagctc

SEQ ID NO: 233029 - DNA, 201 bp, Homo sapiens
aaacctggccccaaggcccccaccagtgccctggcaaacatcagccacttccccttgctgcctgtttctctgtccactgcaccttgtgtttctgtggtgcyggcatgcacacggcgagatgccccaccagtggccgccacatgagcccccgcacgggaagacccaactcagctgtctccctcctgaaacccccagcccttc

SEQ ID NO: 233030 - DNA, 201 bp, Homo sapiens
ctgcatcttttgggaatcagtttacacctgttccagcatatacaaaaaatagccaagcgtggtggctcgtgcctgtaatcccagctacatagaaggctgargcaagagaatcacttgaacccaggagacggaggttgcactgagctgagatcgcaccattgcgctccagcctgggtgacagagtgagacctccgtctcaaa

SEQ ID NO: 233031 - DNA, 201 bp, Homo sapiens
cagcgtctacgacgagagcgggagcaccggaggtggtgatggtgagtggtcctggctttggggtgcagagatggggttacatcagagatggagctgggggyccggagctggggagggggaggccgggaagttgcgggcttcagcccagcccactctgtatcccgtctctgaccccatagggctgggctattcccttgagtg

SEQ ID NO: 233032 - DNA, 201 bp, Homo sapiens; identical to SEQ ID NO: 43323

SEQ ID NO: 233033 - DNA, 201 bp, Homo sapiens
aggcgccacactggatatagccacgtggggcagcccggtctccataacccacactccagtcctcccacgggctggctggcaagcggccctggtgggtctgygggggcaggggcagccttcctggtttatctccaccggcgcgatctgctcgtccgcctcggctccagaagctggggctcagggtccggcgaggcaggaagc

SEQ ID NO: 233034 - DNA, 201 bp, Homo sapiens
  misc_feature (1)...(201): n = A,T,C or G
gaggacagggctgtcgtgagaacagtggctgcagatgtgagcggctggcaggaagtggccacttgaaccgcagatgcttcctgggctggtcagggaccggnggtgctggctgcagctgggacccccccctgcatcttgctggcctggcacctgggtccctgggaggcgccacactggatatagccacgtggggcagcccgg

SEQ ID NO: 233035 - DNA, 201 bp, Homo sapiens
caagagttcaagaccagcctggccaacatggtgaaaccccacctctactaaaaatacaaaaaaaattagccgggcatggtggcgggcccctgtaatcccarcttctggggaggctgagacaggagaatcgcttgaacccaggaggcggagattgcagtgagcccagattaaaaaaagaataaactatggatacacgaaaca

SEQ ID NO: 233036 - DNA, 201 bp, Homo sapiens
tgggcaagagtgaagtgaggcactcatacaggggtgccttgtgagtatggggtcagccgaggatgctgaggggctctcgaggttcagccagagtccctgaygctgggctcgtgctgctctgggggtctgaagggaccctcgctattaccctctgggaggcgcccatccttggtttttttttttttttttgccgagtctcgc

SEQ ID NO: 233037 - DNA, 201 bp, Homo sapiens
ctgagtcactcccactgccagtggggggtcggggcggggcggaggagtcggggcaggtcgtcgggggaggttggtaggggagggaggtggggagatattgmgcctatgtctcttatctctggggtgggcccagctgttacctgtcctccgcctccccttcaggctcagggtctgagtcctccacctcaaggccggctccat

SEQ ID NO: 233038 - DNA, 201 bp, Homo sapiens
gacccgtatgcgcgcgcgcgcgcgcacgcacacacacacacacacacacacacgcgcgcgtgcgcccgcgcacagctgttcgctggtgggtgttgcgtggrccagggtggagggaggatgaatgtcccactttgtccccaggaactctgagcctctgaccctgagtcactcccactgccagtggggggtcggggcggggcg

SEQ ID NO: 233039 - DNA, 201 bp, Homo sapiens
ggacttcgggatgggaccccacacccctttcctgaacccaactccacggggctcaggccagctgccacctcctcatttagatggcagaaccccaactggawgggggacacatggcccaggcctggcactgtacaactctgcctcctttccccttccagtggaccacagtgatgggctctgggtgtccatgtgcggtaagag

SEQ ID NO: 233040 - DNA, 201 bp, Homo sapiens
cagtggctgaccccgtcctgccttcctttccatagttagacgttgtcctggagacgaacctggccacaatccgtgtgttggaaagtgtgcagaagaagctrtctcggatggcgccggaagaccaggagaagttccggctggacgactccctgggaggcacgtcggaggtgatccagcgccgtgccatttatcgcatctatg

SEQ ID NO: 233041 - DNA, 201 bp, Homo sapiens
taaaccctcctccccaccactctgaaaggctgggctgtagacgaagacagggctcagaagccctggcctgtgggcccccaccacccggccactatgtctcygaggggccggagtctggccccatctgtggaacgggctggcgctctgggtgctgctttccaggttcccgctgctcacaggaggccgaggcccggctgtgac

SEQ ID NO: 233042 - DNA, 201 bp, Homo sapiens
gcagtgatggactttggcttaggtagtgggtggcagcagccttcatttctttcttgccgactgtgccaggcaccggtgttagcaacacagaaagagtaatrcatcatctgacctcactcctgaacctgactctgctgcggcattattctgattttaccagtggggaaactgaggcacaagaggttgcatttgcctgggctg

SEQ ID NO: 233043 - DNA, 201 bp, Homo sapiens
tgtcaggtgcccgggacacacacatgcacacacacacacatgcacacacaaagttcatgtgcaccccagaacatgtgagtaagatcagtaacgtgtattcktgtcaatatcctggagtgatcatttaccagagttttctgagatgttaaccacaggcacaagctgggtgtgtgggtatgaatggtccccaggaccaaactg

SEQ ID NO: 233044 - DNA, 201 bp, Homo sapiens
  misc_feature (1)...(201): n = A,T,C or G
gagcgggagaagctgctgtgtgagggccgcagggagaagggcagcgaccccgccatggagctgcggctgaagcagcccagtaaggctccaaagcctgccgngaggccccggggggtgcctggggttaggggtcacagctcatgatctgacatgtcctgttacttttctttctggcttttcattttaagagaattctgtgat

SEQ ID NO: 233045 - DNA, 201 bp, Homo sapiens
gtggccactccccaggtgagggaaacacgcacggggcagcctggagagaggacacccagggcccagcacatggtgttggggaagtgacgcaggggacgccrgggggctggcagtctgtcccctcccccccccccaggctgggcacccctcatgggccatggcttcggggacagcaaccttgcttgtgacaccaggagattg

SEQ ID NO: 233046 - DNA, 201 bp, Homo sapiens
gaccccagccagtattccctcagagccggcacgaccctgctgtggggcggcgggcccagtcgtgttcctgcagtgggcaccctaggcgtatgtgtatacaygcacagatatttattcctttcgcttttagtggttgttatttctgtagcagccaagtcctgcggctccctggggctgagatctccctttgtggaactccga

SEQ ID NO: 233047 - DNA, 201 bp, Homo sapiens
atggggggtgggggtggacagtgtgtgctggggggttcgggtgctgcagacctggaactcccttctgccaggatgttggcagccggttgtaagccttgcaygggacagaccacaaggggccatgccagtggctgtggaggacacagctggtgtgtggggaaggggagaagcctcagcacctggtgcacaaacacacacaca

SEQ ID NO: 233048 - DNA, 201 bp, Homo sapiens
aatgggtccctgcccatcaccatccacagcagtggccactccccaggtgagggaaacacgcacggggcagcctggagagaggacacccagggcccagcacrtggtgttggggaagtgacgcaggggacgccagggggctggcagtctgtcccctcccccccccccaggctgggcacccctcatgggccatggcttcgggga

SEQ ID NO: 233049 - DNA, 201 bp, Homo sapiens
  misc_feature (1)...(201): n = A,T,C or G
gtgctggggttcagcctgtctggcggcacccagacccccagcgtctacgacgagagcgggagcaccggaggtggtgatggtgagtggtcctggctttgggntgcagagatggggttacatcagagatggagctgggggcccggagctggggagggggaggccgggaagttgcgggcttcagcccagcccactctgtatccc

SEQ ID NO: 233050 - DNA, 201 bp, Homo sapiens
ggccgtggcacctgtcctgggtgtagcaccctctcctgactggggaacatttgtttctcatgggctttctcgtggagccgtcatggcccagctccacagtrccctttttctttctttttttttttttttgagatggagtcttgcgctgttgcgcaggctggagtatagtggcaggatctcggcccactgcaacctccactt

SEQ ID NO: 233051 - DNA, 201 bp, Homo sapiens
ggctcaggggcgtctctccatcagctgggagttcaaatctcggtgggctcacgttgcatttccctgatggcaaatgtggctggggccctgtcctttcatgrccgttgggacatcttttctcatggaaagctatccacggtgtttgcgcctgtttccgttgcgtctgccttgttggtgactgggaggatttctgtgtctggc

SEQ ID NO: 233052 - DNA, 201 bp, Homo sapiens
tgtttttgactttttgaagagcctctaaactgttttctacagtgaccgcaccattttacattcctatcagcaatggactgcggtttctgtctctccacatsttggccaacatttgttcttttccaggtttttttttttttttttttgccttttgtttttagtagccatcagtgtgtgaagttttattgcattaaggtttgt

SEQ ID NO: 233053 - DNA, 201 bp, Homo sapiens
gtggaattcctgggtcacatgttaattctgtttttgactttttgaagagcctctaaactgttttctacagtgaccgcaccattttacattcctatcagcartggactgcggtttctgtctctccacatgttggccaacatttgttcttttccaggtttttttttttttttttttgccttttgtttttagtagccatcagtg

SEQ ID NO: 233054 - DNA, 201 bp, Homo sapiens
gagagttggttgagaatgcagacacctggccaccatgcaggattcccattcatcagggcccgcccggcatcggcacagtttctttgctgtttttattttttgagactgggtctcactgttgcccaggctggagtgcagcggcatcatcacagctcactgcagcctctacttctctgggctcaagcaatcctcccacctcag

SEQ ID NO: 233055 - DNA, 201 bp, Homo sapiens
ggactgccggtgtgcccagcctcccctgcacagcttcccactctgctcacagagaagacggtggaggggggagcccaggcgtgggttttccgtgtgctgarggtgtcctcagccacctttttccccaagtcattgacgtgaagctgattttctcattggtggccatggaaactgcccagaaatgggagcagggcctctgag

SEQ ID NO: 233056 - DNA, 201 bp, Homo sapiens
ggcctcccaaagtgctgggattacaggcgtgagccattgcgcccggtcgtgcatcactattttgatgcatcatcttcaaaccaccctgccccagcatcacyggactgccggtgtgcccagcctcccctgcacagcttcccactctgctcacagagaagacggtggaggggggagcccaggcgtgggttttccgtgtgctga

SEQ ID NO: 233057 - DNA, 201 bp, Homo sapiens
gctttgggagactgagatgggaggatcacttgagcccaggaatttgaggctgcagtgcacaatgatcatgtctatgaacagccatggcactccagcttggrcaacatacagagaccccatctctacaacacacacacacacacacacacacacacacacacacacacactagctgggcgtggtggtagtgtgtgcctgtgg

SEQ ID NO: 233058 - DNA, 201 bp, Homo sapiens
atgggggacacatggcccaggcctggcactgtacaactctgcctcctttccccttccagtggaccacagtgatgggctctgggtgtccatgtgcggtaagrggggagtagcttgtgtcagaccaccaaccaaatcgaaaagctacccatagcacactacccagcaatacaaaagaacaaactccaggccgggcacagtggc

SEQ ID NO: 233059 - DNA, 201 bp, Homo sapiens
cagagtccctgacgctgggctcgtgctgctctgggggtctgaagggaccctcgctattaccctctgggaggcgcccatccttggtttttttttttttttttgccgagtctcgctctgttgcccaggctggagtgcagtggcaagatctcggctcactgcaacctccacctcctgggttcaagcaattctcccacctcagcc

SEQ ID NO: 233060 - DNA, 201 bp, Homo sapiens
agctccaaggctggggggttggggtgcttggagctccagctgtagctaggaaggtgggggatctcccaagggacctccagctgtcccccctgcaccacacyggtgactgctgagcccacacctgggtcccaagagtctcatcctagggacgggcagatctctgtcattctgttccttgggttcatttagaggcaggtgtca

SEQ ID NO: 233061 - DNA, 201 bp, Homo sapiens; identical to SEQ ID NO: 43309

SEQ ID NO: 233062 - DNA, 201 bp, Homo sapiens
cgagagctgggacagtcttagggcaatttggggtcctgggtgccccaaagggaggccggggctttgtgtttcagagaaacgcagcctgttccgttttgaarttgcccaccggctggatgttttgctaatttagtccacatcgtgtttgctcagaaagaggcttttggccacacgagtgctttctgggaatgtttcttctcc

SEQ ID NO: 233063 - DNA, 201 bp, Homo sapiens
agtttcctgtggaacctggaggctcctgatgcctttgactccaggctgggcgattccgatgctgacccgtcctcctgggctccccacccccgctccccaartgtcacacaggcactttgtacacatcctggttttctaagaagggaacttgccatcaagattcctgtaccaggcccacggccgtctcgggcagagccacct

SEQ ID NO: 233064 - DNA, 201 bp, Homo sapiens
ggtgtgtggggaaggggagaagcctcagcacctggtgcacaaacacacacacagacacagacacacacacacacagagacaccgctgctcactccagggartggcacagggcagtttcaaagaccactggggcatgaactatgggggcaaggcagagggttggagggccactgttgggctcctcattgggtctatgtctct

SEQ ID NO: 233065 - DNA, 201 bp, Homo sapiens
accaggcccacggccgtctcgggcagagccacctgggccccgggtgcagccggagaccccgccgagcccctcctcccagtattcccatccccgcatgcttytagggagcgcctcttttccgttcttgaggaatttctgttctggggcttgtccttcctttgcagctgttttgaatgtagttttccttttctatttatttgc

SEQ ID NO: 233066 - DNA, 201 bp, Homo sapiens
acacatatgtccaaacccatggaaggtacagtgccaaaagtgaacccccatggaaacgcggggttccagaagacagagccgtgtccatgcagctttgtccrttgcaacaaaggcaccgcttttggtaaaggacatagatagcgggggaggcttgcatgtgtggggtggggttacatggggactctgtaccttctgctgaat

SEQ ID NO: 233067 - DNA, 201 bp, Homo sapiens
ggcaaaagtatagaggcagtgaaaagatctgtggttgccagggggcagatgggaggaagtaatccataggtggaggtgggaggatttttagggcagtgacrcaactgtgcgacactatggtcaatggtggacatatcatgacacatatgtccaaacccatggaaggtacagtgccaaaagtgaacccccatggaaacgcgg

SEQ ID NO: 233068 - DNA, 201 bp, Homo sapiens
ttcctgtgagagccttgctgacttcctgccaccaggtcagtgggctggacccatgagagcaaggggtggctgggtgtgcctacctgggaccaggggagtcraagcccctccttgaaccaagatcatctcacaccctgcacctgccccgccacgacatgggagtgtcttctagaatattctttccccattccatttgcacat

SEQ ID NO: 233069 - DNA, 201 bp, Homo sapiens
gccactgtaagcctgcttcaagctaacccacccctttttaaaagtgtgtttaagtcaagtgctgtctttattctaggcccagtttttagacgttgagtccrgtgggtctgagtgcactcaataaagatcctcctgtatacaccccaaggtctctcttttcctcctgtttccacaacactacatgtgatgctgacagagggt

SEQ ID NO: 233070 - DNA, 201 bp, Homo sapiens
aataaccgccacccttgccatcctgcaacagctggactcaagtttccaggaagtggagatgtgtttctagaagtttcctgtggaacctggaggctcctgaygcctttgactccaggctgggcgattccgatgctgacccgtcctcctgggctccccacccccgctccccaagtgtcacacaggcactttgtacacatcctg

SEQ ID NO: 233071 - DNA, 201 bp, Homo sapiens
gtgaagagtgaatgcccggactggagggagacgctgccagagctggtggggccaggccagaggcgggtggctgtggcaggaccctggaccacctcaggtcrggctaggatggcacctatgggaccagtgggggctgctggtgggtgttcagatctgggggcatttcttgttgcttccatttgctttctgtggacccctggg

SEQ ID NO: 233072 - DNA, 201 bp, Homo sapiens
gcagtatgtggggaccgagggcgcgtccagctcgcccactgagggcttcctcctgaaacctgtgttcctgcagaggtaagaggccctgagatgcatgctcygttccttccttcctgggcccagggagtgtcccctttgtcctgacgggggctggaccatggcacactgtctgggagcacttagtaggtgcctgctgtgtgc

SEQ ID NO: 233073 - DNA, 201 bp, Homo sapiens; identical to SEQ ID NO: 43320

SEQ ID NO: 233074 - DNA, 201 bp, Homo sapiens
cacctggctcggtacgtggagcagtatgtggggaccgagggcgcgtccagctcgcccactgagggcttcctcctgaaacctgtgttcctgcagaggtaagrggccctgagatgcatgctccgttccttccttcctgggcccagggagtgtcccctttgtcctgacgggggctggaccatggcacactgtctgggagcactt

SEQ ID NO: 233075 - DNA, 201 bp, Homo sapiens
aggagactcactgaggtttggagtgggtaagggacccacctaagtggcagaggtgtcactagaactcagaccctctgactcagattcttggaagtcacatscttaccatactgctgccccctcttaggaaacatggtggggctggcctggtttccttccgggagcccagtgctaagggctgggctgcaatgcagccagaag

SEQ ID NO: 233076 - DNA, 201 bp, Homo sapiens
ctggagtacaatggcacaatctctgctcacagcaacctctgcctcctggtttcaagcaattctcctgcctcagcctcctgagtagctgagattacaggtgygcaccaccacgcctggctaatttttgtatttttagtagagagggggtttcaccatgttgggcaggctggtctcgaactcctgacctcaggtgatccgcct

SEQ ID NO: 233077 - DNA, 201 bp, Homo sapiens
ttaaattgacaacatggaaaaaaccttaacccacttatcctgagggagggtgggaatagtgatttcatctgcgttggttttagtagtagcaaaaacccagsccccactgaatgtcaacacaaggaaactggtcacgtaaatataaacagcagacgtcccagacgagctgggtgtggttccaggacatgggtcctgcctggt

SEQ ID NO: 233078 - DNA, 201 bp, Homo sapiens
ctcgaacccctgacctcaagtgatcccccacctcagcctcccaaagtgttgagattacaggcgttagccactgtgcctggccttttttacatttttaaaayagagacagggtttcaccatgttgtccaggctggactcaagtgatcctcctgccttggcctcccaaagttttgggattacaggtgtgacccaccacgcctg

SEQ ID NO: 233079 - DNA, 201 bp, Homo sapiens
ccatgttgtccaggctggactcaagtgatcctcctgccttggcctcccaaagttttgggattacaggtgtgacccaccacgcctggccagtattctctgtygcttagtttttctagtttgactgttttgaagtatctttttccccccccaattttatcacaaagcctgccagctactgacaagtagggagtggcccatagg

SEQ ID NO: 233080 - DNA, 201 bp, Homo sapiens
accccttaacgtgcagctcctaacttaagcagcccctcgacattcaaagggagccccctggctgttctctgggggaagtcccgctagttgtcaacaagtcrattcttgtgtttgtatcttcttggctcatggagcaggcggtgaccccttctccgagccaggccctggggtttattcagaggccctgctctcagggttcct

SEQ ID NO: 233081 - DNA, 201 bp, Homo sapiens
accccctgggttcaagcaattcttcctcctcagcctcccaagtagctgggtctataggtgcacaccaccacacctggctaatttttgtatttttagtggasacggggttttgcaatgttggccaggctcgtctcaaactcctgacttcaagggatctgtccacctcaacctcccaaagtgctagaattacaggtgtgagcc

SEQ ID NO: 233082 - DNA, 201 bp, Homo sapiens
ggatcagagggtgcatgcggagcttggaaatgcctccttggaatggtggggggctcgcagtgagcctacagctgcctctgaaacagaccttggctccatgmtgcttccctacatacccacaccctgctcgttccgaccccttctgccatcaaacctgtgcaccatggagaaacagacgcagccccctgtgagcctgagcag

SEQ ID NO: 233083 - DNA, 201 bp, Homo sapiens
ccaaattcatgtattttagccctagccccagcgcctcagaacgtgactgtatttggagatggagcctttgaagaggtgatttaactgaggccgttagggtrggccctaatccagtctgattggtgtccttataagagaggagattgggacacacatcagggacatgcgtgcacagagagaagaccacatgaggacacagac

SEQ ID NO: 233084 - DNA, 201 bp, Homo sapiens
tgccccctctgttcgtggacactgctgggtccccaccatactcctggacgggacctgcccatggccggggctcaggccatgctgggcagcaagatccacamgtgtgcagacaggaccctgcgggcaggtgctctttcctgagagtcatcctgtccccttcacggagggctgcctgagtgtcccggcccagggcacagcact

SEQ ID NO: 233085 - DNA, 201 bp, Homo sapiens
ccttcctttgcagctgttttgaatgtagttttccttttctatttatttgcacattaaagttaataattgaatattgacatcaagccgtgagggtgtgttgstcttcctgtgagagccttgctgacttcctgccaccaggtcagtgggctggacccatgagagcaaggggtggctgggtgtgcctacctgggaccaggggag

SEQ ID NO: 233086 - DNA, 201 bp, Homo sapiens
cctgctcccagacccccccaagccctgtcccccatcccctgtagcccagcgctgagcacactggggccagaaccacccataccagactcccccagggcacracgggttgaggcctctctgaggcagggagggacaacactgaggggccttgtgcagaagagggaaggggtacccccccgagcttcagtttcttcatctgcc

SEQ ID NO: 233087 - DNA, 201 bp, Homo sapiens
tttttccccaagtcattgacgtgaagctgattttctcattggtggccatggaaactgcccagaaatgggagcagggcctctgagaccctgccccagctagmctctctctccaggcttcagtgtctcctcctggagctgggtgttgactctgtccaagactctgctcagtcacttcctggctgatccccgagtgctcaagtg

SEQ ID NO: 233088 - DNA, 201 bp, Homo sapiens
tgtcaccagggataaggtgggacaatggggggtgggggtggacagtgtgtgctggggggttcgggtgctgcagacctggaactcccttctgccaggatgtyggcagccggttgtaagccttgcacgggacagaccacaaggggccatgccagtggctgtggaggacacagctggtgtgtggggaaggggagaagcctcagc

SEQ ID NO: 233089 - DNA, 201 bp, Homo sapiens
ccacaaggggagggaccccagccagtattccctcagagccggcacgaccctgctgtggggcggcgggcccagtcgtgttcctgcagtgggcaccctaggcgtatgtgtatacacgcacagatatttattcctttcgcttttagtggttgttatttctgtagcagccaagtcctgcggctccctggggctgagatctccctt

SEQ ID NO: 233090 - DNA, 201 bp, Homo sapiens; identical to SEQ ID NO: 43331

SEQ ID NO: 233091 - DNA, 201 bp, Homo sapiens
cctatccgtccaggcccatgcctgcccacccaccccacacgaccaccctctgtactccttggggccccacccacttcctggctttcaccatcattttctcytcatctcctgccccctgtctgcatcccaagctccacacctgcttccgggtagcagaagccccagctctgctgtgtcccctggctgacatacctggagggt

SEQ ID NO: 233092 - DNA, 201 bp, Homo sapiens
cctgaagatgtctccgctgtgctggggaggggaccctgtggcaagggacagagagtggcctccaagagccaagggggacctcagagccaccactaccaccrggacccaaattctgcccaagtccacttgggcccagaaaaggcccccgagcagcagataaggacacagcccagctgacaccttgatctcagcctcatttga

SEQ ID NO: 233093 - DNA, 201 bp, Homo sapiens; identical to SEQ ID NO: 43332

SEQ ID NO: 233094 - DNA, 201 bp, Homo sapiens
aattagccaggcatggtggcgggtgcctataatcccagctgctcgggaggctgaagcaggagaatcgcttgaatccaggaagcagaggttgcagtgagccsaaatggcaccattgcaccttcagcctgggcaacaagagcgaacctccatctctaaataaaaaatattttggccaggtgcagtggctcatgcctataatcc

SEQ ID NO: 233095 - DNA, 201 bp, Homo sapiens
gggtttctccatgttggtcaggccggtctcaaactcccaacctcaggtgatttgcctgccttggcctcccaaaatgttgggattacagccgtgagccaccrtgcctggcctagcagggctcttcttatcctgctcaccagagataggaagtcggggggtgacttcaggaaaggcccagagcccgtgatgggcgtggggatt

SEQ ID NO: 233096 - DNA, 201 bp, Homo sapiens
tatttgcccaaaggaactgaaaacttgggtccacacaaaaacctgcacaagagatatacgcagccttattcaccagtgcccaaactcagacacaaccaagrcgtccttcagcgggcaaacggataaaccatgtcacctccagacaacaggatataaaacgaaatgagccatgaagctgtgaagacatgaaggggccaggcg

SEQ ID NO: 233097 - DNA, 201 bp, Homo sapiens
gggtaggccctaatccagtctgattggtgtccttataagagaggagattgggacacacatcagggacatgcgtgcacagagagaagaccacatgaggacamagacagtggccacccacaagccaaggagagagtccttagagaaaaccaaacctcctggcaccttgaccttggcctcctggcctccaggcctccagaactg

SEQ ID NO: 233098 - DNA, 201 bp, Homo sapiens
tgcaggggacttgggcaatgcaggtgggctggtggcgagggacatctgtgtcgtgagtggggcttagacgtcctcttcacccagacgtggagtctctaacrcttggaattttttttagcagcagaacccattttttttcttttttttgaaacagaatcttgcgctgtcacccaggctggagtgcagtggctcaatctcagc

SEQ ID NO: 233099 - DNA, 201 bp, Homo sapiens; identical to SEQ ID NO: 43321

SEQ ID NO: 233100 - DNA, 201 bp, Homo sapiens
ctggagtgcagcggcatcatcacagctcactgcagcctctacttctctgggctcaagcaatcctcccacctcagcctcctgagtgactgggactacaggcrctcactccgacgcccagctaagggctaagaggagacggggtttcaccatgttgcccaggtgggtcttggaactcctggcctcaagtgatccacccacctc

SEQ ID NO: 233101 - DNA, 201 bp, Homo sapiens
cagcctgtgaattatgtgaaggccgggaggaggtcatctgaaatcagacaggtcattgtggcctcagatggggacagggctggcccctagcacaggggaaygctgagagagtgcatggacatgggagggggtgctggcgtggttttgcatactcccacggggttctggtcagccgggagcagtttctgcattcacctggtg

SEQ ID NO: 233102 - DNA, 201 bp, Homo sapiens
gggcagcctggagagaggacacccagggcccagcacatggtgttggggaagtgacgcaggggacgccagggggctggcagtctgtcccctcccccccccccaggctgggcacccctcatgggccatggcttcggggacagcaaccttgcttgtgacaccaggagattggaccagatggtttatggaaagcattgattaatg

SEQ ID NO: 233103 - DNA, 201 bp, Homo sapiens
tcactgcagcctccgcctcccaggttcaagcaattctctgcctcagcctctgagtagctgggattacaggcacccaccaccatgtccggttatttttttttgtatttttagtggagacgaggtttcaccatcttgaccaggctggtcttaaaactcctgaccttgtgatccacctgcctcgggcttccaaagtgatgggat

SEQ ID NO: 233104 - DNA, 201 bp, Homo sapiens
cccaggaggttgaggctgcagtgagctttgattgtgccacagcactcaagtctgggtgacagagcaagaccctatctcttaaatacacacaccccccccccaaaaaaatcctctggtctctgaggtcccaggctcctctctgaggcctcttgagttccccagtggctgaccccgtcctgccttcctttccatagttagacg

SEQ ID NO: 233105 - DNA, 201 bp, Homo sapiens
tgacagagcgagagtctgtctcaaaaaataaaagacacaaaggggcctcaaatgcatctaactaagtgaaagaagccagcctggaaaggctgcacactgcrtgattccaactatagaacactctggaaaaggcaaaagtatagaggcagtgaaaagatctgtggttgccagggggcagatgggaggaagtaatccataggt

SEQ ID NO: 233106 - DNA, 201 bp, Homo sapiens
acctcatcaaagtagaagagcactcggcgtccagccacttcatacctcttcatccccatgtgcttgtcaaggagcagctgcagaggaagccagaagtcagkgtcctcagactctctacttgcttcctctcccatcccctgggggcagtggtcagtgggatgcttggacttgcccacaagttaccatgggctggggtctggg

SEQ ID NO: 233107 - DNA, 201 bp, Homo sapiens
gctcccagacccccccaagccctgtcccccatcccctgtagcccagcgctgagcacactggggccagaaccacccataccagactcccccagggcacgacrggttgaggcctctctgaggcagggagggacaacactgaggggccttgtgcagaagagggaaggggtacccccccgagcttcagtttcttcatctgcccga

SEQ ID NO: 233108 - DNA, 201 bp, Homo sapiens
ggcccagagcagcagcgatggtgtccccgaggctaggcggggggtagggtcctcaccgagggcgcagcagctgggaggcgcgggctccaggggcgcggcckggcggcaggcggcctcccgcaggcggcaggcgctggcgtagaccaccccgtcggagccgcacaccgggttcccctgggcgccgcagtcgtggtcgcagcc

SEQ ID NO: 233109 - DNA, 201 bp, Homo sapiens
ttctgaaatgtgaaaaaatctgaaatccgaaacactgctggtccccccagcatttcggataagggatccttgacccgtatgcgcgcgcgcgcgcgcacgcrcacacacacacacacacacacacgcgcgcgtgcgcccgcgcacagctgttcgctggtgggtgttgcgtgggccagggtggagggaggatgaatgtcccac

SEQ ID NO: 233110 - DNA, 201 bp, Homo sapiens
tgtctatgaacagccatggcactccagcttgggcaacatacagagaccccatctctacaacacacacacacacacacacacacacacacacacacacacactagctgggcgtggtggtagtgtgtgcctgtggtcccagctactcaggaggctgaggcaagaggatcacttgagctcaggaggtcaaggctgcagtgagcc

SEQ ID NO: 233111 - DNA, 201 bp, Homo sapiens
tggagtgcagtggcaagatctcggctcactgcaacctccacctcctgggttcaagcaattctcccacctcagcctcctgagtagctgggaccacaggcatytgccaccaagcccagctaatttttgtatttttatgagagatggggtttctccatgttggtcaggccggtctcaaactcccaacctcaggtgatttgcctg

SEQ ID NO: 233112 - DNA, 201 bp, Homo sapiens
atgtctatgaacagccatggcactccagcttgggcaacatacagagaccccatctctacaacacacacacacacacacacacacacacacacacacacacactagctgggcgtggtggtagtgtgtgcctgtggtcccagctactcaggaggctgaggcaagaggatcacttgagctcaggaggtcaaggctgcagtgagc

SEQ ID NO: 233113 - DNA, 201 bp, Homo sapiens
gcccggtctccataacccacactccagtcctcccacgggctggctggcaagcggccctggtgggtctgcgggggcaggggcagccttcctggtttatctcyaccggcgcgatctgctcgtccgcctcggctccagaagctggggctcagggtccggcgaggcaggaagcctgaggccacagcccagagcagcctgagtgca

SEQ ID NO: 233114 - DNA, 201 bp, Homo sapiens
ctgaggactccacgttcgtcagctccaagaagacaccgtacgaggagcagcttcaccgctgtgaggacgagcgcttcgaggtgtgtgtgctgctgtggccrggtcccccggcatgtgcctgttccccttctccatgggacatgcatcctgatcctcctccactgccccagtctcgtttggaggagcaggaattgcagcaca

SEQ ID NO: 233115 - DNA, 201 bp, Homo sapiens
tctccatgggacatgcatcctgatcctcctccactgccccagtctcgtttggaggagcaggaattgcagcacattccaacagctcctggaagcttcctgcygggtcttgctggcctttgggctggctaccagatggcacttttctttctgtttaaaaattttgtttgggctgggcgtagtggcagacacctgtaatcccaa

SEQ ID NO: 233116 - DNA, 201 bp, Homo sapiens
gaggacctgctctcagagtttggacagttcctgcccgaagccaagcggtctctggtgagtgccgagagcccctgcccagcctcgggggcctcagcgaggayggagggccccagccagcttgacccatgtccgggccaagcctatgtaccctccaggccacactagggtcccccagaagctacgcaggttgcagatacccag

SEQ ID NO: 233117 - DNA, 201 bp, Homo sapiens
ttcatcgtgaactccgaggactacatgtaccgtcgcgggaccctctgccgggccaagcaggtgccaggggaggcctgggctgccccgacatgcccctcctsaccccaagtcctggggccctgggggtccagccctcagctgccctgacacccggcctcttcaacaggtgcagcccctggtcctgctccgccaccaccagca

SEQ ID NO: 233118 - DNA, 201 bp, Homo sapiens
gagcgtggcaagccagaccggaggccgccctgtttccttctgccttgatcccatggctggggatgcccagggtcctctgtgggcccccagactggctttcyttggtcagaagtgctgcaggggctgggaaaggctgtgctggtcccaggagagcagacaaagagcagatctccgaggtggccctgccctgaggggtcccct

SEQ ID NO: 233119 - DNA, 201 bp, Homo sapiens
caggcactttgtacacatcctggttttctaagaagggaacttgccatcaagattcctgtaccaggcccacggccgtctcgggcagagccacctgggccccrggtgcagccggagaccccgccgagcccctcctcccagtattcccatccccgcatgcttctagggagcgcctcttttccgttcttgaggaatttctgttct

SEQ ID NO: 233120 - DNA, 201 bp, Homo sapiens
cgtgaatgctaaagcctgaactcagtgcataaggtgctgtgtgttccgctcctctggctgctccgggattatcttgtactctctttcttcccctccctctmtgcagcctgggaaactcgtcttaaaaaaaaaaaaactcttgaaatgtaccatgctgtctcccacctcaaaaatcacagctgttcgtgatttttctcatga

SEQ ID NO: 233121 - DNA, 201 bp, Homo sapiens
gggctattcccttgagtgtcatgtccagctgtttcccaccagggcagaccccaggctctgagcacctccctccctgctgcttctcgtcacctgccgaggcrggggctgactgaggtcccctctctctcccagacagcacgccctcaatcctgcctgccccccgcggctacccaggccaagtctgtgccaatgacagtgaca

SEQ ID NO: 233122 - DNA, 201 bp, Homo sapiens
gcacctgggtccctgggaggcgccacactggatatagccacgtggggcagcccggtctccataacccacactccagtcctcccacgggctggctggcaagyggccctggtgggtctgcgggggcaggggcagccttcctggtttatctccaccggcgcgatctgctcgtccgcctcggctccagaagctggggctcagggt

SEQ ID NO: 233123 - DNA, 201 bp, Homo sapiens
catgtctatgaacagccatggcactccagcttgggcaacatacagagaccccatctctacaacacacacacacacacacacacacacacacacacacacacactagctgggcgtggtggtagtgtgtgcctgtggtcccagctactcaggaggctgaggcaagaggatcacttgagctcaggaggtcaaggctgcagtgag

SEQ ID NO: 233124 - DNA, 201 bp, Homo sapiens
tcatgtctatgaacagccatggcactccagcttgggcaacatacagagaccccatctctacaacacacacacacacacacacacacacacacacacacacacactagctgggcgtggtggtagtgtgtgcctgtggtcccagctactcaggaggctgaggcaagaggatcacttgagctcaggaggtcaaggctgcagtga

SEQ ID NO: 233125 - DNA, 201 bp, Homo sapiens
ggctctcgaggttcagccagagtccctgacgctgggctcgtgctgctctgggggtctgaagggaccctcgctattaccctctgggaggcgcccatccttggtttttttttttttttttgccgagtctcgctctgttgcccaggctggagtgcagtggcaagatctcggctcactgcaacctccacctcctgggttcaagca

SEQ ID NO: 233126 - DNA, 201 bp, Homo sapiens
aatcaaccctggggacaggtgctgtgtgagcccttttgcattaacttaaaaaaaatatgtgtgtgtgtgtgtgtgtgtgtgtgtgtgtgtgtgtatatatwcacataaacatttttctaatgtaaaataaagcacagatccaagaaaccacatggccaacaaatggcttgaatctttattaagcagtcacccatgtgccca

SEQ ID NO: 233127 - DNA, 201 bp, Homo sapiens
aatgatgcaatctcggctcactgcaacctttgcctcccatgttcaagtgattctcctgcctcgcctcccgagcagctgggattacaggcatatgtcaccaygcctagctaattttgtatttttactagagatggggtttctccatgttagtcaggctggtctcgaactcccaacctcaggtgatccacccgcctctgcctc

SEQ ID NO: 233128 - DNA, 201 bp, Homo sapiens
tgctgtgtggatatcctcccaaggacatcttcctgtgcgtgtgtctggcagaaattcctagacatggaacccttgagtataagggcatgtgcgtcactatkttttttttttttttttgagacgcgtttcactcttgttgcccaggctggagtgaggctggagtgcaatgatgcaatctcggctcactgcaacctttgcctc

SEQ ID NO: 233129 - DNA, 201 bp, Homo sapiens
cctccatctctaaataaaaaatattttggccaggtgcagtggctcatgcctataatcctagtgctttgggaggctgaggcaggtgggtcacctgaggtcargagtttgagaccagcctggccaacacgacgaaactccgcctctactaaaaatacacaaaattagccgggcatagtggcaggcgcctgtaatccctgctgc

SEQ ID NO: 233130 - DNA, 201 bp, Homo sapiens
taactatataatgcaagcattctgaaatgtgaaaaaatctgaaatccgaaacactgctggtccccccagcatttcggataagggatccttgacccgtatgmgcgcgcgcgcgcgcacgcacacacacacacacacacacacacgcgcgcgtgcgcccgcgcacagctgttcgctggtgggtgttgcgtgggccagggtgga

SEQ ID NO: 233131 - DNA, 201 bp, Homo sapiens
ccattcaactgggttaatgtccctgcccagccagggaatgagaggaggtggcaccatgtttgctgctggagtgtaatggcgcgatcttggctcactgcaayctccacctcccgggttcaagcgattctcctgtctcagcctcctgagtaactgggattactggcacgcaccaccacgcccagctaatttttgtatttttag

SEQ ID NO: 233132 - DNA, 201 bp, Homo sapiens
cagcgggcaaacggataaaccatgtcacctccagacaacaggatataaaacgaaatgagccatgaagctgtgaagacatgaaggggccaggcgtggtggckcacacctataattccagcaccttgggaggctgaggcaggaggatcacctgaggtcaggagtttgagaccagcctggccaacatggtgaaaccctgtctgt

SEQ ID NO: 233133 - DNA, 201 bp, Homo sapiens
ctgtaggggaggggccatagcttcctcccagtgacccatgtgctccctgtacacccaagcgtctctggcagttctgaccacacccccaccggagggtcagrgctcccagggagcgtggcaagccagaccggaggccgccctgtttccttctgccttgatcccatggctggggatgcccagggtcctctgtgggcccccaga

SEQ ID NO: 233134 - DNA, 201 bp, Homo sapiens
ttgtaaatgtcattggcaccctgtaggcaccctgctcgggacaagcatcctcgacctgttagccgatggctggagcctgggaggcaggccccgaaccagccacgagccccactctgctcccagcaagtgacgacatcatcccccagaaacgttttgtcattcatagaaaagacttcaaaacctggccccaaggcccccacc

SEQ ID NO: 233135 - DNA, 201 bp, Homo sapiens
tcgctgtgttacacaggctggagtgcagtggtgtgatctcagctcactgtaacctcagcctcctgggttcaagtgattcttctgcctcagcctcctgagtrgctgggactacaggcgcacaccaccacacccagctaatttttatatttttagtagagatgggttttcaccatgttggccaggctggtcttgaactcctga

SEQ ID NO: 233136 - DNA, 201 bp, Homo sapiens
agtagagatagggtttcaccatcttggctaggctggtcttgaactcctgacctcaggtgatccgcctaccttggcctcccaaagtgctgggattacaggcstgagctaccgcacctggccttgccttctgtgtttgagagcacctgctccccacaccctcatcggaaatcctagcctcttctgtctgtgtagtcagatgag

SEQ ID NO: 233137 - DNA, 201 bp, Homo sapiens
ccaggaggttgaggctgcagtgagctttgattgtgccacagcactcaagtctgggtgacagagcaagaccctatctcttaaatacacacaccccccccccmaaaaaatcctctggtctctgaggtcccaggctcctctctgaggcctcttgagttccccagtggctgaccccgtcctgccttcctttccatagttagacgt

SEQ ID NO: 233138 - DNA, 201 bp, Homo sapiens
ctcaaaaaaacgaaaacaaaaaaaaatgaccagcctgggcaacatagtgagacctcgtcagaaactagccagaagtggtggcgtgtacctgtacctacttyggaggttgaggtggctggatcgcttgagttttcgaggcagaggttgcagtgagccctgatctcaccactgcactcagcctgggtaacagagtgagaacct

SEQ ID NO: 233139 - DNA, 201 bp, Homo sapiens
  misc_feature (1)...(201): n = A,T,C or G
gtgcagagatggggttacatcagagatggagctgggggcccggagctggggagggggaggccgggaagttgcgggcttcagcccagcccactctgtatccngtctctgaccccatagggctgggctattcccttgagtgtcatgtccagctgtttcccaccagggcagaccccaggctctgagcacctccctccctgctgc

SEQ ID NO: 233140 - DNA, 201 bp, Homo sapiens; identical to SEQ ID NO: 43322

SEQ ID NO: 233141 - DNA, 201 bp, Homo sapiens
tgggtgccagggaggaggtggaggaaccgggaagccggccacattggctctgtaaggccatcacgccctccctctgacgtgcacagagcccactgcacagrctaggctgggagctggctgggcctgggtcctggacccccagtcaagtcccagaggaagacaggccagccctgggatgcttcagggaggatgccctggctt

SEQ ID NO: 233142 - DNA, 201 bp, Homo sapiens
gtgaagtggagctggaggagtactacccggccttcctggacatggtgcggagcctgctggagggcagcatcgaccccacgcagtacgaggacaccctacgygagatgttcaccatccatgcctacgtgggcttcaccatggacaagctggtgcagaacattgcgcggcaggtgagccgggccggggtggggccggccctga

SEQ ID NO: 233143 - DNA, 201 bp, Homo sapiens
ggctctcagaagtaacctttccctgtctctaatacagcttggctccgtgctgagttttttctgttcctgtgcagacagtggctgggcctggtgtttttcayaatctgtttccagtgtcgggcctggcagtaactcattgtcgccttgtcaggagaattcgcacaaccacggggacggtgcagaggacttcaagcagcaggt

SEQ ID NO: 233144 - DNA, 201 bp, Homo sapiens
atggcctgaggtgagagtgagtgggtgtgcttgaggaacagccaaggagaacggcagggtcaggagctgaaggagagaagggggagagggagccaggagcrtgagaaccactggatggttctgggaggcggttctgctgctgtgctgagaatgaggggtcaggaggcccctgggagaccagggaggggccccaagtgatgg

SEQ ID NO: 233145 - DNA, 201 bp, Homo sapiens
accagtggaaggctgagcgctgcatggccgacgagaactgcttcaaggtgagaggaggcctggggctgggaacacgccgggaggcccggccgctcactccrctctggactcagtcctgggtggaccctggttcagcggctgggacaccggccctgctgcagagcccatgaggtacctttgacctgcaggaagcatcagggc

SEQ ID NO: 233146 - DNA, 201 bp, Homo sapiens
ctggaatagagactggacccagtgcagacacccatggcactgggggcctcaggacagccaggttggtgtgtccccagaggcagaggctgggctcccatggrggatccaggggcatctgtccctcacccccaacccctgccctctttggggctccataaggtgagaaggggccagactgcctggccacctcagagctcaaaa

SEQ ID NO: 233147 - DNA, 201 bp, Homo sapiens; identical to SEQ ID NO: 43325

SEQ ID NO: 233148 - DNA, 201 bp, Homo sapiens; identical to SEQ ID NO: 43326

SEQ ID NO: 233149 - DNA, 201 bp, Homo sapiens
cataaaatcctgtaaaattctaattagttgtggggttttttgtttgttttttcttagagtctggctctgttacccaggctggagtgcagtggcacggactyggctcattgcaacctccacctcctgggctcaagccatcctccaacttcagcctcccaagtagcggaggctacttggggctagaacatgggcgcacatcac

SEQ ID NO: 233150 - DNA, 201 bp, Homo sapiens
agccccgtcccctgccgcgcctcctccgcactgaccacacccaccccaaccccacccccaccgcactgaccgctcctatcctcaaccccgccccctccgcsgtgaccacacctaccctcaaccccgccccctccgtcctgaccactcttaaccccgccccctccgcactgaccacacccaccacaaatcccgcccctcagc

SEQ ID NO: 233151 - DNA, 201 bp, Homo sapiens
gaatttcacgcaggtatttgcctaatacttacaaaaacagaaacagacttttaaaaagcggttgtaggagagaaaggagacagggcgtcctgtctgggccrccctgcaacaacagccccgtcccctgccgcgcctcctccgcactgaccacacccaccccaaccccacccccaccgcactgaccgctcctatcctcaaccc

SEQ ID NO: 233152 - DNA, 201 bp, Homo sapiens
cagatctctgtcattctgttccttgggttcatttagaggcaggtgtcacctgggctgaggtctgcccacccaccatacagagtcacaggctgatagggacrggatgcagccagatggtgtcgtcctgctctcagcagggcagccgttaggaagagaagccgctctgactggccaggagaggagaaagattcctatggggcc

SEQ ID NO: 233153 - DNA, 201 bp, Homo sapiens
gcagccttgacctcccaggctcaaatgatcctcccacctcagcctcctgagtaactggaaccacaagtccatactaccatgcccaagttgttgttttttttactttttttgtagacatgaagtctcactgtgttcccgaggctggtctcacactcctggcctcaagcgatcctcccaccttggccttccaaagtgctgaga

SEQ ID NO: 233154 - DNA, 201 bp, Homo sapiens
tggggaaggggagaagcctcagcacctggtgcacaaacacacacacagacacagacacacacacacacagagacaccgctgctcactccagggagtggcayagggcagtttcaaagaccactggggcatgaactatgggggcaaggcagagggttggagggccactgttgggctcctcattgggtctatgtctctgatcag

SEQ ID NO: 233155 - DNA, 201 bp, Homo sapiens
tgcagccttgacctcccaggctcaaatgatcctcccacctcagcctcctgagtaactggaaccacaagtccatactaccatgcccaagttgttgttttttttactttttttgtagacatgaagtctcactgtgttcccgaggctggtctcacactcctggcctcaagcgatcctcccaccttggccttccaaagtgctgag

SEQ ID NO: 233156 - DNA, 201 bp, Homo sapiens
tggctgaccccgtcctgccttcctttccatagttagacgttgtcctggagacgaacctggccacaatccgtgtgttggaaagtgtgcagaagaagctgtcycggatggcgccggaagaccaggagaagttccggctggacgactccctgggaggcacgtcggaggtgatccagcgccgtgccatttatcgcatctatggcg

SEQ ID NO: 233157 - DNA, 201 bp, Homo sapiens
aatagatatggaaacacctacacaagcagcctctgcctcccaaattgatctgtttggaagatttaaatcaagagtggatgtcagggaggtatcctcctaaygcagaattttgtgtgaagtctaaataaccacctcagcagttgctgaggtcttggcttgaggctttcccagcgagcataccaggcaggcttgcccttgtat

SEQ ID NO: 233158 - DNA, 201 bp, Homo sapiens
ggatcgctgcagccttgacctcccaggctcaaatgatcctcccacctcagcctcctgagtaactggaaccacaagtccatactaccatgcccaagttgttgttttttttactttttttgtagacatgaagtctcactgtgttcccgaggctggtctcacactcctggcctcaagcgatcctcccaccttggccttccaaag

SEQ ID NO: 233159 - DNA, 201 bp, Homo sapiens
aattgcttgagccagagaggccgaggctgcagtgagccgagatcacaccactgcactccaccctggacaacagaatgagaccctgtctcctaaaaagtttmtttaatgtaaaaattaaatttatttttattttatttatttatttattttgcttgctctgtttcccaggctggaagtgcagtggcgtaatcatggatcgct

SEQ ID NO: 233160 - DNA, 201 bp, Homo sapiens
tctccacatgagcagattcataccattgcaatacacaggagttcataaataagattctactcaggtaggcagtaactagcaagttttgagtcaacaaagtstcagtattacatagttctcttcaccaaagatgagtctcccggatttcagcaataatttgactggctccttgtaatgcctgcattaaaggaaaaaaaattt

SEQ ID NO: 233161 - DNA, 201 bp, Homo sapiens
cattgtctccctttgcatcacctgccactccaccttagtgattccctcatctgctggtttaacacacagtgaatttgaggctggtgtcatatacttccctrtagtatgtcagcgagacaaataattttcctcactatggaagcagatttcgttttcttctgaactttactatagtgtgttcgctaatactggaagctttac

SEQ ID NO: 233162 - DNA, 201 bp, Homo sapiens
gtctccacatgagcagattcataccattgcaatacacaggagttcataaataagattctactcaggtaggcagtaactagcaagttttgagtcaacaaagwctcagtattacatagttctcttcaccaaagatgagtctcccggatttcagcaataatttgactggctccttgtaatgcctgcattaaaggaaaaaaaatt

SEQ ID NO: 233163 - DNA, 201 bp, Homo sapiens
aggcaggtggatcacttgaggttgggagtttgagaccagcctggctaacatggcgaaacccatctctactaaaaatacaaaattagccaggtgtggtggcrtgcacctgtaatcgcagctactctggaggctgaggcaggagaatcacttagaacacaggaggcggaggttgcagtgagctgagatcatgccagcctgggc

SEQ ID NO: 233164 - DNA, 201 bp, Homo sapiens
cagacacagtggttcacacctgtaatcccagcactttgggaggccaaggcaggtggatcacttgaggttgggagtttgagaccagcctggctaacatggcraaacccatctctactaaaaatacaaaattagccaggtgtggtggcatgcacctgtaatcgcagctactctggaggctgaggcaggagaatcacttagaac

SEQ ID NO: 233165 - DNA, 201 bp, Homo sapiens
atccaggggggaaaaaaaatcaaggatgcaaaaatgcattcaggaacattctataaatgaatttttcccttctgtaatgaaatcgtaaaataacatgaaaratgaaaataatcatgggagattgtttattctgccttatttccttcaccattgtcacctttgttaaaagtttccttcagatgaatacataagaaaaatcca

SEQ ID NO: 233166 - DNA, 201 bp, Homo sapiens; identical to SEQ ID NO: 43340

SEQ ID NO: 233167 - DNA, 201 bp, Homo sapiens; identical to SEQ ID NO: 43342

SEQ ID NO: 233168 - DNA, 201 bp, Homo sapiens; identical to SEQ ID NO: 43338

SEQ ID NO: 233169 - DNA, 201 bp, Homo sapiens
tttcaaaatctctagtccattgttatgtagcacttccccttggcctgcctagaacctgcctggaaccactcatgaggttcagaatgaatagagtaagtacygtaacaatacataagaggaacaagaattcagatttaggaggtcaaggaagttttcctggagcaagtaaccagaaagaaatctggaaggtgaacagtagaa

SEQ ID NO: 233170 - DNA, 201 bp, Homo sapiens
cattcgctgctacataatttggttcttctggaatatttatatagctcttggagtacagctatgaaaattaacaactgttaaaggaaacacttttttttttygtaattttttccttgaagaaccaaagtattttttcagctgtttgttgaatagggttaagtctgcttggattagctgtgcctttcattactttgttacaga

SEQ ID NO: 233171 - DNA, 201 bp, Homo sapiens
ccagctacttgggaggctgaggcaggagaatggcatcaacccgggaggcagagcttgcagtgagcggagatcccaccactgcactccagcctgggtgacaragcaagactctgtctcaaaaaataaataaaatgttacagttcacagcatgtgtttccagagaggatgttttcctgatagtgctttagtggcatctcttcc

SEQ ID NO: 233172 - DNA, 201 bp, Homo sapiens
attagattgttaatggattattgtgttataggtgacatagttaactgtaaagtaacctgactcagtatagttactggtaccacagtgaggtgaataaaacrggatttttcagaagttagcctgaatttcactgtacttttaaatttaacctccattaactaagcatcttttctttgtggtagggtctaccttctgcttccc

SEQ ID NO: 233173 - DNA, 201 bp, Homo sapiens
aatgaaacctcaggcacaaataaagcaggacgaggaccctgagaaaataaaacttagaactcttattatatatgtaatttcagttcttcccaagggttaakaaagtcacatttttggtacttttcatgaaaaatgctttttaatttcaaatatgagagcaaaataaactgtataattaaatttaaaaagacacagtatatg

SEQ ID NO: 233174 - DNA, 201 bp, Homo sapiens
aaaatcaaggatgcaaaaatgcattcaggaacattctataaatgaatttttcccttctgtaatgaaatcgtaaaataacatgaaaaatgaaaataatcatrggagattgtttattctgccttatttccttcaccattgtcacctttgttaaaagtttccttcagatgaatacataagaaaaatccaaatccaaaagcttca

SEQ ID NO: 233175 - DNA, 201 bp, Homo sapiens; identical to SEQ ID NO: 43343

SEQ ID NO: 233176 - DNA, 201 bp, Homo sapiens
aaaggtaccaacatttccattctgaagcaagagactcacatttttagtttctcttctgctgtcctgaattaactgttaaaagatatgttaaaacatgcaawttaacaagcaaaatttaaataccaatgggttgaaattcaaaaagtgcaggataatttcctctttaaattactttttctgtgtgcatcttctatattgcaa

SEQ ID NO: 233177 - DNA, 201 bp, Homo sapiens
gctggtctcgaactcctgacctcaagtgatccaccttcctcagcctcccaaagtgctgggattacaggcttgagctaccgcacccggcctagagaatttarataatcttttcaaaaattgcattttctatctggttctggtgtatagaaatacaattactttatatatattacctttaaatctagcaactctgccaaactc

SEQ ID NO: 233178 - DNA, 201 bp, Homo sapiens
tgggaagtgtgttgttaggtgatttcatcattgcaaatatcgtagagtgtccctgcacaaacatagatagcatagcctactacacacttaggctatacagygtaccctgttgctcccagggtagaagcacatacagcacattactgtactaaatactgaaggcagtgataacgcgagggtaagtatttgtatacgtaaaca

SEQ ID NO: 233179 - DNA, 201 bp, Homo sapiens
ttgcaaatatcgtagagtgtccctgcacaaacatagatagcatagcctactacacacttaggctatacagtgtaccctgttgctcccagggtagaagcacrtacagcacattactgtactaaatactgaaggcagtgataacgcgagggtaagtatttgtatacgtaaacatagaaaaagtacagtaaactatggtattat

SEQ ID NO: 233180 - DNA, 201 bp, Homo sapiens
attatccaagtattgagatatatgcctactaaaaaatgttcatgttaattgaaaagtgtggagtaacttacagatacatcctctcactgttgggactcatrccataattatcatattttaaaataaataagaaatcatttaacccaaagcttcttaatcttttttttttctgcccacacacctgaaggatacaatacactg

SEQ ID NO: 233181 - DNA, 201 bp, Homo sapiens; identical to SEQ ID NO: 43350

SEQ ID NO: 233182 - DNA, 201 bp, Homo sapiens
cttctgcagaggatgggggcaaggaaggaaacaaatggaatttttttcttcaggcccacagtgtaaaacactaggaactgttatttctactacaagctacrggtttaaaaagtctacaagcaaaaaagataaatggttctacagacaaaaatcatttatttcaatatgaagtattagactgtttattactctgtgcagtaa

SEQ ID NO: 233183 - DNA, 201 bp, Homo sapiens
gggaggctgagatacgagaatcacttgaacccaggaggtggagattgcagtgagccaagaacgcgccactgcactccagcctgggcaacagagtgagactstgtctcaaaaaaaaaaacaaaagcaacaattcttgatactttaccttcttttcatcatctttatttcaaaactcttcaataagcatttattcataatagc

SEQ ID NO: 233184 - DNA, 201 bp, Homo sapiens
ctctgtggattgtacccatgtccaattttctcactttgttattgtactatagttatgcaagatgtccaacagtgggggagatgggggaaagggtacacagtggagggtgcatgggacctccctgtacatcaccctgcaacttcctgtgagtctataattatttcaaaataaaaaggtgttctaatgagggtgtagagaaat

SEQ ID NO: 233185 - DNA, 201 bp, Homo sapiens
ctctttattttttgtctcaaaggtacctgaagctgttcactttcctgccccttccagagattgatcatatcatgcagctgcatgtcaaagagccagaaagrcggggtcctcagaaacgactggcagcagaagtaacaaagcttgttcatggacgagaaggattggattctgctaaaaggtagtagtttagtatgattaaca

SEQ ID NO: 233186 - DNA, 201 bp, Homo sapiens
ctgaactttactatagtgtgttcgctaatactggaagctttaccactactaaaaatgacaccacatctgatttagccagggctctaagtaatactgatttytttttttaatattatataagctaaataggtttggtgcatttaaattaaacatagaacatgatctggaaactagcagacagcgtaaaataatacttcctaa

SEQ ID NO: 233187 - DNA, 201 bp, Homo sapiens; identical to SEQ ID NO: 43337

SEQ ID NO: 233188 - DNA, 201 bp, Homo sapiens
aatgcctaggtcaatgccaaattttaggaattatctcaggttggtgaaattaagagtggtttttttttccattttcagagatagggtctctttttttagcrccatctgcttgcagtgctgcctcttgctcctccccaccaccactgctgccctgagtcactgcctgcacagctccagccgcctggcttctcatagtagcca

SEQ ID NO: 233189 - DNA, 201 bp, Homo sapiens; identical to SEQ ID NO: 43347

SEQ ID NO: 233190 - DNA, 201 bp, Homo sapiens; identical to SEQ ID NO: 43339

SEQ ID NO: 233191 - DNA, 201 bp, Homo sapiens
gtacttacacaaacgtagatggtatagcctatgacacgcctaagctatatgggatagcctattgctccaggctgcaaacatgtacagcatgttactgtacygaatagggaactgtaacacaatagtatttgtgtatctaaacataggaaatgtacagcaaaaacatggtatcataatctaacgggaacacattcaaatacg

SEQ ID NO: 233192 - DNA, 201 bp, Homo sapiens
catgggacaattcgtattgtgactaaaacagtttccaatgactctttctttaattttcttgcccctcctgaagttcctgagagtggagatctggatgatgmtgctgaagctatccttgctgcagacttcaaaattggtcactttttacgtgagcatacaatcccaagatcagtgttatagtttactggagaagctactgaa

SEQ ID NO: 233193 - DNA, 201 bp, Homo sapiens
ggggaaaaaaaatcaaggatgcaaaaatgcattcaggaacattctataaatgaatttttcccttctgtaatgaaatcgtaaaataacatgaaaaatgaaartaatcatgggagattgtttattctgccttatttccttcaccattgtcacctttgttaaaagtttccttcagatgaatacataagaaaaatccaaatccaa

SEQ ID NO: 233194 - DNA, 201 bp, Homo sapiens
atatattagactaaagtgatctgaccttagcacagtatcccatattaatattcttctattcagtgtattgtttccagaagattatgttgtaccagagaacwaggcatgcaggcttagattaagaatcagaacagaccttgccatcagcctcagcagaagcagcgggggagggctcctgggaggcaggtgccaaagcacttg

SEQ ID NO: 233195 - DNA, 201 bp, Homo sapiens
agttcagaactttaaatctggataattaaggaaaggagctaaatggcagaaaatcttgaaatagcgatgagtctgaataatttatacattatttaattttyctctaaaatggttatcaagaattgaaaacagtctcaaactctcacagtccccatttgtttttttaatttgcttaagcttctgaagcatatgtgaagctat

SEQ ID NO: 233196 - DNA, 201 bp, Homo sapiens
aaaaagcttgatgcttaaatgcttaaataaatgcttaaatctacttttaagcatttatgtcagtgaattcaaaatactattatctttaaatcactcaaaamccattttaaacttgtatgcctttactcagttagttccaatggagtgttaaagggaggaaaagaagaaaaaattactcctaggactgagtaatattctgag

SEQ ID NO: 233197 - DNA, 201 bp, Homo sapiens
ctatatatagggtaacaagtgcaaactaactggaagcataagaaagaagcattagatctattagtactgaacagatctcaagatctttaaagaggaaaggraatgtccaaaaatacaattccatctctgaaatctaggaaatctctgaatttcctaccaaaatactaaatttaaaactattcttgaaggtaacaaaacagt

SEQ ID NO: 233198 - DNA, 201 bp, Homo sapiens
agtaatatctgcaatataaatgtgttgtctattagagacggggctagatgtcttaaggatttctaagtacatcttaaaatttataatatagtcgttcatamcaagaatcatctggggaattttaacaaaatatgtatatgttctaaacctcatcactaccccataaatgcagcttaggtctgtaagtctgaaggagtatgt

SEQ ID NO: 233199 - DNA, 201 bp, Homo sapiens
agttagagactatcctggctaacatggtgaaaccccgtctctactaaaaatacaaaaaattagctgggtgtggtggtgggcgcctgtagtcccagctactygggaggctgaggcaggagaatggcgtgaacctgggaggcggcgcttgcagtgagccgagattgtgccactgcactccagcctgggcgacagagccagact

SEQ ID NO: 233200 - DNA, 201 bp, Homo sapiens
tgatactttggaaaaccaagttaaattaaaaaggcaagtcagtgttactagccaaaataattaatgaaactactaaattaaaatttaggaaaaagattttmttaaatgactcaaaatgtggcagccagatagaacaaaagaatctctcatttttaatagctttttctagctgatacatgaggtcctagtcattctatgtta

SEQ ID NO: 233201 - DNA, 201 bp, Homo sapiens
atctacataatctagtattattcacacaaaagatatgtcacttaatgacacggatatgctttgagaaatgcattattaggtgatttcattacatgcacagcacagagtgtacttacacaaacgtagatggtatagcctatgacacgcctaagctatatgggatagcctattgctccaggctgcaaacatgtacagcatgtt

SEQ ID NO: 233202 - DNA, 201 bp, Homo sapiens
tgtttataccagaacgtgactgggcctccttgagtagctagcctctgctttagctctgcaccctccatgaaactagtgttagtccttggttggtatctcaraaagttttttcaactccaaataattgacaagtaatgcgggtctaatagcattttcttgagagaggtgaaggatagggctagctcatgtgcaacagagcaa

SEQ ID NO: 233203 - DNA, 201 bp, Homo sapiens
tctacataatctagtattattcacacaaaagatatgtcacttaatgacacggatatgctttgagaaatgcattattaggtgatttcattacatgcacagcacagagtgtacttacacaaacgtagatggtatagcctatgacacgcctaagctatatgggatagcctattgctccaggctgcaaacatgtacagcatgtta

SEQ ID NO: 233204 - DNA, 201 bp, Homo sapiens
tgtgatgtgttctgcaatttggaatacacttttcagtttatagccagtctccacatgagcagattcataccattgcaatacacaggagttcataaataagmttctactcaggtaggcagtaactagcaagttttgagtcaacaaagtctcagtattacatagttctcttcaccaaagatgagtctcccggatttcagcaat

SEQ ID NO: 233205 - DNA, 201 bp, Homo sapiens
tttataccagaattattaaaaattttcctttaaaatgagactgaaactcaacttgtttttcctcccaatacactggaaaacattatgcctacactctaaagtaaccatataatgcttattaaaaagcagccaagcaaaaatttaaacttttactaatagtaattacaatgatctatgctatagtagctcaccatttcattt

SEQ ID NO: 233206 - DNA, 201 bp, Homo sapiens
ctgttacatttctctccgttacctgtgtactgtaattgctacagtgctgaatgatcctttgcatttcctcatgaaccagttccacacagcggaggctgggmtcttctagacgtttgatttgccgcttcaccagtaactcaaatgaaacctcaggcacaaataaagcaggacgaggaccctgagaaaataaaacttagaact

SEQ ID NO: 233207 - DNA, 201 bp, Homo sapiens
actgtaattgctacagtgctgaatgatcctttgcatttcctcatgaaccagttccacacagcggaggctgggctcttctagacgtttgatttgccgcttcmccagtaactcaaatgaaacctcaggcacaaataaagcaggacgaggaccctgagaaaataaaacttagaactcttattatatatgtaatttcagttcttc

SEQ ID NO: 233208 - DNA, 201 bp, Homo sapiens
agtagaaaaagtcactgttttgtatggacttgcctcatctctctgcctaggacatggcaaggggtttagggtgtgttcctaggtatctaatcccatcctaratgaagtctgatatgtatgattggtgttttggttgttctaggtccaagagtttggagtttgtgaagttcgtgacctcaaacccaatggggccaacatctt

SEQ ID NO: 233209 - DNA, 201 bp, Homo sapiens
agaatctgtggcattcccagccagtgccctgggaaggagttctgccatttgcagacgggtgcttttgaaattcataatagctcaggagttttcttcttctwcagagtcaggtctttgctgcagatggtgcctccactgagacttccgcatctgggacctcccaaggagagggtaatgatttgcttttctcactaccatgtt

SEQ ID NO: 233210 - DNA, 201 bp, Homo sapiens
ggtatataagttcctggtgcttggtgaattgggacagggagtcaggttcgtcagtcacttatacagccgtgtgacgctcaacaaattatttaagtttgcarcacttctattcccttgtttataaaatgtaattaatgaccatattctgggaattatgtatataacatgtatacaaagtgtttgggcaaatacacaacacat

SEQ ID NO: 233211 - DNA, 201 bp, Homo sapiens; identical to SEQ ID NO: 43354

SEQ ID NO: 233212 - DNA, 201 bp, Homo sapiens
gataattgtatagtgattatccattttcctgttgatggacttgggtttctgagttttttccaggcttagacactaccctttcttttttttttttttttttwttacaaaatcagcagctagtatttgcaaatggtgtttgtatttactcttgaaatacatggttttgtgctggagatttggagtaaggaaacttaggcacta

SEQ ID NO: 233213 - DNA, 201 bp, Homo sapiens
actccctcattccaaaacatcttttgtgaatacttttcttttctcagcctgcagactgcagagccttaatagacaaactcaaagtttgtaatgatgagcarcttctcttggaactgcagcagatcaaaacatggaacattggaaaggtatgtgaagtcaagctcccaaaagacaggactcaccatactaatacatcatttt

SEQ ID NO: 233214 - DNA, 201 bp, Homo sapiens
agggggaagtttaatatggaagcacccagtgaggtcacgatgtcctgcttataatttcacactcaaacccactaaatattctgactccttctccctcacgwgtccgacctctggctcttctatgccacttttagccacctgtatttcatttgtagtatcccatttaacttccccaactcccctctcttctttctcacctcc

SEQ ID NO: 233215 - DNA, 201 bp, Homo sapiens
tgataattgtatagtgattatccattttcctgttgatggacttgggtttctgagttttttccaggcttagacactaccctttctttttttttttttttttytttacaaaatcagcagctagtatttgcaaatggtgtttgtatttactcttgaaatacatggttttgtgctggagatttggagtaaggaaacttaggcact

SEQ ID NO: 233216 - DNA, 201 bp, Homo sapiens
ttgggataacctggcagagctctctctctctgtatttacttacttacttatttacttatttatttttgagacagagtctcactctattgcccaggctggartgtagtggcgcaatcttggctcactacaacctctgcctcccgggttaaagcgagtctcctgcctcagcctcccgagtagctgggattagaggtgcctgcc

SEQ ID NO: 233217 - DNA, 201 bp, Homo sapiens
cagtaagtcgtagtgattgtaattgaagccagaagctctcatataaaagttcagctctaccaaactattgtccagtgttcccagaggcaacttcttaatayatacttagctttgagaggtaacccactgttggaaagctttcttagaagaaaagtgttatggctggctttttaaaagcatatttaatgcttacctcaaagt

SEQ ID NO: 233218 - DNA, 201 bp, Homo sapiens
tagctaagctacccaacaattcccagacagacaggaaagtctttggtgtttataaggatatacctgctggctttgcaatgagagctttaatattgctataytaggaatgaccatgtatgagtggcctccaccaaactggtaactgctcactggtgattctgaagccacctagaggagatcagcagtttgtaatactgagcg

SEQ ID NO: 233219 - DNA, 201 bp, Homo sapiens
ttggacgagctgtgggacatgcttggggagtgtctaaaggaactagaggaatcccatgaccagcatgcggtgctaggtgagttgtgtcctaaaggcccagstcccaacccagtggtctgctctggggcccttcctgccagcttgtttttcttccttccaggttactcctctccctcagtgtctctgtaatgagaattcaaa

SEQ ID NO: 233220 - DNA, 201 bp, Homo sapiens
ccttggcttcttcatctataaagtggacctaataatcactcattgggtgacttaaggaaatactatgtgtgtgtgtatctttggtcctgtgcaaatgatayggcataattgtgcttgtaagtaaatgtcgtgattcatgacttttcaggactgcagtgtgctagcttttgttctggaccacctgctcccacatacccagaa

SEQ ID NO: 233221 - DNA, 201 bp, Homo sapiens
caattgatcctcccacctcagcctccctagtagctgagactacaggcatgcaccaccacacccggctaattttttatattttttgtagagatggggtttcrccatgttgcccatgctggtctccaactcctgagctcaggcgatccactcgccttggcctcccaaagtgctgggattacaggcgtgagccactgcctgtcc

SEQ ID NO: 233222 - DNA, 201 bp, Homo sapiens
gttacatatgttagccattcccttttcccttttaccactgatagttgccttactctcttctgccttttttgtaggtcttagagccaaagagtattttcctstttcctacccaaagcctttccctataaggggagttgcgagctatgagtagtagaaaaagtcactgttttgtatggacttgcctcatctctctgcctagga

SEQ ID NO: 233223 - DNA, 201 bp, Homo sapiens
aaagtgctgggattgcagacctgagccaccgtgcctggccagcaattgacttttgtatattaaccttatatcctgcaaacttggtgcaattgcttgttagytccagggtgtttttccttatttcagattttctgcatgtatgatcatgtcatctctgacaaaaagacagttctgtatcttccttcccaatctttataattt

SEQ ID NO: 233224 - DNA, 201 bp, Homo sapiens
taagtttttcagttttggggtgctaatataaatgttttttatttcaaattctgcttgttcgttgctggtatataggaaagcaattgactttttttttttttttttttttttgagacggagtcttgctttgtcgccccaggctggagtgcagtggcgccatctcagctcactgcaagctcagcctcccaggctcatgccatt

SEQ ID NO: 233225 - DNA, 201 bp, Homo sapiens
aatatcatatgaattccctaggtagcatgtctcaaactgtattctttggaatacttcaattggactttgagtagatgccacttgagaaaatggttctgtgygctaataagcctcctttacctaagatgtcttagagccattaataatgtcaattagctatgtgactgccctagtggaagagaaattctgtctataacattt

SEQ ID NO: 233226 - DNA, 201 bp, Homo sapiens
agaagagaaaggagaggtaaaaaggttgttgggtaggcaacaacatccgttaggctggcacatcacttgagcccaggggttcgaggccagcctgggcaacrtggcaaaaatcttgtctttacgaaaaatacaaaacttagccgggtggggtggcatgcacctgtggtcccggctacttgggaggctgagttgagaggatca

SEQ ID NO: 233227 - DNA, 201 bp, Homo sapiens
tattatacatggtcatgcagtatggattcttgtggttaaatatttgtgtacatctttacgactttctttggattaattcctagaaatggaagttatcaggraactgcagggctatggtgaatttttccatcctgagatgtgttgcaaacattgtacactcttattttcaattaagagtttgagatgcttgtaaaagagaaa

SEQ ID NO: 233228 - DNA, 201 bp, Homo sapiens
gctcaggtggggtgggggagggggaagacacatgacaagctggggaaaatatttgtaacccagtgtagttaatattttcagtagctaaatcaggagaaatkaatatcccaatgacaaaatgggcatagggcatttaagaaaagaacaaacccagtaaacgtccagcaagattcaacttagcgggtaattggagaaatgcaa

SEQ ID NO: 233229 - DNA, 201 bp, Homo sapiens
ctgacattgcagctgaggctcaagccctgagacgagagcaagaagcccggcagcgacagctcatgcatgagcgtctgtttgggcacagtagcacctccgcrctctctgctattctccgaagcccgggtacagagggaggcaagtgggagggctctggaaagctttagccagatgaggctatgttttcttacctttgtatta

SEQ ID NO: 233230 - DNA, 201 bp, Homo sapiens
acttagctttgagaggtaacccactgttggaaagctttcttagaagaaaagtgttatggctggctttttaaaagcatatttaatgcttacctcaaagtaaytcaagttttcaggctaattcaggtgccatgattacttataaattagttttgtataattataaatataacatgtattctgaaaattctaggaaaatgtaga

SEQ ID NO: 233231 - DNA, 201 bp, Homo sapiens
agtcattaaaaatacagctttgatcatgttaatttggttatttgtataggaccacaatagcatctgacagaattcacatcaccctacttttaggctgatayaaacacactaatatttcatactttaattaaatgttctgacaatttaagtagaagttaaaatgcaaactgtttttggtataagtggctcacatatataaag

SEQ ID NO: 233232 - DNA, 201 bp, Homo sapiens
ctttaaagtcacctgtataactatagggttcttttgatggctgcatagtattccatgctttggatgtaccatattttactcaagttccctattgatgcatrcttatatttgttatgaatgatgctacattaagcaatcttatatatgaatttagttactgatacatttaatatgatattataagagatgatatggagatca

SEQ ID NO: 233233 - DNA, 201 bp, Homo sapiens
ggtgtttccctgggaacttgctggccttccagagatctgtcatagtggcgtgggaatctgccccacaaagaattccttcaaaatgcagccttgtttggctrtcctcacacgtagccttgtcttttcctttgtcacccattcgtttattctctgagaacttacaaacttgcccaaggaagggaccttattgtctttgcgctt

SEQ ID NO: 233234 - DNA, 201 bp, Homo sapiens
gtgattctgaagccacctagaggagatcagcagtttgtaatactgagcgtaggagctgatgagatgaaagacctattggagttgtttaatgattcctcccyatctcttgtggtgtgggctctccaactgtgtaatcacaagaagtcagggagtctccctagacagactgtatgccatgttcttccaccaccaaataccttt

SEQ ID NO: 233235 - DNA, 201 bp, Homo sapiens
tttaggctgccaggtgtagaaggcttcattttaaacaggattgtttcatacagttaatccttagttgatgagagagagagagagagagagagagagagagwgtgtgtgtgtgtgtgtgtgtgtgtgtacatacacacacccgtgcacgtaaaccctgcatggtttcccttggcctcaggatactcaggtttagaatagaaa

SEQ ID NO: 233236 - DNA, 201 bp, Homo sapiens
aagcctctagtgaggatgaggaggaagaggaagtacaggccatgcagagctttaattctacccagcaaaatgaaactgagcctaatcagcagtaagtgttkacagaacagatcatctagccatataatcgtgggcatgttatcacctctctaagtcttaatgaacactttcatctataaaaagcaagagagttgtattaga

SEQ ID NO: 233237 - DNA, 201 bp, Homo sapiens
gccaactgctgtatccgcatcgcccttcctgcccctcgaggctcaggaactggtaagtttcgcttgctcctggcctttgatattaagtttgtggcctggtrtaaatccagaaatttatttatgaggaggtctgtaacttgaagagcctccttaggcaagtattaggacatttgctggctaattgattgtttgggtcaattt

SEQ ID NO: 233238 - DNA, 201 bp, Homo sapiens
acttctagttagatctagaggctttagaggcttattgaagcagtttaaacattttgggctgaaatgtgtagcctaggtgatgtatagctcatattgtatcrtgggagacacatctcccatgataattgtcactttttgttcttactagaaagtcatctctgttgttattttggcactttacaaatgtctacactatcaatc

SEQ ID NO: 233239 - DNA, 201 bp, Homo sapiens
ttcctaagagattacattccgttacatatgttagccattcccttttcccttttaccactgatagttgccttactctcttctgccttttttgtaggtcttaragccaaagagtattttcctctttcctacccaaagcctttccctataaggggagttgcgagctatgagtagtagaaaaagtcactgttttgtatggacttg

SEQ ID NO: 233240 - DNA, 201 bp, Homo sapiens
agcactcttcataactcacttttcacaatggagtttttttcaaacttaaaaaaaaaaacaaaaaactcttaagcacatgctaggcatctggagaaaagatkgattctccaggaaaccatccctgccctacccgcttgcccacctgcctccaccactggtgcaacttcctccttcagagtcagtttctgcagtcaggagaga

SEQ ID NO: 233241 - DNA, 201 bp, Homo sapiens
gtaccttagaggaggctgtgggtgacacttcagcagctggcagttctgagcagcccagagcaggcagctccactcctggggatgccccaccagctgtggcrgaagtgcaaggcaggagtgatgggtcaggggaatctgcccagccacctgaggacaggtaagcatgtgtgggcaaaagaagggtaggatatattggagggt

SEQ ID NO: 233242 - DNA, 201 bp, Homo sapiens
agcaaataaataaataaatagaaaaaggcctagaattttatacagtgcctcctcctctgttctcttaatattggtattgtgaatttctgtgtaactcactmttttctcccctaacagggttgttggtacagaggaacgtattcctattcccctcatggattacatccttaatgtggtaagattcaacacagggcaaactga

SEQ ID NO: 233243 - DNA, 201 bp, Homo sapiens
agcttttcctatttccatccccaaaattctttctcaagactaataatacctttagtagtggaatctgtcaattcagtgtctgtttagagattatcagttgkatttgatccagtccttcagaatttaatttggtgatgattctgccctccattgctggttgggaatggaattcttccccagaacctatagataccaaaaagt

SEQ ID NO: 233244 - DNA, 201 bp, Homo sapiens
ttgggccagccgcatgccgcaatccagacatattcacagaagtggccaactgctgtatccgcatcgcccttcctgcccctcgaggctcaggaactggtaartttcgcttgctcctggcctttgatattaagtttgtggcctggtataaatccagaaatttatttatgaggaggtctgtaacttgaagagcctccttaggca

SEQ ID NO: 233245 - DNA, 201 bp, Homo sapiens
caagtgtagtttgagaaagcttatttctcacaggatagtcagatgatgttttatttattcatttatttatttacaggtttagaaatagcattctatagtakgtacctttgtgactggcatcttcagtggtttacactgtttgtttttgagacttctttggcaagtagtgatataatagcatttaacaaagaggaaacactt

SEQ ID NO: 233246 - DNA, 201 bp, Homo sapiens
aaagcagaagagttgggaaaggcatccttttgtcctggatagctacagttttccccacccaaatatgggaagcttctttgcaagctcaatgtatgagaagyggaagggccaacctctagcctgtctctaaggaaagcagagttgcacccttatgtgatttttgtctcccttttatccagtcggagtctagccagtcagagg

SEQ ID NO: 233247 - DNA, 201 bp, Homo sapiens
aaagacagccatctcctcaaaaaggagagcccagatgactaaggtgtgtaatgtagtatgtatgactgcaggacggtttagcttcctgaggcaagagtagmccagaagagaatatgagagagtagtgaagaatatagaagtctctgaccaatgtataaatctcttaagggattttcatagctaggtttctcttctgaataa

SEQ ID NO: 233248 - DNA, 201 bp, Homo sapiens
ttttttttaatagatatgcttgtagctatcgttcactgtccccctactctttctcttgccattgtgtcttcctcctctctcatcctttcagggatatcatyttgaattaagtcacaaaatattcagtagtcaatactgtgcatttaacttcttttactgtggcacagtaaaatggaaaacacgtggttttgtaatcagtcc

SEQ ID NO: 233249 - DNA, 201 bp, Homo sapiens
aacccccattttataggagccagaaccactcagtgacttagccatgggcaacaaaaactttattgtctctaggtacttgttatgttctaaacattgtgatrgaccttgggtccttttagggaaatactgcaatttttggatcggtggatcagttaatgcttgacaaggccaagaatctcattcccctttgctgtccctaca

SEQ ID NO: 233250 - DNA, 201 bp, Homo sapiens
tccagaactttccccagttcagtgcactgcgcttccttgtggtaactcagaaagtgagtattcagtattctaaaatcaaaaggaatttctcatgctaagtmgttcccactctattttgtcctgcttaatgaaataacatgcttatttaagaaccactggatccaactcccagatagggctgccttacgtaagggaatatag

SEQ ID NO: 233251 - DNA, 201 bp, Homo sapiens
ccctaaagagcgatcttacagtctcttctgtttctagaaatcaactgtgtatctgcttgcagtgtttttccattataatagtttttaatccctgaaaaaawatatatatatatatatacttgattttcttataacctttctcttgattgtagcatgaagtagatttgtgccgaaaagaatgtccgtttgtgatcaagccaa

SEQ ID NO: 233252 - DNA, 201 bp, Homo sapiens
tctcttctgccttttttgtaggtcttagagccaaagagtattttcctctttcctacccaaagcctttccctataaggggagttgcgagctatgagtagtaraaaaagtcactgttttgtatggacttgcctcatctctctgcctaggacatggcaaggggtttagggtgtgttcctaggtatctaatcccatcctagatga

SEQ ID NO: 233253 - DNA, 201 bp, Homo sapiens
atgctggggagataaagctggtttctgtgagaaaggggtattgtagcagtgttttataaacgagaagacataatacagacagcaacctgagcatgatttcsctcagctccccacctgcatcctctgagagctcttccaccagagattctgccgtggccatttctggagcagattcccgaggaatcctagaagagccgttgc

SEQ ID NO: 233254 - DNA, 201 bp, Homo sapiens
ctaaagagcgatcttacagtctcttctgtttctagaaatcaactgtgtatctgcttgcagtgtttttccattataatagtttttaatccctgaaaaaatawatatatatatatatacttgattttcttataacctttctcttgattgtagcatgaagtagatttgtgccgaaaagaatgtccgtttgtgatcaagccaaag

SEQ ID NO: 233255 - DNA, 201 bp, Homo sapiens
gtctttagaagggaaaaacaaagctctccttttctacttttctcttaaaatgtctaaaatgtgcctcacccttgagtcaggttcgtcccctggactaatamtgaataaatgttttttcctatgtaacagccgcttgaacaactgagtccccatcctgatgaatacttgtgacctgatatttgtcctctttttcttttctct

SEQ ID NO: 233256 - DNA, 201 bp, Homo sapiens
cacaatcctatgagatagacttgtttattttacagaggtgactggactcagagatgtatggcaacttgtctaagatcacacacctagtaaatggaatttargcccagatctgtctgtttcccaggcttttccattatgctgttgtcctttacttcatttttacttttcttccagtggtagtcttcagcctctacttttttt

SEQ ID NO: 233257 - DNA, 201 bp, Homo sapiens
ttttagagtagttttacattcccagcaaaatcgagcagaaggtacagaaatttcccatatactgcctgcctccacacaggcatagcctcccttgttatcarcatctcccactagagtggtacacttgttacaattgattaatctacattgatacatcattatcactcaaaggccatagttaacattagggtttactcatgg

SEQ ID NO: 233258 - DNA, 201 bp, Homo sapiens
agttaacattagggtttactcatggtgtatacttttggggtttagacacataataacatgtgtccaccattgtagtatcatacagagtagtttcactggcyaaaaaatcctctgcgctccacctcttcattcttccctccccactaaccctcctcaaccactgatctttttactgtctctatagttttttcttttctagaa

SEQ ID NO: 233259 - DNA, 201 bp, Homo sapiens
accctaaatatcaaccatagaaaacattttttcttcttaaggaatggtctctgcagaaatgttttagaacgtattctgaatttttcacaaactcttccttsaatgcctgctgattgaatggatacaggtcgtacaggcaaatacacgctatttccatagtactgagtatattggactaaatctaggcaaaaagctgcctaa

SEQ ID NO: 233260 - DNA, 201 bp, Homo sapiens
gattcttgtggttaaatatttgtgtacatctttacgactttctttggattaattcctagaaatggaagttatcaggaaactgcagggctatggtgaatttktccatcctgagatgtgttgcaaacattgtacactcttattttcaattaagagtttgagatgcttgtaaaagagaaaaaattttcattttgacctgatttg

SEQ ID NO: 233261 - DNA, 201 bp, Homo sapiens
agccagttatactgttccctggtgtgggaaagcactgtcctcctctctctgtgtaccccaaacaggtaagagaatggctctctctcttattactttgttayctaagttcggtgagcctggaggattgctttggttggggataggagggtatggaagagagttcagaggcctccttgtccttccctcttcccagcctaggaa

SEQ ID NO: 233262 - DNA, 201 bp, Homo sapiens
taggctgccaggtgtagaaggcttcattttaaacaggattgtttcatacagttaatccttagttgatgagagagagagagagagagagagagagagagtgwgtgtgtgtgtgtgtgtgtgtgtgtacatacacacacccgtgcacgtaaaccctgcatggtttcccttggcctcaggatactcaggtttagaatagaaatg

SEQ ID NO: 233263 - DNA, 201 bp, Homo sapiens
tttaagatttgttttacggtggggacgtctcaaggccaggggcagggagaatgcccgtcttctgggagaaagtccagaacagagagaaagagaaaaggatrcacaggcatttttctataaatgggaagcttagaagaaggagcaattgccattgacagggatattgtttaaaagagggaggcagcaagaggatatagtgct

SEQ ID NO: 233264 - DNA, 201 bp, Homo sapiens
tggaaagtatctcattttgaggctagaaaggggacaaaggaagcactaattgtgttttttcagatgtcatacaactaaggcaatcggcaaaagagagatcmatttaagagaccattgtccatttagtaagtttaagagagcattgaacaagccattatgcctctattaggcctgctttctgtgaacagtacaacagatggg

SEQ ID NO: 233265 - DNA, 201 bp, Homo sapiens
  misc_feature (1)...(201): n = A,T,C or G
ttttcccatgttccagaagctttggtagttattactgcacattttaaaatattataatgtcaaaaactgatcagattaatattcaaggactcttgcattgntggtgatagtttaaaattgttgaataacctttgtatgaggcagtttatctattttcatcagtaaagcttgcatttgctttaacccagcaagcccacatca

SEQ ID NO: 233266 - DNA, 201 bp, Homo sapiens
gtttgtggcctggtataaatccagaaatttatttatgaggaggtctgtaacttgaagagcctccttaggcaagtattaggacatttgctggctaattgatygtttgggtcaatttattaggtacttcagtagcttctctgggccttgccctgttgtaatccctgccagagacactgaggactcattcattctagtccttca

SEQ ID NO: 233267 - DNA, 201 bp, Homo sapiens
acactggcttcatgggtcccttcctacagatccagtggttctggagagcattgcgttctttcgatcaagctgaccgtgccaagttcctccagtttgtcacrggtacttccaaggtacccctgcaaggctttgctgccctcgaaggcatgaatggcattcagaagtttcagatccatcgagatgacaggtccacagatcgcc

SEQ ID NO: 233268 - DNA, 201 bp, Homo sapiens
agtgtctaaaggaactagaggaatcccatgaccagcatgcggtgctaggtgagttgtgtcctaaaggcccaggtcccaacccagtggtctgctctggggcycttcctgccagcttgtttttcttccttccaggttactcctctccctcagtgtctctgtaatgagaattcaaaagagaagtgttttttctctgacttcagt

SEQ ID NO: 233269 - DNA, 201 bp, Homo sapiens
atgactggatgtatcctgggttttctgcacagctcttttctgcttctgctttcttatgcaggtatatagtatttgaaggagaagaagggcaggatgctggygggctcctgcgggagtggtatatgatcatctctcgagagatgtttaaccctatgtatgccttgttccgtacctcacctggtgatcgagtcacctacacca

SEQ ID NO: 233270 - DNA, 201 bp, Homo sapiens
agttagttacttccaagatacaatgggggtataggcattgggtaaatgttcccatttcaaatgggagaaattagccaaaacaaagggccccaggtcccatscaagtctgaaacccagtggggcagtctttaaatcttaaagctctgaaataatctcctttgactccatgtctcacatccaggcaacactgatgcaaggggt

SEQ ID NO: 233271 - DNA, 201 bp, Homo sapiens
tcgcaccactcttctccagcctgggcaacagagtgagactccatctcaaaaaaaaaaaacaaacccagcttaacttcactggacacagtggctcacatttrtaatcctagcactttgggaggctgaggcaggaggatagcttgagcccagggggttgagactagcctgggcagaattaaccagttgtggtggtgcatgcct

SEQ ID NO: 233272 - DNA, 201 bp, Homo sapiens
tcataatcccagcactttgggaggctgaggcagggggatcatttgagctcaggagtttgagaccagcctgggcaacatagaccccatctctattggggggraaaaaaaactctccaaaatcgatggtgttatttacatgagtaaactgaaactcagaaatgaaataattagcccaagtcactctgtaagtggttgaactag

SEQ ID NO: 233273 - DNA, 201 bp, Homo sapiens
tggagcacaggctggatgttgaattaagggcatcaggttccagcagcagcactaacatctcttctggccccagccctggtcccagtcccggcaccggcccyggccccggccccggccccggccccggccctggccccggccccggccccggtcctggtcccggccctggccccggccctggccctggcccccgtcctggtg

SEQ ID NO: 233274 - DNA, 201 bp, Homo sapiens
ggaatgaccatgtatgagtggcctccaccaaactggtaactgctcactggtgattctgaagccacctagaggagatcagcagtttgtaatactgagcgtasgagctgatgagatgaaagacctattggagttgtttaatgattcctccccatctcttgtggtgtgggctctccaactgtgtaatcacaagaagtcagggag

SEQ ID NO: 233275 - DNA, 201 bp, Homo sapiens; identical to SEQ ID NO: 43361

SEQ ID NO: 233276 - DNA, 201 bp, Homo sapiens
agtatttagggctatccccggggaatttcaaagatattaattgtgatgtatctgtaaattatctgttgcctgtaaagacaaaattggggtgtccctggagmcttttttttctctcctaggattagaactgttctttaattttttttcttttccctttccttccccgcctcccccacagtctcccagtcactgtatttataa

SEQ ID NO: 233277 - DNA, 201 bp, Homo sapiens
agctgtagcaggtgtttgtgagtgacatcacaaacaggaaaaccagaatttgcaggccatttcctagtttcacctttattaaaaaaaaaaaaaaaaaaaaactccagtacataattcctcattcccaagggtaggtctttgtagaaaaatcgtacaaatgtaagtggggggaaaatgaaggcagttaaggttactcttctc

SEQ ID NO: 233278 - DNA, 201 bp, Homo sapiens
tccgccaggtgtggtggcacacccctgtggtcccagttacttgggaggctgaggtaagaggatcacttgagcctgggaggtgaaggctgcaatgagccagkatcgtgctactgcattctagcctgggcaacagagtgagaccgagactctgtctctaaaaaagaaaagagaatatttgttactatttgtatgtaggtgatg

SEQ ID NO: 233279 - DNA, 201 bp, Homo sapiens; identical to SEQ ID NO: 43352

SEQ ID NO: 233280 - DNA, 201 bp, Homo sapiens; identical to SEQ ID NO: 43364

SEQ ID NO: 233281 - DNA, 201 bp, Homo sapiens
cactgaataccacaagtaccagtccaactctattcaggtgagctgctgctggcatccctcctcatatggtcctcttaccctaggcaacgctagtttgtgtrataccaaataaaccagtagtactcttagaggaagttgcatgtagaagacagtctacctatatctaactctttgttctcctgaagcatagcagacttctct

SEQ ID NO: 233282 - DNA, 201 bp, Homo sapiens
agccttttccctcttggttcacctccccataacctcaaatgtattcttctctatatattatcttcatattatattgactgttgagggtgtttttgtccttmagttacaaatgcaggataccttacatccttgttttcttatttcagaccttgttcaaaaatcactttaaagtcacctgtataactatagggttcttttgat

SEQ ID NO: 233283 - DNA, 201 bp, Homo sapiens
ccactgccacctcaaccacatctaccaccaccaccactgccgcctccaccacgcccacaccccctactgcacccacccctgtcacttctgctccagccctkgttgctgccacggctatttccaccattgtcgtagctgcttcgaccacagtgactacccccacgactgctaccactactgtttcaagtaagtgtggatgta

SEQ ID NO: 233284 - DNA, 201 bp, Homo sapiens
tttctgacttactctgcaatggtccataaattctgttctttacaagtgtttacagtaaaagcagaagcataggaagaggctaaaatggaaatcttatattsaaggcatagtggagttacatcaagtagtaatgttatgaaaaattaactcagagcttttcctatttccatccccaaaattctttctcaagactaataatac

SEQ ID NO: 233285 - DNA, 201 bp, Homo sapiens
tctgcttccttggtcatttctaactaagccgtggcttgacaaatcattttccctacctctttcctcctgtcccacagaaccctctcgcacaaaaccatccrtctgtctagcatcatgccccctgcccttatctgtaatggtaaatcttagcgcctgatgatgagcactctgaagcttcctgagctaaagctcaaaagacct

SEQ ID NO: 233286 - DNA, 201 bp, Homo sapiens
gaaatgtggcccactgggagggctcctttgtcagagtcagctgtctcctcaaaagctggaggaagcacctgaccatccccccatcccaaaaaaccccatawacatcatactatgacactaaattgatatcctcctttacttttgatgggggcatgagctggggctccaccaccataaatactgaaaattgaccagagtttg

SEQ ID NO: 233287 - DNA, 201 bp, Homo sapiens
ggaggcaaactgtcctcagttactttctggttaacctgtaaagagaatggatattgtgaaccagatttattctccaacaagagctttctgaaaccttagtmacctacaaaacttttgttttcacttgcaaataaaatgtataaggggcattttaaaaattgggaggccagaaagaggagaggggaaaggcatgtaaagtcc

SEQ ID NO: 233288 - DNA, 201 bp, Homo sapiens
caagcagtgaagacatatacactggtttccctcaaggagtgacatgggtttattttctccaagtacatattaggcaccaatagaggtgtgagaggctgggygcggtggctcgtgcctgtaatcctgaaaatttgggaagcagaggtcagaggatcacctgaagccaagagtttaagaccagcctgggcaacatagggagac

SEQ ID NO: 233289 - DNA, 201 bp, Homo sapiens
atggccaaagcattctccattagatcactgaactcctagatggtctgggtggaggatggtgactattacagttgacctctatcttaggtgcttgcaaagtyccacattggtctatcccttctttttgcagtgtactgcatctaagtcaaatgactccactgaacagaatctctcaggtaactctccttccctttctccctt

SEQ ID NO: 233290 - DNA, 201 bp, Homo sapiens
agtagtcacttggtaattctggatgaaaagtatatagatgtttattatactattcgaacttttctgtaggtttgttggatttgtttttttattttattttwtttttttaattttttttttttattgatcattcttgggtgtttctcgcagagggggatttggcagggtcataggacaatagtggagggaaggtcagcagat

SEQ ID NO: 233291 - DNA, 201 bp, Homo sapiens
atcaggtttataatcatgttctgcatttaatagaggatgcatgaagaggatctcatggtaacaggttgcagggcacctctggacttaacagtgatcatggwacccaccattaccctacaggttgcttggtccctcagctgctgctgacatccttcagctgagcagcagccttcccctacaaagccggggtcgggcccgcct

SEQ ID NO: 233292 - DNA, 201 bp, Homo sapiens
gaaaagatatttaagtggcccacagttctgcaagctttggaagcatggtgctagcatctgctgggcttctagggaggcctcaggaagttcacagtcatggyggaaggttaagtgggagcttgcatgtcacatggcaggagccaggaggtggagggggtggtacacactaactcactatcatgaagacaacactaaacaatg

SEQ ID NO: 233293 - DNA, 201 bp, Homo sapiens
ctgagcaggatgcccaaggagcctctcaagattccagtagcaaccagcaggacccaggtagggaatcagagccaatggactggagaggtgggagtagttgytttatgggcctgggatcacaactgttctggcttggtggtgtttccctgggaacttgctggccttccagagatctgtcatagtggcgtgggaatctgcccc

SEQ ID NO: 233294 - DNA, 201 bp, Homo sapiens
cccgggttcatgccattctcctgtctcagcctcccgagtagctgggactacaggcgcccgccaccacgtccagctaatttttgtatatttagtagagacgrggtttcactgtgttagccaggatggtctcgatctcctgacttcgtgatccacccgcctcagcctcccaaagtgctgggattacaggcgtgagccaccgcg

SEQ ID NO: 233295 - DNA, 201 bp, Homo sapiens
aagaggacagcagtggcagtaacgaggatgaggatgatagtcaggatgaagaggaggaggaggaggaagatgaggaagatgatcaggtgaggggggactgygtttgggttggttcagatgacctcttccatgggaacatagagctgcagaaaaccaacagtctgggttgctagcctcagcgtctccctccctcatgtgcac

SEQ ID NO: 233296 - DNA, 201 bp, Homo sapiens
tccctcattgagggcttcttaggcctgaactgtttggttaatgtggtctgtcaggagttacaacatgtctcggtaacctctatgagttgagtctgtgttayagaattggaaatacctaaacttgtgcccgttacaccaaagattctgatgaggcccagaataggtaaaaagtgctcctttttgtggcaagacttgataaaa

SEQ ID NO: 233297 - DNA, 201 bp, Homo sapiens
tttaggtttttttgtgttttttttgttttgttttgttttttgttttttttgagatggagtctggctctgtcgcccaggctggagtgcagtggcgcaaactsaactcactgcaaggtccgcctcccgggttcatgccattctcctgtctcagcctcccgagtagctgggactacaggcgcccgccaccacgtccagctaatt

SEQ ID NO: 233298 - DNA, 201 bp, Homo sapiens
agcattttgaggcccttcctctctctttagcttgagcacaagatgtctgattgcctgtgagttgcagtggtcttgttgggtttctttgttttgagtgtgtrtccttactggatattctcttaacactctaggatctcagcatgtctgaagaggaccagatgatgagagcaattgctatgtctctgggacaggatattccaa

SEQ ID NO: 233299 - DNA, 201 bp, Homo sapiens
gtagtatcccatttaacttccccaactcccctctcttctttctcacctcctgccttacccctcatgttatctgttcgggtctgtttgtagcctatgctaaygtcatcatgcttatgattgaccacttaaccagagagtgtagcaagttgtcaatatgagtattgaaatcctccaagggagcaagatatagttgtatgagta

SEQ ID NO: 233300 - DNA, 201 bp, Homo sapiens
tatcctttactggctttacattctccagctttagatccttcactttccttttgctttaagttttcatatagtgagttcattattttcttgaattgcattaraatctatagatttgtctttattatggcaatcctgtacccacataaacgtgcattttcaatatgaaataaaaagatttcacaaaagtgcaaggttttcaag

SEQ ID NO: 233301 - DNA, 201 bp, Homo sapiens
ggcacaaagaacatattgggaggctagggtttgagtagggctagtggcatggggatgcaatggcatttgggcccagggactgtgatgaccttctgccttcytttactctcttctctgtaaccttgactttccaaactctgttggattcattttcagttctattgaagtacatctgtgggtaatttttaaggtgtcagactt

SEQ ID NO: 233302 - DNA, 201 bp, Homo sapiens
gtcagaagctgcttctcctattatcttgacattctttaagccaaatctctttctaaaattatcaaattatcctttactggctttacattctccagctttaratccttcactttccttttgctttaagttttcatatagtgagttcattattttcttgaattgcattagaatctatagatttgtctttattatggcaatcct

SEQ ID NO: 233303 - DNA, 201 bp, Homo sapiens
catgattactaataagtaatcttatttcctgtgcctttcagttacttgaagaaatctgtaatcttggaagggaccccaaatacatctgtcagaagccatcratccagaaggcagatggcactgccactgctcctcccccaaggtctaatcatgccgcagaagaagcctctagtgaggatgaggaggaagaggaagtacagg

SEQ ID NO: 233304 - DNA, 201 bp, Homo sapiens
cttttgtctgtatgaaaaaccctttcaggcagataccctttctcaatgatgttcttagtggtgtctgggaacttatctgttgcctgttggttggttgtcaraagctgcttctcctattatcttgacattctttaagccaaatctctttctaaaattatcaaattatcctttactggctttacattctccagctttagatcc

SEQ ID NO: 233305 - DNA, 201 bp, Homo sapiens
tcatcatctggtatcggttcagaagcactcatctctatcaagacgtcttctgttacttgctctggtgtggtgtttattagctcttgaatttcactgagatycatatcctgaaattcttcacccatgaccttttttttgctatatccacaaactcgtgatttccttgattggcgctgtcataaatcctgttaagttctgcac

SEQ ID NO: 233306 - DNA, 201 bp, Homo sapiens
cccccaccatatacacctactccccgattcaggtgaagttcagcttgagattcagggactagaaagttacaataaaaaatatgtaagttgttcctatactwcttaaaatggagtgtgagccactgaatttgagaatttggaggtcccttgtttactctagaaaatgaagtgtaagttacttgttttggttgtacctagtac

SEQ ID NO: 233307 - DNA, 201 bp, Homo sapiens
aaagattgctgatggaagtataagttgatagaacctttttggggttgactgtatgcaccaggaagttttaaaatactcatttcctttaacttagattttargctgcttatagtctagcctaataaagtaattgtttagtggtgatcctttagtagcatacatcttttgatatagattctaaatccctatggtaaatatgtt

SEQ ID NO: 233308 - DNA, 201 bp, Homo sapiens
ccttaccagtaacataaacagtcgatggacacacgttttgtatatgtattatatcctgtattcttaaagtaagctagataaaggaaaatgttaaaatcttmagagaaaaatatatttactattcattaagaggatcatcatagaggtcttcatctgggtggtcttcacattgagtagctgaggaggaggaaggaagtgggg

SEQ ID NO: 233309 - DNA, 201 bp, Homo sapiens
catgttcttattccttaggaaaacaacttgaaaaaactgtaggtgtcctgtgcagggggtaggagaatacagacttaattattacgtttactggtctaagkgaactttctcaggtgagctcagtgttctgtaataaagggtctctatatgctaaagttaatggaactgtaagttaaccaacctagtaatggttgctgtggt

SEQ ID NO: 233310 - DNA, 201 bp, Homo sapiens
aacctgggaggtggaggttgcagtgagccgaaatcgcgccattgcactccagcctgggcaacaagagcgaaacaccgcctcaggaaaaaaaaaaaaaaaaattccaaatttcagtaagtagaaatcatacacaattttctgactctaatgctacaaacctaaaatgaatacaagcaacttttccagaatgttttttctctg

SEQ ID NO: 233311 - DNA, 201 bp, Homo sapiens
ttctcgtgccgtaatttggttttgtagttcatgtaaatggaatctcatagaatgtactctcttttttgcctggcttcttttgcttaacatacttgattcaytttgtgtgcaggtgaagtttattttcatctgtataaaattccactgtggaatgtaccatgtaccaaaacaaatacatcttttacccattctactgctaat

SEQ ID NO: 233312 - DNA, 201 bp, Homo sapiens
ttcccactctattttgtcctgcttaatgaaataacatgcttatttaagaaccactggatccaactcccagatagggctgccttacgtaagggaatatagaycatttgagaattttccgtgataaacatttgagctgtaaatttcagattggtacttgcattaggccgttcttgcattgctataaagaaatacctgagactg

SEQ ID NO: 233313 - DNA, 201 bp, Homo sapiens
taagacaaacagttaaaggcactgtaggtactgaatgtactgcttattcttctgccacaataagttgaacaagtggctaggactttgagggaagatgtggrggataatgtttataatcagttgaaactcaatgtctgattctttgatgtgctttatacacagaaatatccacccagtgcaactacactacactttgaattc

SEQ ID NO: 233314 - DNA, 201 bp, Homo sapiens
ctttgggaggccaaggcaggtggatcacgaggtcaggagttcaagaccagcctgaccaacatggtgaaaccaagtctctactaaaaatacaaaaatcagcygggcatggtggcttgtgcctgtaattccagctactcaggaggctgaggctggagaatcgcttgaacccaggaggcggaggttgcagtgagccaaggtcgc

SEQ ID NO: 233315 - DNA, 201 bp, Homo sapiens
tcatatctgttggaaatatcttcatttgcttttgattttgtttttgatgtgttttggcatctagaagttttgacaactgtgtacttgaatgtcttttactraaggacaaaaagaaaacttgcttaagaaactataatttaaaaatttaaagtggaaccaatgtaagaatctactgctacgagaatagaagacctagaaaag

SEQ ID NO: 233316 - DNA, 201 bp, Homo sapiens
gctttgagaggtaacccactgttggaaagctttcttagaagaaaagtgttatggctggctttttaaaagcatatttaatgcttacctcaaagtaattcaakttttcaggctaattcaggtgccatgattacttataaattagttttgtataattataaatataacatgtattctgaaaattctaggaaaatgtagacaaaa

SEQ ID NO: 233317 - DNA, 201 bp, Homo sapiens
ggtgggttttctttttcagtactttcccattttgaagccctgggcaattcagcgattccttgattttgtcacttagtccctggcttgtgagtttcagagasgcttacagtgttctgtctgtttcctcaaagtttctcccactactaagggcagcaaatctccagcgaaggtgagtgatgggggcagcagcagtacagactt

SEQ ID NO: 233318 - DNA, 201 bp, Homo sapiens
ggcaggggcggggcttcgcttgcggtgggtggagccccaaatcgagtttgagctgagccgaagcgaggaggctttcgactgagggctagcgaggggagcasggctggagcagggctggagcagggctggagcagggctggagcagggctgaagcagggccgcggaccccgcacgctcctgcgggccccgcggagccattgc

SEQ ID NO: 233319 - DNA, 201 bp, Homo sapiens
acatcttgggcaagtcagtcaggtgaggatgaggcatagtcctgggactgtcttcagtcctgggggtctggtctttttgtgtcccatccttgtgctccttyttcccccccactcgcaaaccatgaccctgtataattgtgtttttctagatatacagatatggagagtgaagattaccacttctaccaaggtctggtttat

SEQ ID NO: 233320 - DNA, 201 bp, Homo sapiens
tgcttttgtttgctcccagatctccaccccatttctgggctgtcctggcactctctgtttacctcttcatctgacactgcactccccagacactgcttcasagtctctcactcacacaaatgactggatgtatcctgggttttctgcacagctcttttctgcttctgctttcttatgcaggtatatagtatttgaaggaga

SEQ ID NO: 233321 - DNA, 201 bp, Homo sapiens
gtcaggttcgtcagtcacttatacagccgtgtgacgctcaacaaattatttaagtttgcagcacttctattcccttgtttataaaatgtaattaatgaccrtattctgggaattatgtatataacatgtatacaaagtgtttgggcaaatacacaacacatagaaaacgctctaaatatgttagctgtctcctcctcccca

SEQ ID NO: 233322 - DNA, 201 bp, Homo sapiens
gacagactgtatgccatgttcttccaccaccaaatacctttagagaatttggactctgggcttatccctctctaataccacttttctcccctccccacttmacctaagcaaggcctcatttatttctctgatacctttcctattggtgttttctggaatatctgttaaccttgactattttgggacatctcctctgtcagt

SEQ ID NO: 233323 - DNA, 201 bp, Homo sapiens
cttttcctttgtcacccattcgtttattctctgagaacttacaaacttgcccaaggaagggaccttattgtctttgcgcttgcctcatggtgcccagcacrtaggcactctttgattattttgctggttggttgattgtttcaggcgagcctggggaagcagaagtgcaggaggaggatcatgatgtcactcagacagagg

SEQ ID NO: 233324 - DNA, 201 bp, Homo sapiens
catcctctcactaatttttagtcatttcttccataaaaacatatatacataatggtaaaatttagaaaatgtagttgaaagaattacccgtatttctgccmccaaaaaaaaaaaaaaaacattttggaagtgtctgcccgtcttttttctctgaatacatttgccagtgtcttagataaaaacatttcgtagatctctttc

SEQ ID NO: 233325 - DNA, 201 bp, Homo sapiens
ggtttgaatggtcacctttgagcttggctttggggagcagatttgaacatactcactctattcatccaggatgcgtcttttcgggagaacgagtgaatctyttcctcccccatcaccgtgaaacttcccttttagcgtcaagttagaatcgagttcttagaatcaagctgtcttgatagggcaggtcttgacaacttaaat

SEQ ID NO: 233326 - DNA, 201 bp, Homo sapiens
aggtgtagaaggcttcattttaaacaggattgtttcatacagttaatccttagttgatgagagagagagagagagagagagagagagagtgtgtgtgtgtktgtgtgtgtgtgtgtacatacacacacccgtgcacgtaaaccctgcatggtttcccttggcctcaggatactcaggtttagaatagaaatgctcagattc

SEQ ID NO: 233327 - DNA, 201 bp, Homo sapiens
ttcacagaagtggccaactgctgtatccgcatcgcccttcctgcccctcgaggctcaggaactggtaagtttcgcttgctcctggcctttgatattaagtktgtggcctggtataaatccagaaatttatttatgaggaggtctgtaacttgaagagcctccttaggcaagtattaggacatttgctggctaattgattgt

SEQ ID NO: 233328 - DNA, 201 bp, Homo sapiens
taacacagtgcgaaatagacgtcatctgtgtattcctgccaagaaatgtttgacctgtatttaattatgaggaaacaattagataaatacaaattgtgagwtgttctatataagacaactggcctagactcttcaaaaatattaatgttatgaaagaaaaaatacaggatcatttcttatagagaaaagtagactagagag

SEQ ID NO: 233329 - DNA, 201 bp, Homo sapiens; identical to SEQ ID NO: 43401

SEQ ID NO: 233330 - DNA, 201 bp, Homo sapiens; identical to SEQ ID NO: 43402

SEQ ID NO: 233331 - DNA, 201 bp, Homo sapiens; identical to SEQ ID NO: 43403

SEQ ID NO: 233332 - DNA, 201 bp, Homo sapiens; identical to SEQ ID NO: 43404

SEQ ID NO: 233333 - DNA, 201 bp, Homo sapiens; identical to SEQ ID NO: 43405

SEQ ID NO: 233334 - DNA, 201 bp, Homo sapiens; identical to SEQ ID NO: 43406

SEQ ID NO: 233335 - DNA, 201 bp, Homo sapiens; identical to SEQ ID NO: 43407

SEQ ID NO: 233336 - DNA, 201 bp, Homo sapiens
aaaaaaattattcattgatgctatggtttgaatggtcccccaaagttcatatgtttgaaacttaatcctcaaagcagtcctttcaaccttgtcaacctgtyggcgcggcctctggtgcagtggcggcggctcctgttcctgccgcagctctctccccttcttacctccccaccagatcccggagatcgcccgccatggctt

SEQ ID NO: 233337 - DNA, 201 bp, Homo sapiens; identical to SEQ ID NO: 43409

SEQ ID NO: 233338 - DNA, 201 bp, Homo sapiens; identical to SEQ ID NO: 43410

SEQ ID NO: 233339 - DNA, 201 bp, Homo sapiens; identical to SEQ ID NO: 43411

SEQ ID NO: 233340 - DNA, 201 bp, Homo sapiens; identical to SEQ ID NO: 43412

SEQ ID NO: 233341 - DNA, 201 bp, Homo sapiens; identical to SEQ ID NO: 43413

SEQ ID NO: 233342 - DNA, 201 bp, Homo sapiens; identical to SEQ ID NO: 43414

SEQ ID NO: 233343 - DNA, 201 bp, Homo sapiens
gagtgcagtggagggtgggtgtctgtgcacttggcctgcacatgtgtgcgcacagggtgcttggggatgcagtagccacagtggtcctggtgaccactggygcctgagtcctgccctcaagccttcccacaaggtccctgtcccacaggctggcccacccctctgcctccatggagcccctcccctcctcagccaaaccca

SEQ ID NO: 233344 - DNA, 201 bp, Homo sapiens
agtgcagtggagggtgggtgtctgtgcacttggcctgcacatgtgtgcgcacagggtgcttggggatgcagtagccacagtggtcctggtgaccactggtrcctgagtcctgccctcaagccttcccacaaggtccctgtcccacaggctggcccacccctctgcctccatggagcccctcccctcctcagccaaacccag

SEQ ID NO: 233345 - DNA, 201 bp, Homo sapiens
ccgcccccatctagccccacctttgagaactgggggcagagcgaggctccaggttctgggctctccctgggagttggggtgatgaccatgggcagaggggrtgggactgaagctgggcgctcaagagtcggggaagtagagggaggcagagtcaggtcacaggccccaagaaccccaggtggaaggagggctgagtggcag

SEQ ID NO: 233346 - DNA, 201 bp, Homo sapiens
ggggacagtctgcagaaagggttgaggccaccatggtggatgggcatctcttccccaaggaagagatggggtccagggactgcaggggatgtggggtggaggaccccttccctccttccttcctgggccggggaggctggggatgagtttggaggtgggccctgagcacactacatggcccagggtgcccagtggtcgtcc

SEQ ID NO: 233347 - DNA, 201 bp, Homo sapiens
acgagggctttcgaaggatttgttttgggccttgggagtgctcgccgtcacggtgggcttagggggctcccggctccagcccctcccccagtttaggaccytggcgggaggcttgaggctaacctcagagaaggggcaggaaggggtcaacccgcagccccacagggggagggaggatttctccaggagccctcctctagg

SEQ ID NO: 233348 - DNA, 201 bp, Homo sapiens
tgggtgggctgtggaagggggttgagggaggcacgtggagcaaccatcttcccctttggcccacagcgtcttctgggacctgtactgcgcggcgcctgacmgaagagaggcctgcgagcactccggcgaggccaaggccttccaggactatgtgagtcctggccccagggactcaggggctccagggcgggaggtgtgctg

SEQ ID NO: 233349 - DNA, 201 bp, Homo sapiens
gacgtagggggtctggcccgggccaaccgccggggagggcgcgccgcccgggattaactgctcagggcctagagttgggaagctgcgggtcgcagggggcggggggggggtgcggtggagcgtccccgaccaggaaacgctcaggcacccgctgtggcccgtgaggggattgccctccctgcggggtggacagacacaggg

SEQ ID NO: 233350 - DNA, 201 bp, Homo sapiens
aactgagaaagtggcacaggagtagggcacgagggctttcgaaggatttgttttgggccttgggagtgctcgccgtcacggtgggcttagggggctcccgsctccagcccctcccccagtttaggaccttggcgggaggcttgaggctaacctcagagaaggggcaggaaggggtcaacccgcagccccacagggggaggg

SEQ ID NO: 233351 - DNA, 201 bp, Homo sapiens
acgtagggggtctggcccgggccaaccgccggggagggcgcgccgcccgggattaactgctcagggcctagagttgggaagctgcgggtcgcagggggcggggggggggtgcggtggagcgtccccgaccaggaaacgctcaggcacccgctgtggcccgtgaggggattgccctccctgcggggtggacagacacagggc

SEQ ID NO: 233352 - DNA, 201 bp, Homo sapiens
ccccatggtgtcccactactcgtgtgtggtccccttgtcctagtcccgctagatctggggccccgggggtgtctggagctgtggacttgggcgactctgcycccatccctgccgtctgggtctagcatcctctctgggcgccccccgccgggccaggagggcggagctggagagtcggcgtgaacgcgcttcccaggcgcg

SEQ ID NO: 233353 - DNA, 201 bp, Homo sapiens
gttcatgccacaaacacctgagtgtccctgtgtgctggcttgggccgaccccagagagagcccatcaccttctttttggggtttggggcttggcctggacsatacagacaggggccaggagagaagttctcccctccctgtccccagacgtgttcctctgccctcatagactgggcctcccttcccacctcacatccccct

SEQ ID NO: 233354 - DNA, 201 bp, Homo sapiens
cgggcgacatggacgggttgccgaaggtaaggaggctgcgctcttgccgggggtgggatccggggggggtggcggggagggggcggggcggggagttgcgmgctgacggcggccgcccccagagttcccccggcgccgtggccggcctgagcaacgccccgggcaccccgcgggacgacggcgagatggcggccgccggga

SEQ ID NO: 233355 - DNA, 201 bp, Homo sapiens
gagagagcccatcaccttctttttggggtttggggcttggcctggaccatacagacaggggccaggagagaagttctcccctccctgtccccagacgtgtycctctgccctcatagactgggcctcccttcccacctcacatccccctccccaccttccccctgccagaccctgtaggccccatagcagacaggtctagaa

SEQ ID NO: 233356 - DNA, 201 bp, Homo sapiens
catggacgggttgccgaaggtaaggaggctgcgctcttgccgggggtgggatccggggggggtggcggggagggggcggggcggggagttgcgcgctgacsgcggccgcccccagagttcccccggcgccgtggccggcctgagcaacgccccgggcaccccgcgggacgacggcgagatggcggccgccgggaccttcct

SEQ ID NO: 233357 - DNA, 201 bp, Homo sapiens
agcctcccgcaggcctccctggctcccagcccctcctccctggcgccatggagccctccccacgagcccagggtgagtagggaagctccagcccctatccygccatcaatcagaattccagctctcagagcccagaccttgctgcctccccactgtccacactggggaatggtccaggtccaagtccccttccttctgccc

SEQ ID NO: 233358 - DNA, 201 bp, Homo sapiens
cggtgcccgtgtctgtccgtgtctgtaggctcgggcgacatggacgggttgccgaaggtaaggaggctgcgctcttgccgggggtgggatccggggggggyggcggggagggggcggggcggggagttgcgcgctgacggcggccgcccccagagttcccccggcgccgtggccggcctgagcaacgccccgggcaccccg

SEQ ID NO: 233359 - DNA, 201 bp, Homo sapiens
cagagctatggaggtggcatgcgacccccacccaactccctcgccggcccaggcctgcctgccatgaacatgtaagaccctgggggatcctaggagtgtgyagttcgcaggccaccaccagcttcatggctgggtcagctggggcaggtcctgaatcctcaggacagccttggatattgtttatttcatggccaccgttga

SEQ ID NO: 233360 - DNA, 201 bp, Homo sapiens
tgaagtagcaattagtctcctggggccagtgatgggttgggattggaacctggcagctcatggtggccacttttccagcaacatctgctgctctgtggtckgtctggggatacagtggagcagggtgtggggggtgtgtggtgagggctgtgatccacatggactagccccagagtctgtcatccgcggtctcttccaggg

SEQ ID NO: 233361 - DNA, 201 bp, Homo sapiens
cgcaggcctgtcagccactagccacagggaaaagctcagaagcctctagatgggccagggtgccacagaagtgagctagacaggtgggcctgcaggccgcsgggccaggaaagtggaggaagagcaggtgtgggagactggaggggtggaggtcaggatctagcagggcctgggctgggggcagtctcttcaagagtgctg

SEQ ID NO: 233362 - DNA, 201 bp, Homo sapiens; identical to SEQ ID NO: 43418

SEQ ID NO: 233363 - DNA, 201 bp, Homo sapiens
gtatggccccaggtgacacaatggccgcaggctccatggcggctggcttcttccaggtatggccccggctggagtccactggcccccaactctggctgaayatgcgtttgagggtggggggggtcccacgtgggcagaggtcatgaggccggcaggctggagttgggtgggagggtcctctgtgccgcaggtgtgcccagg

SEQ ID NO: 233364 - DNA, 201 bp, Homo sapiens; identical to SEQ ID NO: 43417

SEQ ID NO: 233365 - DNA, 201 bp, Homo sapiens
caagggtcagattaaagatatgctgtaataaagcagacaaatctaaaatgttaacaacattattcatggaaacaaatgttgccccaaaattgataatgacmaacaccactttgtttagtaattttaaatggttaagtaactactaataaaatttaaaaggctatgttttatcttttttctctctaatccctctgccttcct

SEQ ID NO: 233366 - DNA, 201 bp, Homo sapiens
tattatttgtataaaaatgaaatttggttatttcttttcctataggaggcccatgattccatagatttcttctgattgggatcattgtaatacatgtttcrtttatcttcctgatttgaactgtatcttccttgagttctatcaatcgctcttcccttcattcaaatttttcataacattcttatatttatttgcatataa

SEQ ID NO: 233367 - DNA, 201 bp, Homo sapiens; identical to SEQ ID NO: 43431

SEQ ID NO: 233368 - DNA, 201 bp, Homo sapiens
ttcagaggtgaatccccattttatgggcctgaagtgattgcaatttagaaaggagtctcttattaggttgttaaaaatttgtaaaaggataccacataaakaattaaatacccataggtttaacatgtaactcagcataaagtaaatgtgcttttaccattattaccatcattattaacaataaaatagtagaagaattag

SEQ ID NO: 233369 - DNA, 201 bp, Homo sapiens
agcaaaattgtgtatttggaggctatcatttttatagaaattcagatttgaaagggattgtccagcctgcttaaagccctaataatgaaaacaaagtttasaatcccagtttcccaccactgttctgactatgtattgttagtctacgtagtagttgcaaattatcagcctaggtgagcccaatataacccctgaaatatt

SEQ ID NO: 233370 - DNA, 201 bp, Homo sapiens
tgaatttaataagtatgaaaagagagttgtgcaacatatgaaatagaaaaatgaacatttagaagtttttatcatgagattaactttattatgaattcctkaaaagtgtttacaaatttacttttatttagaaacactattcatatgaaattagaacacagaatacctggaagaagtactctgaataaagtttggaaataa

SEQ ID NO: 233371 - DNA, 201 bp, Homo sapiens
gatataacaaagtgaatttaataagtatgaaaagagagttgtgcaacatatgaaatagaaaaatgaacatttagaagtttttatcatgagattaactttaytatgaattccttaaaagtgtttacaaatttacttttatttagaaacactattcatatgaaattagaacacagaatacctggaagaagtactctgaataaa

SEQ ID NO: 233372 - DNA, 201 bp, Homo sapiens
tatttttaacatgctttttcttttattatatatgtcaatgtgaaacaaggatataacaaagtgaatttaataagtatgaaaagagagttgtgcaacatatkaaatagaaaaatgaacatttagaagtttttatcatgagattaactttattatgaattccttaaaagtgtttacaaatttacttttatttagaaacactat

SEQ ID NO: 233373 - DNA, 201 bp, Homo sapiens
tttcttagattcaaaacaaatatagttaatcaaaatattttgtttgcttttcttggcaattttaattaaattagtgtgattatagtaattccaaaaattamagatatggatgtttctttgtttttatcactaattgcacctagtatgacattaatcctaggtttcagctgttattttatttccttcagacataatattgca

SEQ ID NO: 233374 - DNA, 201 bp, Homo sapiens
agccattagtacctatttaaggaaaggagccatgctcaactagttgaaactgcagtagatgcttcagcatgtcttgcatggtaacagctgcatcaacatayacttgataatcatccagaaaatttatgtcgtcagttgtcagctttaaaggccataaagcagtacacgttttataaaagcacactaaaactattaaaattt

SEQ ID NO: 233375 - DNA, 201 bp, Homo sapiens
agtacttgggatacccatccttgttttcttcatgttcccttttacaatatggttgaatagaatgaaatatctctttattaaatgtataatattagcactgstatgttgaggtctttttaagggatgtggctatattttatttagttttctgttatcccaaggacataaacacttaggtcttcattaaatgtttatagaagt

SEQ ID NO: 233376 - DNA, 201 bp, Homo sapiens
atattagtgaaatgattggaatttcaatcaaggtgttttgggggaacaattagagttagactatacctagtaaaatattttgttagtttgttttctatttrtatttttcctgtcctccatagtaagtctacatgagtttctaaaatttgaaattacttttgtaattaagatagatgcatatcatgtaaggactatatgaga

SEQ ID NO: 233377 - DNA, 201 bp, Homo sapiens
atacagcagatataaaattgagctgctctgggaaatcattttatccattctttctccccctcaatggctgacttttctacttcctctgggtgatcccaaakcacctccatagtatcttgcagaacactgtttaaaaatacttgataaattgcttatagaagataaatataaactttcagttctctactattttctattata

SEQ ID NO: 233378 - DNA, 201 bp, Homo sapiens
ggattctaatttcctgaaaggaagcctgtgctctatcacataatctggcctattattaccttttccagggttaatggtatattttgcctttatccatataygccatggatatttaagatatcttggactgctcttctctctgcctgcatacagtgccccatatatcctccatcctcttttatacattttgtataaacctca

SEQ ID NO: 233379 - DNA, 201 bp, Homo sapiens
gttaagagtgggggctactaatcaattcctgtgtttttaagtagggattaagttgaaatgcaatactttaaagctgttccactgtacaattaaatcattgytactgttaccacataggagaaacaattgcccaaagcctatttataaatatttaaaacactctttgtctcgctcaaaaaaagaatatggaaatgttaacac

SEQ ID NO: 233380 - DNA, 201 bp, Homo sapiens
ggtttggaaatattttttcatggaggataagggttttattggggtgctagtattttccataattaggcttacagtatttctgaagataatacataatttttaaaaggcataattaaatagaacatcctcattgtgtttttgtgcctcacagacttatgaatattgcagtttgtggattattctgttattacaaaatatttt

SEQ ID NO: 233381 - DNA, 201 bp, Homo sapiens
tcctatatactggtcgctggctccagacttgcctttaaaatctatcttccatgctaccatcaaagggttacacctaacatataagtatgaataggctctaygtctgcttgagcaaggatcagtggattctaatttcctgaaaggaagcctgtgctctatcacataatctggcctattattaccttttccagggttaatggt

SEQ ID NO: 233382 - DNA, 201 bp, Homo sapiens
ggttaggagaccaaagaaaaactgggggcaaaatctaaatgatgaattggaaaaatatttttctgttggattgtaggaagagaagataaacaaagtagttrgtatcttccattttaataattggtttggaaatattttttcatggaggataagggttttattggggtgctagtattttccataattaggcttacagtattt

SEQ ID NO: 233383 - DNA, 201 bp, Homo sapiens
attaggtacacacgagtatggctgtagaagtcaggatacaaaaaaataaaagctaggttaggagaccaaagaaaaactgggggcaaaatctaaatgatgawttggaaaaatatttttctgttggattgtaggaagagaagataaacaaagtagttagtatcttccattttaataattggtttggaaatattttttcatgga

SEQ ID NO: 233384 - DNA, 201 bp, Homo sapiens
tcccctgggaccttttgagaaatagaatctgagccttcactccatacccattgcatcacagtttgcattttaaacaagatccttacgtgactcatatgcarattaactttgagaggcacttgcctatttgatacctcctcttgggtatccaacaggcatctcgagcttcatatatattcaaaattcttgtaccatttttca

SEQ ID NO: 233385 - DNA, 201 bp, Homo sapiens
ttatctagagattcttatatcatttataaaaatatacatagaatatcatatttctattttgtttaatcagggtaatcactatatagttacatctcattaayatcactgctgattattagtgagtatctagcttgtggaatgtgtcatgcagttgaaatcagaggaactagcatgcaaatctggcattattaactattttat

SEQ ID NO: 233386 - DNA, 201 bp, Homo sapiens
gcaaaaatcctggtaggtcagtttagccagaattcctttcactcctgatgttttctcctagtaatttttaatccactgacccccaccccactccttggctrtaaattctcacttgcccatgctgtatttggatttcagcacagtctctctctcctgcattgcatgtggtccctgtacctactgcaatgttcctaaataaat

SEQ ID NO: 233387 - DNA, 201 bp, Homo sapiens
tcaaagacacatcacagtgtgtgatttcctcttcatttataagcttatccccaattgttcactactaatcttctctagccaaataatatgttaccacttaygcaaccgtccgtctttcttttccaaccctattggtttttcagtgttgcagcttttatagctgtaaaatgaattacctgagaacttagtggcataagtaaa

SEQ ID NO: 233388 - DNA, 201 bp, Homo sapiens
tagtttcaaggcttctggacttaagaagttttgtgaatatggtgtcagtctattttagctttggcagccaagacagggtattgggtagaaaaaaaaaaaaactggatgttcaattttccagagatttcctgtgtttattattgtaagactgtgatttattaaaactgtcttacttcttcaagcagaccaagatctcctctg

SEQ ID NO: 233389 - DNA, 201 bp, Homo sapiens
ttagtttcaaggcttctggacttaagaagttttgtgaatatggtgtcagtctattttagctttggcagccaagacagggtattgggtagaaaaaaaaaaaaactggatgttcaattttccagagatttcctgtgtttattattgtaagactgtgatttattaaaactgtcttacttcttcaagcagaccaagatctcctct

SEQ ID NO: 233390 - DNA, 201 bp, Homo sapiens
gttagtttcaaggcttctggacttaagaagttttgtgaatatggtgtcagtctattttagctttggcagccaagacagggtattgggtagaaaaaaaaaaaaactggatgttcaattttccagagatttcctgtgtttattattgtaagactgtgatttattaaaactgtcttacttcttcaagcagaccaagatctcctc

SEQ ID NO: 233391 - DNA, 201 bp, Homo sapiens
ctatatgaaaaaggcaagattagtttggtttctagtagttgaatttaacattgatgctttttttaattgttttcaaaagcagacatgctgttgaagtttayaaaataaaatataatgtgggagctatgaaatgaaatgtctttcatattgaacataagagaacaaattgcacagtgatgtaagtttcaggtctcagagatt

SEQ ID NO: 233392 - DNA, 201 bp, Homo sapiens
cacagatccatttgggtagcctgggtctattttattaatttaaaaaatgaatacttgtagacattagtggatcatgactcaaatgtcttgcctgcatttayaatagaagagtttgggtcatatgcttcctattttggtcactcttgagacgtgtaggcatttcaccccatagagggcagtacagaggtccttagtacacaa

SEQ ID NO: 233393 - DNA, 201 bp, Homo sapiens
gactgtgattgaccaaatttaagtccaatcagctgcagccaagattaataaaagagtcattgagcagtttccagaaacccttctttatgagaggcacttcyaagaggagaaggtttaaggagaaaacaagataggtagtgatccactcaaatgttcctttatttttgtgtcctcaaacatgcagtgctgtgtcttcagttt

SEQ ID NO: 233394 - DNA, 201 bp, Homo sapiens
ggcaagattagtttggtttctagtagttgaatttaacattgatgctttttttaattgttttcaaaagcagacatgctgttgaagtttacaaaataaaatayaatgtgggagctatgaaatgaaatgtctttcatattgaacataagagaacaaattgcacagtgatgtaagtttcaggtctcagagatttaagtggatcat

SEQ ID NO: 233395 - DNA, 201 bp, Homo sapiens
acctagatcccttgcatgcactcctatgaaaatctaatgcagctgctgatctgaccggaggtggatctcaggaggtaacatgagtgatggggagtggctgyaaatacagatgaaacttcacttgctctcctgctgctcaccttctgctgtgtggccccattcctaaccagccacagaccagtactggtctgtggactgggg

SEQ ID NO: 233396 - DNA, 201 bp, Homo sapiens
caaaattttaagcaaatgtctagccccacatatgtttaaatattttacgtggcaacttttccaaggatgaattgctgaaggaggttatgccattttctttmaaagaaaaccctaaaatattctaacttgaatacaaatttactttttagtttcatcaggaactacgcagataaattaacctcacaggcatatacagcttta

SEQ ID NO: 233397 - DNA, 201 bp, Homo sapiens
aatatggaaatgttaacactgtttttgttgggatggtggaaactattattattattattattattattattattatttattatgtttgagacagagtcttkctttgttgcccaggctagagtgcagtggtgtgatctcagctcactgcaacctctacctcctgggttcaagcgattctcctgcttcagcctctcaagtagc

SEQ ID NO: 233398 - DNA, 201 bp, Homo sapiens
actctttgtctcgctcaaaaaaagaatatggaaatgttaacactgtttttgttgggatggtggaaactattattattattattattattattattattatwtattatgtttgagacagagtcttgctttgttgcccaggctagagtgcagtggtgtgatctcagctcactgcaacctctacctcctgggttcaagcgattc

SEQ ID NO: 233399 - DNA, 201 bp, Homo sapiens
gtgccatataaaacaggatcccacacctataacctgaatggctggagatgataaaatacctgtcattaaaaaatacatgttctttacaacatattctttamaactttccttagagtgacatgaaatataagaacatttgaaatgagtccagatagcccctcgctcagatggaatgaacaatagcagcagaaagaaaacatg

SEQ ID NO: 233400 - DNA, 201 bp, Homo sapiens
cagataaattaacctcacaggcatatacagctttaggaacaaaactatatgtaaagtaagatattacatgaaattttttttctaaactttgcatatatttrtagagagatcatagtttatacagaaggtatttttaatacacggtattctaatagtaggcttaggagaaataaaatcagtcaagtattctagagcaaaaat

SEQ ID NO: 233401 - DNA, 201 bp, Homo sapiens
gggtgccatataaaacaggatcccacacctataacctgaatggctggagatgataaaatacctgtcattaaaaaatacatgttctttacaacatattcttkacaactttccttagagtgacatgaaatataagaacatttgaaatgagtccagatagcccctcgctcagatggaatgaacaatagcagcagaaagaaaaca

SEQ ID NO: 233402 - DNA, 201 bp, Homo sapiens
ctagtatttagagagacttctctaataataccgggtgatattatctttgagtaaatttgaatataaattgaaacataaaaatgagtattgtgaactttctmggaaatattcattaaaaccattgaaataaaaataaattcaagaaagtaagaagtactgattatgttgcatggttctggagcaggaatactgagagcaatt

SEQ ID NO: 233403 - DNA, 201 bp, Homo sapiens
cctgaacttgccctttatacccagctgcatatctgtcatccatggatttacctgagcttttgttgatcctatttatactttcagacagtacaacctctcargcgaacaagttccagatgtgtactaaataccacttcattttatttcacttgcaactacctccttcaatatcatactagtaatagtatttctggccttggt

SEQ ID NO: 233404 - DNA, 201 bp, Homo sapiens
tacactttgactaacaagttgggttttctttgttcttagatttaaaaaaataaccaaaacataatattaaaataaaatattctacttcagaggtccccagsctttttggcacaaaggactggttttgtggaagacaatttttccacaaacggggaggtgggaggtagtttccagatgattcaagtgcattacgtttactat

SEQ ID NO: 233405 - DNA, 201 bp, Homo sapiens
acttgctcacttggagattcacatccattactcaaaacctggtttaaacattaaagcattaagatattaagcgtagtctggatagcccagttttgagtatkttctagcagtacttattttcaagaatacattatccttgtatccttgagcacttaaaatgaaacatatcatagcagttatttttaaataattaggataatg

SEQ ID NO: 233406 - DNA, 201 bp, Homo sapiens
tcctcctattctctttctccttcctcctatgagtgagctaagtttgaagagggcttaagtatcatcctggcattagtggggagttacctggtctgcaaacrttcttagtcctcccttgtttccctggagatatgactattcggcccattcagctctgtccttgtgatggtacccaaaccatgatccatccaactctagccc

SEQ ID NO: 233407 - DNA, 201 bp, Homo sapiens
ctcacataacctagatatctctctgttcacatacccccctcaacttcttcctcaactctcttcttccttttatcacatgtcctctgtctgcctccacatcyttgttatatacttttaaaatccagcattttgctatgtgccaacctatgtgataagcacattccatgaaagatctcatagaatcctcaacaagcctgttaa

SEQ ID NO: 233408 - DNA, 201 bp, Homo sapiens
ctgaacacttgaacttgaatttatgctatcactgaatgcactttcatgaggctttgctgcctttccatttctgcttagcatttcaaaaaactgcacgtgcygaatgttgaggtagccagaagttttcaatgccctgtttcaacagctcctcattcctcctctccaaaggagcttcagtctgtgatgctgatgctgcaccat

SEQ ID NO: 233409 - DNA, 201 bp, Homo sapiens
caaactcattgtccaccctgctttatgccaggagtgcaaatctttcctttaaaatctggattttaagagctgactttgtatccagttactgtcgtagtcasttagggatactataacagaatagcatagactgggtgacttaaacagcaggagaactatttctcacagttatggaggctgggaagtccaacatttaggtgc

SEQ ID NO: 233410 - DNA, 201 bp, Homo sapiens
gtcgatgttcttcttctaattcacaccctgcctcctggagttgttatatggattcaatgaatcaatgcatgtaaagtgtttagtaatatgtccggcatatmgtcagtattttgttaactattaatattgtgcagtagcacacagttgttaaacctggatttgcattcttaccttgcctcatactaaccatatgaagcagga

SEQ ID NO: 233411 - DNA, 201 bp, Homo sapiens
agtattgaggaacaatttttatggaacccttgcttatctgcatgttttattagcaaggcactgattgcctttctttgagaatatcttttcaagaatgtttktctagcaaacagccatagaaagagagatagtatctctctctaaggcaaagggcaggtatgcctacagcccattatgaaattctgaggttccccaagtgca

SEQ ID NO: 233412 - DNA, 201 bp, Homo sapiens
ttaccgaattgttacctttcacagaggaatggcatgcctgcctctgttcttctcatattattaacatttgaactccggggcccttctcagaccctgttgtrctcatgtcttccataacttctccggtacacagagagctcttccacctctgatatccccaagtgcataatcatgtaccaaatctcatgtttccagaggcta

SEQ ID NO: 233413 - DNA, 201 bp, Homo sapiens
catttagacagtattttacctagtaaatttatctcaaatttattccttaacaacaatctttttccttatgcttcattttaaatagtcatcactaatgattkgatgtattgcactaattttctaacaaatgtttctacttacatatttctcagcctctatccatctcaattattgctcccttgctagcaaaattagaaaata

SEQ ID NO: 233414 - DNA, 201 bp, Homo sapiens
tgcaatgtgattcactaatgatactgacttgattagtaaatacttattcataagacacggccctgctacatgtctgatattactttgcaacactgtcttcrtgactccctctactccaagcacagtggtctccttaattctctctaaacacaccaaatactcctccttgtcaaagcatttgttctgaccgtcttcattttt

SEQ ID NO: 233415 - DNA, 201 bp, Homo sapiens
tttctttcttcagtcattcctcattcatttagacagtattttacctagtaaatttatctcaaatttattccttaacaacaatctttttccttatgcttcaytttaaatagtcatcactaatgattggatgtattgcactaattttctaacaaatgtttctacttacatatttctcagcctctatccatctcaattattgct

SEQ ID NO: 233416 - DNA, 201 bp, Homo sapiens
gtcaagtattctagagcaaaaattgaatcttagcagaattactcctggatgccatgaaacagtctttaatttttatgttatccacaataataaatgcattwcaggctctcaaaatatattgttcattcacttaataataatggcatgttattttgtgttgcttacagaatggtgtattccacatgaatgtagcaaagtagc

SEQ ID NO: 233417 - DNA, 201 bp, Homo sapiens
ttatggggcaagaaagtatacatgtgacccaaattacccaaattaatttgttaatggcttcgtatcagccttggcccatagcatactccctagtacatgtrgtttactcatccaaaacagtgtagtctatcaaacagcaaagtcttttgtgatatggaagaaagtgcaatgcacaaatacataatattttctattctattc

SEQ ID NO: 233418 - DNA, 201 bp, Homo sapiens
tgagaggtatgggggagggaggagagggaaaaatctgccttggtgcttgtctgcttccaggaccaatagttgcctcaagtattataaccaggcctatgtgytgtgaaacctataatgcatttttgtgtgtgtttgtttcttaaggaagaatttgtttctaagacattagctactttttctattaattttataaatatggag

SEQ ID NO: 233419 - DNA, 201 bp, Homo sapiens
ggaatctacaaagagcaaagacacagtgaagagaaatctcaggaaatgtttgggtaatagaaagaagcttacttttattgaaataaagttttttgtggatrtatagtaaaagaaaggtagaaggttagattggagtttcacagattgctaaacttgaacaccagtttattcagtagaaaatagcaagccattaaagattgt

SEQ ID NO: 233420 - DNA, 201 bp, Homo sapiens
agaagacagaaaaagagtttgtagcagaattgtttataatgataaaaactgaaacaatttttcacctctaaggaattggatcaaactgtgccatattcacrcaaatgaaaatcatctagtcaagacaaggaatattgacagctatgtgcagtcacacaggttgaactgaaaaacccagtaatgggtggataaagcaagtta

SEQ ID NO: 233421 - DNA, 201 bp, Homo sapiens
gatgagaggtatgggggagggaggagagggaaaaatctgccttggtgcttgtctgcttccaggaccaatagttgcctcaagtattataaccaggcctatgkgctgtgaaacctataatgcatttttgtgtgtgtttgtttcttaaggaagaatttgtttctaagacattagctactttttctattaattttataaatatgg

SEQ ID NO: 233422 - DNA, 201 bp, Homo sapiens
cagagaaatgtaaattaaaactacaatgaaataccaccacacagccaccagactggttgcaatgataaagtctgaggtacaaagtactggcaaaaatgtgraacgaatggtactctcacatattgctgttgggagtttaaattggtgccaccactctgtaaaacatgcatacattagaacccaacaattccattcctaggt

SEQ ID NO: 233423 - DNA, 201 bp, Homo sapiens
agggtgccatataaaacaggatcccacacctataacctgaatggctggagatgataaaatacctgtcattaaaaaatacatgttctttacaacatattctktacaactttccttagagtgacatgaaatataagaacatttgaaatgagtccagatagcccctcgctcagatggaatgaacaatagcagcagaaagaaaac

SEQ ID NO: 233424 - DNA, 201 bp, Homo sapiens
cagtagcagggtgccatataaaacaggatcccacacctataacctgaatggctggagatgataaaatacctgtcattaaaaaatacatgttctttacaacwtattctttacaactttccttagagtgacatgaaatataagaacatttgaaatgagtccagatagcccctcgctcagatggaatgaacaatagcagcagaa

SEQ ID NO: 233425 - DNA, 201 bp, Homo sapiens
tttatattactctcttattttggaaaaaaaaatcttatgaagtcagacttgtctaacttaacatctgagattttgacgataattttagtacaacagcttayatatatattggttgaaataatttctacttttaaggacaatgtgtgtggatctaaattggtattctattaattctctacatcttatatttttttcctcaaa

SEQ ID NO: 233426 - DNA, 201 bp, Homo sapiens
attttctatataaacacattttttatccatttattacctaacccattctttccctactaatacaaaatgttcatccatgacacataacgtgcttaaattgkgtctgtctctggaatttctattctgtgataacaatagctgatattaataatttttaaaatcatatcttacctgagttctatgttgtcctcatgacaatcc

SEQ ID NO: 233427 - DNA, 201 bp, Homo sapiens
attaagagtagtagtaatatgtcacctttcacagagggtgacttttatttatcctcaaaagaaactaattttctctatcccattgtcattgctgtttatartgtgtgtgtgtgtgtgtgtatgtgtatatattttgttttgattagccactacctataccataagtattttaaaagtagtgatcatgtatcgtttatcttc

SEQ ID NO: 233428 - DNA, 201 bp, Homo sapiens
tttataatagcaaggaaaactgaatattttcaattttaagcccacattgtttctagtccatattgagggggaacatagaagcttatgaaatgccacataarggcaagtttgtgcttaatccacttaatgctttgcctcctccggtgacaacaaaagtgctgggtggaaactttgatagtgaccctttccttacactaaagc

SEQ ID NO: 233429 - DNA, 201 bp, Homo sapiens
tttggtttggtattcaagactgtctatacctggccacgttttttccttcttagtgttaactgtattactttgtggaagctactgctaaattaactgtttcktgtcctctatttacatgtcctgcctctttgtccatatagcactttacctgtacttgcttatgtgtatctgtatttctgcgtttctctgcagttagaactc

SEQ ID NO: 233430 - DNA, 201 bp, Homo sapiens
ctggatgtaatttataagtgaaaggcacctgaagttaattgtttacagaatttaagtatcattggattaaggatgttaaacagatactccacgtaaagccrttaccacgacaaaaccaactttctcaaaccaaagcaaatgttagtatcctgaaaacaactttgtaataaaaagacatcatgaaaataatttacaagtatc

SEQ ID NO: 233431 - DNA, 201 bp, Homo sapiens
tgtataattgtgacaaatggacttactgaaaagagaagaaagacattaatgacaaaaatctttctgtcaacccttgctggatgtaatttataagtgaaagkcacctgaagttaattgtttacagaatttaagtatcattggattaaggatgttaaacagatactccacgtaaagccgttaccacgacaaaaccaactttct

SEQ ID NO: 233432 - DNA, 201 bp, Homo sapiens
aaaatgtaagctagttatgggcaggagttttggttgaatgattcacctcctatacccaataactataataatgctacttagcatgtgttagctaaaagaawgttcaattttacttgtccaaattttattcattcatttagtcaaacattgatcaagtgcttattatgtatccattttgataactctgagggttttaataaa

SEQ ID NO: 233433 - DNA, 201 bp, Homo sapiens
cagaatatttcaatattcataaagaccttatttacacaaaaaaatacttctcaagaaatgaagtgcatgaaacataagcaaatatgtctggaaatttctastatagatgatgttattttcctaggggaaaaaaaagcagtacttgtagggtgactaataagcaatcatatctattaccattagaagggttgattgtatata

SEQ ID NO: 233434 - DNA, 201 bp, Homo sapiens
gtccacagttcatttgctgtacatctcacctcttataaagacggattctgtctttgtctgttctaagtctgggtgagaagactgtgattgaccaaatttargtccaatcagctgcagccaagattaataaaagagtcattgagcagtttccagaaacccttctttatgagaggcacttccaagaggagaaggtttaaggag

SEQ ID NO: 233435 - DNA, 201 bp, Homo sapiens
acagtctggcatactttcagcaagcttttatttttaccttgatatgtctttggaaaattgttaacttctattagtaatatccttatacaataaaggttaarggcagtggttctggattcagacaatccttaaagcatagatgaatatacatggaaatataaaaaagaaaaaaaatcctcatggaaaacaagaaatagtttc

SEQ ID NO: 233436 - DNA, 201 bp, Homo sapiens
agaggattggaaaaaaatctagaagcacaaataaatggaactatagttagtatccttttcttttatcttccattttctcctattcattttttcatattatrtatttttgtatatatagtactgtttatatatttatatatttatatttttgtatatataatattgtattatacagaaatattttactatttcatgatagcc

SEQ ID NO: 233437 - DNA, 201 bp, Homo sapiens
ccttcagggaactcagaaatggaataagtcaagatgagatcattttttccttatttttaattgctctaagagataactgactaactaaagtaaaaaaaaaatagtagcaatatattatcagtttatttatgtaaaagtaacagggaaacacgagcacaaaggctgcatggaaggaattgagaatatactgttagcagctcc

SEQ ID NO: 233438 - DNA, 201 bp, Homo sapiens
gattatattttttctcaattgctacttgaatttgtaaattacaaataatactcactttgacttaggaagtaattttctgtttgtgcttaaataggacctayacaatttacttataaaatattttttgttttcataggttatagttcctacagatataaaaattgaatttatcaatcgactttcccaaactggcttgtctgt

SEQ ID NO: 233439 - DNA, 201 bp, Homo sapiens
tctagccaagttccttcagggaactcagaaatggaataagtcaagatgagatcattttttccttatttttaattgctctaagagataactgactaactaaagtaaaaaaaaaatagtagcaatatattatcagtttatttatgtaaaagtaacagggaaacacgagcacaaaggctgcatggaaggaattgagaatatact

SEQ ID NO: 233440 - DNA, 201 bp, Homo sapiens
ttctagccaagttccttcagggaactcagaaatggaataagtcaagatgagatcattttttccttatttttaattgctctaagagataactgactaactaaagtaaaaaaaaaatagtagcaatatattatcagtttatttatgtaaaagtaacagggaaacacgagcacaaaggctgcatggaaggaattgagaatatac

SEQ ID NO: 233441 - DNA, 201 bp, Homo sapiens
tattctagccaagttccttcagggaactcagaaatggaataagtcaagatgagatcattttttccttatttttaattgctctaagagataactgactaactaaagtaaaaaaaaaatagtagcaatatattatcagtttatttatgtaaaagtaacagggaaacacgagcacaaaggctgcatggaaggaattgagaatat

SEQ ID NO: 233442 - DNA, 201 bp, Homo sapiens
ttattctagccaagttccttcagggaactcagaaatggaataagtcaagatgagatcattttttccttatttttaattgctctaagagataactgactaactaaagtaaaaaaaaaatagtagcaatatattatcagtttatttatgtaaaagtaacagggaaacacgagcacaaaggctgcatggaaggaattgagaata

SEQ ID NO: 233443 - DNA, 201 bp, Homo sapiens
ctataagatgtgctttaatcattttgcggacctttcctaattccctttctccatttaaatggagcctgaagcatgacagggttctgtagctagttttcaaycaaacctgagtaaggcaccagtatttttgacagacctaaacctaaacttttatttaagtatcctgtttctcacttgttcagcttgaggatagaaggttgt

SEQ ID NO: 233444 - DNA, 201 bp, Homo sapiens
ctggcttgtgacattgaacttcctcctgaactccttgtctctttcattaactcatcttctttctcccacctccaaaaagtgagtgttcaccaaaacccagsatttgaacctctgccatttttattctagccaagttccttcagggaactcagaaatggaataagtcaagatgagatcattttttccttatttttaattgct

SEQ ID NO: 233445 - DNA, 201 bp, Homo sapiens
cctcaaactcctaggctcaagtgatcttctctcagtctccccagtagctgggaacacagacctgagccactgtgcctggcctgtaatattttttgtacttwatagcatacataatattttatatctatgtaaaaacacagcagtgtccagtttaatgaattctgacgtttaccccccaaatagatgtctcctaataaatgg

SEQ ID NO: 233446 - DNA, 201 bp, Homo sapiens
tttagagatgggggtctcactctgaagcccaggctggagtgcagtggtatgatcatagctcactgcagcctcaaactcctaggctcaagtgatcttctctyagtctccccagtagctgggaacacagacctgagccactgtgcctggcctgtaatattttttgtactttatagcatacataatattttatatctatgtaaa

SEQ ID NO: 233447 - DNA, 201 bp, Homo sapiens
aaaatctaaaaccctattaaataaaaattaaaacaaaaatatatattataagattgaataacaagtcacaatgtgggaaaagatattttgaattaatatayatgacaaaggaatagtatcaagaatacatataaaactcctattaatctatgataaaataaatattaacaggtcagtggtaaaatggacaaataacttgaa

SEQ ID NO: 233448 - DNA, 201 bp, Homo sapiens
ccaatcaacaacaggcaaaagcagatgattctgagaagaatcatctacagaatttgaatggaattcaagccatgtgagcctgagatagaccagaatacttytgggggtatgatactggcaaaagaaggaaatgactatgaaaaaaagtagatagacctttattaataaagttcatttgtcctaaatatatgagtggtatat

SEQ ID NO: 233449 - DNA, 201 bp, Homo sapiens
atttagaaatcaagctgaacttgagctatttgaaattaacaataagaatgtgaatggtaatactcatataagtaatatcataaaatattctatactttttkatttttatttttttagagatgggggtctcactctgaagcccaggctggagtgcagtggtatgatcatagctcactgcagcctcaaactcctaggctcaag

SEQ ID NO: 233450 - DNA, 201 bp, Homo sapiens
agggtacttatgaaatcccacaaattctgttttgttaatgtttattgttaaagcttactcaaaaattatctagagattcttatatcatttataaaaatatrcatagaatatcatatttctattttgtttaatcagggtaatcactatatagttacatctcattaacatcactgctgattattagtgagtatctagcttgtg

SEQ ID NO: 233451 - DNA, 201 bp, Homo sapiens
ctctctcaggtggtacagtagctcatatagtatctatttagagtcttggttgagaagcaaacatctgggcttattggaaataagcgtggccactgaactaygagtaatacttcatgtatgggtaatttcagtcctttggtagagtgaatagtagctatgagaaacaagttgagaataaaaatattggaaaataagcatatt

SEQ ID NO: 233452 - DNA, 201 bp, Homo sapiens
aacatcatagcagttcttgggaatactggctatgaaacagaatatttcaatattcataaagaccttatttacacaaaaaaatacttctcaagaaatgaagygcatgaaacataagcaaatatgtctggaaatttctactatagatgatgttattttcctaggggaaaaaaaagcagtacttgtagggtgactaataagcaa

SEQ ID NO: 233453 - DNA, 201 bp, Homo sapiens
gaaagtcacacaatttcctgattcagccctctgatctgtgtaataggaacatttgattggaacatcatagcagttcttgggaatactggctatgaaacagaatatttcaatattcataaagaccttatttacacaaaaaaatacttctcaagaaatgaagtgcatgaaacataagcaaatatgtctggaaatttctactat

SEQ ID NO: 233454 - DNA, 201 bp, Homo sapiens
agaaagtcacacaatttcctgattcagccctctgatctgtgtaataggaacatttgattggaacatcatagcagttcttgggaatactggctatgaaacagaatatttcaatattcataaagaccttatttacacaaaaaaatacttctcaagaaatgaagtgcatgaaacataagcaaatatgtctggaaatttctacta

SEQ ID NO: 233455 - DNA, 201 bp, Homo sapiens
tctcattttactagagattgaatttctctgctctccgttattcatggaaaaagttactggtccacagttcatttgctgtacatctcacctcttataaagayggattctgtctttgtctgttctaagtctgggtgagaagactgtgattgaccaaatttaagtccaatcagctgcagccaagattaataaaagagtcattga

SEQ ID NO: 233456 - DNA, 201 bp, Homo sapiens
ttctatttcctctttcatagtttgttttattcataatgtagttttatattaaaacaataattaattgatgaatattaaacacctggctgcatttattgctsaagctacttttaaaaaaatggaatttatttaagtagtaagtgaacacatatggtaaagatgctaaaaacctcattttaaaaatttgaataaacaatttta

SEQ ID NO: 233457 - DNA, 201 bp, Homo sapiens
ttgttaatggtatttctttcttcagtcattcctcattcatttagacagtattttacctagtaaatttatctcaaatttattccttaacaacaatctttttycttatgcttcattttaaatagtcatcactaatgattggatgtattgcactaattttctaacaaatgtttctacttacatatttctcagcctctatccatc

SEQ ID NO: 233458 - DNA, 201 bp, Homo sapiens
tcacctaacttcactaggatatggtaacatttttctcaaccccttctgccacctttagcactcaataattcatctccaacaaatataaaacactgttcacrtatcaagaagtataagggaccatagattgttgttttctgagaatttttgttgtgtgtctgtagtcacgcaaatgctcatttttatttttgccaatcagaa

SEQ ID NO: 233459 - DNA, 201 bp, Homo sapiens
tgtcccttggggtgcaaaattgtcctgaatgagaacgagtgaatatgttaataattacactgctgcaggttgccagggagtagcaatatcccacctacttygaagaatatgaaataactgaaaattaaccagcaactcatctagctcccaaatcccattttggagaccacttcctcagttcactcctggcactaattttct

SEQ ID NO: 233460 - DNA, 201 bp, Homo sapiens
tctatcatagtatacgagacatatttaagcacccgacaaatgatttaagaatacatgcagtgttgtttcataatgatatctactggttaaataaaatggtrgagaaaagccaaaacaaaattcttctttggtgcgatatcaacaaattctactgtataattgtgacaaatggacttactgaaaagagaagaaagacattaa

SEQ ID NO: 233461 - DNA, 201 bp, Homo sapiens
actgtaatgaatctagggtgttcattttgtccatctcttcgtctactatttttctcactattgactttcttcttatgcaaaaaaagggaaaacttaatttkgtcttaaatgcttccaaaagggattgcattacatacaatcgtgaagaattcctttgatgaaagatcctcaatgttaggaaattcttcctgtgtttaatta

SEQ ID NO: 233462 - DNA, 201 bp, Homo sapiens
gccgggtgtcccttggggtgcaaaattgtcctgaatgagaacgagtgaatatgttaataattacactgctgcaggttgccagggagtagcaatatcccacytactttgaagaatatgaaataactgaaaattaaccagcaactcatctagctcccaaatcccattttggagaccacttcctcagttcactcctggcactaa

SEQ ID NO: 233463 - DNA, 201 bp, Homo sapiens
cttgaaactccagaatctatcatagtatacgagacatatttaagcacccgacaaatgatttaagaatacatgcagtgttgtttcataatgatatctactgrttaaataaaatggtagagaaaagccaaaacaaaattcttctttggtgcgatatcaacaaattctactgtataattgtgacaaatggacttactgaaaaga

SEQ ID NO: 233464 - DNA, 201 bp, Homo sapiens
cttgtctaatgtagaatctcagtatggactcagatcctgaccctgaagataatagcagtcttgttgagtgagataatgagtctccttatttagggctccawttttaagtacactgtgactagtagctagcatttcttatgacagcatcaaatcccttccattggatgatctacctctatggaacacttgcatttatagcat

SEQ ID NO: 233465 - DNA, 201 bp, Homo sapiens
aacactatggattttggatgtcttctttgttgtggagtcctgtcttgtgcattgtaagatttttaccctactagatgccagtagtgcccagcaattttgasaaccaaaatttctccagacattgccgggtgtcccttggggtgcaaaattgtcctgaatgagaacgagtgaatatgttaataattacactgctgcaggttg

SEQ ID NO: 233466 - DNA, 201 bp, Homo sapiens
taagaagactgaaagcaagtgtcatcatgcatgattttaagttctatatttattatatcgttatgagactccaagctaagatgttaacaaaaacaaatctyagcaccaccaaattaaatccattagatatcccagtgaagcaaaagtaaaatcatcctttaggaatatttcaataacccatgaaagattcctatagaaaaa

SEQ ID NO: 233467 - DNA, 201 bp, Homo sapiens
tctttggggaaagattatatgaattactttatatagttctcttagtattacaaggtcctcatcataaacatctggctgctgcttcagtcacttgtggtttwtttttttttttttggtctgaaaattggctaagatgtatagactaggcaagggatcatgacttttacattgaagcagctaaccaaagctaattgatgagct

SEQ ID NO: 233468 - DNA, 201 bp, Homo sapiens
tttgcattcatctggctaataatgtacaacacttcttggatctatgacttgatgtttgttgggtttcatattttggaagcttttcaaccatttttgcttcraatgttgtttgtttcttgtttccttttaaatcttctccagttaggcctacaatttgaagaatattagaactttctctgtgccttatttgtttcttacatt

SEQ ID NO: 233469 - DNA, 201 bp, Homo sapiens
aagggtaattgagacctcatctaaggccagtagataataggactgttcagtaaagaggctgagaatgtgttagaatgttttaggtgtgaagctgagtttayagctggaaaaataaagaagacttgaatcttactataacaggaaagtcagataactacgtagggttctacagaaggagtagatgattcttgggaataatat

SEQ ID NO: 233470 - DNA, 201 bp, Homo sapiens
agttagtaagcactttataataaagcttactttatttcaagttgtcacataggtcctaagcttgacagatccaggtcaatttcctttactacatgctcttrgaatcctgtttctttgtttgaaaattcttatttttagctggtatttatttattcctcagtagggttgactaagatctatcctcacttgacttcaggatct

SEQ ID NO: 233471 - DNA, 201 bp, Homo sapiens
ggaggttcactcactttttacaagtattaagactatttcttttgtatccttcacctctcccaatggccaacctcaatacttttgaagtacttgggataccmatccttgttttcttcatgttcccttttacaatatggttgaatagaatgaaatatctctttattaaatgtataatattagcactggtatgttgaggtcttt

SEQ ID NO: 233472 - DNA, 201 bp, Homo sapiens
aagcccatggggagtcattcaacagcagcatctggaaggaaacaataagtgattggaaggtttacttttcaggcaaatgattaagaggcgattaaatgaargtgttaggatgtgagggagggaaggaagcactgaaggtgtatatataatatggaacagagggattatggaaaagacttaacagaatgaactacagatcac

SEQ ID NO: 233473 - DNA, 201 bp, Homo sapiens
tatacttatgtttattttcctaccttctttgaataactggcttcaactgcaccatttcgggtgccttcaactggactatttctagtggcagaaaaaaaaaattattttatatattcacagccttccctcttcctccaagatgtacccaatgctttaaaaaattaataccattgttaagataaatatcttgttagatatttt

SEQ ID NO: 233474 - DNA, 201 bp, Homo sapiens
atgaaacagaacatgagattcatataatgcagaacatactgggaagcatttttctggaatagtaaaggacagtgatgatgtttagttattcagagccactrggcgtcatttcctagagttgcaaagacatcctgctattacacctttatagttttgctctagttatattggccctactttaaagtcctaagaaaacgctgg

SEQ ID NO: 233475 - DNA, 201 bp, Homo sapiens
ttgaactatgcaactacaactctcatttatctctcagccttttccaaggcaaatatccacaattgcctcaaccatggattatattatgttttctagacatrcgagttttctccaaatctgcttttcttctatatatttaactgtaattatacttatgtttattttcctaccttctttgaataactggcttcaactgcacca

SEQ ID NO: 233476 - DNA, 201 bp, Homo sapiens
atgttgacattaaaagttactgtcatactaaatttcaaaaattgctgggttaaaaaatactgacaccaaaaaagttgcataactggactacagagctcaartaacaacagaataatactgtcccccttacttttagatatggatggcaattaagtgaattcaatagatttattttagaaaagtgttttgccatggatagat

SEQ ID NO: 233477 - DNA, 201 bp, Homo sapiens
tgaacccaggaggcggaggttgcagtgagccgagattgcgctactgcactccagcctgggcaacagagcaagactccatctcagaaaaaaaaaaaaaaaaagaaagaaaaaagaaaagattggactcaacaccaaaagcccagcataactcctttgtgagttttgaccctacatattgttccagttctggggcgattcctt

SEQ ID NO: 233478 - DNA, 201 bp, Homo sapiens
ttgaacccaggaggcggaggttgcagtgagccgagattgcgctactgcactccagcctgggcaacagagcaagactccatctcagaaaaaaaaaaaaaaaaagaaagaaaaaagaaaagattggactcaacaccaaaagcccagcataactcctttgtgagttttgaccctacatattgttccagttctggggcgattcct

SEQ ID NO: 233479 - DNA, 201 bp, Homo sapiens
aacagaacaacaaacaaagctcactttctttccatgattattccatctggagagatgcctaggggttactagatttaggaaaagaggaaagtagacatttwgtttcaaatatgtaaatgtctgcagttgccccaatgtttgaagccaaaaatgttatatttgtattattatattttgaagcagttgtattacaatttattt

SEQ ID NO: 233480 - DNA, 201 bp, Homo sapiens
tgcattacgtaatacaatttgtattcataggtattccttcaaggataccgcccttattctcagtgctccttgtactgtgtaacaaagactacaaatttgtyacaatgtgaggcagaaaaaggaatgaaaccggtagaaggttaagaagacatagtaggatgaaataatccatcagaacattaattatcccaaatgtatttg

SEQ ID NO: 233481 - DNA, 201 bp, Homo sapiens
atagtatttctggccttggtttaaaaaatatatatgtatatatatgcatacaccttttctgtaatccttatggctttttcaagtttgtttctttatatagyaaagaggatagttttttttctaagtcagttcttatctataaactgctccaaaacattattttgattgtccttcgctgatgctttgttgactgcttttcta

SEQ ID NO: 233482 - DNA, 201 bp, Homo sapiens
atgactagatatataatgttcacagatgaatgaatttggtatcttaaagatggcaattgtcctggttttgatttataaactttcaagtgaaatccctagcygtcttgttcgtgaaagttgatgatcaaatttaaccttcaaaaagaggagtaaaggagtaaagagcacagagtaaacaagacacattttagaacaagagag

SEQ ID NO: 233483 - DNA, 201 bp, Homo sapiens
ataagagcatttgacaaaatttcagttggaaatagtaactgatcaaacataagagaaaaatacaatattcaagttagcagcaaaaacaataaagtactagragaaaccaggtatgtgtttaaaccaaatacatattaaaacctttgttgtaaaacctgtatatcacaattccaaaatgtttttgaaagaaatacaaataaa

SEQ ID NO: 233484 - DNA, 201 bp, Homo sapiens
ttgcatttcctcatatgcaaaagaattctgttacactagaagataaatcaaagtatatgctcatacccttttcatgaaaatttcttagattcaaaacaaayatagttaatcaaaatattttgtttgcttttcttggcaattttaattaaattagtgtgattatagtaattccaaaaattacagatatggatgtttctttgt

SEQ ID NO: 233485 - DNA, 201 bp, Homo sapiens
aataagagcatttgacaaaatttcagttggaaatagtaactgatcaaacataagagaaaaatacaatattcaagttagcagcaaaaacaataaagtactargagaaaccaggtatgtgtttaaaccaaatacatattaaaacctttgttgtaaaacctgtatatcacaattccaaaatgtttttgaaagaaatacaaataa

SEQ ID NO: 233486 - DNA, 201 bp, Homo sapiens
acataaaatatgttcaacattaatctgaaaaatgcaaatttaaatgtgatttcatgttatacctggtatattggcaaaaatagaaaagccagacagtatcyaatgttggtaaagatgtagacttacagaaactctcacatactattggtgatttgtgcacatgtgtactctatgacccagcaatttattccttggtatata

SEQ ID NO: 233487 - DNA, 201 bp, Homo sapiens
actttttcatgtatcatttatctctcttctcagctaaagactggggccgggcacagtggctcactcctgtaatgccatgactttgggaggccgaggtaggyggtttgcctgaggtcaggagttcgagaccagcctggccaacatagtgaaaccccgtctctactaaaaatagaaaaaaattagccaggcatggtggcatgt

SEQ ID NO: 233488 - DNA, 201 bp, Homo sapiens
atcttttaaaatttatttttaaataaccatgcaattttcacattgtaagggccactttttcatgtatcatttatctctcttctcagctaaagactggggcygggcacagtggctcactcctgtaatgccatgactttgggaggccgaggtaggtggtttgcctgaggtcaggagttcgagaccagcctggccaacatagtg

SEQ ID NO: 233489 - DNA, 201 bp, Homo sapiens
taaggcctgttcctaatactaaatatgttatttccaattatatactcagggactgagaaataaccacagggaataaggacccaggactccacttattatgyggtcctcctatttctcattttaacaatggggatataatgatactttgggtctccaagtgtcattgtcaaattgaaccttgtatccaagaatctgaaattt

SEQ ID NO: 233490 - DNA, 201 bp, Homo sapiens
tggtcagtcttgatacagtggatcaatgtgatgttctgcagaatgtccagctatttcaggtccctttgaaatatattatgacagacaataggtgaatgaayatagcactgagagaattctataaaatctgctgttgtctgtcccaagcaaattggaattttaatgctgttttttctttcaggtacagaaaagaaagctttc

SEQ ID NO: 233491 - DNA, 201 bp, Homo sapiens
aacataatgacctccagttccacccatgtcgttgcaaataacgggatctcattcttttttatggctgaatagtattccattgtgtctatacaccacattayctttatccatttgtctattgatggacacaggttgcttccaaatcttggctattgtgaatagtgctgcagtaaacatgtaagtacagatatctgttaggta

SEQ ID NO: 233492 - DNA, 201 bp, Homo sapiens
ttttggatccctgcatttttttaaaatgccccttaaattacttttataatttattaattcattttaattgagtttcctttcatatagttagaactttggtyagtcttgatacagtggatcaatgtgatgttctgcagaatgtccagctatttcaggtccctttgaaatatattatgacagacaataggtgaatgaatatag

SEQ ID NO: 233493 - DNA, 201 bp, Homo sapiens
attgtctgtcccgagtttgaaatggaggactggtagcattcatgtttaggattttaaatctctatgctacatgtatatgccctacagagatagatcactayggggttgtctatttgagactttagattctgtaatgagtattcagcaatcatttatcttttttgtgtgtgtttgtttgtttttggatccctgcattttttt

SEQ ID NO: 233494 - DNA, 201 bp, Homo sapiens
ttctcagcagatactagactgcctgacagttaaagttcccatgacagatgtggaaaggctgccacaggactttcctgttgtatggtaaatggtccttgtakgaagcccaagcctggtgaggatagtccctagctccataaactcattcttttcagctgcaaaacgcaagtgtcaactaggtgatgagagatttctttcagc

SEQ ID NO: 233495 - DNA, 201 bp, Homo sapiens
ccacaactgtttttagctattgtaacctccattttttatagatgagtaaatgaggtacagagtggtaatagaatttttcactatactagggatggaaaatrtattttttattgcagaatagagtcaatcattgatagtagatacctgaatttagataatagtttctacctggatagcagatactggagtaggtagctctat

SEQ ID NO: 233496 - DNA, 201 bp, Homo sapiens
tggatgaataaataaacaaaaaataattttctgtacctattatttgtataatggtcatcacatatatacatacagcactatatgtggctttaccacaactstttttagctattgtaacctccattttttatagatgagtaaatgaggtacagagtggtaatagaatttttcactatactagggatggaaaatgtatttttt

SEQ ID NO: 233497 - DNA, 201 bp, Homo sapiens
tttattttaggaatattttaactagggtatctccttcaaaattagtctctgtatccaaataggctttctttgaccaaattctagcacagggtcctacacaygttaaatgtccactcagtagtaagtggatgaataaataaacaaaaaataattttctgtacctattatttgtataatggtcatcacatatatacatacagc

SEQ ID NO: 233498 - DNA, 201 bp, Homo sapiens
caattagaatcactaatgtaccccaagaatgatggctaaatgaataactgggttgcttaaaggaatcgtgaagtctcttttgcttgagggtgtaggtcaaytcaaaccttatcctgtgatgtgaatgtctaactattcatctgccagctccatattctgcaagtggatccacaatttaaaaaattttagatctttttacac

SEQ ID NO: 233499 - DNA, 201 bp, Homo sapiens
gtttttttcattgaattaactatagtggcaattagaatcactaatgtaccccaagaatgatggctaaatgaataactgggttgcttaaaggaatcgtgaartctcttttgcttgagggtgtaggtcaattcaaaccttatcctgtgatgtgaatgtctaactattcatctgccagctccatattctgcaagtggatccaca

SEQ ID NO: 233500 - DNA, 201 bp, Homo sapiens
tgggtatacattttaatacttctatttgctttagttcatctccaacatctttatattaatataagcatctctctgattttggcaataggtgatcaattagwttttgtctttagggataatataatcttcatctatttctagatatccacaggtaatatggatagttggaaaaagctgtttctgagctacaggaaattttaa

SEQ ID NO: 233501 - DNA, 201 bp, Homo sapiens
ttagtgtctggcttaaaggctcatccccttaagcaggatcagattaaagacaaccatatactttaaagcttagtggctggaaaaatatacgaataaatctycgtgtaagactatgtagtataaattagtgtctgtagatgaattctcagtttgggggttcttggaagtaaaatggagagagcaaaatattgctatcattag

SEQ ID NO: 233502 - DNA, 201 bp, Homo sapiens
tgatactctaggataaaagggtaggcacagggaataatatacattgtgatctccattctcacaagtcacagctcactggaccaaggaaactcttcaacacrtatctgataggtagaacatcttttttgggatccagaggctgaaaaggtcataggcagagtcttcgagtgcagatatacacagggaagtaaagtcgaggct

SEQ ID NO: 233503 - DNA, 201 bp, Homo sapiens
gttgtactgaacataaactattatcacatgactgtttttttagcttaatgtaatataaccagttaatggttatatgcccagcccttagacacaccaccccraaaacacacaattagaagcactgataactccaatagtccaaattcaggaatctcttagctttttagttgaacagctttctcatatattgccaaaatattt

SEQ ID NO: 233504 - DNA, 201 bp, Homo sapiens
gcaccatccttttcctcaataattttttaatctatctaattaaatgtgaaaatcatgtcaaattgcatagtcaggaagttgtatgtatccacattcaaaayttcttgtactgacttaacttttaaaaaaatctgtgtaagtatgattaactgtaagaatcatgtatggctacatctactaaagacttttcaggttaaataa

SEQ ID NO: 233505 - DNA, 201 bp, Homo sapiens
aaacttcttgtactgacttaacttttaaaaaaatctgtgtaagtatgattaactgtaagaatcatgtatggctacatctactaaagacttttcaggttaartaatactattttataaaaattatgtctttttctaatggaacttttaacagatttcccaagaaatgtaaaaatcatagtaccctctgtcctcctagcccaa

SEQ ID NO: 233506 - DNA, 201 bp, Homo sapiens
ttttaaaaaaatctgtgtaagtatgattaactgtaagaatcatgtatggctacatctactaaagacttttcaggttaaataatactattttataaaaattrtgtctttttctaatggaacttttaacagatttcccaagaaatgtaaaaatcatagtaccctctgtcctcctagcccaaaattacattatgcattttattt

SEQ ID NO: 233507 - DNA, 201 bp, Homo sapiens
tcccatgaagtaatttttgtaactttttatttttaaaaaatgacataattgtagcttagcaaggttagggaagttgtccaatgtttcctacttgaaaaatrgtagaaccgggatttcaacccaactcatcttgtgtctttccatctctttagtctatttatttcgtgcaaatgccacacttttaatgaatgtgtctctata

SEQ ID NO: 233508 - DNA, 201 bp, Homo sapiens
caagtcacaatgtgggaaaagatattttgaattaatatacatgacaaaggaatagtatcaagaatacatataaaactcctattaatctatgataaaataamtattaacaggtcagtggtaaaatggacaaataacttgaagagacactgcacagaaaaggtgtattaatagcaagtaagttctgaaaagtcattacacttc

SEQ ID NO: 233509 - DNA, 201 bp, Homo sapiens
tagtcaggaagttgtatgtatccacattcaaaacttcttgtactgacttaacttttaaaaaaatctgtgtaagtatgattaactgtaagaatcatgtatgrctacatctactaaagacttttcaggttaaataatactattttataaaaattatgtctttttctaatggaacttttaacagatttcccaagaaatgtaaaa

SEQ ID NO: 233510 - DNA, 201 bp, Homo sapiens
tttctattttgtttaatcagggtaatcactatatagttacatctcattaacatcactgctgattattagtgagtatctagcttgtggaatgtgtcatgcarttgaaatcagaggaactagcatgcaaatctggcattattaactattttattaacactctagcacccaaatgcagccctcttatctcagcctacatgtgct

SEQ ID NO: 233511 - DNA, 201 bp, Homo sapiens
agtggaactaatcttgactttggagcaattctgtgctcaaaacatgactccagaacttttactccctgtgtgatatcatgctaaggatttaccttttttgygctatagctgtttcatctgtaaaattggcataacaacacttagtttacacagttgtttgtagatgacaaaaagcacatccatagtactaaaaacagtaca

SEQ ID NO: 233512 - DNA, 201 bp, Homo sapiens
gcaagatgttaataacaggaggaattgggtgtaggtctatggtaattatctgtaatctcttcacaatttttctaaaaatctaaaaccctattaaataaaawttaaaacaaaaatatatattataagattgaataacaagtcacaatgtgggaaaagatattttgaattaatatacatgacaaaggaatagtatcaagaata

SEQ ID NO: 233513 - DNA, 201 bp, Homo sapiens
ggttaagtgaaaataataaagttccgaattcctatctgtaataactcattttacaagatcccattctgtaaaacagttaagcttatctctacttattatamgtctatgagactgagaactactttcctttacattcactggcatttttttttatttcagatattaatttaaagactctaactgtccatgtaactataacct

SEQ ID NO: 233514 - DNA, 201 bp, Homo sapiens
atgcaaaaaagagacgggaatgtaaacctgtagatggaggctctaaaagaagaataaaaaagaaatgctagaaaaaaaaactaatagaaatgaagaatgcygttgatagactcattggtagactagacgtggctaaggagagaatcagtgagctgaaaaatatgtcagtagacacttcataaaactgaaatgcaaagagga

SEQ ID NO: 233515 - DNA, 201 bp, Homo sapiens
tgagaactggggaaatgcatcctgaaggaatcagtctcctgtgatgaagagcaaagacgtgacggacaagaaagaactctttttcttccttggacattaayctgtccatgattaatattttgtgtattttcctgcataccccatgtttatgtgaagtaagtgaaatagcacttgaatttgactcatatctaaagattttta

SEQ ID NO: 233516 - DNA, 201 bp, Homo sapiens
aaaggaagggaataaagattggttaagtgaaaataataaagttccgaattcctatctgtaataactcattttacaagatcccattctgtaaaacagttaarcttatctctacttattatacgtctatgagactgagaactactttcctttacattcactggcatttttttttatttcagatattaatttaaagactctaac

SEQ ID NO: 233517 - DNA, 201 bp, Homo sapiens
ctcaaggtgggttaataaaaatcactctgccaaaagttttctagttagagcttatgaaaaagagttcctttctcttacataaaactctgtgacttttgatrtagccgacttgaaagaataaagccaacacacagagaagaaaaaaaatgatgagagagatgaagagagagaacgaaggaaaaaagaagggaagaaagagac

SEQ ID NO: 233518 - DNA, 201 bp, Homo sapiens
tgtgtattcaaacttccaacataagttataggtatactattaaaatcaatacataaatttaggaagattgtagaatataagcacaatatataaaaattacyggtactgttatatatactagtaacaaatattcattatgaaatgaaatgacacacttccaattgcaatattattaaaatatggtaaggcatagatttaaca

SEQ ID NO: 233519 - DNA, 201 bp, Homo sapiens
aataatgcattctgatgatagcaaaccaagttatataaagaaaacccaatagccctttttctgcatttctatattgaggattccagttttggtttggcatrttttcacagctttttgcatgttcattttgtatactttccactgcttatatactattcttcatatttattgttcatgccacaatttattatttttaaatat

SEQ ID NO: 233520 - DNA, 201 bp, Homo sapiens
taaaaatcactctgccaaaagttttctagttagagcttatgaaaaagagttcctttctcttacataaaactctgtgacttttgatatagccgacttgaaaraataaagccaacacacagagaagaaaaaaaatgatgagagagatgaagagagagaacgaaggaaaaaagaagggaagaaagagacagaaagtaggatgtt

SEQ ID NO: 233521 - DNA, 201 bp, Homo sapiens
gtctagggcctcaactggatgactcaaatgctggaggcaaaagtcatctggaggctacttcaatcacaaatttagggggtgacactgactattggctgggrgcctcagttcctcttcacatgggttctccaagagggtctccttatgtggcctctttgcgtaggctaatttgggctttcttacaggatgttggctgatttc

SEQ ID NO: 233522 - DNA, 201 bp, Homo sapiens
gagaagaaaaaaaatgatgagagagatgaagagagagaacgaaggaaaaaagaagggaagaaagagacagaaagtaggatgttggaatctctggttcagtrtttcccaagattaaccaaccaaactttttctataattcacttaagggaaccaatgaatttctctcctgcccttttcttggctttaataactcaaacttct

SEQ ID NO: 233523 - DNA, 201 bp, Homo sapiens
gcataagtaaacatttactatgctcactaattctgtgggccaggatttgaacaggacatgggggacaggttgtgtctggtcttcagtgtctagggcctcarctggatgactcaaatgctggaggcaaaagtcatctggaggctacttcaatcacaaatttagggggtgacactgactattggctgggagcctcagttcctc

SEQ ID NO: 233524 - DNA, 201 bp, Homo sapiens
ggtgtggttcatggtgccacaaaataatgacaatagtaaaatcaaagatcagtgatcacagatcaccataacagatataataataatgaaaaagttttaartattgtgagaattaccaaaatgtgacacagagatacaaagtgagcacattctgttggaaaaatgatgccaatagatcttgatcaactcagagctcccaca

SEQ ID NO: 233525 - DNA, 201 bp, Homo sapiens
accacttacgcaaccgtccgtctttcttttccaaccctattggtttttcagtgttgcagcttttatagctgtaaaatgaattacctgagaacttagtggcrtaagtaaacatttactatgctcactaattctgtgggccaggatttgaacaggacatgggggacaggttgtgtctggtcttcagtgtctagggcctcaact

SEQ ID NO: 233526 - DNA, 201 bp, Homo sapiens
cttaatttcaatattgttgtgtctcagggaatggggaggcctaaggagacggagagaggtggggaatgcccaattgatagatcagttgaacacacacaacmtttacttattaaatttgccatcttatatggtgtggttcatggtgccacaaaataatgacaatagtaaaatcaaagatcagtgatcacagatcaccataac

SEQ ID NO: 233527 - DNA, 201 bp, Homo sapiens
atataaacacattttttatccatttattacctaacccattctttccctactaatacaaaatgttcatccatgacacataacgtgcttaaattgtgtctgtytctggaatttctattctgtgataacaatagctgatattaataatttttaaaatcatatcttacctgagttctatgttgtcctcatgacaatcccatgaag

SEQ ID NO: 233528 - DNA, 201 bp, Homo sapiens
gtagcacttttaattcccttctgactttttctttgcatttaaaacttttctaactgtttggcataagaggcttggtttatcacctatcggggctttcaacrttcctttctcactaaacttaatcattttagcttttgatttaaagtgagagatatgtgagtcttcctttcacttgaacattacaggccattttaaggttgt

SEQ ID NO: 233529 - DNA, 201 bp, Homo sapiens
tgaggatataataagcggcatatagatcatatttaaatccagcagactgtacaagatgataaatggggcaccgagacattccatccttaagagatcagagsagagtagtttgaggagactgagaaatagtgatttatgaagtaagagaaaactgagagtcttgagccctagagtctcaaaaaagggtttcaagaagaaaga

SEQ ID NO: 233530 - DNA, 201 bp, Homo sapiens
caggctggagtgcagtggtatgatcatagctcactgcagcctcaaactcctaggctcaagtgatcttctctcagtctccccagtagctgggaacacagacmtgagccactgtgcctggcctgtaatattttttgtactttatagcatacataatattttatatctatgtaaaaacacagcagtgtccagtttaatgaattc

SEQ ID NO: 233531 - DNA, 201 bp, Homo sapiens
tttttatgttatccacaataataaatgcatttcaggctctcaaaatatattgttcattcacttaataataatggcatgttattttgtgttgcttacagaawggtgtattccacatgaatgtagcaaagtagctcctatgtttatagatcttaattccctttatttgagattacatataatttcatcactcctggcattgtt

SEQ ID NO: 233532 - DNA, 201 bp, Homo sapiens
agggggtgacactgactattggctgggagcctcagttcctcttcacatgggttctccaagagggtctccttatgtggcctctttgcgtaggctaatttggrctttcttacaggatgttggctgatttccccacagtggctttccccaaaagagaaagccatatggaagctgtatccttttttgtaacctggcttcagaagt

SEQ ID NO: 233533 - DNA, 201 bp, Homo sapiens
ttttcaatgccctgtttcaacagctcctcattcctcctctccaaaggagcttcagtctgtgatgctgatgctgcaccatggacctctcaggaagccctgakccccatcatatttgagggcacctctccctcttttactaaaggtgagaataggagaagcctaacaacttctcaaactgtttgaaaggagaataaaatatga

SEQ ID NO: 233534 - DNA, 201 bp, Homo sapiens
attcacaggctgaggtggaaaaacctgaatgaatcacttttctctcagagacatgttattcagactctgtaaagttattccatagtggtttttttttttttgaaaactttcatgaccttctccttttgttctgtacatgccacaccaccaaaactcttgtaagctttataggctatttctgatacatgcatcctttcttag

SEQ ID NO: 233535 - DNA, 201 bp, Homo sapiens
ctataactattatctatattcatccatctatctaatctatcactttacaaaaataattttaagaccccataatcttataaattgttttatacattttttttcaaatttgatgagtttggaggttcactcactttttacaagtattaagactatttcttttgtatccttcacctctcccaatggccaacctcaatacttttg

SEQ ID NO: 233536 - DNA, 201 bp, Homo sapiens
agctagaattttaactcaagcagttctagttctaaagcctgcaatttttgccatgataccagtgcttcctaaacttttcttgtgataagagtcacctaaaktgtttattaaatatagaggaaattttgattcagtagctctgagttggagcccaattatctttatttctacttaacccaattttagtaaacactgtgttgg

SEQ ID NO: 233537 - DNA, 201 bp, Homo sapiens
tttcacttattatctgtgtgtaaaccagagtagcacttttaattcccttctgactttttctttgcatttaaaacttttctaactgtttggcataagaggcytggtttatcacctatcggggctttcaacattcctttctcactaaacttaatcattttagcttttgatttaaagtgagagatatgtgagtcttcctttcac

SEQ ID NO: 233538 - DNA, 201 bp, Homo sapiens
gatggagcttttgagtaggcagttgcatataaaagaattgggaagggatatgaagtcttcagtgaggatataataagcggcatatagatcatatttaaatscagcagactgtacaagatgataaatggggcaccgagacattccatccttaagagatcagagcagagtagtttgaggagactgagaaatagtgatttatga

SEQ ID NO: 233539 - DNA, 201 bp, Homo sapiens
tctagcttttaaagccacctttgatttgacttgacttacatgcacttttgaaggaaagcttaaggctgttcacattttgattcctgaagggaaatggctgrctagtgcatgctgagaacaaggccagcatcccaggggagtgcggctttgtctctgtgccattagcaagtgtgttccttggtgtttcataagagatatagc

SEQ ID NO: 233540 - DNA, 201 bp, Homo sapiens
ttgtgagctctcccaattgtcagagtctggcctggatttgtacataaaaaaatataatatagcaacctaaggaattaaatggtattccaatcgccatgtgytacttgaagaccattgcaggagaaccgctgtatacatcacagcaatactttgtataactccccttttttcttctcatctcacaccgtttcactgctatag

SEQ ID NO: 233541 - DNA, 201 bp, Homo sapiens
agaagtgacagttttttttccatttacttaaaatctctcttcaatagagagcataatatacaatataaattatttctatcaattatgaccatttagaattrttttatgaattatttaaaagtactaatttaaccaaaaaaaggtttattggttatcttctatgtgaaagtctctctgctgttaggcaaactggttaatttt

SEQ ID NO: 233542 - DNA, 201 bp, Homo sapiens
aatctcagtagtcttgaggtggctgtgagtctttttgggtatctcagcctcagccaagtcctgggtttattgcattttaagagagtccttatctctgtagyatgaagaatctagcttttaaagccacctttgatttgacttgacttacatgcacttttgaaggaaagcttaaggctgttcacattttgattcctgaaggga

SEQ ID NO: 233543 - DNA, 201 bp, Homo sapiens
atatcttatatgatatactgggttttatatattttcagtgtatgagaatatttacaccaacattctgaaagagtgcagcaattgtgagctctcccaattgkcagagtctggcctggatttgtacataaaaaaatataatatagcaacctaaggaattaaatggtattccaatcgccatgtgctacttgaagaccattgcag

SEQ ID NO: 233544 - DNA, 201 bp, Homo sapiens
cacatatggccttaatttggaaattttcttgttgcgccatggtgtttgcataaaacacattaagctttttatttttaaacttcttttcatgtttattttcrattttttctcacttgaaagttcatatttacaaggaaattttatgcacatacattcttgcccctgaatataatgtaacacagacttttcctttggaacatt

SEQ ID NO: 233545 - DNA, 201 bp, Homo sapiens
ggtgtgaagctgagtttatagctggaaaaataaagaagacttgaatcttactataacaggaaagtcagataactacgtagggttctacagaaggagtagaygattcttgggaataatatattgggaaatgactaaagaaagctggactgtaaaataaggtggcttatcaagtgagtaaatctcagtagtcttgaggtggct

SEQ ID NO: 233546 - DNA, 201 bp, Homo sapiens
attttgaattttgtttctccttaactatttacatacttttggtgccagttaatgtaggacattaacatggtgaatatgcactcttgctctactctacagtkagttgtaatatgaggtaaaattgtgtactatatcttatatgatatactgggttttatatattttcagtgtatgagaatatttacaccaacattctgaaag

SEQ ID NO: 233547 - DNA, 201 bp, Homo sapiens
gagtcggaaaagtaaaaaagaatgaacactggattcatcagtagaagggttttttgtttgttgattttctttttaatcacagtttaacagttttttgtttkttgttgttgtgttttgtaaatcattgtttccatgcttacatcagcaccattaatttatgttggttgatactctaggataaaagggtaggcacagggaata

SEQ ID NO: 233548 - DNA, 201 bp, Homo sapiens
tatgctcttgactgtatgtgtatgtttgtatgtgcttatgcatatggatgatgtgctagcaactgatttctattctttgaaaaaattcttctctactttttctacattagcattttaattttctttaaatatttagctcacttgattttagtctttttaaaaattaagtgctttaagactatacctgcccatttctctatt

SEQ ID NO: 233549 - DNA, 201 bp, Homo sapiens
agagcctaaacatttagaggatctctaagtgatcctttttttcattatgcctctaaggccctctagaattcttttttagttttctgattccatatcccggygggtgtcgcatagaccagcatagaccaagtctgtggattgaagtaagggaaagatttatgctaacagtggcagagctgtctttgaatgatgatgaggtca

SEQ ID NO: 233550 - DNA, 201 bp, Homo sapiens
cacactaatagtgtagtagagggatctgagggatctttctggggttcctgggttttattttttttttattacttaaatatatgatttatgggaccagagaytgttgtatggaattcaagaataattatcatattatttaatatagagaaattattctgagcatgtcgatcccagtgtgggatatttataatccctcaaaac

SEQ ID NO: 233551 - DNA, 201 bp, Homo sapiens
tatttgaagggacctaatttcatatcctaccataggactttaaaaatcccccttttcaaatatcttataccctaactctgttttagagcctaaacatttasaggatctctaagtgatcctttttttcattatgcctctaaggccctctagaattcttttttagttttctgattccatatcccggtgggtgtcgcatagacc

SEQ ID NO: 233552 - DNA, 201 bp, Homo sapiens
gcattgacatcataagaaagacatatacacaactgctttcttgaaactgtatgtaactgatacagtgttcaaatgttttgaaacttttatgtttatgaaaracagccacatgtggtactggaatgtcactgcaaacacacgtggactggtcctgagtggcgctgagtgaggtgttcaccagtgctctcttcttacccctct

SEQ ID NO: 233553 - DNA, 201 bp, Homo sapiens
atgcttttagaataaagttagagaattggataatatgtgaaaatctggagtaaattaaccttactctaagcttcaccacctacagttgagctgttaccaaygaacaacaccattttacttttgatcaaagattattctagctccagagagccttagcagaatttctgttagcctcaaagacgagattagacataaaagaaa

SEQ ID NO: 233554 - DNA, 201 bp, Homo sapiens
agcagcagaggaaattactgaatgtgcagatttccagtttacagtctcagagatttttggttcattggggccaatacagaatatagaaataagcattttaraagtcgtcccagatcattctgacctaggcagtcctcaggccagtatttggaagcacagctctaagcacactggacccttcagtaaatgacacatactgag

SEQ ID NO: 233555 - DNA, 201 bp, Homo sapiens
ctgtgttacattgccccagggcttaatttatagccacagtgtaaatacatggataagagagtaaaagtggtttgcatgataagcaacatgatatgaggccrgagaagctactataaatgagtgactgagaaaatgttcaaaaagcagagatgtagagctttctgtcttttccgccatcagctggcatagagtttgataaac

SEQ ID NO: 233556 - DNA, 201 bp, Homo sapiens
gccactgtgcctggcctgtaatattttttgtactttatagcatacataatattttatatctatgtaaaaacacagcagtgtccagtttaatgaattctgamgtttaccccccaaatagatgtctcctaataaatggtggaatacatgtgtaaatccgcttagccacttctcctttaaaacagatttcaagttcctcctatt

SEQ ID NO: 233557 - DNA, 201 bp, Homo sapiens
accataataatgctcattgtaaagcacagcaaagaaaatctgttttgtagggtctatgtgggttacacaggaatctactccaaaacttctactcctcaccscagggaggagttgcagacttttctaaaccatgcatataaagcagcagaggaaattactgaatgtgcagatttccagtttacagtctcagagatttttggt

SEQ ID NO: 233558 - DNA, 201 bp, Homo sapiens
agtatgtactataattaattttatgcagttatgattcagtactgaatcattacatgcacatttctcttgaatgagaatggcactatctacagtctgtttgtgtgctgagttttgataaattttaaccttttaaaatacatttgtattattttatagtaaatgagaaaaatagattagtattaacacatattttatatagtc

SEQ ID NO: 233559 - DNA, 201 bp, Homo sapiens
atatttgtattattatattttgaagcagttgtattacaatttatttcacttcaggaggctcttaggaaatttgtatattttagaataacttttctggaatwttctctttagtagagagttctaaagaaacctgaggcataagagtaaataacttaaatcatgaaatataacatcttttaaaatttatttttaaataaccat

SEQ ID NO: 233560 - DNA, 201 bp, Homo sapiens
tttattaatttaaaaaatgaatacttgtagacattagtggatcatgactcaaatgtcttgcctgcatttacaatagaagagtttgggtcatatgcttcctrttttggtcactcttgagacgtgtaggcatttcaccccatagagggcagtacagaggtccttagtacacaaaggtaatgctgaataaggaagtacaggaaa

SEQ ID NO: 233561 - DNA, 201 bp, Homo sapiens
tatcttgttgatatttctctgagcaagatatgaaattttaccaaaactggtatttttccaaactttagtttttatcagtgaaacttttttcttttttgtcrtgggtaaaactttatgtagaacttcaatatatgatatagacaagaaagtcaccataaaagatttgttgaggtcccttctaggctgtaggagaggtcttat

SEQ ID NO: 233562 - DNA, 201 bp, Homo sapiens
cagtatgtactataattaattttatgcagttatgattcagtactgaatcattacatgcacatttctcttgaatgagaatggcactatctacagtctgtttgtgtgctgagttttgataaattttaaccttttaaaatacatttgtattattttatagtaaatgagaaaaatagattagtattaacacatattttatatagt

SEQ ID NO: 233563 - DNA, 201 bp, Homo sapiens
cctacaataaacatctcattaaaatcttctggccaggcgcggtggctcacgcctgtaatcccagcactttgggaggccgaggtcaggagatcgagaccatyctggctaacgcggtgaaaccccgtctctactaaaaatacaaaaaaattagccagacgtggtggcgggcgcctgtagtcccagctgctggtaaggctgagg

SEQ ID NO: 233564 - DNA, 201 bp, Homo sapiens
ttattttaggaatattttaactagggtatctccttcaaaattagtctctgtatccaaataggctttctttgaccaaattctagcacagggtcctacacacrttaaatgtccactcagtagtaagtggatgaataaataaacaaaaaataattttctgtacctattatttgtataatggtcatcacatatatacatacagca

SEQ ID NO: 233565 - DNA, 201 bp, Homo sapiens
gtctctttcctgttgtacgcctgcatatagaaagtaatactgtcagttatgtctaatccagctactggagattgtagacagatagcttctgacattatctsctcattttgaagagataatgaatattgtcctggattatcgatagagttggtggtggggcaaagaaagcaaagtatccttcaaaaatatatttttaaaatt

SEQ ID NO: 233566 - DNA, 201 bp, Homo sapiens
tcagtatgtactataattaattttatgcagttatgattcagtactgaatcattacatgcacatttctcttgaatgagaatggcactatctacagtctgtttgtgtgctgagttttgataaattttaaccttttaaaatacatttgtattattttatagtaaatgagaaaaatagattagtattaacacatattttatatag

SEQ ID NO: 233567 - DNA, 201 bp, Homo sapiens
tatccaggagttcgctatcctgtccttactcctaatcttcagggttttcaccatgctgtaagtgtgctactaatatctctaaaattgataggcctcttatygttttaaagatatttacaaagttaaaattgtgtcatatgtaactcatctgtaatacaaatactatgctaatgtactaacatgaagacatagagctccaag

SEQ ID NO: 233568 - DNA, 201 bp, Homo sapiens
gatcctaattcaacttcaccaaaaaatatttggtaaatactgtgatattaacttgatataattactaattttccatattctttcaaaatattaacctgtgractgtgatatgattaaataaaaaccctttgatgaagtcctacaagttacttagaactttatactaagcctgtgtgagtatggttcaatataatgaatagg

SEQ ID NO: 233569 - DNA, 201 bp, Homo sapiens
tactataaatgagtgactgagaaaatgttcaaaaagcagagatgtagagctttctgtcttttccgccatcagctggcatagagtttgataaacgcattgayatcataagaaagacatatacacaactgctttcttgaaactgtatgtaactgatacagtgttcaaatgttttgaaacttttatgtttatgaaagacagcca

SEQ ID NO: 233570 - DNA, 201 bp, Homo sapiens
ttaggctaggtatatttccttgaaattgtcaatttgtaaaatgctagctattatttcactagccaccattaattttaagagagttctagacatttttattrtctttatatcttcataaatttacttctgtctttaatacagtctttgctaatttcacatatttgattattgctggagagaaactgaataggctgatataac

SEQ ID NO: 233571 - DNA, 201 bp, Homo sapiens
cgctggctccagacttgcctttaaaatctatcttccatgctaccatcaaagggttacacctaacatataagtatgaataggctctacgtctgcttgagcamggatcagtggattctaatttcctgaaaggaagcctgtgctctatcacataatctggcctattattaccttttccagggttaatggtatattttgccttta

SEQ ID NO: 233572 - DNA, 201 bp, Homo sapiens
atgctgtatgtccacactgatactctgtactgattttccattgagttccaagagttaatattaggatacatatacagagagggcttttatcatttctagakcttgtttttaatctctcctaaagcttttactgaaggctgttgaaaacaaagtgtagcacaattctccacttctcttctggctgttcaaaaactgctaaaa

SEQ ID NO: 233573 - DNA, 201 bp, Homo sapiens
cttacttttaaaaagtgatagtgcattcatctaacgataacccacaagtatttaatggccctcattttaagaagctttcatcctcaacctatagtttaaayttaatcctatgttaaataaagtttgacagaaaaattaaccttagtagggtaaccctttgcacatttaagttataaatttgcatgttagttttctatcctt

SEQ ID NO: 233574 - DNA, 201 bp, Homo sapiens
ctgcctttccatttctgcttagcatttcaaaaaactgcacgtgctgaatgttgaggtagccagaagttttcaatgccctgtttcaacagctcctcattcckcctctccaaaggagcttcagtctgtgatgctgatgctgcaccatggacctctcaggaagccctgatccccatcatatttgagggcacctctccctctttt

SEQ ID NO: 233575 - DNA, 201 bp, Homo sapiens
gaaactaaaatgattctcggtaacatattcgaagttacacatttacatataactattatgtatttaagatggctgatcacactgaagtaatgaaaggcatkcatcaatatccaggagttcgctatcctgtccttactcctaatcttcagggttttcaccatgctgtaagtgtgctactaatatctctaaaattgataggcc

SEQ ID NO: 233576 - DNA, 201 bp, Homo sapiens
gcactttacctgtacttgcttatgtgtatctgtatttctgcgtttctctgcagttagaactcaattagatagaaaggcttaaaacattaaaggctttttarttgtattacatttgaagtaacagaagccaaaataggattaagagtagtagtaatatgtcacctttcacagagggtgacttttatttatcctcaaaagaaa

SEQ ID NO: 233577 - DNA, 201 bp, Homo sapiens
agccaaaataggattaagagtagtagtaatatgtcacctttcacagagggtgacttttatttatcctcaaaagaaactaattttctctatcccattgtcaytgctgtttataatgtgtgtgtgtgtgtgtgtatgtgtatatattttgttttgattagccactacctataccataagtattttaaaagtagtgatcatgta

SEQ ID NO: 233578 - DNA, 201 bp, Homo sapiens
caaaaggaaaaaaaaaggcagtccctttgtgagaagtaattggaaaatgcctcctgaccttacattaagtagatacatgggataggactataaaatgataygatttattctaggtttgttcccaagttgagtttagggcttaaactattcaaatttaatgaactcttccaaggctcaaagtattatcgaataagtgcctga

SEQ ID NO: 233579 - DNA, 201 bp, Homo sapiens
gttcagcttgaggatagaaggttgtggaacaaattaggcacagcctgcaagtacatgaagcacttttaagtacagtacgggcaccagctgtactctatacrggcaacgtaatttattgctaacccctttcccccttgtatacggaaaacatttaagcagggctagatttaggtttacatggaatgagcaaatacacacatg

SEQ ID NO: 233580 - DNA, 201 bp, Homo sapiens
tgtctctttcctgttgtacgcctgcatatagaaagtaatactgtcagttatgtctaatccagctactggagattgtagacagatagcttctgacattatcycctcattttgaagagataatgaatattgtcctggattatcgatagagttggtggtggggcaaagaaagcaaagtatccttcaaaaatatatttttaaaat

SEQ ID NO: 233581 - DNA, 201 bp, Homo sapiens
ttcagtatgtactataattaattttatgcagttatgattcagtactgaatcattacatgcacatttctcttgaatgagaatggcactatctacagtctgtttgtgtgctgagttttgataaattttaaccttttaaaatacatttgtattattttatagtaaatgagaaaaatagattagtattaacacatattttatata

SEQ ID NO: 233582 - DNA, 201 bp, Homo sapiens
tttttgtgtgtgtttgtttcttaaggaagaatttgtttctaagacattagctactttttctattaattttataaatatggagatatgatgaacacacatcktaacaagttaaagtgcatagcgattggtaatagaaggttgaaagctggggatggatttgggtgcaggctgtacttcccttagttgaggtgagcaaagttc

SEQ ID NO: 233583 - DNA, 201 bp, Homo sapiens
atcacatgaaacagaacatgagattcatataatgcagaacatactgggaagcatttttctggaatagtaaaggacagtgatgatgtttagttattcagagycactaggcgtcatttcctagagttgcaaagacatcctgctattacacctttatagttttgctctagttatattggccctactttaaagtcctaagaaaac

SEQ ID NO: 233584 - DNA, 201 bp, Homo sapiens
ttacgaatgtatcgcctttaagaggagttactgctcaaattgagttttgagttatagggtctgaaaccacattatttacatttttatagtaatcgatggcwtgtgttgaagaaattgcatgctctatgtctctttcctgttgtacgcctgcatatagaaagtaatactgtcagttatgtctaatccagctactggagattg

SEQ ID NO: 233585 - DNA, 201 bp, Homo sapiens
gggagcacttccagcatcactagttgcacttcctatgagttcattggtgttatttaaggtttatggtatttcactaaatataatgaaaaacacataagaastgcaagagatcactttgtcctgcgatatgcaatttactggaaagatgaactgttcatacagagatgattagcatcaccaggattttaagtggataccctc

SEQ ID NO: 233586 - DNA, 201 bp, Homo sapiens
tttattaaaactgtcttacttcttcaagcagaccaagatctcctctgtgctactgaggctaagatatatggggtttgtgcaaggagtctgtgaatgagacmgggttactgtacccaggctacagtgctattcataactggctacagcattttcacccagggttgtcaggaagagctctagtctcattttttctcattactg

SEQ ID NO: 233587 - DNA, 201 bp, Homo sapiens
cctcacaggcatatacagctttaggaacaaaactatatgtaaagtaagatattacatgaaattttttttctaaactttgcatatatttatagagagatcayagtttatacagaaggtatttttaatacacggtattctaatagtaggcttaggagaaataaaatcagtcaagtattctagagcaaaaattgaatcttagca

SEQ ID NO: 233588 - DNA, 201 bp, Homo sapiens
cagctcaactgatgtagtagaaagacccagccttcaagttggacagacagtttggttttaaagcctagttcagcagtttactctatttgtattctgcaacytatttaatttacttgaggctcaggttttccattggtgaaatggatttattgtggagattacaaaattttaagcaaatgtctagccccacatatgtttaaa

SEQ ID NO: 233589 - DNA, 201 bp, Homo sapiens
aagtaaaaccttagataagggaaggctactctaccagtatgggactcttaacactttttccacgtggctctgggtggggctgaggccttttaattaaaaaytactccaaggattcatcattttaagaggaaaaaacacaaaggatcaaatgaagtagtttatcaattagagtggaaagacaaatagagcaaaaaggtatag

SEQ ID NO: 233590 - DNA, 201 bp, Homo sapiens
attttcagaccatggttgactgcatgtaactaagattgcagaaagtaaaaccttagataagggaaggctactctaccagtatgggactcttaacactttttccacgtggctctgggtggggctgaggccttttaattaaaaattactccaaggattcatcattttaagaggaaaaaacacaaaggatcaaatgaagtagtt

SEQ ID NO: 233591 - DNA, 201 bp, Homo sapiens
atacctagtcaaactattgctcaagaatgaagatgaaatgaaaccatttgctgacaaaacagtctgcaacatctaccagactcttgctgaaagaactactrtgtattcacttaagtcaaaaacattgaaccagaaataaggaataagatgaaaaaaataaatggagcaattggagtttgcagcttcagaaaagtagaaatc

SEQ ID NO: 233592 - DNA, 201 bp, Homo sapiens
tgttgaataaaataatattttgtacataatcatgctatttaaaaagacagactattttacaaatctcttctaaaaaacaaacaatataagtcatcataaaatggaacatgaagtattacctgaagtgtccggcccagatcattgggaacatattcagatattgagttgggtttagtttgagggctggggaaacagggagtc

SEQ ID NO: 233593 - DNA, 201 bp, Homo sapiens
tttggaacgggtctgggtaaaacttaaccaccaggcaatcaaagctgaatgaaaatattatggcatagttgtgaggaaattcctgagattagttagatacrgtcaggtccatgtaatataactttttacacaagggaatcagtagagcaatccaggtgatgcagtattgctaatagttgagtgattttcaatgttggcagt

SEQ ID NO: 233594 - DNA, 201 bp, Homo sapiens
ttcaggtctcagagatttaagtggatcattaaaaatttgagagcttggctggagacagagtcaaaagccaggacatacagaactctgagaaaagtctctgraactacattggtttaatttgttgaataaaataatattttgtacataatcatgctatttaaaaagacagactattttacaaatctcttctaaaaaacaaac

SEQ ID NO: 233595 - DNA, 201 bp, Homo sapiens
aattgttttggaacatatcctaagcatcagtgtttatcttttttaaagcaccaaggtgattctgtgcagccaaggttgagaaccactgtaatagattgttrgagaagagcagaagtccagaagctggctttggccgcttgtcaaagaagagaattcagttcatattcatgacggtagaggccttttctcactcaggaaaag

SEQ ID NO: 233596 - DNA, 201 bp, Homo sapiens
ttatttagaaacactattcatatgaaattagaacacagaatacctggaagaagtactctgaataaagtttggaaataataagtattcgataaatttatttytaatcttatttaactttttcaatataattcagcagaaaacataatcttaggcattcttcaattaattcaaaattgaatcaaaaatttattttaaaaatgt

SEQ ID NO: 233597 - DNA, 201 bp, Homo sapiens
attttattattaaaagagtaataggcaggatttggtctctgggccttagtgtaccaacctctgctttagaatgttaaagtatacagttaagggaacatagytgagaaccatcacattagccttggagaaagtagccgcatgcgtgactagatcaaaacagtgttccctcacaagatagggaagagcatatgaacatgaaat

SEQ ID NO: 233598 - DNA, 201 bp, Homo sapiens
tttagaagtttttatcatgagattaactttattatgaattccttaaaagtgtttacaaatttacttttatttagaaacactattcatatgaaattagaacrcagaatacctggaagaagtactctgaataaagtttggaaataataagtattcgataaatttatttttaatcttatttaactttttcaatataattcagca

SEQ ID NO: 233599 - DNA, 201 bp, Homo sapiens
tgatcaacttcaaaatttgtcaatggcataaatccagtggattttctcagctgtcattttccttaaccatctgttgcactcatcactgtggtatgtatttrgagaaacgttttctaccctggcttgtgacattgaacttcctcctgaactccttgtctctttcattaactcatcttctttctcccacctccaaaaagtgag

SEQ ID NO: 233600 - DNA, 201 bp, Homo sapiens
ctgctgccattgtcccatccttgtcagggccctctctttcaccttacagcatctgaggggcagagctctagagggtttgggcagacaatgcctctgaaaatttttttttaaataaaatttagatgacaagtatatatcatatatgcagtgaccaagcatataactactttacagtcatctaactgctgtagcaatgatatg

SEQ ID NO: 233601 - DNA, 201 bp, Homo sapiens
tcttatctcacttaacagggcttcctattgacagtctgacaatctcagctccatccagtcagttctccatattgtagttacagaaatcacaaaaagctgtttttgattataatactgtctggcttaaaattcttcactgacttctaattgacaaatcaaatttcttaacatgaaagacacacaaagtctagatgtgtggtc

SEQ ID NO: 233602 - DNA, 201 bp, Homo sapiens
acagtaggttcctacaaccaattttactcaagcatgggcttcctctgaactcctttcttgtcttaatacttctcttctaattattgttatttagaatttayttttgcatatatcaaataataggtttaggcaactatcattcaggattttgttgagagttaagattgatttacaaagatttttttcctccaataaacatgt

SEQ ID NO: 233603 - DNA, 201 bp, Homo sapiens
tacttccaggaagtggcatctatgcacccaattcttcaagagcatttcattatgatatgaagacagaagagggaaaactcctcctctcgcaactggattcycacccatcccattctgcagtggtgaactggacttcctatgccagcagtatagaagcgctctcatcaggaaacaaggaatttaaaggcactgtctttttcg

SEQ ID NO: 233604 - DNA, 201 bp, Homo sapiens
tggatgaagcaacaggcagatttcaggcaccataagcaaactgaatttttaaaccctaaattaggacatgtggtctaattttggagcattttatgtatacrccaaacagcctgagaaatgtagcttgaattgaaatatattagaatacatgaagactaatagagtcagtaggaaaatatgtttgtcatcagaactgtttca

SEQ ID NO: 233605 - DNA, 201 bp, Homo sapiens
gcctgagaaatgtagcttgaattgaaatatattagaatacatgaagactaatagagtcagtaggaaaatatgtttgtcatcagaactgtttcagaaatccmaaacaccaacctacttattccaccacttaaggtgatccaaaaagactgggggtaaacatgtttcaagtggttcaatgtgttgtaatttatatctatgcat

SEQ ID NO: 233606 - DNA, 201 bp, Homo sapiens
aagactgggggtaaacatgtttcaagtggttcaatgtgttgtaatttatatctatgcatttcagatatcaattgaagcaaaggtgggttaaactattgaayggttgttctttcttacaaacacattgaaataataattttctatatgtattattatatccttttccaatctttttcaaggatatgttttatagatgattgc

SEQ ID NO: 233607 - DNA, 201 bp, Homo sapiens
taattttctatatgtattattatatccttttccaatctttttcaaggatatgttttatagatgattgctatggctttccttatattcattatacaaatttktttgtagatctagtagccaatatttgatgtcaccaaatttttattcatacaacagttatctcagccttctcagctattcttcaataaccatttatcattt

SEQ ID NO: 233608 - DNA, 201 bp, Homo sapiens; identical to SEQ ID NO: 43443

SEQ ID NO: 233609 - DNA, 201 bp, Homo sapiens
acacattttaaattcttgataattaaaatcattagtaacttgagaacaatgaagatatagctgttcatggctataggccaaggatctgattgcttttacakggctaatctttttgacagtgaattgcaggaggcactggggcttaaagccctttatttttattattagttgtattaattattcagtgataaactggatgac

SEQ ID NO: 233610 - DNA, 201 bp, Homo sapiens
tttttgtatcaacatcctagtttttaaaactgtgttgtggtctatcctcctattttcctacctttgtgggttaaaaaaaatagtgttcttttgaaggattktaggaaataaaattgaagcatatgttcattctacctttacctgaaagttacttctatcccatcttaatacacttgcactgaagtgattactttccacctg

SEQ ID NO: 233611 - DNA, 201 bp, Homo sapiens
aggactaggtttctcttctgtatactgccaaatccactggtttgtgtttattaactcttacggcgcttccacaggtaagtaaattagaagacattgattaygggcatctcactaataaatgaatcagtgccagtttcatagctccaatttttcttgtacttggcaacatttcaaatttttctgatagaatggaatttggcc

SEQ ID NO: 233612 - DNA, 201 bp, Homo sapiens
tagagcagtcccagtgattaatttgagtgctttgcagtgtagatagggattcttggctctttctactgctagtttaggacctggttttcttgggtctgctraatcaattactactttttgtatcaacatcctagtttttaaaactgtgttgtggtctatcctcctattttcctacctttgtgggttaaaaaaaatagtgtt

SEQ ID NO: 233613 - DNA, 201 bp, Homo sapiens
ttatatcagtatgtcattgcaaacatcactcagagttttgcttttatagtttttctttgtttttcctaaagttattaattgccttatttttttaaatttcrttaattttctttgactttttgttaaaaccccatatcttccaacagcatctcagaataatttttccacaatatcattttcataagtttatcttgagctaaa

SEQ ID NO: 233614 - DNA, 201 bp, Homo sapiens
ttccaagcattttatagcaaatatgcataattttgtttatatcagtatgtcattgcaaacatcactcagagttttgcttttatagtttttctttgtttttsctaaagttattaattgccttatttttttaaatttcgttaattttctttgactttttgttaaaaccccatatcttccaacagcatctcagaataatttttc

SEQ ID NO: 233615 - DNA, 201 bp, Homo sapiens
agcatttttgagtataattttggcagaattttctgagctcataatgataggatgatgggcagattatattgggttgaaaagtcaaagggaagtgaatgcayttttttccccaagaaatcttatctgagacaagaagaagagaagcaagacaatggtttaacagagactcatggtcaggagaaatgtgtgtgtatgtgtgta

SEQ ID NO: 233616 - DNA, 201 bp, Homo sapiens
gacatcccagaccctgaagtaaactggatcccctgtaataatcgtaacaggtaaagaaacaacttgtgaaaaattcactagtaaacatcaacttgatttayctgggaaaactttgttgatgatcattgcatagatccatgatcaattcttaagtttcagtatagcttatttttcatctactatgggtatatttactgggag

SEQ ID NO: 233617 - DNA, 201 bp, Homo sapiens
tacaggcgagtgccaccacgcctggctaatttttttgttgttgttgtattttagtagagacagagtttcaccatattggccagggtggtctcaaactcccsgagctcaggtgatccgcccacctcagcctcccaaagtgttgagattataggcatgagccaccgtgccctgcctatttgctaaaccttgaaaccttagatg

SEQ ID NO: 233618 - DNA, 201 bp, Homo sapiens
aatttcaatggtcctgtcttccagttcactgtttcttttttctacatgcctgaattggtcttcgaatcctcctataaaatattcatttcagttattgtaattttcagctccagattctttttaggttttctatctttttattgatatttctactttgttttgttttttgattttctccacatcttcctttattttcttaag

SEQ ID NO: 233619 - DNA, 201 bp, Homo sapiens
tctccacatcttcctttattttcttaagcttctgtaaaaccattgttttaaagtctgtgtttagtaggtctgtcatgtggtccttttcagggatgattttmgttggtttatttttcctttcttttgagtgagtcatactttcctgtttctttgtatgatttgtgatttttttggttgataactagacatttgaatcttatc

SEQ ID NO: 233620 - DNA, 201 bp, Homo sapiens
tcgttggtttatttttcctttcttttgagtgagtcatactttcctgtttctttgtatgatttgtgatttttttggttgataactagacatttgaatcttaycacatggttactctgggaatcagattctctgggtttgctatgtttgtttgtttgtttgttttgttgttgtaggatgtttgtgttgaggatcagcttgaga

SEQ ID NO: 233621 - DNA, 201 bp, Homo sapiens
catttcccatgaaaacactgatcatagatgaaattggcactaagatgtgagcttgtactttttcccacactgtgatgtccagatcaacttcctaaaataawttttttctctttatcttctgtttattgcagcaaaaccttttcatgggtgaaaatcaattcaatgtacccaaggagcctgagattgtgactttcaatacca

SEQ ID NO: 233622 - DNA, 201 bp, Homo sapiens
atagatccatgatcaattcttaagtttcagtatagcttatttttcatctactatgggtatatttactgggagagcaaatatgaattatgaagtcacagaartcagagctagaaagtagcttagaaatcatcacattcagtgtgaacatctctggtctctgactcctcaccagtgaacagaaaaatatttccctgtgtaggt

SEQ ID NO: 233623 - DNA, 201 bp, Homo sapiens
cctcctgggttcaagcaattctcctgcctcagcctcacgagtagctgggattacaggtgcctgccactacacccagctatttttgtatttttggtagagayggggttccaccatgttgtccaggctgatctcaaactcctgacctcaggtgatcctcttgcctcagcctccagaaatgctgggattacaggtgtgaatcac

SEQ ID NO: 233624 - DNA, 201 bp, Homo sapiens
agttaagattgatttacaaagatttttttcctccaataaacatgtatcagatttggccagaccccagtacaagaaagactcagctgcctggccaagaacarctctatctatgttgtggcaaatattggggacaagaagccatgcgataccagtgatcctcagtgtccccctgatggccgttaccaatacaacactgatgtg

SEQ ID NO: 233625 - DNA, 201 bp, Homo sapiens
agaagtaatctattttatgtcttataagattccagtgggtctttatagataaagatacccatgtacatatttgtaatgtggagactgaactaaaggcccartttagctagaatggcctctgattctctaaagcaaactcatttcccatgaaaacactgatcatagatgaaattggcactaagatgtgagcttgtacttttt

SEQ ID NO: 233626 - DNA, 201 bp, Homo sapiens
ctaatgaaataaagtgggcaaggagaaaaatatgttattgataatgataagcacactttagaaatcgagtaggggcaaagcatagaaagtaatgataaagygtggaaagctcctataaagaggcttaaggggttccgtgtacatataagaacacaggagtgtgttttcaggagtgtgtagcagtcagaaagtgccgcatgc

SEQ ID NO: 233627 - DNA, 201 bp, Homo sapiens
agcaatccttcctccttggactcccaaagtgctggaattacaggcatgagcaaccacacccaccccaagatattttttaatgcctctcttctgttagacawaattttagtaaacgggatatgtaagtcattgatctatgatatccacaggatgctgcagacattataagacaaacacgtaagtgaaaatatgactatagat

SEQ ID NO: 233628 - DNA, 201 bp, Homo sapiens
ccaaaatgttgggattacaggcatgagctaccacacctggccccccaaaatttgttttttgagacagggttttgctctgttgcccaggttggaatgcagtrgaactcactgtagcctcaaaatcccaagttcaagcaatcatcccacctcagtctcccaaatatctgagactacaggcacacaccactatgcctggctatt

SEQ ID NO: 233629 - DNA, 201 bp, Homo sapiens
gctattttttttttttttcattttttgtagagagacagtcttgctttgttgcccaggctggtctcaaactcctgggctcaagcaatccttcctccttggaytcccaaagtgctggaattacaggcatgagcaaccacacccaccccaagatattttttaatgcctctcttctgttagacaaaattttagtaaacgggatat

SEQ ID NO: 233630 - DNA, 201 bp, Homo sapiens
tcattccacaccttccccagaatgcatgcagaatttcttcctttctattttcttttctctttttctgaaactcttattattgggatcttctgcctcttggwttagggctctaattttccgacattttctctgctattttttactactttatttttctcctctactttctgagagatttcctcctcttgatcttccaaatct

SEQ ID NO: 233631 - DNA, 201 bp, Homo sapiens
actggttctttaaatctcctggaagccacttcagccagaaagagggcctgcaaaaatggtgtgtctgtatgtatacacaacaatagctgcttgcctttgcrtttgtacctccatgatcagaagcaacaattagtgatcagaatgcagatctcgtatatttgaaagacaaggtcattattgtccaccctgctcccataagct

SEQ ID NO: 233632 - DNA, 201 bp, Homo sapiens
ttgataactagacatttgaatcttatcacatggttactctgggaatcagattctctgggtttgctatgtttgtttgtttgtttgttttgttgttgtaggaygtttgtgttgaggatcagcttgagatgtaaatttaaggtcttcttagaccttttatgagtctgtacctttccctgggcatgtatggcgactttctaaatt

SEQ ID NO: 233633 - DNA, 201 bp, Homo sapiens
agcttcttggatctttatattcatatctttcttcaagtttgggaagttttcagccattatttcttcaaataatctctcttctccttctgagactcccacartgcatgtgttggacactcaatggtgttcctaaggctctgttcaattttctttaatattttttgttgttgttctgcagactcaataatttcaatggtcctg

SEQ ID NO: 233634 - DNA, 201 bp, Homo sapiens
actagtaaacatcaacttgatttacctgggaaaactttgttgatgatcattgcatagatccatgatcaattcttaagtttcagtatagcttatttttcatstactatgggtatatttactgggagagcaaatatgaattatgaagtcacagaagtcagagctagaaagtagcttagaaatcatcacattcagtgtgaacat

SEQ ID NO: 233635 - DNA, 201 bp, Homo sapiens
tgtatgtatgagtcacttctgtcttgctgctttcaagattctcattttgtctttggctttctacaatttgattatagtgtgtcttagtgtgagtctctttraattcattctcttggagtttgttgagcttcttggatctttatattcatatctttcttcaagtttgggaagttttcagccattatttcttcaaataatctc

SEQ ID NO: 233636 - DNA, 201 bp, Homo sapiens
aagaagccatgcgataccagtgatcctcagtgtccccctgatggccgttaccaatacaacactgatgtggtatttgattctcaaggaaaactggtggcacrctaccataaggtaaaattaatttgcaaataatccaattagttaatgcctaatgaaataaagtgggcaaggagaaaaatatgttattgataatgataagca

SEQ ID NO: 233637 - DNA, 201 bp, Homo sapiens
ttattgatgagaaatctgccgataatcttattggggatcccttgtatgtatgagtcacttctgtcttgctgctttcaagattctcattttgtctttggctytctacaatttgattatagtgtgtcttagtgtgagtctctttgaattcattctcttggagtttgttgagcttcttggatctttatattcatatctttcttc

SEQ ID NO: 233638 - DNA, 201 bp, Homo sapiens
ccctatctctactaaaaatacaaaaaattagcctggcgtggtggcgggcgcctgtaatcccagctacttgggaggctgaggcaggagaatcacatgaaccmgagaggcggaggttgcagtgagccgagatttcgccactgcactctagcctgggtgacaagagtgaaactccatctcaaacaacaacaacaataaacaaac

SEQ ID NO: 233639 - DNA, 201 bp, Homo sapiens
ggcaatagatcatgtgagtatctgaaaaaagtgcattccaggctgaaggaattctaaattccaagatcctgtggtcagagtatgtgtctaacctatggaasagaaaaagggttagtgtggttacagtgatgtgacagaagaggagaaaagtaggaaatggaggcagaagggcaggaggagcgcaatgttgagaatagactc

SEQ ID NO: 233640 - DNA, 201 bp, Homo sapiens
tcaattgaagcaaaggtgggttaaactattgaacggttgttctttcttacaaacacattgaaataataattttctatatgtattattatatccttttccartctttttcaaggatatgttttatagatgattgctatggctttccttatattcattatacaaatttgtttgtagatctagtagccaatatttgatgtcacc

SEQ ID NO: 233641 - DNA, 201 bp, Homo sapiens
actttaaatatatcagctcaatgctttgtggtctccaaagttattgatgagaaatctgccgataatcttattggggatcccttgtatgtatgagtcacttytgtcttgctgctttcaagattctcattttgtctttggctttctacaatttgattatagtgtgtcttagtgtgagtctctttgaattcattctcttggagt

SEQ ID NO: 233642 - DNA, 201 bp, Homo sapiens
ttgtcctgaaatctattctgtctgataaaaatatagctacccctgctccttttgttttccatttgcatggaaatctttgctatccctttattttctgtctrtgtgtgtctttataagtgaagtgtgtttcttgtacacaatcgaccattgccattgattttttttcttttttatccatttagccactctatgtcttttgat

SEQ ID NO: 233643 - DNA, 201 bp, Homo sapiens
tgtaggttttttgatttgatgttatgcagcttgtaaataacaacttatagttcattattttaaagtgatgacaacttaacattgattgtataaactaacargcaaagagaaagctaataaaagcttcatactttaacttcatcccccatacttttaatttttaatactttctatttatatcttatactgtctatgtcttaa

SEQ ID NO: 233644 - DNA, 201 bp, Homo sapiens; identical to SEQ ID NO: 43436

SEQ ID NO: 233645 - DNA, 201 bp, Homo sapiens
tttgcaaataatccaattagttaatgcctaatgaaataaagtgggcaaggagaaaaatatgttattgataatgataagcacactttagaaatcgagtaggsgcaaagcatagaaagtaatgataaagcgtggaaagctcctataaagaggcttaaggggttccgtgtacatataagaacacaggagtgtgttttcaggagt

SEQ ID NO: 233646 - DNA, 201 bp, Homo sapiens; identical to SEQ ID NO: 43438

SEQ ID NO: 233647 - DNA, 201 bp, Homo sapiens
aattagcctggcgtggtggcgggcgcctgtaatcccagctacttgggaggctgaggcaggagaatcacatgaacccgagaggcggaggttgcagtgagccragatttcgccactgcactctagcctgggtgacaagagtgaaactccatctcaaacaacaacaacaataaacaaacaacaacgatgacaaaaaaagctaga

SEQ ID NO: 233648 - DNA, 201 bp, Homo sapiens
gtactgccctagccaatccttgttacctcttatttgaacaatggcaacagcttcctaatgaatcccctgcatttagtctctcactgttccagtacattctrcactccgtgttctatttatctttatgaagaaaattttgaccaggttgcttctgtcttcaaaggctttaatagtacctatttattactaaatttggaacaa

SEQ ID NO: 233649 - DNA, 201 bp, Homo sapiens
ataagcatagcaaccacatctgacatttctatgtctctcacattgtatgcttggacagctctgcctggaatattcttcccccagttgcccacatgtccaayatagtgctttgtgttgtgtcaaaacctaatgcatatttgttgaatatttaacatgtgctgattttagattagtaaatatctttccgataattgatgattt

SEQ ID NO: 233650 - DNA, 201 bp, Homo sapiens
ttttcaaaattgtattttaattgctttactgggacaattattggtaactttgtaaaagaataaaaaaatcaggcattaacaaatgctccaggatttccatwgtttcatactagctggtactgccctagccaatccttgttacctcttatttgaacaatggcaacagcttcctaatgaatcccctgcatttagtctctcact

SEQ ID NO: 233651 - DNA, 201 bp, Homo sapiens
agccaatatttgatgtcaccaaatttttattcatacaacagttatctcagccttctcagctattcttcaataaccatttatcatttcagagttgtgcaatrgaggataaatatagcaatatgttaaatattattttcaaaattgtattttaattgctttactgggacaattattggtaactttgtaaaagaataaaaaaat

SEQ ID NO: 233652 - DNA, 201 bp, Homo sapiens
cttggactcccaaagtgctggaattacaggcatgagcaaccacacccaccccaagatattttttaatgcctctcttctgttagacaaaattttagtaaacrggatatgtaagtcattgatctatgatatccacaggatgctgcagacattataagacaaacacgtaagtgaaaatatgactatagattacgataaatgcta

SEQ ID NO: 233653 - DNA, 201 bp, Homo sapiens
gtctggaatcttatcctacagtaggttcctacaaccaattttactcaagcatgggcttcctctgaactcctttcttgtcttaatacttctcttctaattaytgttatttagaatttacttttgcatatatcaaataataggtttaggcaactatcattcaggattttgttgagagttaagattgatttacaaagatttttt

SEQ ID NO: 233654 - DNA, 201 bp, Homo sapiens
ctcaggcttgtgtaacttaaaatgagcctgagcatgggtctacacacagcaagatgtgtaataaaaacacaattttagtgctactttcaaaattcatgctrttaagaaagatgctgttttcaaagctgaaaagatcatgaaatggctaacttacatatcagaggttggataattccttactattgaggtgttatattttct

SEQ ID NO: 233655 - DNA, 201 bp, Homo sapiens
catcttatctcacttaacagggcttcctattgacagtctgacaatctcagctccatccagtcagttctccatattgtagttacagaaatcacaaaaagctktttttgattataatactgtctggcttaaaattcttcactgacttctaattgacaaatcaaatttcttaacatgaaagacacacaaagtctagatgtgtgg

SEQ ID NO: 233656 - DNA, 201 bp, Homo sapiens
atcatggatgaagcaacaggcagatttcaggcaccataagcaaactgaatttttaaaccctaaattaggacatgtggtctaattttggagcattttatgtrtacgccaaacagcctgagaaatgtagcttgaattgaaatatattagaatacatgaagactaatagagtcagtaggaaaatatgtttgtcatcagaactgt

SEQ ID NO: 233657 - DNA, 201 bp, Homo sapiens
tccaatctcagaggcctaggaaacaaagcaaacagagaggcccagggaggggaagccttcctgggtggatgtctctgcagagccaccaagatcatattgcyctcatcagggtcagcttggagctgaagggctgaaaaggcattttgatatttgattgcatattatttcatactgttatttcagagttttgtgtgcacacat

SEQ ID NO: 233658 - DNA, 201 bp, Homo sapiens
ttgatttagactccaaagtttagagcatttgatcttgacatgccttaaattgggcttccagtcaaaattgaggccacttctcctttcaaatggcaagttcycttgaatgagtgaatagtggagttgtagaaattgaaaggcagtagtagctttcactttacattacaacttctccaatgcaatcttttccattctcatcaa

SEQ ID NO: 233659 - DNA, 201 bp, Homo sapiens
acgctaccataaggtaaaattaatttgcaaataatccaattagttaatgcctaatgaaataaagtgggcaaggagaaaaatatgttattgataatgataarcacactttagaaatcgagtaggggcaaagcatagaaagtaatgataaagcgtggaaagctcctataaagaggcttaaggggttccgtgtacatataagaa

SEQ ID NO: 233660 - DNA, 201 bp, Homo sapiens
agatttttttcctccaataaacatgtatcagatttggccagaccccagtacaagaaagactcagctgcctggccaagaacaactctatctatgttgtggcwaatattggggacaagaagccatgcgataccagtgatcctcagtgtccccctgatggccgttaccaatacaacactgatgtggtatttgattctcaaggaa

SEQ ID NO: 233661 - DNA, 201 bp, Homo sapiens
tcagaggttggataattccttactattgaggtgttatattttctgtgtagtaaatgccttcaaatattaactgaaagatcagtgaagtcattttccccttygtgattccaacttcattttgtttattttgaagataattaatattttaattgcaaaagaaaattatagcattggaaaattttctgtatatggagaataaca

SEQ ID NO: 233662 - DNA, 201 bp, Homo sapiens
ttacaaagatttttttcctccaataaacatgtatcagatttggccagaccccagtacaagaaagactcagctgcctggccaagaacaactctatctatgtygtggcaaatattggggacaagaagccatgcgataccagtgatcctcagtgtccccctgatggccgttaccaatacaacactgatgtggtatttgattctc

SEQ ID NO: 233663 - DNA, 201 bp, Homo sapiens
ttgggcagacaatgcctctgaaaatttttttttaaataaaatttagatgacaagtatatatcatatatgcagtgaccaagcatataactactttacagtcrtctaactgctgtagcaatgatatgtaactacagtgtcaaaacaccctgacagttttcagaaacccaatgtggagaccatctgccatatcttactttttct

SEQ ID NO: 233664 - DNA, 201 bp, Homo sapiens
agggccctctctttcaccttacagcatctgaggggcagagctctagagggtttgggcagacaatgcctctgaaaatttttttttaaataaaatttagatgrcaagtatatatcatatatgcagtgaccaagcatataactactttacagtcatctaactgctgtagcaatgatatgtaactacagtgtcaaaacaccctga

SEQ ID NO: 233665 - DNA, 201 bp, Homo sapiens
gcagtttctgacagtcaggtttcagtacctctatcatcttgatagtgattgagcctcagtggtaaccacccttcttgggcctgcactcacctcaccccacraaatccaatctcagaggcctaggaaacaaagcaaacagagaggcccagggaggggaagccttcctgggtggatgtctctgcagagccaccaagatcatat

SEQ ID NO: 233666 - DNA, 201 bp, Homo sapiens
ctctgcagagccaccaagatcatattgccctcatcagggtcagcttggagctgaagggctgaaaaggcattttgatatttgattgcatattatttcatacygttatttcagagttttgtgtgcacacattgtttcttcagtaagcctaatgctttataagcatagcaaccacatctgacatttctatgtctctcacattgt

SEQ ID NO: 233667 - DNA, 201 bp, Homo sapiens
gtagtggtggctgtgcatgtggccagcctgctgccattgtcccatccttgtcagggccctctctttcaccttacagcatctgaggggcagagctctagagkgtttgggcagacaatgcctctgaaaatttttttttaaataaaatttagatgacaagtatatatcatatatgcagtgaccaagcatataactactttacag

SEQ ID NO: 233668 - DNA, 201 bp, Homo sapiens
tttgctactataaccttatttaaagaaacaaacagaaaaaaacccaaacgtatttgaagtctgcttaaatattactgttaaatgtgaagtgtttatatctracattcataatcatatgaatgtcaacatttagtttcgagtagaaaaagataaatcattactgtgagttaagaaatttaaatggagatgtgtgagggagca

SEQ ID NO: 233669 - DNA, 201 bp, Homo sapiens
atgcttggacagctctgcctggaatattcttcccccagttgcccacatgtccaatatagtgctttgtgttgtgtcaaaacctaatgcatatttgttgaatrtttaacatgtgctgattttagattagtaaatatctttccgataattgatgatttttgttatacctaaagattgaacactttgaaagcagccttagaaaat

SEQ ID NO: 233670 - DNA, 201 bp, Homo sapiens
tagaaagttagatcaatgttagaaataaagagtcacagtgtacctttccagacttgtcgttagcatttcatatttatagttttagctttgatttgaatgtytcacagatgaacttaaatcaacacataattccaccatagcataatagtaattaggcagtttccctaaatttgagaacattgccttaatgtagttgtgatg

SEQ ID NO: 233671 - DNA, 201 bp, Homo sapiens
aacttaaaatgagcctgagcatgggtctacacacagcaagatgtgtaataaaaacacaattttagtgctactttcaaaattcatgctattaagaaagatgytgttttcaaagctgaaaagatcatgaaatggctaacttacatatcagaggttggataattccttactattgaggtgttatattttctgtgtagtaaatgc

SEQ ID NO: 233672 - DNA, 201 bp, Homo sapiens; identical to SEQ ID NO: 43432

SEQ ID NO: 233673 - DNA, 201 bp, Homo sapiens
gatgaattcacttttgtgaagctcacaggagttgcaggaaattatacagtttgtcagaaagatctctgctgtcatttaagctacaaaatgtctgagaacayaccaaatgaagtgtacgctctaggggcatttgacggactgcacactgtggaagggcgctattatctacaggtaatattttgatgtcagaagagttactgg

SEQ ID NO: 233674 - DNA, 201 bp, Homo sapiens
tttcagcactcattggacttcagcatgactactcagttgccagcttacgtggcaattttgcttttctatgtctcaagagccagctgccaggacactttcaytgcagctgtttatgagcatgcagcgatattgcccaatgccaccctaacaccagtgtctcgtgaggaggctttggcattaatgaatcggaatctggacatt

SEQ ID NO: 233675 - DNA, 201 bp, Homo sapiens
gaagggcgctattatctacaggtaatattttgatgtcagaagagttactggataaaataaagacactcagttaaatatacagtttagataaataatgaatkattttttagtataagcatatcacacttttggggatttatgtatgctaaaaattttgttgtttatttgaaattcaactttagctgggaagcctacaaatac

SEQ ID NO: 233676 - DNA, 201 bp, Homo sapiens
taggcatttttctagatcaagagagtatttcagttgactttctcatgttttttttttaagagcatctagcagtttatttaattattttattctattttttmtctttaaaatttatcctagctttattgtcattaacaaatgaaaattgtatatctttacagtgtatgatgtgacgttttgatatgtgtacacaccgtgaaa

SEQ ID NO: 233677 - DNA, 201 bp, Homo sapiens
tatagtttttctttgtttttcctaaagttattaattgccttatttttttaaatttcgttaattttctttgactttttgttaaaaccccatatcttccaacrgcatctcagaataatttttccacaatatcattttcataagtttatcttgagctaaaaataataacctttctctgcactggtttccctctagtcattctgc

SEQ ID NO: 233678 - DNA, 201 bp, Homo sapiens
ataatttttaataccacctaaatacaatatattgatccaatatagaaagttagatcaatgttagaaataaagagtcacagtgtacctttccagacttgtcrttagcatttcatatttatagttttagctttgatttgaatgtttcacagatgaacttaaatcaacacataattccaccatagcataatagtaattaggcag

SEQ ID NO: 233679 - DNA, 201 bp, Homo sapiens
aggtgctgacatatacgccatctatagcctttattatgttgaggtatattccttctgtataataaagtgcacatgtctgaattatatattacttgccttgwgggtgccaagaaactatttatactgcctagaatattaacctttattatgcctaaagagttcattagtcaaatgttggttttgatgtagacctcatagttt

SEQ ID NO: 233680 - DNA, 201 bp, Homo sapiens
aacagtttttctattttatataatttccctctcctctctctggatctcgctccccagctcattttttcttttttttgctctgattctttatacacctctgytgcctctgtgataagcagcttcaaagatggttcctaatgctttattggatagaatacaacaaaagcgatgaggtgttgcttccccaattacattacgaag

SEQ ID NO: 233681 - DNA, 201 bp, Homo sapiens
aaacaaggtactgtgattactcttctgatttttggttcttatgaaggttcattcttgttgtggatggttgttcagtttggtgatcctgcaggaagacaatygctggaaggttctatttggccatcttcctctgcttcctcctcatcttttatttcttcctcttgcctgattgctctggctaggacttccagtatgatgttg

SEQ ID NO: 233682 - DNA, 201 bp, Homo sapiens
tcagaatttttttttctatgtctgtgaagaatgacattggtattttgatggagattgcattgaatctgtagaatgctttggatagtatgggcattttaacmatattgattcttccaatctatgaacatggaatatctttccatgttttgtgtcctcttcaatttcttacatcaatgttttacagacttcattgtagagagc

SEQ ID NO: 233683 - DNA, 201 bp, Homo sapiens
cccatttttggattggattattagattttttttcctatagagttgtttggacttcttacatattccggttatgaatcccttataagatggatagtttgcamatattttatcccaatctgtgggttgtctcttcactttcttgatagtttcccctgctgtgcagaagctttttaccttcatgtgattccatttgtccatttt

SEQ ID NO: 233684 - DNA, 201 bp, Homo sapiens
gagtctctttctgttgccaaggctggagtgcagtggcatgatttccgctcactgcaacctctgcctcccgggttcaagcaattctcctgcctcagcctccygagtagctgggattacaggttcatgccaccactcccagctaattttttatatttttggtacagatggggtttccccatgttggccaggctggtctcgaac

SEQ ID NO: 233685 - DNA, 201 bp, Homo sapiens
caggtggatcacctgaggtcagcaatttgagaccagcctgcccaacacggcgaaaccctatctctactaaaaatacaaaaaattagcctggcgtggtggcrggcgcctgtaatcccagctacttgggaggctgaggcaggagaatcacatgaacccgagaggcggaggttgcagtgagccgagatttcgccactgcactct

SEQ ID NO: 233686 - DNA, 201 bp, Homo sapiens
gaaggatttgaagtttctaattatatctaatataattaaaaataggatactttagttctaacaacaaactagaacccatatgaatagaggaagcagttgtyatgaggcatcatggtaaagagctgctcattacaactggatgttaagtatagttctaagagtttctgagcagctaagagaagtacaattttgttcagacac

SEQ ID NO: 233687 - DNA, 201 bp, Homo sapiens
ctttaattgtttggtaaaattcagcactgaagcctttaagtcctgggcttttttttgctgggagatcttttattacagcttcaatcttattatttgttatytgtctattcaggttttggatttctttgtggttcaatcttggtaggctgtatgtgtctaggaatttattcatgtcttttaggttttccaatttatcggcat

SEQ ID NO: 233688 - DNA, 201 bp, Homo sapiens
taatcgtaacaggtaaagaaacaacttgtgaaaaattcactagtaaacatcaacttgatttacctgggaaaactttgttgatgatcattgcatagatccaygatcaattcttaagtttcagtatagcttatttttcatctactatgggtatatttactgggagagcaaatatgaattatgaagtcacagaagtcagagcta

SEQ ID NO: 233689 - DNA, 201 bp, Homo sapiens
atgtgtctaacctatggaacagaaaaagggttagtgtggttacagtgatgtgacagaagaggagaaaagtaggaaatggaggcagaagggcaggaggagcrcaatgttgagaatagactccagggtataggtcaccaaagaagcagagggcagttcaaaagctgttgtgatcattatggcatagagatgatgggtctgaga

SEQ ID NO: 233690 - DNA, 201 bp, Homo sapiens
agtgatccacctgctcggcctcccaaagtgctgggattacaggtatgagtcatcatgcccagctgccttaatttattaactctgcaaattttttttgagtrcctattatgtctaaacattgttctgggcaatgaagtgaacaaaacagattaaaaattcctgtccccttgaaatttatattctagtgtggggaggtaataa

SEQ ID NO: 233691 - DNA, 201 bp, Homo sapiens
atgtttgtttgtttgtttgttttgttgttgtaggatgtttgtgttgaggatcagcttgagatgtaaatttaaggtcttcttagaccttttatgagtctgtrcctttccctgggcatgtatggcgactttctaaatttccctgtatatttaattgcttattccttaaatgtctcactatccaaaggagaaaaagagaaaata

SEQ ID NO: 233692 - DNA, 201 bp, Homo sapiens
ttgaaaactatatgagtaaatggcaaaagagagtcacatcagtttaagattaatagttttcctttctcattgctaagatagctgatgaggttaatgtagtaaagtccttaaagtgtaagctgattgtaatctaagaggtgatatggcaggattttaagtggtttaagtcaggtctcggctacagagatattaagtgtggtg

SEQ ID NO: 233693 - DNA, 201 bp, Homo sapiens
aacagtgcaattgttatctaggtggggagaaaaattccctgctctgctatcttcccagcatccctctacctctaaatttttgttaactcattcaaaaaaawttttttttgagatggagtctcactcttgttgcctaggatggagtgcaatggcatgatctcagctcaccacaacctctgcctcccaagatcaagcaattct

SEQ ID NO: 233694 - DNA, 201 bp, Homo sapiens
tgcagtggtgcatcagctcactgcaagctctgcctcctcggccaagcaattctcacgcctcagcctcccaagtagctgggactacaggcgagtgccaccaygcctggctaatttttttgttgttgttgtattttagtagagacagagtttcaccatattggccagggtggtctcaaactccccgagctcaggtgatccgcc

SEQ ID NO: 233695 - DNA, 201 bp, Homo sapiens
attaagtgtggtgaaagcagcactattaattttaatgtaaggaaaccaatatcttatacacctaagaaaatcatgtcgattcacatacttctttctgaatrcacatggctaaaattattttaggaattcctcttttggaactattctcaaaaccgcacaacgccagttagaatggtgatcattaaaaagtcaggaaacaac

SEQ ID NO: 233696 - DNA, 201 bp, Homo sapiens
taacagtgtatgagggttcccttttctccacatcctcaccagcatttgttataagtcattttaacaggtgtgagatgatataattgtacttttgatttgcttttttttttttttgagacagagcctccctcttgttgcccaggctgaagtgcaatggtgccatcttggctcactgcaacctctgcctcctgggttcaagca

SEQ ID NO: 233697 - DNA, 201 bp, Homo sapiens
cactagagctccaaaatagtaatattagacagattccaacagtgcaattgttatctaggtggggagaaaaattccctgctctgctatcttcccagcatccytctacctctaaatttttgttaactcattcaaaaaaatttttttttgagatggagtctcactcttgttgcctaggatggagtgcaatggcatgatctcagc

SEQ ID NO: 233698 - DNA, 201 bp, Homo sapiens
tggcatgatctcagctcaccacaacctctgcctcccaagatcaagcaattctcccacctcagcctcttgagtagctgggattataggcgcacgccaccagrcccagctaattttgtatttttagtagagacggggtttcttcatgttggtctggctggtctcgaactcctgacctcagctgatccacccacctcggcctcc

SEQ ID NO: 233699 - DNA, 201 bp, Homo sapiens
agattatccttggggatcatgaaggacattgagcaggctgcatttcttgtctggaaattcttaacataataattactgtgtccttcagaataaaaaaatawatatcttattttggggattatagggagtttaaagtcttccaagtagaaagaagattcaacgagagtagtttcagaaccagtgccattggagccccttagg

SEQ ID NO: 233700 - DNA, 201 bp, Homo sapiens
ggacattgagcaggctgcatttcttgtctggaaattcttaacataataattactgtgtccttcagaataaaaaaatatatatcttattttggggattatarggagtttaaagtcttccaagtagaaagaagattcaacgagagtagtttcagaaccagtgccattggagccccttaggaccactggggagtgatggcctag

SEQ ID NO: 233701 - DNA, 201 bp, Homo sapiens; identical to SEQ ID NO: 43442

SEQ ID NO: 233702 - DNA, 201 bp, Homo sapiens
ccattcacttcatttcaaggaacacggttgcccatttatgttttccatcaactaatgatgtctgaatgtcttgccttaattctctctgtctctctctctcttttttttttttttgagagagagactctgtgtcgcccaagctggagtgcagtggcgtgatctcagctcactgcaacctctatcccccaggtccaagcaatt

SEQ ID NO: 233703 - DNA, 201 bp, Homo sapiens
cattcacttcatttcaaggaacacggttgcccatttatgttttccatcaactaatgatgtctgaatgtcttgccttaattctctctgtctctctctctcttttttttttttttgagagagagactctgtgtcgcccaagctggagtgcagtggcgtgatctcagctcactgcaacctctatcccccaggtccaagcaattc

SEQ ID NO: 233704 - DNA, 201 bp, Homo sapiens
acagtctccagagtagctgggaccacagatgcatgccaccgtgcccagctaagttttgtattttttgtagagatgggattttgccatgttgcccacgctgkacttgaactcctgacctcaggtgatccacctgccttgggctcccaaagtgctgggattacaggcatgagctaccgtgactgccctatattcttatatata

SEQ ID NO: 233705 - DNA, 201 bp, Homo sapiens
ttctggtacagatggaggatggaggataaatgggtcagggactaggtgctattttcagagtattagtggccttcatgtactcatgtgctattaaggctttrcaggttttcgaataaatttataatctgaaaacaaatttaagttttcaattccttgccagcatgcattatatacttcacacttcattctaattacaagata

SEQ ID NO: 233706 - DNA, 201 bp, Homo sapiens
gatctcaattctctgatgcatcctagaaaagttgtcgattttcatttgtttagcttttttcttggtgtgagcatgggaaaaatgactgccaagctctttaygagttggactagaaactccacgggaggtttaatatttttaatctaagaaggtcaagaagtaattttttaacctcttgccaactcatctcagttttaactt

SEQ ID NO: 233707 - DNA, 201 bp, Homo sapiens
gcagtacactcttaacctctgtatctgcctatctctgcagttctgaggaccgcagtttatcctgtgatctcaattctctgatgcatcctagaaaagttgtygattttcatttgtttagcttttttcttggtgtgagcatgggaaaaatgactgccaagctctttatgagttggactagaaactccacgggaggtttaatat

SEQ ID NO: 233708 - DNA, 201 bp, Homo sapiens
atgtctctgggcaacaaccaatgaggtcttgatccctgccgtcagccacatgagggagcttggagctcggaagtgaatcctcctggagtcaagccttgatrtagctagccctggcagctgcttgactgcagccttgtgaaagagaccttgggccagaggcaccagctaaactgcccctggattcctgacccagagaaagtg

SEQ ID NO: 233709 - DNA, 201 bp, Homo sapiens
aggccagaaagggtagattcatgtggcagtgacatgctggaggagggacaaggttattggtcctatgatttagtctcagtcttttagtgagcctgtacccmtgggtttatgaacttcacttggcttttttcttctgccattagttggcataaaaacaagctagagatgagattttccctttccccaagttaaagattagag

SEQ ID NO: 233710 - DNA, 201 bp, Homo sapiens
acctcttcatttgtatcctttgtaatatcctttacaataagccactaaaggtaagtgtttccctgagttctgtgagccactctagcaaactaattgaactmaaaaaaaaaggggtcatggaaaccccaacccagagccatttggtcggaagatctggaagcccagacttgttactggtgggaaggagggggcggttttgtg

SEQ ID NO: 233711 - DNA, 201 bp, Homo sapiens
ctcccaagatcaagcaattctcccacctcagcctcttgagtagctgggattataggcgcacgccaccaggcccagctaattttgtatttttagtagagacrgggtttcttcatgttggtctggctggtctcgaactcctgacctcagctgatccacccacctcggcctcccaaaatgttgggattacaggcatgagctacc

SEQ ID NO: 233712 - DNA, 201 bp, Homo sapiens
tggctggtctcgaactcctgacctcagctgatccacccacctcggcctcccaaaatgttgggattacaggcatgagctaccacacctggccccccaaaatytgttttttgagacagggttttgctctgttgcccaggttggaatgcagtggaactcactgtagcctcaaaatcccaagttcaagcaatcatcccacctcag

SEQ ID NO: 233713 - DNA, 201 bp, Homo sapiens
ctatgttgaataatagtggtgaaaatggacattcttgtcttttctagatcttagagaaaagctttcagttttccctcattcagtatgataccagccatggrtctgtcataaatggctattattgtgttgaggtatgttccttctatatccagtcattgagggtttttattatgaaggaatgttgaattttaccaaatattt

SEQ ID NO: 233714 - DNA, 201 bp, Homo sapiens
gagaaggcagtgggttcttttctggctcagggtgggtctagaaatgccatccaggagctaagtcctggaattgaggactttaggagtctgcttggtgcttyatgttactgtggctaagttggtacccaatttgtaagacaaagtccttttactcttccctctcctttcctccccatgcctccccatggctacaacagctgg

SEQ ID NO: 233715 - DNA, 201 bp, Homo sapiens
tccctctcctttcctccccatgcctccccatggctacaacagctgggaatgtgctgggtcacacctgaaaccagcatggtactgggtcccacccaagcctsgtggtgagtactgcctggctatcactgatgtttattcaaagcccaagggctctttagttagcaggtgatgattcttgccaggactgggtccttccattta

SEQ ID NO: 233716 - DNA, 201 bp, Homo sapiens
tatatttactgggagagcaaatatgaattatgaagtcacagaagtcagagctagaaagtagcttagaaatcatcacattcagtgtgaacatctctggtctytgactcctcaccagtgaacagaaaaatatttccctgtgtaggtctgtgatttgaaaactatatgagtaaatggcaaaagagagtcacatcagtttaagat

SEQ ID NO: 233717 - DNA, 201 bp, Homo sapiens
actgctgggtaggacaattcctctctgacaagagctgttctaaatgtgccctctgtgggcactggctgaattctgtgccatgttgctttctgctgttacawggcaacactgacttccaatgtaaagtcccacaatcactgtactttccttcccccaagggcacaaattttctctccacaccatgtggtaacctggaggatg

SEQ ID NO: 233718 - DNA, 201 bp, Homo sapiens
tcattttcccctttgtgattccaacttcattttgtttattttgaagataattaatattttaattgcaaaagaaaattatagcattggaaaattttctgtayatggagaataacaatgaaccaaatttaccaattagggaaccatttcaggaattgttggatggtgaatttttcttcagtaactatgctttagttgcaatgc

SEQ ID NO: 233719 - DNA, 201 bp, Homo sapiens
ttttcaaaatatatgacttcttacatacaactctcccttcttggcttcttggtttcatactttaattgatttcctctcacttctctgtctttatcagcatrttttactgaaattaataaaacatataacttagagagagtaaaatgtgaatatgaggttaaaatagtaataacaattatgaaatccctttttactttccaa

SEQ ID NO: 233720 - DNA, 201 bp, Homo sapiens
ttctccatattgtagttacagaaatcacaaaaagctgtttttgattataatactgtctggcttaaaattcttcactgacttctaattgacaaatcaaattkcttaacatgaaagacacacaaagtctagatgtgtggtcccttcctattctctatcctctaatctcacttctacttacaaatatcctgggcttctgcaata

SEQ ID NO: 233721 - DNA, 201 bp, Homo sapiens
ataaaaatgttatagccttatgttaattcaagttaggtcttaatgccaatgtgccagtgggttacaaaaatcctttattttcagaagattttggatttttrtattgaagataaggaattttggtataatattatatttataatttttcatagtctaactgtgatgatatattatgcttgaaaaatctcgattatcaccaaa

SEQ ID NO: 233722 - DNA, 201 bp, Homo sapiens
tttttttttttgagagagagactctgtgtcgcccaagctggagtgcagtggcgtgatctcagctcactgcaacctctatcccccaggtccaagcaattctygtgcctcagcctcccgaagatgacaagtgtgagccacaacacccagctagttttttgtattttcagtagagatgggtttcaccatgttggccaggctggt

SEQ ID NO: 233723 - DNA, 201 bp, Homo sapiens
ttttttttttgagagagagactctgtgtcgcccaagctggagtgcagtggcgtgatctcagctcactgcaacctctatcccccaggtccaagcaattcttrtgcctcagcctcccgaagatgacaagtgtgagccacaacacccagctagttttttgtattttcagtagagatgggtttcaccatgttggccaggctggtc

SEQ ID NO: 233724 - DNA, 201 bp, Homo sapiens
tattatgtctaaacattgttctgggcaatgaagtgaacaaaacagattaaaaattcctgtccccttgaaatttatattctagtgtggggaggtaataaatkttttaaaaagataattatctatctatcatctatctatcatctatctattatctatctacctatctttatataggtatctttcatctgtctacctatctat

SEQ ID NO: 233725 - DNA, 201 bp, Homo sapiens
attgagggtttttattatgaaggaatgttgaattttaccaaatattttttcagtgtcaattgaaatgaccatttggtttttgttcttcattctgttgataygatgtgccacatcaattgatttgtgcatgttgaaccatccttgcacccttgggataaatccgacttggtcatgatgaataattttttaatgtgtcgttgc

SEQ ID NO: 233726 - DNA, 201 bp, Homo sapiens
cagagggacggagtctctcaaagctgtgagctgtgctgcctggagttggaggagggttgatgcaaccactcctttgactactccagctggtgtctcactargttatgtgcgctccaaggctactggttctgagctcagtacagcactaggacttgcctaggaattgtagtccttgtggcctaaatcagctgtccccaacgt

SEQ ID NO: 233727 - DNA, 201 bp, Homo sapiens
gaggagggttgatgcaaccactcctttgactactccagctggtgtctcactaggttatgtgcgctccaaggctactggttctgagctcagtacagcactargacttgcctaggaattgtagtccttgtggcctaaatcagctgtccccaacgtttttggcaccagggactggttttgtggaagacaattttttaatggaca

SEQ ID NO: 233728 - DNA, 201 bp, Homo sapiens
attactaaatttggaacaaatcttagcctcttgtgcaaagctcaatatccatccttccttccttccttcctccctgcctcccttctttctttctttttttwaaattttttaaattttttatttttttgagacagagtctcactctgtcacccaggctggagtgcaggggcgcaatctcagctcactgcaagctccacctcc

SEQ ID NO: 233729 - DNA, 201 bp, Homo sapiens
gaacaaatcttagcctcttgtgcaaagctcaatatccatccttccttccttccttcctccctgcctcccttctttctttcttttttttaaattttttaaaytttttatttttttgagacagagtctcactctgtcacccaggctggagtgcaggggcgcaatctcagctcactgcaagctccacctcccgagttcacgcca

SEQ ID NO: 233730 - DNA, 201 bp, Homo sapiens
tatttttttgagacagagtctcactctgtcacccaggctggagtgcaggggcgcaatctcagctcactgcaagctccacctcccgagttcacgccattctsctgcctcagcctcctgagtagctgggactgcaggcacctgccaccacgcctggctaattttttgtatttttagtggagatggggtttcaccgtgttagcc

SEQ ID NO: 233731 - DNA, 201 bp, Homo sapiens
tgtcacccaggctggagtgcaggggcgcaatctcagctcactgcaagctccacctcccgagttcacgccattctcctgcctcagcctcctgagtagctggractgcaggcacctgccaccacgcctggctaattttttgtatttttagtggagatggggtttcaccgtgttagccaggatggtctcgatctcctgacctca

SEQ ID NO: 233732 - DNA, 201 bp, Homo sapiens
acccaggctggagtgcaggggcgcaatctcagctcactgcaagctccacctcccgagttcacgccattctcctgcctcagcctcctgagtagctgggactrcaggcacctgccaccacgcctggctaattttttgtatttttagtggagatggggtttcaccgtgttagccaggatggtctcgatctcctgacctcaggtg

SEQ ID NO: 233733 - DNA, 201 bp, Homo sapiens
ccatcttatctcacttaacagggcttcctattgacagtctgacaatctcagctccatccagtcagttctccatattgtagttacagaaatcacaaaaagctgtttttgattataatactgtctggcttaaaattcttcactgacttctaattgacaaatcaaatttcttaacatgaaagacacacaaagtctagatgtgtg

SEQ ID NO: 233734 - DNA, 201 bp, Homo sapiens
atcttatctcacttaacagggcttcctattgacagtctgacaatctcagctccatccagtcagttctccatattgtagttacagaaatcacaaaaagctgtttttgattataatactgtctggcttaaaattcttcactgacttctaattgacaaatcaaatttcttaacatgaaagacacacaaagtctagatgtgtggt

SEQ ID NO: 233735 - DNA, 201 bp, Homo sapiens; identical to SEQ ID NO: 43456

SEQ ID NO: 233736 - DNA, 201 bp, Homo sapiens; identical to SEQ ID NO: 43458

SEQ ID NO: 233737 - DNA, 201 bp, Homo sapiens
cctagaggagggctcctggagaaatcctccctccccctgtggggctgcgggttgaccccttcctgccccttctctgaggttagcctcaagcctcccgccarggtcctaaactgggggaggggctggagccgggagccccctaagcccaccgtgacggcgagcactcccaaggcccaaaacaaatccttcgaaagccctcgt

SEQ ID NO: 233738 - DNA, 201 bp, Homo sapiens
gagtccgagagtatgtacaaccaacttccctacaccctctccatcctccccacaccctcaccatccaacccacagctggagcagatccgcagggacatccragacttccggtctagcgcggggctggacaaagtcatagtgctgtggacggcgaacacggagcgcttctgtgaggtgattccaggcctcaacgacacagcc

SEQ ID NO: 233739 - DNA, 201 bp, Homo sapiens
ccctgtgtctgtccaccccgcagggagggcaatcccctcacgggccacagcgggtgcctgagcgtttcctggtcggggacgctccaccgcaccccccccccgccccctgcgacccgcagcttcccaactctaggccctgagcagttaatcccgggcggcgcgccctccccggcggttggcccgggccagaccccctacgtc

SEQ ID NO: 233740 - DNA, 201 bp, Homo sapiens
gccctgtgtctgtccaccccgcagggagggcaatcccctcacgggccacagcgggtgcctgagcgtttcctggtcggggacgctccaccgcaccccccccccgccccctgcgacccgcagcttcccaactctaggccctgagcagttaatcccgggcggcgcgccctccccggcggttggcccgggccagaccccctacgt

SEQ ID NO: 233741 - DNA, 201 bp, Homo sapiens
tggggccgcagggcctgcagctgctggggcttcccttgtacccacagaccatgtccatcgtgagttacaaccacctgggcaacaacgatggggagaacctrtcggcgccattgcagttccgctctaaggaggtgtccaagagcaacgtggtggacgacatggtgcagagcaacccagtgctctatacgcccggcgaagagc

SEQ ID NO: 233742 - DNA, 201 bp, Homo sapiens
ctcacttgacacccggggaactgagtagcccaggcctctgtgagtccgagagtatgtacaaccaacttccctacaccctctccatcctccccacaccctcwccatccaacccacagctggagcagatccgcagggacatccgagacttccggtctagcgcggggctggacaaagtcatagtgctgtggacggcgaacacgg

SEQ ID NO: 233743 - DNA, 201 bp, Homo sapiens
tcccggcggccgccatctcgccgtcgtcccgcggggtgcccggggcgttgctcaggccggccacggcgccgggggaactctgggggcggccgccgtcagckcgcaactccccgccccgccccctccccgccaccccccccggatcccacccccggcaagagcgcagcctccttaccttcggcaacccgtccatgtcgcccg

SEQ ID NO: 233744 - DNA, 201 bp, Homo sapiens
aggaaggtcccggcggccgccatctcgccgtcgtcccgcggggtgcccggggcgttgctcaggccggccacggcgccgggggaactctgggggcggccgcsgtcagcgcgcaactccccgccccgccccctccccgccaccccccccggatcccacccccggcaagagcgcagcctccttaccttcggcaacccgtccatg

SEQ ID NO: 233745 - DNA, 201 bp, Homo sapiens
gggcagaaggaaggggacttggacctggaccattccccagtgtggacagtggggaggcagcaaggtctgggctctgagagctggaattctgattgatggcrggataggggctggagcttccctactcaccctgggctcgtggggagggctccatggcgccagggaggaggggctgggagccagggaggcctgcgggaggct

SEQ ID NO: 233746 - DNA, 201 bp, Homo sapiens
gggccgcagcgcttttctccggaggtcgcgcgcccgagagcccgcgctgtccgccgccgctgcctgagtcgactctgcgccggtgagtgcggttcggggcrgggacggcctccgtggggacccaggctggcttggccccggccgcttagagtccccgctgaccccctgctcaccccgggcccccagcccgccgcgatggag

SEQ ID NO: 233747 - DNA, 201 bp, Homo sapiens
cggggtgcccggggcgttgctcaggccggccacggcgccgggggaactctgggggcggccgccgtcagcgcgcaactccccgccccgccccctccccgccrccccccccggatcccacccccggcaagagcgcagcctccttaccttcggcaacccgtccatgtcgcccgagcctacagacacggacagacacgggcaccg

SEQ ID NO: 233748 - DNA, 201 bp, Homo sapiens
gcccggtggtcaatgcgcttttccgccagcgcagctgcatcgagaacatcctcaggtgcaccccagcctccaggttcccgcccggggcccagatacccccctggctaagctatgcacagggcttggggggctgtaggtggcagggataccccccctttctccctgtgggtgtctggctctgctaagctgtgtgacctctcc

SEQ ID NO: 233749 - DNA, 201 bp, Homo sapiens; identical to SEQ ID NO: 43457

SEQ ID NO: 233750 - DNA, 201 bp, Homo sapiens; identical to SEQ ID NO: 43459

SEQ ID NO: 233751 - DNA, 201 bp, Homo sapiens; identical to SEQ ID NO: 43460

SEQ ID NO: 233752 - DNA, 201 bp, Homo sapiens
cctcaccatccaacccacagctggagcagatccgcagggacatccgagacttccggtctagcgcggggctggacaaagtcatagtgctgtggacggcgaayacggagcgcttctgtgaggtgattccaggcctcaacgacacagccgagaacctgctgcgcaccattgaggtgggcgaacgcccgggtggagcgggtcagg

SEQ ID NO: 233753 - DNA, 201 bp, Homo sapiens; identical to SEQ ID NO: 43463

SEQ ID NO: 233754 - DNA, 201 bp, Homo sapiens; identical to SEQ ID NO: 43464

SEQ ID NO: 233755 - DNA, 201 bp, Homo sapiens
ggcggagatgacttcaagtcaggccagaccaaagtcaagtccgtgcttgtggacttcctcattggctccggcctcaaggtgcgtgggcctagggagctgcygagtgcaggaagggggcctgggccgcgagcacctggcttgtggggccgcagggcctgcagctgctggggcttcccttgtacccacagaccatgtccatcg

SEQ ID NO: 233756 - DNA, 201 bp, Homo sapiens; identical to SEQ ID NO: 43466

SEQ ID NO: 233757 - DNA, 201 bp, Homo sapiens
tccatgcaagcagggctttgaacaagggcaggaaggtccctttctttttgtgtgattttctgtctgctgctctgttaagtgatctggatgcccatgttttycttctggacttaatattttcttccttttccataaaatatgaggagtgaggatgagatagttgatggagaggagagactgtgtgtgtgtgtgtgtgtgtgt

SEQ ID NO: 233758 - DNA, 201 bp, Homo sapiens
tatgtcttttcactgtaaggtttccatgtaaacacctcacatgaacttatgtgattatataaaaatcctgtcctacatggaattagtatgtattgtgtagrccttgaggaactcatgatccagcaggatagatacaatgcacacatagataaatacaatgcaaatcaaaatgttttacatgccagcgaaatggtaccacag

SEQ ID NO: 233759 - DNA, 201 bp, Homo sapiens
tccattctgaaaattccattagccaggcacaatgcattaaaatagacttcaaatgcacaaattatgtgttactgactctaccaaagcaactggcattattkcatttagcttaattattctcttccttggatattaattattaataacagataatacactttttaatagctttggaaaatactgctttggtttgtggaagaa

SEQ ID NO: 233760 - DNA, 201 bp, Homo sapiens
aaaaatactatgtgatttccagcttcattctcatacttaatgtttttggcacaagaaatgtgtggtttttctgagtctgtcatgcactgctgctttctccrccaggaatactgttcctctgtctaacctcccctggtgcttcatgatgggacttacctttcacttacctggaagctctccctaccccactccacgcctact

SEQ ID NO: 233761 - DNA, 201 bp, Homo sapiens
attattttttatcttcttcctcactgctggtatattgctttaggatttaggctgtgaaatcttctaactaaactttctcatctttcaaattggaaaaatcrtggcatctattgttaatataaaaattaaatgatataatgaatccacaagtacttggcatattgtaagcactcaacaaacattatcaatattttttaattc

SEQ ID NO: 233762 - DNA, 201 bp, Homo sapiens
ccctagatgattggattctgtaagatttactcaaattgttgcttcatctagagagttcacgtgactgcagatcttgttgctcctgagtagtttattttgcraaactgtcttttcagggttatggatgatcccttaccaaaatctgcccacttaattcctttcattgactctttcgatgcttaattctatttactttttttt

SEQ ID NO: 233763 - DNA, 201 bp, Homo sapiens
tgaactttatgacgcttgaaaaataatgaaccaaagtctagcattttctcactagaggggaatccattatgaacagactggattttaataaattatctgcmtacaaaagaaaatacaagtcagctgaatgaaggaaagttgttaatctcagcctggtcatctagcatcccctctactctggagttcacttgcccctggatg

SEQ ID NO: 233764 - DNA, 201 bp, Homo sapiens
tgagcatgaaatgttttttcatttgtttgtgtcatctctgatttccttcaacagtgttttgcacttcttgtaaagttctttcacctgcttggttagatgtwttcctaggtattctatcctttctgttgttgtcgtaaatgggattgcattcctgatgaactataaaaacattcttgtttttatagttcttctaggtgtgaa

SEQ ID NO: 233765 - DNA, 201 bp, Homo sapiens
aatagaggtcccaatggatacgtgctaaggaacacaggttttctcccagagtagcttccataaaatatcagcgacttgaaccctgattagttgtgacttargactttttcataaaggttgtatgtatttatatatttaaattttatttcttggccccatattctaaattctatatcttcttgagatattaattaggacagt

SEQ ID NO: 233766 - DNA, 201 bp, Homo sapiens
ttatggctgtgtattattccatgatatatatgtaccatattttctttatccaatccaccatagatgggctcctgggttgacttcacatctctgctattgcrgatagtgctgtgatagacatagaagtacctgtgttttttgagagaataatttattttccttagggtatatacccagtaatggggttgctgggtggtatgg

SEQ ID NO: 233767 - DNA, 201 bp, Homo sapiens
caattttatgtttcagagcacatttgagatctctgcttattttccgagagcccgttggtatgactatagcacggtaagaactaatatatttgtgaagaacmagtttggtctatgcagggtggagaggtggatagagccttctatttccaagcacatatttcctaaggcaataattttgacctttttagccttggcaaggct

SEQ ID NO: 233768 - DNA, 201 bp, Homo sapiens
ttcccctgcacaagctctcttgcctgccgccatgtaagacatccctttgcacttccttcatcttccaccatgactgtgaggcctccccagccatgtggaamtgtgagtccattaaatgtctttcctttataaattacacagtcttgggtatgtctctgttagcagcatgagaactgactaatacagtaaattggtaccagg

SEQ ID NO: 233769 - DNA, 201 bp, Homo sapiens
agtcaaatggtaattgccaagacaacgggaaaaatggctccagggcgtcagaggtcttcagagcagtacctcccatcacaggccaggaagcctcggacagwaaaatggttccatgggccaggcccagggtctcccctgctctgtgcagcctagggacttggggtcctgtgtcccagcagctccagacatggctaaaaggga

SEQ ID NO: 233770 - DNA, 201 bp, Homo sapiens
tgcaggaggtgacaggacagcgaggggtcatcatcacccgctccacatttccctcttctggacgctggggaggacaccggttgggaaacaacacagctgcrtgggaccagctggggaaatctatcattggtgtgtgggctcattcccaggggcctgtgctggcagggagggcactggagtttgtgctgttcaacagcactg

SEQ ID NO: 233771 - DNA, 201 bp, Homo sapiens
agctctgtctacaaggaagtggtcttatctgcagttgtcccttctgtttttcttttgacagatcactgactttaataacatacgctatgaagtttcccatraaaatattaacctggttgatgggattgctgatgcctccaatttgagctattacgtggaggttactgataaacctttcagcatcaaaataatgaggacaag

SEQ ID NO: 233772 - DNA, 201 bp, Homo sapiens
aatcaacgggttaaaatccattctgaaaattccattagccaggcacaatgcattaaaatagacttcaaatgcacaaattatgtgttactgactctaccaargcaactggcattattgcatttagcttaattattctcttccttggatattaattattaataacagataatacactttttaatagctttggaaaatactgct

SEQ ID NO: 233773 - DNA, 201 bp, Homo sapiens
aagcaaagggggagctgtactgggatgacggtgtatctaaaggtagactttctcaaggcaccatccctgtggatcactgtggttctccctgaaaattagtmatcataggctgcccaatatggcactaaccctattagcactgtcgtttacatctgtagctgagaatcaacgggttaaaatccattctgaaaattccattag

SEQ ID NO: 233774 - DNA, 201 bp, Homo sapiens
gctgcctgcccacacccagctcccatgtgtccacccaatatcaacatctactcagtttctggtatagactcttggattatctgtccctgggggatgaaggyggctggtttcacatagttccatctcatctacattctctgaaactgggaagtactcttttacagccggaggaattccctgggactcatcatcgccttggac

SEQ ID NO: 233775 - DNA, 201 bp, Homo sapiens
tagtcaaagtaatcactgaggaggatttccctatggccagaaattgtccttaggtatattccctaccgtgtgagagaatttgagttaaataggagataaakgttatcacgtggaagccaacaccgtttgggggtcaagagctcagattctacagaacctgggttcaagccttggtttgggctacatactagatgtgtttac

SEQ ID NO: 233776 - DNA, 201 bp, Homo sapiens
cccactttatctccatggcaacccctgtgggacttccatttcactctggggctgctacaaactgcctcagaagacagacaccaatttttttttttttttttgagacagagtctcattctgttgccagtttggagtgcagtggcacgatctcagctcactgcaacctccaactccctggttcaagcaattctcctgcctcag

SEQ ID NO: 233777 - DNA, 201 bp, Homo sapiens
tcccactttatctccatggcaacccctgtgggacttccatttcactctggggctgctacaaactgcctcagaagacagacaccaatttttttttttttttttgagacagagtctcattctgttgccagtttggagtgcagtggcacgatctcagctcactgcaacctccaactccctggttcaagcaattctcctgcctca

SEQ ID NO: 233778 - DNA, 201 bp, Homo sapiens
acaggaggctgtcccaccttcgccagggatatgtggattataaactaaattgccaaacagctttactggtcagatcctgtgagcgctttctgagtgggacycggaggaagatgagttcataaagttagtcttagggatatatatacacacatatatttttgtctgtagtgctgtatcaaaggcaaaaattttcctgaaggc

SEQ ID NO: 233779 - DNA, 201 bp, Homo sapiens
cgtaatgaggaagccttacaggaggctgtcccaccttcgccagggatatgtggattataaactaaattgccaaacagctttactggtcagatcctgtgagygctttctgagtgggacccggaggaagatgagttcataaagttagtcttagggatatatatacacacatatatttttgtctgtagtgctgtatcaaaggca

SEQ ID NO: 233780 - DNA, 201 bp, Homo sapiens
ctgaacaaagttgatagaccttattcttgtgtatacatgactcttgaccttccaactcaaaacaaaactcaaaattctatgggcttggtcagactccctcrcttgtatctttactgagggagacttagtgcatttgtcttcttggcatcacaaactctgatacaggacaaagtgctctgtgtgatagggcaccatgagatt

SEQ ID NO: 233781 - DNA, 201 bp, Homo sapiens
ctagggtgatgatagttaacaacaatttattgtatatttcaaaatagctagaagagaatatttgaaatgtttccaacacgaagaaatgatgaatgtggctwggtgtggtggctcacacctgtaatcccatcactttgggaggccgaggcaggaggatcacgtggtcagggatttgagaccagcctggccaacatagtgaaa

SEQ ID NO: 233782 - DNA, 201 bp, Homo sapiens
gtaataataacattttggctatatcatgtaaataaaatatattttgaaattaatgtaccctttttcttttcactttttaaaaaaatgtgactactagaaartattcaattacatatatagtttcccttatatttctataagatggcatagacttccatgttgcctactacctctttttagctagagtctatattttttctg

SEQ ID NO: 233783 - DNA, 201 bp, Homo sapiens
gctggaagctttccctttgaaaaccggcacaagacaaggatgccctctctcaccactcctattcagcatagtattggaagttctggccagggcaatcaggmaagagaaagaaataaagcttattcaaataggaagagaggaagccaaattatctctatttgcagatgatgtgattgtatatttagaaaaccccattgtctc

SEQ ID NO: 233784 - DNA, 201 bp, Homo sapiens
ctacttttattaaattggtaagcatcacacccagaggacagtaagcctaaccatgacagtcctgcctgtgatctgcactcattagcatgatgaaaactctkcccatccaacacttccacaatgactccatgaagtgagaaaacccaggaatcagccaagttctgaatatctcatggcaaaatggttttggaggaaggaata

SEQ ID NO: 233785 - DNA, 201 bp, Homo sapiens
aatgttaagagctaactaccataaatatatatgcacccaatacagaagcacccacattcataaggcaagtccttagagacctacaaagagacttagactcycacacaataatagtgggagattttaacacccactgtcaatattagacagaccaacaagacagaaaattagcaaggatattcagaacttgaactcagctct

SEQ ID NO: 233786 - DNA, 201 bp, Homo sapiens
gccaccgtgcctagcccgtttatttatttctcttgcctgattgccctggccagaacttccaatactacattgaataggagtggtgagagaggacatccttktcttgtgctggttttcaaggggaatgctttcagcttttgctcattcagtatgatattggctgtgggtttgtcatctatggctcttattattgtgagatat

SEQ ID NO: 233787 - DNA, 201 bp, Homo sapiens
actatcagtaagtccgtgatggattctatcttgtttctctcctttggctgggagtgtgccctgtgactctgggatctccttaagcatgggatgatgtgacwaagaggttctcttttcccttatcatataaatcttcactacatgctttcgcctctcattgaccacagtgcttgtatgtgtgctaattctccaggtaggtgc

SEQ ID NO: 233788 - DNA, 201 bp, Homo sapiens
atttattttgagctgtatattttttccttgattctgcctgcccagtagcaaaagtcttgttcatccttcatgatgccaattgaacatgtttcttttttctyttcctactgcagccatcataattgagaaatgcatagcttccctctgctacaactatctccttgattattgcatgtaatcttcaaaatctttccttacata

SEQ ID NO: 233789 - DNA, 201 bp, Homo sapiens
atcacagaaaggatgcaggagaaacgtgtgcatgctaaagaaagacctctctgctttgtttgtatcagggctctgaagaaaatagcgggagtcggaacccygagagaaggaagttcttctctgggcgcagttaaaatgagacactctgatcccagctgtgacatagtgaatagattgtgcaatgggtatttacacattggt

SEQ ID NO: 233790 - DNA, 201 bp, Homo sapiens
cagatatcttcaaccctgttttggtttcactctgtgtaagctgaatgtgtttctttcatgattgattactgcagagtataataaacctgcagccagtggtrataaaagcaaagtgtcggccagtctacattaaagtagaagtggggataggagttgagtgagtcctctcctccaacctacccctatttttgacagtaaatt

SEQ ID NO: 233791 - DNA, 201 bp, Homo sapiens
attggccagacctgggggatagaaaagagaaaactaaaagacagaaaatacaaagcctctgagtaagactgttcctttaagatgtttaaaaaaaaaaaaaacccagcagttatctaatctgttttaccacagtaccagcctgcctctaaataaactggaaccacagatatcttcaaccctgttttggtttcactctgtgta

SEQ ID NO: 233792 - DNA, 201 bp, Homo sapiens
gtattgagttgtgggctgtatgtataagaaacgaagtttgataccatagcactcttagggtaggtccttcctacttctttctctacctgaaattccaccaytggagaccgatcctctaagtctttaagctctgcagcctaggatacattgtcgagagagtattcaagtactattttaaaaagtagcggctctcggtgtttg

SEQ ID NO: 233793 - DNA, 201 bp, Homo sapiens
ttggaggaggggaagaaagtttcaaattacttttttgcccgtgactccatgtggtaaaagtgctataaatcaagaatgggttggttaatatattctaatarttatggttaatagttaaaaggtaattgtgattgagcaaatagtaggtgtctttctaatttctctggccaggcataatggcctacgctcccagaggacagt

SEQ ID NO: 233794 - DNA, 201 bp, Homo sapiens
tctctgcttgaggattaagtcttatcaatctggtttatctccaggagttgtttccaaacactagcaaaagtttttctcaagaattttatggagaaacaccratgcattctttttcttctcaactgtctttgtaaaaatagatttctatgtcattggaaaaaatcacttatgtcatatttaaattcctacaggattttttaa

SEQ ID NO: 233795 - DNA, 201 bp, Homo sapiens
atgttttgttttttttttgagacggagtctcgctctgtcgcccaggctggagtgcagtggtgcgatctcggctcactgcaagctccgcctcctgggttcaygccattctcctgcctcagcctcccaagtagctgggactacaggcagctgccaccacgcccggctaattgtttgtattttttagtagagacggggtttcac

SEQ ID NO: 233796 - DNA, 201 bp, Homo sapiens
ctacttggatgttttgttttttttttgagacggagtctcgctctgtcgcccaggctggagtgcagtggtgcgatctcggctcactgcaagctccgcctccygggttcacgccattctcctgcctcagcctcccaagtagctgggactacaggcagctgccaccacgcccggctaattgtttgtattttttagtagagacgg

SEQ ID NO: 233797 - DNA, 201 bp, Homo sapiens
ttacagtctatgccaacacataggtaatttataagtaatttatttcttttcatggttttcactgtaattaattctaatgattttaaaatctataattatamctgagatgtttccctaatttttagacacaaatatccaaaacaatcttctgacgttgtctacttggatgttttgttttttttttgagacggagtctcgctc

SEQ ID NO: 233798 - DNA, 201 bp, Homo sapiens
gggagacggaggttgcagtgagccgagatcacgctattgcactccagcctgggcaacaagagtgaaactccgtctcaaaaaaaaaataaaaaaagatactkctctgcctggtgcctctgctctctttccagctgttccctctcatctgtgtgcctggatcttttccatcagctctttcactattgatgattcttaggaatc

SEQ ID NO: 233799 - DNA, 201 bp, Homo sapiens
cttttaataaagtaatcttaagttgaaatatttccaattgagtggtttagctcttaataggttcattagaataacttcctaatgataattttagctccaaytcttgactttgtctttaacccaggaaggattaacagtcaaaccttcaaagtattttatccctgggcttttctggccacttgtgatctagagagagatgaa

SEQ ID NO: 233800 - DNA, 201 bp, Homo sapiens
cgggcagatcacttgaggtcaggagttcggactagcctggtcaacatggtgaaaccccgtctctattaaaaatacaaaaaaattacccaggtgtggtggcrcatgcctgtaatcccagctacaaagcaggctgaggcaggagaatcacttgaacctggaggcagaggttgtagtgagctgagatcgcgccactacactcca

SEQ ID NO: 233801 - DNA, 201 bp, Homo sapiens
ctggtgatacccaggcaaacatggtctggagtggacctccagcaaactccagcagacctgcagaagaggggcctgactattagaaggaaaactaacaaacrgaaagcaatagcatcaacatcaacaaaaaggatgaccatgcaaaaaatccatccgaaggtcaccaacagcaaagaccaaaggtagataaatccacgaaga

SEQ ID NO: 233802 - DNA, 201 bp, Homo sapiens
aggattgcttgattttagcaaataaaaatacaggacaccaaattaaatttgtgtgggacattctcatactaaaaattacttgttgtttatttggaatttgratttacctgtatttcctttatttatctggaaatgctacaccatatccttctatttccttcccaatgtcctgcttgtctacctcataattctcccttctgc

SEQ ID NO: 233803 - DNA, 201 bp, Homo sapiens
catgagcttgcagggctcagaggatgtgggtctggtcttggctgatctttgctagctcacatacatctccagttagtcttgggtctattgggctgtttagrtaatcttggctgtattcacatatctggggggtcagctgactctcatatgatttatcatggccttgtgggaaggtctaggcacggcttcttcataattatg

SEQ ID NO: 233804 - DNA, 201 bp, Homo sapiens
agtcctcagctagaagtcagctcttgcttggatccttttactgaatgcactaggattgcttgattttagcaaataaaaatacaggacaccaaattaaattygtgtgggacattctcatactaaaaattacttgttgtttatttggaatttgaatttacctgtatttcctttatttatctggaaatgctacaccatatcctt

SEQ ID NO: 233805 - DNA, 201 bp, Homo sapiens
gcttttgctcattcagtatgatattggctgtgggtttgtcatctatggctcttattattgtgagatatgttcctttagtacctagtttattgagagttttwaaaaatcagccagatttactgtagaaaaaaaccccagatatacaatcctgtttgtttcctaggaaagtcccagtttctacccttgaacatttcaattaga

SEQ ID NO: 233806 - DNA, 201 bp, Homo sapiens
tagagtcctcagctagaagtcagctcttgcttggatccttttactgaatgcactaggattgcttgattttagcaaataaaaatacaggacaccaaattaartttgtgtgggacattctcatactaaaaattacttgttgtttatttggaatttgaatttacctgtatttcctttatttatctggaaatgctacaccatatc

SEQ ID NO: 233807 - DNA, 201 bp, Homo sapiens
gaagagtgggaaagacatgaattgaggaaaggaaaggggatagagttccaattggggaaacagaaggagaaggagtgggcacaggtgaactgcatgcaggmatcagaaagcaatttcaatctgcagaattgaaaagtcagcagagggaagtaatgagatgaggaatgaagaggggcctggaatggggcaggcaggcagcag

SEQ ID NO: 233808 - DNA, 201 bp, Homo sapiens
ctatgtaaggcatttagagtcctcagctagaagtcagctcttgcttggatccttttactgaatgcactaggattgcttgattttagcaaataaaaatacargacaccaaattaaatttgtgtgggacattctcatactaaaaattacttgttgtttatttggaatttgaatttacctgtatttcctttatttatctggaaa

SEQ ID NO: 233809 - DNA, 201 bp, Homo sapiens
atgaagaggggcctggaatggggcaggcaggcagcaggaccaggggcctggcagagcagttaatgtgccctgcagggcacctactgcagggttccaagagycttgctgcttctttctgcaggacgtccagcatgtagacatcgattacatgaaccggaagctggatttcaccctcagtgccaactttcaaaacctcagtct

SEQ ID NO: 233810 - DNA, 201 bp, Homo sapiens
aatactatgtaaggcatttagagtcctcagctagaagtcagctcttgcttggatccttttactgaatgcactaggattgcttgattttagcaaataaaaatacaggacaccaaattaaatttgtgtgggacattctcatactaaaaattacttgttgtttatttggaatttgaatttacctgtatttcctttatttatctg

SEQ ID NO: 233811 - DNA, 201 bp, Homo sapiens
ttccaggacccctgcggatatcaaattccacagatgctcaagttccttatataaaatgataatatttttataatttcaacttttattttagatatagggtrtacatgtgcaggtttgttgcatggatgtattgtatgatgctgaggtttggggtatggatcccgtcacccaggcagtgagcatagtaactaatgggtagtt

SEQ ID NO: 233812 - DNA, 201 bp, Homo sapiens
tttattttccataactgtcactggaatataattattattctcttggtaaagttagaacaactgtgggctgaagcactgaagatagcaaaaaaaaaaaaagkggggggcatctcactgtttcaggctatgtctcaggagaaatagctgtatcttaatctcatctttacgtcaggaggttcaaaaatctcttatgttgtatca

SEQ ID NO: 233813 - DNA, 201 bp, Homo sapiens
aggtatgagccactgtgcccagcctctatttttcttttaagtgtgactgtattataaaaaagaaaaagttccctttctctgccttcatacctatacattgyacactcaatttctcttgattaaatttatgtagataaacactatatgctttatacttaggctcagatccactgcgtttgctctgagcatgtttctcagttg

SEQ ID NO: 233814 - DNA, 201 bp, Homo sapiens
tcagccagggatgatctatctctgtataactgtctcactcttgatttaaaaagaagtgtggatgcaaatatcaggctgatggttaattcattctcaatggracagaaacatgactctatcatttggatcagccatctataccaggcaccctgttcctcacaaataggcctgctcaagaggcaatttagaggttagaaaatt

SEQ ID NO: 233815 - DNA, 201 bp, Homo sapiens
tgtcacatcttattttttttttttttgagatgtagtctcgctctgtcacccagtctggagtgcagtggcacgatctcggctcattgccacctccgcctccygggctcaagtgattctcctgcctcagcctcccaagtagctgggactgtaggcgcacaccaccatgcctggctaatttttgtaattttagtaaagacgggg

SEQ ID NO: 233816 - DNA, 201 bp, Homo sapiens
cagaggttgtggtgagccgagatcgcgccattgcactccagcctgggtagcaagagcgaaactctgtctcaaaaaaaaaaaaaaaaaacctcatgaataaytttatattgaaaaatgttgtaataataacattttggctatatcatgtaaataaaatatattttgaaattaatgtaccctttttcttttcactttttaaaa

SEQ ID NO: 233817 - DNA, 201 bp, Homo sapiens
tttataggtcccatttctagtcaaggtcaattttccagtttctgattttgaaagaatatgtgtggaggtggcgggtggcagtggcagtatagaatacactwtgctctggcaacatataaaccccaatatctcagtggattaacacaataatcgtttactttttgctcacatcatactctgatgagggatgggtgacttgaa

SEQ ID NO: 233818 - DNA, 201 bp, Homo sapiens
agcaccagctatggttgtccttgcactcctccatgaatgtggctttgttcaatgtgtccctgtacccctatttcctgtctcataataaatccttcccatgmttaccaggagttccgaagttacatgtccttcctaagttctctcttgaccctcttcctcccatgtaatttttcctttctcttcacatccatgaaaaatatc

SEQ ID NO: 233819 - DNA, 201 bp, Homo sapiens
aaagaatctagctgtattctattaagctagacattaaacagatttacaaaatgtaaaataatgtcattcttctaatttttttttgctttgggaaatacagwtatttttcattaaaaacatatttatgttatcacaaagtgaatatgttattttttatgaatgaaaaataaatatttaaaaaatattttacaaatgactcaa

SEQ ID NO: 233820 - DNA, 201 bp, Homo sapiens
aaaggggtggtaacttccaggtcattgtcatggaaagggttgtaacttctggctgttaccatggcaatgccatggcaatggtaaactgggaagaggtcgastgacatggcattggtggatgtgtctcagggagagatgcttttgcctcttcactatttcagctagtcttcaaactggtctggagttcaagccttacctcag

SEQ ID NO: 233821 - DNA, 201 bp, Homo sapiens
gctaattctaccattgacaacactagcaaaacctgtgcatggactctgatttataaggtctagagaaacttctaagctccataatgactggccccgctggktcacccacatgtgtgatattaattctgcactaatgattataacttatgttctaagtataaagaaatttacttttctacacttctggtacttgacacattc

SEQ ID NO: 233822 - DNA, 201 bp, Homo sapiens
ttcttatctttcttgggtgaggcctcttatacagtacttagcagaaacactcaagttgattcaagtataagtcaatcaccttgtcttccctaagaaatctwtctggatgcatttttctttttattctagttgattggtcggccagcaatgattccatactgggccttgggattccatctgagtcgctatggataccagaat

SEQ ID NO: 233823 - DNA, 201 bp, Homo sapiens
accggcaaattctcaggtttcctagaatgaaaactctggaatacagaaaaacttcaattacgtttctatcattttgcatgtctgtagttgctccacatttrttggactttcttatctttcttgggtgaggcctcttatacagtacttagcagaaacactcaagttgattcaagtataagtcaatcaccttgtcttccctaa

SEQ ID NO: 233824 - DNA, 201 bp, Homo sapiens
cacctgccacattgcattttattttgctgttttataaacagatttgtaatttttttcttaaaatcatttctgtcatttcatgtaaatttagttaggtgagraaggtgaatgcctgtgtttattctaacacagtggtctcagttgccatttgttttatttatcataacaaaataattttatgtaaattaacctgaaaattat

SEQ ID NO: 233825 - DNA, 201 bp, Homo sapiens
caatgaaaataatattttctatgttagttgtttttaactttatagaaagtatcagatgcgatcttttgagacttactcatttcaatgactcttattttgcrtagattaaaatttgctaacattgagaattgctaagaataagtctgaagtttcagaggaagccagggataagttctgaagtttcagaggtgtaccagctgg

SEQ ID NO: 233826 - DNA, 201 bp, Homo sapiens
aaaatacaaaaaattagccaggcctggtggtgcgcacctgtagttctagctactcaggaggctgaagcatgggaatcacttgaacctgggtggtggagatygcagtaagccgagatcgcaccactgcactccgagctggcgacagagtgagaatccatctaaaaataaaaataaaaaaaaagaaagaagaaaaccttcacc

SEQ ID NO: 233827 - DNA, 201 bp, Homo sapiens
gttgaccaaaaggaccagaccacaaccagatccaactagacagagaaaacaaaatcggggaacggaagcctagagaaattgctatgggggctagaatataraggtttgtactgtcttatatgagatctgaaatcttaccccaaaatgggaaagaagctcttagatagtactaagtttatgacacctggtttatgacaccct

SEQ ID NO: 233828 - DNA, 201 bp, Homo sapiens
aaatggttccatgggccaggcccagggtctcccctgctctgtgcagcctagggacttggggtcctgtgtcccagcagctccagacatggctaaaagggacmaaagtacagctcgggccatggcttcagagtgtataagccccaagtcttggctgcttctacatgttgttgagcctgtgggtgcatagaagtcaagcaccga

SEQ ID NO: 233829 - DNA, 201 bp, Homo sapiens
agaaacttgctgttatgcattcagccagggatgatctatctctgtataactgtctcactcttgatttaaaaagaagtgtggatgcaaatatcaggctgatrgttaattcattctcaatgggacagaaacatgactctatcatttggatcagccatctataccaggcaccctgttcctcacaaataggcctgctcaagaggc

SEQ ID NO: 233830 - DNA, 201 bp, Homo sapiens
cctctttaccctttaaatgacctttggtaagcattttaaagatcatcttattttgtccagctcactagtttcaggcgaatgcctttctaacttctctgaaycttagcttcctaacagtaaaaggagtgcaaggaaaccttttcatgatgttatgagacaccacataggaaagtgaccggtataatactggaatagaggaat

SEQ ID NO: 233831 - DNA, 201 bp, Homo sapiens
cttcattatgttttgtccattgtttttatttgaaattcctttctcttgtagaaatcaggtggtttatatattctttcagttttaatagaacatgtgtgtatgtgtgtgtgtgtgtgtgtgtgtgtgtgtgtatttccattcatttttggatttgttttggtgtgaaaaattggaaataacccaaatggattagtttacaca

SEQ ID NO: 233832 - DNA, 201 bp, Homo sapiens
aaaaaaaaaaatctagcactggcaataattttgtaaaatacaattaaaatatattactgaaaaaatgaaataaaaaaactcaaagacataccaaaaaaacstaaattttcagttgaacagacataaaatattacccttttcaattgctataaaagaatttctaaactttgacttttggtttttgcacttgtcttgtggctg

SEQ ID NO: 233833 - DNA, 201 bp, Homo sapiens
accttttacttcattatgttttgtccattgtttttatttgaaattcctttctcttgtagaaatcaggtggtttatatattctttcagttttaatagaacatgtgtgtatgtgtgtgtgtgtgtgtgtgtgtgtgtgtgtatttccattcatttttggatttgttttggtgtgaaaaattggaaataacccaaatggattag

SEQ ID NO: 233834 - DNA, 201 bp, Homo sapiens
ttatttgatggggcacatgtaattgggtgatttcacaaatcagaagccacaaggtgaagaattagaagctattctcatggggtgtcatttgagatggaacrtcttttgtagctctgtctacaaggaagtggtcttatctgcagttgtcccttctgtttttcttttgacagatcactgactttaataacatacgctatgaag

SEQ ID NO: 233835 - DNA, 201 bp, Homo sapiens
ctttgcatcagtcactactctatcttcctgccttattccaggccttcattatctctcatctagactgttataaaaatctaagctatcctcacccccatttstttatcacacatacatacatatgcattcttccaatttgtgtatggttaaatctataccttttacttcattatgttttgtccattgtttttatttgaaatt

SEQ ID NO: 233836 - DNA, 201 bp, Homo sapiens
caaaggtcaagtcaccatgagacctgcagctccctgttggtcctctgtacttggcagagtcagagtgggttgtggggtatgtctgggggtgatctgttgaygcagtgggtcaagggcagaagatccccaggcactgcagtgttgccgtaggggtgcagctgatatggtgccatgatccagtattttctgcacagcaaatgg

SEQ ID NO: 233837 - DNA, 201 bp, Homo sapiens
ctaagaaaaaatagaggaagataatagtaacctctggccatagactaaaaagtgaataatccatgcgtagtaaaacaagatgggctacctctgttggggasttgtatcaaggggagttgtatcaagagatttccttaggtcctgtgtccagcattacctcactatttttgccactgtaaaacaatccttgtaagttttaaa

SEQ ID NO: 233838 - DNA, 201 bp, Homo sapiens
ttgcagagagaggttttaggaaaagatacacttgtctcagaccatgtattagaaagcgggaaagaagagcttgcctgcgaagagctggcagaaactgtggmgtggctcaggtcttactgtcctttaattgtattattgttcaattttataattctaatggaagatgtgggctttttaccacaggggggaaaaaagaaaaga

SEQ ID NO: 233839 - DNA, 201 bp, Homo sapiens
gtgtgtgtgtgtgtgtggtgtcagtgtttggaggacaggttgggggaggtctggtgtgagatcctcctctctcactgggagaaattaaggacagaggaaayagatgggatccttctggaaactatctcaagatggcatggatttggaggaaggtgaattcctcccagctttgggcaggaagggtttctaagtaggcaagaa

SEQ ID NO: 233840 - DNA, 201 bp, Homo sapiens
ctaacaagctcccaggcaatgctgctgctttgggtctaagaaacataatttccaagcaggactttagaaaaccttcacctggcaaggtgtggtggctcacrcctgtaatcccaacactatgggaggccgaggcaggtgaggtcaggagatcaaaaccatcctggccaacatggtaaaaccccgtccctactaaaatacaaa

SEQ ID NO: 233841 - DNA, 201 bp, Homo sapiens
gaatgcaggggcacaatctcaggtcactgtaacttccacctccctggctcaagccatcttcccacctcagcctcccaagtagccaggactataggtgtgckccgacacacctggctaatttttgtattttttgtagagacggggttttgccttgtttcccaggcggtctcaaatgtctaacctcaagcaatccacctccct

SEQ ID NO: 233842 - DNA, 201 bp, Homo sapiens
gtgtgtgtgtgtgtgtgtgtgtgtgtgtgtgtgtgtgtgtgtggtgtcagtgtttggaggacaggttgggggaggtctggtgtgagatcctcctctctcaytgggagaaattaaggacagaggaaacagatgggatccttctggaaactatctcaagatggcatggatttggaggaaggtgaattcctcccagctttgggc

SEQ ID NO: 233843 - DNA, 201 bp, Homo sapiens
caaggtgctggcagattccgtgtctggtgaaggccctctctgcttcactgatggcacctccttgctcctccctcatgacttaatcacctcacaaaagtctycccaccccttaatactatcactctgggtattaagtttcaacatataaattttgagggtacaccagcattcagaccatagcagaaggcctttccaaatgta

SEQ ID NO: 233844 - DNA, 201 bp, Homo sapiens
ttttttttttttttttgagacagagtctcattctgttgccagtttggagtgcagtggcacgatctcagctcactgcaacctccaactccctggttcaagcrattctcctgcctcagcctcccgagtagctggaattacaggcacgtgccaccacacccagctaatttttgtatttttagtagagacaggatttcaccatgt

SEQ ID NO: 233845 - DNA, 201 bp, Homo sapiens
cacatcttccaaattacatggaaaatgaacaaaatgaatgccgaccattgacggaaaattttcatctctgggtccatggaaaattagatttttcttctaaygggttatttttttactcttggataaaatctgctaaaaaccatcgtcataatttatttgcacaatgtatgtcaaagaacaaatagaggtcactaatctttg

SEQ ID NO: 233846 - DNA, 201 bp, Homo sapiens
tatgtatctaagagtggaacttctgtgtcatataggaactgtatttttaatattttgaagaaatatcaagctgttttctaaaaaggctgtaccattttacytttttttttttttttttttttttgatggagtctggctctgtcgcccaggctggagtgcagtggtgcaatctcggctcactgcaacctcctcctcctgggt

SEQ ID NO: 233847 - DNA, 201 bp, Homo sapiens
atcctattaagtgtgattgggagcaggggtaagtggcaaagtgtgggacaaggatcaggaaggattatgctgatctgcttgtaaacatgaaatattgccartgtagccatgtcaaaggccctttgagctgttgttatagccacactatctgatgacaggtcctgctaaccaaccagtggccctgctgggaggctttcctgg

SEQ ID NO: 233848 - DNA, 201 bp, Homo sapiens
tttttttttttttttttttttttttttttttgagatggagtgtcactctgttacccaggctggagtgcagtggtatgatcttggctgtctgcaacctcctyttcccaggttcaagcgattctcctgcctcagcctcctgagtagctgggattacatgtgtgtgccaacactcctgattaatttttgtatttttagtagaga

SEQ ID NO: 233849 - DNA, 201 bp, Homo sapiens
aaacaatttatgacaatgaaactgaccttttgaattagactgaccccagtttcagagggagcagagctacttaatgtctgccttaggaaaatcaattatcyacaggccacccagacccccaaattctttcttcactgatcccttccagccttttttgttatctgaagacaatgagacaggaatgtcaattagatttatgga

SEQ ID NO: 233850 - DNA, 201 bp, Homo sapiens
ttactcagtattttggtttttctccatgggagaggtgcttcccagccgcatctagctggccatattgtcccctttcctctcattttattacttacaggttkgggtggtaactttttgtagtatagaaaggctccttcatttgttggcacagattcttataccctttgaaagagattacccctcataagggttttatatctt

SEQ ID NO: 233851 - DNA, 201 bp, Homo sapiens
actctatgtgggatttccagctttctccctcttacacctcagtgtttgcattgcctctctatagactggcagtgttatctttcaaaagctctgtttgaagygtaatggtttactcagtattttggtttttctccatgggagaggtgcttcccagccgcatctagctggccatattgtcccctttcctctcattttattact

SEQ ID NO: 233852 - DNA, 201 bp, Homo sapiens
cgcacaggcttgagctctgcctctgcctactctccaggcagtttctcttgccaattcaaatgtctatggtgtttgtggggtctgttgtagctaggatcccrgatgtctgcagtgcaagtttcccttcactcactccttccttgggacctgttcagtgccaggagctggtcccggcactcagcaactctatgtgggatttcc

SEQ ID NO: 233853 - DNA, 201 bp, Homo sapiens
cttggcagagtcagagtgggttgtggggtatgtctgggggtgatctgttgacgcagtgggtcaagggcagaagatccccaggcactgcagtgttgccgtargggtgcagctgatatggtgccatgatccagtattttctgcacagcaaatggctttggggccctctcagcttgctctcccccaactgagtctccttccaat

SEQ ID NO: 233854 - DNA, 201 bp, Homo sapiens
gtccatttttggtgcttgagggagcctcctctaatcactgatatcatgcctatgtttccttagccccaagggcgtccctgacaggctgtgctcttccctcytagggacagcctgagccaaaggtcaagtcaccatgagacctgcagctccctgttggtcctctgtacttggcagagtcagagtgggttgtggggtatgtct

SEQ ID NO: 233855 - DNA, 201 bp, Homo sapiens
atatgtcagtttaaatttgaaaagtacaaaaaggctgggcacggtggctcacacctgtaatcccagcactttgggaggccaaggtgggaggatcacctgargtccggagtttgagaccagcctgaccaacatggagaaactctatctctactaaaaatacaaaattagctgggtgtggtggcgcatgcctgtaatcccagc

SEQ ID NO: 233856 - DNA, 201 bp, Homo sapiens
aagttttctgcataggtggagtccttatggagatcctctgctagggcagtgcggaagggaaatgtggggtcagagccccaacaaaaagtccccactggggygcagcctagtgaagttgggagaagagggccactgtcctccagcccccagaatggtagatccactgatggcttgcactgcatgcccggaaaagccgcagac

SEQ ID NO: 233857 - DNA, 201 bp, Homo sapiens
gaagctgaggcaggataatcccttgaacctgggaggtggaggttgcagtgagttgagattgcgccactgcactccagggtgacactccgtctgcaaaaaartaaaataaaataaaaataaaattactgctgcgaaaagtgagaggcactgtcaagaccatcagtcggcttgcaggcccagtttatttaggagattatgagc

SEQ ID NO: 233858 - DNA, 201 bp, Homo sapiens
actaagatacagtgtaagtgtcatttaaatgttctattagcagacttggaaccatttatttaacttttcctcacataggtgatataatggctgttcaaggwtaatcttaaaagaacatgttaacagaatcccattctttacaatttttttattaactgctagaagaggctgtagtgtttgcccaggttgcattttctagcc

SEQ ID NO: 233859 - DNA, 201 bp, Homo sapiens
gacccaaagataccgggaaagtagtctgactgaactgttaactggctgtgagaactaacagaatgagaggaattaaaaaaagattcctaggttttttttttataatgtgattctattcctcaagttattaattatttgaagaacagataatttggccaaattggcaggaactgggagtgaggtgtggggagagatgatttc

SEQ ID NO: 233860 - DNA, 201 bp, Homo sapiens
accggggaggcagaggttgtggtgtgctgggatcgcgccattgcacttcagcctgggcaacgagagcaaaattccgtctcaaaacaaaacaaaaaaaaaaacaaagtacaaagaaacagggacattgttttaaaaatactttatatagctcaatgtgtatctatatgtgtgtgtgtgtctgtatattacatagcattatca

SEQ ID NO: 233861 - DNA, 201 bp, Homo sapiens
agtctctagtttctgttattcccacctttatatctatgtgtacccagtacttagctcccacttataagtgagaacatgtggtatttgcatgtctgttcctkcattaattcacttagaataatggcctccagctacatccatgttgctgcaaagagcataatttcattctttttatggctgtgtattattccatgatatata

SEQ ID NO: 233862 - DNA, 201 bp, Homo sapiens
tggaggacttgccaactacttctcatgactcattccacctttaggctcgtctacccaaaatagtattttcgatgggcaagtacatggaagtgggttcaaaktcccccctaaggaggtgtttatgatggtagcagaagcaagtagggtgagatgtcctttcttttaataaagtaatcttaagttgaaatatttccaattgag

SEQ ID NO: 233863 - DNA, 201 bp, Homo sapiens
aatcaaccacataattggaagtaatacgctcctcagaaaatgaaaaagaacagaaatcataacaaagagtctctcagaccgcagtgcaatcaaattagaaytcaggattaagaaactcactcaaaaccacacaactacagggaaactgaacaacctgctcctggatgactactgagtaaataatgaaattaaggcagaaat

SEQ ID NO: 233864 - DNA, 201 bp, Homo sapiens
agatagcctcttattcagctgcaggcctctttcatatttcagcacagttgcagtagtgctatggggtgggggagatgggggatccagagatggcccccttsccaagtccatttttggtgcttgagggagcctcctctaatcactgatatcatgcctatgtttccttagccccaagggcgtccctgacaggctgtgctcttc

SEQ ID NO: 233865 - DNA, 201 bp, Homo sapiens
tgcattgggtttcacaggcaccctttttgtttggtggtgtaatttaggctgcgatacagtagatggtgtttaagagtaagggccagaagatagcctcttaytcagctgcaggcctctttcatatttcagcacagttgcagtagtgctatggggtgggggagatgggggatccagagatggcccccttcccaagtccatttt

SEQ ID NO: 233866 - DNA, 201 bp, Homo sapiens
aaggctctttaagagatatttatctgtggctgaattcctgcattgggtttcacaggcaccctttttgtttggtggtgtaatttaggctgcgatacagtagrtggtgtttaagagtaagggccagaagatagcctcttattcagctgcaggcctctttcatatttcagcacagttgcagtagtgctatggggtgggggagat

SEQ ID NO: 233867 - DNA, 201 bp, Homo sapiens
agggcagatgttcctttatctttttgaagtcgctgtcttttggatatggctttttgtttttatagtctttattttccttgagggtttgactgtggtgtatrttgagtatagttgattggcttcatttctgggtgctttcagaggcccaaggctctttaagagatatttatctgtggctgaattcctgcattgggtttcaca

SEQ ID NO: 233868 - DNA, 201 bp, Homo sapiens
ccacattcataaggcaagtccttagagacctacaaagagacttagactctcacacaataatagtgggagattttaacacccactgtcaatattagacagaycaacaagacagaaaattagcaaggatattcagaacttgaactcagctctggaccaagcagatgtaatagacatctacagaactctccaccctaaatcaac

SEQ ID NO: 233869 - DNA, 201 bp, Homo sapiens
tccatctcaaaaaaagaaagaaagaaagaaggaaagaaagaaagaaagaaagaaagaaagaaagaaagaaagaaagaaagaaagaaagaaagaaagagagaaagaaagaaagaaataggagactacaaagaatattgaagataagccagaaatagaggtggaaagccaagattcctatcaaggaatccatatgtggaaagt

SEQ ID NO: 233870 - DNA, 201 bp, Homo sapiens
aatagatttctatgtcattggaaaaaatcacttatgtcatatttaaattcctacaggattttttaacatcttatttatttgtttatttaaatatttcaggkttaaactttttttaacttctattttagattcagtgtgtacatatgtaggtttgttacaaaagtgtattgtgtaatgctgaggtttggagtatgtattagt

SEQ ID NO: 233871 - DNA, 201 bp, Homo sapiens
aaccaaaatgtaaagaccattgacactatgaagaaactgcatcaactaatgggcaaaataaccagctagcatcataatgacaggatcaaattcacaaatarcagtattaaccttaaatgtaaatgggctaaatgctctgattaaaaggcacagactggcaaattggataaagagtcaagacccactggtgtgctgtattca

SEQ ID NO: 233872 - DNA, 201 bp, Homo sapiens
ctccatctcaaaaaaagaaagaaagaaagaaggaaagaaagaaagaaagaaagaaagaaagaaagaaagaaagaaagaaagaaagaaagaaagaaagagaraaagaaagaaagaaataggagactacaaagaatattgaagataagccagaaatagaggtggaaagccaagattcctatcaaggaatccatatgtggaaag

SEQ ID NO: 233873 - DNA, 201 bp, Homo sapiens
tacaggattatgtcatctgcgaatatgaatagtttgacttcctcttttcctatctaaatgccctttatttctctctctctctcttttttttttttttttttgagttggagtctccctctgctgcccaggctggagtgccatggagcaatctcggctcactgcaacctctgcctcctgggttcaagtgattctcctgcctca

SEQ ID NO: 233874 - DNA, 201 bp, Homo sapiens
agactccatctcaaaaaaagaaagaaagaaagaaggaaagaaagaaagaaagaaagaaagaaagaaagaaagaaagaaagaaagaaagaaagaaagaaagagagaaagaaagaaagaaataggagactacaaagaatattgaagataagccagaaatagaggtggaaagccaagattcctatcaaggaatccatatgtgga

SEQ ID NO: 233875 - DNA, 201 bp, Homo sapiens
ggttaagaaacttttgggttgagatgatggagttttctagatataggatcttgtctatatgacaagatctagtatctagatacaggattatgtcatctgcraatatgaatagtttgacttcctcttttcctatctaaatgccctttatttctctctctctctcttttttttttttttttttgagttggagtctccctctgc

SEQ ID NO: 233876 - DNA, 201 bp, Homo sapiens
ttaatttgtatgtttcctttccccagttgagatagagtatgttagttctacttaggtaagtgagatttgtcattatcatcagaacaccctctaactcagamttttctatagatatatggacacactgttactagctgactctcacttttcactacttattactgtggaccagaaccttctaatcttgcaacataccacatt

SEQ ID NO: 233877 - DNA, 201 bp, Homo sapiens
cgagactccatctcaaaaaaagaaagaaagaaagaaggaaagaaagaaagaaagaaagaaagaaagaaagaaagaaagaaagaaagaaagaaagaaagaaagagagaaagaaagaaagaaataggagactacaaagaatattgaagataagccagaaatagaggtggaaagccaagattcctatcaaggaatccatatgtg

SEQ ID NO: 233878 - DNA, 201 bp, Homo sapiens
tgtcacattcttttgtccctaaaaggcatatatatatatatatatatatatatatatatatatatatatatatatatccacaactgacagagggaaatatrtatatatttccctctgtcagttatggattttatttatctcacaaacttttagttaatatattctacttgtcaggcacattgctaagtgcttatctgtaca

SEQ ID NO: 233879 - DNA, 201 bp, Homo sapiens
gcgagactccatctcaaaaaaagaaagaaagaaagaaggaaagaaagaaagaaagaaagaaagaaagaaagaaagaaagaaagaaagaaagaaagaaagaaagagagaaagaaagaaagaaataggagactacaaagaatattgaagataagccagaaatagaggtggaaagccaagattcctatcaaggaatccatatgt

SEQ ID NO: 233880 - DNA, 201 bp, Homo sapiens
cgctctcagttgtaatagagcacgtgtcacattcttttgtccctaaaaggcatatatatatatatatatatatatatatatatatatatatatatatatatccacaactgacagagggaaatatgtatatatttccctctgtcagttatggattttatttatctcacaaacttttagttaatatattctacttgtcaggca

SEQ ID NO: 233881 - DNA, 201 bp, Homo sapiens
cctgggtggcggaggttgcggtgagccgagatcgcgccactgcactccagccagggcaacagagcgagactccatctcaaaaaaagaaagaaagaaagaargaaagaaagaaagaaagaaagaaagaaagaaagaaagaaagaaagaaagaaagaaagaaagaaagagagaaagaaagaaagaaataggagactacaaaga

SEQ ID NO: 233882 - DNA, 201 bp, Homo sapiens
ccgctctcagttgtaatagagcacgtgtcacattcttttgtccctaaaaggcatatatatatatatatatatatatatatatatatatatatatatatatatccacaactgacagagggaaatatgtatatatttccctctgtcagttatggattttatttatctcacaaacttttagttaatatattctacttgtcaggc

SEQ ID NO: 233883 - DNA, 201 bp, Homo sapiens
cacaaggggtcagggtactccccccgtagccaaaggaagccacgagggacagtgctatctggcccagatactacacttttcccatggtctttgcaacccayagagcaggagattccctcaggtgcctacaccaccaggaccctgggtttcaagcacaaaactgagtggccgtttgggcagataccaaactagcttcaggag

SEQ ID NO: 233884 - DNA, 201 bp, Homo sapiens
tggtcgtggcattggggaggagttgagaagagcagggaggcagggaaatgaaaagtaagaggagatgcaaaatcaacataaaaataagagagagaacagtytttgtccctgctgacttatatttaatagcttgttgctgcataagtgctggtttagtatggtgggaatatggggagaggagacgctgagcagctggggtta

SEQ ID NO: 233885 - DNA, 201 bp, Homo sapiens
gacattttatttgcttttctttccctaatttgtcttctcctttctctttctggagtcttcttagttgagtgctgctatctgagtctgtcagtcacttcatytactctttctttcatattttccattttttttatattattttctgggataattgaatttgatttttaaagtttttttcataacacttctctttggttgttt

SEQ ID NO: 233886 - DNA, 201 bp, Homo sapiens
agaaaatccttgaataccttctttttaaaaactctatggcatatctgatgcctattatgtgccagacaccatactgtttgaaatgaggaaaacatgaaacyaacctgctgtcaagaggactaaaacccaatggcaaagcaaagagattttaataaatgttggttttaatcacagctacaaatatttgtaaacaataaggtt

SEQ ID NO: 233887 - DNA, 201 bp, Homo sapiens
tcttaagtacgtaaatggaacataattgaaagcatggaattttgaaaaggtaagaaatactttgaatatacaaaagtcttgactttggtcagatgtttgaraagacttgagaattgaaactcaggagtcaatgcacaagtagtggtcctggaaccaggttcagaaaacatgagggcaatgttgacatgctaattctaccat

SEQ ID NO: 233888 - DNA, 201 bp, Homo sapiens
gggttccccaagactttctggagcacacagcttcttcaaatctactttcataatgatgctaagttatttgttttttcagtctcattgtctcattagtatayagtggcactgtccagatgctctatgctgtattgtgtcataaaagatgaatatagaaaaagaaaaaagaatctagctgtattctattaagctagacattaa

SEQ ID NO: 233889 - DNA, 201 bp, Homo sapiens
gtttcagaaacctcatcatgcatctcccagagtgtggaagccaatgaaatcacaaagaatggcgctagagtcttgcccagagaattccaaaagtggcagakattggagaccctgcagtagtggatgcagagccagggaagtagtggtgcatcctggactcaacagtgttcaatggacaaggaagctgaagctcctcaggtg

SEQ ID NO: 233890 - DNA, 201 bp, Homo sapiens
tcttctagatgtgaagttggattgttaatttgagatctttctaacttctcgatgtaggcacttatggctataaactttcctagtgtgtcttagggatgatyatcttgcataatatttcatagggattctctgaatttcttaaattcacatgttgaactctctagcaagaatggggaaattttcatggacaatatcttcaaa

SEQ ID NO: 233891 - DNA, 201 bp, Homo sapiens
aactcaacatttcccctcagatttggaatctagggacaagggcctgagcagcaagactctgtgcatggagagtcagcagatcctgccggacagctcccccrtggagcactacaacgtgcacaacctgtacgggtggtcccagaccagacccacatacgagtgagtgtctttttgtcacagcagcaaagataattttccaca

SEQ ID NO: 233892 - DNA, 201 bp, Homo sapiens
tgggtgtaatgtcatctttgtcatttatgattatacttatttgtatctttctttttttctcaatctagcagatggcctataatcttgtttatcctttcaawaaaacagcttttgcttttgttgatctgttgtatggatttttgaatctcaattttgtttagctctgctctgattatgatcatttattttcttctgcgatct

SEQ ID NO: 233893 - DNA, 201 bp, Homo sapiens
tccgctctcagttgtaatagagcacgtgtcacattcttttgtccctaaaaggcatatatatatatatatatatatatatatatatatatatatatatatatatccacaactgacagagggaaatatgtatatatttccctctgtcagttatggattttatttatctcacaaacttttagttaatatattctacttgtcagg

SEQ ID NO: 233894 - DNA, 201 bp, Homo sapiens
tgctgtggatcctccagtggcttaggaaagagcatctttgtctttctcggcttctttccccctgttttggtgtttctagagcactgttgtgctctacaagrcagggagactttgatgggtttatggggcctgtctcagtccttttcttacttgacttctctttctccttggtactcaaggccataaccactcctttaaact

SEQ ID NO: 233895 - DNA, 201 bp, Homo sapiens
ttccgctctcagttgtaatagagcacgtgtcacattcttttgtccctaaaaggcatatatatatatatatatatatatatatatatatatatatatatatatatccacaactgacagagggaaatatgtatatatttccctctgtcagttatggattttatttatctcacaaacttttagttaatatattctacttgtcag

SEQ ID NO: 233896 - DNA, 201 bp, Homo sapiens
ttttttatattattttctgggataattgaatttgatttttaaagtttttttcataacacttctctttggttgttttcttttgtaattcagtttaaatattmaggagctttaaatcttgttctaaatcttaacagtacacattcctcatttttttaatggaagtgatatggtttgatcctgtgtccccacccaaatctcacc

SEQ ID NO: 233897 - DNA, 201 bp, Homo sapiens
gatattcagagagtgaatttgataatgcaagacaataagagataattggtggaatgaaatttttgagaaattcaacagctgtgagatctagataacagatrcaaggattatgcttaaacaagaagaggaaaaactgtttcattgagaatagagggggaaaaataagaatttacctagatgtgaataacctttgtggaaacg

SEQ ID NO: 233898 - DNA, 201 bp, Homo sapiens; identical to SEQ ID NO: 171011

SEQ ID NO: 233899 - DNA, 201 bp, Homo sapiens; identical to SEQ ID NO: 171017

SEQ ID NO: 233900 - DNA, 201 bp, Homo sapiens
tctctactaaaaatacaaaaagttagccacacgtagtggcatgcacttgtagtcccagctactcaggaagctgaggcaggataatcccttgaacctgggargtggaggttgcagtgagttgagattgcgccactgcactccagggtgacactccgtctgcaaaaaaataaaataaaataaaaataaaattactgctgcgaa

SEQ ID NO: 233901 - DNA, 201 bp, Homo sapiens
aggcctgaaaagaaggatagaaggaacaattttttaaattacaggcacggtggctcatgctgtaatcccagcactttgggaggccgaggtaagtggatcayttaaggtcaggagttcgagactagcctggccaacgtggtgaaatcctatctctactaaaaatacaaaaagttagccacacgtagtggcatgcacttgtag

SEQ ID NO: 233902 - DNA, 201 bp, Homo sapiens
attctcctgcctcagcctcccaagtagctgggactgtaggcgcacaccaccatgcctggctaatttttgtaattttagtaaagacggggtttcaccatatyggtcaggcttgtcttgagctcttgacctcaggtgatccacctgcctcggcctcccaaagtgctgggattacaggtatgagccactgtgcccagcctctat

SEQ ID NO: 233903 - DNA, 201 bp, Homo sapiens
aatagagtcaggcctgaaaagaaggatagaaggaacaattttttaaattacaggcacggtggctcatgctgtaatcccagcactttgggaggccgaggtargtggatcatttaaggtcaggagttcgagactagcctggccaacgtggtgaaatcctatctctactaaaaatacaaaaagttagccacacgtagtggcatg

SEQ ID NO: 233904 - DNA, 201 bp, Homo sapiens
taatagagtcaggcctgaaaagaaggatagaaggaacaattttttaaattacaggcacggtggctcatgctgtaatcccagcactttgggaggccgaggtragtggatcatttaaggtcaggagttcgagactagcctggccaacgtggtgaaatcctatctctactaaaaatacaaaaagttagccacacgtagtggcat

SEQ ID NO: 233905 - DNA, 201 bp, Homo sapiens
ggtagtggttcaatgttattctttccttcattttattatcttgacaccttgtcaaaaatcaattgacagtaaatgagaaggcttatttttgccttctcaaytctatttcattgatctctctctctctctatatatatatatccttatgccagtaccacactgtcttaattgatgaagtgtgactcttccaatttttttttc

SEQ ID NO: 233906 - DNA, 201 bp, Homo sapiens
gcagcacatcaacaggtcagaggaaaatcctgaaggctccccttgaccacatcaaccttcatgtcagaggaggctacatcctgccctggcaagagcctgcwatgaacactcactccaggtgaggagaagaggcaatgtctaacagcctcttgctataccgtaatgaggaagccttacaggaggctgtcccaccttcgccag

SEQ ID NO: 233907 - DNA, 201 bp, Homo sapiens
caataagttaaaattcagtgaaaaggaactacctgaataaactttgctagctattcacatttgactcaaattatagaaaaggaagacgcttgaggttggcygcagtggctcatgcttgtaattccaccactttgggaggccaaggtgggcgaatcacttgaggtcaggaggttgagaccagcctggccaacatggcagagc

SEQ ID NO: 233908 - DNA, 201 bp, Homo sapiens
ctcaacaaacagcgaacatggaaatgtgtagaaggaaatcatcaatgaaatcctctcataagtgtgattttaatgggctgtgatttgtttgaactttatgrcgcttgaaaaataatgaaccaaagtctagcattttctcactagaggggaatccattatgaacagactggattttaataaattatctgcatacaaaagaaa

SEQ ID NO: 233909 - DNA, 201 bp, Homo sapiens
ctgtttatggtgttatttcctttctggttcagtcttgggaggttgtgtgtttctaggaatttattcatttcctctagattttctagtttgtgtgcatagaratgttcataaaaatctctaaggatattctgtatatttgtgtgattgggtgtaatgtcatctttgtcatttatgattatacttatttgtatctttcttttt

SEQ ID NO: 233910 - DNA, 201 bp, Homo sapiens
tattgctgatacaattttagaatttattattgatctgtttatggtgttatttcctttctggttcagtcttgggaggttgtgtgtttctaggaatttattcrtttcctctagattttctagtttgtgtgcatagaaatgttcataaaaatctctaaggatattctgtatatttgtgtgattgggtgtaatgtcatctttgtc

SEQ ID NO: 233911 - DNA, 201 bp, Homo sapiens
aggatttttgcatctatgttcatcagggatatcagcctgaagttttctttctttattgtctctgccagatattgatatcaggatgatgttggctttgtatratcagttagggaggcatccctcctcaagtcttttggaataatttcagtaggattggaaccagctctttgtacatctagtaggattttattatgaatccat

SEQ ID NO: 233912 - DNA, 201 bp, Homo sapiens
gggtttggtttgttagtcttttgttgaggatttttgcatctatgttcatcagggatatcagcctgaagttttctttctttattgtctctgccagatattgrtatcaggatgatgttggctttgtataatcagttagggaggcatccctcctcaagtcttttggaataatttcagtaggattggaaccagctctttgtacat

SEQ ID NO: 233913 - DNA, 201 bp, Homo sapiens
gtgatcagtgctaaacccagggtacatccaagataaagtttgaaaagcaggccgggcgcggtggctcacacctgtaatcccagcactttgggaggctgagkcaggtggatcacccgaggtcgggagttcgagaccagcctggccaacatggtgaaaccccgtctttactaaaaatacagaaaagtagccagccaggcatgg

SEQ ID NO: 233914 - DNA, 201 bp, Homo sapiens; identical to SEQ ID NO: 43484

SEQ ID NO: 233915 - DNA, 201 bp, Homo sapiens
tagcccccagaatcctgccgttagtcacaaggcatccctgaactccactatactccagggccccgcggacgctggtgtggttggtggccaatcgtggaacygcgcatgggagccagccaggggtgctgcgtcctgggacacctggcgcaacaaggcggtggtgcctcccaggcggtccggggagccaatggtgtccatgca

SEQ ID NO: 233916 - DNA, 201 bp, Homo sapiens
cctggcacacctctgcagagccaccacgaccatccagtctgcctggcgcggctacagcacccgccgggaccaagcccggcactggcagatgctccaccccrtcacgtgggtggagctgggcagccgggccggggtcatgtctgaccgaagctggttccaggatggcagagccaggacagtatctgaccatcgctgcttcca

SEQ ID NO: 233917 - DNA, 201 bp, Homo sapiens
tccatgcaggctgcagaggagatccgcatcctcgcagtgatcactatccaggcgggcgtccgtggctacctggcgcgtcgcaggatccggctgtggcaccrgggggccatggtcatccaagctacttggcgcggctaccgtgtgcggcggaacctggcacacctctgcagagccaccacgaccatccagtctgcctggcgc

SEQ ID NO: 233918 - DNA, 201 bp, Homo sapiens
agtcctgccaggcacacgcttgcagcgtctgccactccctgagctccaggatcgggagcccgcccagcgtggtgatgctagtgggctccagccctcgcacytgtcatacctgtggacgcacacagcccacccgtgtggtgcagggcatgggccagggcactgagggccccggggcagtgtcttgggcctccgcctaccagc

SEQ ID NO: 233919 - DNA, 201 bp, Homo sapiens; identical to SEQ ID NO: 43486

SEQ ID NO: 233920 - DNA, 201 bp, Homo sapiens
ccttcaagaacatcctggtagacgagatggacatgatgcacgcccgtgcagccacgctcatccaagccaactggaggggctattggctccggcagaagctsatttcccagatgatggcggccaaggccatccaggaggcctggcggcgcttcaacaagagacacatccttcactccagcaagtcgttggtaaagaaaacga

SEQ ID NO: 233921 - DNA, 201 bp, Homo sapiens
cccttccagatatgtccagggcccatgatcaccaagactctactccagacatatccagtggtctccgtgaccctgccacagacatatccagcgtccacgaygaccaccaccccacccaagactagcccagttcccaaagtaacaataatcaagaccccagcccagatgtatccggggcccacagtgaccaaaactgcacct

SEQ ID NO: 233922 - DNA, 201 bp, Homo sapiens
atcacgcctctgttcaggggtgtggctgtaagccatccccaggagcctttggctgatgctatgttccccagtgggtctcaggggaccacatctcctggcckagctgggaatctcccctggagaaccatagcaactggcatgggccaaagtcaatgtcaggtggccaatggcatggcttcccttgcatcccaggtcttagag

SEQ ID NO: 233923 - DNA, 201 bp, Homo sapiens; identical to SEQ ID NO: 43489

SEQ ID NO: 233924 - DNA, 201 bp, Homo sapiens; identical to SEQ ID NO: 43488

SEQ ID NO: 233925 - DNA, 201 bp, Homo sapiens; identical to SEQ ID NO: 43490

SEQ ID NO: 233926 - DNA, 201 bp, Homo sapiens
ggcctcagcgccccaccctgggccaagccagaggacagacagacccagccacagccccacggacacgtgccggggaagaccactcaggggggaccatgccsggcagcctgtgaggtccagggtatgctggtgccgccgatggcacccaccggccattccacatgcaacgttgagtcctggggagacaacggagccacacgt

SEQ ID NO: 233927 - DNA, 201 bp, Homo sapiens; identical to SEQ ID NO: 43483

SEQ ID NO: 233928 - DNA, 201 bp, Homo sapiens
aggtgcctggctcaaccacatccgggaactggggtccccagggctgcagctgagcttcctttggaagccgagaaaatcaagactggcacccagaaacaggygaaaacagacatggcatttaagaccagtgtggcagtggaaatggctggggctccatcctggacaaaagttgctgaggaaggggacaagccacctcacgtg

SEQ ID NO: 233929 - DNA, 201 bp, Homo sapiens
gaggtggctcccagccatgctagtggcatggtccctgtccctttccaggccccgggtttagccactaagtccccctcagtttatcaacaggggtctgtcaytcacgtcatacccccaaatcactctcagggtacagtggcttctaatgtagtctcaggatcaccccagctggcccgtggcagtactgaggctttcagattg

SEQ ID NO: 233930 - DNA, 201 bp, Homo sapiens
ctctgttggccaaagccctctcccagggagaagtctgggcagctctgaaccaggccctgtccaaggaggtcctgggtgccactgtcaccaaagccctgccycagagcatgctgagcatggcgctggtgaaggcgctgtcctggagtgagctgcgcctgaccctgtcccgagccctgtcccggggcgagctgcgggcggaac

SEQ ID NO: 233931 - DNA, 201 bp, Homo sapiens
ggaggtggctcccagccatgctagtggcatggtccctgtccctttccaggccccgggtttagccactaagtccccctcagtttatcaacaggggtctgtcrctcacgtcatacccccaaatcactctcagggtacagtggcttctaatgtagtctcaggatcaccccagctggcccgtggcagtactgaggctttcagatt

SEQ ID NO: 233932 - DNA, 201 bp, Homo sapiens; identical to SEQ ID NO: 43485

SEQ ID NO: 233933 - DNA, 201 bp, Homo sapiens
ccggcagcctgtgaggtccagggtatgctggtgccgccgatggcacccaccggccattccacatgcaacgttgagtcctggggagacaacggagccacacrtgcccagccatcaatgcccggccaggcggtgccctgccaggaggacacggtaggctccctgctggcctccttgtgtgctgaagtagctggtgtgctggca

SEQ ID NO: 233934 - DNA, 201 bp, Homo sapiens
cacacctctgcagagccaccacgaccatccagtctgcctggcgcggctacagcacccgccgggaccaagcccggcactggcagatgctccaccccgtcacrtgggtggagctgggcagccgggccggggtcatgtctgaccgaagctggttccaggatggcagagccaggacagtatctgaccatcgctgcttccagtcct

SEQ ID NO: 233935 - DNA, 201 bp, Homo sapiens
gttagtctttgtatgactgtgtgtctgttggcattagtgacacgaacttttaatcttgccatttggcccttgggtatatggctgtgagtgttctgtcacartcaccatatatgctgtgtgctgtgttcgtatatatatatgcaatacataccagtgtcagcgtaatggagtggttaggaacacaggcggcttagatttaac

SEQ ID NO: 233936 - DNA, 201 bp, Homo sapiens
gttaccttctcgcttggcaataggcttacctttgagcatagcccttcccatcatgggaagacagtgcctgtggcctcagtaggaatgacaggtatttgccwgaacaccctttttgtgaattgttaccctgcccccaacactggggcagagtggaggaaggaggaagaacctagaacacaggttctgtgttcctgcctctct

SEQ ID NO: 233937 - DNA, 201 bp, Homo sapiens; identical to SEQ ID NO: 43617

SEQ ID NO: 233938 - DNA, 201 bp, Homo sapiens
atttgcagtagtcttcatgtgtgggatcccatggcttggctgaataccccacactctgatgtctgactgaattggcctgtttgctgtgttttcccagtcamagttcacagaacacatgtgtatgcgcctttgcatgatacactgatgtaacaggaccatagaatgtgtgttataaatttgtcatcagtatattttgtgagc

SEQ ID NO: 233939 - DNA, 201 bp, Homo sapiens
tgaaaaagccaaagggaaaagcaccaacaccaaatgagaagtggaagcccccggtatcaccaaatggctggaatccctagggaggcagaaaaagtcagacrggaagccggcaaatctgtcaaggaagggacacaactggacaagaagactcacccctctgctctccggagctggtctctggccctgggggcggggtggagt

SEQ ID NO: 233940 - DNA, 201 bp, Homo sapiens; identical to SEQ ID NO: 43623

SEQ ID NO: 233941 - DNA, 201 bp, Homo sapiens
ggggaggagagaagctaaaaatgtcctgagtggcctggaaggagacccctgtggtgggcagggggtgggttctccacccatacagccagatacggaggagyagcagcagcaaaagcagccacaagttaaaaacatggtttctcacttcccaacttcggccttgagagaaagggacagcacggagcaatcccccaaatgaga

SEQ ID NO: 233942 - DNA, 201 bp, Homo sapiens
atgttgctgaaaatgataggatttcattctttttctggctgaataatattccattgtgtctatatgacacagtttcttttttccattcatttgttgatggmacttcagttaattccatatgttagctattgtgaacagtgctgcaataaatatggggatgcagatatctcttcaagatactgatttcctttggatatgtaa

SEQ ID NO: 233943 - DNA, 201 bp, Homo sapiens; identical to SEQ ID NO: 43525

SEQ ID NO: 233944 - DNA, 201 bp, Homo sapiens
atactcccacccacacataccagcaaagtcttatgtctcctgtcgggcttcacctatgggaacgtgccctccgattatctgtatgactgtatgattattckctcctagcctctccagtatataagcgagacccaccacctcccgcccccctcctcgattctcaccagtacaggtggccacacacactgaccacagcttccc

SEQ ID NO: 233945 - DNA, 201 bp, Homo sapiens
cctctcctttctcctctccccaacaaacacatacaaattttcgtgccctctcttttctgcctttcaagttaatttctaatttccttcagccacctctttcygggtctcctcttttcaaccccaaccccatcactccaaaccaaacccctttactagcacattcccccattactcactttcaagctcaataatgtccctatc

SEQ ID NO: 233946 - DNA, 201 bp, Homo sapiens
ctatgcacagacttcactcctcctccccaggccttcctggacaatgtccagggctggccttagccaacagaaatagaggggtcaagggggtccaggagtamggaagggtcagcagggaccctcaatactgattcttctctggctggaggtgggcaggaagcagacatagctcaaatactgagcagccaaaaaaagaagaag

SEQ ID NO: 233947 - DNA, 201 bp, Homo sapiens
agaattaaacaacgttactgagtgagcctctgagcagaaggctctcccatctatgcacagacttcactcctcctccccaggccttcctggacaatgtccarggctggccttagccaacagaaatagaggggtcaagggggtccaggagtacggaagggtcagcagggaccctcaatactgattcttctctggctggaggtg

SEQ ID NO: 233948 - DNA, 201 bp, Homo sapiens
agtgagggggcggaagcacttaagagtcagaatccatattagactctggggagtgaaaaattaaattaaatcagtaagatggggagtgggggaagagtcaragggaactttgcccacctttgaagatcaaatcaagaaatcagggaaagcaaagacttaggagaggagaaagacattctctcaatccatcctccttcccca

SEQ ID NO: 233949 - DNA, 201 bp, Homo sapiens
caaacaaacaaaaaaaacccctagctatataccttcacaccgtacacacaaaccaagcacctggaaactccacacctttcacacactgctactcccctcayatacccacaccgtcacataacgccctaaatgcacatcccttgctccaacaaaacaccccgcaactcatgcccaccctaaggctctgagtaaaccccactc

SEQ ID NO: 233950 - DNA, 201 bp, Homo sapiens
tgggggcgaacttgggaagagatcccatcaatatatttcaccttttttattgaatttgtattaaaggaggtagtgagggggcggaagcacttaagagtcaraatccatattagactctggggagtgaaaaattaaattaaatcagtaagatggggagtgggggaagagtcagagggaactttgcccacctttgaagatcaa

SEQ ID NO: 233951 - DNA, 201 bp, Homo sapiens
aactacacacacacattgaaccaatgtgaatttcctggttttgatactgtgctataattacataggatgcaaccactgggggaagctgggtgaagggcctygctatactatctttgcaatttcctatgaatctataagaatttcaaaattaaaagtttttataaagtgggggagggggtgatagggatggagaggagaaga

SEQ ID NO: 233952 - DNA, 201 bp, Homo sapiens
cgggggtgggggcgaacttgggaagagatcccatcaatatatttcaccttttttattgaatttgtattaaaggaggtagtgagggggcggaagcacttaaragtcagaatccatattagactctggggagtgaaaaattaaattaaatcagtaagatggggagtgggggaagagtcagagggaactttgcccacctttgaa

SEQ ID NO: 233953 - DNA, 201 bp, Homo sapiens
ctaagaaaaagccttcaaccccagccttggcccatgagggcctctgacttccactggcctcatttccacacacagagtttgagaaccttcacaattacagsctctgactggatttttcctccttcagagattcctgggaagccagaaattgtagattctgcctctgaactcacggctggtgttcccaataaggtagtggaa

SEQ ID NO: 233954 - DNA, 201 bp, Homo sapiens
ggctggaatccctagggaggcagaaaaagtcagacgggaagccggcaaatctgtcaaggaagggacacaactggacaagaagactcacccctctgctctcyggagctggtctctggccctgggggcggggtggagtttttaatctgaggaagtggagagagaaagttaacagggatttttctcctcccatcttccacaccg

SEQ ID NO: 233955 - DNA, 201 bp, Homo sapiens
ggtgccaggcaatgaacaggaatggaaaggagaccaagtccaactaccgagtccgtgtctaccgtaagaattccagggtcttctccaaggcctccctcttrcctaagaaaaagccttcaaccccagccttggcccatgagggcctctgacttccactggcctcatttccacacacagagtttgagaaccttcacaattaca

SEQ ID NO: 233956 - DNA, 201 bp, Homo sapiens; identical to SEQ ID NO: 43526

SEQ ID NO: 233957 - DNA, 201 bp, Homo sapiens
tgttccacctcttcacccctatcttgtcgccatggtgactgctctacaattggcgaggcttgcacttcaaagtcctaggctcgcttcatccgggtccttcrgctgtggactttctgctgattgggccttttccttttcccctgattggccgacatcgggaaagacggcgaagagctaggaaaagagggaaaacactagggt

SEQ ID NO: 233958 - DNA, 201 bp, Homo sapiens
gcctcccaacttccagggagaccagcaatgatttggatccccgtcactctgcctcacagtcctttcccaaaggccttgcactgtttaggccctgcttctcwgcttctagaacacaggccggacagaagcttggaaggtcctgtctccccagggaggaggcccctgggacagtgtggctcgtgtccttcccaacggctccct

SEQ ID NO: 233959 - DNA, 201 bp, Homo sapiens
tggcagccggaacagcagttggagcctgggtgctggtcctcagtctgtggggtgagccactccctcaaccccactgaccctccctgcagaaagcactttamccccacaccccagtcgtcctagaacttttcccagaacccgaggaagtgcctttcaaggtccctcacccaccctgtccaaattttgttagccctcattccc

SEQ ID NO: 233960 - DNA, 201 bp, Homo sapiens; identical to SEQ ID NO: 43575

SEQ ID NO: 233961 - DNA, 201 bp, Homo sapiens; identical to SEQ ID NO: 43577

SEQ ID NO: 233962 - DNA, 201 bp, Homo sapiens; identical to SEQ ID NO: 43579

SEQ ID NO: 233963 - DNA, 201 bp, Homo sapiens; identical to SEQ ID NO: 43580

SEQ ID NO: 233964 - DNA, 201 bp, Homo sapiens; identical to SEQ ID NO: 43582

SEQ ID NO: 233965 - DNA, 201 bp, Homo sapiens; identical to SEQ ID NO: 43626

SEQ ID NO: 233966 - DNA, 201 bp, Homo sapiens; identical to SEQ ID NO: 43627

SEQ ID NO: 233967 - DNA, 201 bp, Homo sapiens
agaatggcgtgaacccgggaggcggagcttgcagtgagctgagatcacgccactgcactccagcctgggtggcagagtaagactccacctcaaaaaaaaamaaaaatacaaaaattagccaggcgtggtggcgggcgcctgcaatcccagctattggggaggctgaggcaagagaatcgcttgaacctgggaagcagtggt

SEQ ID NO: 233968 - DNA, 201 bp, Homo sapiens
gagcatctgaatggctcccattctgagtggagggagccattatatcacctgggaagactgcagtggtgggaggggcaccgggaagggaaggatgtgacccmgagagtggattgggggccgccccaggaggaggggtgtaaccctggggcaagcttagtgcttcattctaggggctctgcaccagcccctggatccaaatgc

SEQ ID NO: 233969 - DNA, 201 bp, Homo sapiens
cctttaatctccccattgcctagcagctagaagagggtcattgctctgcataccaggggtcctccagacttttgcattctgagcatctgaatggctcccaytctgagtggagggagccattatatcacctgggaagactgcagtggtgggaggggcaccgggaagggaaggatgtgacccagagagtggattgggggccgc

SEQ ID NO: 233970 - DNA, 201 bp, Homo sapiens; identical to SEQ ID NO: 43618

SEQ ID NO: 233971 - DNA, 201 bp, Homo sapiens; identical to SEQ ID NO: 43619

SEQ ID NO: 233972 - DNA, 201 bp, Homo sapiens
accccggctgactgttttgcacacttcctgcttttgttcccacttcctatctaggcaggatcatagcagagagggggccttttggggtgagagggaccgarctgagataggctggagatgtcaggggacagaggccattccagtgatcttagttctgcctttcttcccacgggtggccaaggaacagcctgctctttctgt

SEQ ID NO: 233973 - DNA, 201 bp, Homo sapiens
caggaatggccaccagaaagccttgtagtcctcccgcaggtccccagcaagcaccctgttccctggcctttcacacctcaaggagcagggccacacactgygaagcagcagggcctcagggttcatcttattcaaccccatgcagacagcacctcgggggaggaccgcctgagtggggcaagtcaggagcagggccgattc

SEQ ID NO: 233974 - DNA, 201 bp, Homo sapiens
gtaacttcagcaaacaggccactgaggtcctaaatgagtatttctactcccacctgagtaacccatatcctagtgaggaggccaaggaggagcttgccaaraagtgtggcatcaccgtgtctcaggtattatggaggttgcgggaggagttgtcaggcaaagtgcacgcatctcagctaggtgcagtggtgtgttcctgta

SEQ ID NO: 233975 - DNA, 201 bp, Homo sapiens
ccaacattcaccagcatggttgtactgattgctaaaatgttaaaatatttccaaattaagggtgccatgagccccctttgtgcaccatcctgatgcctgtyctagcccctttaatctccccattgcctagcagctagaagagggtcattgctctgcataccaggggtcctccagacttttgcattctgagcatctgaatgg

SEQ ID NO: 233976 - DNA, 201 bp, Homo sapiens
gagaagtatgagcaggtaaggagaggaggcttgggtgggtggagggaagggctcttgcaggggaatcccatggtcaaagggctcctcctcaccagcccacyggcccccactacaggcatgtaatgagttcacgacccatgtcatgaacctgctgagggagcagagccgcaccaggcccgtggcccccaaagagatggaacg

SEQ ID NO: 233977 - DNA, 201 bp, Homo sapiens
cacagaggtgctctgagagaaaaacgtgcaggatattacaagagcacagaggaccagccaacccagactaaaaatggaggaggtgatggctgagatgagtyttgaaagataagcagaggctgggcgtggtggctcacgcctatagtcccagcacttcgggaagccgaggcgggtggatcacccgagattaggagttcgaga

SEQ ID NO: 233978 - DNA, 201 bp, Homo sapiens
cctttctagaccatctcccaaagcccgcagcctttaacctgctgcctgcatcttccctgtgtctccctgaagctgaggagcttccccatgctctgggagcwgatcttttcccaagaactcctcattccacccccaactcattccacccccaatccgcttcctccctccgcagactgaccctcctccctccttgttctcagg

SEQ ID NO: 233979 - DNA, 201 bp, Homo sapiens
tgcttcaatgggggtacctgtgtgaacaggcctggcaccttctcctgcctctgtgccatgggcttccagggcccgcgctgtgagggaaagctccgccccakctgtgcagacaggtgagcagggcccaaagacccctagaagggagaaaacccctcagccttcccacccctcctctcatctccccctgggttccaggctgcc

SEQ ID NO: 233980 - DNA, 201 bp, Homo sapiens
ccagcctctgtctctctccctctgaaacctaccaagtcactttcctttctccatccactcccagattcctcctcctacctttctagaccatctcccaaagsccgcagcctttaacctgctgcctgcatcttccctgtgtctccctgaagctgaggagcttccccatgctctgggagctgatcttttcccaagaactcctca

SEQ ID NO: 233981 - DNA, 201 bp, Homo sapiens
ggaccccttcacacaccctacactgatctccccagttagctcggcacccccagccccactctgccacctcaaactctgactcttctcaaccccagcctctstctctctccctctgaaacctaccaagtcactttcctttctccatccactcccagattcctcctcctacctttctagaccatctcccaaagcccgcagcct

SEQ ID NO: 233982 - DNA, 201 bp, Homo sapiens
cagccagacactaggtgcatcaaagcctcccacctgctcagccccaggaccccttcacacaccctacactgatctccccagttagctcggcacccccagcyccactctgccacctcaaactctgactcttctcaaccccagcctctgtctctctccctctgaaacctaccaagtcactttcctttctccatccactcccag

SEQ ID NO: 233983 - DNA, 201 bp, Homo sapiens
cctctccactgctcagccagacactaggtgcatcaaagcctcccacctgctcagccccaggaccccttcacacaccctacactgatctccccagttagctsggcacccccagccccactctgccacctcaaactctgactcttctcaaccccagcctctgtctctctccctctgaaacctaccaagtcactttcctttctc

SEQ ID NO: 233984 - DNA, 201 bp, Homo sapiens
gagtacctgtgggagctgctgtgggcaggtctctcaggagcacctagaagaggaaaggtggaggcacagcacccagggcttccattgcgcctgcctctccwccctcagggctgctgtgtgggagtttcccagaaccctgtgccaatggaggcacctgcctgagcctgtctctgggacaagggacctgccagtgagtgtgcc

SEQ ID NO: 233985 - DNA, 201 bp, Homo sapiens
tgaggcacgagaattgcttgaacccaggcggtggaggttgcagtgagccaaggtcgtgccactgcaatccagcctggactgtctcaaaaaaaaaaaaaaaagtcaatataatgaaaggcaaagtacatttaaggtactgtactcatattaaaggaaactaaaaagactcgacagctaaatgcaatgcaggatgccaaatga

SEQ ID NO: 233986 - DNA, 201 bp, Homo sapiens
ccaacgccggcactgactggagagcaaatgaagaaaatatgggtgttctcacctgccccgttcctgtgggcttccacacagcttttggccaaaacaaccayctgagaatcaaaaccacacagacaaatcagttcttgattgcagaggtgttgaattgtgcaatcagagaagcctaacacaattcctgttacctcatttaac

SEQ ID NO: 233987 - DNA, 201 bp, Homo sapiens; identical to SEQ ID NO: 43573

SEQ ID NO: 233988 - DNA, 201 bp, Homo sapiens
gactcaacgtggagcaactcaactctgtcctgatcatcataacccaggcagagtggaccacacttaatccagctacactcaacgcatttcaccccaccccwctcacttcgatgtcacgccaccctctttgtaaaagaacactaaaataaggtttgatatgagaagagctcgggaaagagattatgatggagttaagggata

SEQ ID NO: 233989 - DNA, 201 bp, Homo sapiens
tattaactccttgggcccagaccagtctccacccaggaatgttagtggtccccaaggtaaaggcctctacacccagagattgggccctgaatacacccttyctcctcctcacataccttatttatttatttatttatttatttatttatttatttatttttgagatggagtcccagtctgtcacccagggtggagtgcagt

SEQ ID NO: 233990 - DNA, 201 bp, Homo sapiens
cataccttatttatttatttatttatttatttatttatttatttatttttgagatggagtcccagtctgtcacccagggtggagtgcagtggcacgatctyggctcactgcaaccttcacctcctaggttcaagtgattctcctgcctcagcttcccaagtagctgggattcgtgtgccaccatgcccagctaattttttt

SEQ ID NO: 233991 - DNA, 201 bp, Homo sapiens
agtctcctggaacagccccatccccgggagccccctctggctcccagactaagaaactgttcttgggctacgttatcttctcccctaactctccacccagscccctcattctctccagatgtggagacctccacaccctctccagagcccctaaagctcctctccactgctcagccagacactaggtgcatcaaagcctcc

SEQ ID NO: 233992 - DNA, 201 bp, Homo sapiens
agtagagacggggtttccccatgtttgccaggctggtctcacactcctaacctggtgatccacctgcctcggcctcccaaagtgctgggattacaggcgtragccatggcgcccggccccccacttatctttgtatatccctgtttgtctctctccccaggcatagacgtctcttccctttgccacaatggaggcctctgt

SEQ ID NO: 233993 - DNA, 201 bp, Homo sapiens
atagaaaagtgatccctctcaaacctcccttcacccccaggccctgaaaccttcacagagggaacccccggtggcccggctccccactcctaaccttttgscgacccctgcagtctcctggaacagccccatccccgggagccccctctggctcccagactaagaaactgttcttgggctacgttatcttctcccctaact

SEQ ID NO: 233994 - DNA, 201 bp, Homo sapiens
ttgcctctcagcctttatccctgctattgacactacctggaatggccttcccaacccctcttccacaggctggtgttcaggaggcatcttcttcaggaagrtgtccctaacttctccccaggctggattagggcctcttctttgtggtccaggtcactaagccaggagaggcaaagctggcattcaagtctaagcagcctg

SEQ ID NO: 233995 - DNA, 201 bp, Homo sapiens
cccccactccgggaccccacacagacccagcaaaccccgttcacatgttctgaatcttctgggagccccccccaactccagggccctctccaggatccaayagctctcttctctccttattcctgggagcccatagaaaagtgatccctctcaaacctcccttcacccccaggccctgaaaccttcacagagggaaccccc

SEQ ID NO: 233996 - DNA, 201 bp, Homo sapiens; identical to SEQ ID NO: 43581

SEQ ID NO: 233997 - DNA, 201 bp, Homo sapiens
agcgggactcattctccaagccaatttgttcctatttgtaccttgaggtcctccaggctgatcagcctgccctggtgagccccgccctctgtatacacagkaatggccaccagaaagccttgtagtcctcccgcaggtccccagcaagcaccctgttccctggcctttcacacctcaaggagcagggccacacactgcgaa

SEQ ID NO: 233998 - DNA, 201 bp, Homo sapiens
tcttttgttattgacaaacggtagtcatacgtatctatggggtacatgtgagttttttggtttctttttttttttctctctcgtttttggagacagagtcrctctatcccccaggctgaagggcagtggcataatcttggctcactgaaacccccgcctcccaggttcaagcagttctcatgtctcagcctcccgagtagc

SEQ ID NO: 233999 - DNA, 201 bp, Homo sapiens
acctgcacagctaagacccctcacttctctggggtaaggtggctcgggtctcacattgtcctgccactccccgccccaccttctcttctcagcacatcacrtgcctcagctcctggttcctaagacctttctttccacagatctcgaccgttatactcccacccacacataccagcaaagtcttatgtctcctgtcgggct

SEQ ID NO: 234000 - DNA, 201 bp, Homo sapiens; identical to SEQ ID NO: 43583

SEQ ID NO: 234001 - DNA, 201 bp, Homo sapiens
tagtcatacgtatctatggggtacatgtgagttttttggtttctttttttttttctctctcgtttttggagacagagtcgctctatcccccaggctgaagkgcagtggcataatcttggctcactgaaacccccgcctcccaggttcaagcagttctcatgtctcagcctcccgagtagctgggattacaggaacgcgcca

SEQ ID NO: 234002 - DNA, 201 bp, Homo sapiens
gtttctgtgtctctctctccgcccccagctcctccctgttcctcctctcttctcccctcctcttcctctccggctcccctcccccagcctccctccctcgytccccccccttctccctcctccctcctccctctctctcacacacacccccgcttgggcctcctctctctctccggctccattttctccgccgccgggggc

SEQ ID NO: 234003 - DNA, 201 bp, Homo sapiens
cagaaaagatgccccaggatcccttcacctgcacatctagcactgggccaacatccaggaatgagctaggatggaggcagtgactgatgcagtgtgtgacrtctaatctcccccataattacaggccagtggtgtgaggtggagatagacccctgccacagccaaccctgctttcatggagggacctgtgaggccacagca

SEQ ID NO: 234004 - DNA, 201 bp, Homo sapiens
atctatggggtacatgtgagttttttggtttctttttttttttctctctcgtttttggagacagagtcgctctatcccccaggctgaagggcagtggcatratcttggctcactgaaacccccgcctcccaggttcaagcagttctcatgtctcagcctcccgagtagctgggattacaggaacgcgccaccacgcctggc

SEQ ID NO: 234005 - DNA, 201 bp, Homo sapiens
cgccaccacgcctggctaatttttgtatttttagtagagatggggtttcaccatgttgggcaggctggtctcagaactcctgacctaaagtgatccacccrctcagcctgccaaagtgataagattacaggtatgagccaccgcacctggacacatgtgatattttgatacatgcatacaatgtatcatgatcaaatcagg

SEQ ID NO: 234006 - DNA, 201 bp, Homo sapiens
agcaggtgagctgggcacggggttggggaggctgacactgggaaagaagggaggtgagaggacctggggcagaaatgtagggacacaggggccttgaaagkcttgggcaaactgaggcaggaacagagacacacagagaggaaacgggccactggcctagccccctgtccactcctcccgcttcaaccaccactgcttgac

SEQ ID NO: 234007 - DNA, 201 bp, Homo sapiens
ttcaggtgaatctgatccagactcgtttgagaaaaccactgctaggccgggcgtggtggctcacgcctgtaatcccagcactttgggaggccaaggcgggyggatcacaaggtcaggagatcgagaccatcctggctaacacagtgaaaccccgtctctactaaaaatacaaaaaattagccgggcgtggtggcgggagcc

SEQ ID NO: 234008 - DNA, 201 bp, Homo sapiens
aatttaaaatgttaggcaatctgttttaacaagcccttcaggtgaatctgatccagactcgtttgagaaaaccactgctaggccgggcgtggtggctcackcctgtaatcccagcactttgggaggccaaggcgggtggatcacaaggtcaggagatcgagaccatcctggctaacacagtgaaaccccgtctctactaaa

SEQ ID NO: 234009 - DNA, 201 bp, Homo sapiens
cataagaagtggctttggcccaatgaaggatgtggctttggcccaatgaaggatgtggaggagctgttttctttttgacccatcttcccaccccaggccarctctgtgaggttcccctgtgtgctcccaacctgtgccagcccaagcagatatgtaaggaccagaaagacaaggccaactgcctctgtcctgatggaagcc

SEQ ID NO: 234010 - DNA, 201 bp, Homo sapiens; identical to SEQ ID NO: 43574

SEQ ID NO: 234011 - DNA, 201 bp, Homo sapiens
tctcgaactcctgacctcaaatgatcttcccgcctcaacctctgaaagtgctgggattacaggcatgggccaccacacttggcccttgtgttttcaataayagccactttaactggtgtgagatgatatctcattgtggttttgatttacatttccctgatttgcatccatatacctgttggccatttgtatgtcttcttt

SEQ ID NO: 234012 - DNA, 201 bp, Homo sapiens
ggtcccaggccattcaggagaaggtttttgaagtaagggatttcgaggagctggagtgggcagaggaccatctctgggctgagaatctgatgctatgtccwgcctcacgctccctcccacccctcagactctgatggacttatgtgcccagaagccctgcccacgcaattcccactgcctccagactgggccctccttcca

SEQ ID NO: 234013 - DNA, 201 bp, Homo sapiens
cgaactcctgacctcaaatgatcttcccgcctcaacctctgaaagtgctgggattacaggcatgggccaccacacttggcccttgtgttttcaataatagscactttaactggtgtgagatgatatctcattgtggttttgatttacatttccctgatttgcatccatatacctgttggccatttgtatgtcttcttttga

SEQ ID NO: 234014 - DNA, 201 bp, Homo sapiens
actgactcaggaatttaaaatgttaggcaatctgttttaacaagcccttcaggtgaatctgatccagactcgtttgagaaaaccactgctaggccgggcgyggtggctcacgcctgtaatcccagcactttgggaggccaaggcgggtggatcacaaggtcaggagatcgagaccatcctggctaacacagtgaaaccccg

SEQ ID NO: 234015 - DNA, 201 bp, Homo sapiens
gtcaaaggcaaggcaggatcagttgatagcatgaatggaattttcaaaaatcacaggcgttgcctaagggaaggtcaggagctccccaagctcaagctgcrtggtgggtggcctcagataggttattttaactctgtgtgtgtttgtatatgtatttatggacctcagatgcatggaattagactaatcttaagctttggt

SEQ ID NO: 234016 - DNA, 201 bp, Homo sapiens
gcccgccaccacacctggctaattttttgtatttttagtagagacagggtttcaccatgttagccaggatggtctcgatctcctgacctcatgatccaccygcctcagcctcccaaagtgctgagattataggagtaagccactacacccagccactaatttttatatttttagtagagagggggttttgccatgttggcc

SEQ ID NO: 234017 - DNA, 201 bp, Homo sapiens
aaggcaggatcagttgatagcatgaatggaattttcaaaaatcacaggcgttgcctaagggaaggtcaggagctccccaagctcaagctgcgtggtgggtrgcctcagataggttattttaactctgtgtgtgtttgtatatgtatttatggacctcagatgcatggaattagactaatcttaagctttggttcctgatac

SEQ ID NO: 234018 - DNA, 201 bp, Homo sapiens
gctgcctgccgtattaaaacaatggtgcgagcagagggtgatgctggtcctacattcatccacgtctagttaccgaaaaaaggaaggggctgagagagggrgcgggggcaagcacctgggtaggtggggaggacaagctgactcacccacatgacagtgcttccctccccagccgggggcgcactcgcactggtcaggcct

SEQ ID NO: 234019 - DNA, 201 bp, Homo sapiens
atggcgtgaacctgggaggtggagcttgcagtgagccgagatcgcgccactgcactccagcctgggcgacagagggagactccatctcaaaaaaaaaaaaagaaaaataactgctatatcgtactttgtgccttactctaagcattttacattgttacctcatttaatcctcccccacaaccccatgaggcacgtactgct

SEQ ID NO: 234020 - DNA, 201 bp, Homo sapiens
gcctgccgtattaaaacaatggtgcgagcagagggtgatgctggtcctacattcatccacgtctagttaccgaaaaaaggaaggggctgagagagggggcrggggcaagcacctgggtaggtggggaggacaagctgactcacccacatgacagtgcttccctccccagccgggggcgcactcgcactggtcaggcctaac

SEQ ID NO: 234021 - DNA, 201 bp, Homo sapiens
cgtgtgagggatgctggatggaggagattctcactgcccaaatagagacggcctccagggaaagacggctctgcccatggagctgcttcgggcctggtgcyaggggtggtgactgctgggggatgggtgagagggtgcccacctccaggaagaacctcgtcagcactggcactggaggactcttgcagccatagggaagag

SEQ ID NO: 234022 - DNA, 201 bp, Homo sapiens
tttccccattcaatatgatgttagctgtgggtttgtcatatatggcttttattattttgagatatagaaccacagctttttttttttgagacagagtcttkctctgtcactcaggctggaatgtagtggtgcaatctcagctcactgcaacctctacctcccgggctcaagcaattcacctgcctcagcctccccagtagc

SEQ ID NO: 234023 - DNA, 201 bp, Homo sapiens
gggaacaaagcagttcaggttatgggagaaaaagcaagatcagctgaggaaagctagaagggcaagtcgtcacaaaggggcaggggggcagcccagggcascaaggggaaaactgcccccctctcttcatgacatttgttagggcttagggggaacagaattgagtcagccaccaccccccatgccagaacagacagggcc

SEQ ID NO: 234024 - DNA, 201 bp, Homo sapiens
tcattgtgtgaaattaccacaggacatggtttcaacatccacaaaatgattaacttgatgctctctgaggcgccttttagatatgagaatctaggaccctctgcaccgtcttaacccaagagtttgcttgatggagagcgggaagaataatgcaagttgcatctccaatatctcccctcccctccacagggttttgaaggc

SEQ ID NO: 234025 - DNA, 201 bp, Homo sapiens
ttgattttgtatcctacagctttactgaatttgtttataaccagtgttttctttaggtttttctaaatataggattatgtcatctgtgaacatggataatytgagttcttcttttgcaatttggatgccctttatttctttctcctgcctaattgctctggccaggacttccagtattaccttgaataaaaatagtgaaag

SEQ ID NO: 234026 - DNA, 201 bp, Homo sapiens
caacatccacaaaatgattaacttgatgctctctgaggcgccttttagatatgagaatctaggaccctctgcaccgtcttaacccaagagtttgcttgatrgagagcgggaagaataatgcaagttgcatctccaatatctcccctcccctccacagggttttgaaggccccacctgcagccacagggccccttcctgcgg

SEQ ID NO: 234027 - DNA, 201 bp, Homo sapiens
actaaacaggggtcgaagactctggactccaacctagggtaatggggtggcatcagtatttaatgtggggcgtggcctttgggctcctctctaagagttgwaggaactcaggtctcaagcctccttccctaagccttgctgccatggagtatttcccctagcagtcagcacctcacagagggaaaagggcctgggactctc

SEQ ID NO: 234028 - DNA, 201 bp, Homo sapiens
gacattggtttatgcctggtcttcttttattttattattctaacaatgtaacacccatgaacctaacccaagaatttcaatattaataataacttacatcyacttaagtcctcctcctgtatcctgttccctctccagaggaagaggaagacatatgatcctatttctaaggagtaagataataatataacagccggccgg

SEQ ID NO: 234029 - DNA, 201 bp, Homo sapiens
tgttgcctttgttgcctggctgttgaggtcttacccaaaaaacttttgcccagaccaatgtcttgaagcatttcccaaatgatttttttttttttttttttgagaaggagtcttgcaccgtcgcctgggctggagtgcagtggcgcaaatttgactcactgcaacctttgcctcctgggttcaagcgattctcctgcctta

SEQ ID NO: 234030 - DNA, 201 bp, Homo sapiens
ttgttgcctttgttgcctggctgttgaggtcttacccaaaaaacttttgcccagaccaatgtcttgaagcatttcccaaatgatttttttttttttttttttgagaaggagtcttgcaccgtcgcctgggctggagtgcagtggcgcaaatttgactcactgcaacctttgcctcctgggttcaagcgattctcctgcctt

SEQ ID NO: 234031 - DNA, 201 bp, Homo sapiens
gttgttgcctttgttgcctggctgttgaggtcttacccaaaaaacttttgcccagaccaatgtcttgaagcatttcccaaatgatttttttttttttttttttgagaaggagtcttgcaccgtcgcctgggctggagtgcagtggcgcaaatttgactcactgcaacctttgcctcctgggttcaagcgattctcctgcct

SEQ ID NO: 234032 - DNA, 201 bp, Homo sapiens
tgttgttgcctttgttgcctggctgttgaggtcttacccaaaaaacttttgcccagaccaatgtcttgaagcatttcccaaatgatttttttttttttttttttgagaaggagtcttgcaccgtcgcctgggctggagtgcagtggcgcaaatttgactcactgcaacctttgcctcctgggttcaagcgattctcctgcc

SEQ ID NO: 234033 - DNA, 201 bp, Homo sapiens
tcagacccagaggtgaggcatggcgtgggtgaggtgaggggacccagctcccttaggaggatgatcagtggggtgggggaagagggccaagccccaggccrtgtgagggatgctggatggaggagattctcactgcccaaatagagacggcctccagggaaagacggctctgcccatggagctgcttcgggcctggtgcca

SEQ ID NO: 234034 - DNA, 201 bp, Homo sapiens
gaatgcagcccccttcactgctgctgctgctgctgctgctgctgctgctatgtgtctcagtggtcagacccagaggtgaggcatggcgtgggtgaggtgargggacccagctcccttaggaggatgatcagtggggtgggggaagagggccaagccccaggccgtgtgagggatgctggatggaggagattctcactgccc

SEQ ID NO: 234035 - DNA, 201 bp, Homo sapiens
ggcctcgccccacccagcaggcttggctcacctgctccagccgctccaggcgccctcgcagctcgtgaatctcctgcttcagagcgcgctcatctttttcygcctcccgaactagggacaaaggagaccaagagtgtgaccactacccgagcccggacgcccgtcccgagtccctcgggtggcccgtactcctgcccactc

SEQ ID NO: 234036 - DNA, 201 bp, Homo sapiens
agaaggggctgtggaatgcagcccccttcactgctgctgctgctgctgctgctgctgctgctatgtgtctcagtggtcagacccagaggtgaggcatggcrtgggtgaggtgaggggacccagctcccttaggaggatgatcagtggggtgggggaagagggccaagccccaggccgtgtgagggatgctggatggaggag

SEQ ID NO: 234037 - DNA, 201 bp, Homo sapiens
gatggagaattcctggccccaggggctatagcagatccgatagaggttagaccgcatggaggtggggaacagccacttcaagtagtccgtgtctggcaagygaatggcaatgctaagtgaccataaacctctgttcccccaaaactcagggcattctatggagtctagtgcccactcacctccatactgtcccatctgtgg

SEQ ID NO: 234038 - DNA, 201 bp, Homo sapiens
ggccattggacacctcactatggccccccgggccaatagagtcttcaacccaaaagaatcccgcagataaaccttcaaggtggtcgaaggggcgtggaagyatggaagagagacacaaggagagacaaagtgagttactgctgggatcctggacctcctccccacagggtgaacccttcagctcaggagtcacagagaggg

SEQ ID NO: 234039 - DNA, 201 bp, Homo sapiens
ccggcttgtaggacgcgcggtggggcgcgggggctgcaagcagcagcagcggcaggaaaggcaacagaagcaggacccacgccgcggggagccgctgcccscagagccccagcatgctcccgcctgagaaaggggtgataagggcatgtgagggagatggcaacaccctcctccctcggaacagacgcccggcaatcaagc

SEQ ID NO: 234040 - DNA, 201 bp, Homo sapiens
gagctgggtgcatggtgatgaaaaagacagaaaagaagcagaccagagttgtgacctcaaaactagattggaaggaagaaggaggggggcagatggcctakatacagcccctctcttgcccctcaaattagagatggtttctcacccgtctctctctatgtgtctctcccattatctttctccatccctgaccggctgtgt

SEQ ID NO: 234041 - DNA, 201 bp, Homo sapiens
aaggcctctccaggcttcgttgcccccagcgacccaaaagtccgatttccccgccttgattctccccacttcccaatacaggcgtctggctccgcagcagracacgaagtttgcattccccaaggggcggccagggggcggaccagggaaaggtagtcctctgcattttgccgtgtgctgggtgagtggcagggtggcctg

SEQ ID NO: 234042 - DNA, 201 bp, Homo sapiens
tgagtagttgtcagtcataaccaaagccataagcaatttgctcgggactacctatagacctcgcccactataagcccctttctttccttcgcttcctcttytagagaatgtccggattgctattggactttggagcgtatggctccaaatcaactcattggctaaaacttgacggaaaatggtggttaggtaaaacgcgcc

SEQ ID NO: 234043 - DNA, 201 bp, Homo sapiens
tggcatcagtatttaatgtggggcgtggcctttgggctcctctctaagagttgtaggaactcaggtctcaagcctccttccctaagccttgctgccatggrgtatttcccctagcagtcagcacctcacagagggaaaagggcctgggactctcctttagaaacagaggagagcttgggagggtacagagaggggacagtc

SEQ ID NO: 234044 - DNA, 201 bp, Homo sapiens
gggccagacaccagtttttttaagagggcagagggaggaaagggagccagggaccaatacagaggtctctgaggtgcctcctctacaggtttgtggtggtmatgggtgtggatttgtcccgctgtggccctgaccacccggcatcccgctgtccctgggaccctgggcttctactccgcttccttgctgcgatggctgcag

SEQ ID NO: 234045 - DNA, 201 bp, Homo sapiens
tcccaccagcaccccctgccaaccagcttccctggcctgtgctgtgctccccagtggccggggtgattctcctggccctaggggctcttctcgtcctccarctcatccggcgtcgacgccgagagcatggagctctctggctgccccctggtttcactcgacggcctcggactcagtcagctccccaccgacgccggcccc

SEQ ID NO: 234046 - DNA, 201 bp, Homo sapiens
cagaggaagaaactgaagtcagagaaaagcagaaaagtcacttggctaaagccacacagagccagaacttagcttcccaacacctcaggttttgattctcyctgagcttacatgttgtcccttcccccttgttgtgtcctttagattgacccattactctgtcttaccaacagatggggtgacacccctgatgtcagcagt

SEQ ID NO: 234047 - DNA, 201 bp, Homo sapiens
acctgacagggaaactgcggaggatggctgaatatggattgcgagtggggttaatagtgtaaggaactcgagttggcagtccaaggtaccccaggggtcastggccctctgtctccccagcttctgctccgtagcagacaaactgcagtggacgctcgcacagaggacgggaccacacccttgatgctggctgccaggctg

SEQ ID NO: 234048 - DNA, 201 bp, Homo sapiens; identical to SEQ ID NO: 43515

SEQ ID NO: 234049 - DNA, 201 bp, Homo sapiens
gcagcaatatgttgctaggtttgaaacatggagtcatgaggcattttgaaagccaataatatctacagtttattaagtattcactatgcatcaagtgcttyattacattattaatacatcaaccctatgaagtaggtgctattaaaaccctatttcactcagaaattgaggcacagagatctgcccaagattgcaaggaat

SEQ ID NO: 234050 - DNA, 201 bp, Homo sapiens
cagctaattttttgtattttagtaaagatggggtttcaccatgttccccaggctggtctccaactcctgagctcaggcaatccacccgcctcagcctcccraagtgctaggattacaggtgtgagccaccgcagccggccatctcctgaatagattttaaatacctagaggtcagggatgattattcaatacatatatatt

SEQ ID NO: 234051 - DNA, 201 bp, Homo sapiens
ggtgatgggaaaatgacaatgacaccaataggacaatgggacaaaagcatggacaggaaactcacaaaagcatggacaggaaacacgaatagccattaaasagttaaaaagaatgttgacacttaacaacaaatgtgcagtttaaaggagcaataagagaccatttcatctatcaaagtggcgaggattctaatgtggagg

SEQ ID NO: 234052 - DNA, 201 bp, Homo sapiens
aggtgtcccctgccagacctcattgatgtattccagcaggtggcggaagctgtacgagctgtcgaagagcccatgcaccacgatgaccggcttgtaggackcgcggtggggcgcgggggctgcaagcagcagcagcggcaggaaaggcaacagaagcaggacccacgccgcggggagccgctgcccccagagccccagcat

SEQ ID NO: 234053 - DNA, 201 bp, Homo sapiens
acttagttagccttcctgcttgtctgatcttccaacacctaaagctctgtccatcctcaacacactcaaccctctcctttctcctctccccaacaaacacrtacaaattttcgtgccctctcttttctgcctttcaagttaatttctaatttccttcagccacctctttctgggtctcctcttttcaaccccaaccccatc

SEQ ID NO: 234054 - DNA, 201 bp, Homo sapiens
ccttcaatcttccctaagcaacacctccagtctctcacctgggatcctggggcttctggctccctcgcccataaagcgggacaaccttctctctgctgatmccagctttacatactggacactcttgccgttctggccgtgtctccagccactggggagaaaaaaggtggtttccagtatacaagagggtcttacagctcc

SEQ ID NO: 234055 - DNA, 201 bp, Homo sapiens
agccggcaaatctgtcaaggaagggacacaactggacaagaagactcacccctctgctctccggagctggtctctggccctgggggcggggtggagttttyaatctgaggaagtggagagagaaagttaacagggatttttctcctcccatcttccacaccgttttccaagggcagaagccttcaatcttccctaagcaac

SEQ ID NO: 234056 - DNA, 201 bp, Homo sapiens
gtgaccctgtcccagatccacacctgtgggagagaggaaagctgtggaagcatatgctcctaggctgggagggggcctgaggggattcacagggctccctsatgggagctgagtgtgactcttacctgtaccccggcggaaaggctcatgggcattgaagacggtggtgaaaaagccaaagggaaaagcaccaacaccaaa

SEQ ID NO: 234057 - DNA, 201 bp, Homo sapiens
atcacttgaacccaagaggcggaggttgcagtcagccaagatcatgccactgcactccagcctgggtgacagagcaagactccgtctcaaaaaaaaaaaaatctgctgagcacctactttgtgtggctactgttccaggccctgggggaaacacaaagcaaaagagataaagcaactgctctcgtagagctttcattctaa

SEQ ID NO: 234058 - DNA, 201 bp, Homo sapiens
aggaaaactgagtaacagaatggttaagtaacttgcccaaaggcacccaatagggtcaagattcaaacccaagtattctggccccatggtctggtctagargttggcaaactgtgaccaaaggaccaaatccagcctgctacttgtttttgtaaatgaagttttactggaacacaggcacattcattcacatatggtacat

SEQ ID NO: 234059 - DNA, 201 bp, Homo sapiens
gggcagtagtaggtgctcaaaacatcacagcccggattggcgagccactggtgctgaagtgtaagggggcccccaagaaaccaccccagcggctggaatgraaactggtaagcggggctcctgttgcagcctcccaacttccagggagaccagcaatgatttggatccccgtcactctgcctcacagtcctttcccaaagg

SEQ ID NO: 234060 - DNA, 201 bp, Homo sapiens
tccacccgctgtttacttatcccaagtctggaacccacggtggcggggggaagggtgaggaaagagagcgcaggggaatgacggatgggagggggaagggcgggctgcttggggtcgcgcaaatccgtcacgtccggggctttctctggcaaccgcgcgagcgttccccgcaacacagacccaggacaggaggggcaatgg

SEQ ID NO: 234061 - DNA, 201 bp, Homo sapiens
caggcatggtggcacatgcctgtaatcccagctacctgggaggccagctacttgagaggctgaggcaggagaattgcttgaacccaggaggcatagattgygatgagccaagatcgcaccattgcatgccagcctgggcaacaaaagtgaaactccatctcaaaaaaaaaaagaaagggaaagactccactggggctccca

SEQ ID NO: 234062 - DNA, 201 bp, Homo sapiens
agacatccgtgcaggtccctgaccttcctgctgtgccacaggctttgaagggccacgctgtcaaacagaggtggatgagtgcctgagtgacccatgtcccsttggagccagctgccttgatcttccaggagccttcttttgcctctgcccctctggtttcacaggttcacaggggaggcattggaaagaactggcagaata

SEQ ID NO: 234063 - DNA, 201 bp, Homo sapiens
ggtgtgcccctggcttcctgggtgagacgtgccagtttcctgacccctgccagaacgcccagctctgccaaaatggaggcagctgccaagccctgcttccygctcccctagggctccccagctctccctctccattgacacccagcttcttgtgcacttgcctccctggcttcactggcgagagatgccaggccaagcttg

SEQ ID NO: 234064 - DNA, 201 bp, Homo sapiens
ggagggagtgggcaagaataggaagaggggccagtgatgtgagttttcctctcctcccctgcccaggtgtgcccctggcttcctgggtgagacgtgccagwttcctgacccctgccagaacgcccagctctgccaaaatggaggcagctgccaagccctgcttcccgctcccctagggctccccagctctccctctccatt

SEQ ID NO: 234065 - DNA, 201 bp, Homo sapiens
aaaggggggtagggattagtaactgggacggagggcactggggctggggctgggtaccatgtggagagtggggacagatgtgaagaagaggtggtttagartacctgtgggagctgctgtgggcaggtctctcaggagcacctagaagaggaaaggtggaggcacagcacccagggcttccattgcgcctgcctctcctcc

SEQ ID NO: 234066 - DNA, 201 bp, Homo sapiens
atctgaatcctccacttcccactggaaccatgcccctcccagtcccggtaagtaagagggaagatcgggagggccaaatcctacaccagggtctatcttarggagggaagggacctggctggggggagggggattctgaggagtgaaaccacttcctgtgtagctagttcctgtgttgacagaaagagcagaagaggaggt

SEQ ID NO: 234067 - DNA, 201 bp, Homo sapiens
cagggaatggggcgagcttacaagtaaagctggacagaagcatcccctagagtttgacaaggaggaaattggtgtgattgggaacctgacagggaaactgyggaggatggctgaatatggattgcgagtggggttaatagtgtaaggaactcgagttggcagtccaaggtaccccaggggtcactggccctctgtctcccc

SEQ ID NO: 234068 - DNA, 201 bp, Homo sapiens
cccaggaccccttcacacaccctacactgatctccccagttagctcggcacccccagccccactctgccacctcaaactctgactcttctcaaccccagcytctgtctctctccctctgaaacctaccaagtcactttcctttctccatccactcccagattcctcctcctacctttctagaccatctcccaaagcccgca

SEQ ID NO: 234069 - DNA, 201 bp, Homo sapiens
aacctgacagggaaactgcggaggatggctgaatatggattgcgagtggggttaatagtgtaaggaactcgagttggcagtccaaggtaccccaggggtcwctggccctctgtctccccagcttctgctccgtagcagacaaactgcagtggacgctcgcacagaggacgggaccacacccttgatgctggctgccaggct

SEQ ID NO: 234070 - DNA, 201 bp, Homo sapiens
ccctgagctgccatgctgcacaacatggtactccatgacaatggtgactctggggtcatgccatgtgacagccctgccaggacatcaacatcctcctcacygctcttctccctcctctgtagacgaaagcgccgtaacttcagcaaacaggccactgaggtcctaaatgagtatttctactcccacctgagtaacccatat

SEQ ID NO: 234071 - DNA, 201 bp, Homo sapiens; identical to SEQ ID NO: 43513

SEQ ID NO: 234072 - DNA, 201 bp, Homo sapiens
ctatgctgtcaagaccgccgtgtcagtcacccaggggggccacagccgcaccagctccccgacacccccttcctctgcaggtggatcccactgtcaccccrgctgactgttttgcacacttcctgcttttgttcccacttcctatctaggcaggatcatagcagagagggggccttttggggtgagagggaccgagctgag

SEQ ID NO: 234073 - DNA, 201 bp, Homo sapiens
tgagggtgagtggatcctgaagctcctctctgtccagttctcacaggacagaggggcattttccctagtaatgttgtgcccacacagggttcccagggctytctctgttttctgtactctgtctctcctttcaggcaaatggcagctggcaagaggctgtgaccccctcttcagtgacatccccaacggagggaccaggga

SEQ ID NO: 234074 - DNA, 201 bp, Homo sapiens
tgggaacctgacagggaaactgcggaggatggctgaatatggattgcgagtggggttaatagtgtaaggaactcgagttggcagtccaaggtaccccaggkgtcactggccctctgtctccccagcttctgctccgtagcagacaaactgcagtggacgctcgcacagaggacgggaccacacccttgatgctggctgcca

SEQ ID NO: 234075 - DNA, 201 bp, Homo sapiens; identical to SEQ ID NO: 43516

SEQ ID NO: 234076 - DNA, 201 bp, Homo sapiens; identical to SEQ ID NO: 43628

SEQ ID NO: 234077 - DNA, 201 bp, Homo sapiens
agatgggggctggagagagggtgcaggccccacctagggcggaggccacagcagggagaggggcagacagagccaggaccctggaaggaagcaggatggcwgccggaacagcagttggagcctgggtgctggtcctcagtctgtggggtgagccactccctcaaccccactgaccctccctgcagaaagcactttaacccc

SEQ ID NO: 234078 - DNA, 201 bp, Homo sapiens
caatgctcggcctttccgggaggaaatctcttcgaagtctcagccattcacctcccgggagccacctccgcccctcttctgacccctgttgtcttgcttcygagagatggagtccgaggctggacttgggaggccagagaataaacaggaaaggggggtagggattagtaactgggacggagggcactggggctggggctg

SEQ ID NO: 234079 - DNA, 201 bp, Homo sapiens
gcttctctgcttctagaacacaggccggacagaagcttggaaggtcctgtctccccagggaggaggcccctgggacagtgtggctcgtgtccttcccaacrgctccctcttccttccggctgtcgggatccaggatgaggggattttccggtgccaggcaatgaacaggaatggaaaggagaccaagtccaactaccgagt

SEQ ID NO: 234080 - DNA, 201 bp, Homo sapiens; identical to SEQ ID NO: 43504

SEQ ID NO: 234081 - DNA, 201 bp, Homo sapiens
ctccctccatgcacccacacccaagcctcccctgccccacccaaattctgccaagagagcagccaagcctctcccttcttccctctgagctaaaaaaaggracagacggctgggcgcggtggctcacgcctgtaatcccaacactttgggaggctgaggcgggcagatcacctgaggtagggagttcgagaccagcctgac

SEQ ID NO: 234082 - DNA, 201 bp, Homo sapiens
ctgggaggccagctacttgagaggctgaggcaggagaattgcttgaacccaggaggcatagattgcgatgagccaagatcgcaccattgcatgccagcctsggcaacaaaagtgaaactccatctcaaaaaaaaaaagaaagggaaagactccactggggctcccactaaataaccctctctcaacccgaagtcttccttt

SEQ ID NO: 234083 - DNA, 201 bp, Homo sapiens
tgcctcccttaacctttgtgtctcacttgtttccacctgcacagctaagacccctcacttctctggggtaaggtggctcgggtctcacattgtcctgccaytccccgccccaccttctcttctcagcacatcacgtgcctcagctcctggttcctaagacctttctttccacagatctcgaccgttatactcccacccaca

SEQ ID NO: 234084 - DNA, 201 bp, Homo sapiens
gggaaaaggttagtgcagtcctgccttcgcacaatggctattggctgatacggtctaagtcaatgtgcaatgccaagggattggtaataactcgctacacsctgtcgcctggccaaggagggctttattcgtctgagtagttgtcagtcataaccaaagccataagcaatttgctcgggactacctatagacctcgcccac

SEQ ID NO: 234085 - DNA, 201 bp, Homo sapiens
aggttagtgcagtcctgccttcgcacaatggctattggctgatacggtctaagtcaatgtgcaatgccaagggattggtaataactcgctacacgctgtcscctggccaaggagggctttattcgtctgagtagttgtcagtcataaccaaagccataagcaatttgctcgggactacctatagacctcgcccactataag

SEQ ID NO: 234086 - DNA, 201 bp, Homo sapiens
ggctaaaacttgacggaaaatggtggttaggtaaaacgcgcctgcgcagcacgcggcgggacgggggtgggccaatcctgtgagggtttaaccttctcttkttccacctcttcacccctatcttgtcgccatggtgactgctctacaattggcgaggcttgcacttcaaagtcctaggctcgcttcatccgggtccttcag

SEQ ID NO: 234087 - DNA, 201 bp, Homo sapiens
aatggtggttaggtaaaacgcgcctgcgcagcacgcggcgggacgggggtgggccaatcctgtgagggtttaaccttctcttgttccacctcttcacccctatcttgtcgccatggtgactgctctacaattggcgaggcttgcacttcaaagtcctaggctcgcttcatccgggtccttcagctgtggactttctgctga

SEQ ID NO: 234088 - DNA, 201 bp, Homo sapiens
aaactgaactaaaggcccacccctttcttaatgttgtacacagagtagaacaggattgacttcaactccgttttaaaccttcagagcaggaaagctctggrctcaacccctttgtgagtggtgcaaaagggacaaagcccgccccttttaaggagacccgcggaggctagacccgccctttcctctttataatttgcccat

SEQ ID NO: 234089 - DNA, 201 bp, Homo sapiens
tctgacccctgttgtcttgcttccgagagatggagtccgaggctggacttgggaggccagagaataaacaggaaaggggggtagggattagtaactgggayggagggcactggggctggggctgggtaccatgtggagagtggggacagatgtgaagaagaggtggtttagagtacctgtgggagctgctgtgggcaggtc

SEQ ID NO: 234090 - DNA, 201 bp, Homo sapiens
gaggtgaggaagtgagaccaaagaagaaagagaggaagtgaaggagatgaagggaaacaaatgaaggcagaggagggagtgggcaagaataggaagagggrccagtgatgtgagttttcctctcctcccctgcccaggtgtgcccctggcttcctgggtgagacgtgccagtttcctgacccctgccagaacgcccagctc

SEQ ID NO: 234091 - DNA, 201 bp, Homo sapiens
gatacatgcatacaatgtatcatgatcaaatcagggtaattgggatatctatcatctcaaacatcatttctttgtgttgagaacatttcaaatcttctctyctagttattttgaaatacaaattgttaactatcaccatccttctctgctatctaacactagaacttattccttctatatgaccataattttgtatccatt

SEQ ID NO: 234092 - DNA, 201 bp, Homo sapiens
gcttgattctgggacgcaaaggttgcagtgagccgggatggcgccactgcactccagcctggcgacagagtgagactttgtctcaaaaaaaaaaaaaaaaraggccaggtgtggtggctcatgcctgtaatcccagcactttgggagaccaaggagggtggatcacctgaggtcaggagttcaagaccagcctggccaaca

SEQ ID NO: 234093 - DNA, 201 bp, Homo sapiens; identical to SEQ ID NO: 43584

SEQ ID NO: 234094 - DNA, 201 bp, Homo sapiens
gaaccaggaacccacaaagaatgggcattgagagagagcggaaacaccaagggggtccccaccctagaccaggcatctgggcacccaggcctcaggctccrcccccaccctccttggggagccaggtcccctccacctggaaatgagccaagtcacactgaggaaatggaactttatttccataaatacagggataacacc

SEQ ID NO: 234095 - DNA, 201 bp, Homo sapiens; identical to SEQ ID NO: 43576

SEQ ID NO: 234096 - DNA, 201 bp, Homo sapiens
ctcagcctcccaaagtgctggaattacaggtgtgagccaccacgcccggccacatccccatttaccgtttctgtttgtttgtttgtttgtttgtttgtttkagatggagtcttgccctatagcccaggctggagtgcaatggcacgattttggctcactacaacctgcgctgcccaggttcaagtgattctcctgcctcag

SEQ ID NO: 234097 - DNA, 201 bp, Homo sapiens
cagctcagccacctgttctggctgcagctcttcaggcggcacgggcagcaccgctctgacccaggccccagcctgaccggcccactagaaaggaagagatscctcagggtattgacagtgacgtctggcctcgccccacccagcaggcttggctcacctgctccagccgctccaggcgccctcgcagctcgtgaatctcct

SEQ ID NO: 234098 - DNA, 201 bp, Homo sapiens
gtttattgagcacctactccatctcctattgtcctggcactggagataagacagagtccctgtccttaagctgcttacagcctaaggagggaaacaaaaaygccagtcaacacatagtgtgttgtcaagatcagtggttcttaaattcaggcgcacatcagactcaccagagggcttgttgaaatacagattgctagccag

SEQ ID NO: 234099 - DNA, 201 bp, Homo sapiens
ctcaaccccagcctctgtctctctccctctgaaacctaccaagtcactttcctttctccatccactcccagattcctcctcctacctttctagaccatctsccaaagcccgcagcctttaacctgctgcctgcatcttccctgtgtctccctgaagctgaggagcttccccatgctctgggagctgatcttttcccaagaa

SEQ ID NO: 234100 - DNA, 201 bp, Homo sapiens; identical to SEQ ID NO: 43519
  misc_feature (1)...(201): n = A,T,C or G

SEQ ID NO: 234101 - DNA, 201 bp, Homo sapiens
cacagtgctcctgcatgcctggatggacaggtaagcgctgctgggggcagccaggaggggacaggcaggagcaatgggctaggctgtgggtggggaagatrgaactggagcctgagaaactgcaagccctttgaagacagaagccatgagaatcaacatgccaattcttggcaatccacttacccacaaccaacattcacc

SEQ ID NO: 234102 - DNA, 201 bp, Homo sapiens
aacactgacacttcaagaacggaactgtccccataggggagcctcagaaccccactctcatgggtagtccctcttaggagttgggagggctgatgtcaggrgactttagagaaaaaagggaacatggggaggagagaagctaaaaatgtcctgagtggcctggaaggagacccctgtggtgggcagggggtgggttctcca

SEQ ID NO: 234103 - DNA, 201 bp, Homo sapiens; identical to SEQ ID NO: 43491

SEQ ID NO: 234104 - DNA, 201 bp, Homo sapiens
tttttagtggcttcaagtttccagctgtacatgtaaggctttaatctattttgtatatgatgacagatagagatttagtttctttttttctttttttttgkggggggggatagagtcttgctctgttgccctgttgcccagtctggagtgcagtggtatgatctcagctcactgcaacctccacctcccaagttcaactga

SEQ ID NO: 234105 - DNA, 201 bp, Homo sapiens; identical to SEQ ID NO: 43492

SEQ ID NO: 234106 - DNA, 201 bp, Homo sapiens; identical to SEQ ID NO: 43630

SEQ ID NO: 234107 - DNA, 201 bp, Homo sapiens
gcaacctgccaggacagccctcagggtccccgctgcctctgccccactggctacaccggaggcagctgccaggtgagggccattgaagtcaggcgtgctgrggagggaagtggctgggagggaaaccagggagggtcacctggtcccaggccattcaggagaaggtttttgaagtaagggatttcgaggagctggagtggg

SEQ ID NO: 234108 - DNA, 201 bp, Homo sapiens
cacctggcacctccactgctgccgccattaccactggtgcacatggactgtgaagtgagtctccaggtgcctaaacccacttaaagattaggaaatgaggwtcagaaaggcaaagtggctcacccaagggtatacaaccagttgtggcacagcatggtgccacctgagtctcctgcctgcagacgtggggtgcttttcacc

SEQ ID NO: 234109 - DNA, 201 bp, Homo sapiens
ccgggggcgcactcgcactggtcaggcctaacgcagacgcctccgttcaggcaaggcttggcgcagatggctgaggacagaggaagtggggttcagactcraaccgacgacccagctccccagctccgtggggcgcgcctcccgcaaggcccggaagacccagcctcaccttcacaggtgagcgcccccgggtgccgcttc

SEQ ID NO: 234110 - DNA, 201 bp, Homo sapiens
ttcacctctgcctctgtcccccaggtgtgtcctcacaggggctctccggccgcccctctctctgggcagggcaggatgtctccgttggagcctcctcccayagctgatccatgaccctgtcaggtttcataggcccgggctgtgaggtgaatccagacaactgtgtcagccaccagtgtcagaatgggggcacttgccagg

SEQ ID NO: 234111 - DNA, 201 bp, Homo sapiens
tactgctctgtagtctctgctaggacatggacgaaaagggacgcagccgggagagcgactgccccaggtgggggctggggggacgtaagggaagaataatrattatctggctgtgtttttgtttaaaaaaaaaaaaaaactggtgtaaatctccatagacttcctatcctcgctcccttcacccacccacgcgctcccaag

SEQ ID NO: 234112 - DNA, 201 bp, Homo sapiens
aggcccggaagacccagcctcaccttcacaggtgagcgcccccgggtgccgcttcttccagccctggcagcacactgcatgggtctgctgaacctcccgcytcacctcccgccacataacgcggtacatggtcctggaacacagcgcccggctcaggaccctgagtacgggtcctagttggggttcttggggtcccatctc

SEQ ID NO: 234113 - DNA, 201 bp, Homo sapiens
aggggctctccggccgcccctctctctgggcagggcaggatgtctccgttggagcctcctcccacagctgatccatgaccctgtcaggtttcataggcccrggctgtgaggtgaatccagacaactgtgtcagccaccagtgtcagaatgggggcacttgccaggatgggctggacacctacacctgcctctgcccagaaa

SEQ ID NO: 234114 - DNA, 201 bp, Homo sapiens
tcccactcctcccaaggaaacacgccctaaactgccaccgaatgaagcctgctctctttagcgtcctgtgtgaaatcaaggagaaaactggtatgtgggcsccccccggattgctcaactctgggaacagaaccctgttcattatagggctagagtgtgacaacttggggccctgaggaaagtaaggagtcagggggactg

SEQ ID NO: 234115 - DNA, 201 bp, Homo sapiens
gggctctccggccgcccctctctctgggcagggcaggatgtctccgttggagcctcctcccacagctgatccatgaccctgtcaggtttcataggcccggrctgtgaggtgaatccagacaactgtgtcagccaccagtgtcagaatgggggcacttgccaggatgggctggacacctacacctgcctctgcccagaaacc

SEQ ID NO: 234116 - DNA, 201 bp, Homo sapiens
tgagccaggtactattcaaagtacattgcattcatttatttatttaatccttacaaccacctggtgaagtacatgctataatattttacagataaggaaawctgagtaacagaatggttaagtaacttgcccaaaggcacccaatagggtcaagattcaaacccaagtattctggccccatggtctggtctagaggttggc

SEQ ID NO: 234117 - DNA, 201 bp, Homo sapiens
atgtctccgttggagcctcctcccacagctgatccatgaccctgtcaggtttcataggcccgggctgtgaggtgaatccagacaactgtgtcagccaccartgtcagaatgggggcacttgccaggatgggctggacacctacacctgcctctgcccagaaacctggacaggtgagttgtttaagccacatccatgacacc

SEQ ID NO: 234118 - DNA, 201 bp, Homo sapiens; identical to SEQ ID NO: 43495

SEQ ID NO: 234119 - DNA, 201 bp, Homo sapiens; identical to SEQ ID NO: 43498

SEQ ID NO: 234120 - DNA, 201 bp, Homo sapiens
tattctgggaatggaaagaaggcctctccaggcttcgttgcccccagcgacccaaaagtccgatttccccgccttgattctccccacttcccaatacaggmgtctggctccgcagcagaacacgaagtttgcattccccaaggggcggccagggggcggaccagggaaaggtagtcctctgcattttgccgtgtgctgggt

SEQ ID NO: 234121 - DNA, 201 bp, Homo sapiens
gggtgatgtatgctatagagaagttgagcagatggggtgggagatagcgtgcaaaatataggtgcagcagaggggcattccctctcatcctgctgttacgrcggtcaatctgagatgcggtggaagtacgggccgcgtgagtttccccccccaactcccaccctcaacaccacactggccctccgctccagcttactgggg

SEQ ID NO: 234122 - DNA, 201 bp, Homo sapiens
aagcccctttctttccttcgcttcctcttttagagaatgtccggattgctattggactttggagcgtatggctccaaatcaactcattggctaaaacttgmcggaaaatggtggttaggtaaaacgcgcctgcgcagcacgcggcgggacgggggtgggccaatcctgtgagggtttaaccttctcttgttccacctcttc

SEQ ID NO: 234123 - DNA, 201 bp, Homo sapiens
agcttcccaaagtgctgggattacaggcatgagccactgtgcccaacctcaatctatattatcatccccattttgcagataaggaaaccgaggcaaagacmggctactaaacttgtccaaaggtctcccaatagtaatcagtctcaccaggagtggcctctctttgtgactctgtctctcccaccagcaccccctgccaac

SEQ ID NO: 234124 - DNA, 201 bp, Homo sapiens
catgggcttccagggcccgcgctgtgagggaaagctccgccccagctgtgcagacaggtgagcagggcccaaagacccctagaagggagaaaacccctcakccttcccacccctcctctcatctccccctgggttccaggctgcctcccaccccacacctcgttccgccttccctcctggcttgccacctccctgtggttg

SEQ ID NO: 234125 - DNA, 201 bp, Homo sapiens
ccaccattccctcatctctgggcaggggcttattgtaggagtctctgaagagagctgtggactgacctgctttaacccttccccaggttcccattgtcccyatagtcatgtcctcctaccaagacttctactgcaagaaggagcgtcgcttcacctcgggtgagggctttgagcagttctggggtagggtgtgtccggaga

SEQ ID NO: 234126 - DNA, 201 bp, Homo sapiens
cccctagtgttcctccactcttcctccgccccccattactagggtgtccaggacattgtgtgactcaggaaacagctcagacgtgaggcttgcagcaggcygaggaggaagaagaggggcagtgggagcagaggaggtggctcctgccccagtgagagctctgagggtccctgcctgaagagggacagggaccggggcttg

SEQ ID NO: 234127 - DNA, 201 bp, Homo sapiens
ggtggctcacgcctatagtcccagcacttcgggaagccgaggcgggtggatcacccgagattaggagttcgagatcagcctggccaacatggtgaaacctygtctctattaaaaatacaaaaattacaatttgggaggccgaggcgggtggatcatgaggtcaggagatcgacactatcctggctaacacggtgaaacccc

SEQ ID NO: 234128 - DNA, 201 bp, Homo sapiens
gcaggtggccagaatggatttgtggccaggggcatggatgctgctgctgctgctcttcctgctgctgctcttcctgctgcccaccctgtggttctgcagcyccagtgccaagtacttcttcaagatggccttctacaatggctggatcctcttcctggctgtgctcgccatccctgtgtgtgccgtgcgaggacgcaacgt

SEQ ID NO: 234129 - DNA, 201 bp, Homo sapiens; identical to SEQ ID NO: 43514

SEQ ID NO: 234130 - DNA, 201 bp, Homo sapiens; identical to SEQ ID NO: 43517

SEQ ID NO: 234131 - DNA, 201 bp, Homo sapiens
aatcccagctactcgggaagctgaggcaggagaatcccttgaaccctggaggcagaggttgcagtgaaccaagatcatgccactgcactctagcctgggcracagagcaagactccgtctcaaaaaaacaaacaaaacaaacaaacaaaaaaaacccctagctatataccttcacaccgtacacacaaaccaagcacctgg

SEQ ID NO: 234132 - DNA, 201 bp, Homo sapiens; identical to SEQ ID NO: 43518

SEQ ID NO: 234133 - DNA, 201 bp, Homo sapiens
ggactgggggatccccaaacctgagatgggcctcataggccacagatattccccaacactgacacttcaagaacggaactgtccccataggggagcctcadaaccccactctcatgggtagtccctcttaggagttgggagggctgatgtcaggggactttagagaaaaaagggaacatggggaggagagaagctaaaaat

SEQ ID NO: 234134 - DNA, 201 bp, Homo sapiens
tgctctctgaggcgccttttagatatgagaatctaggaccctctgcaccgtcttaacccaagagtttgcttgatggagagcgggaagaataatgcaagttscatctccaatatctcccctcccctccacagggttttgaaggccccacctgcagccacagggccccttcctgcggcttccatcactgccaccacggaggcc

SEQ ID NO: 234135 - DNA, 201 bp, Homo sapiens
tagaaggggaagtaatcccagggggctcaccagttgctcctccatctccaggacggtctcatttgcatcatagaaaccaaagaagctacaaagagatttgsggggaggttatcagaagagctggagaaaatctggccgggcgcagtggcacacgcctgtaattgcagcactttgggaggccaaggagggcaaatcacctga

SEQ ID NO: 234136 - DNA, 201 bp, Homo sapiens
ccctggcctcccctactcatagggctcccagccttagccctcgtcccctccccaaccccctgcaggctgggactgctccgaagatgtggatgagtgtgagrcccagggtccccctcactgcagaaacgggggcacctgccagaactctgctggtagctttcactgcgtgtgtgtgagtggctggggcggcacaagctgtga

SEQ ID NO: 234137 - DNA, 201 bp, Homo sapiens
ggactgtgggtgagcactgatgtggaaattattggaaaaagccatgccaagctcacagtgggaagtgtctctcagaagcagtcaaaggcaaggcaggatcrgttgatagcatgaatggaattttcaaaaatcacaggcgttgcctaagggaaggtcaggagctccccaagctcaagctgcgtggtgggtggcctcagatag

SEQ ID NO: 234138 - DNA, 201 bp, Homo sapiens
aagctgaggagcttccccatgctctgggagctgatcttttcccaagaactcctcattccacccccaactcattccacccccaatccgcttcctccctccgsagactgaccctcctccctccttgttctcaggccccctgctctgtttctctagctcctcaacttttctctttccccactcccactcctcccaaggaaacac

SEQ ID NO: 234139 - DNA, 201 bp, Homo sapiens
gcccacctggacgcacaggtatgggggtagagggtatcaggaggtgggaggtagagaaggagggtgagagaagcaccaggaggactgctaggagcttcaartggcctttgagagcctcaccccctcttacccctccaggactcctgtgccacttggaagacatgtgtctgagccagccgtgccatggggatgcccaatgca

SEQ ID NO: 234140 - DNA, 201 bp, Homo sapiens
tagacccctgccacagccaaccctgctttcatggagggacctgtgaggccacagcaggatcacccctgggtttcatctgccactgccccaaggcaagtgaycacaaatctgccttctctgttgccccctatgctgacaaggcaagaatacctcagttggaatcccagaagggactgtgggtgagcactgatgtggaaatta

SEQ ID NO: 234141 - DNA, 201 bp, Homo sapiens
gctggcatggagacatcctgtgaggaaatatggagacatgaccagatgggggttgtcaagggagcaaaatccagagggctcttcttaatctgccctaaaasaggtcccgagattctcacagaggctggggcactcctccccccactgaaggaacagcagagtggaacacatgtcatcccacatgtgtttatacaactgttg

SEQ ID NO: 234142 - DNA, 201 bp, Homo sapiens
catccaggaatgagctaggatggaggcagtgactgatgcagtgtgtgacatctaatctcccccataattacaggccagtggtgtgaggtggagatagaccyctgccacagccaaccctgctttcatggagggacctgtgaggccacagcaggatcacccctgggtttcatctgccactgccccaaggcaagtgaccacaaa

SEQ ID NO: 234143 - DNA, 201 bp, Homo sapiens
attaaaaaaccaaacatctttttccttgaatttgcccagatttggcatctcttgcctacatgaccctctctccaatgttcagcccctcagtccccatgaawttggtcccttatttcctttccatcttaaagacacaagccccttccccaatttggtctcgtctgccacacgcaggcccccacaccttccctgacagtctca

SEQ ID NO: 234144 - DNA, 201 bp, Homo sapiens
ggccaggacagccccagtgggaccataccttgcgggagagaatgtagaaagcccaagaatatggtggttaatgaagcaaggaagggaggagaggggcttargtggaatttatgggtgtcctggaagggtaatgggtgctttattttgagaagccataggtaaaaattgtgcttttaaagccactctgccagccgcccaacg

SEQ ID NO: 234145 - DNA, 201 bp, Homo sapiens
ctctggccaatgccttctactgccagtgtctgcctggacacacaggtgaggccccaagacaaggggcacaagtgtgtctggagcacagccaagcagaccayggagagccagatagtctccacccatgcggcagccgtcacctggtccatcccctgcctccacgcccacccccgcccagaaaagatgccccaggatcccttc

SEQ ID NO: 234146 - DNA, 201 bp, Homo sapiens
cctcagtccccatgaatttggtcccttatttcctttccatcttaaagacacaagccccttccccaatttggtctcgtctgccacacgcaggcccccacacmttccctgacagtctcacctccttgcccttcctgccctgacccctgtggactcccagctcttctctcctcccagcccagcaaggcccaagtccctgtgaac

SEQ ID NO: 234147 - DNA, 201 bp, Homo sapiens
ctttccatcttaaagacacaagccccttccccaatttggtctcgtctgccacacgcaggcccccacaccttccctgacagtctcacctccttgcccttccygccctgacccctgtggactcccagctcttctctcctcccagcccagcaaggcccaagtccctgtgaacatggcggttcctgcctcaacactcctggctcc

SEQ ID NO: 234148 - DNA, 201 bp, Homo sapiens
tcatagaggctgcacaacctggtccactgtacacagcagcccagcaagagagggtagaagagcagttcataaactttctgtgctgcagcctttgctcaggycaacccagaatgctccctctgattatagaaactctcccatgtagagattcaaggtaatcccttaaaatcccaaaagccctgtgatacaacaggaaaattt

SEQ ID NO: 234149 - DNA, 201 bp, Homo sapiens
aaggtaatcccttaaaatcccaaaagccctgtgatacaacaggaaaatttggtacaacaagaaaaaaattgctgcaagacagcacccacctccaggctagytttaagggggaaaagtcgccccagggagacagcaacagagccaacatcaaggagttgaatgaaatcagaaaaataatcgccaactttatgccaggtactg

SEQ ID NO: 234150 - DNA, 201 bp, Homo sapiens
ggagtgggcagaggaccatctctgggctgagaatctgatgctatgtcctgcctcacgctccctcccacccctcagactctgatggacttatgtgcccagargccctgcccacgcaattcccactgcctccagactgggccctccttccactgcttgtgcctccagggatggaccgggcctctctgcaaccttccactgtcc

SEQ ID NO: 234151 - DNA, 201 bp, Homo sapiens
atcaaggagttgaatgaaatcagaaaaataatcgccaactttatgccaggtactgtctgagcatcttacaggcattgtctcatctacttattacaataacyctatgaggtcagcactgcccattttataactgaagaaactgaggcacagagagtttaagtgacttgtccaaggtcacccagctagcaagtggcagagctg

SEQ ID NO: 234152 - DNA, 201 bp, Homo sapiens
aggcgtgagccaccgcgcccggcctggatatacatattttgaaggtagagtccacaggatttaagacagtttggatgtggagtatgagaaaaagagaggartcagcaatatcttcaaggatttgggcctaaacaatggaaagaatagaactgcaaaactcaattctatcaggaaggaagagaaggttaagggagaagatca

SEQ ID NO: 234153 - DNA, 201 bp, Homo sapiens
ggagtgagtaaggcaagcataagaagtggctttggcccaatgaaggatgtggctttggcccaatgaaggatgtggaggagctgttttctttttgacccatyttcccaccccaggccagctctgtgaggttcccctgtgtgctcccaacctgtgccagcccaagcagatatgtaaggaccagaaagacaaggccaactgcct

SEQ ID NO: 234154 - DNA, 201 bp, Homo sapiens; identical to SEQ ID NO: 43496

SEQ ID NO: 234155 - DNA, 201 bp, Homo sapiens
aagtaagggatttcgaggagctggagtgggcagaggaccatctctgggctgagaatctgatgctatgtcctgcctcacgctccctcccacccctcagactytgatggacttatgtgcccagaagccctgcccacgcaattcccactgcctccagactgggccctccttccactgcttgtgcctccagggatggaccgggcc

SEQ ID NO: 234156 - DNA, 201 bp, Homo sapiens; identical to SEQ ID NO: 43497

SEQ ID NO: 234157 - DNA, 201 bp, Homo sapiens; identical to SEQ ID NO: 43499

SEQ ID NO: 234158 - DNA, 201 bp, Homo sapiens
tggtgactgctgggggatgggtgagagggtgcccacctccaggaagaacctcgtcagcactggcactggaggactcttgcagccatagggaagaggggaaragggaacacactgaccacctgcttggggaggagatgagagggaagcaggagatggggacatgaaaggtcaggcctactaagccctttcttagtccagctg

SEQ ID NO: 234159 - DNA, 201 bp, Homo sapiens
gcctcgccccacccagcaggcttggctcacctgctccagccgctccaggcgccctcgcagctcgtgaatctcctgcttcagagcgcgctcatctttttcckcctcccgaactagggacaaaggagaccaagagtgtgaccactacccgagcccggacgcccgtcccgagtccctcgggtggcccgtactcctgcccactca

SEQ ID NO: 234160 - DNA, 201 bp, Homo sapiens; identical to SEQ ID NO: 43602

SEQ ID NO: 234161 - DNA, 201 bp, Homo sapiens
ggaagcagaagatagcccccaacacatgtgactggggggatggtcaacaagaaaggaatggtgagtggtggtggctgtgctctcaattttccctgtctccrtacaggctctgtgggaggatcagggctgggaactctagccctggccctggggatcctgggaggcctggggacagccgccctgctcattggggtcatcttg

SEQ ID NO: 234162 - DNA, 201 bp, Homo sapiens
agagagcagccaagcctctcccttcttccctctgagctaaaaaaaggaacagacggctgggcgcggtggctcacgcctgtaatcccaacactttgggaggytgaggcgggcagatcacctgaggtagggagttcgagaccagcctgaccaacatggagaaaccccatttctactaaaaatacaaaattagccaggcatggt

SEQ ID NO: 234163 - DNA, 201 bp, Homo sapiens
gggcagacagagccaggaccctggaaggaagcaggatggcagccggaacagcagttggagcctgggtgctggtcctcagtctgtggggtgagccactcccycaaccccactgaccctccctgcagaaagcactttaaccccacaccccagtcgtcctagaacttttcccagaacccgaggaagtgcctttcaaggtccctc

SEQ ID NO: 234164 - DNA, 201 bp, Homo sapiens
agccaagcctctcccttcttccctctgagctaaaaaaaggaacagacggctgggcgcggtggctcacgcctgtaatcccaacactttgggaggctgaggcrggcagatcacctgaggtagggagttcgagaccagcctgaccaacatggagaaaccccatttctactaaaaatacaaaattagccaggcatggtggcacat

SEQ ID NO: 234165 - DNA, 201 bp, Homo sapiens
ggagagacagtagtgactgagggaagacccaatgtatccatttcacctccttttattttttttaaccccacacacccaactaaccacaaagtcatgccacyttatctcctgaagttttctcaagtctgtgctttcaccttcaccctttgtcccactgcctgagtcctgacctttgttgcgttccagatagatacttgcatc

SEQ ID NO: 234166 - DNA, 201 bp, Homo sapiens
ggtggctcaagcctgtaatcccagcactttgggaggccgaggagggtggatcatctgaggtcaggaattcgagaccagcctggccaacacggagaaacccygtctctactaaaaatacaaaattagctgggcgtggtgggcgcctgtaatcccagctactcaggaggcagaggcaggagaattgcttgattctgggacgca

SEQ ID NO: 234167 - DNA, 201 bp, Homo sapiens
cgacagcggcccctcctatttctgccactgcccccctggattccaaggcagcctgtgccaggatcacgtgaacccatgtgagtccaggccttgccagaacrgggccacctgcatggcccagcccagtgggtatctctgccaggtgagagggtctgcaggagaagggggaggaaagacaagggtgggctggatgggagagac

SEQ ID NO: 234168 - DNA, 201 bp, Homo sapiens
caggtgagggccattgaagtcaggcgtgctgaggagggaagtggctgggagggaaaccagggagggtcacctggtcccaggccattcaggagaaggttttygaagtaagggatttcgaggagctggagtgggcagaggaccatctctgggctgagaatctgatgctatgtcctgcctcacgctccctcccacccctcagac

SEQ ID NO: 234169 - DNA, 201 bp, Homo sapiens
ttcttcctatcatgccctgtctctgtcttgttcagcccctgtaggaatagggcaacctgccaggacagccctcagggtccccgctgcctctgccccactgkctacaccggaggcagctgccaggtgagggccattgaagtcaggcgtgctgaggagggaagtggctgggagggaaaccagggagggtcacctggtcccagg

SEQ ID NO: 234170 - DNA, 201 bp, Homo sapiens
gacccacctgtagtgaggagatgacagcttgtcactcagggccatgtctcaatggcggctcctgcaaccctagccctggaggctactactgcacctgccckccaagccacacagggccccagtgccaaaccagcactgactactgtgtgtctggtgagtgcccactgtgtcatggggctggggtccacaggagaatggaag

SEQ ID NO: 234171 - DNA, 201 bp, Homo sapiens
gccccctcctttgggctcccttcgctaggacaggagaagacagccagtgagatgtaggtctgtgagaaatgaccaatggggaaaaggaaggagatggcaargttcttagggcaaggcagtgggagggctcaactggtaagtgttatccaaggagaagagagtccacaaaaactggtggaaacagaggaccagggggtcaga

SEQ ID NO: 234172 - DNA, 201 bp, Homo sapiens; identical to SEQ ID NO: 43566

SEQ ID NO: 234173 - DNA, 201 bp, Homo sapiens
gccggacagaagcttggaaggtcctgtctccccagggaggaggcccctgggacagtgtggctcgtgtccttcccaacggctccctcttccttccggctgtsgggatccaggatgaggggattttccggtgccaggcaatgaacaggaatggaaaggagaccaagtccaactaccgagtccgtgtctaccgtaagaattcca

SEQ ID NO: 234174 - DNA, 201 bp, Homo sapiens; identical to SEQ ID NO: 43567

SEQ ID NO: 234175 - DNA, 201 bp, Homo sapiens; identical to SEQ ID NO: 43522

SEQ ID NO: 234176 - DNA, 201 bp, Homo sapiens
cagcaggccgaggaggaagaagaggggcagtgggagcagaggaggtggctcctgccccagtgagagctctgagggtccctgcctgaagagggacagggacyggggcttggagaaggggctgtggaatgcagcccccttcactgctgctgctgctgctgctgctgctgctgctatgtgtctcagtggtcagacccagaggtg

SEQ ID NO: 234177 - DNA, 201 bp, Homo sapiens
ctgctgctgctgctgctgctgctatgtgtctcagtggtcagacccagaggtgaggcatggcgtgggtgaggtgaggggacccagctcccttaggaggatgwtcagtggggtgggggaagagggccaagccccaggccgtgtgagggatgctggatggaggagattctcactgcccaaatagagacggcctccagggaaaga

SEQ ID NO: 234178 - DNA, 201 bp, Homo sapiens
agcaatcacccaaggccacttgaagctctctctagccaagccaaggagtcctccaaatctgtctttgctccccaaaatctctactcttacatccccaaatyttcccttgcttacttgcccattctcatctctgtcctaccaaatcacccaaagatccctcctttccagtcctcctgcacagcctctgtgtatgcatgttga

SEQ ID NO: 234179 - DNA, 201 bp, Homo sapiens
cggagcgatccatttaggccagtggggagaggaaaaagcagcaaacatattctgggaatggaaagaaggcctctccaggcttcgttgcccccagcgacccraaagtccgatttccccgccttgattctccccacttcccaatacaggcgtctggctccgcagcagaacacgaagtttgcattccccaaggggcggccaggg

SEQ ID NO: 234180 - DNA, 201 bp, Homo sapiens
cttctcctagagatcctcaattccccttcctctgggacattgcccccttgcctcccactcaggccttcattccctgggtagaactgccctcataagcaggktacatatacttttggtcaccctttccttcacttggggcccccctccctgcctagtctcctccttcacctccagtccctaccagagggtgatgagctgggt

SEQ ID NO: 234181 - DNA, 201 bp, Homo sapiens
tgtcctttccccagtgtgtgtacttggtgcctttgttgaaagtaagttggctggccgggagtggtggctcatgcctgtaatcccagcattttgggagaccraggcgggcagatcacaaggtcaggagttcgagaccagcctgaccaacatagtgaaacccccgtctctactaaaaatacaaaaattagccaggcatggtgg

SEQ ID NO: 234182 - DNA, 201 bp, Homo sapiens
gactcccacctggcctgggtccgtaggcctcgctccacccgctgtttacttatcccaagtctggaacccacggtggcggggggaagggtgaggaaagagarcgcaggggaatgacggatgggagggggaagggcgggctgcttggggtcgcgcaaatccgtcacgtccggggctttctctggcaaccgcgcgagcgttccc

SEQ ID NO: 234183 - DNA, 201 bp, Homo sapiens
gaaaagtggccaagggccacccccgctgatgactccttgcattccctcccctcacaacaaagaactccactgtggggatgaagcgcttcttctagccactsctatcgctatttaagaaccctaaatctgtcacccataataaagctgatttgaagtgttacctttttttggaggaattggggagaagaatgggaaaaaaga

SEQ ID NO: 234184 - DNA, 201 bp, Homo sapiens
atttatggacctcagatgcatggaattagactaatcttaagctttggttcctgatacactgacattggtttatgcctggtcttcttttattttattattctaacaatgtaacacccatgaacctaacccaagaatttcaatattaataataacttacatctacttaagtcctcctcctgtatcctgttccctctccagagg

SEQ ID NO: 234185 - DNA, 201 bp, Homo sapiens
tttcaccatgttggtcaggctggtcctgaactcctgacctcgtgatctgcccacctcggcttcccaaagtgctgggattacaggcgtgagccactgcgccyggcccaagattataatttcaaaatgtagtcagcataaaagattagtaatggatatctcacattttgttttttattcagtctttgaaatctgatgtgtatt

SEQ ID NO: 234186 - DNA, 201 bp, Homo sapiens; identical to SEQ ID NO: 43520

SEQ ID NO: 234187 - DNA, 201 bp, Homo sapiens
aagggcagctctgtgaggtggagaccaacgagtgtgcctcagctccctgcctgaaccacgcggattgccatgacctgctcaacggcttccagtgcatctgyctgcctggtgagtacagatgcctctctggccaccctcagaccccaggcctctgaacctgcagagttcaggctcagcaatcacccaaggccacttgaagct

SEQ ID NO: 234188 - DNA, 201 bp, Homo sapiens
catgtccccaggcttagaagggcagctctgtgaggtggagaccaacgagtgtgcctcagctccctgcctgaaccacgcggattgccatgacctgctcaacrgcttccagtgcatctgcctgcctggtgagtacagatgcctctctggccaccctcagaccccaggcctctgaacctgcagagttcaggctcagcaatcacc

SEQ ID NO: 234189 - DNA, 201 bp, Homo sapiens
caagccccaggccgtgtgagggatgctggatggaggagattctcactgcccaaatagagacggcctccagggaaagacggctctgcccatggagctgcttygggcctggtgccaggggtggtgactgctgggggatgggtgagagggtgcccacctccaggaagaacctcgtcagcactggcactggaggactcttgcagc

SEQ ID NO: 234190 - DNA, 201 bp, Homo sapiens; identical to SEQ ID NO: 43523

SEQ ID NO: 234191 - DNA, 201 bp, Homo sapiens
agaaacggctccctctgtcctctgcctcaggtgagcagtgccagcttcgggacttctgttcagccaacccatgtgttaatggaggggtgtgtctggccacrtacccccagatccagtgccactgcccaccgggcttcgagggccatgcctgtgaacgtgatgtcaacgagtgcttccaggacccaggaccctgccccaaag

SEQ ID NO: 234192 - DNA, 201 bp, Homo sapiens; identical to SEQ ID NO: 43552

SEQ ID NO: 234193 - DNA, 201 bp, Homo sapiens
gagccacagccctcatggtccccatgtccccaggcttagaagggcagctctgtgaggtggagaccaacgagtgtgcctcagctccctgcctgaaccacgcrgattgccatgacctgctcaacggcttccagtgcatctgcctgcctggtgagtacagatgcctctctggccaccctcagaccccaggcctctgaacctgca

SEQ ID NO: 234194 - DNA, 201 bp, Homo sapiens
aattaaaaaaccaaacatctttttccttgaatttgcccagatttggcatctcttgcctacatgaccctctctccaatgttcagcccctcagtccccatgartttggtcccttatttcctttccatcttaaagacacaagccccttccccaatttggtctcgtctgccacacgcaggcccccacaccttccctgacagtctc

SEQ ID NO: 234195 - DNA, 201 bp, Homo sapiens
tatctcccaggggcagtagtaggtgctcaaaacatcacagcccggattggcgagccactggtgctgaagtgtaagggggcccccaagaaaccaccccagcrgctggaatggaaactggtaagcggggctcctgttgcagcctcccaacttccagggagaccagcaatgatttggatccccgtcactctgcctcacagtcct

SEQ ID NO: 234196 - DNA, 201 bp, Homo sapiens
ccctccagagtaaggacagcttcaggccaattggcgtaagttaccacagatgcttctctctctacccccagacgaaaactcagggacacccaagacccctrggagaggggttaccacagatggtagtgaggttatgcattcctcaacttggggggaagctgccattcatttcatagtcatcatagaggctgcacaacctgg

SEQ ID NO: 234197 - DNA, 201 bp, Homo sapiens
actcctcaggcaagaaaagaaaggaagccaaggtccagaggttgatcccacctcaattcaggatgaaacagtggagaccaggatgaacccaaagcaacggracaaatataggagcaacaagcttcccagatgcacttcaaattcctccactttgggatctctgttctccctagcatggaggcccgcccagggagaacaaga

SEQ ID NO: 234198 - DNA, 201 bp, Homo sapiens
gaacccaaagcaacgggacaaatataggagcaacaagcttcccagatgcacttcaaattcctccactttgggatctctgttctccctagcatggaggcccrcccagggagaacaagaagcgggactcattctccaagccaatttgttcctatttgtaccttgaggtcctccaggctgatcagcctgccctggtgagccccg

SEQ ID NO: 234199 - DNA, 201 bp, Homo sapiens
aaatataggagcaacaagcttcccagatgcacttcaaattcctccactttgggatctctgttctccctagcatggaggcccgcccagggagaacaagaagygggactcattctccaagccaatttgttcctatttgtaccttgaggtcctccaggctgatcagcctgccctggtgagccccgccctctgtatacacaggaa

SEQ ID NO: 234200 - DNA, 201 bp, Homo sapiens
cccagatgcacttcaaattcctccactttgggatctctgttctccctagcatggaggcccgcccagggagaacaagaagcgggactcattctccaagccartttgttcctatttgtaccttgaggtcctccaggctgatcagcctgccctggtgagccccgccctctgtatacacaggaatggccaccagaaagccttgta

SEQ ID NO: 234201 - DNA, 201 bp, Homo sapiens
tccctgtgccaatggtgggcagtgccaggaccagcctggagccttccactgcaagtgtctcccaggtaaactggggcacacactgtgggggacagcgggarcaggaggcagacatccgtgcaggtccctgaccttcctgctgtgccacaggctttgaagggccacgctgtcaaacagaggtggatgagtgcctgagtgacc

SEQ ID NO: 234202 - DNA, 201 bp, Homo sapiens
ccaaccatgagggacatgactcaacgtggagcaactcaactctgtcctgatcatcataacccaggcagagtggaccacacttaatccagctacactcaacrcatttcaccccaccccactcacttcgatgtcacgccaccctctttgtaaaagaacactaaaataaggtttgatatgagaagagctcgggaaagagattat

SEQ ID NO: 234203 - DNA, 201 bp, Homo sapiens
tgactagaatggacatattttggcatcagggcccccctcaggatgaggaaggctggccccctccaaactccaccactcggccttggcgatctgctcctccrtcccctcctcctccagggacccgccacacaggtacccctacccacccagggagagccccgaccctagtgcccacatcctgaccccattaccaaggcccac

SEQ ID NO: 234204 - DNA, 201 bp, Homo sapiens
tgttcgaatgggggcacctgccagctgatgccagagaaagactccacctttcacctctgcctctgtcccccaggtgtgtcctcacaggggctctccggccrcccctctctctgggcagggcaggatgtctccgttggagcctcctcccacagctgatccatgaccctgtcaggtttcataggcccgggctgtgaggtgaat

SEQ ID NO: 234205 - DNA, 201 bp, Homo sapiens
cagaatccatattagactctggggagtgaaaaattaaattaaatcagtaagatggggagtgggggaagagtcagagggaactttgcccacctttgaagatsaaatcaagaaatcagggaaagcaaagacttaggagaggagaaagacattctctcaatccatcctccttccccagggcagagaattaaacaacgttactga

SEQ ID NO: 234206 - DNA, 201 bp, Homo sapiens
ctggaggtgggcaggaagcagacatagctcaaatactgagcagccaaaaaaagaagaagatggcgagaaacaggaagagggaatcctgccagctggaggcygggtgaccctgtcccagatccacacctgtgggagagaggaaagctgtggaagcatatgctcctaggctgggagggggcctgaggggattcacagggctcc

SEQ ID NO: 234207 - DNA, 201 bp, Homo sapiens; identical to SEQ ID NO: 43500

SEQ ID NO: 234208 - DNA, 201 bp, Homo sapiens
gcctctctgagcctcagacaggcctctgcactgaagacagaaaagggcagattgcttttccaattaaaaaaccaaacatctttttccttgaatttgcccasatttggcatctcttgcctacatgaccctctctccaatgttcagcccctcagtccccatgaatttggtcccttatttcctttccatcttaaagacacaagc

SEQ ID NO: 234209 - DNA, 201 bp, Homo sapiens
cagcctggctattcggggcccacctgccaccaggacctggacgagtgtctgatgggtgaggccactcccacttcagagcctctctgagcctcagacaggcstctgcactgaagacagaaaagggcagattgcttttccaattaaaaaaccaaacatctttttccttgaatttgcccagatttggcatctcttgcctacatg

SEQ ID NO: 234210 - DNA, 201 bp, Homo sapiens
aagcagccacaagttaaaaacatggtttctcacttcccaacttcggccttgagagaaagggacagcacggagcaatcccccaaatgagaggacatgaggtsggggaggcctggaattgtcattcatggaggagcagaggaagggggttctgggaggccaagtctctactaaaaccccgtctctactaaaaatgggggataa

SEQ ID NO: 234211 - DNA, 201 bp, Homo sapiens
gatctctgttctccctagcatggaggcccgcccagggagaacaagaagcgggactcattctccaagccaatttgttcctatttgtaccttgaggtcctccrggctgatcagcctgccctggtgagccccgccctctgtatacacaggaatggccaccagaaagccttgtagtcctcccgcaggtccccagcaagcaccctg

SEQ ID NO: 234212 - DNA, 201 bp, Homo sapiens
tttgggttggggcagagttcattggtgggtgtttgatggttgggatgtgagaatagaatgagaatggtatcctttaaagttatttagtgtaaaacctgcayaattgtacaaccatggggacaagggcaggggttaccgtagggcccacatgggcccagtgtaaatggtgtgattgcggcttgggagcagaggacggggctc

SEQ ID NO: 234213 - DNA, 201 bp, Homo sapiens
gcaagcacttaccaactgcctactatgccagatacggaggcaaatctgagtaagacagttgccatcttcatgtgactttaagtctaatacagagagaccarcaagtctcctgttgatcatagcccacagaggtgctctgagagaaaaacgtgcaggatattacaagagcacagaggaccagccaacccagactaaaaatgg

SEQ ID NO: 234214 - DNA, 201 bp, Homo sapiens
gtgatggctgagatgagtcttgaaagataagcagaggctgggcgtggtggctcacgcctatagtcccagcacttcgggaagccgaggcgggtggatcaccygagattaggagttcgagatcagcctggccaacatggtgaaaccttgtctctattaaaaatacaaaaattacaatttgggaggccgaggcgggtggatcat

SEQ ID NO: 234215 - DNA, 201 bp, Homo sapiens
cagtgggagggctcaactggtaagtgttatccaaggagaagagagtccacaaaaactggtggaaacagaggaccagggggtcagagcagaaagaagagcaytaaatcccagggcgaattaatcattcattagaaaaatatctgctgaggccaggcgcagtgctgattacggtctcatgccggtaatcccagcactttggga

SEQ ID NO: 234216 - DNA, 201 bp, Homo sapiens
aggctaaggtgggaggatgacttgagcccagaaggttaagactgcagtgagctctgatggcaccactgcctgggtaacagagcaagaccctatctaaaaayaataaaatatcatataaataaaaattaattggatggcagtgagctgtcgttttgatgggggtggggggtgtatgtcctatgtacagtgtgactgaggtca

SEQ ID NO: 234217 - DNA, 201 bp, Homo sapiens
cagcctaccaaagtgctgggattacaggcgtgagccaccgcacccggctatttacttcttcttttatgaagctccctcctccaaaacacccccatcacctrttccttccagctctctgaccactccttggattctctgtgaattcccttttctctctttgaagcctgccttcctggtactgtactcttgcacactctcttt

SEQ ID NO: 234218 - DNA, 201 bp, Homo sapiens
ccctccttccactgcttgtgcctccagggatggaccgggcctctctgcaaccttccactgtcctcctgccagaaggctgcactgagccaaggtaaccaacrccggcactgactggagagcaaatgaagaaaatatgggtgttctcacctgccccgttcctgtgggcttccacacagcttttggccaaaacaaccacctgag

SEQ ID NO: 234219 - DNA, 201 bp, Homo sapiens
ggacgcagccgggagagcgactgccccaggtgggggctggggggacgtaagggaagaataatgattatctggctgtgtttttgtttaaaaaaaaaaaaaaactggtgtaaatctccatagacttcctatcctcgctcccttcacccacccacgcgctcccaagatgcaataagcaaataaaaagactaataacgctgtact

SEQ ID NO: 234220 - DNA, 201 bp, Homo sapiens
ctgctattgacactacctggaatggccttcccaacccctcttccacaggctggtgttcaggaggcatcttcttcaggaagatgtccctaacttctccccasgctggattagggcctcttctttgtggtccaggtcactaagccaggagaggcaaagctggcattcaagtctaagcagcctgattcatatgctcagaaccac

SEQ ID NO: 234221 - DNA, 201 bp, Homo sapiens; identical to SEQ ID NO: 43507

SEQ ID NO: 234222 - DNA, 201 bp, Homo sapiens; identical to SEQ ID NO: 43509

SEQ ID NO: 234223 - DNA, 201 bp, Homo sapiens; identical to SEQ ID NO: 43510

SEQ ID NO: 234224 - DNA, 201 bp, Homo sapiens
ctccttgggcccagaccagtctccacccaggaatgttagtggtccccaaggtaaaggcctctacacccagagattgggccctgaatacacccttcctcctmctcacataccttatttatttatttatttatttatttatttatttatttatttttgagatggagtcccagtctgtcacccagggtggagtgcagtggcacg

SEQ ID NO: 234225 - DNA, 201 bp, Homo sapiens
gcctgagtgacccatgtcccgttggagccagctgccttgatcttccaggagccttcttttgcctctgcccctctggtttcacaggttcacaggggaggcaytggaaagaactggcagaatattttattccatttgggttggggcagagttcattggtgggtgtttgatggttgggatgtgagaatagaatgagaatggtat

SEQ ID NO: 234226 - DNA, 201 bp, Homo sapiens
ctgttgttgcctttgttgcctggctgttgaggtcttacccaaaaaacttttgcccagaccaatgtcttgaagcatttcccaaatgatttttttttttttttttttgagaaggagtcttgcaccgtcgcctgggctggagtgcagtggcgcaaatttgactcactgcaacctttgcctcctgggttcaagcgattctcctgc

SEQ ID NO: 234227 - DNA, 201 bp, Homo sapiens
atggcagggacatggtgtacccctatcctggggcccgggctgaagaaaagctaggaggaactcgggaccccacctatcaggagagagcagcccctcaaacrcagcccctgggcaaggagaccgactccctcagtgctgggtaagaagctaggtggagggaagggccagacaccagtttttttaagagggcagagggaggaa

SEQ ID NO: 234228 - DNA, 201 bp, Homo sapiens
ctggctgtgttagtttacattcccaccaacagtgtatgagggttcccctttctctgcatccttgccagcatctgctattttttgcattttttttccttttytgagacagagtcttgctgtgttgcccaggctggatcacagtgacttgatctcagctcactgcaacctctgcctcccagattcaagcgattcttgtacttc

SEQ ID NO: 234229 - DNA, 201 bp, Homo sapiens
gtattgctctgttgcccagcctggagtgcagtggcacaaatggctcactgcagccacaacctcctgggctcaagcaatcttcctacctcagcctctcattkttccatatctatatctcttatgcccaaaataaactttcccctgccccttgtctgcactaaactataagtttccaaaatgaacccttcccgtactctattt

SEQ ID NO: 234230 - DNA, 201 bp, Homo sapiens
tgtgtgtgtggttgccattttattttcttttgttattgacaaacggtagtcatacgtatctatggggtacatgtgagttttttggtttctttttttttttctctctcgtttttggagacagagtcgctctatcccccaggctgaagggcagtggcataatcttggctcactgaaacccccgcctcccaggttcaagcagtt

SEQ ID NO: 234231 - DNA, 201 bp, Homo sapiens
tgggctcaagcaatcttcctacctcagcctctcattgttccatatctatatctcttatgcccaaaataaactttcccctgccccttgtctgcactaaactrtaagtttccaaaatgaacccttcccgtactctatttggtacacatcttgtctcctgaatagagtgtattttttattttattttattttggagacggagtc

SEQ ID NO: 234232 - DNA, 201 bp, Homo sapiens
ttgtgtgtgtggttgccattttattttcttttgttattgacaaacggtagtcatacgtatctatggggtacatgtgagttttttggtttctttttttttttctctctcgtttttggagacagagtcgctctatcccccaggctgaagggcagtggcataatcttggctcactgaaacccccgcctcccaggttcaagcagt

SEQ ID NO: 234233 - DNA, 201 bp, Homo sapiens
gaaagggtgaggagagaggtaaaactcgatggtctaatttcttcagtgccaggagttattaactccttgggcccagaccagtctccacccaggaatgttastggtccccaaggtaaaggcctctacacccagagattgggccctgaatacacccttcctcctcctcacataccttatttatttatttatttatttatttat

SEQ ID NO: 234234 - DNA, 201 bp, Homo sapiens
aatgaagaaaatatgggtgttctcacctgccccgttcctgtgggcttccacacagcttttggccaaaacaaccacctgagaatcaaaaccacacagacaamtcagttcttgattgcagaggtgttgaattgtgcaatcagagaagcctaacacaattcctgttacctcatttaacgcaattcaagcaacaccaaccagccc

SEQ ID NO: 234235 - DNA, 201 bp, Homo sapiens; identical to SEQ ID NO: 43585

SEQ ID NO: 234236 - DNA, 201 bp, Homo sapiens
ccgccgccccgcccccgccggcgccagcccagactgcccaggcccctggcttcgtggtgcccacgcacgcggggactgtgggcacgctgccgctggggggytacgtagcgcccggataccccctgcagctgcagccttgcactgcttacgtgccggtctacccggtgggcacggtgagtgccgggcagacagggacatggg

SEQ ID NO: 234237 - DNA, 201 bp, Homo sapiens
tgtggctactgttccaggccctgggggaaacacaaagcaaaagagataaagcaactgctctcgtagagctttcattctaaagaaagacagaaaataagtawgttacagaaagaatatatatgtgtgtgtatatatatatatatatatctccaactagatatatagatgcatatatctagttggagaaaatgagcaggtgtt

SEQ ID NO: 234238 - DNA, 201 bp, Homo sapiens
aggtgcagtggtgtgttcctgtaatcccagctactagggaggctgaagtgggaggatcacttgaattggagaccagcctgggcaacagcatagtgagaccmggaagcaaaaaaaaaaaaaatgctgtcactcacatcttattcagtgaaggacttcagaggcaaatgtttctacctgaccctcctttctgccccacaggtc

SEQ ID NO: 234239 - DNA, 201 bp, Homo sapiens
gacctgtgaagtccctgcccagccctctcctcaaatccactggatgaaggatgtgagtgacctggagagaggggctgggaggtagggtgaaccataactakcaacagggagggcagagggctaacgagggaaaggcaggctaggagctgaggaggaagagagggtatctgaagatatggagacaaaaagacaagggttttg

SEQ ID NO: 234240 - DNA, 201 bp, Homo sapiens
ctgtactgctctgtagtctctgctaggacatggacgaaaagggacgcagccgggagagcgactgccccaggtgggggctggggggacgtaagggaagaatwatgattatctggctgtgtttttgtttaaaaaaaaaaaaaaactggtgtaaatctccatagacttcctatcctcgctcccttcacccacccacgcgctccc

SEQ ID NO: 234241 - DNA, 201 bp, Homo sapiens
gtgcaggacagcacaggctctaatttcctgccccattctggccttatccctaacagccaccccacctctccctccatgcacccacacccaagcctcccctrccccacccaaattctgccaagagagcagccaagcctctcccttcttccctctgagctaaaaaaaggaacagacggctgggcgcggtggctcacgcctgta

SEQ ID NO: 234242 - DNA, 201 bp, Homo sapiens
agatcactccactgcactccagcctgggtgacagagcaagattccatctcaaaaaaaaaagaaggaaggaaggaaggaaagaaggaaggaaggagagaagrgaaggaaaggaaggaaaggaggaaatgaggaaagagagaaagatagaaagatggatggtcaggagtctgtctaaatagagtgccagatagtgtgttttag

SEQ ID NO: 234243 - DNA, 201 bp, Homo sapiens
ctgagatcactccactgcactccagcctgggtgacagagcaagattccatctcaaaaaaaaaagaaggaaggaaggaaggaaagaaggaaggaaggagagragggaaggaaaggaaggaaaggaggaaatgaggaaagagagaaagatagaaagatggatggtcaggagtctgtctaaatagagtgccagatagtgtgttt

SEQ ID NO: 234244 - DNA, 201 bp, Homo sapiens
ggggcttggaggaaagagggaatgcctgaatggagaggggtcttggggaaagttggggaatagaagtcaaggcgggaggagtgtgaggactcacaggcacmtagcctctcctccagcagcagcacctggtcgctgagagattcgatccggtcaccccggccccacagctcagccacctgttctggctgcagctcttcaggc

SEQ ID NO: 234245 - DNA, 201 bp, Homo sapiens
gaatacagcaccaggggatccagagctgaaagggagttagagaaaaaaaagatgcagctggagccagagatgggggcaaagaccgagggagagccctgggscggggctcgcaagaggacactggtagatgtggggaggagatgccagagtttctgggagacgattggcaaaacaggctgcccatcaccgccctccacttcc

SEQ ID NO: 234246 - DNA, 201 bp, Homo sapiens
gctcattgcaacctccgcctcctggtttcaagttctcctgcctcagcctcctgagtagctggaactacaggcgtgcgccaccaggcccactaatttttgtrtttttagtagagatggggtttctcaatgttagccagctgttctcgaactcctgacctcaggtgatccacccgcctcggcttcccaaagtgctgggattat

SEQ ID NO: 234247 - DNA, 201 bp, Homo sapiens
atattaatgtaaacatgacaaaatgttaacatttgcgaaatctaggtgaggagtataaatgactgctttttgctattttggtaacttttttttttttttttgagacagggtcttactctgtcacccaggcaggagtgcaatggtgagatctcggctcactgcagccttggcctcctaggctcaagcaattctcgtacctca

SEQ ID NO: 234248 - DNA, 201 bp, Homo sapiens
aggagggtggatcatctgaggtcaggaattcgagaccagcctggccaacacggagaaaccctgtctctactaaaaatacaaaattagctgggcgtggtggrcgcctgtaatcccagctactcaggaggcagaggcaggagaattgcttgattctgggacgcaaaggttgcagtgagccgggatggcgccactgcactccag

SEQ ID NO: 234249 - DNA, 201 bp, Homo sapiens; identical to SEQ ID NO: 43621

SEQ ID NO: 234250 - DNA, 201 bp, Homo sapiens
taataacctggcaaattaagcatcctctcctgggaggaggaatacagaactctgtaaccacccaatacctgtttccaggtcctgcccctcctggggcacasggcagccaccttgcaattctcatccctagaaaggagagaccagatcaacaaacagcagggctgggactgcccagggggttccgagattccttctcccctc

SEQ ID NO: 234251 - DNA, 201 bp, Homo sapiens; identical to SEQ ID NO: 43625

SEQ ID NO: 234252 - DNA, 201 bp, Homo sapiens
ttaagcaggataaagcaagaagtgggcaggcagcttcctgacactgtctttaaactcagcttctgcccaccacacttctggttcccttccacctaaccacytctctgtctccgttgcaatttctcctttttctcaagctccagcctagtgccccagcctccctttccacaaatggtgttagattgtcaacattgcagaaat

SEQ ID NO: 234253 - DNA, 201 bp, Homo sapiens
tcctgacactgtctttaaactcagcttctgcccaccacacttctggttcccttccacctaaccacttctctgtctccgttgcaatttctcctttttctcawgctccagcctagtgccccagcctccctttccacaaatggtgttagattgtcaacattgcagaaatggtgagttcagttctttccaccaaggtcttcgcgg

SEQ ID NO: 234254 - DNA, 201 bp, Homo sapiens
ccagggtcttctccaaggcctccctcttacctaagaaaaagccttcaaccccagccttggcccatgagggcctctgacttccactggcctcatttccacayacagagtttgagaaccttcacaattacagcctctgactggatttttcctccttcagagattcctgggaagccagaaattgtagattctgcctctgaactc

SEQ ID NO: 234255 - DNA, 201 bp, Homo sapiens; identical to SEQ ID NO: 43631

SEQ ID NO: 234256 - DNA, 201 bp, Homo sapiens
aaattagccaggcgtggtggcgggcgcctgcaatcccagctattggggaggctgaggcaagagaatcgcttgaacctgggaagcagtggttgcagtgagcygagatcactccactgcactccagcctgggtgacagagcaagattccatctcaaaaaaaaaagaaggaaggaaggaaggaaagaaggaaggaaggagagaa

SEQ ID NO: 234257 - DNA, 201 bp, Homo sapiens; identical to SEQ ID NO: 43501

SEQ ID NO: 234258 - DNA, 201 bp, Homo sapiens
ggagaatggcgtgaacccgggaggcggagcttgcagtgagctgagatcacgccactgcactccagcctgggtggcagagtaagactccacctcaaaaaaawaaaaaaatacaaaaattagccaggcgtggtggcgggcgcctgcaatcccagctattggggaggctgaggcaagagaatcgcttgaacctgggaagcagtg

SEQ ID NO: 234259 - DNA, 201 bp, Homo sapiens
gagatcagcctggccaacatggtgaaaccttgtctctattaaaaatacaaaaattacaatttgggaggccgaggcgggtggatcatgaggtcaggagatcracactatcctggctaacacggtgaaaccccatctcaactaaaaatacaaaaaaataactgggcgtggtggcgggcgcctatagtcccagctactccagag

SEQ ID NO: 234260 - DNA, 201 bp, Homo sapiens
ggccagagagtcctcccattcctgccccctcccacaagcctcctccttagctccagcagggtcagctcagtagggtcaagtcccactaccctcatccccaycccagcaaagggctccctagaagtatctttccaaccctctgaggcccctatttctggactccccagatcagaagctatgagctctgtaacaccaccagta

SEQ ID NO: 234261 - DNA, 201 bp, Homo sapiens
taaaatatttccaaattaagggtgccatgagccccctttgtgcaccatcctgatgcctgtcctagcccctttaatctccccattgcctagcagctagaagagggtcattgctctgcataccaggggtcctccagacttttgcattctgagcatctgaatggctcccattctgagtggagggagccattatatcacctggga

SEQ ID NO: 234262 - DNA, 201 bp, Homo sapiens
ttaaaatatttccaaattaagggtgccatgagccccctttgtgcaccatcctgatgcctgtcctagcccctttaatctccccattgcctagcagctagaagagggtcattgctctgcataccaggggtcctccagacttttgcattctgagcatctgaatggctcccattctgagtggagggagccattatatcacctggg

SEQ ID NO: 234263 - DNA, 201 bp, Homo sapiens
ccacatgtaggtggtggctactttctcggacagcacaagtatagaccattataagacccttaccagctacaagtgttagctattattcttgttgtcatttrttatcaggtatctgtgaattgtagatgtctgtgtcttgtgtctcttgtctgaatatatccggagcctttgggaagagtggtgggagagcagtcctgagct

SEQ ID NO: 234264 - DNA, 201 bp, Homo sapiens
gttaaaatatttccaaattaagggtgccatgagccccctttgtgcaccatcctgatgcctgtcctagcccctttaatctccccattgcctagcagctagaagagggtcattgctctgcataccaggggtcctccagacttttgcattctgagcatctgaatggctcccattctgagtggagggagccattatatcacctgg

SEQ ID NO: 234265 - DNA, 201 bp, Homo sapiens
ctttttttttttttggaaatggagtctcactccattgcccaggctagagtgcagtggcgtgatcttggctcactgcaacctccgcctcccggattcaagcrattctcctgcctcagcctcccgagtagctgggattaaaggcatgcgccaacaggcccggctaatttttgtatttttagtagagacggggtttcaccatgt

SEQ ID NO: 234266 - DNA, 201 bp, Homo sapiens
gctgtttaggagctgtatgacctcaggtaagttatttagcctccctgggcctatttcctataaaatgtaaatagtaatagtactttctagactatcatatkcatcattttaagagtttaacttaatgtatagaccagtactgttctacagaaatataatgcaagccacaatgtaatttttttatggtagccacatttttac

SEQ ID NO: 234267 - DNA, 201 bp, Homo sapiens
gggtaagggtgcagaggccaagtggagctgtgctcaaaagagaggcggtgctggagggacagggagaggtggcctgggtgttgggaggtgggggtgaggtkggggccgagggcaggggggtcagggtgagggataggaaaggccgcaggggaggagaggatgaagagctgtgctggaggcgctgtgggcagcatcgtcctg

SEQ ID NO: 234268 - DNA, 201 bp, Homo sapiens; identical to SEQ ID NO: 44065

SEQ ID NO: 234269 - DNA, 201 bp, Homo sapiens
agggtaagggtgcagaggccaagtggagctgtgctcaaaagagaggcggtgctggagggacagggagaggtggcctgggtgttgggaggtgggggtgaggkgggggccgagggcaggggggtcagggtgagggataggaaaggccgcaggggaggagaggatgaagagctgtgctggaggcgctgtgggcagcatcgtcct

SEQ ID NO: 234270 - DNA, 201 bp, Homo sapiens
gtgggagcagaggaggcctggggtctcccagggatgaggatgtgattgcccaggtctgtgctgagatggccccagcagctgtgcctgtgtgaagctcatcygtgggggctaaagatggggatggggtggcagggagcctagaggcagggaagccaataggcagttggtggccctggtgagaggtgacagtggctcaaacta

SEQ ID NO: 234271 - DNA, 201 bp, Homo sapiens
cgtgctctgggtcaccaagctggtgtgcttctgtctccaatcccttctcccccacccactccgtgcagggctggctcctgctggtcagacctcagaggagkcaaggccccgcctgtcccagctgtctgtgactgacgtgaccaccagttcactgaggctcaactgggaggccccaccgggggccttcgactccttcctgct

SEQ ID NO: 234272 - DNA, 201 bp, Homo sapiens
tgaagtgtgggagcagaggaggcctggggtctcccagggatgaggatgtgattgcccaggtctgtgctgagatggccccagcagctgtgcctgtgtgaagytcatctgtgggggctaaagatggggatggggtggcagggagcctagaggcagggaagccaataggcagttggtggccctggtgagaggtgacagtggctc

SEQ ID NO: 234273 - DNA, 201 bp, Homo sapiens
aagaaatttcagggaaagaagaattaaaataaacacttgagataagaggagcttttagggcagcagttgtctcctgctctgagtaaataaatacaaaccgrtccttggtgttgtcaagggcgccgctttccagttgaagccctagactttctccctcactcagagccaggatggtggtgccaagttggcctgtgccaggct

SEQ ID NO: 234274 - DNA, 201 bp, Homo sapiens
tgtggatactcaggggacagtcaggatctgaggccaggcaggccttagcttggtgacagctttagagagaaggtgaagcgtgtcagatcagcacaggtggwgcaaaggccaggaggctagaaagagcatggtgtgtgagaagtactgaggattgagtggggtgtcctttgcagtgaatagatagtcctgaagtgtgggagc

SEQ ID NO: 234275 - DNA, 201 bp, Homo sapiens
acctgtggatactcaggggacagtcaggatctgaggccaggcaggccttagcttggtgacagctttagagagaaggtgaagcgtgtcagatcagcacaggwggtgcaaaggccaggaggctagaaagagcatggtgtgtgagaagtactgaggattgagtggggtgtcctttgcagtgaatagatagtcctgaagtgtggg

SEQ ID NO: 234276 - DNA, 201 bp, Homo sapiens
ccgtgttagccaggatggtctcaatctcctgacctcgtgatctgccctcctcggcctcccaaagtgctgggatcataggcgtgagccacggcgcccagccraccatccatttctaacaagattctcatctatcttgatgccactggtccaaggaacacactttttttgttgttttttattgtagtaaagtacacttgacat

SEQ ID NO: 234277 - DNA, 201 bp, Homo sapiens
tccaaatgcctggagatttttgttaaaaagcagatttggattcagcaggcttggcctagggcaagagaccatgcatttctttctttttctttctttctttyttttttttttgagatagagtctcgctttgtcacccaggctggagtacagtggctcaatctcggctcactggaacctccgcctcctgggttcaagtgattc

SEQ ID NO: 234278 - DNA, 201 bp, Homo sapiens
  misc_feature (1)...(201): n = A,T,C or G
tattctaagcttggggcaccagcatccagactgtgggcccttggtgtgtctaagagaatcccagagtcccttggttaaaaggaggcccaccaggcatgccnacccattctattttctgatgcagccccaggaaaggatgaagaaatggccccagcctcgacagaacctcccacccctgaaccccccatcaagcctcgcctg

SEQ ID NO: 234279 - DNA, 201 bp, Homo sapiens
tgcccactctcctcttgcatcctccctctctaacaccactgtctttcttccaggcttctcactgcagcactaatggaagccacctgaccaccacccagtgsgggggatgtatgtggggagggacatggaagtctccgggggctggaggtcatggaagccttgtggggtgaaggatagcaggctttattttacctattacct

SEQ ID NO: 234280 - DNA, 201 bp, Homo sapiens; identical to SEQ ID NO: 44168

SEQ ID NO: 234281 - DNA, 201 bp, Homo sapiens
ccagggtgtgggagtgattagcatggccttagacacaaagtgacaggatttgagggtcggtcagagcccatctcttacccaaggctacactccaggctgasagaagggctggggagacaggaaagggcagctctctgtatgccaggcctctcggcctgggctttcttgggtggggagcctcttggtgtggaaacactctgt

SEQ ID NO: 234282 - DNA, 201 bp, Homo sapiens
ttatgagaaaatacaggtagatacaaggaaatatggtagccttgaatgggctattaggtttctggcttgtaaagctggatgaatggtggggtcctgagctkcaatggggaattctgggaggggatgggatacaggaaggtgaccgtgagttcaggttacaggcatggtgaatttgaggtgcccaagtggagatgccaagta

SEQ ID NO: 234283 - DNA, 201 bp, Homo sapiens
ctccttcactgtgcagtacaaggacagggacgggcggccccaggtggtgcgtgtcaggggcgaggagagcgaggtcaccgtggggggcctggagcccgggygcaaatacaagatgcacctgtacggcctccacgaggggcagcgcgtgggcccagtgtccgctgtgggtgtgacaggtgagtaagtgtgagtgaggcgagg

SEQ ID NO: 234284 - DNA, 201 bp, Homo sapiens; identical to SEQ ID NO: 44015

SEQ ID NO: 234285 - DNA, 201 bp, Homo sapiens; identical to SEQ ID NO: 44016

SEQ ID NO: 234286 - DNA, 201 bp, Homo sapiens
gaaagtgcaacttgaaggggcatccttgatctacttcatttgttctgacaggaccaagcttaggaaaaggctcctcatgcccaggtagtcagagttgccarggcaaagctggagggagagtcctggtgcatgttgggtggaattctggcagatgaacacggggtgcccatgagaggggactctgacagataaatagggggt

SEQ ID NO: 234287 - DNA, 201 bp, Homo sapiens
ggacctcactctccccacacgtgtctgtccagctccagaggatgaagcagagaccacccaagcagtgcccaccacaacccctgagccccccaacaagcctmgcctcggggagctgaccgtgacagatgccacccctgactccctcagcctgtcctggatggtccccgagggccagtttgaccacttcctggtccagtacag

SEQ ID NO: 234288 - DNA, 201 bp, Homo sapiens
acaggaacgatgtctgggcttggggaaagggcaccctgtggctgctgtggggagggtggtggacctcttcttcccccatagggcccagatgccacctgacytggatgtccacccccacaccctctctctcttcccactgcccactctcctcttgcatcctccctctctaacaccactgtctttcttccaggcttctcactg

SEQ ID NO: 234289 - DNA, 201 bp, Homo sapiens
gccgagtggggctgtgctcaaaagagaggcggtgctggagggacagggagaggtggcctgggtgttgggaggtgggggtgaggtgggggctgagggcaggrgggtcagggtgagggataggaaaggccgcaggagaggagaggatgaagagctgtgctggaggcgctgtgggcagcatcgtcctgctcttgggcactttgt

SEQ ID NO: 234290 - DNA, 201 bp, Homo sapiens
ctcgggggagaggtactctgaggctgctggcagctggtgaggggctgggtccaggaacacaccccaagctctggcctcgggaggagtgtgctgagcttgtwgcggagcaaagacagaagcccagtgaacaaaagatggcgaggagacaccagtgcagggaggctaagggtgcagaggccgagtggggctgtgctcaaaaga

SEQ ID NO: 234291 - DNA, 201 bp, Homo sapiens
ggtatccagggaaactcgggggagaggtactctgaggctgctggcagctggtgaggggctgggtccaggaacacaccccaagctctggcctcgggaggagygtgctgagcttgttgcggagcaaagacagaagcccagtgaacaaaagatggcgaggagacaccagtgcagggaggctaagggtgcagaggccgagtgggg

SEQ ID NO: 234292 - DNA, 201 bp, Homo sapiens
gtctcctaccgaggggcctggtggtacaggaactgccactacgccaacctcaacgggctctacgggagcacagtggaccatcaggtgaggggtggggaggyggctcagagctggggtggctggggctcggcctgcctaggtttcagccccacagtgtaacaggcaagggactgagtggctgggtgaaatggaacaatcatg

SEQ ID NO: 234293 - DNA, 201 bp, Homo sapiens
tgagtggggtgtcctttgcagttggtggatcatcctgaagtgtgggagcagaggaggggaccactcaccaggcctggggtctcccagggatgaggatgtgrttgcccaggtctgtgctgagatggccccagcagctgtgcctgtgtgaagttcatccgtgggagctaaagatggggatggggtggcagggagcctggaggc

SEQ ID NO: 234294 - DNA, 201 bp, Homo sapiens
ttgggtggaattctggcagatgaacacggggtgcccatgagaggggactctgacagataaatagggggtgcccatgagaggggactctgggatcacactgmtagggcctaaattcttgccattttcttggtgttggtgacgttggcaagatacttgtccttctgtgtctcagtttccttatctgtaaaatgggactaatag

SEQ ID NO: 234295 - DNA, 201 bp, Homo sapiens
acactgctagggcctaaattcttgccattttcttggtgttggtgacgttggcaagatacttgtccttctgtgtctcagtttccttatctgtaaaatgggamtaataggacctgtttcgtagggttgttgtgagaattaagtgagttcatgtgtgtacctcgcctagaacagtggctcacaaggagttagcgctctcagcat

SEQ ID NO: 234296 - DNA, 201 bp, Homo sapiens
gcaatgctgaggccggtagcatcactggctgtgggccgaggggaggccgtccacacacagtccccaccttgtgctgcctcagctgcatctccacgatgtgrtccctcttctctatggcctgcttcagcctccggagacctggattggggaagaactgcggcaggaagcatgagaatgcagctgtgggaaggagcctctccc

SEQ ID NO: 234297 - DNA, 201 bp, Homo sapiens
gattgagcagcagaggcaagagtgccagcccctgagccacctggtgctctctctcacagacagagggggcgagccccccattcacagcacgggttccaagmtctgcctcagcctatgaccagagaggactggcccctggacaggagtaccaggtcactgtccgagcccttcgagggaccagctggggccttcctgcctcca

SEQ ID NO: 234298 - DNA, 201 bp, Homo sapiens; identical to SEQ ID NO: 44096

SEQ ID NO: 234299 - DNA, 201 bp, Homo sapiens
aaaaaaccacggcccaggagagggtgtttgctgtggtctcagtgccaccgatcaggaggtccactgcagccatgtgcacgtgcccttccaggagctgtccrgagccctcttccatgctcggctgcgccaccccttggagcatgtagtccatcatgtccctccactggcctgccacgaggctctcctgcagagggtgaaagg

SEQ ID NO: 234300 - DNA, 201 bp, Homo sapiens; identical to SEQ ID NO: 44023

SEQ ID NO: 234301 - DNA, 201 bp, Homo sapiens
gtgcagtacaaggacagggacgggcggccccaggtggtgcgtgtcaggggcgaggagagcgaggtcaccgtggggggcctggagcccgggtgcaaatacargatgcacctgtacggcctccacgaggggcagcgcgtgggcccagtgtccgctgtgggtgtgacaggtgagtaagtgtgagtgaggcgaggtggggaagat

SEQ ID NO: 234302 - DNA, 201 bp, Homo sapiens
ggatttggcttccccattctccttggacctaagtctctcccttctctctacccactcttcctagtgcctcagagtgacccaagtccagggactccaccccrcctgggaaacctgtgggtgacagaccctaccccagattcactgcacctctcctggactgtccctgagggccagtttgacaccttcatggtccagtacagg

SEQ ID NO: 234303 - DNA, 201 bp, Homo sapiens
cccggtttagtcacagtgaggggaatctcttttttcctttgctcacagaaacaaagacacacctttctcaaaaataacttttactataaggggaaagattwaaaaattaaaagtagagaaatagatagttttccagaacatggtttctgtaattccaccaagctcagcctcatcatgacttggttgatttcatttccagaa

SEQ ID NO: 234304 - DNA, 201 bp, Homo sapiens
ccacctaggcctttggggaaagagcatcccagacagaaggaagagcaaatgcagagactggcaggcgagaagcagccccagatgtctgcagacagtgaggratgcagtatgttttgtggtggagttggaggagggcaggcaatagggaatgatctaagagatgaatatgggacctcagaggccagtgcaggacttggattt

SEQ ID NO: 234305 - DNA, 201 bp, Homo sapiens
tggtggctcacacctgtaatcccagcactttgggggctgaggcaggtggatcacctgaggtcaggggtttgagaccagcctggccaacatggcaaatgccrtctccactaaaaatacacacacacacaaaattaggcaggcatggtggcgcacgcctgtagtcccagctacttgggaggctaaggcaggaggatcgcttga

SEQ ID NO: 234306 - DNA, 201 bp, Homo sapiens; identical to SEQ ID NO: 44110

SEQ ID NO: 234307 - DNA, 201 bp, Homo sapiens
  misc_feature (1)...(201): n = A,T,C or G
tctccggcctggagccagacaacaagtacaagatgaacctgtacggcttccacggtggccagcgtgtgggccccgtgtctgccatcggggtgacaggtgantggacgatgggagccccagggtgggagccatgggagggtcaccctcttgctctttggtgatgactggtggggaatgggacgggtctggtcagcaccacag

SEQ ID NO: 234308 - DNA, 201 bp, Homo sapiens
tgtcctttacggtgagtatctcatcctgaagtgtgggagcagaggaggggaccactcaccaggcctggggtctcccagggatgaggatgtggttgcccagrtctgtgctgagatggccccagcagctgtgcctgtgtgaagctcatccgtgggggctgaagatggggatggggtggcagggagcctggaggcagcgaggcc

SEQ ID NO: 234309 - DNA, 201 bp, Homo sapiens
agtgtgtcagataatcacagctggtgcaaaggccaggaggctagaaagagcatggcacgtgagaggcactgaggattgagtggggtgtcctttacggtgagtatctcatcctgaagtgtgggagcagaggaggggaccactcaccaggcctggggtctcccagggatgaggatgtggttgcccaggtctgtgctgagatgg

SEQ ID NO: 234310 - DNA, 201 bp, Homo sapiens
aagtgtgtcagataatcacagctggtgcaaaggccaggaggctagaaagagcatggcacgtgagaggcactgaggattgagtggggtgtcctttacggtgagtatctcatcctgaagtgtgggagcagaggaggggaccactcaccaggcctggggtctcccagggatgaggatgtggttgcccaggtctgtgctgagatg

SEQ ID NO: 234311 - DNA, 201 bp, Homo sapiens
gaccgagggattcgccgtgctgcactggaagcccccccagaatcctgtggacacctatgacgtccaggtcacagcccctgggggtgagcaggcctgaggcytctggaggggacttgttcagggtggggattgcaggggggaggctggactctggccgaggatggagggggcaggccttgatgcccctctctacactcccag

SEQ ID NO: 234312 - DNA, 201 bp, Homo sapiens
gaccatcaggtgaggggtggggaggcggctcagagctggggtggctggggctcggcctgcctaggtttcagccccacagtgtaacaggcaagggactgagyggctgggtgaaatggaacaatcatgccagcctcgcagagggagctggagttgatttattggctggaaagggccagctcagaattaagcctcaatcctctg

SEQ ID NO: 234313 - DNA, 201 bp, Homo sapiens
gtcctgaggaagaggatttttgttttttttttttcaattggagatatttgagcaaggatccagttgagagtgaggagttgaataaaaaagagagagaagcsaagcatggtggctcatgcttttaatcccagctacctgggaggctgaggtgggaggatggcttgagcccaggagttcaagtccagcttcaaccagggggtt

SEQ ID NO: 234314 - DNA, 201 bp, Homo sapiens; identical to SEQ ID NO: 44037

SEQ ID NO: 234315 - DNA, 201 bp, Homo sapiens
agtcctgaggaagaggatttttgttttttttttttcaattggagatatttgagcaaggatccagttgagagtgaggagttgaataaaaaagagagagaagccaagcatggtggctcatgcttttaatcccagctacctgggaggctgaggtgggaggatggcttgagcccaggagttcaagtccagcttcaaccagggggt

SEQ ID NO: 234316 - DNA, 201 bp, Homo sapiens
gagggtgtttgctgtggtctcagtgccaccgatcaggaggtccactgcagccatgtgcacgtgcccttccaggagctgtccagagccctcttccatgctcrgctgcgccaccccttggagcatgtagtccatcatgtccctccactggcctgccacgaggctctcctgcagagggtgaaaggagcgggctgagcggctggc

SEQ ID NO: 234317 - DNA, 201 bp, Homo sapiens
cagcggctcgcccaggcacacgcgggcaccgcagccgaaggccagagctctggagttcttgcctggctccaggaagcgatctgcgggcgggtggacaggtrggtggggaggcgttcagcggcagcggggaccagcctccaccacattttcacggcaggcccccggccccccacataccaggccagaactcatgtggcctct

SEQ ID NO: 234318 - DNA, 201 bp, Homo sapiens
tggagatttttgttaaaaagcagatttggattcagcaggcttggcctagggcaagagaccatgcatttctttctttttctttctttcttttttttttttttgagatagagtctcgctttgtcacccaggctggagtacagtggctcaatctcggctcactggaacctccgcctcctgggttcaagtgattctcctacctca

SEQ ID NO: 234319 - DNA, 201 bp, Homo sapiens
ccgagggccagtttgaccatttcttggtccagtttaagaatggggacgggcagcccaaggcggtgcgggtgccgggacacgaggatggggtcaccatctcrggcctggagccagaccacaagtacaagatgaacctgtacggcttccacggtggccagcgcgtgggccccgtgtctgctgttggtttaactggtgagtgtg

SEQ ID NO: 234320 - DNA, 201 bp, Homo sapiens
agtaccttttgaaatttccaatcctacttggctgaatggaggtgtccccatcacagccaacatagctaggcagaacacagcatccttagcggctgtcctakctggacagcacagcaaaatgtggggctgttagaatgctcacagatgtacagttcctcctgtttccccagtggtgggcattccaggagaccctgcctggag

SEQ ID NO: 234321 - DNA, 201 bp, Homo sapiens
acaagatgaacctgtacggcttccacggtggccagcgcatgggccctgtgtctgtcgtcggggtgacaggtgagtggatgatgggagccccagggtgggarccatgggagggtcaccctcttgctctttggtgatgactggtggggaatgggacaagggtctggtcagcaccacagacctgcttgtggctggggctggggc

SEQ ID NO: 234322 - DNA, 201 bp, Homo sapiens
gcaccactgcactccagcctgggcaataagagtgaaactccgtctcaaacaaacaaacaaaacaaaacaaaacaaaacaaaacaaaaaaaccagtgtaggrgaacacaatagaaaagggggtgaggagcagggtaaataaatgatatcagagaggtagagaacagacttgcccagggagggtatcctttagggttgggcgg

SEQ ID NO: 234323 - DNA, 201 bp, Homo sapiens
tgtccatttctgtgggtacagagtatattcaatagctgtctgtcctctggctgctgctgtcatcctagaagcctatctctacctcttaccttccctcttcscagaagcacttctctctcaaagcccaaactctgctattccagatcaagggacatacctagttattggaattatttttcagaatgcagaagaagaaagttt

SEQ ID NO: 234324 - DNA, 201 bp, Homo sapiens
gcctgtgagcggagacctccgagcggtcgccgtctcggggctggacccggcccgcaagtacaagttcctgctctttggactccagaatgggaaacgccacrgcccagtccctgtggaggccaggaccggtgagtgagggctggaggcctcccgcggccagagccttcgcccccttgtggcacctgttggaatttcacgttc

SEQ ID NO: 234325 - DNA, 201 bp, Homo sapiens; identical to SEQ ID NO: 44071

SEQ ID NO: 234326 - DNA, 201 bp, Homo sapiens
ttgtctgtcccacaggagatcctgctcccaggagggatcacatctcaccagctccttggcctctttccctccacctcctacaatgcacggctccaggccaygtggggccagagcctcctgccgcccgtgtccacctctttcaccacgggtacctggacgcacgggcccggggccgggggctgggtgggcagccagggccta

SEQ ID NO: 234327 - DNA, 201 bp, Homo sapiens
aggaggtggaggctgcagggagctgagattgcgccactgcactccagcctgggtgatagagccagactccgtctcaaaaaagaccaaaaaaaaaaaaaaaagaaagaaaagccgcaaagcagatgaggaccaggagagtggggccagttcctgggtctgctgtcccctgctgactctgcctctcttctcgtaatttccact

SEQ ID NO: 234328 - DNA, 201 bp, Homo sapiens
ttggtttaggagagtaccttttgaaatttccaatcctacttggctgaatggaggtgtccccatcacagccaacatagctaggcagaacacagcatccttakcggctgtcctagctggacagcacagcaaaatgtggggctgttagaatgctcacagatgtacagttcctcctgtttccccagtggtgggcattccaggaga

SEQ ID NO: 234329 - DNA, 201 bp, Homo sapiens
atccagtacaaagacagggacgggcagccccaggtggtgcccgtggaaggaccccagcgctcggccgtcatcacctccctggatcctggccgcaagtacaratttgtcctgtatgggtttgttggcaagaagaggcatggtccgctggtggctgaagccaagatctgtgagtgacagcagtaacaccctgccctctgtact

SEQ ID NO: 234330 - DNA, 201 bp, Homo sapiens
gtgaggctgggaggggaggccctcatggctccttcctccaccctgcccaggggactccatgagctaccacagcggcagtgtcttctctgcccgtgatcggraccccaacagcttgctcatctcctgcgctgtctcctaccgaggggcctggtggtacaggaactgccactacgccaacctcaacgggctctacgggagcac

SEQ ID NO: 234331 - DNA, 201 bp, Homo sapiens
ggacagcacagcaaaatgtggggctgttagaatgctcacagatgtacagttcctcctgtttccccagtggtgggcattccaggagaccctgcctggagcakggtccagtagattccctttggaggcaccacacataatcataattccttaaatgtacacttgtaggagtgttgttttctcacaagcatttgctaagcatag

SEQ ID NO: 234332 - DNA, 201 bp, Homo sapiens
tatttttgtgtctccaatgcccagcatgatgccaggtacaaaatcaacaatcaggaaacatatttgtggaactttgagcaggtggttcttgttttgaggakcctacaacccgggtgaagagacaagaaaagtccctcaagggaaaggttgtgatgcgggtcccactcctgttacacagccatgagcaggcatctacgagga

SEQ ID NO: 234333 - DNA, 201 bp, Homo sapiens
ccagcatgatgccaggtacaaaatcaacaatcaggaaacatatttgtggaactttgagcaggtggttcttgttttgaggagcctacaacccgggtgaagakacaagaaaagtccctcaagggaaaggttgtgatgcgggtcccactcctgttacacagccatgagcaggcatctacgaggaggttcagggtgaggcagacc

SEQ ID NO: 234334 - DNA, 201 bp, Homo sapiens
gcgcttttacatcaaaaccatcatgcgggttccacaaatgcaacagacatcgctgggtgtggtggctcacacctgtaatcccagcactttgggggctgagrcaggtggatcacctgaggtcaggggtttgagaccagcctggccaacatggcaaatgccgtctccactaaaaatacacacacacacaaaattaggcaggca

SEQ ID NO: 234335 - DNA, 201 bp, Homo sapiens; identical to SEQ ID NO: 44086

SEQ ID NO: 234336 - DNA, 201 bp, Homo sapiens
agcacgaggacagagtcggggaggtgtagctggacaacagctcatgaggcagaagagctgtgtcacaggtgtcagctgagcacaagccctgtctgaggccrtggtgactggcgacagccgggcagtggagggccttggaagctgaagggtggtcttggcatggactctggtccttggggtgcaggctcttgggtcccagtt

SEQ ID NO: 234337 - DNA, 201 bp, Homo sapiens
caggcggtgcgtgttgggggccaggagagcaaggtcactgtgaggggcctggagcctgggcgcaagtacaagatgcacctgtacggcctccacgaggggcrgcgcctgggcccggtgtctgccgtgggcgtcacaggtgagtgagtgtgggtggggcagggttggaagacagccctagaaaatgtgcccttctctaccatt

SEQ ID NO: 234338 - DNA, 201 bp, Homo sapiens
tgcgtgttgggggccaggagagcaaggtcactgtgaggggcctggagcctgggcgcaagtacaagatgcacctgtacggcctccacgaggggcggcgcctrggcccggtgtctgccgtgggcgtcacaggtgagtgagtgtgggtggggcagggttggaagacagccctagaaaatgtgcccttctctaccattttcctat

SEQ ID NO: 234339 - DNA, 201 bp, Homo sapiens; identical to SEQ ID NO: 44095

SEQ ID NO: 234340 - DNA, 201 bp, Homo sapiens
ggaggtgtagctggacaacagctcatgaggcagaagagctgtgtcacaggtgtcagctgagcacaagccctgtctgaggccgtggtgactggcgacagccrggcagtggagggccttggaagctgaagggtggtcttggcatggactctggtccttggggtgcaggctcttgggtcccagttctgctcggggtggtcctgt

SEQ ID NO: 234341 - DNA, 201 bp, Homo sapiens
gagtgaagggtcagtgctgcaggcgagggagtccatccatgggtcaaagttcccaaagaggaggagaggcctgcagcatagatgagggaggctgtcccacrttaaaacgcttcaaggattgtgctctcctctcttggagaagaagccagctagtagttaggcttggaagcagtggaggttgtactgggaagatttccctgg

SEQ ID NO: 234342 - DNA, 201 bp, Homo sapiens
gagatcagcctctcaccttgcagcccaaggtggagcctgtagatgggcccgaatttctgagtcaggccaagcagatagatggggaggtcgggctgcagcargtgcaagaagcccggggcaagaggcgggaggtggaggctccggagcttccaccagttccacagcaggcgggcgccagccagcaggggcagcagcagcagc

SEQ ID NO: 234343 - DNA, 201 bp, Homo sapiens
gccgcttcgactccttcaccgtgcagtacaaggacagggacgggcagccccaggtggtgcgtgtcaggggcgaggagagcgaggtcaccgtggggggcctrgagcccgggcgcaaatacaagatgcatctgtacggcctccacgaggggcagcgcgtgggcccagtgtccaccgtgggcatcacgggtgagtggggggaca

SEQ ID NO: 234344 - DNA, 201 bp, Homo sapiens
cctatggtgagggccagagcgagatcagcctctcaccttgcagcccaaggtggagcctgtagatgggcccgaatttctgagtcaggccaagcagatagatkgggaggtcgggctgcagcaggtgcaagaagcccggggcaagaggcgggaggtggaggctccggagcttccaccagttccacagcaggcgggcgccagcca

SEQ ID NO: 234345 - DNA, 201 bp, Homo sapiens; identical to SEQ ID NO: 44026

SEQ ID NO: 234346 - DNA, 201 bp, Homo sapiens
gagggcgaattcgactccttcgtggtccagtacaaggataaggatggtcggctccaggtggtgccggtggcagccaaccagcgggaggtcacagtccaggscctggagcccagtaggaaatacaggttcctgctctatggtctgtcaggcaggaaacgactgggccccatctctgctgacagcaccacaggtgagtcccag

SEQ ID NO: 234347 - DNA, 201 bp, Homo sapiens
tgcagggagggcagggcgtccccggagggcagcagcgtgaaggcctgcagcagtcgggtcagcaccacgaagagctccaggcgcgccagcggctcgcccargcacacgcgggcaccgcagccgaaggccagagctctggagttcttgcctggctccaggaagcgatctgcgggcgggtggacaggtgggtggggaggcgtt

SEQ ID NO: 234348 - DNA, 201 bp, Homo sapiens; identical to SEQ ID NO: 44108

SEQ ID NO: 234349 - DNA, 201 bp, Homo sapiens
gtagtcccagctacttgggaggctaaggcaggaggatcgcttgaacccgggaggcagaggctgcagtgagccgaggtcgcccactgctctgggtgacagcragactccatctcaaaaataaaaaataaaaaataaataactagacatcattactataagaaaagggggattctttactaacagccccctaccatctctgtc

SEQ ID NO: 234350 - DNA, 201 bp, Homo sapiens
gcagcccaaggtggtgcgggtgccggggcacgaggacggggtcaccatctcaggcctggagccagaccacaagtacaagatgaacctgtacggcttccacrgtggccagcgcgtgggccccatctctgtcattggggtgacaggtgagtgtacgatgggagccccagagtggggcctgtgggagggtctccctttctctgg

SEQ ID NO: 234351 - DNA, 201 bp, Homo sapiens
ctcagtgccaccgatcaggaggtccactgcagccatgtgcacgtgcccttccaggagctgtccagagccctcttccatgctcggctgcgccaccccttggrgcatgtagtccatcatgtccctccactggcctgccacgaggctctcctgcagagggtgaaaggagcgggctgagcggctggcctggggagaggagtacag

SEQ ID NO: 234352 - DNA, 201 bp, Homo sapiens
gggcagggcgtccccggagggcagcagcgtgaaggcctgcagcagtcgggtcagcaccacgaagagctccaggcgcgccagcggctcgcccaggcacacgygggcaccgcagccgaaggccagagctctggagttcttgcctggctccaggaagcgatctgcgggcgggtggacaggtgggtggggaggcgttcagcggca

SEQ ID NO: 234353 - DNA, 201 bp, Homo sapiens
ccgtaattctcttcccaaaccctcactgtggggacggggtacagatccccacccatcggccccagccccacccgggcaagcctctgctctgccctctgttytcccagctaatcccctgtcttctccctgccccaccctggctgccccggcccagtggggtcagtgtggggctggggaagcaggaggcacggatgttcaggc

SEQ ID NO: 234354 - DNA, 201 bp, Homo sapiens
gctccttcctccaccctgcccaggggactccatgagctaccacagcggcagtgtcttctctgcccgtgatcgggaccccaacagcttgctcatctcctgcrctgtctcctaccgaggggcctggtggtacaggaactgccactacgccaacctcaacgggctctacgggagcacagtggaccatcaggtgaggggtgggga

SEQ ID NO: 234355 - DNA, 201 bp, Homo sapiens
cgaatttctgagtcaggccaagcagatagatggggaggtcgggctgcagcaggtgcaagaagcccggggcaagaggcgggaggtggaggctccggagcttycaccagttccacagcaggcgggcgccagccagcaggggcagcagcagcagcaggcccaggagcagcatggcaagacgcccgtcagggccctgaggtgcca

SEQ ID NO: 234356 - DNA, 201 bp, Homo sapiens
tggtgggcctggaggaatctgcagagcgacttccattcctggggactagaggaaaaggggtggtgagcctgtgctggagcagaggcgagggggggactcgyagggagaagcctccctgcccctgcctgcgtcattgttccttgacccctctgcagttctggagagcccccgtgacctccaattcagtgaaatcagggagac

SEQ ID NO: 234357 - DNA, 201 bp, Homo sapiens; identical to SEQ ID NO: 44041

SEQ ID NO: 234358 - DNA, 201 bp, Homo sapiens
catggagtcacggatgcccagcagcagggctgagcgggtgagcttcttgtgggctttccagagcagggagtagtctcccaaggacaggtccgggtagttcytagacaccagcttgtctgcaggaggagttgggggctggagggtgggaactgatgaaggcagctgagggcctgaccttcttcggcctccccaacccctgct

SEQ ID NO: 234359 - DNA, 201 bp, Homo sapiens
tacagaccacactttgctcatcctttcatccattgatggacatctgggttgcttccacctcttagctatcaagaataatgctgctatgaatatttgtgtgsaaatcacagaacacctttgtagcaaagctcctcccagtaacagatttggaaactctcttagaatttgttgaagcgaatttttcttgcattcatgaatcct

SEQ ID NO: 234360 - DNA, 201 bp, Homo sapiens
acgtccacaatttggatggaccagtggctccaggtttttaacacctcctggatacatttgtaataggcaggcattaagttgtcgtcctgccagaaaaggakggagtactttcagttcaggacaaggagaggctcagggaggggctgggggtgggcctgaggggctgtgaggcaccttgatcttgtctccgaaggtgaggta

SEQ ID NO: 234361 - DNA, 201 bp, Homo sapiens
atacagaccacactttgctcatcctttcatccattgatggacatctgggttgcttccacctcttagctatcaagaataatgctgctatgaatatttgtgtscaaatcacagaacacctttgtagcaaagctcctcccagtaacagatttggaaactctcttagaatttgttgaagcgaatttttcttgcattcatgaatcc

SEQ ID NO: 234362 - DNA, 201 bp, Homo sapiens
tggccagaacttccttccttttcaggctgaataatgtttcgttttacacatacagaccacactttgctcatcctttcatccattgatggacatctgggttscttccacctcttagctatcaagaataatgctgctatgaatatttgtgtgcaaatcacagaacacctttgtagcaaagctcctcccagtaacagatttgga

SEQ ID NO: 234363 - DNA, 201 bp, Homo sapiens
ccaaagcagcgtcagcggagagaggaccctctccgtcacctccgccccctcctatggtgagggccagagcgagatcagcctctcaccttgcagcccaaggwggagcctgtagatgggcccgaatttctgagtcaggccaagcagatagatggggaggtcgggctgcagcaggtgcaagaagcccggggcaagaggcgggag

SEQ ID NO: 234364 - DNA, 201 bp, Homo sapiens; identical to SEQ ID NO: 44226

SEQ ID NO: 234365 - DNA, 201 bp, Homo sapiens
agatagatggggaggtcgggctgcagcaggtgcaagaagcccggggcaagaggcgggaggtggaggctccggagcttccaccagttccacagcaggcgggygccagccagcaggggcagcagcagcagcaggcccaggagcagcatggcaagacgcccgtcagggccctgaggtgccacttatagctcaagagccccagcc

SEQ ID NO: 234366 - DNA, 201 bp, Homo sapiens
ttgcagtggacagcagtccatggtcccatcagccagtttctgctgggggtgaaggctccttggggcagggggctccacagccatcaggacttcagacatgratgaggtttgcaggaccagtgaaagacaggtcctggggtacctggctttcacatcccctctttgttcctctctgtgggaccagggtggctgactcatccc

SEQ ID NO: 234367 - DNA, 201 bp, Homo sapiens
agcctccggagacctggattggggaagaactgcggcaggaagcatgagaatgcagctgtgggaaggagcctctccctccaccccagcctctcccctacaayccaggggtgtctaggctccaggtcctcaccctgagaaagggaatcacgtccacaatttggatggaccagtggctccaggtttttaacacctcctggatac

SEQ ID NO: 234368 - DNA, 201 bp, Homo sapiens
aggacttcagacatggatgaggtttgcaggaccagtgaaagacaggtcctggggtacctggctttcacatcccctctttgttcctctctgtgggaccaggrtggctgactcatcccccagctccaggtcaagctcaccactggaagagagggtggtaagagagacagcagctcaggtgggcagaggagctttcagactgct

SEQ ID NO: 234369 - DNA, 201 bp, Homo sapiens
agggactccgggagtcagatggtggaaccagggtagaggtggttattggtgaggtgagcccctgggccctggaggtgctggggctagcgggaagataggamtaggctgaactggtggccagctgaaccttggaaggaaagtgcttgcggaatcccaaatgtcgggctagagcagctgagcccaggctctgggggctccagg

SEQ ID NO: 234370 - DNA, 201 bp, Homo sapiens
acagacagacttctggagggactgggaggactatgcccatggttttgggaacatctctggagagttctggctgggtcagtgcctcacagggactggggaastacggatggggatgggggccctgtggacaccaggaccctgatgagggcacgtatcccacccccaggcaatgaggccctgcacagcctgacacaggcaggt

SEQ ID NO: 234371 - DNA, 201 bp, Homo sapiens
agacagccaaagcagcgtcagcggagagaggaccctctccgtcacctccgccccctcctatggtgagggccagagcgagatcagcctctcaccttgcagcycaaggtggagcctgtagatgggcccgaatttctgagtcaggccaagcagatagatggggaggtcgggctgcagcaggtgcaagaagcccggggcaagagg

SEQ ID NO: 234372 - DNA, 201 bp, Homo sapiens
ttaagaaagaaaaaatgcccccagcccttacaggtaagtggctcaggtctgccagcaaagtctgcccactttttgaccatggcttcctcaatggtcctctwggagttcagcaccaccacatctgggagacagccaaagcagcgtcagcggagagaggaccctctccgtcacctccgccccctcctatggtgagggccagag

SEQ ID NO: 234373 - DNA, 201 bp, Homo sapiens
tgccagaaaaggagggagtactttcagttcaggacaaggagaggctcagggaggggctgggggtgggcctgaggggctgtgaggcaccttgatcttgtctscgaaggtgaggtaacagatgatgctgcaggtgaggagagagaattcctcctcaatggccacaggggtgccgggctgggctctcatgcgctgtggagaaac

SEQ ID NO: 234374 - DNA, 201 bp, Homo sapiens
atggtggcattgagcaagggcagccgtgcacggtccttgtaggggacccgggagctggaggcaccagggcccagttcgtggtctagctcctcctgcagtcrctgctgaatctggggaatgatcgggtggagtcctgccccagcagcccacagctgcccagcctccagccgctccctcagcaacccagtgagcctgagtgcc

SEQ ID NO: 234375 - DNA, 201 bp, Homo sapiens
gcgatggtggcattgagcaagggcagccgtgcacggtccttgtaggggacccgggagctggaggcaccagggcccagttcgtggtctagctcctcctgcaktcgctgctgaatctggggaatgatcgggtggagtcctgccccagcagcccacagctgcccagcctccagccgctccctcagcaacccagtgagcctgagt

SEQ ID NO: 234376 - DNA, 201 bp, Homo sapiens
ggccagaacttccttccttttcaggctgaataatgtttcgttttacacatacagaccacactttgctcatcctttcatccattgatggacatctgggttgsttccacctcttagctatcaagaataatgctgctatgaatatttgtgtgcaaatcacagaacacctttgtagcaaagctcctcccagtaacagatttggaa

SEQ ID NO: 234377 - DNA, 201 bp, Homo sapiens
tcggcgatggtggcattgagcaagggcagccgtgcacggtccttgtaggggacccgggagctggaggcaccagggcccagttcgtggtctagctcctcctrcagtcgctgctgaatctggggaatgatcgggtggagtcctgccccagcagcccacagctgcccagcctccagccgctccctcagcaacccagtgagcctg

SEQ ID NO: 234378 - DNA, 201 bp, Homo sapiens
gcgggcgggtggacaggtgggtggggaggcgttcagcggcagcggggaccagcctccaccacattttcacggcaggcccccggccccccacataccaggcyagaactcatgtggcctctcccagaccgtctcatccaggtgggcgccttggaggttcggaatgatgactgtgccctcagggatgtcgtagccggagatgct

SEQ ID NO: 234379 - DNA, 201 bp, Homo sapiens
gggaatcacgtccacaatttggatggaccagtggctccaggtttttaacacctcctggatacatttgtaataggcaggcattaagttgtcgtcctgccagraaaggagggagtactttcagttcaggacaaggagaggctcagggaggggctgggggtgggcctgaggggctgtgaggcaccttgatcttgtctccgaagg

SEQ ID NO: 234380 - DNA, 201 bp, Homo sapiens
ccctgagaaagggaatcacgtccacaatttggatggaccagtggctccaggtttttaacacctcctggatacatttgtaataggcaggcattaagttgtcstcctgccagaaaaggagggagtactttcagttcaggacaaggagaggctcagggaggggctgggggtgggcctgaggggctgtgaggcaccttgatcttg

SEQ ID NO: 234381 - DNA, 201 bp, Homo sapiens
taccaggccagaactcatgtggcctctcccagaccgtctcatccaggtgggcgccttggaggttcggaatgatgactgtgccctcagggatgtcgtagccrgagatgctgaagggggctggagttagaggctggccaggacctccctgggctcgggctttcctcactcatccccaaccctcgggagtcacctgctgggccg

SEQ ID NO: 234382 - DNA, 201 bp, Homo sapiens
taattcgccattctaatcgctttctagtttgcagtccagcatgaagtccactcacattgctgtggactgtcaccctccacttccagaactcctcttcccasactgaaacttcctacccactagacacgaactcccattctccccttgccccagcccctggcaacaccattctactctctgtctctatgaatttgactctag

SEQ ID NO: 234383 - DNA, 201 bp, Homo sapiens; identical to SEQ ID NO: 44064

SEQ ID NO: 234384 - DNA, 201 bp, Homo sapiens
tgatcgggaccccaacagcttgctcatctcctgcgctgtctcctaccgaggggcctggtggtacaggaactgccactacgccaacctcaacgggctctacrggagcacagtggaccatcaggtgaggggtggggaggcggctcagagctggggtggctggggctcggcctgcctaggtttcagccccacagtgtaacaggc

SEQ ID NO: 234385 - DNA, 201 bp, Homo sapiens
acacagacaagagaacggttgagtccactatgctttgcttttgcctctcaaactccagacaaggatgaggagaagcctgggaagtcctcaggcccaccacrcctgggtgagctgacggtgacagacaggacctccgactccttgctcctgcgctggacggtccccgagggcgagtttgactccttcgtgatccagtacaaa

SEQ ID NO: 234386 - DNA, 201 bp, Homo sapiens
gcttcagcctccggagacctggattggggaagaactgcggcaggaagcatgagaatgcagctgtgggaaggagcctctccctccaccccagcctctccccyacaacccaggggtgtctaggctccaggtcctcaccctgagaaagggaatcacgtccacaatttggatggaccagtggctccaggtttttaacacctcctg

SEQ ID NO: 234387 - DNA, 201 bp, Homo sapiens; identical to SEQ ID NO: 44001

SEQ ID NO: 234388 - DNA, 201 bp, Homo sapiens
gtctgggcacagagcccagtaacctgtattgcaacaagccctccaggtgattctgatgcccctccagcctgaggccccctaagtgaaggaatgttgctatyttgcaaagtgctagctccactatgaatgtgagagaaagcatggggaaactgagggagatgagttcctgaatgagaaagaggttcagatattccttgtctg

SEQ ID NO: 234389 - DNA, 201 bp, Homo sapiens
ctgcagtggggcaggggctgcagggagggcagggcgtccccggagggcagcagcgtgaaggcctgcagcagtcgggtcagcaccacgaagagctccaggcrcgccagcggctcgcccaggcacacgcgggcaccgcagccgaaggccagagctctggagttcttgcctggctccaggaagcgatctgcgggcgggtggaca

SEQ ID NO: 234390 - DNA, 201 bp, Homo sapiens
cttagcggctgtcctagctggacagcacagcaaaatgtggggctgttagaatgctcacagatgtacagttcctcctgtttccccagtggtgggcattccakgagaccctgcctggagcagggtccagtagattccctttggaggcaccacacataatcataattccttaaatgtacacttgtaggagtgttgttttctcac

SEQ ID NO: 234391 - DNA, 201 bp, Homo sapiens
tgggctgcggatccccttccccagggactgcggggaggagatgcagaacggagccggtgcctccaggaccagcaccatcttcctcaacggcaaccgcgagyggcccctgaacgtgttttgcgacatggagactgatgggggcggctggctggtgggtggcattgggaagcccaggggtctgtgcagggcagggtctgttgc

SEQ ID NO: 234392 - DNA, 201 bp, Homo sapiens
gccttcaagtccctggggacccagcacctcaattcctcaaacttcctttgctcactccagacctagccactaggtgcaggaccagaaactgccttcctgtytctcattgcacccctaaccattttcagctggggcctggaaatcctttctcttaatttttccattcccaggccgattagctccccagaataaggggtatct

SEQ ID NO: 234393 - DNA, 201 bp, Homo sapiens
ctgagcacatcccccaggcacctggcatcctctctatatctccttttctcagctgcagaggaagagacccccagccccacggaactcagcactgaggcccsggagccccctgaggagccgctcctgggggagctgacagtgacaggatcctcccctgactcgctgagcctctcctggaccatcccccagggccacttcgac

SEQ ID NO: 234394 - DNA, 201 bp, Homo sapiens; identical to SEQ ID NO: 44267

SEQ ID NO: 234395 - DNA, 201 bp, Homo sapiens
tgtgtccctttttctcagctgcagaggaagagacccccagccccacagaacccagcatggaggccccggagccccctgaggagccgctcctgggggagctracagtgacaggatcctcccctgactcgctgagcctctcctggaccgtcccccagggccgcttcgactccttcaccgtgcagtacaaggacagggacgggc

SEQ ID NO: 234396 - DNA, 201 bp, Homo sapiens
accacgaagagctccaggcgcgccagcggctcgcccaggcacacgcgggcaccgcagccgaaggccagagctctggagttcttgcctggctccaggaagcratctgcgggcgggtggacaggtgggtggggaggcgttcagcggcagcggggaccagcctccaccacattttcacggcaggcccccggccccccacatacc

SEQ ID NO: 234397 - DNA, 201 bp, Homo sapiens
caggtgggctgcggatccccttccccagggactgcggggaggagatgcagaacggagccggtgcctccaggaccagcaccatcttcctcaacggcaaccgsgagcggcccctgaacgtgttttgcgacatggagactgatgggggcggctggctggtgggtggcattgggaagcccaggggtctgtgcagggcagggtctg

SEQ ID NO: 234398 - DNA, 201 bp, Homo sapiens
ttcctccactagaatcactagaatgttttctttctttctttctttctttctttctttctttctttctttctttctttctttctttctttcttccttccttyctttctttctctttctttctttctttcattcttttcttttctttctttctttttagacaaggtctcactctgtcgcctgggctagagtgtactggcacag

SEQ ID NO: 234399 - DNA, 201 bp, Homo sapiens
ccagctcagaattaagcctcaatcctctgcagcggagggtcaggaagggagctctgcggggaggttggttgagtgctgggagctacctccttaaggggaaygggaagagcagatgggacatccggctttgactctctcttgacaacccctttcccagggagtgagctggtaccactggaagggcttcgagttctcggtgcc

SEQ ID NO: 234400 - DNA, 201 bp, Homo sapiens
ccagggacccacactgggctctgtgaggccctgtgcctggtccctggggtaaggatgggctctgtcaggcactgaccaagtcggtgcagtagagataaatrgagtttgggaatctgacaaactgagttccttcctgtcttcctctgttctcagctgtatgatttttatttttttattttattattatttttttgagacaga

SEQ ID NO: 234401 - DNA, 201 bp, Homo sapiens
ttactaacagccccctaccatctctgtcccagccccacaacaagaagagacccctccagccactgagtccccgctggagccacgcctaggagagctgacartgacagatgtgacccccaactctgtgggcctctcctggacagtccccgagggccagtttgactccttcatagtccagtacaaggacaaggacgggcagcc

SEQ ID NO: 234402 - DNA, 201 bp, Homo sapiens
ttcaaagtctcctaccagctggcggacggaggtggtgcctttgccatgtgctcatcgcctcgcatttcctctcccccctgcactctgcccaccctccagcygccctggggttccctgggtaaccctcgatccccaatgttttcaggggagcctcagagtgtgcaggtggatggccaggcccggacccagaaactccagggg

SEQ ID NO: 234403 - DNA, 201 bp, Homo sapiens; identical to SEQ ID NO: 44012

SEQ ID NO: 234404 - DNA, 201 bp, Homo sapiens
tactttcagttcaggacaaggagaggctcagggaggggctgggggtgggcctgaggggctgtgaggcaccttgatcttgtctccgaaggtgaggtaacagwtgatgctgcaggtgaggagagagaattcctcctcaatggccacaggggtgccgggctgggctctcatgcgctgtggagaaacagtgtgagttcagcaggc

SEQ ID NO: 234405 - DNA, 201 bp, Homo sapiens; identical to SEQ ID NO: 44180

SEQ ID NO: 234406 - DNA, 201 bp, Homo sapiens
gcggtgcgggtgccggggcacgaggacggggtcaccatctcaggcctggagccagaccataaatacaagatgaacctgtacggcttccacggtggccagcrcgtgggccccatctctgtcattggggtgacgggtgagtggatgatggcagccccagggtgggagccgtgggagggtcaccctcttgctctttggtgatga

SEQ ID NO: 234407 - DNA, 201 bp, Homo sapiens; identical to SEQ ID NO: 44021

SEQ ID NO: 234408 - DNA, 201 bp, Homo sapiens
caccaccagtgagagctggggctgtggggaggggtgtcctgagtggagatctggactagagagggaatctgccctccgggagggcagaaggaaggggctgsatgggggctaggctcttggaaggaaagatgatgattgaagaaccagacacccacctgagtcctcctctttaacctggctagtgatcgatgggccccagga

SEQ ID NO: 234409 - DNA, 201 bp, Homo sapiens
ttattttactttccctgagaccaagcctcccaagctcctgggaatggttctgctggtgccttcactccgagactttggtattgccccaggtcttctgcccrttacacatgggctttttgggttcccaaagaggtgggggaccaggaaaataacacagactgaggcacacctggggttgaccatagcttcagcccatttgag

SEQ ID NO: 234410 - DNA, 201 bp, Homo sapiens
aagagcacattccatggtcagatcctcatatgaggggtggggcagccagagtgccctggggagggcacaggtaggaagaggcctcactgccctcctcactstctgaggtcagcactgtcagtgaacgtggtttggaagaaccctcagaggcttcctctcttcccatctcagctcctttctcagacacgaagggagacccct

SEQ ID NO: 234411 - DNA, 201 bp, Homo sapiens
gcctggagcctgggcgcaagtacaagatgcacctgtacggcctccacgaggggcggcgcgtgggcccagtgtctgctgtgggcgtcacgggtgagtgtgcrctgcagagccctctgggttgggtcttagcaaagtacagcctccagcatctcctccactagggacccagaaccccaagacctcaaacctgtaatacaccct

SEQ ID NO: 234412 - DNA, 201 bp, Homo sapiens
agggagtaaacgctgcccagcttgttgtcacggttaaaggtggtgatgtaacatgtctggcatcttctcagctcattcatcttttgctcagaccttcccgygagggaatccctgtatatccatgttctaatgctggatattttgaaacatgtattttacacgtcctggataaaatagatgaggccctttaggaaagaaatg

SEQ ID NO: 234413 - DNA, 201 bp, Homo sapiens
tttctctccccctctccgactgcccacagctgtttccaccccttctctttacaaccctgctgtgacttggacacagctgccacctcctgcttctgcccttktttgttgaggcgaagtgctttacatcctgagtcccttctcaggagtcctctgccacctgcctgcactgcattccatcccagccctggagagttttcatct

SEQ ID NO: 234414 - DNA, 201 bp, Homo sapiens
ggggttcgtacgggagcaataaaggagaaactgaggtacccggctggcatcggtcctgccccatcactggctctggcccgggctgtgggcccccatccccsggggctgcagccgcacttggaaaggctgcatcttgaggatgacactgcagtggggcaggggctgcagggagggcagggcgtccccggagggcagcagcgt

SEQ ID NO: 234415 - DNA, 201 bp, Homo sapiens
gaagtgctttacatcctgagtcccttctcaggagtcctctgccacctgcctgcactgcattccatcccagccctggagagttttcatctctccaggaggcygcctcactcttgctctgggctccttcctgcccctcatggcttcctgggcacaggttctccatgattgttgtgctgtggcatctggtgaaacccctacccc

SEQ ID NO: 234416 - DNA, 201 bp, Homo sapiens
cccatcccccggggctgcagccgcacttggaaaggctgcatcttgaggatgacactgcagtggggcaggggctgcagggagggcagggcgtccccggaggrcagcagcgtgaaggcctgcagcagtcgggtcagcaccacgaagagctccaggcgcgccagcggctcgcccaggcacacgcgggcaccgcagccgaaggcc

SEQ ID NO: 234417 - DNA, 201 bp, Homo sapiens
gtgagcatgtgatagggaggcccagggctcaggtcaggaccagacagggacgcctaagtcaccctgcccatgggtacccaggggacagccaggacctgagkccaggcatgccttagcttggtgacagctttagagagaaggtgaagtgtgtcagataatcacagctggtgcaaaggccaggaggctagaaagagcatggca

SEQ ID NO: 234418 - DNA, 201 bp, Homo sapiens
gcgtccccggagggcagcagcgtgaaggcctgcagcagtcgggtcagcaccacgaagagctccaggcgcgccagcggctcgcccaggcacacgcgggcacygcagccgaaggccagagctctggagttcttgcctggctccaggaagcgatctgcgggcgggtggacaggtgggtggggaggcgttcagcggcagcgggga

SEQ ID NO: 234419 - DNA, 201 bp, Homo sapiens
gctgtgggggccagcactggggagcctgatgtttgcctcatcgttctgctatggcttctggatacagcacatctggattccggggcccagatgtgtggttrccacagcgacctgggtccctctggtaaatacaggcgcccacccgcctcagagcagagaacaaaacaattgtgtgactttcttttgtcacgagatagaaat

SEQ ID NO: 234420 - DNA, 201 bp, Homo sapiens
cgggtctgggacgtgcacagagcctgcagagaggatcctaaaacttgttcttggccagagctctgcactcatgactcacggttcagcagggctgggatggmtgagagatgcctctgggggcacaggggctccgtcttcactctgtgccccttccaggctccccttgcctctgtctgtctgaacccgcactctccctcacct

SEQ ID NO: 234421 - DNA, 201 bp, Homo sapiens
ctcacctgccgttggagcctgcattcatgaattcctcccactgccaccccccactgcccccttctaccttcaggccctacctggccggggctccagggggsccccaggacaaagcacgagtccattgtccctagaagacgtccccaccccagggtcctggcatccatcctgtggatgcctaaggtcaaggcagcgccttct

SEQ ID NO: 234422 - DNA, 201 bp, Homo sapiens
accagggagagaggatggatgggctggatgcgagtggcctttagctctgccccacaggacccccctgtggctgcaagtccctggttacagatagagaaacrggggcagggaggggggtggaagggacgtgctctgggtcaccaagctggtgtgcttctgtctccaatcccttctcccccacccactccgtgcagggctggc

SEQ ID NO: 234423 - DNA, 201 bp, Homo sapiens
acaaggacagggacgggcagccccaggtggtgcgtgtcaggggcgaggagagcgaggtcaccgtggggggcctggagcccgggcgcaaatacaagatgcayctgtacggcctccacgaggggcagcgcgtgggcccagtgtccaccgtgggcatcacgggtgagtggggggacaggccctcgtccccaggtttacctctgc

SEQ ID NO: 234424 - DNA, 201 bp, Homo sapiens; identical to SEQ ID NO: 44247

SEQ ID NO: 234425 - DNA, 201 bp, Homo sapiens
agcggctcgcccaggcacacgcgggcaccgcagccgaaggccagagctctggagttcttgcctggctccaggaagcgatctgcgggcgggtggacaggtgrgtggggaggcgttcagcggcagcggggaccagcctccaccacattttcacggcaggcccccggccccccacataccaggccagaactcatgtggcctctc

SEQ ID NO: 234426 - DNA, 201 bp, Homo sapiens
atgggggccctgtggacaccaggaccctgatgagggcacgtatcccacccccaggcaatgaggccctgcacagcctgacacaggcaggtgactactccatscgcgtggacctgcgggctggggacgaggctgtgttcgcccagtacgactccttccacgtagactcggctgcggagtactaccgcctccacttggagggct

SEQ ID NO: 234427 - DNA, 201 bp, Homo sapiens
ggaacatctctggagagttctggctgggtcagtgcctcacagggactggggaactacggatggggatgggggccctgtggacaccaggaccctgatgaggscacgtatcccacccccaggcaatgaggccctgcacagcctgacacaggcaggtgactactccatgcgcgtggacctgcgggctggggacgaggctgtgtt

SEQ ID NO: 234428 - DNA, 201 bp, Homo sapiens
agagggacaagcattctggaggatatttagtggcatcttattgtggttttaacgtacatttacccgataactagtgattttgtgcatcttttaaaatgctscttggatctgggtgcagtggctcacacctgtaagcccaactactgtggagggtgaggcaggaggattgcttgaggccaggagttcaaggccagcctgggc

SEQ ID NO: 234429 - DNA, 201 bp, Homo sapiens
ccgcgagcggcccctgaacgtgttttgcgacatggagactgatgggggcggctggctggtgggtggcattgggaagcccaggggtctgtgcagggcagggkctgttgccccgggagccagaggctgatggtgcccccacttgcttcccaggtgttccagcgccgcatggatggacagacagacttctggagggactgggag

SEQ ID NO: 234430 - DNA, 201 bp, Homo sapiens
acagcccctgggggtgagcaggcctgaggcctctggaggggacttgttcagggtggggattgcaggggggaggctggactctggccgaggatggagggggsaggccttgatgcccctctctacactcccagccccgcctctgcaggcggagaccccaggcagcgcggtggactaccccctgcatgaccttgtcctccacac

SEQ ID NO: 234431 - DNA, 201 bp, Homo sapiens
ggcatgagccaccacacccagccatggttcaatttttatacagcaaaatgccaaagtcttaagtgtgcagctcaatgagtttttgaatatgtatatatctrtgtaaccacccagattaagatacaaaatatttccagaaatatgactccttccggtcaataatccctacaagtaatctgatcctatcttctaaaagcaaag

SEQ ID NO: 234432 - DNA, 201 bp, Homo sapiens
ctgaacttgaccgagggattcgccgtgctgcactggaagcccccccagaatcctgtggacacctatgacgtccaggtcacagcccctgggggtgagcaggsctgaggcctctggaggggacttgttcagggtggggattgcaggggggaggctggactctggccgaggatggagggggcaggccttgatgcccctctctac

SEQ ID NO: 234433 - DNA, 201 bp, Homo sapiens
ggtgcctccaggaccagcaccatcttcctcaacggcaaccgcgagcggcccctgaacgtgttttgcgacatggagactgatgggggcggctggctggtggrtggcattgggaagcccaggggtctgtgcagggcagggtctgttgccccgggagccagaggctgatggtgcccccacttgcttcccaggtgttccagcgcc

SEQ ID NO: 234434 - DNA, 201 bp, Homo sapiens
agttcctgacggtcccacacagttgcgtgcactgaacttgaccgagggattcgccgtgctgcactggaagcccccccagaatcctgtggacacctatgacrtccaggtcacagcccctgggggtgagcaggcctgaggcctctggaggggacttgttcagggtggggattgcaggggggaggctggactctggccgaggat

SEQ ID NO: 234435 - DNA, 201 bp, Homo sapiens; identical to SEQ ID NO: 44117

SEQ ID NO: 234436 - DNA, 201 bp, Homo sapiens
ccagcgcatgggccctgtgtctgtcgtcggggtgacaggtgagtggatgatgggagccccagggtgggagccatgggagggtcaccctcttgctctttggwgatgactggtggggaatgggacaagggtctggtcagcaccacagacctgcttgtggctggggctggggctccccttgggccttcctgtgaggttgaccac

SEQ ID NO: 234437 - DNA, 201 bp, Homo sapiens
gagagctggggctgtggggaggggtgtcctgagtggagatctggactagagagggaatctgccctccgggagggcagaaggaaggggctggatgggggctrggctcttggaaggaaagatgatgattgaagaaccagacacccacctgagtcctcctctttaacctggctagtgatcgatgggccccaggacctccgagtg

SEQ ID NO: 234438 - DNA, 201 bp, Homo sapiens; identical to SEQ ID NO: 44120

SEQ ID NO: 234439 - DNA, 201 bp, Homo sapiens
ctccccttcccccagttcctgacggtcccacacagttgcgtgcactgaacttgaccgagggattcgccgtgctgcactggaagcccccccagaatcctgtrgacacctatgacgtccaggtcacagcccctgggggtgagcaggcctgaggcctctggaggggacttgttcagggtggggattgcaggggggaggctggac

SEQ ID NO: 234440 - DNA, 201 bp, Homo sapiens
agaacgaggagggtgaaagggaggtggtggaggctccgattgcggacgggaggccagtggagtctggggaggcacggagtagagagagccgcggggacccytctgagcccctccccttcccccagttcctgacggtcccacacagttgcgtgcactgaacttgaccgagggattcgccgtgctgcactggaagccccccca

SEQ ID NO: 234441 - DNA, 201 bp, Homo sapiens
gacctccctgggctcgggctttcctcactcatccccaaccctcgggagtcacctgctgggccgtgtggtgcggtggggcaaggctaagggcacaacgggcbgcaggcgcagcacctcggcgatggtggcattgagcaagggcagccgtgcacggtccttgtaggggacccgggagctggaggcaccagggcccagttcgtg

SEQ ID NO: 234442 - DNA, 201 bp, Homo sapiens
tttgggttcccaaagaggtgggggaccaggaaaataacacagactgaggcacacctggggttgaccatagcttcagcccatttgagctgtgtgtcctcaaragactcacacaacctgtctgggcacggtggctcatgcctgtaatcccagcactttgggaggccgaagggggcagatcacttgaggtcaggagttcgagac

SEQ ID NO: 234443 - DNA, 201 bp, Homo sapiens
acctccctgggctcgggctttcctcactcatccccaaccctcgggagtcacctgctgggccgtgtggtgcggtggggcaaggctaagggcacaacgggccrcaggcgcagcacctcggcgatggtggcattgagcaagggcagccgtgcacggtccttgtaggggacccgggagctggaggcaccagggcccagttcgtgg

SEQ ID NO: 234444 - DNA, 201 bp, Homo sapiens
cctgggctcgggctttcctcactcatccccaaccctcgggagtcacctgctgggccgtgtggtgcggtggggcaaggctaagggcacaacgggccgcaggygcagcacctcggcgatggtggcattgagcaagggcagccgtgcacggtccttgtaggggacccgggagctggaggcaccagggcccagttcgtggtctag

SEQ ID NO: 234445 - DNA, 201 bp, Homo sapiens
tcctgcctcagccttccgagtagctgggattacaggcatgcaccagcacatctggctaatttttgtatttttagtacagacaggatttcgccatgttggcsaggctggtctcaagctcctgacctcaggtgatcctcccgcctcggcctcccaaagtgctgggattacaggcctgagccaccacgcctggccctgattgct

SEQ ID NO: 234446 - DNA, 201 bp, Homo sapiens
gctctgtgaggccctgtgcctggtccctggggtaaggatgggctctgtcaggcactgaccaagtcggtgcagtagagataaatggagtttgggaatctgasaaactgagttccttcctgtcttcctctgttctcagctgtatgatttttatttttttattttattattatttttttgagacagagtcttgctttgtcaccc

SEQ ID NO: 234447 - DNA, 201 bp, Homo sapiens
ctgggctcgggctttcctcactcatccccaaccctcgggagtcacctgctgggccgtgtggtgcggtggggcaaggctaagggcacaacgggccgcaggcrcagcacctcggcgatggtggcattgagcaagggcagccgtgcacggtccttgtaggggacccgggagctggaggcaccagggcccagttcgtggtctagc

SEQ ID NO: 234448 - DNA, 201 bp, Homo sapiens
taaacccttaaactctgtatccccctatattacctttcagccccacaagaggatgtggacgagacccccagccctacagaaccaggcacagaggccccagrgccccccgaggagcctctcctgggggagctgacagtgacaggatcctcccctgactcgctgagcctttcctggaccgtcccccagggccgctttgactcc

SEQ ID NO: 234449 - DNA, 201 bp, Homo sapiens
ccaaagtgctgggattacaggcctgagccaccacgcctggccctgattgctgttttttgtttgtttgtttgtttttgtttgtttgtttttttcttgagaargagtctcgctgtctcccaggatggagtgcagtggcgtgatcttggctcaccgcaagctccgcctcctgggttcatgccattctcctgcctcagcctcctg

SEQ ID NO: 234450 - DNA, 201 bp, Homo sapiens
agtcacctgctgggccgtgtggtgcggtggggcaaggctaagggcacaacgggccgcaggcgcagcacctcggcgatggtggcattgagcaagggcagccrtgcacggtccttgtaggggacccgggagctggaggcaccagggcccagttcgtggtctagctcctcctgcagtcgctgctgaatctggggaatgatcggg

SEQ ID NO: 234451 - DNA, 201 bp, Homo sapiens
aaatggcaaacatttcttttacaatcagggaaagggaaaagagaaaatatataatgtcttctccttctttacactccatctgtcctactcctctatcgctsttgtggcttatttcatttatttccttcttttttttttttgagatgaagtttcgctcttgtcgcccaggctggagtgcaatggcatgatctcggctcacta

SEQ ID NO: 234452 - DNA, 201 bp, Homo sapiens
ccagacaacaagtacaagatgaacctgtacggcttccacggtggccagcgtgtgggccccgtgtctgccatcggggtgacaggtgagtggacgatgggagmcccagggtgggagccatgggagggtcaccctcttgctctttggtgatgactggtggggaatgggacgggtctggtcagcaccacagacctacttgtggct

SEQ ID NO: 234453 - DNA, 201 bp, Homo sapiens
tccccaatccctgcctcagtaaactccacaaacacatacaactgggtaaccgtcatccagatcaagaaacaagacacctttagcaccccagaagccccccsccccatgcccctactagtcactaccccctcaagagtatcacacttctgacttggagcactacagattaatgttgcctctcctcaaacttcacataaatag

SEQ ID NO: 234454 - DNA, 201 bp, Homo sapiens
cctgctgggccgtgtggtgcggtggggcaaggctaagggcacaacgggccgcaggcgcagcacctcggcgatggtggcattgagcaagggcagccgtgcayggtccttgtaggggacccgggagctggaggcaccagggcccagttcgtggtctagctcctcctgcagtcgctgctgaatctggggaatgatcgggtggag

SEQ ID NO: 234455 - DNA, 201 bp, Homo sapiens
tggtgcgtgttgggggcgaggagagcgaggtcaccgtggggggcctggagcctgggcgcaaatacaagatgcacctgtacggcctccacgaggggcggcgygtgggcccggtgtccaccgtgggcgtgactggtgagtagtgcttggagtctcggggtaaccacctttccctcatgggtacctggtttactgctgtgccct

SEQ ID NO: 234456 - DNA, 201 bp, Homo sapiens
ctgggattacaggtgcatgccaccacgcctggctaatttttgtattttcagtagagaccgggtttcatgatattggccaagctagactcgaattcccaacytcaggtgatccacccgcctcggcctcccaaaatgctaggattacaggcgtgaaccactgctcccagcccagaatttcttttttagcccacgtttttctag

SEQ ID NO: 234457 - DNA, 201 bp, Homo sapiens
tttcttttttagcccacgtttttctagtgaaaataatacagcaacattatgtggaaagcttgaaaaacagaaaacaagaatctcatagtcctactttctcycccagctgccggcattaataacaatgtgtgtagtgcacattcccttcctgtattttgcatgcagagcgtgttttaaagttgcaatcagtgttcataaagt

SEQ ID NO: 234458 - DNA, 201 bp, Homo sapiens
ggagccgtgggagggtcaccctcttgctctttggtgatgactggtggggaatgggccaggggtccggtcagcaccacagacctgcttgtggctggggctcyccttgggccttcctctgaggctgacccctggctcctcctgagcagggaggggccatcaggagttctgctgtgctggtgactgtcccaggtcccccacagc

SEQ ID NO: 234459 - DNA, 201 bp, Homo sapiens
ccactggctccatggagtcacggatgcccagcagcagggctgagcgggtgagcttcttgtgggctttccagagcagggagtagtctcccaaggacaggtcsgggtagttcctagacaccagcttgtctgcaggaggagttgggggctggagggtgggaactgatgaaggcagctgagggcctgaccttcttcggcctcccc

SEQ ID NO: 234460 - DNA, 201 bp, Homo sapiens
aggaactgggcttgtgtttggtgttttaggaaagcatttaaggaagcaaggttttgctctttattagacgctgtcaggaagaagggataaccctattaccrggcgtctcactaagtcttatctttggggaggtcaactagagcaaggccaaagctgccattggtaaagaagcagctatcactcagattagctggatgggtg

SEQ ID NO: 234461 - DNA, 201 bp, Homo sapiens
accttgcagcccaaggtggagcctgtagatgggcccgaatttctgagtcaggccaagcagatagatggggaggtcgggctgcagcaggtgcaagaagcccrgggcaagaggcgggaggtggaggctccggagcttccaccagttccacagcaggcgggcgccagccagcaggggcagcagcagcagcaggcccaggagcag

SEQ ID NO: 234462 - DNA, 201 bp, Homo sapiens
gctccaccactggctccatggagtcacggatgcccagcagcagggctgagcgggtgagcttcttgtgggctttccagagcagggagtagtctcccaaggamaggtccgggtagttcctagacaccagcttgtctgcaggaggagttgggggctggagggtgggaactgatgaaggcagctgagggcctgaccttcttcggc

SEQ ID NO: 234463 - DNA, 201 bp, Homo sapiens
ttgggggcaaggagagtgaggtcaccgtgggaggcctagagcccgggcacaagtacaagatgcacctgtacggcctccacgaggggcagcgcgtgggcccrgtgtccgccgtgggcgtgacaggtgagtgaggggcaggggcctgctttggttccctcccactgctggctcccagcttccctgtagccagttgctctcctt

SEQ ID NO: 234464 - DNA, 201 bp, Homo sapiens
ggctgtgggccgaggggaggccgtccacacacagtccccaccttgtgctgcctcagctgcatctccacgatgtgatccctcttctctatggcctgcttcarcctccggagacctggattggggaagaactgcggcaggaagcatgagaatgcagctgtgggaaggagcctctccctccaccccagcctctcccctacaacc

SEQ ID NO: 234465 - DNA, 201 bp, Homo sapiens
gagttgagagagaacgaggagggtgaaagggaggtggtggaggctccgattgcggacgggaggccagtggagtctggggaggcacggagtagagagagccrcggggacccttctgagcccctccccttcccccagttcctgacggtcccacacagttgcgtgcactgaacttgaccgagggattcgccgtgctgcactgga

SEQ ID NO: 234466 - DNA, 201 bp, Homo sapiens
gatggactgggacccggggcaagaggtgggagccaagaaaacggcatgggtgggagttgagagagaacgaggagggtgaaagggaggtggtggaggctccrattgcggacgggaggccagtggagtctggggaggcacggagtagagagagccgcggggacccttctgagcccctccccttcccccagttcctgacggtcc

SEQ ID NO: 234467 - DNA, 201 bp, Homo sapiens
gtctcggtccgaggctttgaggagagtgagcctctcacaggcttcctcaccacgggtgagatggactgggacccggggcaagaggtgggagccaagaaaayggcatgggtgggagttgagagagaacgaggagggtgaaagggaggtggtggaggctccgattgcggacgggaggccagtggagtctggggaggcacggag

SEQ ID NO: 234468 - DNA, 201 bp, Homo sapiens
gtgaccgtggtctcggtccgaggctttgaggagagtgagcctctcacaggcttcctcaccacgggtgagatggactgggacccggggcaagaggtgggagycaagaaaacggcatgggtgggagttgagagagaacgaggagggtgaaagggaggtggtggaggctccgattgcggacgggaggccagtggagtctgggga

SEQ ID NO: 234469 - DNA, 201 bp, Homo sapiens
ccctgcactctgcccaccctccagccgccctggggttccctgggtaaccctcgatccccaatgttttcaggggagcctcagagtgtgcaggtggatggccrggcccggacccagaaactccaggggctgatcccaggcgctcgctatgaggtgaccgtggtctcggtccgaggctttgaggagagtgagcctctcacaggc

SEQ ID NO: 234470 - DNA, 201 bp, Homo sapiens
ctcccccctgcactctgcccaccctccagccgccctggggttccctgggtaaccctcgatccccaatgttttcaggggagcctcagagtgtgcaggtggayggccaggcccggacccagaaactccaggggctgatcccaggcgctcgctatgaggtgaccgtggtctcggtccgaggctttgaggagagtgagcctctca

SEQ ID NO: 234471 - DNA, 201 bp, Homo sapiens
ccggggctgggggttgagatgagggtatggtgagacagtgatgctagacagggagtgggggctggggtgggggcaggagaagaggaggggtggcatgtggkagggcctgggaggggtgggaggacctgccctatctccgctcccctccctgacctcatcctggtcctccccttctcctcccctgctcgctgcagactccct

SEQ ID NO: 234472 - DNA, 201 bp, Homo sapiens
gccatcggggtgacaggtgagtggacgatgggagccccagggtgggagccatgggagggtcaccctcttgctctttggtgatgactggtggggaatgggaygggtctggtcagcaccacagacctacttgtggctggggctggggctcccattgtacctttttgtgtggttgacccctggctccccctgagcagggagggg

SEQ ID NO: 234473 - DNA, 201 bp, Homo sapiens
gcctttgccatgtgctcatcgcctcgcatttcctctcccccctgcactctgcccaccctccagccgccctggggttccctgggtaaccctcgatccccaaygttttcaggggagcctcagagtgtgcaggtggatggccaggcccggacccagaaactccaggggctgatcccaggcgctcgctatgaggtgaccgtggtc

SEQ ID NO: 234474 - DNA, 201 bp, Homo sapiens
cctggaggaatctgcagagcgacttccattcctggggactagaggaaaaggggtggtgagcctgtgctggagcagaggcgagggggggactcgcagggagragcctccctgcccctgcctgcgtcattgttccttgacccctctgcagttctggagagcccccgtgacctccaattcagtgaaatcagggagacctcagcc

SEQ ID NO: 234475 - DNA, 201 bp, Homo sapiens; identical to SEQ ID NO: 44056

SEQ ID NO: 234476 - DNA, 201 bp, Homo sapiens
ctggaggaagttccaggtgatcattggttgagtccagatggctgggtacctgaagctgctgtaaaggctttcttagcctgcttgacactgggcactgaggyctctgcagcatctccagcaagcattggtcccacacagttggaacacctggtaacagagagctcagtacttcctgaggctgtccagtccattgttggtcat

SEQ ID NO: 234477 - DNA, 201 bp, Homo sapiens; identical to SEQ ID NO: 44262

SEQ ID NO: 234478 - DNA, 201 bp, Homo sapiens
tgggaaggagccttttgcttgtccccaggacgcacctcagggtggtgaagcaaaaaaaccacggcccaggagagggtgtttgctgtggtctcagtgccachgatcaggaggtccactgcagccatgtgcacgtgcccttccaggagctgtccagagccctcttccatgctcggctgcgccaccccttggagcatgtagtcc

SEQ ID NO: 234479 - DNA, 201 bp, Homo sapiens
tcatccactaattcattcaacattgatgtgtcagatagaacatttatgtgccagacacaagtatacagcagtcctgggatagatgaggtccttgttctcawggagctcccattgtagcattgagagaaaggtaataagtaaactgataactcaggcagcagtaaatgccatgaagaacaggaacaggatattgtgatagag

SEQ ID NO: 234480 - DNA, 201 bp, Homo sapiens
acgcacctcagggtggtgaagcaaaaaaaccacggcccaggagagggtgtttgctgtggtctcagtgccaccgatcaggaggtccactgcagccatgtgcmcgtgcccttccaggagctgtccagagccctcttccatgctcggctgcgccaccccttggagcatgtagtccatcatgtccctccactggcctgccacgag

SEQ ID NO: 234481 - DNA, 201 bp, Homo sapiens
agcggctgtcctagctggacagcacagcaaaatgtggggctgttagaatgctcacagatgtacagttcctcctgtttccccagtggtgggcattccaggakaccctgcctggagcagggtccagtagattccctttggaggcaccacacataatcataattccttaaatgtacacttgtaggagtgttgttttctcacaag

SEQ ID NO: 234482 - DNA, 201 bp, Homo sapiens
gtctcagtgccaccgatcaggaggtccactgcagccatgtgcacgtgcccttccaggagctgtccagagccctcttccatgctcggctgcgccaccccttrgagcatgtagtccatcatgtccctccactggcctgccacgaggctctcctgcagagggtgaaaggagcgggctgagcggctggcctggggagaggagtac

SEQ ID NO: 234483 - DNA, 201 bp, Homo sapiens
gcccaccaggcatgcccacccattctattttctgatgcagccccaggaaaggatgaagaaatggccccagcctcgacagaacctcccacccctgaaccccmcatcaagcctcgcctggaggagctgaccgtgacagatgcgacccctgactccctcagcctgtcctggacggttcccgagggacagtttgaccacttcctg

SEQ ID NO: 234484 - DNA, 201 bp, Homo sapiens
gaacccgcctcatagcaatgctgaggccggtagcatcactggctgtgggccgaggggaggccgtccacacacagtccccaccttgtgctgcctcagctgcwtctccacgatgtgatccctcttctctatggcctgcttcagcctccggagacctggattggggaagaactgcggcaggaagcatgagaatgcagctgtggg

SEQ ID NO: 234485 - DNA, 201 bp, Homo sapiens
acagggacgggcggccccaggtggtgcgtgttgggggcgaggagagcgaggtcaccgtggggggcctggagcctgggcgcaaatacaagatgcacctgtayggcctccacgaggggcggcgcgtgggcccggtgtccaccgtgggcgtgactggtgagtagtgcttggagtctcggggtaaccacctttccctcatgggta

SEQ ID NO: 234486 - DNA, 201 bp, Homo sapiens
gggggcagatcacttgaggtcaggagttcgagaccagcctggccaacatcatgaaacccccatctctactaaaaatacaaaaattagctgggtgtggtggyacatgcctgtagtcccagctactcgggaggctaaggcgggagaatcgcttgaacccaggaggcggaggttgcagtgagccgagatcgagccactgcactc

SEQ ID NO: 234487 - DNA, 201 bp, Homo sapiens
gcctcatagcaatgctgaggccggtagcatcactggctgtgggccgaggggaggccgtccacacacagtccccaccttgtgctgcctcagctgcatctccwcgatgtgatccctcttctctatggcctgcttcagcctccggagacctggattggggaagaactgcggcaggaagcatgagaatgcagctgtgggaaggag

SEQ ID NO: 234488 - DNA, 201 bp, Homo sapiens
agatgaacctgtacggcttccacggtggccagcgcgtgggccccatctctgtcattggggtgacaggtgagtgtacgatgggagccccagagtggggcctrtgggagggtctccctttctctggtgatgggtgaactggcccaggaagcccctctgctcttggctgagccatggtacttttttgtctttccccacttccct

SEQ ID NO: 234489 - DNA, 201 bp, Homo sapiens
gcttgtcatgtgtgttgactgtaaactgagcaagaccacccagctccaaagatgggcctctccaagctgaccccaggacccccactcatggccacagcttygctctccttcctcacaagacccaaggacatcccccagggaagctgcctcaccttctctgtcccctcttctcagctgcagaggaagaaactcccgccccca

SEQ ID NO: 234490 - DNA, 201 bp, Homo sapiens
cctgcctgagctccccggcatcatccccctcaacattctcacaggcagcccacgctccttcaccaggcccagtgggagccttagttctcccgggccagccrgtgcagaataagaaagggaacggagaagggtgagaactacctgtgtcgtaacatcctgcctccctgacctgccgagtgcccccatcagggatcctgcgct

SEQ ID NO: 234491 - DNA, 201 bp, Homo sapiens
gaggggaggccctcatggctccttcctccaccctgcccaggggactccatgagctaccacagcggcagtgtcttctctgcccgtgatcgggaccccaacarcttgctcatctcctgcgctgtctcctaccgaggggcctggtggtacaggaactgccactacgccaacctcaacgggctctacgggagcacagtggaccat

SEQ ID NO: 234492 - DNA, 201 bp, Homo sapiens
attgtagtaaagtacacttgacataattcgccattctaatcgctttctagtttgcagtccagcatgaagtccactcacattgctgtggactgtcaccctcyacttccagaactcctcttcccacactgaaacttcctacccactagacacgaactcccattctccccttgccccagcccctggcaacaccattctactctc

SEQ ID NO: 234493 - DNA, 201 bp, Homo sapiens
ccaggctggagtgcaatggcgcgatctcggctcactgcaacctccgcttcccaagttcaagcaattctcctgcctcagcctcccgagtaactgggattacrggcacgtgccaccacacccagctaattttttgtatttttagtagaaacagggtttcgccatgttggccaggctggcctcaaactcctgacctcaggtgat

SEQ ID NO: 234494 - DNA, 201 bp, Homo sapiens
gtacctggacgcacgggcccggggccgggggctgggtgggcagccagggcctaaggcttggaaaaggactggcccctgctctcctctcccaggtgggctgyggatccccttccccagggactgcggggaggagatgcagaacggagccggtgcctccaggaccagcaccatcttcctcaacggcaaccgcgagcggcccct

SEQ ID NO: 234495 - DNA, 201 bp, Homo sapiens
gatggggtggcagggagcctagaggcagggaagccaataggcagttggtggccctggtgagaggtgacagtggctcaaactaggatcggggactggaggtkggggaggaaggtatccagggaaactcgggggagaggtaactctgaggctgctggcagctggtgaggggctgggtccaggaacacaccccaggctctggcc

SEQ ID NO: 234496 - DNA, 201 bp, Homo sapiens
tttctctttctttctgtctctctctctctctttctttctttttttcctttctttctgttttttgagctctgttgcccaggctggaatgcagtggtgcaatyttggctcactgcaacctttgcctcccaggttcaagtgattctcctgcctcagcctcccgagtagctgggattacaggcatgcaccaccacacctggctaa

SEQ ID NO: 234497 - DNA, 201 bp, Homo sapiens
ccccacagtgtaacaggcaagggactgagtggctgggtgaaatggaacaatcatgccagcctcgcagagggagctggagttgatttattggctggaaaggrccagctcagaattaagcctcaatcctctgcagcggagggtcaggaagggagctctgcggggaggttggttgagtgctgggagctacctccttaaggggaa

SEQ ID NO: 234498 - DNA, 201 bp, Homo sapiens
ttcccatctcagctcctttctcagacacgaagggagacccctcacccccacagaacccaccagagcaggatggggcaagggctgtctcagccttctccatscgtgagtgaccgaatggcaaatacaaaggctacagagcccctgagcccacagcgtaagggcatttccatggctgtcatctgtgggcagcagcagcaaagc

SEQ ID NO: 234499 - DNA, 201 bp, Homo sapiens
ggcggccccaggtggtgcgtgtcaggggcgaggagagcgaggtcaccgtggggggcctggagcccgggtgcaaatacaagatgcacctgtacggcctccaygaggggcagcgcgtgggcccagtgtccgctgtgggtgtgacaggtgagtaagtgtgagtgaggcgaggtggggaagatggccctggaagacactgctgtc

SEQ ID NO: 234500 - DNA, 201 bp, Homo sapiens
gcctctttccctccacctcctacaatgcacggctccaggccatgtggggccagagcctcctgccgcccgtgtccacctctttcaccacgggtacctggacrcacgggcccggggccgggggctgggtgggcagccagggcctaaggcttggaaaaggactggcccctgctctcctctcccaggtgggctgcggatcccctt

SEQ ID NO: 234501 - DNA, 201 bp, Homo sapiens
gcacgtgcccttccaggagctgtccagagccctcttccatgctcggctgcgccaccccttggagcatgtagtccatcatgtccctccactggcctgccacsaggctctcctgcagagggtgaaaggagcgggctgagcggctggcctggggagaggagtacagagtggcaacaggcccataactggggtatgcaaaagaac

SEQ ID NO: 234502 - DNA, 201 bp, Homo sapiens
ggagagggtgtttgctgtggtctcagtgccaccgatcaggaggtccactgcagccatgtgcacgtgcccttccaggagctgtccagagccctcttccatgstcggctgcgccaccccttggagcatgtagtccatcatgtccctccactggcctgccacgaggctctcctgcagagggtgaaaggagcgggctgagcggct

SEQ ID NO: 234503 - DNA, 201 bp, Homo sapiens
cgcacctcagggtggtgaagcaaaaaaaccacggcccaggagagggtgtttgctgtggtctcagtgccaccgatcaggaggtccactgcagccatgtgcavgtgcccttccaggagctgtccagagccctcttccatgctcggctgcgccaccccttggagcatgtagtccatcatgtccctccactggcctgccacgagg

SEQ ID NO: 234504 - DNA, 201 bp, Homo sapiens
acaggccgggggctcggggatacctcaccggctcttattccaagagtcactgaacggcgaacacaaagctgccccagccctcagcctgctctggaggggcrcatttgatgtatgacctctgttgacagcaccagcaaagcaagttgcccttaaacccttaaactctgtatccccctatattacctttcagccccacaagag

SEQ ID NO: 234505 - DNA, 201 bp, Homo sapiens; identical to SEQ ID NO: 44252

SEQ ID NO: 234506 - DNA, 201 bp, Homo sapiens; identical to SEQ ID NO: 44253

SEQ ID NO: 234507 - DNA, 201 bp, Homo sapiens
gctatagcaagccagcttgtgtgggtttccttgtgcatttgggctgaagacaaagatgactgcaggagtgggcaggccggagtggggcgccctggcctgtscccaggaaggaggaggagtctgcagccctgtgggcttcaacatccatcaaggagtccagagcaggagccaggccaggcgggagggaaaggccctgggagg

SEQ ID NO: 234508 - DNA, 201 bp, Homo sapiens
cagggtaaacaaaggccctctctgcacccccagccacccatccctcgggagatgatctgtaatgaatttggcgcatcctcgatcacagcagggaaggggcrgggcaggaaggagtttgggcagcagcctccagaggaggagggggctgttctccctcattcctgtggggcatggcgggagcaggcctgtgtgtctcctcaa

SEQ ID NO: 234509 - DNA, 201 bp, Homo sapiens
cgtgcattggccggctgcccagaccagctctcgatgtttggggtgtctccgtgacaacccagagacctccggggagtctctctcagctctggcctcattcytgctcaggggctgggggtcagggtaaacaaaggccctctctgcacccccagccacccatccctcgggagatgatctgtaatgaatttggcgcatcctcga

SEQ ID NO: 234510 - DNA, 201 bp, Homo sapiens
cctttgactccttcctggtacagtacagggacgcgcaggggcagccccaggcagtgcctgtgagcggagacctccgagcggtcgccgtctcggggctggamccggcccgcaagtacaagttcctgctctttggactccagaatgggaaacgccacggcccagtccctgtggaggccaggaccggtgagtgagggctggagg

SEQ ID NO: 234511 - DNA, 201 bp, Homo sapiens
ccctttgactccttcctggtacagtacagggacgcgcaggggcagccccaggcagtgcctgtgagcggagacctccgagcggtcgccgtctcggggctggwcccggcccgcaagtacaagttcctgctctttggactccagaatgggaaacgccacggcccagtccctgtggaggccaggaccggtgagtgagggctggag

SEQ ID NO: 234512 - DNA, 201 bp, Homo sapiens
gaatgcagctgtgggaaggagcctctccctccaccccagcctctcccctacaacccaggggtgtctaggctccaggtcctcaccctgagaaagggaatcabgtccacaatttggatggaccagtggctccaggtttttaacacctcctggatacatttgtaataggcaggcattaagttgtcgtcctgccagaaaaggagg

SEQ ID NO: 234513 - DNA, 201 bp, Homo sapiens; identical to SEQ ID NO: 44004

SEQ ID NO: 234514 - DNA, 201 bp, Homo sapiens
gaggaaggatataggctgagaggaaaccactggggtcagagaggaggggcagcaggtggagaaatggtggggaaaaaagaaatggcaggaagggtgggggrtgtcaagttgggcaaaaattagggtgagctaaaaatggcatagggaaaggacgtgggaggtaagaccggggctgggggttgagatgagggtatggtgaga

SEQ ID NO: 234515 - DNA, 201 bp, Homo sapiens
ggtggttcacgcttgtaatcccagcactttgggaggccaaggcaggtggatcacttgaggtaaagagttcaagaccagcctgaccaacatggtgaaacccygtctctactaaaaataataataataataataaattttaaaaagtacaaaaaagcggagcgtggtggcacgtgcctgtagtcccagctacttggcgggggt

SEQ ID NO: 234516 - DNA, 201 bp, Homo sapiens
ccacccacttcctccactagaatcactagaatgttttctttctttctttctttctttctttctttctttctttctttctttctttctttctttctttcttycttcctttctttctttctctttctttctttctttcattcttttcttttctttctttctttttagacaaggtctcactctgtcgcctgggctagagtgtac

SEQ ID NO: 234517 - DNA, 201 bp, Homo sapiens
ggctagcgggaagataggactaggctgaactggtggccagctgaaccttggaaggaaagtgcttgcggaatcccaaatgtcgggctagagcagctgagccyaggctctgggggctccaggctccaggaggtgccagagggtgcttctttgggcatccaaatggggactccctaggtggcagcgtgagagttgcagggaggg

SEQ ID NO: 234518 - DNA, 201 bp, Homo sapiens
ttccctttttagtctcactcctagaatccttctaccttcacctctcattgccagattcaactgagggtgtagcaggagggtcagagggaggcatgggggcrggaccagaacccccatctgtggaacatcttttatggaagccagcccctctccccaccccttgggacctatacagtccctaatgagcaaagtgtcaaagtt

SEQ ID NO: 234519 - DNA, 201 bp, Homo sapiens
agtgggtggatcatctgaggtcaggagtttgagaacagcctgaccaacatagtgaaaccccatctctactaaaaatacaaaattagctgagcatggtggtrtatgcctgtaatcccagctacttgggaggctaaggaagaatcccttgaatcttggaggcggaggttgtagtgagctgagatcgtgccattgcactccagc

SEQ ID NO: 234520 - DNA, 201 bp, Homo sapiens
ggccctattctgtttcatctgtctatccttgcacctttaaaataagtcttgatatttgatcatgtaagtcctgaggaagaggatttttgttttttttttttcaattggagatatttgagcaaggatccagttgagagtgaggagttgaataaaaaagagagagaagccaagcatggtggctcatgcttttaatcccagcta

SEQ ID NO: 234521 - DNA, 201 bp, Homo sapiens
ttgttcctctcacaccatccaggttctttcactcacagagctgccctcggagccaacaagaaatcagccttcttaggcatcacccaatgactaggtgtggrggaaacctgaaggggagattgggtgtgtgtgcacgtgtgtgcatgggcacccatatgtgtacctacaaggatgcaggttttgggggtggatttgtgtgtc

SEQ ID NO: 234522 - DNA, 201 bp, Homo sapiens
atggcgggctgagacctgaaggatgagaaggccaagagagaagggaacagtgttccacacggatggaacagagtatacaaagatctggggttggggatggrcacagagagtatgagggacttgaaggtcagtggagctggaatggagggagggagggaaatgttatgggtggtgaagtgggagcaggggatacatgatggt

SEQ ID NO: 234523 - DNA, 201 bp, Homo sapiens
gttgtggtgagctgagatcgcaccactgcactccagcctgggcaataagagtgaaactccgtctcaaacaaacaaacaaaacaaaacaaaacaaaacaaaacaaaaaaaccagtgtaggggaacacaatagaaaagggggtgaggagcagggtaaataaatgatatcagagaggtagagaacagacttgcccagggagggt

SEQ ID NO: 234524 - DNA, 201 bp, Homo sapiens
gaggcatgcataggctataaggaaatgtaaacatcaaatacaaataaattttgacaactgtggccatgaagtagaggagagaaatatgtggtggctggagsgggtgtgagattggggataggttttttaaggtttcatttttttttttttttgagatggagtctcgctctgttgcccaggctggagtgcagtggcacaatc

SEQ ID NO: 234525 - DNA, 201 bp, Homo sapiens
ggttgtggtgagctgagatcgcaccactgcactccagcctgggcaataagagtgaaactccgtctcaaacaaacaaacaaaacaaaacaaaacaaaacaaaacaaaaaaaccagtgtaggggaacacaatagaaaagggggtgaggagcagggtaaataaatgatatcagagaggtagagaacagacttgcccagggaggg

SEQ ID NO: 234526 - DNA, 201 bp, Homo sapiens
aaggtggagcctgtagatgggcccgaatttctgagtcaggccaagcagatagatggggaggtcgggctgcagcaggtgcaagaagcccggggcaagaggcdggaggtggaggctccggagcttccaccagttccacagcaggcgggcgccagccagcaggggcagcagcagcagcaggcccaggagcagcatggcaagacg

SEQ ID NO: 234527 - DNA, 201 bp, Homo sapiens
aggttgtggtgagctgagatcgcaccactgcactccagcctgggcaataagagtgaaactccgtctcaaacaaacaaacaaaacaaaacaaaacaaaacaaaacaaaaaaaccagtgtaggggaacacaatagaaaagggggtgaggagcagggtaaataaatgatatcagagaggtagagaacagacttgcccagggagg

SEQ ID NO: 234528 - DNA, 201 bp, Homo sapiens
acacaagtatacagcagtcctgggatagatgaggtccttgttctcatggagctcccattgtagcattgagagaaaggtaataagtaaactgataactcagrcagcagtaaatgccatgaagaacaggaacaggatattgtgatagagagtaatggaagactgccctaactgggagttaagatttgaagatggagccagcct

SEQ ID NO: 234529 - DNA, 201 bp, Homo sapiens
gaggttgtggtgagctgagatcgcaccactgcactccagcctgggcaataagagtgaaactccgtctcaaacaaacaaacaaaacaaaacaaaacaaaacaaaacaaaaaaaccagtgtaggggaacacaatagaaaagggggtgaggagcagggtaaataaatgatatcagagaggtagagaacagacttgcccagggag

SEQ ID NO: 234530 - DNA, 201 bp, Homo sapiens
ggaggttgtggtgagctgagatcgcaccactgcactccagcctgggcaataagagtgaaactccgtctcaaacaaacaaacaaaacaaaacaaaacaaaacaaaacaaaaaaaccagtgtaggggaacacaatagaaaagggggtgaggagcagggtaaataaatgatatcagagaggtagagaacagacttgcccaggga

SEQ ID NO: 234531 - DNA, 201 bp, Homo sapiens
cggtggctcatgcctgtaatcccagcactttgggaggctgaggcgagcagatcacctgaggttaggagtctgagaccagcctgaccgacatggagaaaccyggtctctactaaaagtacaaaattagccaggcatggtggggcatgcctgtaatcccagctactcaggaggctgaggcaggagaatcgcttggacctggga

SEQ ID NO: 234532 - DNA, 201 bp, Homo sapiens
atcacttgagctaggagacagaggttgcagtgagccgagatcgcaccactgcactccagcctgggcgacagagtaagattccatctcaaaaaaaaaaaaaagtgagagagagagggagaagataatctgcacttttcttagaagacagtaggagctgggatccaggtgtttggggaaggattggccctaggtactcatcca

SEQ ID NO: 234533 - DNA, 201 bp, Homo sapiens
tggctatattcttttctggagtacctgtttgtcttttgacaatttaaaaaactaggtttcctgattttggcttattttgttttgcagagattttttttttwttttttttttttttgagatggagtttcactcttcctctcaggctgaagtgaagtggcatgatctcagctcactgcaacctccgcctccagtttcaagcga

SEQ ID NO: 234534 - DNA, 201 bp, Homo sapiens
actttgggaggccaaggcagatcacttgaggtcaggagtttgagaccagcctggccaacttggtgaaaccctgtctctactaaaaaaaaaaaaaaaaaaaaggctgggtgcggtggctcacgcctgtaatcccagcactgtgggaggccaaggtgggcggatcacgaggtcaggagatcgagaccatcctggctaacacgg

SEQ ID NO: 234535 - DNA, 201 bp, Homo sapiens
gaagagctccaggcgcgccagcggctcgcccaggcacacgcgggcaccgcagccgaaggccagagctctggagttcttgcctggctccaggaagcgatctscgggcgggtggacaggtgggtggggaggcgttcagcggcagcggggaccagcctccaccacattttcacggcaggcccccggccccccacataccaggcc

SEQ ID NO: 234536 - DNA, 201 bp, Homo sapiens
tatgacctctgttgacagcaccagcaaagcaagttgcccttaaacccttaaactctgtatccccctatattacctttcagccccacaagaggatgtggacragacccccagccctacagaaccaggcacagaggccccagagccccccgaggagcctctcctgggggagctgacagtgacaggatcctcccctgactcgct

SEQ ID NO: 234537 - DNA, 201 bp, Homo sapiens; identical to SEQ ID NO: 44184

SEQ ID NO: 234538 - DNA, 201 bp, Homo sapiens
agaggacagcagagtcccgcggataccctgcccacctcagtcctctctttccatgtctctgtccagtcccggaggaggagaagccttcagaacctcccacygcaacccccgagccccccatcaagcctcgcctgggggagctgaccgtgacagatgccacccctgactccctcagcctgtcctggacagttcccgagggac

SEQ ID NO: 234539 - DNA, 201 bp, Homo sapiens
acatccccctcactctctcttcctccttctcagctgcagaggaagagacccccagccccacagaacccagcatggaggccccggagcccgctgaggagccrctcctgggggagctaacagtgacaggatcctcccctgactcgctgagcctctcctggaccgtcccccagggccgcttcgactccttcaccgtgcagtaca

SEQ ID NO: 234540 - DNA, 201 bp, Homo sapiens
aacatcctgcctccctgacctgccgagtgcccccatcagggatcctgcgctcctcggggccggccaaatcacccctttcctcaggggccggccaaatcacrgccaaatcgtgtgctcctgggtaagaggagatagagacccagtctgtaagaagctgcaccctgctggggaagcagtctgtgagaggcggaaagaggctgg

SEQ ID NO: 234541 - DNA, 201 bp, Homo sapiens; identical to SEQ ID NO: 44190

SEQ ID NO: 234542 - DNA, 201 bp, Homo sapiens; identical to SEQ ID NO: 44427

SEQ ID NO: 234543 - DNA, 201 bp, Homo sapiens; identical to SEQ ID NO: 44192

SEQ ID NO: 234544 - DNA, 201 bp, Homo sapiens
agtgccgggattacaggcatgagccactgcacccagcctctgcctgtttttgaacctcatataaacggcattattcagagtgttttcttttttcttttttctttttttggtagctcaggaagggtatataagagtataagagcattctctttctgtgtgtgatattttttactcagcactatgtgtgtgaaattcacccat

SEQ ID NO: 234545 - DNA, 201 bp, Homo sapiens; identical to SEQ ID NO: 44194

SEQ ID NO: 234546 - DNA, 201 bp, Homo sapiens
ctcccaggtagctgggactacaggtgtgtgccaccatgcccagctaatttttgtatttttagtagagacagggtttcaccgtgttggccaggatggtctcsatctcttgacctcgtgatccgcccgcctcggcttcccaaagtgccgggattacaggcatgagccactgcacccagcctctgcctgtttttgaacctcata

SEQ ID NO: 234547 - DNA, 201 bp, Homo sapiens
ccctgtgtcctacaccacaggccttcaggtatttggagacaccagcctgatgtcttcattcctcaggcaaaacctcccagtttcttcgccccttttccctmagtctttattctctgaatcctttaccttcctgtgattcttgcttttttcatgtgcccccaaaatgtggggacagagaggggcccactgacttactctgaa

SEQ ID NO: 234548 - DNA, 201 bp, Homo sapiens; identical to SEQ ID NO: 44102

SEQ ID NO: 234549 - DNA, 201 bp, Homo sapiens
gggattcaagcaattcttttgccttagcctcccaggtagctgggactacaggtgtgtgccaccatgcccagctaatttttgtatttttagtagagacagggtttcaccgtgttggccaggatggtctccatctcttgacctcgtgatccgcccgcctcggcttcccaaagtgccgggattacaggcatgagccactgcacc

SEQ ID NO: 234550 - DNA, 201 bp, Homo sapiens
ctgcagcctggaaatcagggctaggctaagtgttcactgggactcaaaacctcacagcctcagagaagtttttgcttgggtctagtctaaaaacagcaatgagggtgagataagctccaaggaccagccaaggtagagttcatctggagccacgaggttaatattgagataaactctaaaacttcccaagaacaaaatcag

SEQ ID NO: 234551 - DNA, 201 bp, Homo sapiens
tctgggattcaagcaattcttttgccttagcctcccaggtagctgggactacaggtgtgtgccaccatgcccagctaatttttgtatttttagtagagacagggtttcaccgtgttggccaggatggtctccatctcttgacctcgtgatccgcccgcctcggcttcccaaagtgccgggattacaggcatgagccactgc

SEQ ID NO: 234552 - DNA, 201 bp, Homo sapiens
ccctgaagcagacgggacgctgctgactgacctgatgccaggcgtagaatatgtggtgactgtcacagcggagcggggccgggcagtcagctacccagctkctgtcagggccaacacaggtatggctggccagaggttagggaagggccctggtttcccagccttggatcctcctcctcaggagcccaggctcagggctca

SEQ ID NO: 234553 - DNA, 201 bp, Homo sapiens
accacaggtagtgtgggctggggccacgggacacctatcccttgtccagcctcacctgccgttggagcctgcattcatgaattcctcccactgccaccccycactgcccccttctaccttcaggccctacctggccggggctccagggggcccccaggacaaagcacgagtccattgtccctagaagacgtccccacccca

SEQ ID NO: 234554 - DNA, 201 bp, Homo sapiens
gagctaaagatggggatggggtggcagggagcctggaggcagggaggccagtaggcagttggtggccctggtgagaggtgacagtggctcaaactaggatyggggactggaggtgggggaggaaggtatccagggaaactcgggggagaggtactctgaggctgctggcagctggtgaggggctgggtccaggaacacacc

SEQ ID NO: 234555 - DNA, 201 bp, Homo sapiens
gcagggtcctgcctcctgacccatgggcctgctctgctcttttcagcgcccctgcccacaccactgccggtggagccccgcctgggggagctggcggtggmggccgtgacctcggactcagtgggcctctcatggacggtggcccagggcccctttgactccttcctggtacagtacagggacgcgcaggggcagccccag

SEQ ID NO: 234556 - DNA, 201 bp, Homo sapiens
ggcggccccgggcggtgcgtgttgggggcaaggagagtgaggtcaccgtgggaggcctagagcccgggcacaagtacaagatgcacctgtacggcctccaygaggggcagcgcgtgggcccggtgtccgccgtgggcgtgacaggtgagtgaggggcaggggcctgctttggttccctcccactgctggctcccagcttcc

SEQ ID NO: 234557 - DNA, 201 bp, Homo sapiens
accctgccatcctctctgtgtccctttttctcagctgcagaggaagagacccccagccccacagaacccagcatggaggccccggagccccctgaggagcygctcctgggggagctaacagtgacaggatcctcccctgactcgctgagcctctcctggaccgtcccccagggccgcttcgactccttcaccgtgcagtac

SEQ ID NO: 234558 - DNA, 201 bp, Homo sapiens
ccagggactgcggggaggagatgcagaacggagccggtgcctccaggaccagcaccatcttcctcaacggcaaccgcgagcggcccctgaacgtgttttgsgacatggagactgatgggggcggctggctggtgggtggcattgggaagcccaggggtctgtgcagggcagggtctgttgccccgggagccagaggctgat

SEQ ID NO: 234559 - DNA, 201 bp, Homo sapiens
tgagagctgctgcctggtggaggggtggagctggatcgggagggtggtggaggtgaggacatggctgcaatcagtgtagacatcactttctggaatctggrctgggaatgagagcaaagagggaagatggaggctagagagagatgcacacagagtgggggtgaggaggggtgtgacagtagcttgttgaaatgctgatgg

SEQ ID NO: 234560 - DNA, 201 bp, Homo sapiens
cactctccccacacgtgtctgtccagctccagaggatgaagcagagaccacccaagcagtgcccaccacaacccctgagccccccaacaagcctcgcctcrgggagctgaccgtgacagatgccacccctgactccctcagcctgtcctggatggtccccgagggccagtttgaccacttcctggtccagtacaggaatgg

SEQ ID NO: 234561 - DNA, 201 bp, Homo sapiens
gaagagccagggtccttcaccacccagccgctggaggaagccttctctgccagcgatctcgcagcactgtgtttacaggggggaggggaggggttcgtacrggagcaataaaggagaaactgaggtacccggctggcatcggtcctgccccatcactggctctggcccgggctgtgggcccccatcccccggggctgcagc

SEQ ID NO: 234562 - DNA, 201 bp, Homo sapiens
attttagtggctcagaaagtgcttcagatccagctgcccagatctgcatgtgccttcgaatgtagtgattgtgcgactttgcaggcgtttcctaaccttgwgcttcagattcctgcaaagttggggtgatgataataatggcacccacttcatatgttgtgcgagggttaaatgcaccactgtttgtgagctgcttacagc

SEQ ID NO: 234563 - DNA, 201 bp, Homo sapiens
tcccccagggccgcttcgactccttcaccgtgcagtacaaggacagggacgggcagccccaggtggtgcgtgtcaggggcgaggagagcgaggtcaccgtrgggggcctggagcccgggcgcaaatacaagatgcatctgtacggcctccacgaggggcagcgcgtgggcccagtgtccaccgtgggcatcacgggtgagt

SEQ ID NO: 234564 - DNA, 201 bp, Homo sapiens
acatcccgtcgaaaccccaagccccagtcccaggctgccagttcagcacctggctggatctccttgtttacagctccagagaggaaagaggagcccccccrccctgagttcctggagcagcccctcctgggggaactgacagtgaccggcgtgaccccagactccttgcgtctctcatggacagtggcccagggccccttc

SEQ ID NO: 234565 - DNA, 201 bp, Homo sapiens; identical to SEQ ID NO: 44045

SEQ ID NO: 234566 - DNA, 201 bp, Homo sapiens
tcagaattaagcctcaatcctctgcagcggagggtcaggaagggagctctgcggggaggttggttgagtgctgggagctacctccttaaggggaacgggargagcagatgggacatccggctttgactctctcttgacaacccctttcccagggagtgagctggtaccactggaagggcttcgagttctcggtgcccttca

SEQ ID NO: 234567 - DNA, 201 bp, Homo sapiens; identical to SEQ ID NO: 44046

SEQ ID NO: 234568 - DNA, 201 bp, Homo sapiens
ccttgggccttcctatgtggttgacccctggctccccctgagcagggaggggccatcaggagttttgctgtgctggtggctgtgccaggtcccccacagcygaccctggaacttgttacgtgtgttagctgtcagctgagcaggaccacccagccccaagaatggacttctctgaaatgacctcaggtcccccagtcatag

SEQ ID NO: 234569 - DNA, 201 bp, Homo sapiens
gctgggactccccttgggccttcctatgtggttgacccctggctccccctgagcagggaggggccatcaggagttttgctgtgctggtggctgtgccaggycccccacagctgaccctggaacttgttacgtgtgttagctgtcagctgagcaggaccacccagccccaagaatggacttctctgaaatgacctcaggtcc

SEQ ID NO: 234570 - DNA, 201 bp, Homo sapiens
ggctgggactccccttgggccttcctatgtggttgacccctggctccccctgagcagggaggggccatcaggagttttgctgtgctggtggctgtgccagktcccccacagctgaccctggaacttgttacgtgtgttagctgtcagctgagcaggaccacccagccccaagaatggacttctctgaaatgacctcaggtc

SEQ ID NO: 234571 - DNA, 201 bp, Homo sapiens
ggtcaccatctcaggcctggagccagaccataaatacaagatgaacctgtacggcttccacggtggccagcgcgtaggccctgtgtctgccattggggtgwcgggtgagtgaatgatgggagccccagggtgggagctgtgggagggccacctcttgctctttggtgatgactggtggggaatgggacaggggtctggtca

SEQ ID NO: 234572 - DNA, 201 bp, Homo sapiens
tcctggtccagtacaggaatggggatgggcagcccaaggcggtgcgggtgccggggcacgaggacggggtcaccatctcaggcctggagccagaccataartacaagatgaacctgtacggcttccacggtggccagcgcgtaggccctgtgtctgccattggggtgacgggtgagtgaatgatgggagccccagggtggg

SEQ ID NO: 234573 - DNA, 201 bp, Homo sapiens
gagcgaggtcaccgtggggggcctggagcctgggcgcaaatacaagatgcacctgtacggcctccacgaggggcggcgcgtgggcccggtgtccaccgtgrgcgtgactggtgagtagtgcttggagtctcggggtaaccacctttccctcatgggtacctggtttactgctgtgccctttcaccaagccctgtgggtcca

SEQ ID NO: 234574 - DNA, 201 bp, Homo sapiens
acttcctggtccagtacaggaatggggatgggcagcccaaggcggtgcgggtgccggggcacgaggacggggtcaccatctcaggcctggagccagaccayaaatacaagatgaacctgtacggcttccacggtggccagcgcgtaggccctgtgtctgccattggggtgacgggtgagtgaatgatgggagccccagggt

SEQ ID NO: 234575 - DNA, 201 bp, Homo sapiens
gcagtgcctgttgcgggggatgagaatgaggttactgtccccggcctggatcccgaccggaagtataagatgaacctctacgggcttcgtggcaggcagcrtgtggggcccgagtctgtggtggccaagactggtgagtcatggctgccaggcctccctcccctgctagccccatcctgtgagcgggacttggctggggct

SEQ ID NO: 234576 - DNA, 201 bp, Homo sapiens
gagcagtaggtctattaatttagtagaaatttgttgcacattacaatcatctggggagcttttaaaaatactgagtaaaattcacttacttggtcgttctrgtcacatctcaagtgttgcagagcctcatatccctcctggctaccatattggtcagcgtggatacagaatgttttaaaagagaagggccaggtgtggtgg

SEQ ID NO: 234577 - DNA, 201 bp, Homo sapiens
gtccgagcccttcgagggaccagctggggccttcctgcctccaagaccatcaccaccagtgagagctggggctgtggggaggggtgtcctgagtggagatmtggactagagagggaatctgccctccgggagggcagaaggaaggggctggatgggggctaggctcttggaaggaaagatgatgattgaagaaccagacac

SEQ ID NO: 234578 - DNA, 201 bp, Homo sapiens; identical to SEQ ID NO: 44059

SEQ ID NO: 234579 - DNA, 201 bp, Homo sapiens
caagttccacacagtaccatgctgacactgtttagaattggagaaagaagagataagggggattgagcagcagaggcaagagtgccagcccctgagccacmtggtgctctctctcacagacagagggggcgagccccccattcacagcacgggttccaagctctgcctcagcctatgaccagagaggactggcccctggac

SEQ ID NO: 234580 - DNA, 201 bp, Homo sapiens
gccacctggtgctctctctcacagacagagggggcgagccccccattcacagcacgggttccaagctctgcctcagcctatgaccagagaggactggcccmtggacaggagtaccaggtcactgtccgagcccttcgagggaccagctggggccttcctgcctccaagaccatcaccaccagtgagagctggggctgtggg

SEQ ID NO: 234581 - DNA, 201 bp, Homo sapiens
tcacagcacgggttccaagctctgcctcagcctatgaccagagaggactggcccctggacaggagtaccaggtcactgtccgagcccttcgagggaccagmtggggccttcctgcctccaagaccatcaccaccagtgagagctggggctgtggggaggggtgtcctgagtggagatctggactagagagggaatctgccc

SEQ ID NO: 234582 - DNA, 201 bp, Homo sapiens; identical to SEQ ID NO: 44062

SEQ ID NO: 234583 - DNA, 201 bp, Homo sapiens
gctggagggacagggagaggtggcctgggtgttgggaggtgggggtgaggtgggggccgagggcaggggggtcagggtgagggataggaaaggccgcaggrgaggagaggatgaagagctgtgctggaggcgctgtgggcagcatcgtcctgttcttgggcactttgtgttttgtgacacatcctttctatgctgaactga

SEQ ID NO: 234584 - DNA, 201 bp, Homo sapiens
atcccagcactttgggaggctgaggtgggcagattacttgaggtcaggagttggagaccagcctggccaacatggtgaaaccccatctctagtaaaaaaamatacagaaattagctgggtgtggtggcacgcacctgtagtcccagctatttaggaggttgaggtaggagaattgcttgcctgggaagtggaggttgcagt

SEQ ID NO: 234585 - DNA, 201 bp, Homo sapiens; identical to SEQ ID NO: 44507

SEQ ID NO: 234586 - DNA, 201 bp, Homo sapiens
caagagtgagagagagcaagagggggctgatgttgattttataacaaacccactcctgagataagacattaatctgttcatgagggtgaagccctcatgayctaaacacctcccattaggcctcacctcccaacattgttgcatcgaggattaaatttccaacatacgaactttgggggacacattcagatcacagcagaa

SEQ ID NO: 234587 - DNA, 201 bp, Homo sapiens
aaacccactcctgagataagacattaatctgttcatgagggtgaagccctcatgacctaaacacctcccattaggcctcacctcccaacattgttgcatcraggattaaatttccaacatacgaactttgggggacacattcagatcacagcagaaggtaacatgagatggatgtgttgttgatcaggcatttaccatatg

SEQ ID NO: 234588 - DNA, 201 bp, Homo sapiens
caaggcaggcagatcacctgcggtcacctgagaccagcctggccaacatggcgaaaccctgtttctactaaaaatacaaaaattggccaggcatgatggcsgccacctgtaatcccagctacttgggaggctgaggcaggagaatcacttgaacccaggaggtggaggttgcagtaagtcaggatcacgccactgcactcc

SEQ ID NO: 234589 - DNA, 201 bp, Homo sapiens
atactccaagtatgcattgcttgtcatctgtgctaggctctcttctagacactggggatacagccatgaatgagaccaaatagatacctgttttcatataycagctaatggttagtgataggcttcagaaatgaaatatgcccagaaatgaataggagtagcaaatgatcactttagattgggtgatcaaagaacgcaatt

SEQ ID NO: 234590 - DNA, 201 bp, Homo sapiens
tggagtgcagtggtgccatctcgtctcaccgcaagctccacctcccgggttcacgccattctcctgccttagcctcctgagtagctgggactacaggcgcycgccaccacgcccagctaatcttttcgtatttttagtagagacagggtttcaccatgttagccaggatggtctcgatctcctgacctcgtgatccactcc

SEQ ID NO: 234591 - DNA, 201 bp, Homo sapiens
gtggccgggagggctggatgtggggagggcatttttcagccttaagtgaatggccattgtaggctttttcttttaacatggtctaatgtccatggagcttsagcttttatgctgctgtggctgtagatttctggcaatgggcgcattttaatccttctggtcttggtcatgtgactatctctttctccacccaggaacatt

SEQ ID NO: 234592 - DNA, 201 bp, Homo sapiens
ttaagtgaatggccattgtaggctttttcttttaacatggtctaatgtccatggagcttcagcttttatgctgctgtggctgtagatttctggcaatgggmgcattttaatccttctggtcttggtcatgtgactatctctttctccacccaggaacattatacatggcagtgattctgtggagagtgcagagaaggagat

SEQ ID NO: 234593 - DNA, 201 bp, Homo sapiens; identical to SEQ ID NO: 44535

SEQ ID NO: 234594 - DNA, 201 bp, Homo sapiens
ctggtgctgtgcacctctagtcctagctattgggaaggcataggcaggaggattgtgcccaggagtccaaggctgcagtgaaccatgatcatgctactgtmcttcagcctgggtgacagagtgagacatctcttaaataaaaacatatccatcctgttcttgagaagctcttggggattcagtgaatgggggagtgtggga

SEQ ID NO: 234595 - DNA, 201 bp, Homo sapiens
ggtctgaaattcatgcaagtaagtggacttcattgttcccattttgattccttcatagtataggagaacactgtgattaacctgtttctccccgtctttcytatttaaagttctccacggtagagtgaacacaagtgtcttgagacctggaaactcctcagtgccctagcgtttggctacatcttggaacaaaccaagtta

SEQ ID NO: 234596 - DNA, 201 bp, Homo sapiens
ctttgctcctattgactgctaggccctgtggctaggtaccatagagtctctacacaggactaagtcagcctggtgtgcaggggaggcagacacacaaacasaaaattggactacagtgctaagatgctgtaagaagaggttaactaaaggacaggaagatggggccaagagatggtgctactgtctactttagggatcgtc

SEQ ID NO: 234597 - DNA, 201 bp, Homo sapiens
agtgcagtggtgtgatgacagcagctcactgcagcctcgacctctctgggcccaagtgatctcctatcttagcctcctgagtaactggggctacaggcacrtgccaccacgcccaactaatttttgtattttctgtagagatggggtttcatcatgtttcccaggctggtctccaactgctgggctcaagcgatctgcctg

SEQ ID NO: 234598 - DNA, 201 bp, Homo sapiens
gggtccacctaggcacagaatggaggcttggaatctcctttgctttagtctgaaactccgagttccagtgcggtgctcctcctttagcatagggtagtgastgtattttccacattaaatttggggcacagatctgaatccctacacttacgggtaagaatctaagtactgaaattcaaccaggctcatcggtgaagagaa

SEQ ID NO: 234599 - DNA, 201 bp, Homo sapiens; identical to SEQ ID NO: 44505

SEQ ID NO: 234600 - DNA, 201 bp, Homo sapiens
tactgtccttcagcctgggtgacagagtgagacatctcttaaataaaaacatatccatcctgttcttgagaagctcttggggattcagtgaatgggggagygtgggaagttgtaattcctccaaaaatcagaaaagctaggtagatagtaagcctgagtccctgggatggcctcaaatgaagcaggaggtcttgtaagtag

SEQ ID NO: 234601 - DNA, 201 bp, Homo sapiens
cagaaatgaaagaaaacatgagggctgggtgtgctggcttgtgcttgtgataccagctacttgggaggctgagatgggagaccagcctgggtaacatagcragaccctgtctcactaaaaaaaaaaaaagaaaaattaggctgggtacgatggctcatgcctttaatcccagctattcaggaggctgaggaggagaatcgc

SEQ ID NO: 234602 - DNA, 201 bp, Homo sapiens
cttatttgtgtctgtcgagagcagtgccgggcacggagttggcgctctgtaagtgcttgctgaataaatgacgggtgtgtgtgtcattcattcagcaagcrctgagtgcttactgttgtgtcaccgggaccgatgtggagggacatttttagggtgtatttctggcgctttagtcctgttttctcctggacaatttatgct

SEQ ID NO: 234603 - DNA, 201 bp, Homo sapiens
gattcatcagaaatgaaagaaaacatgagggctgggtgtgctggcttgtgcttgtgataccagctacttgggaggctgagatgggagaccagcctgggtarcatagcaagaccctgtctcactaaaaaaaaaaaaagaaaaattaggctgggtacgatggctcatgcctttaatcccagctattcaggaggctgaggagga

SEQ ID NO: 234604 - DNA, 201 bp, Homo sapiens
attcagcaagcactgagtgcttactgttgtgtcaccgggaccgatgtggagggacatttttagggtgtatttctggcgctttagtcctgttttctcctggrcaatttatgcttgccccgcaccccatcgtgcgattctccgcagtctttgggctttgtctctctctctttttttttttttggaagttgcagaatggtgata

SEQ ID NO: 234605 - DNA, 201 bp, Homo sapiens
cgattctccgcagtctttgggctttgtctctctctctttttttttttttggaagttgcagaatggtgataaatgattttctttgctcctattgactgctasgccctgtggctaggtaccatagagtctctacacaggactaagtcagcctggtgtgcaggggaggcagacacacaaacagaaaattggactacagtgctaa

SEQ ID NO: 234606 - DNA, 201 bp, Homo sapiens
taatcccagcactttggtaggctgaggtgggcagatcacttgaggacaagagttcgagaccagcgtgggcaacatagcgaaaccccatctctaaaaaaacsccacaaaaaccaaaacaaatgaaaataaaataaatcaaatgggatagaaattatagtccttgcttttggatcctttcccacattgacatattagttcata

SEQ ID NO: 234607 - DNA, 201 bp, Homo sapiens
tttttttttttggaagttgcagaatggtgataaatgattttctttgctcctattgactgctaggccctgtggctaggtaccatagagtctctacacaggastaagtcagcctggtgtgcaggggaggcagacacacaaacagaaaattggactacagtgctaagatgctgtaagaagaggttaactaaaggacaggaagat

SEQ ID NO: 234608 - DNA, 201 bp, Homo sapiens
gtatttctggcgctttagtcctgttttctcctggacaatttatgcttgccccgcaccccatcgtgcgattctccgcagtctttgggctttgtctctctctytttttttttttttggaagttgcagaatggtgataaatgattttctttgctcctattgactgctaggccctgtggctaggtaccatagagtctctacacag

SEQ ID NO: 234609 - DNA, 201 bp, Homo sapiens
tttttttggaagttgcagaatggtgataaatgattttctttgctcctattgactgctaggccctgtggctaggtaccatagagtctctacacaggactaartcagcctggtgtgcaggggaggcagacacacaaacagaaaattggactacagtgctaagatgctgtaagaagaggttaactaaaggacaggaagatgggg

SEQ ID NO: 234610 - DNA, 201 bp, Homo sapiens
gtagttctcccacaccccaccgtttattggctagtcaaaatattctttgcattgtaaagtgtagcataacattacaagaatggattaatgggttgggaatkctgggttttggccttcattctggtgctgtggtcctgtttcctcatttgtaaaatgaagggggttgtaaagatatattctctaaaacccctaatgctatgg

SEQ ID NO: 234611 - DNA, 201 bp, Homo sapiens
tttgagaccaacctggccaacatggtgaaaccccgtctctcctaaaaatacaaaaagtagccgggtgtggtggtgggcacctgtaatcccagctgctcggraggctggggcaggagattcgcttgaacccgggaggcggaggttgcagtgagccgagatcgcaccactgcactccaccctgggcgacctggcaaggctccg

SEQ ID NO: 234612 - DNA, 201 bp, Homo sapiens
tctgtaataggaggtgcattgctacgggaaaagcagtgcagagttccacatatgactgcatctctgtaatttctgactgagagctgagcatgtttgagttsttggtcttgagcttcctgagcagataattttagagagatttttttccccctttgagacaggttgttttttagcaagaaagtctttccatcatcaattact

SEQ ID NO: 234613 - DNA, 201 bp, Homo sapiens
gggcggatcacgaggtcaggagatcgagaccatcctggctaacacggtgaaaccccgtctctactaaaaatacaaaaattagccgggcatggtagcgcgcscctgtagtcccagctacacgggaggctgaggcaggagaatggcgtgaacccgggaggcggagcttgcagtgagtcgagatcgcgccactgcactccagcc

SEQ ID NO: 234614 - DNA, 201 bp, Homo sapiens
gtcttgagcttcctgagcagataattttagagagatttttttccccctttgagacaggttgttttttagcaagaaagtctttccatcatcaattactagayactaataaatgcttattgtttagcatatattaggtatcataggagctggtggaggaaaactatggttttggttttggggaggttcttcagaaacagcaga

SEQ ID NO: 234615 - DNA, 201 bp, Homo sapiens
ttgataaatgcaaaggattgattgaccaataacccttcttcaaacaaattctagagataatccaaattctcggctgggtgaggcatagtggctcatacctrtaatcccagcactttgggaagccaaggcaggctggtcacttgaggtcaggagttcaagaccagcctggccaacattgtgaaaccccgtctctactaaaaa

SEQ ID NO: 234616 - DNA, 201 bp, Homo sapiens
gccttgttggtctgaaattcatgcaagtaagtggacttcattgttcccattttgattccttcatagtataggagaacactgtgattaacctgtttctcccygtctttcttatttaaagttctccacggtagagtgaacacaagtgtcttgagacctggaaactcctcagtgccctagcgtttggctacatcttggaacaaa

SEQ ID NO: 234617 - DNA, 201 bp, Homo sapiens
cgttcctgcgggttgggcggctgggccctccggggtgtggccaccccgcgctccgccctgcgcccctcctccgccgccggctcccgggtgtggtggtcgcwccagctctctgctctcccagcgcagcgccgccgcccggcccctccagcttcccggtaaggcggtgggggcgcatcccctggcgactcctcccgttccctc

SEQ ID NO: 234618 - DNA, 201 bp, Homo sapiens
ggtggacacaacagcagtctccttcagcacggcgtggtgtgtccctggacacagctcttcattccattgacttagaggcaacaggattgatcattcttttrtagagcatatttgccaataaagcttttggaagccggacactgtctccttgtgcttatttgatactgagctgaaagaagtgacttggttctctggctatag

SEQ ID NO: 234619 - DNA, 201 bp, Homo sapiens
tggaacctgctgaagttacttaactgagcaactaggagcttgggaggagaaagcaaatcagaccttagaaatgggaaggatgttagctgggtgtggtggtrcacggctgtaatctcagctacttgggaggctgaggtaggagaattgcttgaacctgggaggcggaggttgcagtgagccgagatcgtgccactgcactcc

SEQ ID NO: 234620 - DNA, 201 bp, Homo sapiens
accccatctctactaaaaaaatacaaaaattagctgggcatggtggcgtgtgcctgtaatcccagctactcgggacgctgaggtgggagaattgcttgaamctgggaggaggaggaggttgcagtgagctgagccactgcactccagcctgggcaacagaacaagactctgtctcaaaaaaaaaaaaaaaaaaaattggag

SEQ ID NO: 234621 - DNA, 201 bp, Homo sapiens; identical to SEQ ID NO: 44536

SEQ ID NO: 234622 - DNA, 201 bp, Homo sapiens
ccgagacgggcggatcacgaggtcaggagatcgagaccatcctggctaacacggtgaaaccccgtctctactaaaaatacaaaaattagccgggcatggtrgcgcgcccctgtagtcccagctacacgggaggctgaggcaggagaatggcgtgaacccgggaggcggagcttgcagtgagtcgagatcgcgccactgcac

SEQ ID NO: 234623 - DNA, 201 bp, Homo sapiens
tgatggctgcataaggattctgcaacattgtttatctctgtctcagctaaactgggaagtccccaagttggacagacttttctttgaatcctagcaatacrtttggaatgcagtttttatataggcccctactctctgctggggttagctgataatcatgtcactgatcggtctcattgatgtgtcgtgtcaggtaggagt

SEQ ID NO: 234624 - DNA, 201 bp, Homo sapiens; identical to SEQ ID NO: 44504

SEQ ID NO: 234625 - DNA, 201 bp, Homo sapiens
tccttctgctgttccctggaatccttaccctagcatgttagtctttcttttccctcttctagcagtcttctgggatgcccttcccactgatcctattccasactggccactttctcctttcttcaccagttcttctgtgttgatggctgcataaggattctgcaacattgtttatctctgtctcagctaaactgggaagtc

SEQ ID NO: 234626 - DNA, 201 bp, Homo sapiens
aggtctgattataaatccattttcacactttcgaggtctgggaggggctgaacgtggtgaagacaggccgagtgatgcttggggagaccaatccagcagaytcaaagccaggcaccattcgtggggacttctgcattcaggttggcaggtaagtccggggacaggagggtggatgacttttatgcaacaccatttaaagca

SEQ ID NO: 234627 - DNA, 201 bp, Homo sapiens
aaagaccgaccattcttccctgggctggtgaagtacatgaactcagggccggttgtggccatggtgagtgctcgtggggaatgagagaaaatgaggaaaargtgctcagtgttctttgttagacatctccctcagctaatctaaattttattttatgaatggaacctgctgaagttacttaactgagcaactaggagcttg

SEQ ID NO: 234628 - DNA, 201 bp, Homo sapiens
gctgctgtggctgtagatttctggcaatgggcgcattttaatccttctggtcttggtcatgtgactatctctttctccacccaggaacattatacatggcrgtgattctgtggagagtgcagagaaggagatcggcttgtggtttcaccctgaggaactggtagattacacgagctgtgctcagaactggatctatgaatg

SEQ ID NO: 234629 - DNA, 201 bp, Homo sapiens
cttgaaactgggaggaggaggaggttgcagtgagctgagccactgcactccagcctgggcaacagaacaagactctgtctcaaaaaaaaaaaaaaaaaaaattggagagagtaaaatagggaggcagtgaaattgttgagaaagtagatctatttcctgttcacctttttcttccttctgctgttccctggaatccttacc

SEQ ID NO: 234630 - DNA, 201 bp, Homo sapiens
gcttgaaactgggaggaggaggaggttgcagtgagctgagccactgcactccagcctgggcaacagaacaagactctgtctcaaaaaaaaaaaaaaaaaaaattggagagagtaaaatagggaggcagtgaaattgttgagaaagtagatctatttcctgttcacctttttcttccttctgctgttccctggaatccttac

SEQ ID NO: 234631 - DNA, 201 bp, Homo sapiens
ggttaggtgaggagttagtgaagagatgagttcagctctaagaggcggcgaggaggatcggatgggaggaggggcagggagcgcctgtggacaagtgcagrccggtcggcgcacgtcccacgccacgtggactcgcctttgtcggtggccgcctttctcgtcaggccgcgacgacagggctgtgccttatttgtgtctgtc

SEQ ID NO: 234632 - DNA, 201 bp, Homo sapiens
ggaggcgttcttattaattggtcgctgaaacgtctggaagcatattgattggctggtgacgccgcctgtttgggctcaacggtcacctccccgcgtgcggrggcggtgtctggccccggccccagcgctctcccactggctggagagaacgatccctcctctcctgattggtcgaggttggcagtctgtcctgtgggggcg

SEQ ID NO: 234633 - DNA, 201 bp, Homo sapiens
tcgtttggttcatctttctgagaaagacatccctgtgtatttatgcaagggtggaacaatttagtttgatctatatttgatcctgatttctaaggggccargagtagcttcttgctgtaatatccttttgtggttatttggactggtcaaatgaatactttgtaaactccttctaaacagattgggttgagtacagaagat

SEQ ID NO: 234634 - DNA, 201 bp, Homo sapiens
ttggtaataagcaagcgtattgttatttatttggcctttatgtagtgggtgattttaatctcctgggctaaagtagtgccagaatgtaatccagaatactwgttccagattgctataaaagtgtcataaatatattcaaatgactttggaagcctttgttttatggaaataaaatctctgttttgctgtatgttctcagct

SEQ ID NO: 234635 - DNA, 201 bp, Homo sapiens
gcattgctaaattgttaattttatgtactatatttggtcattcatgcagcaaatatttactgaatattggtcatgtgccagatactgttttaagttatgargatgtagctatgaacaagtcaaagtctctgccctcatggagcttatagtctagctgagaaaggcaaatagatagacgtgtaatatatcaactggagataa

SEQ ID NO: 234636 - DNA, 201 bp, Homo sapiens
agctactgtgccgggccttggcactttcattttgaagcttagctttataaggagttttctctcagttttctcctttttccttttaggcaccaacggagagrcagcttcgatataaggaaaaagtggctgaactcaggaagaaaagaaattctggactgagcaaagaacagaaagagaaatatatggtgagggaaagttaaa

SEQ ID NO: 234637 - DNA, 201 bp, Homo sapiens
caaatcttagatgatagagtccaaatttaaaaagattcacagcagatggaatcagattaaccggaagaaattttaatagggataaagatactgatgaatgrtctcttcatatggtaatatgtgtgtgaaatctataatgttttcctgagataagccatccactccacttaactaccattatctcctattctctggatggga

SEQ ID NO: 234638 - DNA, 201 bp, Homo sapiens
tcccagctgacttcagagttttcagctcttacactgtaaacaagttcattttcagtctgggaatgccacatggttttcgccttctgttgattttaaatggsccctatgagtagtactgatgtgtctggtgttcctaatctcaggaatacctggggtaccttacaggggttaggtagctttcttcaggtgaattagagagtt

SEQ ID NO: 234639 - DNA, 201 bp, Homo sapiens
cccagattatgaaacagaaactgttgagagctgatgtgatttgtctgaggtcatgtaactacagaattaagtttccctggagacttgaacccaggttttctttttttttttttttttttttgagacagtctcgctctgtcacccaggctggagtgcattggtgcaatctcagctcactgcagtctcagcctcctagattca

SEQ ID NO: 234640 - DNA, 201 bp, Homo sapiens
ggctaatttttgtatttttagtagagatggggtttcaccatgttggccaggctggtcttgaactcctgacctcgtgatccacccgcctcggcctcccgaartgctgggattataggcatgagccactgcacccagccttttttttttttttttttttttttaaatttatttattttaaattttagataagggtgtacatgt

SEQ ID NO: 234641 - DNA, 201 bp, Homo sapiens
ctcccagagtgctggaattacaggcgtgagccaccttgcccggccaccttctttcatttttaagtcacctgagaagagatgaactgggaagtgacataagrggggaactatatatctttgaataggtaacactgttcttataaacttgattttatagaaatttttaagcattaacaaaagtataataaatgcttctatacc

SEQ ID NO: 234642 - DNA, 201 bp, Homo sapiens
gagtgattagtgctaggcactgtgattgtgacgttcctttgatcttttaacagtccagtatgattggtgatatttcccatattttatatacaggaaaactragactgagagaggtaacttacctaaaatcatacaggcagaaagagtgtctgaagtaaaagttcttgaaatttttaaccttaacaaacatctgctctgctt

SEQ ID NO: 234643 - DNA, 201 bp, Homo sapiens
tgttgataggaaaatacatagtatatataggatttggtactacccacagttttgggcctccactgggagttttggaacacattccctgtgaataagagggractcctgtgtcatgtaaatgcaaatacacattcttccccttttgtttatacaaaggcagtatactatagttaaccacacagtattccattgaatgactaa

SEQ ID NO: 234644 - DNA, 201 bp, Homo sapiens
ctgaggcaggagaatggcgtgaacaagcgaggcagagcttgcagtgagctgagatcgtgccactgcactccagcctgggcgacagtgcaagactctgtctraaaaaaaaaaagtagaaggcctctctactgagtgacagctgggccagtatgtccctccctagtcctggccctgcacatattcaggggtgtgcctagagcc

SEQ ID NO: 234645 - DNA, 201 bp, Homo sapiens; identical to SEQ ID NO: 44579

SEQ ID NO: 234646 - DNA, 201 bp, Homo sapiens
gaggtcaggagatcgagaccatcctggctaacacggtgaaaccctctctctactaaaaatacaaaaaattagccgggtgtggtggcgggcacctgtagtcycagctactcgggaggctgaggcaggagaatggcgtgaacaagcgaggcagagcttgcagtgagctgagatcgtgccactgcactccagcctgggcgacag

SEQ ID NO: 234647 - DNA, 201 bp, Homo sapiens
actttaggcttgtaagttctcagaccaaaacgtgcacatccacacacatggcaccgcagccaagcagaggccggtgaaaggcatcagagtttcagactctygggttgtccttgtaatccatattgcaatttcactatccacagaaacacgaccctcctctgagtagcatcccttgtctgcattataagaaaatgaaggaca

SEQ ID NO: 234648 - DNA, 201 bp, Homo sapiens; identical to SEQ ID NO: 44544

SEQ ID NO: 234649 - DNA, 201 bp, Homo sapiens
cttttggtgcctcggtgaccattgatggtgtgacttacggatctggaactgcaagcagcaaaaaacttgcgaagaataaagctggtaacgtgcttgcttgrgtgtcaaagatacgtgctgcctgctgtgtctgcctcgctgcttggttagggaggggctgagcagtggtgacaagtgggggatgtgggtggggcatgttta

SEQ ID NO: 234650 - DNA, 201 bp, Homo sapiens; identical to SEQ ID NO: 44545

SEQ ID NO: 234651 - DNA, 201 bp, Homo sapiens
aggaaaagagagtggagtatgcagtgctcgatgagttagaagattttactgacaatttggagctagatgaagaaggagcaggcgggttcacggctaaagcratcgttcagagagacagagtggatgaagaggccttgaatttcccctacgaggtatgttggcagcccctcctctagagggctcttagcaaaacccaaagag

SEQ ID NO: 234652 - DNA, 201 bp, Homo sapiens; identical to SEQ ID NO: 44549

SEQ ID NO: 234653 - DNA, 201 bp, Homo sapiens
tgcaaagatgaatccgttggtgagtttttgaaggactcttcccttcttgcctcctgggacccatgagctttgtttttctaatgaaggccataattgttcayagttcctagttgtacttgtgagcaaggggctgtgcacctccactgttggtgtggctgaaaggcttgtcttcctgtccttgcaagaacctgcctgggtgca

SEQ ID NO: 234654 - DNA, 201 bp, Homo sapiens
ttctgaagtaggaattaaagtgggcattaacaaaatatttaactttggacttaagttataattcaggttctgaagaataaaagtaaggttagtttgttttratgcctaaaaagtcctcttagggaatattattttgaagccctttactatgctgttaatagtgcttggcttttaacttggtaccagggaattggaaggttt

SEQ ID NO: 234655 - DNA, 201 bp, Homo sapiens
gttaggtcatgcagtgcggtttgcatgtgtgcatctttactggtatgcacgcatgtgcatgcatgcgtgttcctgtgcacgttgtgggagtgtgcatgtgygtgtgtctgcatgtgttccttctgctctgatgcagggttttctggctgccccctcagacccatcttccctgcttcatgttgtccctttcttcatgcttcc

SEQ ID NO: 234656 - DNA, 201 bp, Homo sapiens
ggagtagatggccagtggatagttgttaaatgtattgattaaacctaaactagtctctggttttcatgttgtgtccccttcgaagtacatccaccatgccytgtcccttgttaaatgtgtgatgtctgcatctcctgttctttccgggaatcttgggaggatgttaggtcatgcagtgcggtttgcatgtgtgcatcttta

SEQ ID NO: 234657 - DNA, 201 bp, Homo sapiens; identical to SEQ ID NO: 44540

SEQ ID NO: 234658 - DNA, 201 bp, Homo sapiens
caccgtgaccttggggtaggaaatgtgcttctggctggcttgcccagtcttagactctcttgttgtagccctctcctttgtgatgtcacccagcctcctgrctttaatgccagctttccttgacatcttcacagctccagccctggcctctcttctgatttccagcctggtgtttctggccacctcttccatatctccatg

SEQ ID NO: 234659 - DNA, 201 bp, Homo sapiens
tgggtggaggcatgtttgaggacaggacagaaatatctgaggagggaaacacaggatgggaggacgtcctgatgcatgacccagatgcggatcctggtgtrtgctatggaaaccacagagcagcaggcactgtgcagaggaatgggaggggacttctgagggggtcaggaggggatgttggtatatgccaggagccagcat

SEQ ID NO: 234660 - DNA, 201 bp, Homo sapiens
aactccgaccccagtgggcatatccgtgccctgccctctagcagctccctctagcgtctctcagacctggctgcatctctccacccacgccagccactgcygctgccacctggtctaggtacctgcagtagcctgctctcaggcctccctgcatggtccagggcccgcaaagctgttttctcacgtgccaccgaagtggtt

SEQ ID NO: 234661 - DNA, 201 bp, Homo sapiens
tggattcattttgctggtattttgttaaggatttttgcatttgtagttataagcaatattgatctgtagttttcttgtgatatctttgtccagtgtaacarcaggtacaggtatcaggataatactggcctcataaaatggttggaacatgttccattttcttctgttgtgtggaatagtttgtgaaggattggtgttcat

SEQ ID NO: 234662 - DNA, 201 bp, Homo sapiens
tgtctgccagaccctgggcgcgcctgccttcagggtcccaggcacacagctgctgggcagcgggcaggccgtagagctacagcctgcagtcctgagcgtgrggtgctatacttcccaggagacatcggacaagagtgtgattgagctgcagcagtatgccaagaagaacaagcccaacctgcacatcctcagcaagctcca

SEQ ID NO: 234663 - DNA, 201 bp, Homo sapiens
ttggcagtgtgtgcccctggaccaggtgtgttggtgtcagctggtagcttcatcctgtttgtttttcagatgatcatgcaccctaagggcacatctaggcyccctgagagcacctcctttctgtgtctgttctcaggaatgctgttgagctctcctgttgcaggagcatgagcgccaggggctctggtgtctgaacagcgt

SEQ ID NO: 234664 - DNA, 201 bp, Homo sapiens
gaaaaaccagaagagtgaatacgtcatggcgtgtggcaagcacacagtgcgcgggtggtgtaaggactccttctctgctgcctggtggccgctgggcgggyggcccctggtgtggccctgcgcctctgtggcttggtctcagctgttgccctggcattgtccctgagcccagctgtgtgtgctggccaccacacgttcagc

SEQ ID NO: 234665 - DNA, 201 bp, Homo sapiens; identical to SEQ ID NO: 44551

SEQ ID NO: 234666 - DNA, 201 bp, Homo sapiens
acccaagtgagccttttggtgcctcggtgaccattgatggtgtgacttacggatctggaactgcaagcagcaaaaaacttgcgaagaataaagctggtaaygtgcttgcttgggtgtcaaagatacgtgctgcctgctgtgtctgcctcgctgcttggttagggaggggctgagcagtggtgacaagtgggggatgtgggt

SEQ ID NO: 234667 - DNA, 201 bp, Homo sapiens
aatggggtgacagtgcagtggtcattgacctgccagtgtgtccaggccctgtgaccttgtctcttgtccatatagtgcgttcctcggagtagatggccagkggatagttgttaaatgtattgattaaacctaaactagtctctggttttcatgttgtgtccccttcgaagtacatccaccatgccttgtcccttgttaaat

SEQ ID NO: 234668 - DNA, 201 bp, Homo sapiens
gcctgcttgtaaagcagctccatcacttcctggctgtatgaccttgagcatgtgggtgaacctttcttccataatgctatgtgagacctgggtgagttaaratgcttaaagtgcttagaacagggcctggctgaggtttggttgccactgctatcctggaatcagctgatgccactgtgtgggccttcctatccggtggcc

SEQ ID NO: 234669 - DNA, 201 bp, Homo sapiens
ataaaagtaaggttagtttgttttgatgcctaaaaagtcctcttagggaatattattttgaagccctttactatgctgttaatagtgcttggcttttaacytggtaccagggaattggaaggtttctgtcattttgtgacgatatttttaaatttctttgcaggtagaagaagaaaggtgccactccggcatgaagacaga

SEQ ID NO: 234670 - DNA, 201 bp, Homo sapiens
ggtgagagaataaacctcttgttctaagccactgactttgtggtatgttgtcacaggagctccaccagggaggttgtccatgctccagagtgggctggatrgcatcttcctttcacccaggaggcactctcagcttcagccaaagtcctagtctgggaaggcacagtgggcaatgtctctgcacctcagcctgctgcagct

SEQ ID NO: 234671 - DNA, 201 bp, Homo sapiens
gggcagtgcccaagcctcaccctcgggctcttttttttcatagcccgagctacactggaaatcctcatccctgactttgttaaacagacctctgaagagargcccaaagacagtgaagaactcgaggtgagtgttgtggtcctgccctgctgggagctgtgtgtgcagtgcggctaccctgccctgttagtgtgagctggg

SEQ ID NO: 234672 - DNA, 201 bp, Homo sapiens
gcgccactgtgctccagcctggtgacagagcgagactcctgtctcaaaaaaaaaaaaaggaaaaagaaaaaaaatatatatatatatggggtagagatggrgtttcaccatattgctcaggctggtctcgaactcctaggctcaagcaatctgcccacctcagcctcccaaattgttgagatgacagacgtgccactgtgc

SEQ ID NO: 234673 - DNA, 201 bp, Homo sapiens
tagattgattctgtgaagtgtgtattctttatgatttgtggccactgaatacacgggccctttagctgagtggtctcctgatgcttggacagggattttcktaaattccctgagccagtaagtctcccggcctgtgatgagagctgtgggtctgtggggctcacctggtgtgctccggtggctgccaactgtcttagcctt

SEQ ID NO: 234674 - DNA, 201 bp, Homo sapiens
ggtgtgctccggtggctgccaactgtcttagcctttgtgtgccacctgcacagagtctccaggtcagtcagctgggaggttttcctgggcctgtgcgcagycatctccagacatacgctagagcctttcagagccccatggacatctccagcttttccttcttgggttcttggccagcctcttgtttgcccaactagtgcc

SEQ ID NO: 234675 - DNA, 201 bp, Homo sapiens
accttccccatttcagtcctaaagaatcacaaggtgtaactttggtcagggctggggaggcaggcgctgaccgctagccctactctactggaacgggaggraagggaagggtagagagcagcgtgctgcagatgggtggcttgtttcctggagccgcgccccatctgagtgggtggctctgcttttcccttccagtctgtc

SEQ ID NO: 234676 - DNA, 201 bp, Homo sapiens
tactgacacatttgatttctccggggagcccaccctggccacctcctcagcataagctctgtggtggggtcgttttgaatcacaaaagacaaacctagcastcaggaaatcctcagggttttaagaactctgttctgggaacctgagagaagaccgtgtgtttttatgatgccatgccttggtttagggtgccttttgtat

SEQ ID NO: 234677 - DNA, 201 bp, Homo sapiens
ctttttggtacagtactgtgagttttgacaaatacacagtcatgtaaccaacactgcaatcaagatgcagaacatttctgtacattccaacattcttcttygttggtcaaactctcccacctgtatcctctggtgggcactgaactgcccctgtagttttgccagatcctgaatgtcctcttagtggagtcacctggtacg

SEQ ID NO: 234678 - DNA, 201 bp, Homo sapiens
agtgccttcctcttctatgcagttgcagcgagttggccttgctgcttgctggagcggcgagggcagaggagctgcccactgccctgtctgtagggccagtrtccctgtggagcgggcttggcacactgtggagcctgcacagcgaggcgtgtgaatcatttgattctaggtttcctcgctgcccatgggccaggcaggctc

SEQ ID NO: 234679 - DNA, 201 bp, Homo sapiens
gtgatccagtgtgtctggtgtttctctaagaagagggaggaggggcagggctagtagtccatatgaaaatcggagcaatgctgccatagccaagggatgcmggggccaccaggagctggcagaggctccctagaggcttctgaaagaggatggccctgctgaggccttgatttcagacttcagaatggtgagagaataaac

SEQ ID NO: 234680 - DNA, 201 bp, Homo sapiens; identical to SEQ ID NO: 44548

SEQ ID NO: 234681 - DNA, 201 bp, Homo sapiens; identical to SEQ ID NO: 44552

SEQ ID NO: 234682 - DNA, 201 bp, Homo sapiens
ctggcaggtcccttccccacagccacccacccctctcctccatcgggaacagaactatgctgccacctctggtgacctcagcacgctgcatcactgtcccygtccacgtgctaccctgtgggcccaggagagccctggggtccctgggtagcagagcgcctggccatgcctctgaggcccctagtgccgcagagttgagct

SEQ ID NO: 234683 - DNA, 201 bp, Homo sapiens; identical to SEQ ID NO: 44553

SEQ ID NO: 234684 - DNA, 201 bp, Homo sapiens
ctgtttgtcagaagcaacagggatttgtctgcaggtcacttctgccatctgtctgctctcatgagctggagcctccacctgtccctggcgggttaaccctyagtagcacatgtggcctcaggcagcttggtgcagggcatcctggtgtcggtcttttttttttttttttttgagacggagtctcgctctgtcgcccaggcc

SEQ ID NO: 234685 - DNA, 201 bp, Homo sapiens
ggtggtgtaaggactccttctctgctgcctggtggccgctgggcgggcggcccctggtgtggccctgcgcctctgtggcttggtctcagctgttgccctgkcattgtccctgagcccagctgtgtgtgctggccaccacacgttcagcctaaggcggactggcagccgtcctgcctgcactttccctgtcttttccctttc

SEQ ID NO: 234686 - DNA, 201 bp, Homo sapiens
ggtataagcctctgcattttaacatcagcagactggttatgctgttatttctaatgtgatgtgttgagggcatgttttatgagttgcatttcgttcaaagwttatgtttatcccatgaatgcaggggtctgccacattcacggtcgtgagcccctagttactgacatggtaacaggaagctgtgtgctagcttgtggcact

SEQ ID NO: 234687 - DNA, 201 bp, Homo sapiens
agtgcctctgttagccaacacagcaagtgggctaggaggaagggtgctgtccaagtgtacgggttttctccccgtgccaagggtccaggggagcttgccgkgagcccgttcctgtccgatagtcctgttggcaaggcagggtttgcatgcggtgtttggtcagctggagcagtggggaggcctacgggcagagagctcccc

SEQ ID NO: 234688 - DNA, 201 bp, Homo sapiens
gttgtactctgatggcaatgcagggggcctctgcaatctcaggctggcctgccccaggccttccctgctcctcctagcctggcatcacaagcactggtgcygttggggctccagggcctcctggcatgatctgctgggctctccctccaccttgtgtcttcccgagcctctgccaagcccacctcactggtacccctgacc

SEQ ID NO: 234689 - DNA, 201 bp, Homo sapiens; identical to SEQ ID NO: 44556

SEQ ID NO: 234690 - DNA, 201 bp, Homo sapiens; identical to SEQ ID NO: 44557

SEQ ID NO: 234691 - DNA, 201 bp, Homo sapiens; identical to SEQ ID NO: 44558

SEQ ID NO: 234692 - DNA, 201 bp, Homo sapiens; identical to SEQ ID NO: 44541

SEQ ID NO: 234693 - DNA, 201 bp, Homo sapiens
agttatgttgccacagctcctggctgtttcgtgtctgccagaccctgggcgcgcctgccttcagggtcccaggcacacagctgctgggcagcgggcaggcygtagagctacagcctgcagtcctgagcgtgaggtgctatacttcccaggagacatcggacaagagtgtgattgagctgcagcagtatgccaagaagaaca

SEQ ID NO: 234694 - DNA, 201 bp, Homo sapiens
agcagtatgccaagaagaacaagcccaacctgcacatcctcagcaagctccaagaggagatgaagaggctagctgaggaaagggtgagtgccaccctagcsggagggctgccgggccacggccattcctgtggcacctgtggagggacagcagaccccaggacccgtgcctgagctgacaccttggaaatgcttggatcct

SEQ ID NO: 234695 - DNA, 201 bp, Homo sapiens
tgcctttttgcatgcttgcatgtaccttgttcctgcacggcagtcctgtctttggctgtcgactgttcgaggccaaccaccaggcgaggatccactgtttmctggccagactagactcccagctgtgggagtggcccaaaccctgctgcaggccttcactcacaaaagggagtgaatggccagcccggggtacccagtgtt

SEQ ID NO: 234696 - DNA, 201 bp, Homo sapiens
ggtggaggttgcagtgagctgatactgcgccactgtgctccagcctggtgacagagcgagactcctgtctcaaaaaaaaaaaaaggaaaaagaaaaaaaawatatatatatatggggtagagatggggtttcaccatattgctcaggctggtctcgaactcctaggctcaagcaatctgcccacctcagcctcccaaattg

SEQ ID NO: 234697 - DNA, 201 bp, Homo sapiens
acgggttgagtgtcacgtagataattgggatacggttttattgtaacaatgagcatggcggaaataaatggaaggtggcaacctgttgacagtgatgcctstctggtgtcaaccgatggacttgggtttcttgtggcaggagtctgatttgcctttttgcatgcttgcatgtaccttgttcctgcacggcagtcctgtctt

SEQ ID NO: 234698 - DNA, 201 bp, Homo sapiens
gaggtggaggttgcagtgagctgatactgcgccactgtgctccagcctggtgacagagcgagactcctgtctcaaaaaaaaaaaaaggaaaaagaaaaaawatatatatatatatggggtagagatggggtttcaccatattgctcaggctggtctcgaactcctaggctcaagcaatctgcccacctcagcctcccaaat

SEQ ID NO: 234699 - DNA, 201 bp, Homo sapiens
tattatcactacactgtaatatgtaatgtaatcactatacaactcaccataatataaaaccagtgggagccctgagcttgttttcttgcaactagatggtyccctctgatgacgatgggagacagtgacagatcatcaggcattagatttgcataaggagtacacaacctagatcccttgaatgcactgttcacaataggg

SEQ ID NO: 234700 - DNA, 201 bp, Homo sapiens
tcgggtgatccactcgcttccgcctcctaaagtgctgggattacaggcattagccactgcgcccggccctagattgttctttatatacttgacccttgagyaacgtggaagttaggggcaccagcctctcacgtggtcgaaaattcacgcatcactttcagtcctcccaaaccttaactacttactggtaacctactcttg

SEQ ID NO: 234701 - DNA, 201 bp, Homo sapiens
agtttcagggaagacaatttttccacagacggtgttggggggcggggatggtttcaggatgactcaagcacatcacatttattgtgcactttttatttctrttatcactacactgtaatatgtaatgtaatcactatacaactcaccataatataaaaccagtgggagccctgagcttgttttcttgcaactagatggttc

SEQ ID NO: 234702 - DNA, 201 bp, Homo sapiens
gggattacaggtgtgtgccaccatttctggctaatttttgtatttttagtagagatggggtttcaccatgttggccaggctggtctcgaactcctgacctygggtgatccactcgcttccgcctcctaaagtgctgggattacaggcattagccactgcgcccggccctagattgttctttatatacttgacccttgagta

SEQ ID NO: 234703 - DNA, 201 bp, Homo sapiens
cccccccccccccccacccgtctgccaagcatgggtatgaatcgtgcacacagccatgcttcaaggccggggcaggggagcctgtgctgatgccatccagrgcactgggctgtgcctggaaggcgagccttgattgtctgaacacataaagcaaactgtccagaagggaatggctgatgtctttattctgagggtgagagg

SEQ ID NO: 234704 - DNA, 201 bp, Homo sapiens
tgagccgatctgcagagctggagtttcccctggatgagcctgactctatgggtgctgacccggggcccccggacgagaaagacccactaggggctgaggcmgcccctggggccctggggcaggtgaaggccaaagtcgaggtgtgcaaagatgaatccgttggtgagtttttgaaggactcttcccttcttgcctcctggg

SEQ ID NO: 234705 - DNA, 201 bp, Homo sapiens
gccgcagagttgagctgagggtctcgcgctcgccctctgactgacccagcccttgcaggtgagtggattgctgtgctctggtggcctgagggaggccacgygccttctgtgtgttccagaaagggtgcctcccactgcatgcttgcttatctgagttagaagaatgctgtggtggagtttagtgtaaatttttaaaatatt

SEQ ID NO: 234706 - DNA, 201 bp, Homo sapiens
gccctggtcttccttgtaatctgtggcactgggcgcattgacccctcggtctgttttctctaatggtctttcttggttgccaggagactgacctcaccccrcttagtgttcctcatgcctgcctggttgctgcccacagcctcttgagcgtcttcagcactttatagtcagttgttagctctgtgctgtgtttcctggatc

SEQ ID NO: 234707 - DNA, 201 bp, Homo sapiens
ctgtcagtgggcctggcatcactgaggcgggccagtcagcatgcagttatgttgccacagctcctggctgtttcgtgtctgccagaccctgggcgcgcctrccttcagggtcccaggcacacagctgctgggcagcgggcaggccgtagagctacagcctgcagtcctgagcgtgaggtgctatacttcccaggagacatc

SEQ ID NO: 234708 - DNA, 201 bp, Homo sapiens
atttcataaagaggaaacttgcctgtctttgtataggcagggaaaaaatgtcctttttgttagagatttttgtcctcttttgcagcattgagtgtgcaccrtaaatgtcgggtacacataggtttgtgatgggaatgaatctttgaggcagtctacaagatttagattgttcttttttttgagacaaagtcttgctctgtc

SEQ ID NO: 234709 - DNA, 201 bp, Homo sapiens
cctctttcacacctttgtcctctggcctggaggactgtccccgtgccttggatgcagttgcttctgcctggcacagctgtgggtctcccctctcaagtagsaacctacttgtggcatgagagtcgcttcaccttcagtggctccttattgtccccagggcggaacgggctgcaggtggcacccaggcctctctgtgcctcg

SEQ ID NO: 234710 - DNA, 201 bp, Homo sapiens
ctgctgctgtcagtgggcctggcatcactgaggcgggccagtcagcatgcagttatgttgccacagctcctggctgtttcgtgtctgccagaccctgggcrcgcctgccttcagggtcccaggcacacagctgctgggcagcgggcaggccgtagagctacagcctgcagtcctgagcgtgaggtgctatacttcccagga

SEQ ID NO: 234711 - DNA, 201 bp, Homo sapiens
cagtgggcaatgtctctgcacctcagcctgctgcagcttccctatgcctcactgtgtggaatctccccatcacctcttgtttccctgtctgcctctcttgyccttcctgtgtgttcttgggttggctgcagagccagggtgatgacactgttggaagccttgctgggctgggcctctgctggccacctggggctgggctct

SEQ ID NO: 234712 - DNA, 201 bp, Homo sapiens; identical to SEQ ID NO: 44554

SEQ ID NO: 234713 - DNA, 201 bp, Homo sapiens
tcctccctgcctgctcccaggaccccagggtgagagcgcacacacccagtgtggcccgtgaggctttctggtagcctgccacacgtctgggcttttccttytgtcctctcctgaccctgtcactgaagtgctgtctctcctcagggccctcgctcagcctctgagctgtggggatgggaggcagcagtgcacagttcactc

SEQ ID NO: 234714 - DNA, 201 bp, Homo sapiens; identical to SEQ ID NO: 44555

SEQ ID NO: 234715 - DNA, 201 bp, Homo sapiens
tgctgctggctgtgcctgtgtccctcctgcgtctgtgatctggggccggtggggcctaatgagctcattcatggctggtgtagtaaaggagactacatccygggtccagcgtcccacaggccagcccaggcttgggcacgtggtgggctcaggcttccagaaggcctggagagggcaagcctctgcttgtgtcacctttgg

SEQ ID NO: 234716 - DNA, 201 bp, Homo sapiens
gggctggctcagctgatgcttctgctgctggctgtgcctgtgtccctcctgcgtctgtgatctggggccggtggggcctaatgagctcattcatggctggkgtagtaaaggagactacatcctgggtccagcgtcccacaggccagcccaggcttgggcacgtggtgggctcaggcttccagaaggcctggagagggcaag

SEQ ID NO: 234717 - DNA, 201 bp, Homo sapiens
ccccaagggccctgtgccaggctcccccagtaccacgctcacatccctgcctgagaggctggacccctgcaggcttcagctctgcccctgctgtgggtggytggggagctctggggagctggggtcccctcccatgggtaagtggttctagactatggcagctgctctgtcctgtgctgggcccagactgccacaccaccc

SEQ ID NO: 234718 - DNA, 201 bp, Homo sapiens
tgcagtagtgagccatcccctcacacactgccagccttgcccactgtgtcctccctggccgcccggagctgtgtccgcctcctgcctggctgcctgtgctsggcccctccacaagcccaaaacagccctagggtactcagtgttttcagagccgcctagatgcaggactgtttgtgttttggttttaaatttttttaatta

SEQ ID NO: 234719 - DNA, 201 bp, Homo sapiens
ggcacaggggaggaaaccgaggcagggagcctgtgggggctgctcggcaggggacaggcagctcctgtgcccactgctgtcccacacctgcatggaaacasaaaccccaccacggagccccctctcatctctacagggcctccagagcgccatgtgcaagaacttcatgggcggggtggggtggggtcaggagcctgctgt

SEQ ID NO: 234720 - DNA, 201 bp, Homo sapiens
ttttcatggcctgaaattgcagcacacccatttttgtgccctgatcctctgctaattgtcatagatgtgtcggtgatgggacagactcactttctccacaygcacaggcctggtggccagcactgcccagcactcgggagctggtgggggttcctctcagcttgtaatcaggactcccagcctctgggtggactctcaatg

SEQ ID NO: 234721 - DNA, 201 bp, Homo sapiens
gcaagggggcctcgctggggtgtctctgtcttagccacactcggtgtttctgggtcctgtgacccatgtgtgagcagcctgtggtgctggtggcacagggraggaaaccgaggcagggagcctgtgggggctgctcggcaggggacaggcagctcctgtgcccactgctgtcccacacctgcatggaaacacaaaccccac

SEQ ID NO: 234722 - DNA, 201 bp, Homo sapiens
tcagggccaggggtgcactgtacgatccctccccagacgcaaagctgtgtctgtcatgaggcttatgggcatgtttgggctggtccccagagtcacggcaygtttgatgcagggacgctgtgccccagctggttctgtgtgaattgtctggtcccagacatcgcttttgcttggttgctggtctttctttttcatgaggtg

SEQ ID NO: 234723 - DNA, 201 bp, Homo sapiens
ccctctgtggtacacacgggccgtcaggggttttgtgtctgaggatgcagctgtcctaggttgctggaaatggaattgctgggtcagagagaatgtgcgcrtggtcaagcctgctgagtgtcctcgctgcaggagggccgtactgctcgggcttcctggtgcaccgggatgcccacccccactgtgccctacagggacctg

SEQ ID NO: 234724 - DNA, 201 bp, Homo sapiens
gcgatgtggaggctttggggagtgcccacatctaaggggcatcccaaaagaggagccagtgctggtggtgctgcaataggaggaggaggcagcagggcagraatgccaggggagggagtggccagccacagggcaaggacgggcattctaggtggcagctgagtgggacagagactagccatgcagaagccatgcccacct

SEQ ID NO: 234725 - DNA, 201 bp, Homo sapiens
accgtcaccctctgtggtacacacgggccgtcaggggttttgtgtctgaggatgcagctgtcctaggttgctggaaatggaattgctgggtcagagagaaygtgcgcatggtcaagcctgctgagtgtcctcgctgcaggagggccgtactgctcgggcttcctggtgcaccgggatgcccacccccactgtgccctacag

SEQ ID NO: 234726 - DNA, 201 bp, Homo sapiens
aggtcagcctaggacccgtggtggcgggagtgcggaggatggtggaggaagaaggagctgaactggacagatggagggctctgggagggcactgctgtgcktgtgcacacaaggatgtcttaaggtcaagttttggccatagagagccccggccaaggagacaggagggcgagaagggacatcccaggtagaggaactggc

SEQ ID NO: 234727 - DNA, 201 bp, Homo sapiens
aaaattggccacagttccctgagcctgctcctgcagacacttagatccagagatgtgcatgaacactcggtcctccccaccctgcaggctcagcctgtttrcttttcagttcacacagtgggatcgcccatcagctgttctgcacctgcttttactgctctagtttcttggtgatcttttcatgtagcacaggctggccaa

SEQ ID NO: 234728 - DNA, 201 bp, Homo sapiens
ggagcgccaaggtcagcctaggacccgtggtggcgggagtgcggaggatggtggaggaagaaggagctgaactggacagatggagggctctgggagggcaytgctgtgcttgtgcacacaaggatgtcttaaggtcaagttttggccatagagagccccggccaaggagacaggagggcgagaagggacatcccaggtaga

SEQ ID NO: 234729 - DNA, 201 bp, Homo sapiens
acaatgtgaccctggacatggagctggctcaccgtgagggctggtgttttggggccaagccggtgcggggcgcatacctggcccaggagcgagcctgtgcrtcagagatcggatatgaggaccccatcaaccccatgtacgaggccaccaacaccatgtaccacaggtgcgcagctctcccacccctctgtcttctcaggg

SEQ ID NO: 234730 - DNA, 201 bp, Homo sapiens
gggagcctgtgggggctgctcggcaggggacaggcagctcctgtgcccactgctgtcccacacctgcatggaaacacaaaccccaccacggagccccctcycatctctacagggcctccagagcgccatgtgcaagaacttcatgggcggggtggggtggggtcaggagcctgctgtgggctggccaggcatgaacaccaa

SEQ ID NO: 234731 - DNA, 201 bp, Homo sapiens
tgcggccgctggtgcccgccgtggacttcggcaacgcgtaggaggcgtactgcagctggcgaacctgggagctggcgcgcagcctgctggtgctgcgcttstgcgcctggcccgcgctgctggcgcgccacgagcaggtgcgcggggtgcagccggggcgcggggcttctgcccgtcccgggagcctttacggagtttcct

SEQ ID NO: 234732 - DNA, 201 bp, Homo sapiens
ctcaggtgagactgtacagaggtcgggggctgcacccctggcctcaacaggaggcgggggaaggcgggggacggtgtgagatgagaagcaccgagccacasttgagcttaggtgaggcctcggcgggtgcgaggtgagggcagggatccacgaactcagagtcagatgctgttggcccgaatcccatggggagcgccaagg

SEQ ID NO: 234733 - DNA, 201 bp, Homo sapiens
ccccactcctgtggcttgtgagggggtgggcaccgtgggggcgcacagggggcatggtgggcagtggtcggaggtggttttgggaactcacccagggcacrtggctcactctgcagctgctggggttggcctggtggggaggaggaggtcggagggactctgaacagagaggggagatgctggcaggagggctggagaccc

SEQ ID NO: 234734 - DNA, 201 bp, Homo sapiens
ggcttcagggcccccatggccacaggccatgagacatctactcaagtgtcagagaccacctcaggcaaaggcatgggaaaggagcaggaggagcggggtcsctgaccctgagcgtggggcctctgcctaccaggggtgtggtcgggccctccaccctcagtgctgcccttcagggtagacagcccctccctcatttgcagc

SEQ ID NO: 234735 - DNA, 201 bp, Homo sapiens
ggatggtggaggaagaaggagctgaactggacagatggagggctctgggagggcactgctgtgcttgtgcacacaaggatgtcttaaggtcaagttttggycatagagagccccggccaaggagacaggagggcgagaagggacatcccaggtagaggaactggcaaggtgagggacggcgatgtggaggctttggggagt

SEQ ID NO: 234736 - DNA, 201 bp, Homo sapiens
tggcctgaccatgtgctgtacccccagacaggacagctggagcccctgctgtcccggtttgctgaggaggaggagctacagatgacgaggatgctacagcrgatggatgtcctgcccaaggcgagctgtcccgctcgggcagagggctggggccttggggacccgggactcatgcagaagagggcacctgcctcacttgag

SEQ ID NO: 234737 - DNA, 201 bp, Homo sapiens
aagaggagccagtgctggtggtgctgcaataggaggaggaggcagcagggcaggaatgccaggggagggagtggccagccacagggcaaggacgggcattytaggtggcagctgagtgggacagagactagccatgcagaagccatgcccaccttgtggccaggatgtagtgggggctaggaaggcaccaggtcaggtttc

SEQ ID NO: 234738 - DNA, 201 bp, Homo sapiens
tggaccggcgtctgctgaggaaagggagctgcttggagcgcggggcgagggactcacgtggagaaggcgtgggccctacggcgggcggggcggggcctcargaggagcgggtgcagatgctagggaggggcggggcccctgggatggggcggtgtctcccgaggagtgggcgcggctcggagcgtgggacttctaaggaga

SEQ ID NO: 234739 - DNA, 201 bp, Homo sapiens
gaagagccctgatgttgcagctcttctctggtggccagtccccagggaactccagggcccctgaggctcccctgcaggtagcctggctcccgctgtgcctrcaggcttccccgatctcctgtctcttcacattctgtacacacctcgacgatggtatttaccaaaagcccccctcaagacagctccataacacagggaagc

SEQ ID NO: 234740 - DNA, 201 bp, Homo sapiens
caatgtgaccctggacatggagctggctcaccgtgagggctggtgttttggggccaagccggtgcggggcgcatacctggcccaggagcgagcctgtgcakcagagatcggatatgaggaccccatcaaccccatgtacgaggccaccaacaccatgtaccacaggtgcgcagctctcccacccctctgtcttctcagggc

SEQ ID NO: 234741 - DNA, 201 bp, Homo sapiens
cccaggaaggccccatcctgctgtcacttgggcttgcccaggctccctgtgacttttggccctggccccacaggatgcctatgacaatgtgaccctggacrtggagctggctcaccgtgagggctggtgttttggggccaagccggtgcggggcgcatacctggcccaggagcgagcctgtgcatcagagatcggatatga

SEQ ID NO: 234742 - DNA, 201 bp, Homo sapiens
aggggttttgtgtctgaggatgcagctgtcctaggttgctggaaatggaattgctgggtcagagagaatgtgcgcatggtcaagcctgctgagtgtcctcrctgcaggagggccgtactgctcgggcttcctggtgcaccgggatgcccacccccactgtgccctacagggacctgcttcccttttatttcctttcagggc

SEQ ID NO: 234743 - DNA, 201 bp, Homo sapiens
tcttctgcagcacagctcacccagcgggccccagggtccaggaaagagccccttaggtggtggccacagccaggcctgcagaggaggccgaggccagggtractgcctcagagtagcaagaaaggcccgctgcccgcagcctctcccctggttctcagaaccagccaagagtgtctaaggagcaagaggaagacaacgatc

SEQ ID NO: 234744 - DNA, 201 bp, Homo sapiens
gcacgtgctgcacaactgccctgtctgcctgtagccaggggtcttcctcctgggccctcttcctgctctgggtggagcccttctgtttgacgattgggtgrtcagtgttcacttcctcagtgtcacatgggagctgcagggggccctcccacaatggtggggcctctgtgagaactggggaggctgttagagtacacactt

SEQ ID NO: 234745 - DNA, 201 bp, Homo sapiens
aaaggggccgcgagagggtaggtgctctagaggtggcccacgggcgggcggcactgaggccgggcctgcaggggaggcggtgtggccagcggactcttgtkgggtggcaagggaagggaagaaccacagggctgcacaggttccgagggggcctagtggtccgcatttgcccttgggtgggcggtgggactgggaggacag

SEQ ID NO: 234746 - DNA, 201 bp, Homo sapiens
ctgggattacaggtttgagctactgcacgccactggttttaaatttttaaacagaaaacaatatttacatttcctctgtctttttttttttttttttttttgagacggagtctcgctctgtcacccaggctggagtacagtggcgcgatctctgctcactgcaagctccgcctcctgggttcatgccattctcctgcctca

SEQ ID NO: 234747 - DNA, 201 bp, Homo sapiens
cttgcccactgtgtcctccctggccgcccggagctgtgtccgcctcctgcctggctgcctgtgctcggcccctccacaagcccaaaacagccctagggtastcagtgttttcagagccgcctagatgcaggactgtttgtgttttggttttaaatttttttaattaatttattttttatagagaccaggtctcaccatgtt

SEQ ID NO: 234748 - DNA, 201 bp, Homo sapiens
gctcctgtgcccactgctgtcccacacctgcatggaaacacaaaccccaccacggagccccctctcatctctacagggcctccagagcgccatgtgcaagracttcatgggcggggtggggtggggtcaggagcctgctgtgggctggccaggcatgaacaccaagctggaggtggcggtgctgcaggtggggcagccttc

SEQ ID NO: 234749 - DNA, 201 bp, Homo sapiens
actccgaaaggacagcctgccctcagcagggcttcctctctccagcttccgcccggcacctgtctgtccctactatcttgctgtggcagtggcttccccartggacacagcttccccctcccctgagtggcagccgggctctctcctcttggccccaagggccctgtgccaggctcccccagtaccacgctcacatccctg

SEQ ID NO: 234750 - DNA, 201 bp, Homo sapiens
ctcggcaggggacaggcagctcctgtgcccactgctgtcccacacctgcatggaaacacaaaccccaccacggagccccctctcatctctacagggcctcyagagcgccatgtgcaagaacttcatgggcggggtggggtggggtcaggagcctgctgtgggctggccaggcatgaacaccaagctggaggtggcggtgct

SEQ ID NO: 234751 - DNA, 201 bp, Homo sapiens
tgtgggggctgctcggcaggggacaggcagctcctgtgcccactgctgtcccacacctgcatggaaacacaaaccccaccacggagccccctctcatctcyacagggcctccagagcgccatgtgcaagaacttcatgggcggggtggggtggggtcaggagcctgctgtgggctggccaggcatgaacaccaagctggag

SEQ ID NO: 234752 - DNA, 201 bp, Homo sapiens
ctgtgggggctgctcggcaggggacaggcagctcctgtgcccactgctgtcccacacctgcatggaaacacaaaccccaccacggagccccctctcatctytacagggcctccagagcgccatgtgcaagaacttcatgggcggggtggggtggggtcaggagcctgctgtgggctggccaggcatgaacaccaagctgga

SEQ ID NO: 234753 - DNA, 201 bp, Homo sapiens
tgagtggcagccgggctctctcctcttggccccaagggccctgtgccaggctcccccagtaccacgctcacatccctgcctgagaggctggacccctgcargcttcagctctgcccctgctgtgggtggctggggagctctggggagctggggtcccctcccatgggtaagtggttctagactatggcagctgctctgtcc

SEQ ID NO: 234754 - DNA, 201 bp, Homo sapiens
ggaggaaaccgaggcagggagcctgtgggggctgctcggcaggggacaggcagctcctgtgcccactgctgtcccacacctgcatggaaacacaaaccccrccacggagccccctctcatctctacagggcctccagagcgccatgtgcaagaacttcatgggcggggtggggtggggtcaggagcctgctgtgggctggc

SEQ ID NO: 234755 - DNA, 201 bp, Homo sapiens
cctttcagggccaggggtgcactgtacgatccctccccagacgcaaagctgtgtctgtcatgaggcttatgggcatgtttgggctggtccccagagtcacrgcacgtttgatgcagggacgctgtgccccagctggttctgtgtgaattgtctggtcccagacatcgcttttgcttggttgctggtctttctttttcatga

SEQ ID NO: 234756 - DNA, 201 bp, Homo sapiens
acatggcactcttcacaggtgcctggactacgtgctggaggagctgaagcacaacgccaaggccaaggtgatggtggcctcccacaatgaggacacagtgygcttcgcactgcgcaggtaggtgtgccccaccctgcaccgaaaccccaacctgagccgttgtctcctccagctggggagaggtggcagcagtgcagagct

SEQ ID NO: 234757 - DNA, 201 bp, Homo sapiens
ctgttcctcctgatcctgtggatacccttggaaagagccagctcactggatggatctgggtctgccttcggcctcctctctgtgcagctggtaatgagagrtgcaggcgaccacaggcctggaactgggctcacatggcactcttcacaggtgcctggactacgtgctggaggagctgaagcacaacgccaaggccaaggt

SEQ ID NO: 234758 - DNA, 201 bp, Homo sapiens
agggtatctggtggtgttgatttctcaggtgagactgtacagaggtcgggggctgcacccctggcctcaacaggaggcgggggaaggcgggggacggtgtsagatgagaagcaccgagccacacttgagcttaggtgaggcctcggcgggtgcgaggtgagggcagggatccacgaactcagagtcagatgctgttggccc

SEQ ID NO: 234759 - DNA, 201 bp, Homo sapiens
actgtggcattcagctttcccaaggctcacatctgctccatccagcaaaggggtcttgcaccccaagcctgcctccctcttcacacacacaatcccacttsgtcaaccacaaagatgcatgggtttacccagcctcaaccccatcggcccctccccttccagttgccggagggctcgggccccttcagctgggctcccaca

SEQ ID NO: 234760 - DNA, 201 bp, Homo sapiens
acctgtctatgcagtagaaacaaaccagacatggatcctgttcttactaacgatgtaataaagccagaaacagcaccagaggccaatgggtggggggaagrataaaatgtgagcgaatggggctgatccaggccttctcacttctcaaggaaagtgtcgcaaagatgggcatcgcatccagggctgagattgaggactggt

SEQ ID NO: 234761 - DNA, 201 bp, Homo sapiens
cagctagaactactcaaagaactcaggggaacactctacctcagtttactggtttagtataagggatacagctcaggaatggccatatggaagagacatayggggcaaggtagcagggtggtgcagagcttacaggccctctccggtcacaccaccatccagcacatcagtgagttcaccaacccagaagctcttgtcttg

SEQ ID NO: 234762 - DNA, 201 bp, Homo sapiens
tgattcagagaatggctgaggctccaggtggagtaactttgaaatcccttgtggagttacctcgagcctcctgggtctgtttacgatgatgcattctgaasgaaaccttcaagcatcagggaattgattccaggttcacattatgctgggtaggttgtattgccaaagctggagacagcagtgaccatgactggacagttt

SEQ ID NO: 234763 - DNA, 201 bp, Homo sapiens
gaatggggctgtgattcagagaatggctgaggctccaggtggagtaactttgaaatcccttgtggagttacctcgagcctcctgggtctgtttacgatgakgcattctgaaggaaaccttcaagcatcagggaattgattccaggttcacattatgctgggtaggttgtattgccaaagctggagacagcagtgaccatga

SEQ ID NO: 234764 - DNA, 201 bp, Homo sapiens
tctcctctggaactcccacaatgtgtatgttgatctgcttgatggtgtcccacagatgtcttaggctctgttcactttccttcagtaatttttatttctgytcctcagacttaataatttctattgtcttcaagttctattatcttcaagttcactgattcttttgcttgctcaaatctgcctttgaatccctctagtgaa

SEQ ID NO: 234765 - DNA, 201 bp, Homo sapiens
aaattactgcaaattgggtggcttaaaacaacagacatctattccctcacagttctggaggctagaagcctgaaaccaagctatgggcaaggccatgctcyctctgcagcctgggtgagagggatgggcaggtggctttgtctcatgcctctctcccagcttctggtggttaccctgaaatccttgccactctctggcttg

SEQ ID NO: 234766 - DNA, 201 bp, Homo sapiens
caacagctggatacaaccagatggtgccctagatcttacggatggacaaggatgggtacagacaggttattaggaaggacttaaagagttggggaacctgrttcaaacaaagtcctcgatagcctgaacgtaggaggaaggggagaaatggtaagtgtagtcaattgatagctaccaattgggtgctctcaggagaccttg

SEQ ID NO: 234767 - DNA, 201 bp, Homo sapiens
tcacttgtgtgtcggtagccagtgatttgattacattatatttccctgggcaagcagagccaggaggcctctggatgggggctgaggccttgattgccctrgtgggtactctgagttgcagaaggtgggtttcttgctagacggtttctgtttcaacaaggtctcaggtgccttttactgcaaggaatgttgtaggtctct

SEQ ID NO: 234768 - DNA, 201 bp, Homo sapiens
tggatgtaataaaagactagtcagcagcatatgcagattccttccataaaatataattttatgataccaggcagggctccttttatggctttctaaaatcrtttggttgaaattgctagaggtgtggagggccttcacttgtgtgtcggtagccagtgatttgattacattatatttccctgggcaagcagagccaggagg

SEQ ID NO: 234769 - DNA, 201 bp, Homo sapiens
tgagtctctcggaggaactattaaggagaaattgtttactgaattggatgtaataaaagactagtcagcagcatatgcagattccttccataaaatataaytttatgataccaggcagggctccttttatggctttctaaaatcatttggttgaaattgctagaggtgtggagggccttcacttgtgtgtcggtagccagt

SEQ ID NO: 234770 - DNA, 201 bp, Homo sapiens
aaacaggttttcttaaaggtaaagtgagtctctcggaggaactattaaggagaaattgtttactgaattggatgtaataaaagactagtcagcagcatatrcagattccttccataaaatataattttatgataccaggcagggctccttttatggctttctaaaatcatttggttgaaattgctagaggtgtggagggcc

SEQ ID NO: 234771 - DNA, 201 bp, Homo sapiens
ggatggagtcctggatgtcaggccagctttgtgtgtggggtaaagcaaaggtcagtctttgagaagccttaatttcctctctgccaaagcactaactgctsagagtagaaacaggttttcttaaaggtaaagtgagtctctcggaggaactattaaggagaaattgtttactgaattggatgtaataaaagactagtcagc

SEQ ID NO: 234772 - DNA, 201 bp, Homo sapiens
gcaaatcttcccagagccctgatttggatttattttccttctcccggatgttcttgaattggggtgtgttcctcttagtgctagctcctcctatcacttcytcttcccatcctttaatgatacttctttcagtttcccatatccccaagtgcactttcattcctcgcaaacttcacatgggtaggaatcaagtctgatttt

SEQ ID NO: 234773 - DNA, 201 bp, Homo sapiens
tagctcctctgccctgccagctttctctaatccccttgtgcaggcttcctcttctccagtcgggaggatggaaatgatataattaagtcattttattaagwagttagtaaccttagcagctagaagtgttagtccccagctggacacttgcattttaataaagggttcttggagcagtggtgaaccctaagaactggactt

SEQ ID NO: 234774 - DNA, 201 bp, Homo sapiens
aaagaaactctgcaacacaggaggtacccaaatgtgtttgggattggggactgcaccaaccttcctacgtcaaagaccgctgctgcagtaggtaagtcaaycagctccatttctccctttctcaaaaatatgtcacctcaaggcatgattgtaacaaaaacacaagcttggcatcggccagagacggtggttcctgcctgt

SEQ ID NO: 234775 - DNA, 201 bp, Homo sapiens
gtgttctgtcttccatgctctaggccctcttttgctgctggataaataataatagtaaatcactttcacataccaagtactctatcatctgctaccttacttttttttttttttttttgagacagagtcttgctctgttgcccaggttggagtgcagtggcacaatcttggctcactgcaacctccacttcctgggttcat

SEQ ID NO: 234776 - DNA, 201 bp, Homo sapiens
ctcagtcccacaagactgccctcacttcagacgccagccaggcagggcatctgctgctggccccaaggggacccacacctgtgtctagctgactacaaatyccaaggctcccatgatccatcctcctcaggttctataatcagctagaactactcaaagaactcaggggaacactctacctcagtttactggtttagtata

SEQ ID NO: 234777 - DNA, 201 bp, Homo sapiens
attagctcccggagttagtggaggccccgtagtttaaagctcagtcccacaagactgccctcacttcagacgccagccaggcagggcatctgctgctggcyccaaggggacccacacctgtgtctagctgactacaaatcccaaggctcccatgatccatcctcctcaggttctataatcagctagaactactcaaagaac

SEQ ID NO: 234778 - DNA, 201 bp, Homo sapiens
tataatttcttcatgcttttgaaagcaagaatgctttagttcagtgaccgttacccacgttttggcctcaggctcctttattttatttttatttttatatytatttatttttttgagacagggtctcgctccgctgcccaggctggagtgcagtggtgcgatcatagctcgctgcagccatgaacttctgggctcaagtta

SEQ ID NO: 234779 - DNA, 201 bp, Homo sapiens
ggttgcagtgagtcgagatccagcctgggcgacagagcaagattccgcctcaaaaaaaaaagaaaaaagaaagattgtgtggctgttgcttccttcaattktatctttctctgcttgttgctataaacttggtttaggtcaatgtcagaaattactgttggttcctaagtgatgttttctgatgccacttctaacatcaaa

SEQ ID NO: 234780 - DNA, 201 bp, Homo sapiens
cctcagcctcctgaatagctgggaccacaggtgtgtgccaccgtgcccagccattctgggcttgagcaattctcccaccttggcttcccaaagtgctaggrttacaggtgtgagccactgcccctggccctcagactcctttgataatccagtgaaaactataagtcctctgccctgaaaaatatataaagatacagaatt

SEQ ID NO: 234781 - DNA, 201 bp, Homo sapiens
tgctgactttagggtccagtttgatcttccattgagtgattgattgattgattgattgagacagagtcccactctgttgcccaggctggagtgcaggggtrtgatctcagctcacagccaccaccacctcccaggttgaagcaattcttgtgcctcagctttcacagtagctgggattacatgcacggggtaccacgccgg

SEQ ID NO: 234782 - DNA, 201 bp, Homo sapiens
ccaccacacccagctaatttttgtattttttatagagatggggtttcaccatgttggccaggctgatcttgaacttctgacctcaggtgatccccagcctyaggctcccaaagtgctgggattacaggagtgagtcactgtgcctggccagatttctgtagctttataataagtattgaaattgggtactgtgagtcttcc

SEQ ID NO: 234783 - DNA, 201 bp, Homo sapiens
acaaaaaatacaaaaattagccgggtattgtggtgcatgcctgtaatcccagctactactcaggaggctgaggcaggagaatcacttgaactgggaggcaraggttgcagtgagccgaggtcacaccactgcactccagcctgggcgacagagtgagaccctgtctcaaaaaaaaaaaaaaaaaaaaaaaaaaagggatag

SEQ ID NO: 234784 - DNA, 201 bp, Homo sapiens
ctgtaatcccagctactactcaggaggctgaggcaggagaatcacttgaactgggaggcagaggttgcagtgagccgaggtcacaccactgcactccagcytgggcgacagagtgagaccctgtctcaaaaaaaaaaaaaaaaaaaaaaaaaaagggatagaggccaggcatggtggctcatgcctgtaatcctaacactt

SEQ ID NO: 234785 - DNA, 201 bp, Homo sapiens
cactttgggaggccgaggcggttggatcagttgaggtcaggagctcaagaccagcctgcagcctggccaacatggtgaaaccctgtctctactaaacatamaaaaatgagcagggtgtggtggtgtgcttgcactccagcctgggcgacagagcgagagcgagactccatctcaaaaaaaaaaaaaattaaataaataaat

SEQ ID NO: 234786 - DNA, 201 bp, Homo sapiens; identical to SEQ ID NO: 44615

SEQ ID NO: 234787 - DNA, 201 bp, Homo sapiens
agtaagaaagagggagaaaagtagatgcagaaaagccttcaacaaaattcaacagcccttcatgctaaaatctctcaataaactaggtattaatggaatgyatctcaaaataataagagctatttatgacaaacccacagccaatatcatactgaatgagcaaaaactggaagcattccctttgaaaactggcacaagaca

SEQ ID NO: 234788 - DNA, 201 bp, Homo sapiens
aataaagagtattcatttgggaaaagaggaagtcaaatttccatttgcagatgacatgattgtatatttagaaaaccccatcttctcagcccaaaaatctycttaagctgatgagcaacttcagcaaagtctcaggatacaaaatcaatgtgcaaaaatcacaagtgttcctttacaccaataacagacagagagccaaat

SEQ ID NO: 234789 - DNA, 201 bp, Homo sapiens
gcaagcagaaaaacaaggtgttctttcattttttttccccctatataattcagtcaaaactcttaactttcatttgaaataatccaattgactgacatatwttttctttcctggaatctgaatgcaagcattttccttatgtaaatataatttgtgttttctgcttagcaattgtattggtttggtgaaattgtcagttct

SEQ ID NO: 234790 - DNA, 201 bp, Homo sapiens
agatggatgaaagacttaaatgttagacctaaaaccataaaaatcctagaagaaaatctaggcaataccattcaggacacagacatgggcaaggacttcaygcaccaaaagcaatggcagcaaaagccaaaatagacaaatggatctaattaaactaaagagcttcttcatggcaaaagaaactaccatcagagtgaacag

SEQ ID NO: 234791 - DNA, 201 bp, Homo sapiens
acattcttccttcttctttatcccctatagctgattgtcgcaaaaatgtcaatgtgtgtctcacattcacacccctcatctctgttcccattcagaccccrccctcactgtgcctgaatttctgaaacagccgcttaatggatcttcatattcctggtctttcctgttataacagacagactcttcttacccatcactggc

SEQ ID NO: 234792 - DNA, 201 bp, Homo sapiens
aagaaaagcactgtgagccaagcaaaacacagctctggcctgcacttggcctgcaggttgctgctttgtgactcctagatcaaattgccattgtctgggawtaagctctcagacctaaactttagtaacacatgcctatccaatctcatttctccctcttcccagagcgctagactgccctcctttatatccaccattagg

SEQ ID NO: 234793 - DNA, 201 bp, Homo sapiens
ttgtattggtaattttgggttatgaaaccccagatttgaagccccaaattgtatagggttcaatgcccataaaacccagatctgcccctgcttagaggccrgcccctctaggagacagcatgtggggccacccagagatgcaggactcttctgttctgccctatcgcagcagagaggccatccctggagctggaaggtgca

SEQ ID NO: 234794 - DNA, 201 bp, Homo sapiens
gatgactcacacctataatcccagcacttttggaagctgaagcaggaggatcacttgagctcaggagttcgagaccagcctgggcaacatagtgagacccmcccccccatctctgccaaaaaaaaaaaaagaagaaaagaaaaaattagacaggtgtggtggcacatgcctgtagttccagttacttgggaggctgaggtg

SEQ ID NO: 234795 - DNA, 201 bp, Homo sapiens
ttgtgactcctagatcaaattgccattgtctgggaataagctctcagacctaaactttagtaacacatgcctatccaatctcatttctccctcttcccagwgcgctagactgccctcctttatatccaccattaggagattctcattgcaagtgattctactttcaaaatcttgaacccaactgtccaaaagtagcccgaa

SEQ ID NO: 234796 - DNA, 201 bp, Homo sapiens
tgggaataagctctcagacctaaactttagtaacacatgcctatccaatctcatttctccctcttcccagagcgctagactgccctcctttatatccaccrttaggagattctcattgcaagtgattctactttcaaaatcttgaacccaactgtccaaaagtagcccgaacaggtccctgccataacttccctttttctg

SEQ ID NO: 234797 - DNA, 201 bp, Homo sapiens
gtaacacatgcctatccaatctcatttctccctcttcccagagcgctagactgccctcctttatatccaccattaggagattctcattgcaagtgattctmctttcaaaatcttgaacccaactgtccaaaagtagcccgaacaggtccctgccataacttccctttttctgctcacataattcctttttcttcagctgtc

SEQ ID NO: 234798 - DNA, 201 bp, Homo sapiens
atctcatttctccctcttcccagagcgctagactgccctcctttatatccaccattaggagattctcattgcaagtgattctactttcaaaatcttgaacycaactgtccaaaagtagcccgaacaggtccctgccataacttccctttttctgctcacataattcctttttcttcagctgtctagatgtcaactttgact

SEQ ID NO: 234799 - DNA, 201 bp, Homo sapiens
agaggaaagtgggtgcagagaatgtggccattgttgagcccagtgaggtaagcctccccttttgagggcctgggtgtgtgtgtacgtgtgtgtgtgtgtgwgtgtgtgtgtgtgtgtgttctggggttggatatgactatcaagcaatgggtcttcatatgttcaggttagggcttctcctgggcacagaaagcagcctat

SEQ ID NO: 234800 - DNA, 201 bp, Homo sapiens
gaaagtgggtgcagagaatgtggccattgttgagcccagtgaggtaagcctccccttttgagggcctgggtgtgtgtgtacgtgtgtgtgtgtgtgagtgwgtgtgtgtgtgtgttctggggttggatatgactatcaagcaatgggtcttcatatgttcaggttagggcttctcctgggcacagaaagcagcctatccag

SEQ ID NO: 234801 - DNA, 201 bp, Homo sapiens
gtgactgccatgaaggaagaagctcttactcacagttccctagaaacaggaggcataacacctcacatggggccatatgggaaagcacctgcgtaggtgarggggcagaaaaagtgaggggaaagaacaggcaaaagactgtattgtgaggcaggggaaagggctggctaggtttgggattggctagtttgaataatttta

SEQ ID NO: 234802 - DNA, 201 bp, Homo sapiens
gcgaaaccctgtctctactaaaaacacaaaaaattagctgggcgtggtggtgtgcacctgtagccccagctacttgggaggctgaggcaggagaatcgctygaactcagggggctgtttgtggtgagctgagatctgcaccactgcactccagcccaggtgacagagtgagactctgtctccgaaaaaaaaaaaaaaaaaa

SEQ ID NO: 234803 - DNA, 201 bp, Homo sapiens
aggtgactgccatgaaggaagaagctcttactcacagttccctagaaacaggaggcataacacctcacatggggccatatgggaaagcacctgcgtaggtsaaggggcagaaaaagtgaggggaaagaacaggcaaaagactgtattgtgaggcaggggaaagggctggctaggtttgggattggctagtttgaataattt

SEQ ID NO: 234804 - DNA, 201 bp, Homo sapiens
agtctgatttacaattttagtatgatggctacacatcatgtccactggtgaccggctacaaccgtgtgattcttgctgagtttgactacaaagcagagccrctagaaaccttcccctttgatcaaagcaaagagcgcctttccatgtatctcatgaaagctgacctgatgcctttcctgtattggaatatgatgctaaggt

SEQ ID NO: 234805 - DNA, 201 bp, Homo sapiens
tgcacttttttaattagtgtctccaatatgggcatttctgtttttgccattagtactattttttttgtaatataatttacatttttcacagtacaaaaagytagaatatacagaaaagaaaaaatatataagcactcacagcaaataataaattctatagtgttaatatagtaccatgaaaaaaatctactttccaactca

SEQ ID NO: 234806 - DNA, 201 bp, Homo sapiens
caccatacctggcaattttttttttttttttgtatttttagtagaggcagggtttcatcatgttgctcaggctggtcttgaactcctgacctcaagtgatstgcctaccttggcctccaaaaatgctgggattacaggcatgaaccactgtgtccagccaattttcactattataccactttgtttatatatgtagaaaaa

SEQ ID NO: 234807 - DNA, 201 bp, Homo sapiens
tccacagctgtcctcattcctgtgcacttctcctcccatcattacccatcattttaatggttctgtgaatccctgagagccttttaatgtcccttttcttytttttcttttttttgagacagaatctcgctctgttgcccaggctggagtgcagtggcacgatttcagctcactgcaacctcaacctctgggttcaggcag

SEQ ID NO: 234808 - DNA, 201 bp, Homo sapiens
gccacactggagggagtcggctctttagtatcaaacccatggaaacacatgcgcaggccttccatgaattaaagaaccccctccggtagtcagaatttcarttagtaagaaggtcatgttctagtcacagtcttgagggatgggaaatggaatcttcttgtttacattaaagttatttgcaaattagttttcatggaaaac

SEQ ID NO: 234809 - DNA, 201 bp, Homo sapiens
gggattacaggcacctgccactgcacctggctaatttttgtatttttagtagagacggggtttcaccatcttggccaggctggtggtgatctcctgacctygtgatccacctgccttggcctcccaaagtgctgggattacaggcgtgagccactgtgcccagcctaatgtcccttttctacttaaggcatccagagctgg

SEQ ID NO: 234810 - DNA, 201 bp, Homo sapiens
gtaggtccctccttacagccacactggagggagtcggctctttagtatcaaacccatggaaacacatgcgcaggccttccatgaattaaagaaccccctcyggtagtcagaatttcaattagtaagaaggtcatgttctagtcacagtcttgagggatgggaaatggaatcttcttgtttacattaaagttatttgcaaat

SEQ ID NO: 234811 - DNA, 201 bp, Homo sapiens
ggcatgaaacccaagtattgccctgtaatatggtttggctgtgtccccacccaaatatcaacttgaattgtatctcccagaattcctaggtgttgtgggasggactcagggtgaggtaattgaattatgggtgctggtctctcaagtgctattctcatgatagtgagttagtctcacgagatctgatgggtttattagggg

SEQ ID NO: 234812 - DNA, 201 bp, Homo sapiens
agtgttgggattacaggcgtgagccaccatgcctggcctggaaacattcttaaacagcagcagaattgtgaccatgcgaatttcatgtaagtctatttcayaaagatacacttacatatttaacatagctaaatgtaagtaatttaatcgtatatcatttgcgcaggtaaaaattctcctaataaaaattcagcttagatt

SEQ ID NO: 234813 - DNA, 201 bp, Homo sapiens
gcgcctttcgcctccctccatgattctgaggcctccccagccacatggtactgtaagtccaattaaacttctttttcttcccagtcttgggtatgtctttrtcagcagtgtgaaaacaaattaatacaacctgttcatctgcctatctggttctgagactgccctgtggcttggcaggatgaaacaccatgtgatgcttgc

SEQ ID NO: 234814 - DNA, 201 bp, Homo sapiens
tagtcccagctactcgggaggctgaggcaggagaatcacttgaatccgggaggtggacgttgtagtgagctgagatcacaccactgcactccagcctgggmgacggagtgagacttcgcctcaaaaaaaaaaaaaaaaaaaagaagaagaagaaaatcatgtcacagaagcaatgctgcagatggaattgagttaccaata

SEQ ID NO: 234815 - DNA, 201 bp, Homo sapiens
taaaatagatgtgaagatttttcttggtggagaagatatcttaagtttcaatagaatggaggatagtatatgacaaaggaaaggaaggccacgtgctgctkcttctagagcggttactgccttaaaaactcaaactgtagctatgttatttagttgcaaaaatttataaaaatttagctcaatcacccacaaattgtaaca

SEQ ID NO: 234816 - DNA, 201 bp, Homo sapiens
gccaccatgcctggcctggaaacattcttaaacagcagcagaattgtgaccatgcgaatttcatgtaagtctatttcataaagatacacttacatatttarcatagctaaatgtaagtaatttaatcgtatatcatttgcgcaggtaaaaattctcctaataaaaattcagcttagattatctttcctgattttcagttct

SEQ ID NO: 234817 - DNA, 201 bp, Homo sapiens
gggaggctgaggtgggagaactgcttgagctcagaagttcgaggctagcctgagcaacatagcaagaccttgtctcaataaaagaataattagccaggcayggtggctcacgcctgtaatcccagcactttgggaggccgaggtaagcagatcgcttgaggctgggagtttgaggccagcctggccaacatagaggaaccc

SEQ ID NO: 234818 - DNA, 201 bp, Homo sapiens
ctatttaggttggtgcaaaagtaattgcggtttttgccattaagagtaatgtctctaaatttttgccattaagaggagtggcaaaaaccgcagttacttgyaccaagctaatatttcacctgtgtgaaagtctatttactcttctcttcaatgtccaaattacaatagtactagctgttcccaagcagatcttcatttctt

SEQ ID NO: 234819 - DNA, 201 bp, Homo sapiens
tcaataaaagaataattagccaggcacggtggctcacgcctgtaatcccagcactttgggaggccgaggtaagcagatcgcttgaggctgggagtttgagrccagcctggccaacatagaggaaccccgtctctactaaaaattcaaaatattagctgggtggggtagtgtgcacctgtaattccaactactcagggggct

SEQ ID NO: 234820 - DNA, 201 bp, Homo sapiens
gaatgtgagaagtcaggctcccactggctacagcaagcagaaaaacaaggtgttctttcattttttttccccctatataattcagtcaaaactcttaactktcatttgaaataatccaattgactgacatattttttctttcctggaatctgaatgcaagcattttccttatgtaaatataatttgtgttttctgcttagc

SEQ ID NO: 234821 - DNA, 201 bp, Homo sapiens
agaattgtgaccatgcgaatttcatgtaagtctatttcataaagatacacttacatatttaacatagctaaatgtaagtaatttaatcgtatatcatttgygcaggtaaaaattctcctaataaaaattcagcttagattatctttcctgattttcagttctgcaaacttagcccctgtgtgattgagacaaattcagtgt

SEQ ID NO: 234822 - DNA, 201 bp, Homo sapiens
gcaaatgtataccttgaaattaaagagtgttttctcattatggtaagacctcacacactggattccaaggaatgatatacttgaatgaaatggccagtccsgtttacagtgaactccttgcatgtgagactctgagtggaaatcccaatgctcctgaggctgatgagtaattttaatgtggtcatttaacaaactcaggaa

SEQ ID NO: 234823 - DNA, 201 bp, Homo sapiens
tgcatgagtaagtgagtcaactctcagtccccttccttgtctgatgggcaagttacaacttctgttctcctttgaagtattctcttttgcattggaaggarggctcttgagtgagatagtagaatacatacactggaggatctcagcatgtgggatatgctcaggacatttccctccccctcccctcccctccctccctcc

SEQ ID NO: 234824 - DNA, 201 bp, Homo sapiens
gtgttcctcttagtgctagctcctcctatcacttcttcttcccatcctttaatgatacttctttcagtttcccatatccccaagtgcactttcattcctcrcaaacttcacatgggtaggaatcaagtctgatttttttcaacagtgtatgcctagacagcgggcacagggcttgctggacacagaaggcaaggactcaga

SEQ ID NO: 234825 - DNA, 201 bp, Homo sapiens; identical to SEQ ID NO: 44608

SEQ ID NO: 234826 - DNA, 201 bp, Homo sapiens
ctccctgctctgacagctacaatgctggcctttgacatacagttggtcaattggaaactcccactgagaattttcactctcactctctttatatttgtgtygttcattctacagtaatttgtgatgacatgggagcatcctgggggtagccaggctgtttctactaaaagaaggtggacattctgctttttgattatccac

SEQ ID NO: 234827 - DNA, 201 bp, Homo sapiens
ctcactgcaacctctgcctcctgggttcaagcaattctcttgtcttagcctcctgagtagctaggattataggcacctgccaccacgcctggctaattttyctatttttagtagagacggggttttaccatgttggccaggctgttcttgaactcctgaactcaagtgatccacccacctcagcctcccaaagtgctggga

SEQ ID NO: 234828 - DNA, 201 bp, Homo sapiens
ctagttgactgcagaaatgcagacaggagattaataatttagtagatgatagctgttgaccatttcatccattatcctgcaaacatgcattcagtttcaaygttcatgaacagacctgacctcagggacccatgtgcccaagagccaccctccacccaagattatcctgcagatgagcagcagccatttgcagtgctcctt

SEQ ID NO: 234829 - DNA, 201 bp, Homo sapiens
tacagactagaaaggaaacctgaaaattacctgaccagaggccaactatgagtggtggggttgaaggggagctaagtcgtgcttctttatgtactagaatrtgagaagtcaggctcccactggctacagcaagcagaaaaacaaggtgttctttcattttttttccccctatataattcagtcaaaactcttaactttcat

SEQ ID NO: 234830 - DNA, 201 bp, Homo sapiens; identical to SEQ ID NO: 44613

SEQ ID NO: 234831 - DNA, 201 bp, Homo sapiens
ggaagttgcattgagccaagattatcatgccactgcattctagcctgcgcaacagagcaagactctgtctcaaaaaaagaaagaaagaaaaaaaaaaaagraaaattaagttaggtcattaaggtggagccctaatccaatatgaatagtatccttataagaagatgactcgtcaggagcacatgtgcacagagaaaaggc

SEQ ID NO: 234832 - DNA, 201 bp, Homo sapiens
gatctccaaattttttaatgttgatgactaattcaaaattcaagaaaagcactgtgagccaagcaaaacacagctctggcctgcacttggcctgcaggttkctgctttgtgactcctagatcaaattgccattgtctgggaataagctctcagacctaaactttagtaacacatgcctatccaatctcatttctccctctt

SEQ ID NO: 234833 - DNA, 201 bp, Homo sapiens
agccacccaccaccacacctggctaatttttgtattttttggtagagacagggtttcaccatattggctaggctggtcttgaactgctgacctcaagtgayctgcccttgtctgcttcccaaagcaaccaccacacccagcttaactttggcttttgaatttcttttcgcctcagcttcttcattgtacagtggagataat

SEQ ID NO: 234834 - DNA, 201 bp, Homo sapiens
ttcttttttttttttttttgagacggagtctcactctgtcaccaggctggagtgcagtggcgcgatctcggttcaatgcaacctccgcctgctgggttcargtgattctcctgcctcagcctcccgagtagatgggactacaggtgtgtgccaccacacccagctaatttttgtatttttagtagagacaggatttcacca

SEQ ID NO: 234835 - DNA, 201 bp, Homo sapiens
agagagaaaaaagaaaaatgaagaggtgaggaaggggtactggatctttaaatcacttgaaagtcacttcagcttgagggaaaggaggttgcaacggggtkggggggcaggtgcaacaacatggccacctgcctctttgtctgcatctttatgatcagaagctgcaatcagcaagcagagcacacatcctcaatattgtag

SEQ ID NO: 234836 - DNA, 201 bp, Homo sapiens
ttggccaggctggtcttaaactcctgacctcaagtgatccacctgcctcggccttctaaagtgctgggattacaggcatgagccaccgcgcctggcttttwagatgccgcctgacagtttagtggatatgtgaggagaagaagccgagcaaaaatgtgttaaacatgtaaaagcttccatctgactgaatagttggcacat

SEQ ID NO: 234837 - DNA, 201 bp, Homo sapiens
ccagttaccttgtagaataccccaaaatttagaattgtctagttgctttcttacggttagattcaggttatatgttttggcaaaaatctccatacctgagkctgtgtacctccctctgtggcacctcaggagcctgtcatgttagtttgtcttgtctttagtgaagctagacttcctcactgggttaaggggtgttctctc

SEQ ID NO: 234838 - DNA, 201 bp, Homo sapiens
ggccaggctggtcttaaactcctgacctcaagtgatccacctgcctcggccttctaaagtgctgggattacaggcatgagccaccgcgcctggcttttaaratgccgcctgacagtttagtggatatgtgaggagaagaagccgagcaaaaatgtgttaaacatgtaaaagcttccatctgactgaatagttggcacatgc

SEQ ID NO: 234839 - DNA, 201 bp, Homo sapiens
attttatttataaggttatgaggagtctttgagacagcacaagtacaactggtaaacaataaatgttagttattatttcaatgatagttttttgttttttwgtttttttgttttttttttgagacggaatcttgcgccaccgtcaccaggctggagtgcagtggcacgatcttggctcactgcaacctccgccttctgggt

SEQ ID NO: 234840 - DNA, 201 bp, Homo sapiens
cctggtatctttgcctctgacaccaggcaggttggctatttttcttctgcctgaaacaccataaagctcgaggagcatttgttttcccagaaaacacatgsaagtcaatgaaagcttgcagaccagaaaattgtcctgttaagacaaatacagtggagcatgccctgagtggtacacgattaaggcctcagcctggaaaac

SEQ ID NO: 234841 - DNA, 201 bp, Homo sapiens
aaaagcataatactatttgattataaaatatattgcatgtgccatttggtaaatgaaagttaaatttaccttatttattgatgtttttctttttctttttyttgagacagagtcttgctctgttgcccaggctggagtgcagtggtgcaatcttggctcactgcaacctccgcctccctggctcaagcaattgattctcct

SEQ ID NO: 234842 - DNA, 201 bp, Homo sapiens
gcatagacggcagagggcatgatgggagtggacacgcatccctccctgccagtctgcccacctcccccagccccaagacattcagattaaaaaatgggaayctgggcaggactcccaaccttgttctgcttcgattttctcatctgttctatgggctaataatatttccctgcctcccttagaccacatggaaccacatct

SEQ ID NO: 234843 - DNA, 201 bp, Homo sapiens
tcacttttaaaggacagatctgctggttatacaattcttggttgacagtttttttctgttttagcactttaaatatattggcccattgctctctggcctcyaaagttcctgatgagaaatctgataatcttatcaaggatcccttgtatgagacaaattgcttctgtcttgctgctttcaagattctcttttggtctttgt

SEQ ID NO: 234844 - DNA, 201 bp, Homo sapiens
ccaccacctcccaggttgaagcaattcttgtgcctcagctttcacagtagctgggattacatgcacggggtaccacgccggcaggtccggctacttttttytagtttttgtagagaccaggtttcaccatgttggccaggctgttctgaaactcctgatcttaagtaagtgacccgcccacctcagcctccctaaagtttt

SEQ ID NO: 234845 - DNA, 201 bp, Homo sapiens
agtgagccaagatcgcaccactcctttccagcctgggtgacagagcaaggcttcatctcaaaaaaaaaaaaaaaaggccttcctaagacagaagcaagttrtcaatgaacccagtgtcatatacagcaaaaaataccttttgagtgctttgccccagagtagcatgatcttatctaccttttctaggtcagaggggttgtt

SEQ ID NO: 234846 - DNA, 201 bp, Homo sapiens
taaaaaatgggaacctgggcaggactcccaaccttgttctgcttcgattttctcatctgttctatgggctaataatatttccctgcctcccttagaccacrtggaaccacatctggggcctgagtcagtccttgagttgatgcttcttgagtcctggtctaaaataatgtctttttgtgttgcagatctcctaccgatatc

SEQ ID NO: 234847 - DNA, 201 bp, Homo sapiens
aaaaaatctactttccaactcagtctgatttacaattttagtatgatggctacacatcatgtccactggtgaccggctacaaccgtgtgattcttgctgartttgactacaaagcagagccgctagaaaccttcccctttgatcaaagcaaagagcgcctttccatgtatctcatgaaagctgacctgatgcctttcctgt

SEQ ID NO: 234848 - DNA, 201 bp, Homo sapiens
ctacttacccataaaatgacttgatttcaaatgtacagtgcaggtcacacagagattaaacttaatttgtatcccatttttaccatagcttctcccctgaytgacaaggctgattgtattttggacatgggattgcggtagaggttcccgggagaggaagagacatttggaagaaaaaggtgagaaatcagctgggcgcgg

SEQ ID NO: 234849 - DNA, 201 bp, Homo sapiens
ccaccaataaaagcaatttaggcttcttatttcctggatcccagctggatactacttacccataaaatgacttgatttcaaatgtacagtgcaggtcacayagagattaaacttaatttgtatcccatttttaccatagcttctcccctgattgacaaggctgattgtattttggacatgggattgcggtagaggttcccg

SEQ ID NO: 234850 - DNA, 201 bp, Homo sapiens
gctgattgtataatgctccatgcagccatagcacagtgtatagagtaaggaaggtagggggagagcttgtggagctgtagaaatattgaataaatgaaaaygtggattctctctttgtgtgtagtatgaaatgcttcatgtcacacctccaatgagcccaccagatgtcctcaagaccagtcctgtggctgatgctgctgg

SEQ ID NO: 234851 - DNA, 201 bp, Homo sapiens
tcctgtgatcaactgtggtgatcttgggactgtaattcatccaaccaaccccctctgctcagttgccccttaggaaggaaggcccatgaggactatggagkagctgctccttgcacctgtgtggagaagtacatctatacggctcaaggggtagattgtggtggccattagaacatgcctcacagaccttcagctacaggg

SEQ ID NO: 234852 - DNA, 201 bp, Homo sapiens
aataaaggtgccactgaactataagttgtggctgctgacagggtgctttgtactttttgtgttcaggcaccagcaggcaagagaggagctggtatactagyaaaagcactgaagtgatcgttagggggaggtaagttcatttacaagatggggcaaggaggaagatgtgtggaactcgggtgattcatttgggtacctcct

SEQ ID NO: 234853 - DNA, 201 bp, Homo sapiens
aattttcttaagttggagaccctaggagtagggatagaaattgaccttaggagttttactttaaatatcttgataaaactatatccataatggggaattayggggctacaccaatctatctgctatttttctttatccagtctgatgatattggaagaacaaaagtgaagaaggcatgagtttctctgtaaggagagagcc

SEQ ID NO: 234854 - DNA, 201 bp, Homo sapiens
gaatgaattaacttgctgtgcacccaaaatggtactatttatgtaccatccttgggagaactgagaaaatggtcactcagagcattttctgtgttctgtgktttagatgaggccttagatgagaaaggctgcagggctccttggatatgctttttcttttacctcctgtttcagaaatataggggttacccccaaatagtg

SEQ ID NO: 234855 - DNA, 201 bp, Homo sapiens
aactgagaaaatggtcactcagagcattttctgtgttctgtggtttagatgaggccttagatgagaaaggctgcagggctccttggatatgctttttcttktacctcctgtttcagaaatataggggttacccccaaatagtgctctcagcactttcctgttcatgcttttcctcaaggatctcttcacactttcattaag

SEQ ID NO: 234856 - DNA, 201 bp, Homo sapiens
ttaaacatgtaaaagcttccatctgactgaatagttggcacatgcattttaatctagatgtattacaacgtacctgggatttgttttaatcaagtatggtraggccaacagatcaggaggtgactgccatgaaggaagaagctcttactcacagttccctagaaacaggaggcataacacctcacatggggccatatggga

SEQ ID NO: 234857 - DNA, 201 bp, Homo sapiens
tagagtacacagctgtatacaaaacttccactcaacttttcgtccctgtcttgttcttttgaggtcagacttgcattgtaggctgattgctatctcaaccrtctccctctcattttctccctaagaatttgcttaaaaatccttgtatgtttagctctgtcttgatgcctgcttctcagagtacatggattaacacagagc

SEQ ID NO: 234858 - DNA, 201 bp, Homo sapiens
tgtcaactttgacttttttttttcttccagaagtctttcccacgtctcccaaaattattctctcttcccagcctctatcttatctgaatctttgtttgcayttctaatgctaacacctaattcaggagcttatcgctcacacctggaccactccaatagtctcctaactgatttgtcaaaatcagtccatgtgaaactggt

SEQ ID NO: 234859 - DNA, 201 bp, Homo sapiens
atcaggaggtgactgccatgaaggaagaagctcttactcacagttccctagaaacaggaggcataacacctcacatggggccatatgggaaagcacctgcrtaggtgaaggggcagaaaaagtgaggggaaagaacaggcaaaagactgtattgtgaggcaggggaaagggctggctaggtttgggattggctagtttgaa

SEQ ID NO: 234860 - DNA, 201 bp, Homo sapiens
ctgggaacctgtattttccacaagtctccccaatgctgctaataaacattaaagtttgaaaaccaccacactgattggactatgtatgttaatgaaggagraccaagttatttatcctatacagttacagaaataaatgatagataatgaacaagctacaactaagtgccagtgtttgtttgtttgtttttttctttcttt

SEQ ID NO: 234861 - DNA, 201 bp, Homo sapiens
acttctcttggagccattttcggggttaagaagtatgcagatgccctgcaggagatcatccaggagcggaacctcactgttaactacaagaaaaacctcaytgaagtccgagccgataaacaagaggctgtatttgagaacctggacaaaccaggagagacccaagtgatttcagtgagtggtgaggctaagctgtcagca

SEQ ID NO: 234862 - DNA, 201 bp, Homo sapiens
accaaatgcctcccttttcagtacctttgaacagcaaccatgtgggctactcatgatgggcttgattctttgggaataataaaatgaaataatacttttaytttctgaataaaagtttgtcactgattgtgttctatgagaaaattttatcttggctgatagggatgaaaagttccagcacttgggagaaaaatatggtgg

SEQ ID NO: 234863 - DNA, 201 bp, Homo sapiens
aattcatgctagctctggccctgctgctgatgcattgtgtgaaacccttgagtgacttcacctcttggaactcagttttcccatttgtaaagtgatatcartacttccggtgtgggctcaggtttgggccctgtgaattgtaaagctctatgcacatgggaggatgtatgattataagttgtgttgctattacttgtattg

SEQ ID NO: 234864 - DNA, 201 bp, Homo sapiens
gcagtggcacgatctcggtttactgcaacctatgcctcccaggttcaagtgattctcatgcctcagcctcctgagtagctgggattacaggcatgtgacaycatacctggcaattttttttttttttttgtatttttagtagaggcagggtttcatcatgttgctcaggctggtcttgaactcctgacctcaagtgatgtg

SEQ ID NO: 234865 - DNA, 201 bp, Homo sapiens
aagcattttggaaatataggaggggactttttatttgtcataaatttgggagagagtctattggcatttagagagtgggaaccaaggaagccaacctcccytgctatgtgaacagggccatataacaatgaactgtcctggccagtcatggtggcccactcctctaatcccagtaccttgagaggctgaggcgggaggatg

SEQ ID NO: 234866 - DNA, 201 bp, Homo sapiens
ggatggcaggcgggcggggccccagtccaggccttgagacccagaagggagcgaaggtttttgctgcgccaacgcagtgaccgaaggctccgctcacgccygggtaagaggcatccgcggccgatctttggccctgggccagcggagggagactgggcggggacagcgaccaccactgaggctgtttgttagcttaactcg

SEQ ID NO: 234867 - DNA, 201 bp, Homo sapiens
atagcactaccttttaggctaataattttaaaaatgtgttcatctcttaaatcatgtagaaaaaaaatagtggaattaagactgttaaaacaatactaacytttattattgcccatgtatttacctttattgagatctttatttcttcatacaactttgagttactgtctagtgttctttaatttcactctgaagaactcc

SEQ ID NO: 234868 - DNA, 201 bp, Homo sapiens
gagagggcgtggactggtacaagtgctgattgtataatgctccatgcagccatagcacagtgtatagagtaaggaaggtagggggagagcttgtggagctrtagaaatattgaataaatgaaaatgtggattctctctttgtgtgtagtatgaaatgcttcatgtcacacctccaatgagcccaccagatgtcctcaagac

SEQ ID NO: 234869 - DNA, 201 bp, Homo sapiens
gtgggagtgggtcctgaccatgggattctctggttgtgttatgaactgcaccacccagaagcaactggccttatagattgttgagatggtcttctaaagtwacaactgaaatggtagctctgagaaaggatgtgaaataatgaagtgccatctttcaggacacggtgcatttattaaatcagtgacctctctatggttcta

SEQ ID NO: 234870 - DNA, 201 bp, Homo sapiens
agtagttctagttgactgcagaaatgcagacaggagattaataatttagtagatgatagctgttgaccatttcatccattatcctgcaaacatgcattcastttcaacgttcatgaacagacctgacctcagggacccatgtgcccaagagccaccctccacccaagattatcctgcagatgagcagcagccatttgcagt

SEQ ID NO: 234871 - DNA, 201 bp, Homo sapiens
attgctgctcctcaaatggcctcactcaaatgggctatgagtgagagctcatatgagtgaactcatttttactttacaaaagagcccatttgagagagtcygtttgagtgagcccaagttgggctttcactaaaatgagctatgagtaagagcccgaagcatccttttatgagcaaagtgtatgaacttgagtgcatgaac

SEQ ID NO: 234872 - DNA, 201 bp, Homo sapiens
tgggactacaggtgtgcaccaccatgcccggctaatttttttattttttatttttagtagcggcgaggtttcaccatgttggccaggctggtctcgaactsctgacctcaagccatccacctgctcggcctcctgaagtgctgggattacaggcatgagccatcgcacctggcctcaggctctgtttgttagactggaaca

SEQ ID NO: 234873 - DNA, 201 bp, Homo sapiens
gcaggactcaggctacagtcaggtattacattcaattgtgaggtctatttagcctcctttaatctgtgatgtttctatagcttttctttgtcttctatgaygttgatattttgaaataatacagccctctcccccaccacttttctttcagtagaatgttcctcattttgagtttgtcagtgttttcttgtgattagtttc

SEQ ID NO: 234874 - DNA, 201 bp, Homo sapiens
ctattcctttgactcaacttttcctggcatcgagtcacttgaggtagccaaaaatattccacaactttggttactgtgtagaggtaagggagggcttcctygaatgcaagatctggtgattgtctcaattggtggcatgtgagaaacagtcctgcttgtgagcaggaagtaaccctgtgggtagttgaagaaaacagggat

SEQ ID NO: 234875 - DNA, 201 bp, Homo sapiens
ttgaagtccgagccgataaacaagaggctgtatttgagaacctggacaaaccaggagagacccaagtgatttcagtgagtggtgaggctaagctgtcagcmtgaagcgttgtctgctgaaacgtgccatagatacatgggggctcacaccaccctatctgccatcattgtgtgctggggaagactgggtgaaatgagcatc

SEQ ID NO: 234876 - DNA, 201 bp, Homo sapiens
gagacggagtttcactgtgttggtcaggctggtctcaaactcctggcctcaagtgatccacccgcctcagcctctcaaagtgctgggattacaggcgtgarccactgcacccagccaggaatcaaaaattgattctttacaactacttgtgagggaggcatttttatcttcacttaatagatgaggaaactgaggctaagg

SEQ ID NO: 234877 - DNA, 201 bp, Homo sapiens
gaggctggagtgaagtggtgtgatctcagctcacttgcaatttccatttcccaggttaaagcaatctcctgcctcatcctccagagtagctgggattacasgtgcccaccaccatgcccggctaatttttgtattttttttagtagagacggagtttcactgtgttggtcaggctggtctcaaactcctggcctcaagtga

SEQ ID NO: 234878 - DNA, 201 bp, Homo sapiens
gtcccctcctagtcatgggatctctccaactcactagacaatcttgctttacgtgctgatgaacatgctctgtgagcagcctggcttccctttcagcatcstcctgactgaagtcgccccatctctcttgctgcaggtacatttttttgtgttatttcttacaggggttactggggaggaccagcgtttctgcgcaagttg

SEQ ID NO: 234879 - DNA, 201 bp, Homo sapiens
tatcaccattccccaggagaacacataagatcttggagagggcgtggactggtacaagtgctgattgtataatgctccatgcagccatagcacagtgtatrgagtaaggaaggtagggggagagcttgtggagctgtagaaatattgaataaatgaaaatgtggattctctctttgtgtgtagtatgaaatgcttcatgtc

SEQ ID NO: 234880 - DNA, 201 bp, Homo sapiens
agtagctgggattacatgcacggggtaccacgccggcaggtccggctacttttttctagtttttgtagagaccaggtttcaccatgttggccaggctgttytgaaactcctgatcttaagtaagtgacccgcccacctcagcctccctaaagttttgggattacaggcgtgagcctccttttttttttttttttttttttt

SEQ ID NO: 234881 - DNA, 201 bp, Homo sapiens
catgcacggggtaccacgccggcaggtccggctacttttttctagtttttgtagagaccaggtttcaccatgttggccaggctgttctgaaactcctgatyttaagtaagtgacccgcccacctcagcctccctaaagttttgggattacaggcgtgagcctccttttttttttttttttttttttttttgccttctcgtt

SEQ ID NO: 234882 - DNA, 201 bp, Homo sapiens
ggggccatatgggaaagcacctgcgtaggtgaaggggcagaaaaagtgaggggaaagaacaggcaaaagactgtattgtgaggcaggggaaagggctggcyaggtttgggattggctagtttgaataattttagagtgctccaggattcatgagctgcctatagttgtagttgtctgatgcctggccctggaataataagg

SEQ ID NO: 234883 - DNA, 201 bp, Homo sapiens
gtttttgtagagaccaggtttcaccatgttggccaggctgttctgaaactcctgatcttaagtaagtgacccgcccacctcagcctccctaaagttttggkattacaggcgtgagcctccttttttttttttttttttttttttttgccttctcgttaagattgtgtggctggccgggcacggtggctcacacctgtaatc

SEQ ID NO: 234884 - DNA, 201 bp, Homo sapiens
aatctttcattaagaatgctctgagtaattcttgcttagccagcagctctgtttgaactctgccaggtgccctggctgctcacaaaccatgtcatgtgacmtaagattaggaagcttttgacacaggcagtctgtattgcttgtccaggaagggctgtagtggaaaggtatgaagtcccaaagacttgtccagaccaggtc

SEQ ID NO: 234885 - DNA, 201 bp, Homo sapiens
tggatcacttgaggtcaggagttcaagaccagtctggccaacgtggtgaaaccccatttctactaataatacaaacttaggtaggtgtggtggcaggcacmtgtaatcccagctactcgtgggggccggagacaggaaaattgcttgaacctgggaggtggaggttgcagtgagtcgagatccagcctgggcgacagagca

SEQ ID NO: 234886 - DNA, 201 bp, Homo sapiens
ggtttcccttttctgggaagttgtagaaagtatatcttttttttttttttctttttgagacagagtctcactctgttgcccaggctggagtgcagtggcgyaatcttggcttactgcaaccttcgcctcacgggttcaagtgattcccctgcctcagcctccccagtagctgggactacaggtgtacaccaccatgcccag

SEQ ID NO: 234887 - DNA, 201 bp, Homo sapiens
gagacgggatttcaccatgttggccaggatggtctcgatctcctgaccttgtgatccgcccgccttggcctcccaaagtgctaggattacaggcgtgagcyaccgtgcctggcctatttttttttttttccccgtttaacattatcacacaagcattgttttgttgctgttgagacatattgttctaaagatcatagagat

SEQ ID NO: 234888 - DNA, 201 bp, Homo sapiens
tggtctcgatctcctgaccttgtgatccgcccgccttggcctcccaaagtgctaggattacaggcgtgagccaccgtgcctggcctatttttttttttttycccgtttaacattatcacacaagcattgttttgttgctgttgagacatattgttctaaagatcatagagatagtatggtgtagtggtttaaagtagaggc

SEQ ID NO: 234889 - DNA, 201 bp, Homo sapiens
aatcaaatgagctcagagataatgagtgaactggaggataaaaaaatagatgccatgtctatttagatttatatattctccatcaactaggggctgctcarttctcttaaaaatagcttcaggaaagaggtgggccaattgagagcaggctcaacagataatctggctctcagactttttaacagtacaaggcacaaaagg

SEQ ID NO: 234890 - DNA, 201 bp, Homo sapiens
tttttcagacagagtctcactctgtcacccaggttggagtgcagtggcatgatctcagcttacttgcaacctctgcctcctgggttcaagcaattctcatrgctcagcctccctagtagctgggattgcaggcacacaccaccatgcctggctaaaaatttttgtatttttagtagagacagggtttcaccatgttggcca

SEQ ID NO: 234891 - DNA, 201 bp, Homo sapiens
cttacggatggacaaggatgggtacagacaggttattaggaaggacttaaagagttggggaacctggttcaaacaaagtcctcgatagcctgaacgtaggmggaaggggagaaatggtaagtgtagtcaattgatagctaccaattgggtgctctcaggagaccttgggaccacagccagtggggaaagtggtcttgagag

SEQ ID NO: 234892 - DNA, 201 bp, Homo sapiens
gttggcacccaggggcggaagcgtcaggtggcctcggtgtcctccgcctgtgcgccccagcctgcggggccgcccttcagggcgcgcaaggggcgagtctktccagccggcagcaccccaggccggatggacgcttgttcctggttctgtgccccgtgagcgctcaacgccctggtgtgttcactgaccatggtgcctggg

SEQ ID NO: 234893 - DNA, 201 bp, Homo sapiens
aagaatcgcctgaacctgggaggtggaggttgcagtgagccgagatcgtgccactgcactccagcctgggtgattggggtgattgggcgagactctgtctwaaaaaaaaaaaaaaaaaaaaaaaaggaccatctgaagcaagaaaactccagaagatagtgaaagtttgggtatgcattgcattgtggagtaggatctggt

SEQ ID NO: 234894 - DNA, 201 bp, Homo sapiens
agaatcgcctgaacctgggaggtggaggttgcagtgagccgagatcgtgccactgcactccagcctgggtgattggggtgattgggcgagactctgtcttaaaaaaaaaaaaaaaaaaaaaaaaggaccatctgaagcaagaaaactccagaagatagtgaaagtttgggtatgcattgcattgtggagtaggatctggta

SEQ ID NO: 234895 - DNA, 201 bp, Homo sapiens
aaaataccttttgagtgctttgccccagagtagcatgatcttatctaccttttctaggtcagaggggttgttgtcagaagagggggccttagagtgcatcrcttttctagctctcttgaattctgttacttctcatactgccatactggcatccctggtatctttgcctctgacaccaggcaggttggctatttttcttct

SEQ ID NO: 234896 - DNA, 201 bp, Homo sapiens
aaagtattgcctattggggattgttcaggtggagatacacctgtttctgagtagagttgaaaaattgcctccataaaagtcacgcttgttttcagttgctrgttcaaataagttgccagagatctgtaagtatcttttctgagatgatctgtttcattcccagtagataactttactagtaagtaaagattagaggatatg

SEQ ID NO: 234897 - DNA, 201 bp, Homo sapiens
agggtttagattataaattttaaagcagactttaaggggtggaacaccagcagttagctcgtctgttgctggagggacatctgggttttgttgtgtcgatrctgggtttttagtgtgaagtaaccgatgcaatggaaatgccactcagaagttcctcagatccccgttttcagtgagctagggagccagatgcaatttgaa

SEQ ID NO: 234898 - DNA, 201 bp, Homo sapiens
atattcattttgacaagaaaggggttctaagaaaatctcttctggttttatttcttggcagtccttttacagttttaaggaagtcttctctaagattctgycgataataaccatatgttctagctttaagctttaattagagttcagcatgctcatgccttaatgattaattcttgcaaaacagcagttttctttccacat

SEQ ID NO: 234899 - DNA, 201 bp, Homo sapiens
tatttttagtagagacggggtttcatcatgctggccaggctggtctcgaactcctgacctcgtgatctgcctgccacagcctcccaaagtgctaggattayaggcacgagccaccgcacccagcccaggacatgtttcttaactctgaatctggttccacagccatcaatctcaaaccacccagcaggcagcacatctcct

SEQ ID NO: 234900 - DNA, 201 bp, Homo sapiens
agcaatgggtcttcatatgttcaggttagggcttctcctgggcacagaaagcagcctatccagaaggactgggaggaagtggagggaaagagagagggagracagatctcttggcttttagtgttctcctctgtattagtttcttagggctgccataacaaattactgcaaattgggtggcttaaaacaacagacatctat

SEQ ID NO: 234901 - DNA, 201 bp, Homo sapiens
tataattgagtatgtctatatctttattgatagcagatgggaatagaggagtacatagtattctaaatgtaaaaagtgaaatgaatactcctagggtgttygatctcttctaagaagtactcctaaatcttacctagaatctgtgattaggtttggcatttatcattattttatgaaagtattgcctattggggattgttc

SEQ ID NO: 234902 - DNA, 201 bp, Homo sapiens
caaagtcctcgatagcctgaacgtaggaggaaggggagaaatggtaagtgtagtcaattgatagctaccaattgggtgctctcaggagaccttgggaccayagccagtggggaaagtggtcttgagagatgatggggaccagctggagcgggccagatgccggcctcccttcctcctggaaagaaaacgcttcagtcccac

SEQ ID NO: 234903 - DNA, 201 bp, Homo sapiens
ggttattaggaaggacttaaagagttggggaacctggttcaaacaaagtcctcgatagcctgaacgtaggaggaaggggagaaatggtaagtgtagtcaaytgatagctaccaattgggtgctctcaggagaccttgggaccacagccagtggggaaagtggtcttgagagatgatggggaccagctggagcgggccagat

SEQ ID NO: 234904 - DNA, 201 bp, Homo sapiens
gtggtgaaccctaagaactggacttgacggtaggatttggggcactgtcatacccagggagggagatatcatgagccggggccactcaaggtttacaagtrgatggagtcctggatgtcaggccagctttgtgtgtggggtaaagcaaaggtcagtctttgagaagccttaatttcctctctgccaaagcactaactgctc

SEQ ID NO: 234905 - DNA, 201 bp, Homo sapiens
taataaagggttcttggagcagtggtgaaccctaagaactggacttgacggtaggatttggggcactgtcatacccagggagggagatatcatgagccggrgccactcaaggtttacaagtggatggagtcctggatgtcaggccagctttgtgtgtggggtaaagcaaaggtcagtctttgagaagccttaatttcctct

SEQ ID NO: 234906 - DNA, 201 bp, Homo sapiens
tctgaatctttgtttgcacttctaatgctaacacctaattcaggagcttatcgctcacacctggaccactccaatagtctcctaactgatttgtcaaaatyagtccatgtgaaactggttttgtttctcctccaacaggagggttaatttgttccaacaccagaagattctcttactcaaagctgcccctttgtgcgatca

SEQ ID NO: 234907 - DNA, 201 bp, Homo sapiens
caaaactctggaattaagttaatcttaacagcccctcagctcctctttcccattccctattatttttccccctctccaaggcctttctttctttttgtagytcctctgccctgccagctttctctaatccccttgtgcaggcttcctcttctccagtcgggaggatggaaatgatataattaagtcattttattaagaagt

SEQ ID NO: 234908 - DNA, 201 bp, Homo sapiens
gaatctttgtttgcacttctaatgctaacacctaattcaggagcttatcgctcacacctggaccactccaatagtctcctaactgatttgtcaaaatcagyccatgtgaaactggttttgtttctcctccaacaggagggttaatttgttccaacaccagaagattctcttactcaaagctgcccctttgtgcgatcactt

SEQ ID NO: 234909 - DNA, 201 bp, Homo sapiens
gtggggaaagtggtcttgagagatgatggggaccagctggagcgggccagatgccggcctcccttcctcctggaaagaaaacgcttcagtcccacgatggkttctaccttggcactcacagccctgtctcttcccttccagcctgatcctgcctgaagatggtgccactggtggctgtggtatcagggccccgtgcccagc

SEQ ID NO: 234910 - DNA, 201 bp, Homo sapiens
tgccagggcagggcctcttgactgcacgttacttcccttggctcctcagccagagccaagcactctcaggtcttggagtcctctctctccaactgcgattygctcgggttgcttgctctgctctgccatttagtacaggatcatggtaatcaccacctgtttcttctttctgggctcctgagtctcactgcaatcatttcc

SEQ ID NO: 234911 - DNA, 201 bp, Homo sapiens
cccggctaatttttgtattttttttagtagagacggagtttcactgtgttggtcaggctggtctcaaactcctggcctcaagtgatccacccgcctcagcytctcaaagtgctgggattacaggcgtgaaccactgcacccagccaggaatcaaaaattgattctttacaactacttgtgagggaggcatttttatcttca

SEQ ID NO: 234912 - DNA, 201 bp, Homo sapiens
ccaggctggtctcgaactgctgacctcaagccatccacctgctcggcctcctgaagtgctgggattacaggcatgagccatcgcacctggcctcaggctctgtttgttagactggaacattgcataagcattgtgccattctaaggtatcacatttgcaagcatacagtgttcatctgcccttcattggtgatgttaattt

SEQ ID NO: 234913 - DNA, 201 bp, Homo sapiens
caggctggtctcgaactgctgacctcaagccatccacctgctcggcctcctgaagtgctgggattacaggcatgagccatcgcacctggcctcaggctctgtttgttagactggaacattgcataagcattgtgccattctaaggtatcacatttgcaagcatacagtgttcatctgcccttcattggtgatgttaatttt

SEQ ID NO: 234914 - DNA, 201 bp, Homo sapiens
aggctggtctcgaactgctgacctcaagccatccacctgctcggcctcctgaagtgctgggattacaggcatgagccatcgcacctggcctcaggctctgtttgttagactggaacattgcataagcattgtgccattctaaggtatcacatttgcaagcatacagtgttcatctgcccttcattggtgatgttaattttg

SEQ ID NO: 234915 - DNA, 201 bp, Homo sapiens
ggctggtctcgaactgctgacctcaagccatccacctgctcggcctcctgaagtgctgggattacaggcatgagccatcgcacctggcctcaggctctgtttgttagactggaacattgcataagcattgtgccattctaaggtatcacatttgcaagcatacagtgttcatctgcccttcattggtgatgttaattttga

SEQ ID NO: 234916 - DNA, 201 bp, Homo sapiens
taatgaacaagctacaactaagtgccagtgtttgtttgtttgtttttttctttctttctttttttttgtagacagggtctcactctgttacctaggttggrgtgcagtggtacaaccgtggctcatggctcactgcagcctctacttcccaggctcaggcaatcctcctacctcagcctcctgagtagctgggtctatagg

SEQ ID NO: 234917 - DNA, 201 bp, Homo sapiens
gcgatcactttccagaactttgttttcccatgtaaagcctcaatgccctagctaaaagagtgggagggggtcaggcctggagaaattgctgtctctcagcwtgcatccttacatacagtgggcgctcaatgaatacttgtggacacattcttttttctttttgagatggagtcttgctctgtcacccaggctggagtgtag

SEQ ID NO: 234918 - DNA, 201 bp, Homo sapiens
ttgagtgctttgccccagagtagcatgatcttatctaccttttctaggtcagaggggttgttgtcagaagagggggccttagagtgcatcacttttctagctctcttgaattctgttacttctcatactgccatactggcatccctggtatctttgcctctgacaccaggcaggttggctatttttcttctgcctgaaaca

SEQ ID NO: 234919 - DNA, 201 bp, Homo sapiens
tgagtgctttgccccagagtagcatgatcttatctaccttttctaggtcagaggggttgttgtcagaagagggggccttagagtgcatcacttttctagctctcttgaattctgttacttctcatactgccatactggcatccctggtatctttgcctctgacaccaggcaggttggctatttttcttctgcctgaaacac

SEQ ID NO: 234920 - DNA, 201 bp, Homo sapiens
atttgcttcatcgtatttatgtatatatgtatattatgtatgtatatattatgtgtgtgtgtgtgtgtgtacatatatatatatatatttttgtttgtttgtttgtttgtttgttttttggtggggggacagaatttcactcttgttgcctggactggagtgcagtggcgcactctcagctcactgcaacctctgtctccc

SEQ ID NO: 234921 - DNA, 201 bp, Homo sapiens
tgttcatgtgtttcgtagggttaaaataaaaattatataattttattttgattttcaaaaagcttacttcgaatatgatagcatgttgttttcctcaatctttttttttttttttttgaggcagagtcttgctctgtcgcccaggctggagtgtagtggcacaatcttggcacactgcagcctccacctcccaagttcaag

SEQ ID NO: 234922 - DNA, 201 bp, Homo sapiens
attatttgccagatctgcagagatcaaaacaagccctccaggaactcacgtaagctaataaaaaaccagatatacactcatttcctctgtggcatagtcayaatttgtataattgtatactgtgttaagacataatattttttaacatgcaattataattgagtatgtctatatctttattgatagcagatgggaatagag

SEQ ID NO: 234923 - DNA, 201 bp, Homo sapiens
ggggttacccccaaatagtgctctcagcactttcctgttcatgcttttcctcaaggatctcttcacactttcattaagtcgcttctataaatatgacttcyttgtatgtatttgaaacttgggcccctctcttaactcttgtttacttctccatctgctagctggatactttgacgtggctgttttgcactaatctcacgt

SEQ ID NO: 234924 - DNA, 201 bp, Homo sapiens
tcagagtgcagtggtgtttacaactaattgatcacaaccagttacagatttctttgttccttctctaatcccactgcttcagttgaccagcctaaaaaaawaaaataaataaaaggttcctaaatttgatttttgctggggacaggtttaagtgacacttctccagatgaagggttaatagaggacttgactatagaagac

SEQ ID NO: 234925 - DNA, 201 bp, Homo sapiens
tgcccaagtctcaaactcctgggctcaagcgatcctcctgctttggcctcccaaaatgttgggattataggcattagccactgtgcttggcctcatttaawatatatatatatatttagatggagtcttgctctgttgcccgggctggagtgcagtggcacgatcttggctcactgcaacctctgcctcctgggttcaagc

SEQ ID NO: 234926 - DNA, 201 bp, Homo sapiens
tggcatgatctcagcttacttgcaacctctgcctcctgggttcaagcaattctcatggctcagcctccctagtagctgggattgcaggcacacaccaccaygcctggctaaaaatttttgtatttttagtagagacagggtttcaccatgttggccagggtggtcttgaactgctgacctcaggtgatccacctgccttgg

SEQ ID NO: 234927 - DNA, 201 bp, Homo sapiens
tggtgaaatcacagatcactgtggccttcacctcccgggcttgagtgatccttccacttcagccttggtagtagctgggtgcaccaccatgcctggctaattttttttttttttaaatagagttggggtttccccatgttttccatgctagtctcaaactcctgggctcaggtgatccccctctctcagcctcctaaagtg

SEQ ID NO: 234928 - DNA, 201 bp, Homo sapiens
ctttggcctcccaaaatgttgggattataggcattagccactgtgcttggcctcatttaatatatatatatatatttagatggagtcttgctctgttgccygggctggagtgcagtggcacgatcttggctcactgcaacctctgcctcctgggttcaagcaattctcttgtcttagcctcctgagtagctaggattatag

SEQ ID NO: 234929 - DNA, 201 bp, Homo sapiens
tctcattatttgccagatctgcagagatcaaaacaagccctccaggaactcacgtaagctaataaaaaaccagatatacactcatttcctctgtggcataktcacaatttgtataattgtatactgtgttaagacataatattttttaacatgcaattataattgagtatgtctatatctttattgatagcagatgggaat

SEQ ID NO: 234930 - DNA, 201 bp, Homo sapiens
tttggagacagaattttgctctgtcacccaggctggagtgcaatggtgcaatctcagctccctgcaaactccgcttcctgggttcaagccattctcctgcytcagcctcctgagtagctgggattacaggcgcctgtcaccatgcccagctaatttttatatttttggtagagacaggcttgtctcaaaccatgttggcca

SEQ ID NO: 234931 - DNA, 201 bp, Homo sapiens
tttggcctcccaaaatgttgggattataggcattagccactgtgcttggcctcatttaatatatatatatatatttagatggagtcttgctctgttgcccrggctggagtgcagtggcacgatcttggctcactgcaacctctgcctcctgggttcaagcaattctcttgtcttagcctcctgagtagctaggattatagg

SEQ ID NO: 234932 - DNA, 201 bp, Homo sapiens
tcatttaataagagtttagagcaacaaatttttttgaatcaaagggaccttaaattatcccaaatttaaatgtccaagatgaagtttattagtgtgaatgrattacctcaaagcagagcactgttattttcaaattaggctaaacctgtaacccctgattgctctcttggtttttaaattttttttttaacacagaaaaga

SEQ ID NO: 234933 - DNA, 201 bp, Homo sapiens
acataaaagcagaagaaatcaaaatcactcattattctaaaacccagagaaaaccacttgccagtgttaaaattttggctttgttttttctaatatatttyctcttacatagttgagagaatattgcatttctaatttgtatcctgatcatgatgtaaacattttttatttattttattttattgtttttttcagacagag

SEQ ID NO: 234934 - DNA, 201 bp, Homo sapiens
taccatgttggccaggctgttcttgaactcctgaactcaagtgatccacccacctcagcctcccaaagtgctgggattacaggcgtgagccaccgcgcccrgcctcatttaatatttttaagtagagttgtttactcttcatttttgtgaccctcacccattctagaaaaaaaatcattgcttctttgatttggacatcag

SEQ ID NO: 234935 - DNA, 201 bp, Homo sapiens
tgcaccaccatgcctggctaattttttttttttttaaatagagttggggtttccccatgttttccatgctagtctcaaactcctgggctcaggtgatcccyctctctcagcctcctaaagtgctgggattacaggtgtgagccaccatgcccagccaatattaatgtatgtgtatagtagagacttttataaaatacataa

SEQ ID NO: 234936 - DNA, 201 bp, Homo sapiens
gagtccgctgacactgcgtccggggccagacgacgatatcagcgcggggtccccacaacgccatggggcagagccaactctcgagcgcgtgatcgaagccygcagttttttcgcccccgtcacttccgggtgcgacaatctcttctgtccggccagccgctggagtcgttaggtgccgccttgcttctgacgagccacacg

SEQ ID NO: 234937 - DNA, 201 bp, Homo sapiens
ttacaggcatgtgccaccacacctggctaattttttgtatttttagtagagacagggtttctccatgttggtcaggctgatctcaaactcctgacctcagrtgatccacccgccttggcctcccaaactgctgggattacaggtgtgagccaccgcgcctggcccagttttgcacttttttaattagtgtctccaatatgg

SEQ ID NO: 234938 - DNA, 201 bp, Homo sapiens
aaatgcttatgtaaaggactttgtaaatgttaattatcatctaaaggaagattttattaatattaattttatttatttattttgagacagggtctccctckcttcccaggctggagtacagtggtgaaatcacagatcactgtggccttcacctcccgggcttgagtgatccttccacttcagccttggtagtagctgggt

SEQ ID NO: 234939 - DNA, 201 bp, Homo sapiens
cttaggtaggtgtggtggcaggcacctgtaatcccagctactcgtgggggccggagacaggaaaattgcttgaacctgggaggtggaggttgcagtgagtsgagatccagcctgggcgacagagcaagattccgcctcaaaaaaaaaagaaaaaagaaagattgtgtggctgttgcttccttcaattttatctttctctgc

SEQ ID NO: 234940 - DNA, 201 bp, Homo sapiens
gtttaaagtagaggctctgacaccaaaatacctgggtacaaatcacagtccacccatgggctatataactttgagagtcacttaactgctatctgccttarttttaccatctgttaaatgggaatgatggtggtagccaactcacaagttaaatgcttatgtaaaggactttgtaaatgttaattatcatctaaaggaaga

SEQ ID NO: 234941 - DNA, 201 bp, Homo sapiens
gtctaggggaagccatttcaactctctaggtcccagttttctttctttttttttttggaaatggggtctcactctgttgcccaggctggtgtgcaggggcrccatctcgggtcactgtaacctctgccctccaggttcaattgatcctcctgcctcagccttgccagtagcagggactacaggcacggaccactacacctg

SEQ ID NO: 234942 - DNA, 201 bp, Homo sapiens
gtttaacattatcacacaagcattgttttgttgctgttgagacatattgttctaaagatcatagagatagtatggtgtagtggtttaaagtagaggctctsacaccaaaatacctgggtacaaatcacagtccacccatgggctatataactttgagagtcacttaactgctatctgccttaattttaccatctgttaaat

SEQ ID NO: 234943 - DNA, 201 bp, Homo sapiens
actttaaaagctacccagtaactcttgggattaattttatgaaataaattctgagctgctgcttttgatatagtcagacttaagactgaaccccagtagayaggcaatagatatagaattctggttagctaattgaacttttgtgacctgtttaaaaacaaatcaaatttattgaacaaatgacaaggcacaaatactttc

SEQ ID NO: 234944 - DNA, 201 bp, Homo sapiens
actttgtccctatgcagtctgcctgggagccgtcttattctactgactcaaaagacactcctgaaagcagtgccatcctgagcagcagcttgtattacttyacaagtcagacctgttattaaagacgcagactggcatttaaatcaggctgtgtcacacccatcctggtctttgttctggctcctatggtggccaggagaa

SEQ ID NO: 234945 - DNA, 201 bp, Homo sapiens; identical to SEQ ID NO: 44607

SEQ ID NO: 234946 - DNA, 201 bp, Homo sapiens
cttgggagaactgagaaaatggtcactcagagcattttctgtgttctgtggtttagatgaggccttagatgagaaaggctgcagggctccttggatatgckttttcttttacctcctgtttcagaaatataggggttacccccaaatagtgctctcagcactttcctgttcatgcttttcctcaaggatctcttcacactt

SEQ ID NO: 234947 - DNA, 201 bp, Homo sapiens
tcttacaggggttactggggaggaccagcgtttctgcgcaagttgtttcatctaggtatgagttaaggatggctcagcacttgctcatcttggatggcttytgggccaaaactgcagtcactgaatgaccaagagcagcacgaaggacttggaacctatccttgtaaagagttccttgatgggtaatggtgaccaaatgcc

SEQ ID NO: 234948 - DNA, 201 bp, Homo sapiens
cttctcttcaatctaaaaaaaatctatttgagtaatttttaaaatttaaaatgtacagtgtattaaagaaaatttgtgaaaagtacatacaaagaagaggraaaataattataatcattaaaaccattgctaatatttaggtatcagtatcatgaaaaatggtttcccttttctgggaagttgtagaaagtatatcttttt

SEQ ID NO: 234949 - DNA, 201 bp, Homo sapiens
acacaaggagtttcggagtggaggtttaatagacaggagaaaagagaaagaaaaacaactctctctattgagagagaggggtcttctgagtggaaagacgyggccggtggtggatatgtcagattttatagtcaggttggtggaggcggtgtctgatttacatagggctcacagattggtttgatcaggtatgatgtttac

SEQ ID NO: 234950 - DNA, 201 bp, Homo sapiens
atcaaagggaccttaaattatcccaaatttaaatgtccaagatgaagtttattagtgtgaatgaattacctcaaagcagagcactgttattttcaaattargctaaacctgtaacccctgattgctctcttggtttttaaattttttttttaacacagaaaagagcacttaaactgcagcagaagaggcaaaaagaagagt

SEQ ID NO: 234951 - DNA, 201 bp, Homo sapiens
aaccatgaagtattagactggaagggagctagtgaagtggctacattgactggcgtgtatacccatggtttatcgtgttgcgccaggaaaatttaggacayggacacacacaaggagtttcggagtggaggtttaatagacaggagaaaagagaaagaaaaacaactctctctattgagagagaggggtcttctgagtgga

SEQ ID NO: 234952 - DNA, 201 bp, Homo sapiens
aaaccaatttcataaagtttttcacttttctttgagaacaaaaataatacccactgttagtagtttggtagaaagtgcttcaaaaggatccctgcatgtaygacttacaaaaaatgaaaatttccaactgatagtatattttaggtcagatttttaagttttttttttaaggctattttattaaaaaaaaaaaagtgggct

SEQ ID NO: 234953 - DNA, 201 bp, Homo sapiens
ttataacacattcttttgtgtttgtgaagttgtttcttatagttggaaagtgaaatttgactgcaaaggccaggacattctgcttcatgactattaatgaygtcaataaatctggttcagaggactttttatttataaatactgaatccaggaataggctatggataattaatgaaataaagcagaagtagccttcttggc

SEQ ID NO: 234954 - DNA, 201 bp, Homo sapiens
aacttggacatttcttataacacattcttttgtgtttgtgaagttgtttcttatagttggaaagtgaaatttgactgcaaaggccaggacattctgcttcrtgactattaatgatgtcaataaatctggttcagaggactttttatttataaatactgaatccaggaataggctatggataattaatgaaataaagcagaa

SEQ ID NO: 234955 - DNA, 201 bp, Homo sapiens
cagaagctcttgtcttgttatagagctcaatttccagccccattctccctcccaaggttagaggtggggctgagagttccaaccctctaatcgtagtcacrtgtttggtttttctggtgaccagccccctcctgaagccatctagggatcccaccttgagtcaccttactagcataaactcagggactcattatgaaaaac

SEQ ID NO: 234956 - DNA, 201 bp, Homo sapiens
cagcacatcagtgagttcaccaacccagaagctcttgtcttgttatagagctcaatttccagccccattctccctcccaaggttagaggtggggctgagarttccaaccctctaatcgtagtcacgtgtttggtttttctggtgaccagccccctcctgaagccatctagggatcccaccttgagtcaccttactagcata

SEQ ID NO: 234957 - DNA, 201 bp, Homo sapiens
ggcaaggtagcagggtggtgcagagcttacaggccctctccggtcacaccaccatccagcacatcagtgagttcaccaacccagaagctcttgtcttgttrtagagctcaatttccagccccattctccctcccaaggttagaggtggggctgagagttccaaccctctaatcgtagtcacgtgtttggtttttctggtga

SEQ ID NO: 234958 - DNA, 201 bp, Homo sapiens
gccaaatcacgcgcacgcttgcgcgctgagcctccagccgcgcacgcgcactggcccgcgcccagcctccgctaggggaccccctccatggcttcccaccrggttgttccaggcctcagcttcgccgaaaggcctcaccacctccgacctccgcctgccctggggatgctcccagccctgctgcggcagaacgcgacatgc

SEQ ID NO: 234959 - DNA, 201 bp, Homo sapiens; identical to SEQ ID NO: 44738

SEQ ID NO: 234960 - DNA, 201 bp, Homo sapiens
agtgcttctcctcctggtgagcctcccttgtgtttggggacccagtctcatcccaccttcccccttccccaggcaagctaacaagtgagccttggggcaayggactgagagtcacaaatgacctagcagagcttctctcccagccatatgcctctcacgggctatgaggtatggttgggcaccctgttccagaacccacag

SEQ ID NO: 234961 - DNA, 201 bp, Homo sapiens; identical to SEQ ID NO: 44739

SEQ ID NO: 234962 - DNA, 201 bp, Homo sapiens; identical to SEQ ID NO: 44667

SEQ ID NO: 234963 - DNA, 201 bp, Homo sapiens; identical to SEQ ID NO: 44669

SEQ ID NO: 234964 - DNA, 201 bp, Homo sapiens; identical to SEQ ID NO: 44668

SEQ ID NO: 234965 - DNA, 201 bp, Homo sapiens; identical to SEQ ID NO: 44743

SEQ ID NO: 234966 - DNA, 201 bp, Homo sapiens
tacctgccagggtgactacgggggcccacttgcctgctttacccacaactgctgggtcctggaaggaattataatccccaaccgagtatgcgcaaggtccygctggccagctgtcttcacgcgtgtctctgtgtttgtggactggattcacaaggtcatgagactgggttaggcccagccttgatgccatatgccttgggg

SEQ ID NO: 234967 - DNA, 201 bp, Homo sapiens; identical to SEQ ID NO: 44671

SEQ ID NO: 234968 - DNA, 201 bp, Homo sapiens
gctacagcacctgctacatgcggtggtgcccgggccttggcaggaggatgtggcagatgctgaagagtgtgctggtcgctgtgggcccttaatggactgcyggtgagtggccactgggcctagataagactgggggcagggaagcctgggctgtggcgttaccctgtgccttcttctctccagggccttccactacaacgt

SEQ ID NO: 234969 - DNA, 201 bp, Homo sapiens
tcatgaacaatggggttgggtaccggggcaccatggccacgaccgtgggtggcctgccctgccaggcttggagccacaagttcccgaatgatcacaagtgrgacaaacaccttccctccgtcccggcctggggccttcccccagcacacactatagtgatgctctgggccctcaggtacacgcccactctccggaatggcc

SEQ ID NO: 234970 - DNA, 201 bp, Homo sapiens; identical to SEQ ID NO: 44673

SEQ ID NO: 234971 - DNA, 201 bp, Homo sapiens
ctgcatcatgaacaatggggttgggtaccggggcaccatggccacgaccgtgggtggcctgccctgccaggcttggagccacaagttcccgaatgatcacmagtgagacaaacaccttccctccgtcccggcctggggccttcccccagcacacactatagtgatgctctgggccctcaggtacacgcccactctccggaa

SEQ ID NO: 234972 - DNA, 201 bp, Homo sapiens
ctctccagggccttccactacaacgtgagcagccatggttgccaactgctgccatggactcaacactcgccccacacgaggctgcggcgttctgggcgctrtgacctcttccagaagaaaggcaagtgggggtggagaggggcagggtgggagacaggggacctcagcccaagttgatcttctgtctcttgctcccagact

SEQ ID NO: 234973 - DNA, 201 bp, Homo sapiens
gcctgggctgtggcgttaccctgtgccttcttctctccagggccttccactacaacgtgagcagccatggttgccaactgctgccatggactcaacactcrccccacacgaggctgcggcgttctgggcgctgtgacctcttccagaagaaaggcaagtgggggtggagaggggcagggtgggagacaggggacctcagcc

SEQ ID NO: 234974 - DNA, 201 bp, Homo sapiens
acccactcatgcctactctgcagggcagcgctcgccattgaatgacttccaagtgctccggggcacagagctacagcacctgctacatgcggtggtgcccrggccttggcaggaggatgtggcagatgctgaagagtgtgctggtcgctgtgggcccttaatggactgccggtgagtggccactgggcctagataagactg

SEQ ID NO: 234975 - DNA, 201 bp, Homo sapiens; identical to SEQ ID NO: 44676

SEQ ID NO: 234976 - DNA, 201 bp, Homo sapiens
ccatgggccctggtgctacacgatggacccaaggaccccattcgactactgtgccctgcgacgctgcggtgagcactagtgacgcttcccccatgaccctrcctcagcccccacccaaaggctggctcccttaaccccagtgaactttgtctttcagctgatgaccagccgccatcaatcctggaccccccaggttaggag

SEQ ID NO: 234977 - DNA, 201 bp, Homo sapiens
ctgtgaggttggtggcagggccctgggccagccctggaagggtatggggggctagaaatgaactattttatcatgaagcaggctagtcattgctgtggccyggggccctcatcagttctcctacctgccagggtgactacgggggcccacttgcctgctttacccacaactgctgggtcctggaaggaattataatcccca

SEQ ID NO: 234978 - DNA, 201 bp, Homo sapiens; identical to SEQ ID NO: 44678

SEQ ID NO: 234979 - DNA, 201 bp, Homo sapiens
acgtacggacctgcatcatgaacaatggggttgggtaccggggcaccatggccacgaccgtgggtggcctgccctgccaggcttggagccacaagttcccraatgatcacaagtgagacaaacaccttccctccgtcccggcctggggccttcccccagcacacactatagtgatgctctgggccctcaggtacacgccca

SEQ ID NO: 234980 - DNA, 201 bp, Homo sapiens
ccttaatggactgccggtgagtggccactgggcctagataagactgggggcagggaagcctgggctgtggcgttaccctgtgccttcttctctccagggcsttccactacaacgtgagcagccatggttgccaactgctgccatggactcaacactcgccccacacgaggctgcggcgttctgggcgctgtgacctcttcc

SEQ ID NO: 234981 - DNA, 201 bp, Homo sapiens
ccggaatggcctggaagagaacttctgccgtaaccctgatggcgaccccggaggtccttggtgctacacaacagaccctgctgtgcgcttccagagctgcrgcatcaaatcctgccgggagggtaagcggcgccgggtcaagctgggagagtggagggacaagcccacgtccatccacgaacccactggctctttgtctcc

SEQ ID NO: 234982 - DNA, 201 bp, Homo sapiens; identical to SEQ ID NO: 44754

SEQ ID NO: 234983 - DNA, 201 bp, Homo sapiens
ccctggaagggtatggggggctagaaatgaactattttatcatgaagcaggctagtcattgctgtggcccggggccctcatcagttctcctacctgccagrgtgactacgggggcccacttgcctgctttacccacaactgctgggtcctggaaggaattataatccccaaccgagtatgcgcaaggtcccgctggccagc

SEQ ID NO: 234984 - DNA, 201 bp, Homo sapiens
cccggctcacaacatccgcccaacctcttggctacggcgtccgttcagggccaaatcacgcgcacgcttgcgcgctgagcctccagccgcgcacgcgcacyggcccgcgcccagcctccgctaggggaccccctccatggcttcccaccgggttgttccaggcctcagcttcgccgaaaggcctcaccacctccgacctcc

SEQ ID NO: 234985 - DNA, 201 bp, Homo sapiens
gtcccggcctggggccttcccccagcacacactatagtgatgctctgggccctcaggtacacgcccactctccggaatggcctggaagagaacttctgccrtaaccctgatggcgaccccggaggtccttggtgctacacaacagaccctgctgtgcgcttccagagctgcggcatcaaatcctgccgggagggtaagcgg

SEQ ID NO: 234986 - DNA, 201 bp, Homo sapiens; identical to SEQ ID NO: 44683

SEQ ID NO: 234987 - DNA, 201 bp, Homo sapiens; identical to SEQ ID NO: 44685

SEQ ID NO: 234988 - DNA, 201 bp, Homo sapiens
tcagttctcctacctgccagggtgactacgggggcccacttgcctgctttacccacaactgctgggtcctggaaggaattataatccccaaccgagtatgygcaaggtcccgctggccagctgtcttcacgcgtgtctctgtgtttgtggactggattcacaaggtcatgagactgggttaggcccagccttgatgccata

SEQ ID NO: 234989 - DNA, 201 bp, Homo sapiens; identical to SEQ ID NO: 44687

SEQ ID NO: 234990 - DNA, 201 bp, Homo sapiens
gtttcatccagcccaccccatcctacagaccaggtgcagtttgagaagtgtggcaagagggtggatcggctggatcagcggcgttccaagctgcgcgtggytgggggccatccgggcaactcaccctggacagtcagcttgcggaatcggtgaggcacaactgcctgtctcccacagagaggagctgaggttgtgtcctct

SEQ ID NO: 234991 - DNA, 201 bp, Homo sapiens; identical to SEQ ID NO: 44689

SEQ ID NO: 234992 - DNA, 201 bp, Homo sapiens
ttttttcacaagtatctgtgcagggggctagactggcccttgaaagtgcatacagggtccatcccagaagcttgtagctttgatcccctgaatgaacaaastgtggacatgccaatacacattactgacatgtatgcccacctgacctgcacccactcatgcctactctgcagggcagcgctcgccattgaatgacttcca

SEQ ID NO: 234993 - DNA, 201 bp, Homo sapiens
atccgggcaactcaccctggacagtcagcttgcggaatcggtgaggcacaactgcctgtctcccacagagaggagctgaggttgtgtcctctgtggttatsccactgggggctgggaatctatccctgcccccagaggtcctagccagaagatggcaggtctagcatctgtcccaggagtctgttacctgtcctaattccc

SEQ ID NO: 234994 - DNA, 201 bp, Homo sapiens
ccaagtctgggcctgcttcccaggggaaatttttttcacaagtatctgtgcagggggctagactggcccttgaaagtgcatacagggtccatcccagaagcttgtagctttgatcccctgaatgaacaaagtgtggacatgccaatacacattactgacatgtatgcccacctgacctgcacccactcatgcctactctgc

SEQ ID NO: 234995 - DNA, 201 bp, Homo sapiens
cagttctcctacctgccagggtgactacgggggcccacttgcctgctttacccacaactgctgggtcctggaaggaattataatccccaaccgagtatgcrcaaggtcccgctggccagctgtcttcacgcgtgtctctgtgtttgtggactggattcacaaggtcatgagactgggttaggcccagccttgatgccatat

SEQ ID NO: 234996 - DNA, 201 bp, Homo sapiens
tgtgatggctctgagccttagcattctcatttgagagatgaggtggggcaagcttcatcacccactgctctcacagagcgtatgtgttagatctgagcccrgtgcctgggccactaaacagaggcaccggtgataactaccaagtctgggcctgcttcccaggggaaatttttttcacaagtatctgtgcagggggctaga

SEQ ID NO: 234997 - DNA, 201 bp, Homo sapiens
cagatggggatagccatgggccctggtgctacacgatggacccaaggaccccattcgactactgtgccctgcgacgctgcggtgagcactagtgacgcttsccccatgaccctgcctcagcccccacccaaaggctggctcccttaaccccagtgaactttgtctttcagctgatgaccagccgccatcaatcctggaccc

SEQ ID NO: 234998 - DNA, 201 bp, Homo sapiens
agggcccctggctgggtaatgtgatggctctgagccttagcattctcatttgagagatgaggtggggcaagcttcatcacccactgctctcacagagcgtrtgtgttagatctgagcccggtgcctgggccactaaacagaggcaccggtgataactaccaagtctgggcctgcttcccaggggaaatttttttcacaagt

SEQ ID NO: 234999 - DNA, 201 bp, Homo sapiens
ctccgaaccgcatgcacaactggaggagaacttctgccggaacccagatggggatagccatgggccctggtgctacacgatggacccaaggaccccattckactactgtgccctgcgacgctgcggtgagcactagtgacgcttcccccatgaccctgcctcagcccccacccaaaggctggctcccttaaccccagtgaa

SEQ ID NO: 235000 - DNA, 201 bp, Homo sapiens; identical to SEQ ID NO: 44692

SEQ ID NO: 235001 - DNA, 201 bp, Homo sapiens
gcagtgacccctcctgagcctgatctacccctctaacctagcatatgcctttgtgcaggtgagagcccagatttggagtctgaatgcctagccagggcccytggctgggtaatgtgatggctctgagccttagcattctcatttgagagatgaggtggggcaagcttcatcacccactgctctcacagagcgtatgtgtta

SEQ ID NO: 235002 - DNA, 201 bp, Homo sapiens; identical to SEQ ID NO: 44764

SEQ ID NO: 235003 - DNA, 201 bp, Homo sapiens
gtaccggggcaccatggccacgaccgtgggtggcctgccctgccaggcttggagccacaagttcccgaatgatcacaagtgagacaaacaccttccctccrtcccggcctggggccttcccccagcacacactatagtgatgctctgggccctcaggtacacgcccactctccggaatggcctggaagagaacttctgccg

SEQ ID NO: 235004 - DNA, 201 bp, Homo sapiens; identical to SEQ ID NO: 44693

SEQ ID NO: 235005 - DNA, 201 bp, Homo sapiens
gccagagccacccaatcccgtagggacaggtttcacaacttcccggatggggctgtggtgggtcacagtgcagcctccagccagaaggatggggtggctcycactcctgctgcttctgactcaatgcttaggggtccctggtaagtgcccccaaccctgatccccatctgccttcaggagggggttggccccattctccta

SEQ ID NO: 235006 - DNA, 201 bp, Homo sapiens
aacctcttggctacggcgtccgttcagggccaaatcacgcgcacgcttgcgcgctgagcctccagccgcgcacgcgcactggcccgcgcccagcctccgckaggggaccccctccatggcttcccaccgggttgttccaggcctcagcttcgccgaaaggcctcaccacctccgacctccgcctgccctggggatgctccc

SEQ ID NO: 235007 - DNA, 201 bp, Homo sapiens; identical to SEQ ID NO: 44768

SEQ ID NO: 235008 - DNA, 201 bp, Homo sapiens; identical to SEQ ID NO: 44769

SEQ ID NO: 235009 - DNA, 201 bp, Homo sapiens; identical to SEQ ID NO: 44770

SEQ ID NO: 235010 - DNA, 201 bp, Homo sapiens
tgctctagcactgaagcagtgtcaggaccacacagatgcacgcacacagcaggcagtgacccctcctgagcctgatctacccctctaacctagcatatgcytttgtgcaggtgagagcccagatttggagtctgaatgcctagccagggcccctggctgggtaatgtgatggctctgagccttagcattctcatttgagag

SEQ ID NO: 235011 - DNA, 201 bp, Homo sapiens
acctcttccagaagaaaggcaagtgggggtggagaggggcagggtgggagacaggggacctcagcccaagttgatcttctgtctcttgctcccagactacrtacggacctgcatcatgaacaatggggttgggtaccggggcaccatggccacgaccgtgggtggcctgccctgccaggcttggagccacaagttcccgaa

SEQ ID NO: 235012 - DNA, 201 bp, Homo sapiens
tctagcactgaagcagtgtcaggaccacacagatgcacgcacacagcaggcagtgacccctcctgagcctgatctacccctctaacctagcatatgccttygtgcaggtgagagcccagatttggagtctgaatgcctagccagggcccctggctgggtaatgtgatggctctgagccttagcattctcatttgagagatg

SEQ ID NO: 235013 - DNA, 201 bp, Homo sapiens
caggaccacacagatgcacgcacacagcaggcagtgacccctcctgagcctgatctacccctctaacctagcatatgcctttgtgcaggtgagagcccagmtttggagtctgaatgcctagccagggcccctggctgggtaatgtgatggctctgagccttagcattctcatttgagagatgaggtggggcaagcttcatc

SEQ ID NO: 235014 - DNA, 201 bp, Homo sapiens
gtcctctgtggttatcccactgggggctgggaatctatccctgcccccagaggtcctagccagaagatggcaggtctagcatctgtcccaggagtctgttycctgtcctaattccccactcctctaggcagggccagcatttctgcggggggtctctagtgaaggagcagtggatactgactgcccggcagtgcttctcct

SEQ ID NO: 235015 - DNA, 201 bp, Homo sapiens
ctagtcattgctgtggcccggggccctcatcagttctcctacctgccagggtgactacgggggcccacttgcctgctttacccacaactgctgggtcctgraaggaattataatccccaaccgagtatgcgcaaggtcccgctggccagctgtcttcacgcgtgtctctgtgtttgtggactggattcacaaggtcatgag

SEQ ID NO: 235016 - DNA, 201 bp, Homo sapiens
ctgggtttcatccagcccaccccatcctacagaccaggtgcagtttgagaagtgtggcaagagggtggatcggctggatcagcggcgttccaagctgcgcktggttgggggccatccgggcaactcaccctggacagtcagcttgcggaatcggtgaggcacaactgcctgtctcccacagagaggagctgaggttgtgtc

SEQ ID NO: 235017 - DNA, 201 bp, Homo sapiens; identical to SEQ ID NO: 44699

SEQ ID NO: 235018 - DNA, 201 bp, Homo sapiens
tgtgaggttggtggcagggccctgggccagccctggaagggtatggggggctagaaatgaactattttatcatgaagcaggctagtcattgctgtggcccrgggccctcatcagttctcctacctgccagggtgactacgggggcccacttgcctgctttacccacaactgctgggtcctggaaggaattataatccccaa

SEQ ID NO: 235019 - DNA, 201 bp, Homo sapiens
ggctgggccttgtggcctcagaccctgagtgcccccattcttgctaaagatctgtgaccctgaaccagcgtgtggccctgatctgcctgccccctgaatgrtatgtggtgcctccagggaccaagtgtgagattgcaggctggggtgagaccaaaggtaagagcacagtgcacaggactgctggtggccaggaggcccagc

SEQ ID NO: 235020 - DNA, 201 bp, Homo sapiens; identical to SEQ ID NO: 44702

SEQ ID NO: 235021 - DNA, 201 bp, Homo sapiens
ccctcactgcaggtacgggtaatgacacagtcctaaatgtggccttgctgaatgtcatctccaaccaggagtgtaacatcaagcaccgaggacgtgtgcgkgagagtgagatgtgcactgagggactgttggcccctgtgggggcctgtgaggttggtggcagggccctgggccagccctggaagggtatggggggctaga

SEQ ID NO: 235022 - DNA, 201 bp, Homo sapiens
taccctgtgccttcttctctccagggccttccactacaacgtgagcagccatggttgccaactgctgccatggactcaacactcgccccacacgaggctgyggcgttctgggcgctgtgacctcttccagaagaaaggcaagtgggggtggagaggggcagggtgggagacaggggacctcagcccaagttgatcttctgt

SEQ ID NO: 235023 - DNA, 201 bp, Homo sapiens
aggcccagccctggatcttcctgcaggaccctctccctctccccattcccctcactgcaggtacgggtaatgacacagtcctaaatgtggccttgctgaaygtcatctccaaccaggagtgtaacatcaagcaccgaggacgtgtgcgggagagtgagatgtgcactgagggactgttggcccctgtgggggcctgtgagg

SEQ ID NO: 235024 - DNA, 201 bp, Homo sapiens
ttgctaaagatctgtgaccctgaaccagcgtgtggccctgatctgcctgccccctgaatggtatgtggtgcctccagggaccaagtgtgagattgcaggcyggggtgagaccaaaggtaagagcacagtgcacaggactgctggtggccaggaggcccagccctggatcttcctgcaggaccctctccctctccccattcc

SEQ ID NO: 235025 - DNA, 201 bp, Homo sapiens
agcttgtcctgctcaagctggagaggtatgtggacaacctgggagggtgtgaggtggggctgggccttgtggcctcagaccctgagtgcccccattcttgytaaagatctgtgaccctgaaccagcgtgtggccctgatctgcctgccccctgaatggtatgtggtgcctccagggaccaagtgtgagattgcaggctggg

SEQ ID NO: 235026 - DNA, 201 bp, Homo sapiens
ccatatgcctctcacgggctatgaggtatggttgggcaccctgttccagaacccacagcatggagagccaagcctacagcgggtcccagtagccaagatgstgtgtgggccctcaggctcccagcttgtcctgctcaagctggagaggtatgtggacaacctgggagggtgtgaggtggggctgggccttgtggcctcaga

SEQ ID NO: 235027 - DNA, 201 bp, Homo sapiens
cagaggtcctagccagaagatggcaggtctagcatctgtcccaggagtctgttacctgtcctaattccccactcctctaggcagggccagcatttctgcgsggggtctctagtgaaggagcagtggatactgactgcccggcagtgcttctcctcctggtgagcctcccttgtgtttggggacccagtctcatcccacctt

SEQ ID NO: 235028 - DNA, 201 bp, Homo sapiens
cggggggtctctagtgaaggagcagtggatactgactgcccggcagtgcttctcctcctggtgagcctcccttgtgtttggggacccagtctcatcccacyttcccccttccccaggcaagctaacaagtgagccttggggcaatggactgagagtcacaaatgacctagcagagcttctctcccagccatatgcctctca

SEQ ID NO: 235029 - DNA, 201 bp, Homo sapiens
cagaagatggcaggtctagcatctgtcccaggagtctgttacctgtcctaattccccactcctctaggcagggccagcatttctgcggggggtctctagtraaggagcagtggatactgactgcccggcagtgcttctcctcctggtgagcctcccttgtgtttggggacccagtctcatcccaccttcccccttccccag

SEQ ID NO: 235030 - DNA, 201 bp, Homo sapiens
gtgtggcaagagggtggatcggctggatcagcggcgttccaagctgcgcgtggttgggggccatccgggcaactcaccctggacagtcagcttgcggaatyggtgaggcacaactgcctgtctcccacagagaggagctgaggttgtgtcctctgtggttatcccactgggggctgggaatctatccctgcccccagaggt

SEQ ID NO: 235031 - DNA, 201 bp, Homo sapiens
cttgctgaatgtcatctccaaccaggagtgtaacatcaagcaccgaggacgtgtgcgggagagtgagatgtgcactgagggactgttggcccctgtggggscctgtgaggttggtggcagggccctgggccagccctggaagggtatggggggctagaaatgaactattttatcatgaagcaggctagtcattgctgtggc

SEQ ID NO: 235032 - DNA, 201 bp, Homo sapiens
ggccctcatcagttctcctacctgccagggtgactacgggggcccacttgcctgctttacccacaactgctgggtcctggaaggaattataatccccaacygagtatgcgcaaggtcccgctggccagctgtcttcacgcgtgtctctgtgtttgtggactggattcacaaggtcatgagactgggttaggcccagccttg

SEQ ID NO: 235033 - DNA, 201 bp, Homo sapiens; identical to SEQ ID NO: 44712

SEQ ID NO: 235034 - DNA, 201 bp, Homo sapiens
tacggacctgcatcatgaacaatggggttgggtaccggggcaccatggccacgaccgtgggtggcctgccctgccaggcttggagccacaagttcccgaaygatcacaagtgagacaaacaccttccctccgtcccggcctggggccttcccccagcacacactatagtgatgctctgggccctcaggtacacgcccactc

SEQ ID NO: 235035 - DNA, 201 bp, Homo sapiens
cctgcctcagcccccacccaaaggctggctcccttaaccccagtgaactttgtctttcagctgatgaccagccgccatcaatcctggaccccccaggttasgagttgggccagttatgggtcaggccctttagcccacgacatccacacagtctgggtttcatccagcccaccccatcctacagaccaggtgcagtttgag

SEQ ID NO: 235036 - DNA, 201 bp, Homo sapiens; identical to SEQ ID NO: 44713

SEQ ID NO: 235037 - DNA, 201 bp, Homo sapiens
gtggcgttaccctgtgccttcttctctccagggccttccactacaacgtgagcagccatggttgccaactgctgccatggactcaacactcgccccacacraggctgcggcgttctgggcgctgtgacctcttccagaagaaaggcaagtgggggtggagaggggcagggtgggagacaggggacctcagcccaagttgat

SEQ ID NO: 235038 - DNA, 201 bp, Homo sapiens; identical to SEQ ID NO: 44788

SEQ ID NO: 235039 - DNA, 201 bp, Homo sapiens
tgagaagtgtggcaagagggtggatcggctggatcagcggcgttccaagctgcgcgtggttgggggccatccgggcaactcaccctggacagtcagcttgsggaatcggtgaggcacaactgcctgtctcccacagagaggagctgaggttgtgtcctctgtggttatcccactgggggctgggaatctatccctgccccc

SEQ ID NO: 235040 - DNA, 201 bp, Homo sapiens
cgacatccacacagtctgggtttcatccagcccaccccatcctacagaccaggtgcagtttgagaagtgtggcaagagggtggatcggctggatcagcggygttccaagctgcgcgtggttgggggccatccgggcaactcaccctggacagtcagcttgcggaatcggtgaggcacaactgcctgtctcccacagagagg

SEQ ID NO: 235041 - DNA, 201 bp, Homo sapiens
cccattcgactactgtgccctgcgacgctgcggtgagcactagtgacgcttcccccatgaccctgcctcagcccccacccaaaggctggctcccttaaccscagtgaactttgtctttcagctgatgaccagccgccatcaatcctggaccccccaggttaggagttgggccagttatgggtcaggccctttagcccacga

SEQ ID NO: 235042 - DNA, 201 bp, Homo sapiens
ctgtgggggcctgtgaggttggtggcagggccctgggccagccctggaagggtatggggggctagaaatgaactattttatcatgaagcaggctagtcatkgctgtggcccggggccctcatcagttctcctacctgccagggtgactacgggggcccacttgcctgctttacccacaactgctgggtcctggaaggaatt

SEQ ID NO: 235043 - DNA, 201 bp, Homo sapiens
tgccacgattttgctcccgcttccgcctaggttcacgtttacctccgaaccgcatgcacaactggaggagaacttctgccggaacccagatggggatagcyatgggccctggtgctacacgatggacccaaggaccccattcgactactgtgccctgcgacgctgcggtgagcactagtgacgcttcccccatgaccctgc

SEQ ID NO: 235044 - DNA, 201 bp, Homo sapiens
agactaccctgccacgattttgctcccgcttccgcctaggttcacgtttacctccgaaccgcatgcacaactggaggagaacttctgccggaacccagatrgggatagccatgggccctggtgctacacgatggacccaaggaccccattcgactactgtgccctgcgacgctgcggtgagcactagtgacgcttccccca

SEQ ID NO: 235045 - DNA, 201 bp, Homo sapiens
ggaaatggttgagactaccctgccacgattttgctcccgcttccgcctaggttcacgtttacctccgaaccgcatgcacaactggaggagaacttctgccrgaacccagatggggatagccatgggccctggtgctacacgatggacccaaggaccccattcgactactgtgccctgcgacgctgcggtgagcactagtga

SEQ ID NO: 235046 - DNA, 201 bp, Homo sapiens
taggaacacatagacattgcccacttaggcctctattagcacgtctgctctagcactgaagcagtgtcaggaccacacagatgcacgcacacagcaggcartgacccctcctgagcctgatctacccctctaacctagcatatgcctttgtgcaggtgagagcccagatttggagtctgaatgcctagccagggcccctgg

SEQ ID NO: 235047 - DNA, 201 bp, Homo sapiens; identical to SEQ ID NO: 44794

SEQ ID NO: 235048 - DNA, 201 bp, Homo sapiens
cctaggaacacatagacattgcccacttaggcctctattagcacgtctgctctagcactgaagcagtgtcaggaccacacagatgcacgcacacagcaggmagtgacccctcctgagcctgatctacccctctaacctagcatatgcctttgtgcaggtgagagcccagatttggagtctgaatgcctagccagggcccct

SEQ ID NO: 235049 - DNA, 201 bp, Homo sapiens; identical to SEQ ID NO: 44795

SEQ ID NO: 235050 - DNA, 201 bp, Homo sapiens; identical to SEQ ID NO: 44796

SEQ ID NO: 235051 - DNA, 201 bp, Homo sapiens; identical to SEQ ID NO: 44797

SEQ ID NO: 235052 - DNA, 201 bp, Homo sapiens
cagcttgcggaatcggtgaggcacaactgcctgtctcccacagagaggagctgaggttgtgtcctctgtggttatcccactgggggctgggaatctatccstgcccccagaggtcctagccagaagatggcaggtctagcatctgtcccaggagtctgttacctgtcctaattccccactcctctaggcagggccagcatt

SEQ ID NO: 235053 - DNA, 201 bp, Homo sapiens
agagtgtgctggtcgctgtgggcccttaatggactgccggtgagtggccactgggcctagataagactgggggcagggaagcctgggctgtggcgttaccytgtgccttcttctctccagggccttccactacaacgtgagcagccatggttgccaactgctgccatggactcaacactcgccccacacgaggctgcggcg

SEQ ID NO: 235054 - DNA, 201 bp, Homo sapiens
tggtgctacacgatggacccaaggaccccattcgactactgtgccctgcgacgctgcggtgagcactagtgacgcttcccccatgaccctgcctcagcccycacccaaaggctggctcccttaaccccagtgaactttgtctttcagctgatgaccagccgccatcaatcctggaccccccaggttaggagttgggccagt

SEQ ID NO: 235055 - DNA, 201 bp, Homo sapiens
tggatcggctggatcagcggcgttccaagctgcgcgtggttgggggccatccgggcaactcaccctggacagtcagcttgcggaatcggtgaggcacaackgcctgtctcccacagagaggagctgaggttgtgtcctctgtggttatcccactgggggctgggaatctatccctgcccccagaggtcctagccagaagat

SEQ ID NO: 235056 - DNA, 201 bp, Homo sapiens
agccatgggccctggtgctacacgatggacccaaggaccccattcgactactgtgccctgcgacgctgcggtgagcactagtgacgcttcccccatgaccytgcctcagcccccacccaaaggctggctcccttaaccccagtgaactttgtctttcagctgatgaccagccgccatcaatcctggaccccccaggttagg

SEQ ID NO: 235057 - DNA, 201 bp, Homo sapiens; identical to SEQ ID NO: 44720

SEQ ID NO: 235058 - DNA, 201 bp, Homo sapiens
ccactacaacgtgagcagccatggttgccaactgctgccatggactcaacactcgccccacacgaggctgcggcgttctgggcgctgtgacctcttccagragaaaggcaagtgggggtggagaggggcagggtgggagacaggggacctcagcccaagttgatcttctgtctcttgctcccagactacgtacggacctgc

SEQ ID NO: 235059 - DNA, 201 bp, Homo sapiens
ggggctagaaatgaactattttatcatgaagcaggctagtcattgctgtggcccggggccctcatcagttctcctacctgccagggtgactacgggggccyacttgcctgctttacccacaactgctgggtcctggaaggaattataatccccaaccgagtatgcgcaaggtcccgctggccagctgtcttcacgcgtgtc

SEQ ID NO: 235060 - DNA, 201 bp, Homo sapiens
caagcctacagcgggtcccagtagccaagatggtgtgtgggccctcaggctcccagcttgtcctgctcaagctggagaggtatgtggacaacctgggaggrtgtgaggtggggctgggccttgtggcctcagaccctgagtgcccccattcttgctaaagatctgtgaccctgaaccagcgtgtggccctgatctgcctgc

SEQ ID NO: 235061 - DNA, 201 bp, Homo sapiens
acgacatccacacagtctgggtttcatccagcccaccccatcctacagaccaggtgcagtttgagaagtgtggcaagagggtggatcggctggatcagcgkcgttccaagctgcgcgtggttgggggccatccgggcaactcaccctggacagtcagcttgcggaatcggtgaggcacaactgcctgtctcccacagagag

SEQ ID NO: 235062 - DNA, 201 bp, Homo sapiens; identical to SEQ ID NO: 44724

SEQ ID NO: 235063 - DNA, 201 bp, Homo sapiens; identical to SEQ ID NO: 44725

SEQ ID NO: 235064 - DNA, 201 bp, Homo sapiens; identical to SEQ ID NO: 44804

SEQ ID NO: 235065 - DNA, 201 bp, Homo sapiens
gcggtggtgcccgggccttggcaggaggatgtggcagatgctgaagagtgtgctggtcgctgtgggcccttaatggactgccggtgagtggccactgggcmtagataagactgggggcagggaagcctgggctgtggcgttaccctgtgccttcttctctccagggccttccactacaacgtgagcagccatggttgccaa

SEQ ID NO: 235066 - DNA, 201 bp, Homo sapiens
gaaggatggggtggctcccactcctgctgcttctgactcaatgcttaggggtccctggtaagtgcccccaaccctgatccccatctgccttcaggaggggsttggccccattctcctattctaggatgagaaaaaagtcggggagccagaggctcagtgggcatggggcagtgaccttgccctcttgagcacagctgggaa

SEQ ID NO: 235067 - DNA, 201 bp, Homo sapiens
ggtgggtcacagtgcagcctccagccagaaggatggggtggctcccactcctgctgcttctgactcaatgcttaggggtccctggtaagtgcccccaaccytgatccccatctgccttcaggagggggttggccccattctcctattctaggatgagaaaaaagtcggggagccagaggctcagtgggcatggggcagtga

SEQ ID NO: 235068 - DNA, 201 bp, Homo sapiens; identical to SEQ ID NO: 44805

SEQ ID NO: 235069 - DNA, 201 bp, Homo sapiens; identical to SEQ ID NO: 44727

SEQ ID NO: 235070 - DNA, 201 bp, Homo sapiens
ctccaaccaggagtgtaacatcaagcaccgaggacgtgtgcgggagagtgagatgtgcactgagggactgttggcccctgtgggggcctgtgaggttggtrgcagggccctgggccagccctggaagggtatggggggctagaaatgaactattttatcatgaagcaggctagtcattgctgtggcccggggccctcatca

SEQ ID NO: 235071 - DNA, 201 bp, Homo sapiens
gctgggcgtgacctgagagcataccccgtggagtaccgtacacctgggaaaggcgggtttggtcccagccccagagggatctcagctctcgctcggggccsgacctatctcggtccatctaagggtccgaggcacagccccgccaagaggccacaactgtcagctgcttccgcgggaagggtgagggctaccggggcacag

SEQ ID NO: 235072 - DNA, 201 bp, Homo sapiens
catggagagccaagcctacagcgggtcccagtagccaagatggtgtgtgggccctcaggctcccagcttgtcctgctcaagctggagaggtatgtggacamcctgggagggtgtgaggtggggctgggccttgtggcctcagaccctgagtgcccccattcttgctaaagatctgtgaccctgaaccagcgtgtggccctg

SEQ ID NO: 235073 - DNA, 201 bp, Homo sapiens
ccaggttcctcgaccaaggtctggacgacaactattgccggaatcctgacggctccgagcggccatggtgctacactacggatccgcagatcgagcgagarttctgtgacctcccccgctgcggtaggcggcggggaccaggcctgggagggtacctgggaaccttggggaggggcgtggcttggccggggaggtaagagg

SEQ ID NO: 235074 - DNA, 201 bp, Homo sapiens
atgaggtatggttgggcaccctgttccagaacccacagcatggagagccaagcctacagcgggtcccagtagccaagatggtgtgtgggccctcaggctcycagcttgtcctgctcaagctggagaggtatgtggacaacctgggagggtgtgaggtggggctgggccttgtggcctcagaccctgagtgcccccattctt

SEQ ID NO: 235075 - DNA, 201 bp, Homo sapiens
tcccagggtcttgttcacgccccattaccgcccccaggttcctcgaccaaggtctggacgacaactattgccggaatcctgacggctccgagcggccatgrtgctacactacggatccgcagatcgagcgagagttctgtgacctcccccgctgcggtaggcggcggggaccaggcctgggagggtacctgggaaccttgg

SEQ ID NO: 235076 - DNA, 201 bp, Homo sapiens
gcgtccgttcagggccaaatcacgcgcacgcttgcgcgctgagcctccagccgcgcacgcgcactggcccgcgcccagcctccgctaggggaccccctccrtggcttcccaccgggttgttccaggcctcagcttcgccgaaaggcctcaccacctccgacctccgcctgccctggggatgctcccagccctgctgcggca

SEQ ID NO: 235077 - DNA, 201 bp, Homo sapiens
ataagccagagtcccagggtcttgttcacgccccattaccgcccccaggttcctcgaccaaggtctggacgacaactattgccggaatcctgacggctccsagcggccatggtgctacactacggatccgcagatcgagcgagagttctgtgacctcccccgctgcggtaggcggcggggaccaggcctgggagggtacct

SEQ ID NO: 235078 - DNA, 201 bp, Homo sapiens
ttgggcggggccagataagccagagtcccagggtcttgttcacgccccattaccgcccccaggttcctcgaccaaggtctggacgacaactattgccggartcctgacggctccgagcggccatggtgctacactacggatccgcagatcgagcgagagttctgtgacctcccccgctgcggtaggcggcggggaccaggc

SEQ ID NO: 235079 - DNA, 201 bp, Homo sapiens
aggcggtatcggcgtcctgggggccgggctagggaaggtccaggactccaggggcagggctccgtgtagggcaattgggcggggccagataagccagagtmccagggtcttgttcacgccccattaccgcccccaggttcctcgaccaaggtctggacgacaactattgccggaatcctgacggctccgagcggccatggt

SEQ ID NO: 235080 - DNA, 201 bp, Homo sapiens
tggtgctacacaacagaccctgctgtgcgcttccagagctgcggcatcaaatcctgccgggagggtaagcggcgccgggtcaagctgggagagtggagggrcaagcccacgtccatccacgaacccactggctctttgtctccagccgcgtgtgtctggtgcaatggcgaggaataccgcggcgcggtagaccgcacggag

SEQ ID NO: 235081 - DNA, 201 bp, Homo sapiens; identical to SEQ ID NO: 44734

SEQ ID NO: 235082 - DNA, 201 bp, Homo sapiens; identical to SEQ ID NO: 44735

SEQ ID NO: 235083 - DNA, 201 bp, Homo sapiens
ctgtggcccggggccctcatcagttctcctacctgccagggtgactacgggggcccacttgcctgctttacccacaactgctgggtcctggaaggaattakaatccccaaccgagtatgcgcaaggtcccgctggccagctgtcttcacgcgtgtctctgtgtttgtggactggattcacaaggtcatgagactgggttag

SEQ ID NO: 235084 - DNA, 201 bp, Homo sapiens
cggctttcctggtagatccacagctttgctactgaaaggtcagttgtgttatcgacttgtaagtggtaagaatacagactagatagaatatagccattctrtgggtgctgagtaagtattgtatagttagggttcaaggattttcaccaagataccatgttcagagaagtgaaagagttacctcactgtgtcctgaaaagt

SEQ ID NO: 235085 - DNA, 201 bp, Homo sapiens
gggattttgaagcatagtcttactgagtgtctgctgcttatcccccccaggccccttttttccccctattttcttaagttgccaggtctccattttctccmtttaaagggaagaaggagagaaaggaggacaaaaggaagaaatcaagtcctgtggcttccgttccttagccctagggcccaccctggggagcgaaagggt

SEQ ID NO: 235086 - DNA, 201 bp, Homo sapiens
gggttattagaagacatatatcaaaacaagacaagggggtaagaaaagctcaaaaatcccaaagctgacaatgtgcccagataactggcagctatagttaygcctgccaagatttgggtgcatgggacttggctttggttagctcccttggtcttattttcccaaacaaggaaacctctgagttatgggctgcccattcat

SEQ ID NO: 235087 - DNA, 201 bp, Homo sapiens
tgctactgaaaggtcagttgtgttatcgacttgtaagtggtaagaatacagactagatagaatatagccattctatgggtgctgagtaagtattgtatagytagggttcaaggattttcaccaagataccatgttcagagaagtgaaagagttacctcactgtgtcctgaaaagttgaccgttgattccagaagtggccaa

SEQ ID NO: 235088 - DNA, 201 bp, Homo sapiens
aagaaggagagaaaggaggacaaaaggaagaaatcaagtcctgtggcttccgttccttagccctagggcccaccctggggagcgaaagggtcttagtttgscccacccatgttctgcagctccaccctctcccctgctggggccctctggctgggacccctctccccagcagtgtcccttactcctggctttagaggctgt

SEQ ID NO: 235089 - DNA, 201 bp, Homo sapiens
accatgttcagagaagtgaaagagttacctcactgtgtcctgaaaagttgaccgttgattccagaagtggccaaacgagggctgtcttggacacagagtasaagcttggctcctggtaacagcttttctccctgaagcagcattctgcttgcactctcgtctcttgctacacttgcattggaagggaaaagagtgcatttc

SEQ ID NO: 235090 - DNA, 201 bp, Homo sapiens
catgttctgcagctccaccctctcccctgctggggccctctggctgggacccctctccccagcagtgtcccttactcctggctttagaggctgtaactccmtgccctcatcagggcgccagttttccagtaagctgagctgttagtgggtgtgactggattgtcccgggctgcctccccacggcttctctgccttttccca

SEQ ID NO: 235091 - DNA, 201 bp, Homo sapiens
ttccagaagtggccaaacgagggctgtcttggacacagagtacaagcttggctcctggtaacagcttttctccctgaagcagcattctgcttgcactctcrtctcttgctacacttgcattggaagggaaaagagtgcatttcagcgagtgttctagcaagtcaaatctaatctctcactaccaattgctacttcaagaga

SEQ ID NO: 235092 - DNA, 201 bp, Homo sapiens
ggaactagcagaaattggatattaatattagctacacagctgctcataccaggatggagctgatatgggacaggcagaggatgtggaatcaggacaccttkgttaagtctggccttcattccctagcttcataaccttggcaattctcttaatgtcagtgagtttcagtttcctcttctgtaaactaagggttttctaaaa

SEQ ID NO: 235093 - DNA, 201 bp, Homo sapiens
ttttccagtaagctgagctgttagtgggtgtgactggattgtcccgggctgcctccccacggcttctctgccttttcccagtggcctccaccatgtgcctygtaccttcatgccacaggaattctaggctccatggcagacgtggcagagtgagcgggtgggtgaggggtgggggcaattgcaaataggctctgtacccct

SEQ ID NO: 235094 - DNA, 201 bp, Homo sapiens; identical to SEQ ID NO: 44973

SEQ ID NO: 235095 - DNA, 201 bp, Homo sapiens
agcagcattctgcttgcactctcgtctcttgctacacttgcattggaagggaaaagagtgcatttcagcgagtgttctagcaagtcaaatctaatctctcrctaccaattgctacttcaagagaggaaattctgagatgattttcctaactcaaatgccttttccctgcatttgacctgagaattcaccctgccatttctt

SEQ ID NO: 235096 - DNA, 201 bp, Homo sapiens
ggtattcataaccatcatctgagtcagagatgatggtacttattggtacttatttcaccaaaggggctcagtaccatctttattttaaacttagaaaactrgccaggcgcggtggcttaggcctgtaatcccagcactttgggaggctgaggcaggcggatctcctgaggtcaggagttcaaggccagcctggccaacatg

SEQ ID NO: 235097 - DNA, 201 bp, Homo sapiens
tagtcacaaaggagagaatggaagaaaatgtgataggaaagactggaagtcctggtgccgacaccgtgatgggctgtcaggaactggagttagttcggggkccttcagataacactgaggtgtagcctcaaccagaaaccttcagttgtcccaggacctccttccaaccctatgtgatggctaggtcttccatgaatggaa

SEQ ID NO: 235098 - DNA, 201 bp, Homo sapiens
aataaaggaaagaaaacaataggcatgaagaactcaacttgatagttcacaaaatgttgccaagctgagattctaccagaccttttctcataaatagatasgaatccacgaatcacgcgtagcatattaattgtctggaaagttatcttttggaaaatagtttgttctcttaagtggttggtacatttcatcctactaatg

SEQ ID NO: 235099 - DNA, 201 bp, Homo sapiens
ttccttctccttcagaaaacctcagtctttgcctttaagaccttcaaactgattggatgaggctcacccacattatggagggtaatctactttactcaaartctattggtttaaaagttaaccatgcccaacacgtatcttcaaacaaccaggcactatagcctagccaagtggacacataaaattagccaccacatgtgg

SEQ ID NO: 235100 - DNA, 201 bp, Homo sapiens; identical to SEQ ID NO: 44981

SEQ ID NO: 235101 - DNA, 201 bp, Homo sapiens; identical to SEQ ID NO: 44982

SEQ ID NO: 235102 - DNA, 201 bp, Homo sapiens; identical to SEQ ID NO: 44983

SEQ ID NO: 235103 - DNA, 201 bp, Homo sapiens
cacaccactgtgagccagcaatctgcctgcagtagggctgtagctagctgccttctctcatcccctgtttcaagccatctggaacaggccctagcagcctyagaccaaatcattctggtgacccagacagtacgctcacgctccttgtgggtgtgatctggtgttcctcatacttgtttgtgattttctttggctggccaa

SEQ ID NO: 235104 - DNA, 201 bp, Homo sapiens
ccagcttgcagagtgatttccaactcagtacttcattccacaaacattcactcatgaaagggtgcctgccatgtgccaggcactgggctgagggcccagaraggaggacacagcccctgctcccaagtttactgagggaggcagacagataaagtcaacaattatgacagagcccgagggctttgatggaggcctcagaga

SEQ ID NO: 235105 - DNA, 201 bp, Homo sapiens
gtcatgcacctaaggtgcagaaacacagttaagttctccttcatcttacctcaaactcatggtcttccactgctcaggcagactacctctactatggttcygtagacaaagctttgaagattagagcagcagcgaactaaccttgatctcatcagctttgcattagaacccactctctgactggattaggggctaggttgg

SEQ ID NO: 235106 - DNA, 201 bp, Homo sapiens
aacaatcctggggaagctttgaggggaaccacccattttcctctctgcaagaggaccaaaatgaaacccagaatttcctgggcttaataaattgtcagcaratgcattttggggggaaaaaagccttggttggatatgaactacaaaaaagataagaggaagtggggagaatttgactgttttcttcttttgatgtaagac

SEQ ID NO: 235107 - DNA, 201 bp, Homo sapiens
gaagcaatgtctcaacctttcccactgctgccatcctacttgagataaggccaggaaccagccagcgtctggggcagtggttctgtgggggaatgcgaccttagtccactttacttgtcctttaactggcaggaaggaaacctaccacacagcctccctactgcctaaggagactgcaccattctcttctttcttgatgta

SEQ ID NO: 235108 - DNA, 201 bp, Homo sapiens
tcagggattgtaaatgcaccaatcagcaccctgtcaaaacagaccactgggctctagcaatcagcaggatgtgagtggggccagataagagaataaaagcwggctgcctgagccagcagtggcaactcgctggggtccccttccacactgtggaagctttgttctttcgctctttgcaatacattttgctactgctcactc

SEQ ID NO: 235109 - DNA, 201 bp, Homo sapiens
ccttccttggaaacactagtttggatagtggttatttaacaagtacaaacacttgagtttagggacaagcagtgtacctgatgctaaagcgatggaaggcrtggtctttggcttcaaggtatttattatcttgttaggaaaagtaaaaagccactgatcactaagcacagtgatagtaccgagcagcatttgtctagtgcc

SEQ ID NO: 235110 - DNA, 201 bp, Homo sapiens
tacctgtctccctttcctttacaacagaaaagtgctactgtctttaaccaacaggttttacttgtcacattccaggggaaatttttgccaataagtaatgyccttctagatactaatgacatttgtgtcccatggtttgttttcccccaatccacaaattctatgtttagcaataaaaatttgtctagcacaacagtagac

SEQ ID NO: 235111 - DNA, 201 bp, Homo sapiens
tttaattccttactttggctatgggtggagggtgagtttgaagaggttctgattttcttgtaacctgggaaagccatgaccttgtgcccgattctttcagwttgctttgggtaataaatattggtggtggtatctgactcatgctgctgtttatggtcctgtttagtggggaatggactcaggttacccatttcccagagg

SEQ ID NO: 235112 - DNA, 201 bp, Homo sapiens; identical to SEQ ID NO: 44991

SEQ ID NO: 235113 - DNA, 201 bp, Homo sapiens; identical to SEQ ID NO: 44992

SEQ ID NO: 235114 - DNA, 201 bp, Homo sapiens; identical to SEQ ID NO: 44994

SEQ ID NO: 235115 - DNA, 201 bp, Homo sapiens
gtgctgggattacaggcatgagacactgtgcccgggtacatctcttttcttgattaccttcaaagaataaaatgaacacttggatttggccactcagtggscttccttgtcactaggactttcctagcccgttgacaatgaggaaagaaggcttagtaaaccaacactactacaactactgctgctactgctactactact

SEQ ID NO: 235116 - DNA, 201 bp, Homo sapiens
gcccgggtacatctcttttcttgattaccttcaaagaataaaatgaacacttggatttggccactcagtgggcttccttgtcactaggactttcctagccygttgacaatgaggaaagaaggcttagtaaaccaacactactacaactactgctgctactgctactactactagctgtgaacaccagaatagctcagattg

SEQ ID NO: 235117 - DNA, 201 bp, Homo sapiens; identical to SEQ ID NO: 44963

SEQ ID NO: 235118 - DNA, 201 bp, Homo sapiens; identical to SEQ ID NO: 44966

SEQ ID NO: 235119 - DNA, 201 bp, Homo sapiens; identical to SEQ ID NO: 44968

SEQ ID NO: 235120 - DNA, 201 bp, Homo sapiens; identical to SEQ ID NO: 44970

SEQ ID NO: 235121 - DNA, 201 bp, Homo sapiens; identical to SEQ ID NO: 44972

SEQ ID NO: 235122 - DNA, 201 bp, Homo sapiens
tttgtcacatgctgtgttaaaaataaaccttgagaatattatgttaataaaaacaagccagtgacaaagtgacagatagtgtatgattccacttatatgamataagtagccaaactcacaaaaagtagaatggtgtttgttaagggctgctgagggggtaaaatgggcagttgttacttaacaggtattcagtttcaggtt

SEQ ID NO: 235123 - DNA, 201 bp, Homo sapiens
caatgggcatttggtaaatggcaggacttgatcccaccattattggtaaactctattctgtgtagtaggtttaagcacctcttcccagtggagtctatccrtcagacctttcctgaataaccaggtactgaggcaggataaggcctgtgggtcctttcctggctcctgccacatggcttcctgcctcactggcattcagcc

SEQ ID NO: 235124 - DNA, 201 bp, Homo sapiens
actatgtcaaaaaaaaaaaaaaaaaaaagatgtctctgggacaggacacaaggtgcctttgagaaatttccttgggtgcaggggtctggagtgcagggatmctatcaggggtggaaatgtaaactcaggagtcctttgctcctctactgagcagtactgcactgccccgccacccaggagacatttggaaatgtgtcaggg

SEQ ID NO: 235125 - DNA, 201 bp, Homo sapiens
cagcacattcaaaatgtctatactttactgttaagattttggggtgagaagcggatggtataatgagagggcatgaacatgggcagctcagatggtcctgkgcatcatgtctgtttctctgagccagctgcttctatgtgatcagattaaaggggctgatagtcatgaagcaggagctggattaaaccagattaccctgat

SEQ ID NO: 235126 - DNA, 201 bp, Homo sapiens; identical to SEQ ID NO: 44976

SEQ ID NO: 235127 - DNA, 201 bp, Homo sapiens
gtcaggttccagcctacttgtgctgactccgaccaggagcccagaggtttcacaataactcaatggccaattaaatgtgaggctttcacataccaacgatmatgcaaatatattcaacacacacaggcagtgataggggaggtcggggcagccatggtggttcacacctgtaatctcagcactttgggaagctgaggtggg

SEQ ID NO: 235128 - DNA, 201 bp, Homo sapiens
ctgttaaatatgttagcggttcaaagcacttgatattatgaagtacaattacggattactataaactatttattttagccaaagtcatgaccaaaacattytaaaacaaggcaaaaaccttcactcattaagagggaggacttagcttccaaacaatctgtctttaatgttacatgaaaatcctgtgcaagaggagaaagc

SEQ ID NO: 235129 - DNA, 201 bp, Homo sapiens
cggattactataaactatttattttagccaaagtcatgaccaaaacattttaaaacaaggcaaaaaccttcactcattaagagggaggacttagcttccaracaatctgtctttaatgttacatgaaaatcctgtgcaagaggagaaagccaaatttcacccttgcgttagtctactattaatgtcaaccccaactttttt

SEQ ID NO: 235130 - DNA, 201 bp, Homo sapiens
actctgactctaaattttttccaggcagaggttagaaagaggtttggggtttgatagtctacccccacagtatgcctcttagcaaaagaaaattgtctcayagagtaactgttcaaattcattgggcagacagagtctcagccttgccactgctgcccccaccacccagagactgctgagcccctgtctatccaccgccac

SEQ ID NO: 235131 - DNA, 201 bp, Homo sapiens
aaaaaccctgtctctgcaaaaacaaaaacaaaaatcacccaggcatggtggcatgcacctatagtcccagcgacttgtaaagcagtctagggtcaacatarcaatctcactgtctaaggtgttatccagagttctttgtctcatgaccaggaaaattaaggagtgtggacaccaagagtgaggttggaacgaaagtttaat

SEQ ID NO: 235132 - DNA, 201 bp, Homo sapiens
ctttctgctggaggtgggggttgtgtgggggacagcagccagggttccttctggggcttatctaagggtcctcagaagaaaggtgtgtctatgtgtggttycatttgcatcaccatttggagtttgataacctctaggcgagaaaaaacaatgtgggttattagaagacatatatcaaaacaagacaagggggtaagaaaa

SEQ ID NO: 235133 - DNA, 201 bp, Homo sapiens
tcaccatttggagtttgataacctctaggcgagaaaaaacaatgtgggttattagaagacatatatcaaaacaagacaagggggtaagaaaagctcaaaamtcccaaagctgacaatgtgcccagataactggcagctatagttacgcctgccaagatttgggtgcatgggacttggctttggttagctcccttggtctta

SEQ ID NO: 235134 - DNA, 201 bp, Homo sapiens
tccccactggtcctcaggaaggtgagaatccctgatcccctgtggcacacagcagagggcccaggaggaagaagccagagggaggcaaaacagagagcccrggaagcttgcccacctacagagagcaaaatgccctatccattcccactgccacagcaacagatgggtgactcggaagttggggagcctccgtgatggctt

SEQ ID NO: 235135 - DNA, 201 bp, Homo sapiens
tgtatttaccagtttaattactgtatgcccctttgatcagtctattgagacccagaagcttttaattaggaaatgaattatggattcatgaagttagaatrtaaaatagtcaaattagtttttaccccacagaagctatgtttggtggtgggggtggtgggaagcttgtttttacaatgtagggttcactcgaatggtaag

SEQ ID NO: 235136 - DNA, 201 bp, Homo sapiens
taccagtttaattactgtatgcccctttgatcagtctattgagacccagaagcttttaattaggaaatgaattatggattcatgaagttagaatataaaayagtcaaattagtttttaccccacagaagctatgtttggtggtgggggtggtgggaagcttgtttttacaatgtagggttcactcgaatggtaaggaaatg

SEQ ID NO: 235137 - DNA, 201 bp, Homo sapiens; identical to SEQ ID NO: 44993

SEQ ID NO: 235138 - DNA, 201 bp, Homo sapiens; identical to SEQ ID NO: 44965

SEQ ID NO: 235139 - DNA, 201 bp, Homo sapiens; identical to SEQ ID NO: 44967

SEQ ID NO: 235140 - DNA, 201 bp, Homo sapiens; identical to SEQ ID NO: 44969

SEQ ID NO: 235141 - DNA, 201 bp, Homo sapiens; identical to SEQ ID NO: 44971

SEQ ID NO: 235142 - DNA, 201 bp, Homo sapiens
tgagactattcatcaagaatgaggatatagtagccatgacatagcttgagctatagcctttaattccttactttggctatgggtggagggtgagtttgaaraggttctgattttcttgtaacctgggaaagccatgaccttgtgcccgattctttcagattgctttgggtaataaatattggtggtggtatctgactcatg

SEQ ID NO: 235143 - DNA, 201 bp, Homo sapiens
tagccatgacatagcttgagctatagcctttaattccttactttggctatgggtggagggtgagtttgaagaggttctgattttcttgtaacctgggaaarccatgaccttgtgcccgattctttcagattgctttgggtaataaatattggtggtggtatctgactcatgctgctgtttatggtcctgtttagtggggaa

SEQ ID NO: 235144 - DNA, 201 bp, Homo sapiens
agtattcttcctgataacaatcttccctcatcaccttccccaatcccatctctcctcgatgtagtttccacgcaagccaccctctgcatagagcccttatragttcctcaggaggcccagatgtggaagggcaggcgtgtctaggaacctgtggagtccctgagagagtttaggaatcttcacgatttcattttcaccttt

SEQ ID NO: 235145 - DNA, 201 bp, Homo sapiens
gtgcaggagcaaaacagtggcctcctgtaatttctatttaacatgctttactcttatcaaaaggacaagattgtccagggttggttcaaccatagtgtgarctaattatggaaaaagaactttgattttacttcttttgtaataagagtgaatgtatttactgagtcggcattccctttcatgattatcattatatgaagg

SEQ ID NO: 235146 - DNA, 201 bp, Homo sapiens
tgtatttttaatagagaatgggtttcactatgtttgccaagctggtctcaaactcctgacctcaggtgatcagccctcctcggcctcccagagtgctgggwttacataggcataaaccaccatgcccagctaaatacagacatattttggtggtcataaagatttctgtgggtccttttctttccttaggatacaaaattt

SEQ ID NO: 235147 - DNA, 201 bp, Homo sapiens
ggtacctccctcacagaattactgatgagatccaatgagaaaagcatatcaagtctccagcatgaggtctggcacatagtaaatgctcagtaaatggtacyaagctatgccatagtcatggcctagtggtctgggcatggaggtgcaggagtaggcctgaaagagagccttgtgctggtggtttatagggaatgatggggc

SEQ ID NO: 235148 - DNA, 201 bp, Homo sapiens
ctggtgacccagacagtacgctcacgctccttgtgggtgtgatctggtgttcctcatacttgtttgtgattttctttggctggccaaataagtgatcacayggcttcctaagaggggtgatggatgtagaatagacttgccacaatgggctagcagactgcgggactcaggtgacagattcttataaaaatctgcatggat

SEQ ID NO: 235149 - DNA, 201 bp, Homo sapiens; identical to SEQ ID NO: 44984

SEQ ID NO: 235150 - DNA, 201 bp, Homo sapiens
tttctgagaccatgctaaatacgcttcctttacctactcttttttaaaaatcaggctgggcatggtggctcatgcctgtaatcctagcactttgggaggcygaagcagtcggatcacctgaagtcaggagtttgagaccagcctggccaacatggtgaaaccccgtctctactaaaaatacaaaaattagccaggcgtggt

SEQ ID NO: 235151 - DNA, 201 bp, Homo sapiens
ccagtctaggcctccatctccagaacccctgctgttccccttgcctgtgccagacttgtggatcttgatagctcccttgtctgtaaggatccttctctccmtaagaccctgtctggttcactttccagcagtttttctttccaatcccgtgcctctgtccctttaggagcattctgtatgtgtgtcctctgccttagaccc

SEQ ID NO: 235152 - DNA, 201 bp, Homo sapiens
ccactgtgagccagcaatctgcctgcagtagggctgtagctagctgccttctctcatcccctgtttcaagccatctggaacaggccctagcagccttagamcaaatcattctggtgacccagacagtacgctcacgctccttgtgggtgtgatctggtgttcctcatacttgtttgtgattttctttggctggccaaataa

SEQ ID NO: 235153 - DNA, 201 bp, Homo sapiens
aacatgcataatctttataaaagtccccctttaaaaagcacttggctgggcatggtggcttacacctgtaatctcagcactttgggaggccgaggcagaaraattgcttgagctcaggagtttgagaccagcatgagcaacagagggagaccctgtctctacaaaaaatagaattagctgggtgtggtagtgtgcacctgc

SEQ ID NO: 235154 - DNA, 201 bp, Homo sapiens
ccttgacctcccaaagtgctgggattatgagattataggcatgagccaccacacctggccagacagttaataccacaacaacatagatcaatctgaaaagyattatgctaactgaaagaagcaagattcaaaagagtatctactgtatgatcccatttttgtgatgtgctagaacaggcaatactaatctgtggtacaaaa

SEQ ID NO: 235155 - DNA, 201 bp, Homo sapiens
gtctctctgcagcctcaacctcttggcctcaagtgattctcccacctcagcctcccaagtagctgggaccacatgcacacaccaccatgctcagctaattwaaaaaattttttttgtaaagatgaggtcttcctatgttgctcttgaactcctgggttcaagtgatcctcctgccttgacctcccaaagtgctgggattat

SEQ ID NO: 235156 - DNA, 201 bp, Homo sapiens
caattaaatgtgaggctttcacataccaacgatcatgcaaatatattcaacacacacaggcagtgataggggaggtcggggcagccatggtggttcacacytgtaatctcagcactttgggaagctgaggtgggaggatcacttgaggccaggagtttgagaccagcctgggaaagaccttgtctctacaaaaaatgtaaa

SEQ ID NO: 235157 - DNA, 201 bp, Homo sapiens
tccaggaccagatggattcagagctgaattctaccagaggtacaaggaggaactggtaccattccttctgaaactattccaatcaacagaaaaagagggartcctccctaactcattttatgaggccagcatcatcctgataccaaagccgggcagagacacaaccaaaaaggagaattttagaccaatatccttgatgaa

SEQ ID NO: 235158 - DNA, 201 bp, Homo sapiens
tcacaataactcaatggccaattaaatgtgaggctttcacataccaacgatcatgcaaatatattcaacacacacaggcagtgataggggaggtcggggcrgccatggtggttcacacctgtaatctcagcactttgggaagctgaggtgggaggatcacttgaggccaggagtttgagaccagcctgggaaagaccttgt

SEQ ID NO: 235159 - DNA, 201 bp, Homo sapiens
atgatcaagtgggcttcatccctgggatgcaaggctggttcaatatacgcaaatcaataaatgtaatccagcatataaacagaaccaaagacaaaaaccaygtgattatctcaatagatgcagaaaaggcctttgacaaaattcaacaactcttcatgctaaaaactctcaataaattaggtattgatgggacgtatctca

SEQ ID NO: 235160 - DNA, 201 bp, Homo sapiens
ttcacaataactcaatggccaattaaatgtgaggctttcacataccaacgatcatgcaaatatattcaacacacacaggcagtgataggggaggtcggggsagccatggtggttcacacctgtaatctcagcactttgggaagctgaggtgggaggatcacttgaggccaggagtttgagaccagcctgggaaagaccttg

SEQ ID NO: 235161 - DNA, 201 bp, Homo sapiens
ctatctatgacaaacccacagccaatatcatactgaatgggcaaaaactggaagcattccctttgaaaactggcacaagacagggatgccctctctcaccrctcctattcaacatagtgttggaagttctggccagggcaattaggcaggagaaggaaataaagggtattcagttaggaaaagaggaagtcaaattgtccc

SEQ ID NO: 235162 - DNA, 201 bp, Homo sapiens
atctcagcactttgggaggccgaggcagaaaaattgcttgagctcaggagtttgagaccagcatgagcaacagagggagaccctgtctctacaaaaaataraattagctgggtgtggtagtgtgcacctgcatttccagctactcaggaggctgagacagaaggatcacttaagcccaggaggttgaggttgcagtgagcc

SEQ ID NO: 235163 - DNA, 201 bp, Homo sapiens
agaccctgtctctacaaaaaatagaattagctgggtgtggtagtgtgcacctgcatttccagctactcaggaggctgagacagaaggatcacttaagcccrggaggttgaggttgcagtgagccatgattgcaccactgcactccagcttgggtgacaaagcaagactctatctcaaaacaataaaataaaataaaattta

SEQ ID NO: 235164 - DNA, 201 bp, Homo sapiens
tgtccctttaggagcattctgtatgtgtgtcctctgccttagaccctgccttttgctccctggcttgtggcaccaaagtttaggaagtggctgagtcagcmgcctagtcatgccaagcctcccttgacaaagtccctctcagatgggcctgggatggcagtgggtatgtgggatgagtgccagccatctctgctgctcccc

SEQ ID NO: 235165 - DNA, 201 bp, Homo sapiens
caaccctatgtgatggctaggtcttccatgaatggaaactggattggaacacagctgacattcccagcacccaagggcgatgggggattgacaaaatactytccagcaagcctgtcctctgagtcttacagatctggtggctgcactaaccactcttaactgaccaacagaggcctggtatttgtttgattttgagagaaa

SEQ ID NO: 235166 - DNA, 201 bp, Homo sapiens
aacaatttcagactgctcaaggactccctttaagccgctctaagcccctctatagaacccttgtcccagctgactctccatctcctcagttgaagaaagtrccatacccaaggtgataggttttgttagttaacagagccacgacaaggactcagatgttcagactccccattctagtgctcattccactctttggagcct

SEQ ID NO: 235167 - DNA, 201 bp, Homo sapiens
aggtcttccatgaatggaaactggattggaacacagctgacattcccagcacccaagggcgatgggggattgacaaaatactctccagcaagcctgtcctytgagtcttacagatctggtggctgcactaaccactcttaactgaccaacagaggcctggtatttgtttgattttgagagaaaaaaaaaaaaactatggat

SEQ ID NO: 235168 - DNA, 201 bp, Homo sapiens
attcttgtaaaccttttataactctctacaaatttttgttaaggagcagatcagtgcctcgagaaagccttgttgtgcttttatttcaatgctcaatttaygtaaaaaacatagaatacccttctgaatttagtcaatatattcagacacagaatttcctttgcaagattaatttttataatgcttccacaacttgctcaa

SEQ ID NO: 235169 - DNA, 201 bp, Homo sapiens
ggcctcagagagaaaagacgccacagggaggggcccttggccctctatctgctcagagcctgcttaaaagtcatgcacctaaggtgcagaaacacagttamgttctccttcatcttacctcaaactcatggtcttccactgctcaggcagactacctctactatggttccgtagacaaagctttgaagattagagcagcag

SEQ ID NO: 235170 - DNA, 201 bp, Homo sapiens
agcatggacaccaagggtgaggttggagtgaaagtttaataagtgaaagaggaaagctctcagcagcagagcaggagacctgaaagagggttgttgttttmcagttaaatacgaaggtttttataagaaacttcccttatctgtctaggtgttgtgtaacttaccttttctctgtagctacctgtgtagcttcccttattt

SEQ ID NO: 235171 - DNA, 201 bp, Homo sapiens
attcagacacagaatttcctttgcaagattaatttttataatgcttccacaacttgctcaaaccttcagctttatcttaacctaattcaaaacaatccttwatttctaggcaaaatttacatttccatgtcttcttataatcttttaccaaaacacattttactttccttacacaccttgcatgtaaatctattttcagta

SEQ ID NO: 235172 - DNA, 201 bp, Homo sapiens
ctttgcattagaacccactctctgactggattaggggctaggttggggtggctgtaacctgaagtatctagaaaatatgatgggctagagaatttcacctktggttgtgtgctggaacactagctgggtaaaagagttcagaggaggatttaggaaaacacctaggctcagtttgagaatgggaagtggtagcgtcattta

SEQ ID NO: 235173 - DNA, 201 bp, Homo sapiens
ggagccagcacccgggcttctcgctcccagccccctcccgaagccccgccccgcctccgggtctggaggaggctgggaagccccgcccctccacgctagcrccgcccaggctggcacaaaggaggaagcctagtcccgcccctgcgtgcggcgcttctcccaggccccaccttccatccagtgccctggaccctcggctgg

SEQ ID NO: 235174 - DNA, 201 bp, Homo sapiens
tcccttatctgtgcctgtagcttgatttttccaagctgctctttatgtgcctgcagcttgattttttccagactgctgttttgtttgaaagaatttcaccraggacctgccctaactgtctgcctgctttttttctttctccttcctcacttgggaggctgaggcaggaggaccacctgaacttggggaggttgaggctac

SEQ ID NO: 235175 - DNA, 201 bp, Homo sapiens
cactctctgactggattaggggctaggttggggtggctgtaacctgaagtatctagaaaatatgatgggctagagaatttcacctttggttgtgtgctggwacactagctgggtaaaagagttcagaggaggatttaggaaaacacctaggctcagtttgagaatgggaagtggtagcgtcatttactagtcagagtagat

SEQ ID NO: 235176 - DNA, 201 bp, Homo sapiens
tgactggattaggggctaggttggggtggctgtaacctgaagtatctagaaaatatgatgggctagagaatttcacctttggttgtgtgctggaacactarctgggtaaaagagttcagaggaggatttaggaaaacacctaggctcagtttgagaatgggaagtggtagcgtcatttactagtcagagtagattaaaatg

SEQ ID NO: 235177 - DNA, 201 bp, Homo sapiens
gttgtgtgctggaacactagctgggtaaaagagttcagaggaggatttaggaaaacacctaggctcagtttgagaatgggaagtggtagcgtcatttactrgtcagagtagattaaaatgatgagatcaggtttgaaaagttgagtttaagatgtctctggaggccaggtgtggtggctgatgcctgtaatcccagcactt

SEQ ID NO: 235178 - DNA, 201 bp, Homo sapiens
gaacacccaacaaaactaggacctgaggaaggcccttgctcctgccatgctgccttcttccggaatggggttccagagggaatgatgcttctgaagggaaracagacattgccaaggtggttggctggggaagtttctgtcatccagtctgtatctggccatgggcctgtggctgactggagggacagctctcctgcattt

SEQ ID NO: 235179 - DNA, 201 bp, Homo sapiens
aaggagctcagtgtctgcttcagccagggctttaagagagaaggaagctgggagtgaggggcagaggctctaccagagaatgtctgctggtgtcttggagscacttcctgcagcctatgcatgcctcgtgaagccatttcactgctgccccttcatcctcctcctccctgagccctaggtagaagtcagtgtgtggaggag

SEQ ID NO: 235180 - DNA, 201 bp, Homo sapiens
agccctaggtagaagtcagtgtgtggaggaggccacccagagatgaccctgaccaggccccaccgcctgtagccagacccagcctctgtcccagctggctsctaatttctgagcatttcttccctgttatttggcctctgtaccttgaacctaggttgacatcatgagcagaggacagttcttaggaaaggcaaatatccc

SEQ ID NO: 235181 - DNA, 201 bp, Homo sapiens
agtgtgtggaggaggccacccagagatgaccctgaccaggccccaccgcctgtagccagacccagcctctgtcccagctggctgctaatttctgagcattkcttccctgttatttggcctctgtaccttgaacctaggttgacatcatgagcagaggacagttcttaggaaaggcaaatatcccataaatcctatttgcct

SEQ ID NO: 235182 - DNA, 201 bp, Homo sapiens
aggccacccagagatgaccctgaccaggccccaccgcctgtagccagacccagcctctgtcccagctggctgctaatttctgagcatttcttccctgttakttggcctctgtaccttgaacctaggttgacatcatgagcagaggacagttcttaggaaaggcaaatatcccataaatcctatttgcctctctttctccta

SEQ ID NO: 235183 - DNA, 201 bp, Homo sapiens
agagatgaccctgaccaggccccaccgcctgtagccagacccagcctctgtcccagctggctgctaatttctgagcatttcttccctgttatttggcctcwgtaccttgaacctaggttgacatcatgagcagaggacagttcttaggaaaggcaaatatcccataaatcctatttgcctctctttctcctaacctctggc

SEQ ID NO: 235184 - DNA, 201 bp, Homo sapiens
aaggaacaaactgtcatttgtttttgagacagttttgctctgtcacccaggtgggaatgcagtggtgtgatcatgtctctctgcagcctcaacctcttggsctcaagtgattctcccacctcagcctcccaagtagctgggaccacatgcacacaccaccatgctcagctaattaaaaaaattttttttgtaaagatgagg

SEQ ID NO: 235185 - DNA, 201 bp, Homo sapiens
cgttaagctagattctctcatctggcatctgcccatgagcatgcaagccttcataacatctctgcttctgctgttttcaaaggttggaaaacaaagaaccrgaccaaagagcgggcagactctgctcccaccctcggacatggtgccatctttgttttcctctccaggtgatcgtgttgccatcgagcctggtgctccccg

SEQ ID NO: 235186 - DNA, 201 bp, Homo sapiens
tcaaaagaattgctttgacctaagcatttttaaatactcttatttatttttaaaaataagataaatctatatctgtaatacagcacattcaaaatgtctayactttactgttaagattttggggtgagaagcggatggtataatgagagggcatgaacatgggcagctcagatggtcctgtgcatcatgtctgtttctctg

SEQ ID NO: 235187 - DNA, 201 bp, Homo sapiens
attctctcatctggcatctgcccatgagcatgcaagccttcataacatctctgcttctgctgttttcaaaggttggaaaacaaagaaccagaccaaagagsgggcagactctgctcccaccctcggacatggtgccatctttgttttcctctccaggtgatcgtgttgccatcgagcctggtgctccccgagaaaatgatg

SEQ ID NO: 235188 - DNA, 201 bp, Homo sapiens
ccagcctgaatgacagcaaaactatgtcaaaaaaaaaaaaaaaaaaaagatgtctctgggacaggacacaaggtgcctttgagaaatttccttgggtgcargggtctggagtgcagggatactatcaggggtggaaatgtaaactcaggagtcctttgctcctctactgagcagtactgcactgccccgccacccaggaga

SEQ ID NO: 235189 - DNA, 201 bp, Homo sapiens
ttctctcatctggcatctgcccatgagcatgcaagccttcataacatctctgcttctgctgttttcaaaggttggaaaacaaagaaccagaccaaagagcrggcagactctgctcccaccctcggacatggtgccatctttgttttcctctccaggtgatcgtgttgccatcgagcctggtgctccccgagaaaatgatga

SEQ ID NO: 235190 - DNA, 201 bp, Homo sapiens
gcacgtccagggtgccacagctctgaagcagcagcgctgggagtcactcccacaccactcaaaccctgagttcacctcttgctcacggcaccacaggcctstctccatggtgtatccatctcagaagtggaggctatgatcgtggtgtatccttcgtctcagaactggaggctgtgacatgtgcctttctctagttccact

SEQ ID NO: 235191 - DNA, 201 bp, Homo sapiens
gcctgaatgacagcaaaactatgtcaaaaaaaaaaaaaaaaaaaagatgtctctgggacaggacacaaggtgcctttgagaaatttccttgggtgcagggrtctggagtgcagggatactatcaggggtggaaatgtaaactcaggagtcctttgctcctctactgagcagtactgcactgccccgccacccaggagacat

SEQ ID NO: 235192 - DNA, 201 bp, Homo sapiens
ccatgagcatgcaagccttcataacatctctgcttctgctgttttcaaaggttggaaaacaaagaaccagaccaaagagcgggcagactctgctcccaccytcggacatggtgccatctttgttttcctctccaggtgatcgtgttgccatcgagcctggtgctccccgagaaaatgatgaattctgcaagatgggccgat

SEQ ID NO: 235193 - DNA, 201 bp, Homo sapiens
cccgccacccaggagacatttggaaatgtgtcagggaggcttggttgtcacgatgactgaggagcactactgcggactttattcagttcatagtgctatcytgcacaacaaagagttgtcctgtcccaaatagtgccctatggggaattatggatggctgagcttgcctgggctgagtgaaccatgtagagtgagaaggaa

SEQ ID NO: 235194 - DNA, 201 bp, Homo sapiens
aaaaagaaaaacaacaacaatgacctcgacaatagcaacaacacaccatgacagcaacggctgacatttcctgaggtgtggtgtgctgccagggcttgagytctgggatcctggatctactccctcctggcaagtgattttggagaaattatttcacttttctctgattcagtttcatttaatcgccaaaatattaaataa

SEQ ID NO: 235195 - DNA, 201 bp, Homo sapiens
ttcaacttccccgtgaaatggggataatggtagtattcatctttggttgtatgaggattcagtggaaccaattgtgcgtgtgaaaggcctagcacagcatytagcacactgttaatggtatgtgctaactgtggagataagcaggaagccagagcccctgaggacggacacttaaaccatatcagcttaaaaagaggtgga

SEQ ID NO: 235196 - DNA, 201 bp, Homo sapiens
gctgcctcaggtgcacctgcagctcaacacagaccttctgggccctcgccactccttctcaggcatggtcttccaccagcacctccacagtgcccaacccrgaccccgagtgtggtatcactgctcctccatcttttccttaagacaaataggctcagtggcttgggtttggggtcagtagtaaaccagagatagcaacta

SEQ ID NO: 235197 - DNA, 201 bp, Homo sapiens
tctactaaaaatacaaaaattagccaggcgtggtggtgggtgcctgtaatgtccactacttaggaggctgaggtgagagaattgcttgaacccgggaggcrgaggttgcagtgagctgattgcaccactgcactccagcctgggtgacagagcgagactctgtctcaaaaaaaatactgtgaacatttttccatgtcaata

SEQ ID NO: 235198 - DNA, 201 bp, Homo sapiens
ttaccccacagaagctatgtttggtggtgggggtggtgggaagcttgtttttacaatgtagggttcactcgaatggtaaggaaatgcggggaattaatatrttgactgcctactgcattccaggcatgtgctgggaactttaatacagggctttacaaactgtccacaatgaagggccaattttactttttccagtcggcc

SEQ ID NO: 235199 - DNA, 201 bp, Homo sapiens
caggtgcacctgcagctcaacacagaccttctgggccctcgccactccttctcaggcatggtcttccaccagcacctccacagtgcccaacccagaccccsagtgtggtatcactgctcctccatcttttccttaagacaaataggctcagtggcttgggtttggggtcagtagtaaaccagagatagcaactaggaggaa

SEQ ID NO: 235200 - DNA, 201 bp, Homo sapiens
gctgattgcaccactgcactccagcctgggtgacagagcgagactctgtctcaaaaaaaatactgtgaacatttttccatgtcaatagataaagagttatrgcgtaatttttagtagccatgtagtttttaaatcatgctttgttggacatttcaggtattatttttcagtattttgttttctgagggagctcacaaaatt

SEQ ID NO: 235201 - DNA, 201 bp, Homo sapiens
tatcacaaataggattttaccattccataaaagcagccctattctaaggggagaccctagaattatggatgtaggggaaatttctctttaaaactgcacarcagaaattaagaaggaggagaaatatgtacacgtagatacaatattagcatctaacttagaagtcttttagtgtggctgttgaagctggcagttttcccc

SEQ ID NO: 235202 - DNA, 201 bp, Homo sapiens
cccagggagccagctcacttaagaaccctctccaggtggtcctcagagggcacctaaaaggaatatgtctctctctgggggaggtgtgatgggttctcacraaggtaggggcaaagaaagaccaggaaaacaagtccagaccttctgagatttcttattttctgaataagtttgtgtttccttgaatcctgtggttctttg

SEQ ID NO: 235203 - DNA, 201 bp, Homo sapiens
tctctttaaaactgcacaacagaaattaagaaggaggagaaatatgtacacgtagatacaatattagcatctaacttagaagtcttttagtgtggctgttraagctggcagttttccccaaatcaggtttgcactaagaacattaattaccagggaaaatacattcaaattttgcaaagtaatattcaactcaacaatttt

SEQ ID NO: 235204 - DNA, 201 bp, Homo sapiens
aggtaggggcaaagaaagaccaggaaaacaagtccagaccttctgagatttcttattttctgaataagtttgtgtttccttgaatcctgtggttctttgasattatctccactagtgcccaggagtaagtgggaaaattttagctctgaggtttgagaggattaaatagaacccagcactaggagcgtattttatgtagag

SEQ ID NO: 235205 - DNA, 201 bp, Homo sapiens
tctttaaaactgcacaacagaaattaagaaggaggagaaatatgtacacgtagatacaatattagcatctaacttagaagtcttttagtgtggctgttgawgctggcagttttccccaaatcaggtttgcactaagaacattaattaccagggaaaatacattcaaattttgcaaagtaatattcaactcaacaattttaa

SEQ ID NO: 235206 - DNA, 201 bp, Homo sapiens
atcaggtttgcactaagaacattaattaccagggaaaatacattcaaattttgcaaagtaatattcaactcaacaattttaaaaaacacagaaatattcarttacatagacccgaacacagtgagcacttatcaagatcacgaacagactagagcatctgacaaagctcagagacttagaatttttgctccatatatagaa

SEQ ID NO: 235207 - DNA, 201 bp, Homo sapiens
caggtttgcactaagaacattaattaccagggaaaatacattcaaattttgcaaagtaatattcaactcaacaattttaaaaaacacagaaatattcaatwacatagacccgaacacagtgagcacttatcaagatcacgaacagactagagcatctgacaaagctcagagacttagaatttttgctccatatatagaacc

SEQ ID NO: 235208 - DNA, 201 bp, Homo sapiens
gcttcctgcctcactggcattcagccgtgttggtctccagcttgttcctggctgctagaaggggagatttctgctgttctctgtggagttagtgtctgggytcaggcagggggtctgccagggtttctagtttggtctctgattcgctggtatgggtcactccccagattcagacggagtttaaatccaattgtaactttg

SEQ ID NO: 235209 - DNA, 201 bp, Homo sapiens
attggagacagtgttgaaaggatcatggggatgagcacatggtttggctgtcacatttatttctttttggaacttgagggttttcctgttcctgtgtgtgsagatttggggtgctgggtaaatcctgggcagtgaggaactagcagaaattggatattaatattagctacacagctgctcataccaggatggagctgatat

SEQ ID NO: 235210 - DNA, 201 bp, Homo sapiens
aaggaggagaaatatgtacacgtagatacaatattagcatctaacttagaagtcttttagtgtggctgttgaagctggcagttttccccaaatcaggtttrcactaagaacattaattaccagggaaaatacattcaaattttgcaaagtaatattcaactcaacaattttaaaaaacacagaaatattcaattacataga

SEQ ID NO: 235211 - DNA, 201 bp, Homo sapiens
gctcaagtagtggtgactggtaagactttgttctttatcaatctccttgactgggaaacagcgggtcctactgtatgtgcatgtgtgaggagaggttatcygtgacagtgtggagggggtgagtgtgtagtgtcatatggattgtggaaatatagaagagtttgagtgtgtgttttgtgttaggagaagctatcagagaga

SEQ ID NO: 235212 - DNA, 201 bp, Homo sapiens
gactgggaaacagcgggtcctactgtatgtgcatgtgtgaggagaggttatctgtgacagtgtggagggggtgagtgtgtagtgtcatatggattgtggaratatagaagagtttgagtgtgtgttttgtgttaggagaagctatcagagagagagagagtttgtgtgagagagtgtgtgtgtgtgtgtctgtgtgtagct

SEQ ID NO: 235213 - DNA, 201 bp, Homo sapiens
aacagcgggtcctactgtatgtgcatgtgtgaggagaggttatctgtgacagtgtggagggggtgagtgtgtagtgtcatatggattgtggaaatatagargagtttgagtgtgtgttttgtgttaggagaagctatcagagagagagagagtttgtgtgagagagtgtgtgtgtgtgtgtctgtgtgtagctgtatggtg

SEQ ID NO: 235214 - DNA, 201 bp, Homo sapiens
cgggtcctactgtatgtgcatgtgtgaggagaggttatctgtgacagtgtggagggggtgagtgtgtagtgtcatatggattgtggaaatatagaagagtktgagtgtgtgttttgtgttaggagaagctatcagagagagagagagtttgtgtgagagagtgtgtgtgtgtgtgtctgtgtgtagctgtatggtggatat

SEQ ID NO: 235215 - DNA, 201 bp, Homo sapiens
gtgtgatgacaatatgttattgtaagtgggaagtcagtatttcttatcttctgagctttcttgtttttacctcctttacaggccactcgctctggtgggamcctcgtgcttgtggggctgggctctgagatgaccaccgtacccctactgcatgcagccatccgggaggtggatatcaagggcgtgtttcgatactgcaac

SEQ ID NO: 235216 - DNA, 201 bp, Homo sapiens
agtccagaccttctgagatttcttattttctgaataagtttgtgtttccttgaatcctgtggttctttgacattatctccactagtgcccaggagtaagtrggaaaattttagctctgaggtttgagaggattaaatagaacccagcactaggagcgtattttatgtagagaataattcttcatggatttattcacttctg

SEQ ID NO: 235217 - DNA, 201 bp, Homo sapiens
ataattcttcatggatttattcacttctgcattcaacaaacagccgctaaggtcttatcatgccaggcactgggatagatgctagagacacacaaaagatrtggttcctatccatggcctggacaagtgggagagcagatgtttaatatttcacgaacatattccatcttctgctttgtttagggccaatcgggatggtca

SEQ ID NO: 235218 - DNA, 201 bp, Homo sapiens
ggggctgggctctgagatgaccaccgtacccctactgcatgcagccatccgggaggtggatatcaagggcgtgtttcgatactgcaacacgtgagtatgcygtgggtgagccgggatgcccagcctccagcaagaccatggcaggccccactcagcctctggcccatgagtctctgcctgtttgttcatggggggcactcc

SEQ ID NO: 235219 - DNA, 201 bp, Homo sapiens
taagaacattaattaccagggaaaatacattcaaattttgcaaagtaatattcaactcaacaattttaaaaaacacagaaatattcaattacatagacccraacacagtgagcacttatcaagatcacgaacagactagagcatctgacaaagctcagagacttagaatttttgctccatatatagaaccatttaataaga

SEQ ID NO: 235220 - DNA, 201 bp, Homo sapiens
ggatggtcactttgctcgtggccaaagcaatgggagcagctcaagtagtggtgactggtaagactttgttctttatcaatctccttgactgggaaacagckggtcctactgtatgtgcatgtgtgaggagaggttatctgtgacagtgtggagggggtgagtgtgtagtgtcatatggattgtggaaatatagaagagttt

SEQ ID NO: 235221 - DNA, 201 bp, Homo sapiens
ctaagaacattaattaccagggaaaatacattcaaattttgcaaagtaatattcaactcaacaattttaaaaaacacagaaatattcaattacatagaccygaacacagtgagcacttatcaagatcacgaacagactagagcatctgacaaagctcagagacttagaatttttgctccatatatagaaccatttaataag

SEQ ID NO: 235222 - DNA, 201 bp, Homo sapiens
tggattgtggaaatatagaagagtttgagtgtgtgttttgtgttaggagaagctatcagagagagagagagtttgtgtgagagagtgtgtgtgtgtgtgtstgtgtgtagctgtatggtggatatgggggtatatgagggtgtagagcaggggtgtccaatcttttggcttccttgggccacattggaagaatggtcttgg

SEQ ID NO: 235223 - DNA, 201 bp, Homo sapiens
ctgggctgcatgtgggctgcaggttggacaagcttggtgtgaagagtatgtgtgttgggctcaacaccaccacccattgcacgagagctttgttgccatcrgatcttacatctccattttcttttcttcctaatgagtcatcagatttctcttgtttgaaagaattttttttttttttttttttaccttcagatctgtctg

SEQ ID NO: 235224 - DNA, 201 bp, Homo sapiens
aacaatattgaattatacacttaaaaagatttaagatggtaaattttatgttatgtattttaccacaatatatttttataaaacaataactagaagaaaaraagactccattttgagacatttagaatcacaaaacattattatatatcaatagccctacctggatgtcccaagacacctcagtcccagcatgtccaaacc

SEQ ID NO: 235225 - DNA, 201 bp, Homo sapiens
tgtgggctgcaggttggacaagcttggtgtgaagagtatgtgtgttgggctcaacaccaccacccattgcacgagagctttgttgccatcagatcttacayctccattttcttttcttcctaatgagtcatcagatttctcttgtttgaaagaattttttttttttttttttttaccttcagatctgtctgctacccgatt

SEQ ID NO: 235226 - DNA, 201 bp, Homo sapiens
tgtaggaattcagaagtcatcccagatgcctcaattcccacctcctgcgggatctgaaagaaggagagggattaggcaatgggaaatgggtgtagttggargtgagatgggggtgtggtggccaccaggtgaggggtttaggagtctccagggtcactggtgacttgatacagatttgcatttcagcaagattgttatcag

SEQ ID NO: 235227 - DNA, 201 bp, Homo sapiens
caagcttggtgtgaagagtatgtgtgttgggctcaacaccaccacccattgcacgagagctttgttgccatcagatcttacatctccattttcttttcttyctaatgagtcatcagatttctcttgtttgaaagaattttttttttttttttttttaccttcagatctgtctgctacccgattgtccaaagccaaggagat

SEQ ID NO: 235228 - DNA, 201 bp, Homo sapiens
tcatgtacaaactgagtgctatggtgaggataaagcccagcccaccgtctgcacatggcaggtgctgtgaacatttccatctctttttgtctgttggctcrggcagatccctgctgacagctttctaatccctcccatccctggaattccactttgtcataatcatgcaggaccctgaagtgaggctgggggcaatggtca

SEQ ID NO: 235229 - DNA, 201 bp, Homo sapiens
atttctgcttgtgttgaggctgttgctacaacccaagcaagacgtgttgagggaatcaactcagttatgcaggtggaagtagaggaaaagggaccaatgaygacatagctaggaaatatatatttaggctaatgtaaaaaaatgtatttaggaaaagcaagataacatttagtatgtgagaggtacctgagatgattccat

SEQ ID NO: 235230 - DNA, 201 bp, Homo sapiens
tctgctacccgattgtccaaagccaaggagattggggctgatttagtcctccagatctccaaggagagccctcaggaaatcgccaggaaagtagaaggtcwgctggggtgcaagccggaagtcaccatcgagtgcacgggggcagaggcctccatccaggcgggcatctacgtgagtgggctgagggcagctttggggaat

SEQ ID NO: 235231 - DNA, 201 bp, Homo sapiens
cagttatgcaggtggaagtagaggaaaagggaccaatgacgacatagctaggaaatatatatttaggctaatgtaaaaaaatgtatttaggaaaagcaagrtaacatttagtatgtgagaggtacctgagatgattccatgtccccgcagagagtacttcctgaagtatttccatgagttacttcaggagtgggctggtag

SEQ ID NO: 235232 - DNA, 201 bp, Homo sapiens
ggcaggaagttggaggtggtgggagggagtgtcattgacagatcaaagtatgaggaaacgaagggaaaataacaacttccaggttccaagccctactgtaygccaggttctctgctgtactttataaacatgaggcctaatctgcacaatagccctgaaaaccagttaccattttatgctgagggatttgtggtttgtttg

SEQ ID NO: 235233 - DNA, 201 bp, Homo sapiens
acttctccatcaagcgtgttctgctacaggcacagcacaggctgtgggcacagcaccctctcgtgtctgggagagtcactgcagctttgctgtgtggtacragcacagctgttcagctctgttaacttgaataaatatttacagtagtgttctctctagtgacccagggcctatttggtgtgcctgactgttgttctaagc

SEQ ID NO: 235234 - DNA, 201 bp, Homo sapiens
atgaggaaacgaagggaaaataacaacttccaggttccaagccctactgtacgccaggttctctgctgtactttataaacatgaggcctaatctgcacaayagccctgaaaaccagttaccattttatgctgagggatttgtggtttgtttgaggcaagccaagtcaggcccaggcccagccctgccaggccccagtgcct

SEQ ID NO: 235235 - DNA, 201 bp, Homo sapiens
taaaaaagaatgagatcatgtctttttcagggacatggatgaagctggaagccatccttctcagcaaactaacacaggaacagaaaaccaaataccacatrttctcactcataagtgggagttgaacaatgagaatacatggacacagggaggggaccatcacacaccagggcctgtcagggggtgggggacaaggggagg

SEQ ID NO: 235236 - DNA, 201 bp, Homo sapiens
aggctgggaagccccgcccctccacgctagcgccgcccaggctggcacaaaggaggaagcctagtcccgcccctgcgtgcggcgcttctcccaggccccamcttccatccagtgccctggaccctcggctgggtagcgccaccagagcgaccaaacgtcccgcgccttccaggccgcactccagagccaaaagagctccat

SEQ ID NO: 235237 - DNA, 201 bp, Homo sapiens
cagaaagggctcgtaacttgacataagtgaaaacctctgaccttccttggaaacactagtttggatagtggttatttaacaagtacaaacacttgagtttrgggacaagcagtgtacctgatgctaaagcgatggaaggcatggtctttggcttcaaggtatttattatcttgttaggaaaagtaaaaagccactgatcac

SEQ ID NO: 235238 - DNA, 201 bp, Homo sapiens
ggtcactggtgacttgatacagatttgcatttcagcaagattgttatcagcagaacaaagttgaatggagccaggagagcttgggctggagaccagctcaytggaccttgggaggaaattctacctcctactttgacctcaagtttgccaggaccaacacggctagaacaaagcctctcatgacaaaatagccaattggga

SEQ ID NO: 235239 - DNA, 201 bp, Homo sapiens
ttaatgtatataaattgcttagcacattgctctgcacataaataaatgctcgataaatgctagctatggttgttattacagtgacattgggcatatataakactattgttagcattgtagttaactcagaggatctctgtgtgtcaattgactcctcaggcttcctgacaatgtcacctttgaggaaggcgccctgatcga

SEQ ID NO: 235240 - DNA, 201 bp, Homo sapiens
gctccccgagaaaatgatgaattctgcaagatgggccgatacaatctgtcaccttccatcttcttctgtgccacgccccccgatgacgggaacctctgccrgttctataagcacaatgcagccttttgttacaagttagtgtccacagtcccactgggtcacctgggacctctttcccttcattagcttggtgctgtttcc

SEQ ID NO: 235241 - DNA, 201 bp, Homo sapiens
taaacagaggaggttggttttacaaacagaaaagagctaaagaaagcagaaacacaagaaaaagcagattggtcatttcggttattttccttgtaaggtgrgaacagggaaatagaacaacagaaaaataactgattggttaagatcaggtttcttcaggtcattattttttattttttggtaaggattaaagtagaggga

SEQ ID NO: 235242 - DNA, 201 bp, Homo sapiens
gctccaggaaccctttgtggatgccagaatccaaggattctcaagtcccttgtatgtaataaaatggtctagtatttgcatataacctacatgcatcctcscatctactttaaatccccctagattacctctaatacctaacacaatgtaaatgctctgtaaataattgttatacaatattattcatttgcattatgtttt

SEQ ID NO: 235243 - DNA, 201 bp, Homo sapiens
acagagcccgagggctttgatggaggcctcagagagaaaagacgccacagggaggggcccttggccctctatctgctcagagcctgcttaaaagtcatgcrcctaaggtgcagaaacacagttaagttctccttcatcttacctcaaactcatggtcttccactgctcaggcagactacctctactatggttccgtagaca

SEQ ID NO: 235244 - DNA, 201 bp, Homo sapiens
ccgagggctttgatggaggcctcagagagaaaagacgccacagggaggggcccttggccctctatctgctcagagcctgcttaaaagtcatgcacctaagrtgcagaaacacagttaagttctccttcatcttacctcaaactcatggtcttccactgctcaggcagactacctctactatggttccgtagacaaagcttt

SEQ ID NO: 235245 - DNA, 201 bp, Homo sapiens
aacaacttccaggttccaagccctactgtacgccaggttctctgctgtactttataaacatgaggcctaatctgcacaatagccctgaaaaccagttaccrttttatgctgagggatttgtggtttgtttgaggcaagccaagtcaggcccaggcccagccctgccaggccccagtgcctgagttgccccgctgcttagga

SEQ ID NO: 235246 - DNA, 201 bp, Homo sapiens
tgcttaggagaggaagggaaggagggcacgaacaaccatgctagggtggggggacagggccagggctggagagggtagcaggcagccgccaccacaggggwctcctgtccctgcctcccagacagcctccccaggtagcgtgggcttcctccttccttctgaggctcacagcaggagggcactttgcatcacatgagacat

SEQ ID NO: 235247 - DNA, 201 bp, Homo sapiens
gcaggagggcactttgcatcacatgagacattctagggaaggctgacccaccaagctgagtagcagagctgcctagacctcctcctactaagttgcccagyggccttgggagctgaggaagcagtgggggagagggaggagcgggtgccaccttggcagtgtcgtgagtttcagctggagtccgccagccctctgcttcac

SEQ ID NO: 235248 - DNA, 201 bp, Homo sapiens
aagggctcgtaacttgacataagtgaaaacctctgaccttccttggaaacactagtttggatagtggttatttaacaagtacaaacacttgagtttagggmcaagcagtgtacctgatgctaaagcgatggaaggcatggtctttggcttcaaggtatttattatcttgttaggaaaagtaaaaagccactgatcactaag

SEQ ID NO: 235249 - DNA, 201 bp, Homo sapiens
tcctactaagttgcccagcggccttgggagctgaggaagcagtgggggagagggaggagcgggtgccaccttggcagtgtcgtgagtttcagctggagtcsgccagccctctgcttcactgtcataggcagtggtcgccatgtgggaaggggcaaaaagaagccgaagctcagagaggaacaatggatctgtgtgtgattg

SEQ ID NO: 235250 - DNA, 201 bp, Homo sapiens
ctcgcccaggctggagtgcagtggcgccatctggctcactgcaagctctgcctcctgggttcatgccattctcctgcctcagcctcctgagtagctgggaytacaggcacccaccaccagccctggctaattttttgtatttttagtagagatggggtttcaccgtgttagccaggatggtctcgatctcctgaccttgtg

SEQ ID NO: 235251 - DNA, 201 bp, Homo sapiens
acataagtgaaaacctctgaccttccttggaaacactagtttggatagtggttatttaacaagtacaaacacttgagtttagggacaagcagtgtacctgrtgctaaagcgatggaaggcatggtctttggcttcaaggtatttattatcttgttaggaaaagtaaaaagccactgatcactaagcacagtgatagtaccg

SEQ ID NO: 235252 - DNA, 201 bp, Homo sapiens
taggcagtggtcgccatgtgggaaggggcaaaaagaagccgaagctcagagaggaacaatggatctgtgtgtgattgatctacccatggtatgtcttgggyacctaccatgtgccaggctttgtgctgggcactttgagggctaagacatgagtaggttgcatctgctgtcttcaagttgtcagcaggtaagtgacctcca

SEQ ID NO: 235253 - DNA, 201 bp, Homo sapiens
cgtgttagccaggatggtctcgatctcctgaccttgtgatccacctgccttagcctcccaaagtgctgggattacacgcatgagccaccgcgcctggcccwacttttcaaagctgagcccagccatggatttgtatactcaaatacctatgagttgggcaaattcctctcttcttgaggtcaaaagaacatggagcctgtt

SEQ ID NO: 235254 - DNA, 201 bp, Homo sapiens
tcctacctgtctagcgggaaacatcctcacgtgcaactgtcagaaacgcctgcatcctttccctggaggagtttgtcagaccaaacaaatctgtatctaasaacatgtttttccaggaaggcaggatctgatacggatggcagatctagaaacccaaagatcccttctgcctagagttacatggactgtgctttttcctta

SEQ ID NO: 235255 - DNA, 201 bp, Homo sapiens
aaaacctctgaccttccttggaaacactagtttggatagtggttatttaacaagtacaaacacttgagtttagggacaagcagtgtacctgatgctaaagmgatggaaggcatggtctttggcttcaaggtatttattatcttgttaggaaaagtaaaaagccactgatcactaagcacagtgatagtaccgagcagcatt

SEQ ID NO: 235256 - DNA, 201 bp, Homo sapiens
ttcaccacttattttaatgagcactaactatgtaccaggactctacactattctgtgagtactttcaacacaaaaagacttaggaaaaattgtttattatktccctgctgaataaaggccagaccttccatggcctcagcaggcctcaccaggttcctaacatcctcttcaggctccagagggcccgaacactagtacaga

SEQ ID NO: 235257 - DNA, 201 bp, Homo sapiens
tgttaaaagctgtagatagctcaaaagaaaaattcccttgactctgaaaaacaaggattagcaatgttttaagcagaaagttaaaaaggattagttcagtyttctattagttcagtccattccattaatacttgctctgcatgatattcatgaacatttcagttcttcatgagtcctatacatttttcctctattccaatg

SEQ ID NO: 235258 - DNA, 201 bp, Homo sapiens
gctgggagtcactcccacaccactcaaaccctgagttcacctcttgctcacggcaccacaggcctgtctccatggtgtatccatctcagaagtggaggctrtgatcgtggtgtatccttcgtctcagaactggaggctgtgacatgtgcctttctctagttccactgtttagcacccagaatggtcccaataaatgcttgc

SEQ ID NO: 235259 - DNA, 201 bp, Homo sapiens
caggcactggtgacagagcacacagaggctgctgggcctcccaaggtcggggagcttgtggggaattcacattcttggttccgggactgattcactgagtsaatcaatattgattgagcacttagttggttgtggtggtggtaggaatgaattcctgggcttcctgcagcccctttccatgaatctatacatatcaaacat

SEQ ID NO: 235260 - DNA, 201 bp, Homo sapiens
cgttgacaatgaggaaagaaggcttagtaaaccaacactactacaactactgctgctactgctactactactagctgtgaacaccagaatagctcagattrcttttgaacctgtgagaggggccaaaatgcaggtcttatgtgttcccaaggggcccctcaaatgccacatgggaagtttaggaaaagaggaccaggtatc

SEQ ID NO: 235261 - DNA, 201 bp, Homo sapiens
ctgcagatggagccagcacccgggcttctcgctcccagccccctcccgaagccccgccccgcctccgggtctggaggaggctgggaagccccgcccctccrcgctagcgccgcccaggctggcacaaaggaggaagcctagtcccgcccctgcgtgcggcgcttctcccaggccccaccttccatccagtgccctggaccc

SEQ ID NO: 235262 - DNA, 201 bp, Homo sapiens
agagaggcagtataagctgggggacttaaaggacatggctctccttcctcttgtgccctgcccttagagcatttggaacagttggcatttccactgttgayggtgggggcctggttgccaggctacctgaggcaggcatggagttgaatgtgacccatgggcctcaccaggcctgaagcagtgtctctcctgacgtcacgc

SEQ ID NO: 235263 - DNA, 201 bp, Homo sapiens
gtgagaggggccaaaatgcaggtcttatgtgttcccaaggggcccctcaaatgccacatgggaagtttaggaaaagaggaccaggtatcagtctttgtgcygatgtaaaggaaagaggttggcagcacagacactttctcctacctgtctagcgggaaacatcctcacgtgcaactgtcagaaacgcctgcatcctttccc

SEQ ID NO: 235264 - DNA, 201 bp, Homo sapiens
cttcctcttgtgccctgcccttagagcatttggaacagttggcatttccactgttgacggtgggggcctggttgccaggctacctgaggcaggcatggagktgaatgtgacccatgggcctcaccaggcctgaagcagtgtctctcctgacgtcacgcatgacgggtgctgtagaatgctataggccaccccgccaatgag

SEQ ID NO: 235265 - DNA, 201 bp, Homo sapiens
taggaaaagaggaccaggtatcagtctttgtgctgatgtaaaggaaagaggttggcagcacagacactttctcctacctgtctagcgggaaacatcctcacgtgcaactgtcagaaacgcctgcatcctttccctggaggagtttgtcagaccaaacaaatctgtatctaagaacatgtttttccaggaaggcaggatctg

SEQ ID NO: 235266 - DNA, 201 bp, Homo sapiens
ctgacgtcacgcatgacgggtgctgtagaatgctataggccaccccgccaatgagcaggctaggtggctggaccaaatatggacaaatctgagcatcgccrtcctgccaggttatgactggatagtgtttgtgatgagacgtggcagatgccttggggtagaattgatgtcatatccttggtgcagatgccatacctacag

SEQ ID NO: 235267 - DNA, 201 bp, Homo sapiens
caactgtcagaaacgcctgcatcctttccctggaggagtttgtcagaccaaacaaatctgtatctaagaacatgtttttccaggaaggcaggatctgatayggatggcagatctagaaacccaaagatcccttctgcctagagttacatggactgtgctttttccttagtcctggcgaagttgcaccagtgggtgggatga

SEQ ID NO: 235268 - DNA, 201 bp, Homo sapiens
caccccgccaatgagcaggctaggtggctggaccaaatatggacaaatctgagcatcgccatcctgccaggttatgactggatagtgtttgtgatgagacrtggcagatgccttggggtagaattgatgtcatatccttggtgcagatgccatacctacaggatagtgtccaggtggttccagcattccttgacctggggt

SEQ ID NO: 235269 - DNA, 201 bp, Homo sapiens
aactgtcagaaacgcctgcatcctttccctggaggagtttgtcagaccaaacaaatctgtatctaagaacatgtttttccaggaaggcaggatctgatacrgatggcagatctagaaacccaaagatcccttctgcctagagttacatggactgtgctttttccttagtcctggcgaagttgcaccagtgggtgggatgag

SEQ ID NO: 235270 - DNA, 201 bp, Homo sapiens
atctgatacggatggcagatctagaaacccaaagatcccttctgcctagagttacatggactgtgctttttccttagtcctggcgaagttgcaccagtggrtgggatgaggtcagcaattagagtcagctcttcctcagttaggattggcctttggcttgtaggctgtttcctagggagggaacccagcgtcagaacttca

SEQ ID NO: 235271 - DNA, 201 bp, Homo sapiens
ctgaattgatttatccaaagaaaaccatgttgccttcttcagatggggacattgtggcatgggttctgtgatgagaacatatctgtcttctaatttgaacsctttgggcccctcactagctttggatggttggggcaagtcatttaacccaccacgcctgtttcctcatctgtaaaatgggaatgatagtacctaccacag

SEQ ID NO: 235272 - DNA, 201 bp, Homo sapiens
gcttgtaggctgtttcctagggagggaacccagcgtcagaacttcatctcaccctgtgacatgtcactactgacaacaagtgtggtcctctgtatgctctrtgagtatgctgggcatgctgctgttgggtccgtcactgtgttatgcagaaaagtgacgaagggctaggcaggtgtgtgcagcgtgccatttagcgtatcc

SEQ ID NO: 235273 - DNA, 201 bp, Homo sapiens
ctgcatagagcccttataagttcctcaggaggcccagatgtggaagggcaggcgtgtctaggaacctgtggagtccctgagagagtttaggaatcttcacratttcattttcacctttttcctattatatagaagggatacttctagggggagtagaaggagtgtgaccgcagtcagagcaggagagtggattggagtagg

SEQ ID NO: 235274 - DNA, 201 bp, Homo sapiens
tggcctccaccatgtgcctcgtaccttcatgccacaggaattctaggctccatggcagacgtggcagagtgagcgggtgggtgaggggtgggggcaattgsaaataggctctgtacccctgaatcataagccataaggtcctttcctgggttgttggcctgtaaaattggctttgcagaaccacagtgctatcaataaata

SEQ ID NO: 235275 - DNA, 201 bp, Homo sapiens; identical to SEQ ID NO: 44979

SEQ ID NO: 235276 - DNA, 201 bp, Homo sapiens
ttcaatgctaggtgctggagaagtgcaaaggagagaaaggagtcacctctccagcctggtgaggacaggggaggcttcttgcaggaggtgatgcctgagcrccagtcccagtaaccaactgcctgttgaacagctgtcatgtcaggttccagcctacttgtgctgactccgaccaggagcccagaggtttcacaataactc

SEQ ID NO: 235277 - DNA, 201 bp, Homo sapiens
cctttgatcagtctattgagacccagaagcttttaattaggaaatgaattatggattcatgaagttagaatataaaatagtcaaattagtttttaccccayagaagctatgtttggtggtgggggtggtgggaagcttgtttttacaatgtagggttcactcgaatggtaaggaaatgcggggaattaatatattgactgc

SEQ ID NO: 235278 - DNA, 201 bp, Homo sapiens
tttaattaggaaatgaattatggattcatgaagttagaatataaaatagtcaaattagtttttaccccacagaagctatgtttggtggtgggggtggtggraagcttgtttttacaatgtagggttcactcgaatggtaaggaaatgcggggaattaatatattgactgcctactgcattccaggcatgtgctgggaactt

SEQ ID NO: 235279 - DNA, 201 bp, Homo sapiens
ggacaaatctgagcatcgccatcctgccaggttatgactggatagtgtttgtgatgagacgtggcagatgccttggggtagaattgatgtcatatccttgrtgcagatgccatacctacaggatagtgtccaggtggttccagcattccttgacctggggtcagcaaactgctggcatcttggcagcttggaatggccagt

SEQ ID NO: 235280 - DNA, 201 bp, Homo sapiens
agacgtggcagatgccttggggtagaattgatgtcatatccttggtgcagatgccatacctacaggatagtgtccaggtggttccagcattccttgacctkgggtcagcaaactgctggcatcttggcagcttggaatggccagttggtgttcctcctcaccaccaggtagagaggaagtgctgatgaggaagtagtttcc

SEQ ID NO: 235281 - DNA, 201 bp, Homo sapiens
gtgggaagcttgtttttacaatgtagggttcactcgaatggtaaggaaatgcggggaattaatatattgactgcctactgcattccaggcatgtgctgggwactttaatacagggctttacaaactgtccacaatgaagggccaattttactttttccagtcggccatggactgatatgtttgcatcaatatatttgaatg

SEQ ID NO: 235282 - DNA, 201 bp, Homo sapiens
ttgatgtcatatccttggtgcagatgccatacctacaggatagtgtccaggtggttccagcattccttgacctggggtcagcaaactgctggcatcttggyagcttggaatggccagttggtgttcctcctcaccaccaggtagagaggaagtgctgatgaggaagtagtttccctagaaaatgggctgagagggcacgtc

SEQ ID NO: 235283 - DNA, 201 bp, Homo sapiens
gcgtcagaacttcatctcaccctgtgacatgtcactactgacaacaagtgtggtcctctgtatgctctgtgagtatgctgggcatgctgctgttgggtccrtcactgtgttatgcagaaaagtgacgaagggctaggcaggtgtgtgcagcgtgccatttagcgtatcccctcaggcatgcacccaggagcagtgtggtct

SEQ ID NO: 235284 - DNA, 201 bp, Homo sapiens
gcattccttgacctggggtcagcaaactgctggcatcttggcagcttggaatggccagttggtgttcctcctcaccaccaggtagagaggaagtgctgatraggaagtagtttccctagaaaatgggctgagagggcacgtccagggtgccacagctctgaagcagcagcgctgggagtcactcccacaccactcaaaccc

SEQ ID NO: 235285 - DNA, 201 bp, Homo sapiens
gggcatgctgctgttgggtccgtcactgtgttatgcagaaaagtgacgaagggctaggcaggtgtgtgcagcgtgccatttagcgtatcccctcaggcatrcacccaggagcagtgtggtctgagcttgtgttaattctaagaagaaataaactaatgatgaaactctaattgtttttaatggaaaatgttcataaggtga

SEQ ID NO: 235286 - DNA, 201 bp, Homo sapiens
cactcaaaccctgagttcacctcttgctcacggcaccacaggcctgtctccatggtgtatccatctcagaagtggaggctatgatcgtggtgtatccttcrtctcagaactggaggctgtgacatgtgcctttctctagttccactgtttagcacccagaatggtcccaataaatgcttgctgctgactataatgaacaat

SEQ ID NO: 235287 - DNA, 201 bp, Homo sapiens
taccatgtgccaggctttgtgctgggcactttgagggctaagacatgagtaggttgcatctgctgtcttcaagttgtcagcaggtaagtgacctccacccygcagagaggcagtataagctgggggacttaaaggacatggctctccttcctcttgtgccctgcccttagagcatttggaacagttggcatttccactgtt

SEQ ID NO: 235288 - DNA, 201 bp, Homo sapiens
aggcaggtgtgtgcagcgtgccatttagcgtatcccctcaggcatgcacccaggagcagtgtggtctgagcttgtgttaattctaagaagaaataaactawtgatgaaactctaattgtttttaatggaaaatgttcataaggtgaagttcttatgcatgctaaatgattttttcaattttgtttcttttaggagaactat

SEQ ID NO: 235289 - DNA, 201 bp, Homo sapiens
tggaagcattcctatttttttttaagactagtcaagtgcagtagtgagaagtggggaaagagtagaacaaggagtattatctgtaactgagtatgaacaaycaattaagatgatgcactaccttcagaccagccttcaccacttattttaatgagcactaactatgtaccaggactctacactattctgtgagtactttca

SEQ ID NO: 235290 - DNA, 201 bp, Homo sapiens
cctgagttcacctcttgctcacggcaccacaggcctgtctccatggtgtatccatctcagaagtggaggctatgatcgtggtgtatccttcgtctcagaamtggaggctgtgacatgtgcctttctctagttccactgtttagcacccagaatggtcccaataaatgcttgctgctgactataatgaacaatcagcatgat

SEQ ID NO: 235291 - DNA, 201 bp, Homo sapiens
caggagcagtgtggtctgagcttgtgttaattctaagaagaaataaactaatgatgaaactctaattgtttttaatggaaaatgttcataaggtgaagttmttatgcatgctaaatgattttttcaattttgtttcttttaggagaactatcctatccctgaaccaggcccaaatggtaagttcttgggaaacatgactta

SEQ ID NO: 235292 - DNA, 201 bp, Homo sapiens
gtatccatctcagaagtggaggctatgatcgtggtgtatccttcgtctcagaactggaggctgtgacatgtgcctttctctagttccactgtttagcaccyagaatggtcccaataaatgcttgctgctgactataatgaacaatcagcatgattgaattatccattcttctgtctctcaccgcactgagcacagtgatcc

SEQ ID NO: 235293 - DNA, 201 bp, Homo sapiens
accacagtttaggaatcctgtacagggactgtgtagacaagatatgaagccagttttcccaaggggcatttattggctctgcaactccagcttgatttttwaaagggaagcatactgttccagtcaaagccttggtaaaacaactagtttctccagttgtgtcctgttgtaaaagaagatggattcttactgcgctgatgg

SEQ ID NO: 235294 - DNA, 201 bp, Homo sapiens
gcatgctaaatgattttttcaattttgtttcttttaggagaactatcctatccctgaaccaggcccaaatggtaagttcttgggaaacatgacttatattytgttatttcctgttgtttcctttggagtcacatgtatattgttcccttacctctcttttccaactgtttattacttttgcatccattaaaaacctatgct

SEQ ID NO: 235295 - DNA, 201 bp, Homo sapiens
gtctcagaactggaggctgtgacatgtgcctttctctagttccactgtttagcacccagaatggtcccaataaatgcttgctgctgactataatgaacaaycagcatgattgaattatccattcttctgtctctcaccgcactgagcacagtgatccccagaaagctctggaacaagcacagcactcacagggagttctgg

SEQ ID NO: 235296 - DNA, 201 bp, Homo sapiens
aatgacaaaatatccagggtagctacagttaaaaacacaattgacaaagaaatttggttatctctgtggtttacaataatttacacaataaccttaattawgattgatagcaaatactcagacattagaattttagatattctatacaattttggaacataatgttattcactaaaatataacctaaagaagattaaacat

SEQ ID NO: 235297 - DNA, 201 bp, Homo sapiens
atgctaaatgattttttcaattttgtttcttttaggagaactatcctatccctgaaccaggcccaaatggtaagttcttgggaaacatgacttatattctrttatttcctgttgtttcctttggagtcacatgtatattgttcccttacctctcttttccaactgtttattacttttgcatccattaaaaacctatgcttt

SEQ ID NO: 235298 - DNA, 201 bp, Homo sapiens
gcaataatcttgctttccactgtatttaccagtttaattactgtatgcccctttgatcagtctattgagacccagaagcttttaattaggaaatgaattayggattcatgaagttagaatataaaatagtcaaattagtttttaccccacagaagctatgtttggtggtgggggtggtgggaagcttgtttttacaatgta

SEQ ID NO: 235299 - DNA, 201 bp, Homo sapiens
atgtgcctttctctagttccactgtttagcacccagaatggtcccaataaatgcttgctgctgactataatgaacaatcagcatgattgaattatccattsttctgtctctcaccgcactgagcacagtgatccccagaaagctctggaacaagcacagcactcacagggagttctggggaaattttcaggagaaatttca

SEQ ID NO: 235300 - DNA, 201 bp, Homo sapiens
ctatcctatccctgaaccaggcccaaatggtaagttcttgggaaacatgacttatattctgttatttcctgttgtttcctttggagtcacatgtatattgytcccttacctctcttttccaactgtttattacttttgcatccattaaaaacctatgcttttgttaggctgagaacagagtctactgcccacagcatgacc

SEQ ID NO: 235301 - DNA, 201 bp, Homo sapiens
caataatcttgctttccactgtatttaccagtttaattactgtatgcccctttgatcagtctattgagacccagaagcttttaattaggaaatgaattatrgattcatgaagttagaatataaaatagtcaaattagtttttaccccacagaagctatgtttggtggtgggggtggtgggaagcttgtttttacaatgtag

SEQ ID NO: 235302 - DNA, 201 bp, Homo sapiens
agaaagctctggaacaagcacagcactcacagggagttctggggaaattttcaggagaaatttcactgctgcctgtgacccactccaagtggggaactgayaaggcagataaacattcaaggaagacaaaacccattatggctcatactgttgaggtaaacatctctggaacaaaaagatttctaactgccagcctgcacg

SEQ ID NO: 235303 - DNA, 201 bp, Homo sapiens
ccttacctctcttttccaactgtttattacttttgcatccattaaaaacctatgcttttgttaggctgagaacagagtctactgcccacagcatgacctgrtgggaagtttatcttggctgctacatgaaataaaagaacagtgatagaatcagaaaaattaccgtaccagactgctgacttgtcccaaagagtttttgat

SEQ ID NO: 235304 - DNA, 201 bp, Homo sapiens
atatggaccaatgacagaattcttcctcttttgacctaatgacagtgtaccctatctaccagaagctgctgttggagtggccaagtgtcctaaccctaacscaaactttgaaaaggagtgagtctacagaacttaatctttagcaaagggagcatcatgccagctttccccactccccaggaaggccagtcaccaaagtgt

SEQ ID NO: 235305 - DNA, 201 bp, Homo sapiens
tagcaaagggagcatcatgccagctttccccactccccaggaaggccagtcaccaaagtgtggggcagcccaggacctactgtccagtgggggtgggaggkgctgcatgggtccctgtcccctgccctaatcaaccaagcacagaaagtgagtgagcacactggggcagggtttccaacacctttactccactccttctag

SEQ ID NO: 235306 - DNA, 201 bp, Homo sapiens; identical to SEQ ID NO: 44977

SEQ ID NO: 235307 - DNA, 201 bp, Homo sapiens; identical to SEQ ID NO: 44978

SEQ ID NO: 235308 - DNA, 201 bp, Homo sapiens; identical to SEQ ID NO: 44980

SEQ ID NO: 235309 - DNA, 201 bp, Homo sapiens
ccactgattacccgaagaacagaggcatttctatgtttggccttgcttccttatctgtgcctgcagcttgatttttccaggctgctcttttgttggaaagmatttcaccaaggacctgccctaactgtgtgcctaactggtttttttctttctcgttcctcatctcccacctcaggagtggagactctaactgctgttagg

SEQ ID NO: 235310 - DNA, 201 bp, Homo sapiens
actgtgagccagcaatctgcctgcagtagggctgtagctagctgccttctctcatcccctgtttcaagccatctggaacaggccctagcagccttagaccraatcattctggtgacccagacagtacgctcacgctccttgtgggtgtgatctggtgttcctcatacttgtttgtgattttctttggctggccaaataagt

SEQ ID NO: 235311 - DNA, 201 bp, Homo sapiens
tctagtcgtgtgcctcccggaacctagccccgtggctggcacgtggccggtgcccaggacggttgcaaactgtttgaatgaagctttctctctcctttgcyagctgcagattcatagtccagcctcttgtcattgacctttccaaaggaaatgctaaggctgtctgaattatcggggcagaccgtgcagagcagagaaagg

SEQ ID NO: 235312 - DNA, 201 bp, Homo sapiens
ctccccattctagtgctcattccactctttggagcctccacccaaggtcctgaattaaagtgaggctgttagtgtttactgttgcaaatgccagatggtaytatgagtaagggaaagtggtccagctctacccagcttgcagagtgatttccaactcagtacttcattccacaaacattcactcatgaaagggtgcctgcc

SEQ ID NO: 235313 - DNA, 201 bp, Homo sapiens
ataaggcagataaacattcaaggaagacaaaacccattatggctcatactgttgaggtaaacatctctggaacaaaaagatttctaactgccagcctgcaygcatgtatgaagccttttttaagccacagaatacaagtggcccatctgtctcatgtttatagttttctcaccaccggtgagcttagagggccagtggttc

SEQ ID NO: 235314 - DNA, 201 bp, Homo sapiens
taaggcagataaacattcaaggaagacaaaacccattatggctcatactgttgaggtaaacatctctggaacaaaaagatttctaactgccagcctgcacrcatgtatgaagccttttttaagccacagaatacaagtggcccatctgtctcatgtttatagttttctcaccaccggtgagcttagagggccagtggttcc

SEQ ID NO: 235315 - DNA, 201 bp, Homo sapiens
cttagactgtggaggtggctgaagccaatattgggtcccgaatctgtaaagctttggaagatgttcccactgtgcctggttctccatgggttaagtgtatkttttcacaatacactttaaagaaaaccgtgtttactctcccgctcagttaagtttggttggcaggttgagcagttcagcagtgtacacaaatcacattct

SEQ ID NO: 235316 - DNA, 201 bp, Homo sapiens
aatatattcagacacagaatttcctttgcaagattaatttttataatgcttccacaacttgctcaaaccttcagctttatcttaacctaattcaaaacaaycctttatttctaggcaaaatttacatttccatgtcttcttataatcttttaccaaaacacattttactttccttacacaccttgcatgtaaatctatttt

SEQ ID NO: 235317 - DNA, 201 bp, Homo sapiens
gagcatcatgccagctttccccactccccaggaaggccagtcaccaaagtgtggggcagcccaggacctactgtccagtgggggtgggaggtgctgcatgrgtccctgtcccctgccctaatcaaccaagcacagaaagtgagtgagcacactggggcagggtttccaacacctttactccactccttctaggcctctcac

SEQ ID NO: 235318 - DNA, 201 bp, Homo sapiens
tgtggaggtggctgaagccaatattgggtcccgaatctgtaaagctttggaagatgttcccactgtgcctggttctccatgggttaagtgtatgttttcasaatacactttaaagaaaaccgtgtttactctcccgctcagttaagtttggttggcaggttgagcagttcagcagtgtacacaaatcacattctcaggaat

SEQ ID NO: 235319 - DNA, 201 bp, Homo sapiens
gcatcatgccagctttccccactccccaggaaggccagtcaccaaagtgtggggcagcccaggacctactgtccagtgggggtgggaggtgctgcatgggkccctgtcccctgccctaatcaaccaagcacagaaagtgagtgagcacactggggcagggtttccaacacctttactccactccttctaggcctctcactt

SEQ ID NO: 235320 - DNA, 201 bp, Homo sapiens
aggaacagaaggatggatggagggagggaaggaggggattttgaagcatagtcttactgagtgtctgctgcttatcccccccaggccccttttttcccccwattttcttaagttgccaggtctccattttctccctttaaagggaagaaggagagaaaggaggacaaaaggaagaaatcaagtcctgtggcttccgttcct

SEQ ID NO: 235321 - DNA, 201 bp, Homo sapiens
cctggcaacagctattctgaaaaacccagaggtgaagctggcagggctggcagccagggacagcctgcgcctggaggcaggcctctgcctgtatgggaatsacattgatgaacacactacacctgtggagggcagcctcagttggacactgggtgagctgggccagcactaaaggatagggtcctggaggtcagggtgacc

SEQ ID NO: 235322 - DNA, 201 bp, Homo sapiens; identical to SEQ ID NO: 45026

SEQ ID NO: 235323 - DNA, 201 bp, Homo sapiens
gactactgttccttccttcccaaggcctgtggggtgggcagcattctggctcattgctggttgggaggcttctgggcagtgagctggatccttgctgggtycttgtgtgtgtgtgtcagatgctgtgtgacatggctagaatatcggagctacgcctgattctgcggcagccatcaccactgtggctgtctttcacagtgg

SEQ ID NO: 235324 - DNA, 201 bp, Homo sapiens
tcaatataccaagagggaagagggggccagtctggcctgaactgtgacttccagggaagtgccttggagggactactgttccttccttcccaaggcctgtrgggtgggcagcattctggctcattgctggttgggaggcttctgggcagtgagctggatccttgctgggtccttgtgtgtgtgtgtcagatgctgtgtgac

SEQ ID NO: 235325 - DNA, 201 bp, Homo sapiens
tatgtctcatgtgtcattctccagggaagcgccgccgagctgctatggacttccctggagccaaggtcattgttccccagctgaagggcagggtgcagcgraggcgtgtggggttgatgtgtgagggggcccccatgcgggcacacagtcccatcctgaacatggagggtaccaagattggtaggtggaccagggaagctg

SEQ ID NO: 235326 - DNA, 201 bp, Homo sapiens
gcgtgcgtgaagagttggcagttcggggaggagtattaaaaccgcgcacgcgcacctaaccccaccctgcttgcttaagggatgagtgactccgggagtayaaaatagcaaccaggtcttttatagccccggagttcccgtgatgccccacgcggctgcaatgattggttaagggttttgcttttagggcgtggacgggct

SEQ ID NO: 235327 - DNA, 201 bp, Homo sapiens
aggctgaggcaggagaatcgcttgaatcccggagacggaggttgcagtgagtcgagataacgccactgcactctagctggggcgacagagcgagattccgygttaaaaacgaaaaagaaaaaaacttccgcaggcacttccgactcccggccgatcctgagcttcggtgattggctgggctggccgtacgcggggcctccc

SEQ ID NO: 235328 - DNA, 201 bp, Homo sapiens
cactgacccctccttctggagcagggtctcccagaccccagcagggtatcctccgaggtgcagcagatgtgggcactgacagagatgatccgggccagtcrcacctccgcaaggatcggccgctttgatgtaagtaatcgcttccttctgcttggcttgctttgccctgagcagatcagacctgatggtcttttgtatttc

SEQ ID NO: 235329 - DNA, 201 bp, Homo sapiens
aaaggtaagtgactagctcagctgctggctggccctttccccagaaagcttctatgactgggaaagctaggtggtggggtgggtaatgggtgaagattgtraatggggccttcatggaggttagctgggtgtgaatgctggaagctcacaatgagaggtgaggccatgtccccatatcccctgacctttggggccacctgc

SEQ ID NO: 235330 - DNA, 201 bp, Homo sapiens
atcacgctactgcactccagcctgggcaaaagagcaagatttcctctcaaaaaaaaaaaaaaaagaaaaggtggggagaaggaagaggtggcacctttgayctttgagcttttcaggcccctgggcctgggtctgacttgttgtaatgggttgtatgtgttctagttgcaggaaatcacgtttaagaattactacacagct

SEQ ID NO: 235331 - DNA, 201 bp, Homo sapiens
cactggctccctgggcccaggccccactgcagcccaggtactacaggccggcgtggcagatgacctgaggaaactgcccttcatgaccagtgctgtgatgraggtgtttggcgtgtctggctgccgcgtgacccgctgtggctacacaggagaggatggtgtggaggtgtgtcaagaagtggtgtgggggcagtacagggc

SEQ ID NO: 235332 - DNA, 201 bp, Homo sapiens; identical to SEQ ID NO: 45037

SEQ ID NO: 235333 - DNA, 201 bp, Homo sapiens
ctgcggcagccatcaccactgtggctgtctttcacagtggaggagctgcagatctatcagcagggaccaaaggtaagtgactagctcagctgctggctggycctttccccagaaagcttctatgactgggaaagctaggtggtggggtgggtaatgggtgaagattgtgaatggggccttcatggaggttagctgggtgtg

SEQ ID NO: 235334 - DNA, 201 bp, Homo sapiens
actccttggctttgtttgctgtgaactggattccaaggacagccttctcagaagagctagaggtcatgggggtgtcatggataggtcaatggccccaaggraatgagctcagagggtctcatcatctcatccttctagcttgcccccattaaatggtgtgccttaatgtcccgggttttccagggctgacacccactctca

SEQ ID NO: 235335 - DNA, 201 bp, Homo sapiens
ctgtctgaataaccacaacaaccgatgcacttccgtgtttaataagccacatcctcagttgagcctggggtgaaatgtgagatcctgactctgtgcagtartattagtgggtgggccaggggctgtgaataacatcatcctcagtacagctgcaattccagggcccctctaccacaaagatggcttaagcaaaggcagcca

SEQ ID NO: 235336 - DNA, 201 bp, Homo sapiens
tccatgttggtcaggctggtctcaaacacctgacctcaggtgatctgcctgccttggccttccaaagtgctgggattacaggcatgagccaccgcgcccgscctgcccctttccaagagatatgctcagcataatgagagatcaaccgtggtggggagtgggtccaagtaagggttctcattgttgccttttaagaggcct

SEQ ID NO: 235337 - DNA, 201 bp, Homo sapiens
tctcatccttctagcttgcccccattaaatggtgtgccttaatgtcccgggttttccagggctgacacccactctcatgtattgggctggatgttggtttsaaaaggggttatttcaggaaggtgctaggtcctgtccagttccctggcagtccccccacacagagtgactgggggaggtcaggaaatcagaaggtggtcc

SEQ ID NO: 235338 - DNA, 201 bp, Homo sapiens
actcaccacgaagggaaatgcgtggagccatcaggcgtggatccattctgaccacccagacctggaggcagaaacacatccagagctgcagaaggctgggrtgggaatctgagcaggcatcagcccaggtcaggttagagaccactggtattgtttggtgaagtctggtgagggtcctaagggactaatggtattgccagg

SEQ ID NO: 235339 - DNA, 201 bp, Homo sapiens
ctgacccttgacctgactcccagcccgggccccgcgccccaagcggcgaccccgcccgcgcagtccccggaagcgcgcccggtagtctcctgtgccccttyccccgcccggccgggcctggtggagcccaggctgcccgcctgcccgccctcggtccccggagcttcctctcccagcggcgccgggcagggcgggggcttt

SEQ ID NO: 235340 - DNA, 201 bp, Homo sapiens
aagtgtggtctctaaaccagcatctttggagcttgttaggaatatagtctcaggcactgctgcagacctgctgaatcagaaccttcattttaacaagatcyccaggtgattcatgtgaccccctcaacctcaggctttttgtccatccagtggggaggctaaggaagttttttgggggcattgctatggagtacttaggag

SEQ ID NO: 235341 - DNA, 201 bp, Homo sapiens
ccggtagcgggggcagttcacctggcaacagctattctgaaaaacccagaggtgaagctggcagggctggcagccagggacagcctgcgcctggaggcagrcctctgcctgtatgggaatgacattgatgaacacactacacctgtggagggcagcctcagttggacactgggtgagctgggccagcactaaaggataggg

SEQ ID NO: 235342 - DNA, 201 bp, Homo sapiens; identical to SEQ ID NO: 45029

SEQ ID NO: 235343 - DNA, 201 bp, Homo sapiens; identical to SEQ ID NO: 45030

SEQ ID NO: 235344 - DNA, 201 bp, Homo sapiens
ggaagcggctgggggctagggccctggtggcactaagcccagccgcccacaggaggtgctccgcaggacaccgctctatgacttccacctggcccacggcrggaaaatggtggcgtttgcgggttggagtctgccagtgcagtaccgggacagtcacactgactcgcacctgcacacacgccagcactgctcgctctttga

SEQ ID NO: 235345 - DNA, 201 bp, Homo sapiens
ctcatgtgtcattctccagggaagcgccgccgagctgctatggacttccctggagccaaggtcattgttccccagctgaagggcagggtgcagcgaaggcrtgtggggttgatgtgtgagggggcccccatgcgggcacacagtcccatcctgaacatggagggtaccaagattggtaggtggaccagggaagctgggaaa

SEQ ID NO: 235346 - DNA, 201 bp, Homo sapiens
agttccctggcagtccccccacacagagtgactgggggaggtcaggaaatcagaaggtggtcctttgccacgtgtagaaccaaaagactggttagtcactktgggtgggctggactgcactgtggatggcagggaggatgcatccttgcttagtagccttttggattgtagctgttgcaatggcctgaggctttcaatctc

SEQ ID NO: 235347 - DNA, 201 bp, Homo sapiens; identical to SEQ ID NO: 45035

SEQ ID NO: 235348 - DNA, 201 bp, Homo sapiens
ggctagggccctggtggcactaagcccagccgcccacaggaggtgctccgcaggacaccgctctatgacttccacctggcccacggcgggaaaatggtggygtttgcgggttggagtctgccagtgcagtaccgggacagtcacactgactcgcacctgcacacacgccagcactgctcgctctttgacgtgtctcatatg

SEQ ID NO: 235349 - DNA, 201 bp, Homo sapiens
accatgttggttggccaggatggtctcaatctcttgacctcgtgatccgcctgccttggcctcccaaagtgctgggattataggcctgagccaccgcgccyggccttttgccagattcttaatatgattatttagtaattttctacccagtgaaaaagcttggctcttatataaattaaaaaaattgaagggaagtaatat

SEQ ID NO: 235350 - DNA, 201 bp, Homo sapiens
ggctaaagaaatatcgcggtatgggttctctcgatgccatggacaagcacctcagcagccagaacagatatttcaggtgggacaggcaagccagttacccyaccctaatcctgcactgacagtctcatctctgctgtgaccttgcccgtgtctctgcctctccctgcagtgaagctgacaaaatcaaagtggcccagggag

SEQ ID NO: 235351 - DNA, 201 bp, Homo sapiens
tttcctattaaaatgtattgattaaaattagaatcataacaattaaggattatggacagttttatctgtagagcataatttttgctttactcacaggcagscttctggacagcatgttctattggaacaaaagcataggttattcagtgtttttctttgtttgttcttaaaaaaacatggtcttggtatgttgctgagatg

SEQ ID NO: 235352 - DNA, 201 bp, Homo sapiens
tcctacctcagcctcctgagtagctggagctataggcatgcgctactgtgctcagctatttttgttttgttttgttttgtttgaaacggagtctcactctrtagcccagggtggagtgcagtggcacgatcttggctcactgcagcctccgcctcccaggtcccaattcaggcaattctcctacctcagcctcctgagcag

SEQ ID NO: 235353 - DNA, 201 bp, Homo sapiens; identical to SEQ ID NO: 45094

SEQ ID NO: 235354 - DNA, 201 bp, Homo sapiens
agccaccatgcctggtcttccttttttaaaaaaagataaatattgtagaagagaccctgtatcttagctaataataataataataataataataataataaaatcccccaaagagtatcagtctctttatctagagaagaaatgacaatagccgttttttttgttttttttgtttttttgtttttttgtttttgagatggg

SEQ ID NO: 235355 - DNA, 201 bp, Homo sapiens
gagccaccatgcctggtcttccttttttaaaaaaagataaatattgtagaagagaccctgtatcttagctaataataataataataataataataataataaaatcccccaaagagtatcagtctctttatctagagaagaaatgacaatagccgttttttttgttttttttgtttttttgtttttttgtttttgagatgg

SEQ ID NO: 235356 - DNA, 201 bp, Homo sapiens
actctctgctcacatgcgttacgggttgattggtacatggggatggagtctcatgctgccctaagctgagagctttactcccaattcactcccttccctcrcagtgactttctcattctccctgggtacatcgacttcactgcagaccaggtggtgagtatgatcaggaattgggtcctgaacatcaaggtgagctaaggt

SEQ ID NO: 235357 - DNA, 201 bp, Homo sapiens
atgacgtgaacccgggaggtggagcttgcagagagccagggtcacaccactgcactccagcctgggcgatagagcaagagtctgtctcaaaaaaaaaaaaagtttggggatttaagtttggagtgttttttgagactttatgttcaagataaactgatgaatgcttgaacttgggaggtagaggttgcagtgaatcaagat

SEQ ID NO: 235358 - DNA, 201 bp, Homo sapiens
ctccctgggtacatcgacttcactgcagaccaggtggtgagtatgatcaggaattgggtcctgaacatcaaggtgagctaaggtgctactatcacctggtstctgggctaactcaccagattgggcttgggggtggattttataggatcatgttgcttgttagcatgcaggtcatacaaaagtgcctttttgtgggggact

SEQ ID NO: 235359 - DNA, 201 bp, Homo sapiens
tgagccaccatgcctggtcttccttttttaaaaaaagataaatattgtagaagagaccctgtatcttagctaataataataataataataataataataataaaatcccccaaagagtatcagtctctttatctagagaagaaatgacaatagccgttttttttgttttttttgtttttttgtttttttgtttttgagatg

SEQ ID NO: 235360 - DNA, 201 bp, Homo sapiens
tgaacccgggaggcggaggttgctgtgagccaagattgcgccactgcactccagcctgggcgacagaacaagactatctcaaaaaaaaaaaaaaaaaaaaataataataataataataaattttctacttgaggcttttttgccttattcaagtagttctaaaagtcttatcacaaatttctaacctacaggatgctagag

SEQ ID NO: 235361 - DNA, 201 bp, Homo sapiens; identical to SEQ ID NO: 45084

SEQ ID NO: 235362 - DNA, 201 bp, Homo sapiens
aattttcaaacatccattaattgaaaaaataaggtggtataataaaactttattttttgattctatatgtatacagctgccctgaatatattccactcttrtgcaagggtaattgcttctgggcatttcctgctaaaaacagtaacataattttgacttctgtttatttctaggaaccctaaggactctgcaatatgaata

SEQ ID NO: 235363 - DNA, 201 bp, Homo sapiens
tttacctccagtttgttcatcagttaaataaggataataccatttaatgagactgaataagataataaagtatctggcatatggagagtttttttttttttgtaatggagacagggtctcattctgtcacctaggttggagtgcagtggtatgatcttggctcactgcaaccccagcctcccaggctcaagcaatcctccc

SEQ ID NO: 235364 - DNA, 201 bp, Homo sapiens
ggcgccacctttctggcagcaccttttcccaggatgaggggctctccacaccggaacccggtcccggcacgtgaccccgccggcggcgatgtcagtgatgktgggggactggctttccgaggctgaccaacactgtggtgctgccatgtcattgtacttgggttgttttctttgtttgtttcttctttttttgagatggag

SEQ ID NO: 235365 - DNA, 201 bp, Homo sapiens; identical to SEQ ID NO: 45085

SEQ ID NO: 235366 - DNA, 201 bp, Homo sapiens; identical to SEQ ID NO: 45086

SEQ ID NO: 235367 - DNA, 201 bp, Homo sapiens; identical to SEQ ID NO: 45087

SEQ ID NO: 235368 - DNA, 201 bp, Homo sapiens
ccccctatagccagttcagaccagcaagtatgtttttatcctacagcaacatacaacacagcagcccattgttgagacttgttttttttttttttttttttgagacagggggtctcattctgtcacccaggctggagtgcagtggtgcgatctcggctcactgcaacctccgcctcccgagttcacaccattttgcctcag

SEQ ID NO: 235369 - DNA, 201 bp, Homo sapiens
agagtgcagtggcattattttggctcactgcaacctccatctctggggttcaagctagcacgcccgactaatttttatatttttagtagagaaggggtttyaccatgttggctagggtggtcttgaactcctgactttaagtgatctgccaacctcggcctcccaaagtgctgggattgtaggcatgagccaccacgccca

SEQ ID NO: 235370 - DNA, 201 bp, Homo sapiens
gggcttgaactccagacctcaagagatctgcgtgccttggcctcccaaagtgccaaagtgctgggattactggtgtgagccaccatgcccagccttttttktgtttgtttgttttttctttgagttggagtttcgctcttgttgtccaggctagaatgcaatggagccatctcggctcactgcaacctgcacctcttgggt

SEQ ID NO: 235371 - DNA, 201 bp, Homo sapiens
ctgtgttttggtgtcaaggaagttctaggtttgttctagagaaataggcacctcttttttctaatacaaaacatctgctagtttgatttacagtcttgctyaattaagcttaaggaataggaagctaagaggaagtaaaattagccatcaaatttgataatggtggggtagttctttctaatgtactgtattgtttttaag

SEQ ID NO: 235372 - DNA, 201 bp, Homo sapiens
cccagactagagtgcagtggcattattttggctcactgcaacctccatctctggggttcaagctagcacgcccgactaatttttatatttttagtagagawggggtttcaccatgttggctagggtggtcttgaactcctgactttaagtgatctgccaacctcggcctcccaaagtgctgggattgtaggcatgagccac

SEQ ID NO: 235373 - DNA, 201 bp, Homo sapiens
aagtcacttttggtgtaggatttcagtccttttcagctctttttttgaccctgccgctgtgttttggtgtcaaggaagttctaggtttgttctagagaaayaggcacctcttttttctaatacaaaacatctgctagtttgatttacagtcttgctcaattaagcttaaggaataggaagctaagaggaagtaaaattagc

SEQ ID NO: 235374 - DNA, 201 bp, Homo sapiens
agggcatggtgatgggcgcctgtaatcccaactactcgggaagatgaggcaggagaatcgcttgaacctgtaggcggaggttgcagtgaactgagagggcwccattgcactccaagctgggggacagagcgagactccatttaaaaaaaaaaaaagaaaagaaaaaaagaaaatagaaccgtgatgaaaatgcccctaaac

SEQ ID NO: 235375 - DNA, 201 bp, Homo sapiens; identical to SEQ ID NO: 45099

SEQ ID NO: 235376 - DNA, 201 bp, Homo sapiens; identical to SEQ ID NO: 45090

SEQ ID NO: 235377 - DNA, 201 bp, Homo sapiens
tgcactccagcctgggcgacagagcgagacttggtctcaaaaacatatatatgtatatataaattaggtctgggcgtggtggctcacgcctgtaatcccarcactttgggaggccgaggtgggcggatcatgaggtcaggagatcaagaccatcctggctaacacggtgaaaccctgtctctactaaaaataaaaaaatca

SEQ ID NO: 235378 - DNA, 201 bp, Homo sapiens
gctgctgtgtggggcagccattggcactcatgaggatgacaagtataggctggacttgctcgcccaggctggtgtggatgtagtggttttggtgagctgcyacacaggtgggttggggcaataggggcagctgccacatcacagtctgagacttacttcttgtcctaggactcttcccagggaaattccatcttccagatc

SEQ ID NO: 235379 - DNA, 201 bp, Homo sapiens
gtggtatgatctcggctgacttcaacctccgcctctggggttcaagtgattctcgtgcctcagcctcccaagtagctgggaatacaggcatgtgccccacrcccagctaatttttttgtatttttagtagagacagggtttcaccatgttggccaggctggtctcaaactcctgacctaaagtgatccgcctgcctcagcc

SEQ ID NO: 235380 - DNA, 201 bp, Homo sapiens
caaccttcgcctcccgggttcaagtaattctcctgcctcagcttccctagtagctgggactacaggcaccacacctggctaatttttgtatttttagtagmgacagggtttcaccatattagctaggctggtctcaaactccttgtgatctgcctgcctcagcctcccaaactgctgggattataggcgtgagccactgtg

SEQ ID NO: 235381 - DNA, 201 bp, Homo sapiens
gggccagctacccacatttgacctctgcccttcttcagagccatgatgtactctggggagcttaagtttgagaagagaacgtcctcagcccaggtggaaggtggcgtccatagcctccattcgtaagtcaccctgtccttggtggggcctctgccatacctcatgcctcctttctcctgccctcacctcacaggtggtcct

SEQ ID NO: 235382 - DNA, 201 bp, Homo sapiens
tactttgatagggcccacagagaccccagtttcaggccccacataccttggaaccaagcactcttatggggacaatagagccctccaataggggcaaccckggggccaaattggcctcttggatgggtgacatggctggaagcaagacaaggtcttgtcatccatcacctgccactcccttgcctagcctggccttcttgc

SEQ ID NO: 235383 - DNA, 201 bp, Homo sapiens; identical to SEQ ID NO: 45091

SEQ ID NO: 235384 - DNA, 201 bp, Homo sapiens
cagggccagctacccacatttgacctctgcccttcttcagagccatgatgtactctggggagcttaagtttgagaagagaacgtcctcagcccaggtggaaggtggcgtccatagcctccattcgtaagtcaccctgtccttggtggggcctctgccatacctcatgcctcctttctcctgccctcacctcacaggtggtc

SEQ ID NO: 235385 - DNA, 201 bp, Homo sapiens
ccagggccagctacccacatttgacctctgcccttcttcagagccatgatgtactctggggagcttaagtttgagaagagaacgtcctcagcccaggtggaaggtggcgtccatagcctccattcgtaagtcaccctgtccttggtggggcctctgccatacctcatgcctcctttctcctgccctcacctcacaggtggt

SEQ ID NO: 235386 - DNA, 201 bp, Homo sapiens
atttacccaactctcaagaatgtcatgagaatcagtcacatgagcttaggcatactatggaagtgtcacatgctggtgccttggtttgttgaggtgtgaaygggtagggaaggatagtagtactggtagaaaaatatatttatttcccctgaaatccttgttcaggagactaccaataacttctattaattgtttttcttt

SEQ ID NO: 235387 - DNA, 201 bp, Homo sapiens
tatgggttctctcgatgccatggacaagcacctcagcagccagaacagatatttcaggtgggacaggcaagccagttaccccaccctaatcctgcactgayagtctcatctctgctgtgaccttgcccgtgtctctgcctctccctgcagtgaagctgacaaaatcaaagtggcccagggagtgtctggtgctgtgcagga

SEQ ID NO: 235388 - DNA, 201 bp, Homo sapiens
cccaggaggcggaggttgcagtgagctgagatcatactactgcactccagcctggtaacagcgagactctgtctaaaaaaaaaaaaaaaaaattagctggktgtggtggtggtgttcctgtagttctagctatttagcaggctgaggtgggaggatcacttgaggagtttgaagtttaaagtgccctatcatcttatcacg

SEQ ID NO: 235389 - DNA, 201 bp, Homo sapiens
ccacaccggaacccggtcccggcacgtgaccccgccggcggcgatgtcagtgatggtgggggactggctttccgaggctgaccaacactgtggtgctgccrtgtcattgtacttgggttgttttctttgtttgtttcttctttttttgagatggagtcttgcactgtggtccaggatggattctcctgccccagcctcctg

SEQ ID NO: 235390 - DNA, 201 bp, Homo sapiens
gcaatcctccacctcagcctcctgagtagctgagactacatgtgtgcaccactgtgaccagctgataacttaatttttttgtttgtttgtttgtttgtttkttttagacagagttacgctctgtcgcctaggctggagtgcattcgagtgatctcgggtcactgcagcctcgatctctgggctcaagcaatccttctacct

SEQ ID NO: 235391 - DNA, 201 bp, Homo sapiens
tagccagggtggtctcgatctcccgacctcgtgatccacccacctcagcctcccaaagtgctgggattacaggcgtgagccaccgtgcccggctttttttytctttttttttaaatggaaggcttaaagaatggattttgatggtttatagcaagtaactttttgaagcttttattttttctgacagctgaatatctagct

SEQ ID NO: 235392 - DNA, 201 bp, Homo sapiens
gactactcaagcaatcctcctgtttcagtctcttgagtagctgggactgcaggcatgcaccatcatcccaggctcccccccccccttttttttttttttttgagacagagtctcactttgtcgccaggctggagtgcaatggtgcgatcttggctcactgcaacctccgcctcccaggttcaagcgatcctcctgcctcag

SEQ ID NO: 235393 - DNA, 201 bp, Homo sapiens; identical to SEQ ID NO: 45088

SEQ ID NO: 235394 - DNA, 201 bp, Homo sapiens
agagacttggctttgagcaagacggtaattggtgacaaactttttaataaaacagtgggggaaagatgggttgctccctgagctaagaaagtacttattgwctaggtaaagggaggcttgggcctgtgggtggtggggaggaggggatgtctgcatgggtcactcagcggcttctgttgctattgggtcctctggccctga

SEQ ID NO: 235395 - DNA, 201 bp, Homo sapiens
ctccccagcagtgagggtctctctcttcctcttgtgctcttgctggggctggtggtccaggggtcttactccttggaggccatgtgggccatgaggtccaycaccctgttgctgtagccaaattcgttgtcatacctagaagatgaaaagagttgtcagggccctttttctgagccagccaccagagggcgccagaccctg

SEQ ID NO: 235396 - DNA, 201 bp, Homo sapiens
aggggagattcagtgtggtgggggactgagtgtggcagggactccccagcagtgagggtctctctcttcctcttgtgctcttgctggggctggtggtccargggtcttactccttggaggccatgtgggccatgaggtccaccaccctgttgctgtagccaaattcgttgtcatacctagaagatgaaaagagttgtcagg

SEQ ID NO: 235397 - DNA, 201 bp, Homo sapiens
cagaggagaccacctggtgctcagtgtagcccaggatgcccttgagggggccctccgacgcctgcttcaccaccttcttgatgtcatcatatttggcaggkttttctagacggcaggtcaggtccaccactgacacgttggcagtggggacacggaaggccatgccagtgagcttcccgttcagctcagggatgaccttgc

SEQ ID NO: 235398 - DNA, 201 bp, Homo sapiens
cgaacatgggggcatcagcagagggggcagagatgatgacccttttggctcccccctgcaaatgagcctacagcagagaagcagacagttatgaacccggstcctgcctttgcagggctgagtcagcttcccctcccgcgggccctcctgcactcaccccagccttctccatggtggtgaagacgccagtggactccacga

SEQ ID NO: 235399 - DNA, 201 bp, Homo sapiens
aagtggtcgttgagggcaatgccagccccagcgtcaaaggtggaggagtgggtgtcgctgttgaagtcagaggagaccacctggtgctcagtgtagcccargatgcccttgagggggccctccgacgcctgcttcaccaccttcttgatgtcatcatatttggcaggtttttctagacggcaggtcaggtccaccactgac

SEQ ID NO: 235400 - DNA, 201 bp, Homo sapiens
ccctgcactttttaagagccagtctctggccccagccacataccaggaaatgagcttgacaaagtggtcgttgagggcaatgccagccccagcgtcaaagrtggaggagtgggtgtcgctgttgaagtcagaggagaccacctggtgctcagtgtagcccaggatgcccttgagggggccctccgacgcctgcttcaccac

SEQ ID NO: 235401 - DNA, 201 bp, Homo sapiens
tgtggcagggactccccagcagtgagggtctctctcttcctcttgtgctcttgctggggctggtggtccaggggtcttactccttggaggccatgtgggcmatgaggtccaccaccctgttgctgtagccaaattcgttgtcatacctagaagatgaaaagagttgtcagggccctttttctgagccagccaccagagggc

SEQ ID NO: 235402 - DNA, 201 bp, Homo sapiens
cagaccctgcactttttaagagccagtctctggccccagccacataccaggaaatgagcttgacaaagtggtcgttgagggcaatgccagccccagcgtcraaggtggaggagtgggtgtcgctgttgaagtcagaggagaccacctggtgctcagtgtagcccaggatgcccttgagggggccctccgacgcctgcttca

SEQ ID NO: 235403 - DNA, 201 bp, Homo sapiens
caggctggccgcttctccacgggccctgccttcctcacctgatgatcttgaggctgttgtcatacttctcatggttcacacccatgacgaacatgggggcrtcagcagagggggcagagatgatgacccttttggctcccccctgcaaatgagcctacagcagagaagcagacagttatgaacccgggtcctgcctttgca

SEQ ID NO: 235404 - DNA, 201 bp, Homo sapiens
tggtcgttgagggcaatgccagccccagcgtcaaaggtggaggagtgggtgtcgctgttgaagtcagaggagaccacctggtgctcagtgtagcccaggaygcccttgagggggccctccgacgcctgcttcaccaccttcttgatgtcatcatatttggcaggtttttctagacggcaggtcaggtccaccactgacacg

SEQ ID NO: 235405 - DNA, 201 bp, Homo sapiens
agggcaatgccagccccagcgtcaaaggtggaggagtgggtgtcgctgttgaagtcagaggagaccacctggtgctcagtgtagcccaggatgcccttgarggggccctccgacgcctgcttcaccaccttcttgatgtcatcatatttggcaggtttttctagacggcaggtcaggtccaccactgacacgttggcagtg

SEQ ID NO: 235406 - DNA, 201 bp, Homo sapiens
gccccagccacataccaggaaatgagcttgacaaagtggtcgttgagggcaatgccagccccagcgtcaaaggtggaggagtgggtgtcgctgttgaagtmagaggagaccacctggtgctcagtgtagcccaggatgcccttgagggggccctccgacgcctgcttcaccaccttcttgatgtcatcatatttggcaggt

SEQ ID NO: 235407 - DNA, 201 bp, Homo sapiens
gtttactgaagaagacagcagtctgcagcttttctgcagctcagggtgggttgccctgctgccccagcttcctgggcagggacggatacccccagcacccmtgaaataaaactccagcaaccccaggatcgtagggaagagagtttggaatactcctttccccaaggggagggtacagtggatttgggtctcatctataaa

SEQ ID NO: 235408 - DNA, 201 bp, Homo sapiens
gtgctcgctgacgcaagtaccagcaacagaacgttttcgcctgatgcccctctgctgatcccactctgaaggccgggggtgagtgtggctcagccatcccrgctgggtttcctatcagcccaggatactcaccgtgtcacagctgtgtccccttgtcaggaagacctcagatgtgaccagagcactggcctcctacagaaa

SEQ ID NO: 235409 - DNA, 201 bp, Homo sapiens
ctccctttgtctcataaccatgtccaccaatgagaatgctaatacacaagctgcccatcttcacagatctaagaacaagggaaaggacagtacagtgagtrccttctgttgctttcttatggtgttatttaaatgggaagacatttggaaaggggtgaaaacttagggatctttttaaaaatgtcctcacttagcaacaaa

SEQ ID NO: 235410 - DNA, 201 bp, Homo sapiens
cccattccttgtcagcgatctctctaaggtaacgaagtcttaggatttaatcaagtcatttttagtatttatagaaagctgtgcttgataagcttcttcaygtgcaagaatcttgggttctactaggagtcctttgctgaacaatacccagtaacccctttacttaaggttgtatcaatagaaccttggtactttcagtca

SEQ ID NO: 235411 - DNA, 201 bp, Homo sapiens
ggcctcttgttaaaacttttggagtacagaatttctgaagtgctgagaaaaatataaggtaaccagcatcaacattttttccttttcagactcctgccctragagccatagggaatatcgtcactggtacagatgaacagactcaggttgtgattgatgcaggagcactcgccgtctttcccagcctgctcaccaacccca

SEQ ID NO: 235412 - DNA, 201 bp, Homo sapiens
atgtgggaccctagaccctagaagacttcaccccaggaggctctgcccatcccaagcatccgtgggtgactgggtctccacctcttggcaagcgctgactyactccctacctctgagagtccatgacccagggctccagagagactatcctcctgcccacctaaccaggtggcgaaatctctggggtcaggtggggcctta

SEQ ID NO: 235413 - DNA, 201 bp, Homo sapiens
aaacatgatgatatccctctagtgcacaggtgtggattcagtagatgcttgataattcagttcttatttggtactattattgacaaaggaaaacgataaargaaatatttttctcttcccccatcttttagctttctccctttgtctcataaccatgtccaccaatgagaatgctaatacacaagctgcccatcttcacag

SEQ ID NO: 235414 - DNA, 201 bp, Homo sapiens
ctccatccctgggcagcagcgctgtactcctgctatgtgctcagcctgcttcccatgcctgtggaagtcccatggaaacagcatggggcaggggaaagagygtgggaggccctcacccactgtgagtcaggaaagttgcttcacttctccgggtccagctttcccgtctataaaatgggccagtgattcctctgttcctgt

SEQ ID NO: 235415 - DNA, 201 bp, Homo sapiens
tgagtcaggaaagttgcttcacttctccgggtccagctttcccgtctataaaatgggccagtgattcctctgttcctgtggcctcctgagcagtggtgagrgctgcatgagggacccagagtctgggccacagatggccctgggtcagcatcgtgtgtgccctgagggcacctgatccagccttggcaggggccagaggag

SEQ ID NO: 235416 - DNA, 201 bp, Homo sapiens
aggtgtgctgctctctccccaggtgtgccaagtgcaagaccgtcttccaccagagctgccaggctgtggtgaagaagggctgcccccgctgtgctcgctgrcgcaagtaccagcaacagaacgttttcgcctgatgcccctctgctgatcccactctgaaggccgggggtgagtgtggctcagccatcccagctgggtttc

SEQ ID NO: 235417 - DNA, 201 bp, Homo sapiens
ccgtcttccaccagagctgccaggctgtggtgaagaagggctgcccccgctgtgctcgctgacgcaagtaccagcaacagaacgttttcgcctgatgcccmtctgctgatcccactctgaaggccgggggtgagtgtggctcagccatcccagctgggtttcctatcagcccaggatactcaccgtgtcacagctgtgtcc

SEQ ID NO: 235418 - DNA, 201 bp, Homo sapiens
catccacacccatgcacatgtgcacaaatgtacacacatgcaggcactcatgcacacgcacacacacacaagggcagtgcccagggcaaggcgtccacctrgaggaaacctgggcagagatcttcccattgggcctgggaaatgatcacatcttttgggggtgattttggggttttgttcatgtatctatttgttcactca

SEQ ID NO: 235419 - DNA, 201 bp, Homo sapiens
aggctgtggtgaagaagggctgcccccgctgtgctcgctgacgcaagtaccagcaacagaacgttttcgcctgatgcccctctgctgatcccactctgaargccgggggtgagtgtggctcagccatcccagctgggtttcctatcagcccaggatactcaccgtgtcacagctgtgtccccttgtcaggaagacctcaga

SEQ ID NO: 235420 - DNA, 201 bp, Homo sapiens
agtttctgacgcagatccgggcccagcccctcatcaacctgcagatggtgaacgcgtctctgtacgagcatgtggagcggatgcacctcattgggaggagmcgggagcagctgaagctcctgggggattacctgggcctgtgccggagtggcgccctgaaggagctcagcaagaggtgagcaacctctacgtgtatgcgtg

SEQ ID NO: 235421 - DNA, 201 bp, Homo sapiens
atctatttgttcactcaaaaacatggactgagaacatactaagcactgcacacctggcgaggcatgtgggctccaacactgagcagggcagagccagggcygacccgctggaagcctctggcctggcagggaagacaagtgggaaagccagtaactccatccgggggtgagggtgagagggagacaggtgggaaagccagc

SEQ ID NO: 235422 - DNA, 201 bp, Homo sapiens
gtgcaagaatcttgggttctactaggagtcctttgctgaacaatacccagtaacccctttacttaaggttgtatcaatagaaccttggtactttcagtcaycgtttttgtgaaaaagtactcttggaatcttatttgtgcaactgttctgaaataaaaccatttccttatgtttaattggcagattttgagacacaaaagg

SEQ ID NO: 235423 - DNA, 201 bp, Homo sapiens
gcaaggatgattctaccttgggtgacagaagtagatgtcactcagatgctgagaatggggagggaggagggagaggacaaatttgatttggggcacacagytttcaacatgtacaaaggacatccagatggcagtgggctatgtgagcctggagactgtgctgcgagttgttgatctacagccagtggggctgggctctcc

SEQ ID NO: 235424 - DNA, 201 bp, Homo sapiens
cagaaggaagctacgtggacaatgtcaaacatcacagccagccgccaggaccagatacagcaagttgtgaatcatggattagtcccattccttgtcagcgwtctctctaaggtaacgaagtcttaggatttaatcaagtcatttttagtatttatagaaagctgtgcttgataagcttcttcatgtgcaagaatcttgggt

SEQ ID NO: 235425 - DNA, 201 bp, Homo sapiens; identical to SEQ ID NO: 45160

SEQ ID NO: 235426 - DNA, 201 bp, Homo sapiens; identical to SEQ ID NO: 45161

SEQ ID NO: 235427 - DNA, 201 bp, Homo sapiens
accagcaggtgtgctgctctctccccaggtgtgccaagtgcaagaccgtcttccaccagagctgccaggctgtggtgaagaagggctgcccccgctgtgcycgctgacgcaagtaccagcaacagaacgttttcgcctgatgcccctctgctgatcccactctgaaggccgggggtgagtgtggctcagccatcccagctg

SEQ ID NO: 235428 - DNA, 201 bp, Homo sapiens
gcaggtgtgctgctctctccccaggtgtgccaagtgcaagaccgtcttccaccagagctgccaggctgtggtgaagaagggctgcccccgctgtgctcgcygacgcaagtaccagcaacagaacgttttcgcctgatgcccctctgctgatcccactctgaaggccgggggtgagtgtggctcagccatcccagctgggtt

SEQ ID NO: 235429 - DNA, 201 bp, Homo sapiens
ggctcaccagcgtcccggcgcctccgttagggctggccaaacactgtggaaaggggacttggggaacattttcaattccacattcctgattaaaaggtctrgttttttaaggtgggtttttcccattcatatttcaacagaaagtattttttattcttgaccgtatgcgagtcacccatgaaatccagacattttcacccc

SEQ ID NO: 235430 - DNA, 201 bp, Homo sapiens
ccttggtcaaggagccaggtacctgcacaggcatgcagacctgtgtagaccagatgcctgtggggtgggttgtggaccccagccccattcacccatccctrccctgctgagagagtttgttcatcggctttacagacctgtctctgtgggcaccaggggcagccctgtctctctctccctgaccctcctgctccatccctg

SEQ ID NO: 235431 - DNA, 201 bp, Homo sapiens
caggcaggtggaggctgtgcatagcttctcccggtcatggcgcacacctgtgcccagatgccaatacctcctaagccaggagctgggttatgcacctgccrtgaccacaagcctggcctggtcagagccctcattgccccatccctgagtgggcaggagtctggcctggggagggcttaggcctgtgaggattcttcccga

SEQ ID NO: 235432 - DNA, 201 bp, Homo sapiens
acacttggatgtctgtccctcggccaaaccaggggccacaggagggcagaggccatatcctgtgcattactgtccccagcactgtccctggtatgtgactktggcaataatgacaacagcctgcatctctaggcatttaccaggtggacaagggtgcaggctcaggagccaggcccctgtgttcaaactccagctctccca

SEQ ID NO: 235433 - DNA, 201 bp, Homo sapiens
ccctccgcagatcgcagatgaggtatatgaaggattcctcaaggccctgattgaatttgcctcccagcatgtctaccactgcgacctgtgcacccagcgcrgcttcatctgccagatctgccagcaccacgacatcatcttcccctctgagtttgacaccacagtcaggtatgcgggacacccagccagctgcctcccagc

SEQ ID NO: 235434 - DNA, 201 bp, Homo sapiens
agcccaggatactcaccgtgtcacagctgtgtccccttgtcaggaagacctcagatgtgaccagagcactggcctcctacagaaagcccaggaagtccccrtgatgtcccctggccctccccccacccctctgctgcaggaggcgtggccaccaccagatgctccctgtctggggcaggcagggccgtttactcaccaggc

SEQ ID NO: 235435 - DNA, 201 bp, Homo sapiens
ccaggatactcaccgtgtcacagctgtgtccccttgtcaggaagacctcagatgtgaccagagcactggcctcctacagaaagcccaggaagtccccatgrtgtcccctggccctccccccacccctctgctgcaggaggcgtggccaccaccagatgctccctgtctggggcaggcagggccgtttactcaccaggccct

SEQ ID NO: 235436 - DNA, 201 bp, Homo sapiens
ggtctccacctcttggcaagcgctgactcactccctacctctgagagtccatgacccagggctccagagagactatcctcctgcccacctaaccaggtggygaaatctctggggtcaggtggggccttatcaccctccttggtcaaggagccaggtacctgcacaggcatgcagacctgtgtagaccagatgcctgtgggg

SEQ ID NO: 235437 - DNA, 201 bp, Homo sapiens
ctggggcaggcagggccgtttactcaccaggccctggctcaccagcgtcccggcgcctccgttagggctggccaaacactgtggaaaggggacttggggarcattttcaattccacattcctgattaaaaggtctggttttttaaggtgggtttttcccattcatatttcaacagaaagtattttttattcttgaccgtat

SEQ ID NO: 235438 - DNA, 201 bp, Homo sapiens
cattttacagatgaggaaactgagtcacagagagggataagtttcaccaattcatacaggtataaagtggtggaggcaggattcaattccattctgactcygaagccagactttttttcccctacacaatttatcagaatttgaaaaggttgctggatacgacagtcaaataaatcaatttcatttctatatatcagcaaa

SEQ ID NO: 235439 - DNA, 201 bp, Homo sapiens
actgggccagctgctttatttggattatctcatttaagtctcataacaaccctgtagagataggcgctactattatcatctctgttgataggggaggaaaytgaagcacagagctggtaagtacctggttggtgtctgctactgagctcacacagctagtaagtggcagaggcagaattttccttttttgtttgtttgttt

SEQ ID NO: 235440 - DNA, 201 bp, Homo sapiens
gccccagagcctttgctcataggcaggaccctagagggcatccctctagggtcttattcaaggttgagtgacatccccctgcccatgttccattgttagcycctcccactccccccaccatccagaggcagatggcatcccatcaccatgggacccttaggtgacctgtgagggggttgtcctgctgcagaaggccagagc

SEQ ID NO: 235441 - DNA, 201 bp, Homo sapiens; identical to SEQ ID NO: 45173

SEQ ID NO: 235442 - DNA, 201 bp, Homo sapiens
aggcccccacaccaaggcccttggactaagcggggcagggacagcctccaggtagagctgttcgccggggcgcctgcagagcccgcatcccaaccctgacmccggggccggggcgcaggctcctggagggaggcgtccaggcgggacagggcccggggagcggcaggaaatgggctgctcttcccacttgactgacgggaa

SEQ ID NO: 235443 - DNA, 201 bp, Homo sapiens
ggaccctagagggcatccctctagggtcttattcaaggttgagtgacatccccctgcccatgttccattgttagctcctcccactccccccaccatccagrggcagatggcatcccatcaccatgggacccttaggtgacctgtgagggggttgtcctgctgcagaaggccagagcaagaagctgagccttggtttgggag

SEQ ID NO: 235444 - DNA, 201 bp, Homo sapiens
gcaagaagctgagccttggtttgggagctgtcctgttggcacagactggagggaagcctgtttcaagcgtctgaaaggaagcagtctgcggttggccccgsgaggatgggagaagctaggcagaacagagcttcctgcagaaaacacctgcaagcctcgcttgacctctcccccgcctgccccagcactcacactttgctc

SEQ ID NO: 235445 - DNA, 201 bp, Homo sapiens; identical to SEQ ID NO: 45180

SEQ ID NO: 235446 - DNA, 201 bp, Homo sapiens
ccatcttcacagatctaagaacaagggaaaggacagtacagtgagtaccttctgttgctttcttatggtgttatttaaatgggaagacatttggaaagggrtgaaaacttagggatctttttaaaaatgtcctcacttagcaacaaaaactgatgtggtaggtgaaacagcatgttatcttttctcaaggaaacgaggcgt

SEQ ID NO: 235447 - DNA, 201 bp, Homo sapiens; identical to SEQ ID NO: 45185

SEQ ID NO: 235448 - DNA, 201 bp, Homo sapiens
aatatttttctcttcccccatcttttagctttctccctttgtctcataaccatgtccaccaatgagaatgctaatacacaagctgcccatcttcacagatytaagaacaagggaaaggacagtacagtgagtaccttctgttgctttcttatggtgttatttaaatgggaagacatttggaaaggggtgaaaacttaggga

SEQ ID NO: 235449 - DNA, 201 bp, Homo sapiens
cccgtccctctcctggcacctcccactgatgggccacaggctggctagtcactgcgctgctcagggagtcccagcctgcttcattttcttcttgctctacygtcctgttctttcagagcaggggcatggtttccttccaaatatttctgctgcttttctaagtgtacaccctttttttttaattacaaaaatgggctcgtg

SEQ ID NO: 235450 - DNA, 201 bp, Homo sapiens
gggagacaagaggtcagaggccccctcagcccccaaatacaggggcaggtctcctgagggccagtttagtcccccaaccctcaaggggacaacagggccayaccaggcactcacacagcagctgatagcagctcacatttactggggatgtgccacctgccaggccctatgccaggagctctcctggaatacctcttttaa

SEQ ID NO: 235451 - DNA, 201 bp, Homo sapiens
acttaacttacaagcgaggaccaccccctccccccccaggcccagcgtcctctggtgtaagcacaatacctaaggattagggttgtgagccttaaatgaaktaaggcttcgaagcgcttggcagcagcagggggtccacccagactgggtcatcctcgtttggcttccctgggtctgcgccgccttcactctggctcctgc

SEQ ID NO: 235452 - DNA, 201 bp, Homo sapiens
aagctaggcagaacagagcttcctgcagaaaacacctgcaagcctcgcttgacctctcccccgcctgccccagcactcacactttgctcttcagcctgtgraggccaggctctgagggggccaggactccagggcttgcaagaaagggttcctcgcctgtgggtgtgaatgctgcgggggcaactctcaccatggctgcca

SEQ ID NO: 235453 - DNA, 201 bp, Homo sapiens
tctccccaggtgtgccaagtgcaagaccgtcttccaccagagctgccaggctgtggtgaagaagggctgcccccgctgtgctcgctgacgcaagtaccagsaacagaacgttttcgcctgatgcccctctgctgatcccactctgaaggccgggggtgagtgtggctcagccatcccagctgggtttcctatcagcccagg

SEQ ID NO: 235454 - DNA, 201 bp, Homo sapiens
tgtggcacaatcacggctcactgcagcctccaccttctgagttcaagtgatcctcccacctcagcctcctgagaagctggaaatacaggcacacgccaccrggcccagctaactttttttgtattttttggagagacaaagtttcgccatgttgcctaggctgatcttaaatttctgggctcaagcgatccgcctgcctca

SEQ ID NO: 235455 - DNA, 201 bp, Homo sapiens; identical to SEQ ID NO: 45172

SEQ ID NO: 235456 - DNA, 201 bp, Homo sapiens
ctggtttagtgtgtcctgggtcctggctgtgctggggtctgttagcagcggctggtttagtgtgtcctgggtcctaactttgctggagtctggtagcgacrgctggtttagtgtgtcctgggtcccaactgtgctggagtctagtagcggcggctggtttagtgcgtcctgggtcccggctgtgctggggtctggtggcag

SEQ ID NO: 235457 - DNA, 201 bp, Homo sapiens; identical to SEQ ID NO: 45174

SEQ ID NO: 235458 - DNA, 201 bp, Homo sapiens
agctgtgcttgataagcttcttcatgtgcaagaatcttgggttctactaggagtcctttgctgaacaatacccagtaacccctttacttaaggttgtatcratagaaccttggtactttcagtcaccgtttttgtgaaaaagtactcttggaatcttatttgtgcaactgttctgaaataaaaccatttccttatgtttaa

SEQ ID NO: 235459 - DNA, 201 bp, Homo sapiens; identical to SEQ ID NO: 45181

SEQ ID NO: 235460 - DNA, 201 bp, Homo sapiens; identical to SEQ ID NO: 45182

SEQ ID NO: 235461 - DNA, 201 bp, Homo sapiens; identical to SEQ ID NO: 45184

SEQ ID NO: 235462 - DNA, 201 bp, Homo sapiens
tggaagggggacagttatccgttggctaaaactattccatagtgctgaaaacatgatgatatccctctagtgcacaggtgtggattcagtagatgcttgayaattcagttcttatttggtactattattgacaaaggaaaacgataaaggaaatatttttctcttcccccatcttttagctttctccctttgtctcataac

SEQ ID NO: 235463 - DNA, 201 bp, Homo sapiens
gtgatcagctgctgagtcacccacccagctttggagctggatgcctgtgcagaacagaggtggcggtggcaggcaggtggaggctgtgcatagcttctccyggtcatggcgcacacctgtgcccagatgccaatacctcctaagccaggagctgggttatgcacctgccatgaccacaagcctggcctggtcagagccctc

SEQ ID NO: 235464 - DNA, 201 bp, Homo sapiens
gtgtgccaagtgcaagaccgtcttccaccagagctgccaggctgtggtgaagaagggctgcccccgctgtgctcgctgacgcaagtaccagcaacagaacrttttcgcctgatgcccctctgctgatcccactctgaaggccgggggtgagtgtggctcagccatcccagctgggtttcctatcagcccaggatactcacc

SEQ ID NO: 235465 - DNA, 201 bp, Homo sapiens
accagagctgccaggctgtggtgaagaagggctgcccccgctgtgctcgctgacgcaagtaccagcaacagaacgttttcgcctgatgcccctctgctgaycccactctgaaggccgggggtgagtgtggctcagccatcccagctgggtttcctatcagcccaggatactcaccgtgtcacagctgtgtccccttgtcag

SEQ ID NO: 235466 - DNA, 201 bp, Homo sapiens
gagctgccaggctgtggtgaagaagggctgcccccgctgtgctcgctgacgcaagtaccagcaacagaacgttttcgcctgatgcccctctgctgatcccrctctgaaggccgggggtgagtgtggctcagccatcccagctgggtttcctatcagcccaggatactcaccgtgtcacagctgtgtccccttgtcaggaag

SEQ ID NO: 235467 - DNA, 201 bp, Homo sapiens
attttgagacacaaaaggaagctgtatgggccgtggaacagttgaacagattgtgtaccttgttcactgtggcataatagaaccgttgatgaacctcttamctgcaaaagataccaagattattctggttatcctggatgccatttcaaatatctttcaggtaagtcctatcaaggtggctttgtttgaatttggacttga

SEQ ID NO: 235468 - DNA, 201 bp, Homo sapiens
tccttggtcaaggagccaggtacctgcacaggcatgcagacctgtgtagaccagatgcctgtggggtgggttgtggaccccagccccattcacccatcccygccctgctgagagagtttgttcatcggctttacagacctgtctctgtgggcaccaggggcagccctgtctctctctccctgaccctcctgctccatccct

SEQ ID NO: 235469 - DNA, 201 bp, Homo sapiens
atcccagctgggtttcctatcagcccaggatactcaccgtgtcacagctgtgtccccttgtcaggaagacctcagatgtgaccagagcactggcctcctavagaaagcccaggaagtccccatgatgtcccctggccctccccccacccctctgctgcaggaggcgtggccaccaccagatgctccctgtctggggcaggc

SEQ ID NO: 235470 - DNA, 201 bp, Homo sapiens
ccatcccagctgggtttcctatcagcccaggatactcaccgtgtcacagctgtgtccccttgtcaggaagacctcagatgtgaccagagcactggcctccyacagaaagcccaggaagtccccatgatgtcccctggccctccccccacccctctgctgcaggaggcgtggccaccaccagatgctccctgtctggggcag

SEQ ID NO: 235471 - DNA, 201 bp, Homo sapiens
ttcagaaggaagctacgtggacaatgtcaaacatcacagccagccgccaggaccagatacagcaagttgtgaatcatggattagtcccattccttgtcagygatctctctaaggtaacgaagtcttaggatttaatcaagtcatttttagtatttatagaaagctgtgcttgataagcttcttcatgtgcaagaatcttgg

SEQ ID NO: 235472 - DNA, 201 bp, Homo sapiens
tggctcagccatcccagctgggtttcctatcagcccaggatactcaccgtgtcacagctgtgtccccttgtcaggaagacctcagatgtgaccagagcacyggcctcctacagaaagcccaggaagtccccatgatgtcccctggccctccccccacccctctgctgcaggaggcgtggccaccaccagatgctccctgtc

SEQ ID NO: 235473 - DNA, 201 bp, Homo sapiens; identical to SEQ ID NO: 45178

SEQ ID NO: 235474 - DNA, 201 bp, Homo sapiens
tgacccaagtcaccaggagtttgccattgggctgtccctgggctggggggctggtacctcagggccccaggctttgggaaaagaagaggttgtccattgckgggggaggtgagagatgctggtggagctgggagacaagaggtcagaggccccctcagcccccaaatacaggggcaggtctcctgagggccagtttagtcc

SEQ ID NO: 235475 - DNA, 201 bp, Homo sapiens
ctgcagtggttggcagtgttcagcgcacattcctgtgtgttatttcactggagcctcacccaaggcctggggccaagtcatgggaagagctgagttaggaytggagaacagcagcttgacccaagtcaccaggagtttgccattgggctgtccctgggctggggggctggtacctcagggccccaggctttgggaaaagaa

SEQ ID NO: 235476 - DNA, 201 bp, Homo sapiens
gattgatgcaggagcactcgccgtctttcccagcctgctcaccaaccccaaaactaacattcagaaggaagctacgtggacaatgtcaaacatcacagccrgccgccaggaccagatacagcaagttgtgaatcatggattagtcccattccttgtcagcgatctctctaaggtaacgaagtcttaggatttaatcaagtc

SEQ ID NO: 235477 - DNA, 201 bp, Homo sapiens
ctccctgggggtgatcagctgctgagtcacccacccagctttggagctggatgcctgtgcagaacagaggtggcggtggcaggcaggtggaggctgtgcayagcttctcccggtcatggcgcacacctgtgcccagatgccaatacctcctaagccaggagctgggttatgcacctgccatgaccacaagcctggcctggt

SEQ ID NO: 235478 - DNA, 201 bp, Homo sapiens
gctcttgctttccttggccttcgattgttttctccatcacttctttccaagccctaatttacacatttctattttaatatctctgacacacacacacacamtactatcagcacatggttttctaactactccatttcaccattcttctttcctttctttccttcctgtattcttgcttactgttctcatctcatcgtcttc

SEQ ID NO: 235479 - DNA, 201 bp, Homo sapiens
tacattattatttggatcaccacagtaaaggggaggctccaaggaaatgctaaattcacagaatatcaatcttgtctaaatgactatagaccacttagcastattatttaagtgcctttctagaggggagtgttacggctcactgttacttaattaaaataatgcaactgggtggatgtattataattattgctcttacta

SEQ ID NO: 235480 - DNA, 201 bp, Homo sapiens
ttcttgaacagcaatattgatgttttatttgctggatgatttgtcttatggaagagttgcagtacagataatcaagaactatttctattaataatgtatakgaagagatgaagccagcttctctggaaaatcatagactattgggcactgagttccatttttatgataaactacagactttcactttgaggtaaatactta

SEQ ID NO: 235481 - DNA, 201 bp, Homo sapiens
ggcatatgcgatgatttcctgtttgcaaagggaaaggaaacttctaatatatatctcatacattattatttggatcaccacagtaaaggggaggctccaargaaatgctaaattcacagaatatcaatcttgtctaaatgactatagaccacttagcactattatttaagtgcctttctagaggggagtgttacggctcac

SEQ ID NO: 235482 - DNA, 201 bp, Homo sapiens
aaaaagagattgggccttgattttcatgttaaagtcttatgggaattgaaaagcttttataaacaagtaactgaaatacttgtcaattattattatgtaarctggacattcttattccttggggaaaaccccggatgtaaattgtcgaaatgtgtttaagaatcttttgcatattgttactgactgaactgagatctgttt

SEQ ID NO: 235483 - DNA, 201 bp, Homo sapiens
agtggccaggaatacctcacccactgtgaggtactagagagtatgctttgctcaacttttgatgaaaaatcgtggccgggcgcggtggctcacacctgtartcccagcacttcaggaggccgaggtgggcggatcacgaggtccggagatggagaccatcctggctagcatggtgaaaccccgtctctactaaaattacaa

SEQ ID NO: 235484 - DNA, 201 bp, Homo sapiens
gcagaaacagatatgggaatccaaccctcttttattaaactagatgttacaaagatctgtaatcatgtaaaataatgccaatctccaaactaatattttttggaaaatatagtttttttatagaaatgttatttatgcttatatgttagatttacaataataataattatagtaactagtgttataaaactgatataataa

SEQ ID NO: 235485 - DNA, 201 bp, Homo sapiens
tgggcaaggaaaagcagctatggcagcaacatggttggcaatactactagacctgaagaggcaaaggaatgaaggagtgaccagacctggagacgtagttraggcctgtttgtagcagctgtggctatctgtggaagcagccattgctaacccagctagaagaaagccaggggataaattccctcatttcactcttctctg

SEQ ID NO: 235486 - DNA, 201 bp, Homo sapiens
caggatataactcttcatttcttaatgaaatttctagcctatttcatggttcacattttgactataacctttgaggttagttagtttttttttttttttttaagacagagtctcactctgtcacccaggttggagtgcagtggcatgatctcggctcactgcaacttctgcctcgtgggttcaagcaattctcttgcctca

SEQ ID NO: 235487 - DNA, 201 bp, Homo sapiens
caatcttctttactcttgaaagctaaattcatctcctatttctctaagaaaataaaggccctcaggaatgcacaccattaagtcttttccccatcctcccycttcatccctaagctgtatctttaataatttactctcctgcatcagaaaacaattgctctttttccttttcaaagctgaaggtttttccagtcccattcc

SEQ ID NO: 235488 - DNA, 201 bp, Homo sapiens; identical to SEQ ID NO: 45237

SEQ ID NO: 235489 - DNA, 201 bp, Homo sapiens
ggcttgttaagcagtgatggaacttgctaaatgtgaggtatggggtggaaactcagtttgttagagagtgggagggaaagaacttaagaaggaacagaggrcagcaaggattgaagtgaacgaagagaggacagtgtaggaaagtgttaaggaagggaacgtctcaggaaagagggagtggtgaactggtctaatggtagg

SEQ ID NO: 235490 - DNA, 201 bp, Homo sapiens
agcctcataacttttgcctcccatgatctttttcttatgaaatatgtttaagatatgctacaacaaagcaagagaatcaattaagaaagggggtggcatgrggtgaggaaacagtgactccagcccaagagagtaatcccaggatgcagctgagcagcagacctgacaaacaatcagccttgagtgggtgacaccacgaag

SEQ ID NO: 235491 - DNA, 201 bp, Homo sapiens
ggccaaagccgtctattgcaaaatataaatcttcacattatgagctcactccagtctcccatttggctggctttgtagtcagttgttaagtctcccttctsatatgtaaaaagggcagtttgcgaaaggcatattttctggaattatacaaaaaagtaatgaacttctgaagaccttagatgtaaaggattaagcacattc

SEQ ID NO: 235492 - DNA, 201 bp, Homo sapiens
tgccctccatataaaataggccaaatccccaaacggaaatggccaggttaacacagaacgtaagttgggtgtggtgggagctgtagatttaggaatatcgkctggaaggagaaactttgagctaggagagaagtgaggcttgttaagcagtgatggaacttgctaaatgtgaggtatggggtggaaactcagtttgttaga

SEQ ID NO: 235493 - DNA, 201 bp, Homo sapiens
ttgttttaaaagtaagtagcggtggcatgattccttcttgtagacgttaatgtgactgctgcacaagaagtgcacattctcagccctaggctacaagatactgttggcaagtctgcgagtaccaatacatacttaaatgtttcataagaggatgtttcctcaagtcatgctaactattcctggccaccgtgggagcaactg

SEQ ID NO: 235494 - DNA, 201 bp, Homo sapiens
ctaggaaagaattcatatttgtctgattccaaaagtcaactcccacccacctcagaaaacctggttatttaacctaaatgtgaatattctcactactatgratgatgtttctcacttatatgttatatttcttttcagactgtttatgaccagtggttcatcaccctttttaacattgtttacacatcactgcctgtttta

SEQ ID NO: 235495 - DNA, 201 bp, Homo sapiens
cagactggccagattctaaaacctatattttttttcatgatgtcatgtggctcttttgagcattcttggaaaacaaacaaaatacaaataaaacaaaaaamcaatcaaccaaccaaacaacaacaacaaaacaaaccctaatcactttgcctttcctcatataaccactggtaaagttcttatattctaaagacaaaagta

SEQ ID NO: 235496 - DNA, 201 bp, Homo sapiens
atctctttgtaactcaatatggcatgatgtattgaaaagcattgttgccgatcctgtaaagttgaagggagaatcatctatcattgagaatggaatggagyattttttaggattcagtgaaaaatcaggcaaaaatgtccatttgagagattatccacaaccttgagcttctctagggtaggggtcctttctcttgattgt

SEQ ID NO: 235497 - DNA, 201 bp, Homo sapiens
cttgaacctgggaagtggatgttgcagtgagccgagactgtgccattgcactccatcctgcccgggcaacaagaaaaactccatctaaaaaaaaaaaaaamcaaaaaactcatccaaggcctgttgcagtagcctatgcctataatctcagcactttgggaggccaaggcaagcagatcacttgagagcagaaatttgaga

SEQ ID NO: 235498 - DNA, 201 bp, Homo sapiens
gagagagagagagagagagagagagagagaggccgggcacagtgactcatgcctgtagtcccaacactagtttgggaggccaaggtgggcagatcacaagktcaggggttcgagaccagcctggccaatatggtgaaaccctgtctctattaaaaatacaaaagttaggcatgatggtgggcacctgtagtcccagctact

SEQ ID NO: 235499 - DNA, 201 bp, Homo sapiens
aaaatcactttgaagtttatcaagatactcaggcagattaagcaagagtgtggaatgacaatgaaggcattaatcaggagtcctggaaaatactttttttwaaatttcattttattattattatactttaagttttagggtacatgtgcacaatgtgcaggttagttacatatgtatacatgtgccatgctggtgtgctgc

SEQ ID NO: 235500 - DNA, 201 bp, Homo sapiens
atatatatacacacacacatatatatatgcgtatatgtatagtgtgtgtgtgtgtgtgtgtgtgtgtgtgtgtatatatatatatatatatatatatatakagagagagagagagagagagagagagagagagagagagagaggccgggcacagtgactcatgcctgtagtcccaacactagtttgggaggccaaggtggg

SEQ ID NO: 235501 - DNA, 201 bp, Homo sapiens
aggtgcccgccaccacgcctggctaattttttgtatttttcgtagagatggggtttcaccatgttagccaggatggtctcgatctcctgacatcatgatcygcctgcctcggcctcccaaagtgctgggattacaggcgtgagccactgcgcccggcccatgaggactctttcattaaactctcatttttatgggtcctaa

SEQ ID NO: 235502 - DNA, 201 bp, Homo sapiens
atttttcaattgtatcagaatgtgttcttggagtcaactcaggaaatcttggaggctgagggactccttttctttaaagctctccccactcattgttcttkcctcatgtctttaatgaattgctttggcttccaactacatggaccagattatgaagaatgaaagaaaattaggaaaggaagaagcttaagttattgattt

SEQ ID NO: 235503 - DNA, 201 bp, Homo sapiens
tattttgaggtctttgtacagttttaatttttatttcagtgcagaaatatccttgagtaatttcttcagaaaggatattgagatgttatactttttagctyaatgttttctgtctttgcctttacatttacatgatatattggacgagcataagatccttgagtcagtctttttctttaggaactttgttgttgcttcact

SEQ ID NO: 235504 - DNA, 201 bp, Homo sapiens
tgttttgtattttagtagagacagggtttcaccatgttggccaggatggtctcaatctcctgacttcgtgatccacctaccttggcttctcaaaatgctgsgattacaagcatgagccaccacacccggcctcatcaatgttttctaattttcagtgtgcaagggttttgagagcccccagctcaaactggggctccagcg

SEQ ID NO: 235505 - DNA, 201 bp, Homo sapiens
tcagtctcctgattatgtgtcattcctcttaatatgcctgggctgcttacagatatcacctttggttctaagaccataaggtcagtgacctcactggccasttctgtatggtttatttttggctatgttatattttgtgactttgtagcaacaaaccccacaaagcattccttgccaggatgcatttgactttgtcagctc

SEQ ID NO: 235506 - DNA, 201 bp, Homo sapiens
gctgtaacacaacttgtggcgcagttgggtaagaggcagatcagatatgtgaacccaggttttccaaaatctggtcttttaaggcctattatagctcactmacttttttccatagcttttgtgccccttggctgatggttctcaaactttacctcccatcagcgtcaccaggagggcttgttacaatacagattgctgggc

SEQ ID NO: 235507 - DNA, 201 bp, Homo sapiens
gattgtcacacagctgtaacacaacttgtggcgcagttgggtaagaggcagatcagatatgtgaacccaggttttccaaaatctggtcttttaaggcctaktatagctcactcacttttttccatagcttttgtgccccttggctgatggttctcaaactttacctcccatcagcgtcaccaggagggcttgttacaatac

SEQ ID NO: 235508 - DNA, 201 bp, Homo sapiens
cctatctagtgttgaaagtgaaatattgacacctcttactattattgtaatgctgtctaagtctcccttcagttctgtcaatggttgcttcatatatttcratgatctgatgttgggggcatgtagacttataattgctacatcatcctggtggattgacccttttatgaaatgtccatatttgtctcttgtaatggtttt

SEQ ID NO: 235509 - DNA, 201 bp, Homo sapiens
cttgcaagttcatgaatgtatttaagaatattaaaatgcttttatagttgtttgtagcagttgagattggtcctgacacccattccaccatgttaccagargtagaacttatgttatttcgtgggtagatcaagtaattgctttaagttttttccttttgtgaatttcaaaaattcattcatgtctattgtattaagtgga

SEQ ID NO: 235510 - DNA, 201 bp, Homo sapiens
aattgcattcagttctgctgtgacatttgttagctttggtgttagtttgttctgctagctttggggttaattttttcttgttcttttttttgtaggtatgygttaagtcattaattgagatctttctaactttttaaggaaattgtttagcattataaactttccccttattactgcttttgcctcatcccagagattttg

SEQ ID NO: 235511 - DNA, 201 bp, Homo sapiens
ggggccttttacaacgtggctggagaagatgggcaacatattgctgactaccagtcctttgcagttaccatggccacatctttggtcattgtggtcagtgwgcaggtaacgctgtcggtgtaagcaccttaacttgatgggtttacaacttttactatttcattgttgattgattttgtctacttgttggggggaaataat

SEQ ID NO: 235512 - DNA, 201 bp, Homo sapiens
attcttcccaagtagctgggactacagacgcctgccaccacgcccagctaattgtatttttagtagagatgtggtttcaccatgttggtcaggctggtctygagcttctgctcaggtgatccacccgccttggcgtcctaaagtgctgggattacaggtgtgagccaccgtgcccaacctggatctaggttttttgaggtc

SEQ ID NO: 235513 - DNA, 201 bp, Homo sapiens
cttctacattgggtgggagtgtgctgcagtttcaaaaaggataaccatggaaggctgaattaagaagacatatttgattgcagatttgaaagaagtgaggyggcagccatgtaaatacttgagcaataagcatgccaggcgagggaacagtaagtgcaaaggccatgagatgagaatggacctggtgtggtcaaggaacaa

SEQ ID NO: 235514 - DNA, 201 bp, Homo sapiens
gattgcaaaaattttttcccattctgtaggctgtctgttcactctgatgatagtttattttgctgtgcagaagctctttagtttaattagatcccatttgwcaacttttacttttgttgcaattgcttttgatatttttgtcatgaaatctttgcccatgcctatgtcttgaatggtactgcctagattttcttttagggt

SEQ ID NO: 235515 - DNA, 201 bp, Homo sapiens
atgcagtgtttggtttcctgttcctgtgttagtttgctgaggatgatggattccagctctatccatgtcccggcaaaggacatgacctcattccttttcayggctgcatagtattccatagtgtatatgtaccacattttctttacccagtctatcactgatgggcattaggctaattccgtgtcttttctattgtgatta

SEQ ID NO: 235516 - DNA, 201 bp, Homo sapiens
atttctgcccgtaggtctttgaggaatcgccatactgacttccacaatggttggagtaatttatattcccaccaacagtgtaaaaacattcctgtttctcragatcgcgccattgcactccagcctgggagacagagtgagactctgtctcaaaaaaaagaaagaaagaaaaaaaaaagttcctgtttctccacagcctca

SEQ ID NO: 235517 - DNA, 201 bp, Homo sapiens
tctttttctgtgatgttcagctagtcaatttaggggatttacatgactaaacaaaaagtctccttttgattccattgcagttaatgcttgaatgtgctttsaccttttgtgatgttatgtgccagttcattaactggacaccttcaccagtcagggtcttggcaaaacacagaggttatcctgaaattgggtggattggag

SEQ ID NO: 235518 - DNA, 201 bp, Homo sapiens
caaatttcttttttgagccagtggctattcaagaatactatttaatttccacattttggtgaggattccacttttccttttgctattgatttctagtttcwtcacattgtggtcagaaaatatatttgacataatcttaatcttaaatttgttgagatttcttttgtgctctaacatgtgatctattcttggcaatagtct

SEQ ID NO: 235519 - DNA, 201 bp, Homo sapiens
gtttctagaaatagaattgctaaatcaaaaggtatctgcatttgtaatttgataaatattgcaaattgccttctttagaatttataacaatttaccctgasacaaacaagtgtaagagtgtctgatttcccccactgtcaccaacacaatgttttatcaaagtttatgatctttgatgagattatatgaaaaatgggtaca

SEQ ID NO: 235520 - DNA, 201 bp, Homo sapiens
gcaataccttgtctctgcaaaaaattaaaaattagctgggcatggtggcatggttctgtactactcaggagactgagctcggaggatagcttgagcccagraggtcaaggttgcagtgagctatgattgtgccattgtactccagcctgtgtgacagagtgagaccctatctaaaaaaaaaaaaaaaaaaaaaaaaaaaaa

SEQ ID NO: 235521 - DNA, 201 bp, Homo sapiens
tgttttataaatttgggagctcaagtgttaggtgcatatatatttaacattgtgataatctccttttggactagtccttttatcattatataatttccctytttgtcttttttaactgctgttgctttaaggtttcttttgtctgttatgagaatagctacttctgcttgcttttgttgtccatgtgcatagaatatcttt

SEQ ID NO: 235522 - DNA, 201 bp, Homo sapiens
taacatacaacccaacaatttcacccctgggcatttatcccagagaaatgaagacatgtttgtacaaaaacctgtacatgaatgtttatggtggctttatwcataacatccagaaatgaaaacaacttgaatatccttcaataagtcaatggttgaataaattgtggtacatccataccatggaatactacttagcaatga

SEQ ID NO: 235523 - DNA, 201 bp, Homo sapiens
tgctgtctatcttgtttcttaggtctagtagtaattgttttataaatttgggagctcaagtgttaggtgcatatatatttaacattgtgataatctccttktggactagtccttttatcattatataatttccctctttgtcttttttaactgctgttgctttaaggtttcttttgtctgttatgagaatagctacttctg

SEQ ID NO: 235524 - DNA, 201 bp, Homo sapiens
ggcatcattgcttgaaatcagtcatggaggaatatttataccatggaaattggcaaatgctacaaatcaaggcttttttttgtttgtttgtttgtttgttttgagacggagtcttgctttgtcacccaggctggagtgcagtggcgtgatcttggcttactgcaacctcagcctctcgggttcatgccactctcctgcctc

SEQ ID NO: 235525 - DNA, 201 bp, Homo sapiens
atacatttgaaaagagaaaaattctcaaataaataatctcatcattcatctaaaaaccctagaaaacagcaaaataaaccccaaagaagcataagaaaggrgataataagataagagcagaaataaatagacttgaaaacaaaaaaaataaagaaaatcaacgacacagagctagttctttggaaacatcaatacaagtga

SEQ ID NO: 235526 - DNA, 201 bp, Homo sapiens
ttttgccacatgtgcttccttactgtctgtctctttttctatacaaacacatgccctcatatgtacaaacacacacgtggggtctttttttttttttttttcaaatttcagtaggtttttggggaataggtagtgtttggttacatgagtaagttctttagtggtgatttctgagatttggtgcacccatcacctgagcag

SEQ ID NO: 235527 - DNA, 201 bp, Homo sapiens
tggcatcattgcttgaaatcagtcatggaggaatatttataccatggaaattggcaaatgctacaaatcaaggcttttttttgtttgtttgtttgtttgttttgagacggagtcttgctttgtcacccaggctggagtgcagtggcgtgatcttggcttactgcaacctcagcctctcgggttcatgccactctcctgcct

SEQ ID NO: 235528 - DNA, 201 bp, Homo sapiens
gtggcatcattgcttgaaatcagtcatggaggaatatttataccatggaaattggcaaatgctacaaatcaaggcttttttttgtttgtttgtttgtttgttttgagacggagtcttgctttgtcacccaggctggagtgcagtggcgtgatcttggcttactgcaacctcagcctctcgggttcatgccactctcctgcc

SEQ ID NO: 235529 - DNA, 201 bp, Homo sapiens
aagttcacgtctgcagcctttaataaagttgcccttacatttctatgcactttcacaacatcattgggaagcataggacattgatgatgtgtgtgaaaatwtgacaagccagccatgggtcttgtggggaaataacaattttctcccagatatgctttattctttattatctccatattcagatgtcttgcattctttttt

SEQ ID NO: 235530 - DNA, 201 bp, Homo sapiens
agtggcatcattgcttgaaatcagtcatggaggaatatttataccatggaaattggcaaatgctacaaatcaaggcttttttttgtttgtttgtttgtttgttttgagacggagtcttgctttgtcacccaggctggagtgcagtggcgtgatcttggcttactgcaacctcagcctctcgggttcatgccactctcctgc

SEQ ID NO: 235531 - DNA, 201 bp, Homo sapiens
cctgtagtcctagacacttgagaggctgagataggaggatcacttgagtccatcagttccaggctgcaatgagccatgatctcgccactgcattccagccsgggtgagagtgatactctgtctcaagaaaaatctgttgagaactatttgttaactttatatttgaatgacagtttgtctataaactctttgggccagttt

SEQ ID NO: 235532 - DNA, 201 bp, Homo sapiens
ttctcagattctttctctcttcttaatacctggaacagtcagatgccatcatcaatgagttgaagatttgtgtcagctgctctgctttaaaaaaaaaaaaatggaagtgagtgtaattcccaatcttggcttcacattggaactacctgggaaaaatttaaaatgaccaaaacttagatccttctcccagagatactgatt

SEQ ID NO: 235533 - DNA, 201 bp, Homo sapiens
catatattttggcatgtagtttattaaagtattttaattttatttttatatgattattttatctttatttttctaatatcagtgagttcaaattgaaccaytgagtttgaaccataagcttttaaggaagaatttaaaatttgcagatggtaagggtttttttctccctaattttattgcactgttaataaaagaatatat

SEQ ID NO: 235534 - DNA, 201 bp, Homo sapiens
gaagaatagcttgggcaggaacacaagccatcaggtatctggggagtgatttgatatggggtgttggggagagggacaaatctcagatttctgatttggatgctggggtggatgtgatggtatcagatactggtatagggaacccaggaggggcgtctggttaaggtaatatgaggatgagctctggtcttgatatattaa

SEQ ID NO: 235535 - DNA, 201 bp, Homo sapiens
ataacatttacagaaaaacataattgcttcattttttgttttaatgcctactgcactttagtcctatcttgggcaaacacgaatgtctcactgcataattkccatgtttatggttacaatttgaaagcactcctaaaaccattcgcctgtttaaattcataatgccatttagtaatggtgatgtaataaataataagtgta

SEQ ID NO: 235536 - DNA, 201 bp, Homo sapiens
atgtaaaatatttagctgagttcctgacgtaattcatatgattaatggtaagaagaggtttgcatacttgcttttcaaatgactatttcttggagttagaygcgtaattagatcatgttgatatgactaattttgagttcaagttaaccttaaccacacttctatcttatttcagatttttgggtttctgatatgcttggg

SEQ ID NO: 235537 - DNA, 201 bp, Homo sapiens
tgtcccgcactatgttaggggtactgctgcatgtattattttgtcctcactgccacactgcaggaagggtatacatcactttagagataaagaaactgccrtttagagagatctagtatcccattaaggcaccagagctgataagaggcaggtctaggaaagaattcatatttgtctgattccaaaagtcaactcccaccc

SEQ ID NO: 235538 - DNA, 201 bp, Homo sapiens
ttgaggtaagatcatcctggattagggtggactctaaacccaaccaccagtgtctttatgagagaagagaaggaaagaagagacacagaaaagaagcttaygtgcaggtggaggcagagattggaattacatagccccaagccaaggaatgcttgaagctatcagaagctaggagagaagcctggaacagattctccctta

SEQ ID NO: 235539 - DNA, 201 bp, Homo sapiens
ctggattttatccagtatgtcagtcttgggtaagtgtgaattactactcttattaaatattctcttactttttctatttgagcacctgcaacaaaaaaaaacccaaagatcattgaactcagtgtatttgcagcttacacacatttagtgtgtctgtgtgtgtcttgtaagtgggagagtgggatcttgttgatcacatgg

SEQ ID NO: 235540 - DNA, 201 bp, Homo sapiens
cagctactctagaggcagaggtgggaggatcgcttgagctcaggaatttgaggccaacctgggcaacatagcaagaccctgtctctaaaaaaaaaaaaaaaggacaagtggctgggtgcggtggctcacacctataatcccaggactttgggaggccgaggtgggtggatcacctgagggcagtagttcgagtactcaagt

SEQ ID NO: 235541 - DNA, 201 bp, Homo sapiens
aataaatcccactttgttgtagcatatgatccttttaatgtgattcaatttactagtcttttgttggggatttttgcatgttaattggggtaatcagcttrtatatacttttcttgtgttgtctttgtctggttttgttgtcagaataatactggccttcaaaatgagtttggaagtgttccctcttgatcaatttttttg

SEQ ID NO: 235542 - DNA, 201 bp, Homo sapiens
taaatatttgttgaatcaaaaagtataatacatgtaaatccccaaacagtaacaatttaaaacaatttgaatacgttttatattacaataattaactatayagcatttaaaagtgaagtatataaagtagtagttctggtctgtagcatcttgatagcaaatttgtgtattgattcagaggggtggctagcagatccttca

SEQ ID NO: 235543 - DNA, 201 bp, Homo sapiens
caaggaaaggaattccatttaatccaaaatggcaagcatctatacaccgttggtgggaatgtaaattacttagtcactgtggaaagcagtgtggatatttstcaaagaacctaaaacagaactactatttgacccagcaatttcattactggatatacacccagtggaaaataagtcattctaccataaatacacacacac

SEQ ID NO: 235544 - DNA, 201 bp, Homo sapiens
tgaacccagagggggaggttgcagtgggccgagatcatgccattgcactccagcctgggtgacaagagtgaaactctttctaaaaaaaaaaaaaaaaaaaacaaggaaaggaattccatttaatccaaaatggcaagcatctatacaccgttggtgggaatgtaaattacttagtcactgtggaaagcagtgtggatattt

SEQ ID NO: 235545 - DNA, 201 bp, Homo sapiens
gcccgccaccgcgcccggctaattttttgtatttttagtagagacggggtttcaccttgttagccaggatggtctcgatctcctgacctcatgatccaccygcctcggcctcccaaagtgctgggattacaggcgtgagccaccgcgcccggcctacactgtattcttataataaagtaagctagagaaaagaaaatgtta

SEQ ID NO: 235546 - DNA, 201 bp, Homo sapiens
gatccttgaatgatgtgggggttagggacaccaactccctgtacagtcaaaaattcatgtataagttttgactctctcaaaactttactaatagcctattkttggccagaagccttaccaataacataaacagttgattaacacatattttgtatgttatatttattatacactgtattcttttttttttttttttttgaa

SEQ ID NO: 235547 - DNA, 201 bp, Homo sapiens
catctgccaggttcaaacaattctcctgcctcagcctcccaagtagctgggactacaggcgagtgccaccatgcctggctgatttttttttttttttttttgtatttttagtagagacagggtttcaccatgctggccaggctggtctcgaactcctgacctcctgatctgccgcctcgacctcccaaagtgctgggatta

SEQ ID NO: 235548 - DNA, 201 bp, Homo sapiens
ctttcaccatgagttgatgatgaactaggactagaatttagcttttctgacaccaagctcaacatttttactgctacatcagaggcttttgagtttttttwaaaaaatcttacatggaagctgctatgtaaaattgatttagagttgttttgatggggcctgatctttagccactgaccgtctctaccccatcctttcctg

SEQ ID NO: 235549 - DNA, 201 bp, Homo sapiens
ggagaaaggagaggatcaatcacaaaaatggtagatccttggcatactcagagccttggaagggacttcctggaaaggggaaaaagtctggctgcctgtgrggaagtgaaagactagccagtggaatttccgtggcacaattagagtgtcttatttttaaaaagactttttgttttttaaaaaagtatttttaaggagacc

SEQ ID NO: 235550 - DNA, 201 bp, Homo sapiens
cttggccaggaacggtggtttatgcttgtaatcccagcactttgggaggtcaaggcaggtggatcacctgaggccaggagttcaagaccagcctggccaaygtggcaaaaccccgtctatactaaaaatacaaaaattagccaggcatggtggcaggcacctgtaatcccagctactcgggaggctgaggcaggagaatcg

SEQ ID NO: 235551 - DNA, 201 bp, Homo sapiens
cacagaccagtagagcagtctgccagtgggagaggaggatgagaagctccatggccaaggaaagaaagagcatggatttcttttgtcccagcatcaatgtrcttgagtggggagaaaggagaggatcaatcacaaaaatggtagatccttggcatactcagagccttggaagggacttcctggaaaggggaaaaagtctgg

SEQ ID NO: 235552 - DNA, 201 bp, Homo sapiens
attcatgcttaaaattatgcaactactggtactgtgtacttgtgagatgatattatctgatgacaatttatcattgtcagtgagatacagggctgtgtatwttttttttcttcaattctactgtgatatggaagcaattatcttgtcaaggctggaaaaactttagttctgtcaaacagtataataaagcaacaaaaagtt

SEQ ID NO: 235553 - DNA, 201 bp, Homo sapiens
ttttctgcataaataccttgctcattaaaaaaaattattcctaggtatgcaattaatttttggggttattgtttccacctagtgtctttctctccattatscctcttaatatgaaagcaataaatttgattgttaattttgtataacactgtcttactatattttcttttgtttatagtaacttctagtcttttttgtggg

SEQ ID NO: 235554 - DNA, 201 bp, Homo sapiens
aagcctgaaactcatggaaccatgaaatgccatttttaatttaaggagacttgactatgtttttgctagtatggtcagaaagctttttctttctttctttyttttttaatcatgattctaatttgctcaaatcctgatgctttgcagaatgtaatttggcctttgttttttctcagagtcttagcatagtttttcacttgc

SEQ ID NO: 235555 - DNA, 201 bp, Homo sapiens
tatccctgtcattctaacttttttacttttaatttatttttcttatctaattgcattggttagtactcttagaataatacaaagtaatatggtcttttttwaaatatcttcatttctgacattagtgcatatgcttctagtattatcccactaaacagaatgaaaaatttggattagaatagatatatttttggaatattc

SEQ ID NO: 235556 - DNA, 201 bp, Homo sapiens
aagtttcggtccaattgcctcttgaatataatcattacacctagaggcaaaaatggtatttaaaatgtttaacaattggtttatatgaacactgtccccaktcaggacagatattggcacagaactaaagcaggatattggagaccttgggttactcctttagtttcttgatggtggggaatttgaaggatcttaggggaa

SEQ ID NO: 235557 - DNA, 201 bp, Homo sapiens
acctccattgctggagaggaccacctaatattatatttagcaccacaacaaatctgtgctttcctgactcaatgctaactcttagtgctgtgtcaatgtcmctctcattcatatttagtgcctttttccattttcacaatagatattctaaaccttggctgtttcctcaagttctcaacactgctacaatcttctttactc

SEQ ID NO: 235558 - DNA, 201 bp, Homo sapiens
ccctttctcctatattaaatggctctatggattgaaaatcatgaggagaatatgtgaagaggaaacactggagaaattagctttaattaaaacttaattgyttctatttagcattttctctgtccacaaggaatttctttaacaatatttttcaatattcttatttgtttatcatctaataacccacttctaaagcagttg

SEQ ID NO: 235559 - DNA, 201 bp, Homo sapiens
ttttctttcctttatgtcacaaaggcatagcttctgctttcaataaattgtgcacaattttggttcatcttaattaagtaaatattgatttaagttccccmtatgttccagggccttcaagctaagggagaatgtgaaaagttgaaaggtagttctatgtggctgcctccaagagaacatggtaaaacagactggatagtg

SEQ ID NO: 235560 - DNA, 201 bp, Homo sapiens
tttagtgccttgtgcctggttttatgcattgaaatttgaatgtgggaaataagatcaaggtgaattttcaaaaaaaatttttttttcctttaaaatcaggrtgggtagtttttggcccaagagcggcatcactttctttatgtggctttcctctgttcacagtgtgacaagtcagagaatttctgcctcaacaagcttctg

SEQ ID NO: 235561 - DNA, 201 bp, Homo sapiens
catcagagaataaagacaaaataaagggtcaactggcagatccaaaatttaactaagactgttttctagatgaaagaatggaaaaacaaacaaacaaacamccaaaaaataatgaagaggagaaaattataaagaaatatcagaagagaacttccccaaatcttccaattgaaagagtctcctgaatactcagaaacaatg

SEQ ID NO: 235562 - DNA, 201 bp, Homo sapiens
atagcctctgaggatcttttgtgtttctgtgagattgattataatgtcacatttgtgttttttattatgttttttggatcttttctcttttttttctttgktaatcttgctagtggtctatcaatcttgtttattctttcaaaaaaaccaacttttggttttattgattgtatagacttttgggtctcaattgcattcagt

SEQ ID NO: 235563 - DNA, 201 bp, Homo sapiens
ccctgaggacataagtccctcattcctttcacagttttatttgcttttgcttttttaatgcaaggtctgttagtgaaatggttggtcaggagtgacgtggycatgtggcaactggttgctgttacctctgtttagtagttttaaagggagcatcctagggagaaaggggacccccctaagaagcctcttttaagttcagaa

SEQ ID NO: 235564 - DNA, 201 bp, Homo sapiens
cattttaaaaatgaagaaaataatagttctacctcatacgattgtatgaggagtgaatacatgtctataaagctctaagaattcctgacacattataaaarcttaatgaatattagcttttcctattattagtaactataagtatgtacataaaggagttaaaatatagtaggtggtgctagtccattgtaagataagaag

SEQ ID NO: 235565 - DNA, 201 bp, Homo sapiens
attgtacattttttaaatcaaaatatgttcttcatataagaaagatttcagaaacagtgattttttcctatagacattgttcttaggatagttagatagtyggtggttatctgtagaatatttttaatagataggtactagaaatgtatctcccaactttattgtactgttggcaaaggaggtgaatcagatgacctaata

SEQ ID NO: 235566 - DNA, 201 bp, Homo sapiens
taaaacttaattgcttctatttagcattttctctgtccacaaggaatttctttaacaatatttttcaatattcttatttgtttatcatctaataacccacktctaaagcagttgattatattcttagaattcctggaacaaggcacttatcatgggataatgtaattacctgaaataaatctaacacaacatttaagacag

SEQ ID NO: 235567 - DNA, 201 bp, Homo sapiens
gcatagcataatagaaagattgggatggatttgggaaggctgtagaaaaaggaaaagggctggttgaagcattttgtattttgtgattttgacacaacatkttgtatttaagaaaaaaagaaaacattctgatgattaaagtctatgaaatcgaagtttctgtctcctgaaaagactacccctattcatctgtgcatgtag

SEQ ID NO: 235568 - DNA, 201 bp, Homo sapiens
aagtataaacttttgataaatttgatcctttagaaagagaaaactcatattgaaaaactggaaacaaaatgaaaagacaatcagccagctgtggtggtgcmtgcagtcccagctactctagaggcagaggtgggaggatcgcttgagctcaggaatttgaggccaacctgggcaacatagcaagaccctgtctctaaaaaa

SEQ ID NO: 235569 - DNA, 201 bp, Homo sapiens
taatgaaaacaacagatgtagtaactgtcatatcaatgaataaaattgaaatccataaatcagatgctagtgagtaaaatgatttatttgtgacacagaargcatcccagcttaatggagaaaggattgattgttcaacaaatggtgatgtaaaatcttcttatttggaaaacttgaaatttgctcctcatatgtatatca

SEQ ID NO: 235570 - DNA, 201 bp, Homo sapiens
aagggacaactgtgatgttcaagaacaaatctataagactatggtatgaatctatatgaaaaagcaaaactaaactaaactaaaattccttactaattgargtactttaaaaaatggaattcctaaaaagatttgaccttcttgaagttgtatttaagtttataaaatatcagttcttttcaaataattaagagtttaaca

SEQ ID NO: 235571 - DNA, 201 bp, Homo sapiens
tgttgctccagcaaaagtcttgagattagttctgattggagctgtatcttcattcctaaacctgtcactgtggctcaagagtttgatccagtaattggcttaaccaagatcatatgccaaaccctggatccatggtggaatcagtttcctaaagttatgtggacagaaagtgaggggatatgatggttccctaagaaatag

SEQ ID NO: 235572 - DNA, 201 bp, Homo sapiens
gtggtggtatttcggtgagttgataaatttgcaagaatgacaggactaaatgttgcttctagagttaaactagaatctgctacattactatgagtcctccrtaaagtatacctgattgccattgctactagaaaaagactggatttgaggaaacatggacttgaatgtcaattcttattttttcgatgttactttatgttt

SEQ ID NO: 235573 - DNA, 201 bp, Homo sapiens
agaaaaaaatagttattaaaaaaaaagaagttatagggaggcagatttgggttcctcataataaggaccattccagcaattcccgttctgaaatggggacrggctgccttgcgaggcagtcagtttcccatcacaggagatcttctaagacagacctaggagccccttgtcggaggtatctaaaagggtcatgctttggga

SEQ ID NO: 235574 - DNA, 201 bp, Homo sapiens
tatctctttggaatttccttgtgtgtcctaatctgtacttgtggtgccaggtttctcttggtaatgtcccctttgcccatcttttttccttttttttttttggcagagtcttgctccatcacccaggctggagtgcagtggtgcaattccggctcactgcgacctccgcttcctgggttcaagcgattctcctgcctcagc

SEQ ID NO: 235575 - DNA, 201 bp, Homo sapiens
cccaagtagctgggactacaggcacctgccaccacacacggccaatttttttgtatttttagtagagatggggtttcaccatgttagccaggctgatctcratctcctgaccttgtgatccgcctgcctcagcctcccaaagtgctgggattaccggcgtgagccaccgtgcccagccagttggtttttgatatatttgct

SEQ ID NO: 235576 - DNA, 201 bp, Homo sapiens
catcctgctcaattttttgtagtagtttcaatagaattggtaccagcttttctgtatacatctggtagaatttggctgtgaatccatctggtctgaacgtwtttttggtttgtgggtttttaaattactaattcaatttcagaactcaatattggtctgttcaaggtttcaatttcttcttgtttcaatcttgggatattg

SEQ ID NO: 235577 - DNA, 201 bp, Homo sapiens
gaaagccagtctgagacccaaaccctcaaaagtagggaagccagggcagggccaaaatggctgactagtagcagtgacattcagaggctcccataaaaaaagccataataagcatgtgaatccttcaccggcaaccaaggtatccaggttctctcttcaaaattgactagaaggctggcatgacccacggagagaaggaag

SEQ ID NO: 235578 - DNA, 201 bp, Homo sapiens
ttttctgtatcatccctcaagctttcagagtagccttgcttttctccttggcatggtcacggaatggatacctgtttgatcttcctgcactgctgagaaawcttccttttgggggagaggattaagtctgggttgaggtgagtagatgggtagcattcaatggttagtgagatgaagtggaaatttagctgtgggctggtt

SEQ ID NO: 235579 - DNA, 201 bp, Homo sapiens
ataatataatttcaagtagttgtaagtacaacaaagaaaatgaaataggggaataggatagagagtgatgggatgggagatggggagatgattttaaagasggtgaccagagaaggccccttgaagaggtaatatttgaactgagaggcagctagccatgccaagatcttgggtagaagaaacaacaagtataaaagctcc

SEQ ID NO: 235580 - DNA, 201 bp, Homo sapiens
acattttctttatttactcatcagttgatgcccgttttaaattggttttgtatctttgcaattgtgcattgtgctttgataaaaatatgtgtgcaggtgtstttttatatgatgacttattttcctttgggtagatacctagtagtgggtttgctggattcaatggtagatctactttcatttcttggagaaatatccata

SEQ ID NO: 235581 - DNA, 201 bp, Homo sapiens
tgcagaaatcacaaacattcctttacaccaacaataggcaagcagagagccaaatcatgaatgaactcgcattcacaatcactacgaagagaataaaataycaaggaatacagcaaacaaaggatgtgaaggacttcttcaaggagaactacaaaccactgctcaaggacataagagagaacacaaacaaatgggaaaaca

SEQ ID NO: 235582 - DNA, 201 bp, Homo sapiens
agaccagcctgggcaacatagtgagaccctgtctctacaaacaacaaaaaaaaccaattagctaggcatgctggggcacacctgtagtcctagacacttgrgaggctgagataggaggatcacttgagtccatcagttccaggctgcaatgagccatgatctcgccactgcattccagcccgggtgagagtgatactctgt

SEQ ID NO: 235583 - DNA, 201 bp, Homo sapiens
ttgaaggagatagagacacaaaaaaccctccaaaaaatcaacgaatccaggagctggttttttgttgttgttgttgttttttttgtttgtttgtttgtttkttttttttttttagttaatacatagatggctagctagactaaaaaagaagaagagagagaagaatcaaacagacacaataaaaaatgataaagggaatat

SEQ ID NO: 235584 - DNA, 201 bp, Homo sapiens
agaattgaaggagatagagacacaaaaaaccctccaaaaaatcaacgaatccaggagctggttttttgttgttgttgttgttttttttgtttgtttgtttktttgttttttttttttagttaatacatagatggctagctagactaaaaaagaagaagagagagaagaatcaaacagacacaataaaaaatgataaaggga

SEQ ID NO: 235585 - DNA, 201 bp, Homo sapiens
tacttacgagctgtgtgacctctcatgaatctctcttggagactcaagctccttctctgtaaagtagagatcattttattatcttctggtttattgtgggwatacaaacaagataatgtcctgttctggcccagtgagtagtgcattttaggacatgtttaaacaggcatttgctatttctgaagatagggaatacaaggc

SEQ ID NO: 235586 - DNA, 201 bp, Homo sapiens
cattcttcttagtgccacatggcacttattctaaaattgaacacataattggatgtaaaacactcctcagcaaatgcaaaagaactgaaatcacaaaaaaacagtctctcagaccacagtgcaattaaattagaactcaggattaagaaactcactcaaaatgacacaatttcatggaaattaaacaacctgcttctgaat

SEQ ID NO: 235587 - DNA, 201 bp, Homo sapiens
ttagtagagaccaggtttcaccatgttagccaggatggtcttgatctcctgacctcgtgatccacccgcctcagcctcccaaagtgctgggattacaggcrtgagccactgcgcccggcctctggttcataatttttttacccattttcttctattgggttgtctattacaaaaattaacttgtatatttctatattaggg

SEQ ID NO: 235588 - DNA, 201 bp, Homo sapiens
tcattatgtttactctcctacatcctggaatttggaaatttgctaagatattcccatcacaaagaattatccagcttgcttactgaaactgggtcttatgycatattctctctgaatagtggtgaaataaatttacctctaggcaagtttcttgttagaattagtaggcatgctctgtatgctttgttatgtttcactttt

SEQ ID NO: 235589 - DNA, 201 bp, Homo sapiens
atctctttctgtctctctctctgatatatatctatttgtcatatttatatgacagtagaaagtgggggtaaaatattcaggcaaggattttttttttttttgactagaggaacagcctgcctgttaataaattttatgatgtccattattattctcagccttccttctcttctttgtcaccatctttttcttattcttctc

SEQ ID NO: 235590 - DNA, 201 bp, Homo sapiens
agcgtagtatctgggctggaatgcaccgttcttcatggcacagtccctcaaggcttccctttgctaggggagggagttccctgactccttgcacttccccrgtgaggtgacaccccaccctatttctgcttgcccttcatgggctgcacccactgtctaaccagtcccaatgagattagccagttaccttagttggaaatg

SEQ ID NO: 235591 - DNA, 201 bp, Homo sapiens
cattttcatgactgtgaggaggattccctgacatagttatctgatgggaaagtctgatcctctcacttacaacaatgatttttcatgtctgttctacttcsctctcccctttgtaactccctaaatttcacacatagcactctgactttatacatctttttctttgattctgcaaactgattgttaaatgtgtgatatcat

SEQ ID NO: 235592 - DNA, 201 bp, Homo sapiens
ttttgaattttaattaatttagatttaaatagctacatgtgatttgtggctactgtattagacacacggatgtggccttttatggtggttcccatgatggsgtgagaatgcttattttccactcttcctcttgttatcgtttggagggacagcaccaaaataacactctaagtgtctttcatccagttgctcacgcctctc

SEQ ID NO: 235593 - DNA, 201 bp, Homo sapiens
ggtgtaggcacctgcgggaatctcctgctctgcgggttgtgaagaccatgggaaaagcgtagtatctgggctggaatgcaccgttcttcatggcacagtcyctcaaggcttccctttgctaggggagggagttccctgactccttgcacttccccggtgaggtgacaccccaccctatttctgcttgcccttcatgggctg

SEQ ID NO: 235594 - DNA, 201 bp, Homo sapiens
ctgagaacagctgcatcacacatgtagagccagggagtgtctgctttcatgtttcaagttggtgacaaaacccaatcaccatacaagctaaaattttagamgtctagaaatattttgaagatgagttttaaagcaaatcattttgtctgaccctccagttctgctgggattttttttatgtattattgtcagtggtggtgg

SEQ ID NO: 235595 - DNA, 201 bp, Homo sapiens
cttgaggaagcagtctgtcccttagcagagctggagtgctgtgctgggagatctgctgctctcttcagagccggcaggcaggaacatataattctgctgaygctgcgcgcacagccaccccttcccccaggtgcgctgtcccagggagatgggagttttatctataagcccctgactggggccgctgcctttctttcagag

SEQ ID NO: 235596 - DNA, 201 bp, Homo sapiens
gcctgtgtgtgattattcttcctcttttgttttttcacatttgaagatagaactgagatagtggagaggatcctgaggaagtaattcaaaatgatgataaactttgataaattacatgacgtagattagggctaaagaactagggctatctggcttttttggtgtgactatttcagttatttgaacagttgtttaaatgga

SEQ ID NO: 235597 - DNA, 201 bp, Homo sapiens
gtgtgtgttttttttaagcctacagcaccaaatatccccagtctcccatctaagtactaaccaggcctgacctgcttagcttagcttctgagatcagatgrgatcaagtatgttcagggtgctatggctacagactatttggcctttgtgatctttaccataaaagaaatatttcccaccctcaatgttcatatgatttta

SEQ ID NO: 235598 - DNA, 201 bp, Homo sapiens
atcttgagtgcacactgcatttttgtcctagatgtcttctgtttgctctccagatttcctctcacctttttctaccattctttctgccctaggaggcttayttgtatggtttatactaataggttaccttgtacttctgcttctggttgggctttgtctcggggatccctaggaagagatcaaaaggaagaaggagattac

SEQ ID NO: 235599 - DNA, 201 bp, Homo sapiens
tcacttctttggtacatggttctgaaatgagaagattatatttaacagtaatgatgaaacagccattttagtgccagacatttgaggctgcaaaataatayactaaaaatacttgggggaactatttttgaattttaaaagataattattggaatgaggttttggttatttttgttgttgttgttctcctacaggaaaaag

SEQ ID NO: 235600 - DNA, 201 bp, Homo sapiens
ctttattttccaatttgatgcttgatctgatctttttatttgccagagcttaaattgaaagtggagggaaaaaaatctgatttttcactgattttttttttatccaatatacttctcttaaaggattgaaaacgaagtccagaaaaatatcttcagctgagtcaaaagggcacattgtacttctagcctaaatctcggagt

SEQ ID NO: 235601 - DNA, 201 bp, Homo sapiens
gttttgggagaatgaaattataaattattatgctgactttgggcggtgcatgttagaaaatctttctatacaaatgtatgctcatatgcattgaagatacmtgagagacaataatgaaatttgtctgatatttcttaattacttaatagtgtctcgatagagataaaaatggaccagtgcccccccagtgttatcttttgg

SEQ ID NO: 235602 - DNA, 201 bp, Homo sapiens
gtagaattttttttaatgttgcatgactgaaactctatactaatttcacagcaaatcaccatattctcatttccccagtctctagcaagaaccattttatktcatgtttcaatgagtttgactactttagagatctcataaaagtggaataattctgtatttgtcattctgtgaccagcgcttttcatttataataatgcc

SEQ ID NO: 235603 - DNA, 201 bp, Homo sapiens
ttagtagagatgaggtttcaccatgttggccaggatggtctcgatcccttgaccttgtgatccgcctgcttcagcctcccaaagtgctgggattacaggcrtgagccaccgcacccagcccaggatggtttctgtgtggctcacagagtcaagattctggtgtttggagtgggtaaaattaggtacagaactatagaattc

SEQ ID NO: 235604 - DNA, 201 bp, Homo sapiens
tggttacaatttgaaagcactcctaaaaccattcgcctgtttaaattcataatgccatttagtaatggtgatgtaataaataataagtgtattccttaaarctaaatgtctaattctaatttcggtttcacttacttttaattctcaatttttgttttgtcaggtgaagtacatgatgacctggatcagaagacagaaata

SEQ ID NO: 235605 - DNA, 201 bp, Homo sapiens
cccagtgcagcagagaccaaccctggagatgatgaagcatgggaagtgactgggccacgaggttgtttgggatggggtgtgtgatttgatgtacatctggrgtattgcatttgatgagagggctcttccccctctctttgacctttggaccaaggcacacaccaatttgcagtttcccagtcatctatgcactgtaccacc

SEQ ID NO: 235606 - DNA, 201 bp, Homo sapiens
gctctacatttggcttttcaagcattctgtttatatgtgacccttgtcaccccaacgctggccgttttgcagattgttccttctgctgagagcacagaggmtctgcggaactttctgtggattcctctggtctcccaatgtcccttcatgggattctgagtgtccactttctcaatacagaaatctcaggaggtaaaggaa

SEQ ID NO: 235607 - DNA, 201 bp, Homo sapiens
ctgatgttaaatttgaaggattttcaagttaaagatagaacatagtttatatcccatatgttttgaaaaaatgtggagagatttaagtgaaaaagaaaagmaacaaggacaatggaaaagtgaggacccaaatatgctagtcaagggatgacatcgttcttacaattgagcaccacatttgactgtaagcttctgggtagc

SEQ ID NO: 235608 - DNA, 201 bp, Homo sapiens
caacttgatcgtggtggataagctttttgaagtgctgctggatttggtttgccagtattttattgaggattttcgcactgatgttcatcagggatattggyctgaaattttctttttttgttgtgtctcttcccagttttggtatcaggatgaggctggcctgataaaatgagttagggaggagtttctccatttctattg

SEQ ID NO: 235609 - DNA, 201 bp, Homo sapiens
atcacttttcagattcaggactctaagccctcacttttttctaaatatctcttgggaaaattgcactcactcaagtattatttaattggattgttgtttcrttgtggtgaatatgagtagattttttgggaaaaatgtcttcaagaagttcttgaagctttcctgaaaccaggtttgtgaggaaggtctttgttcttaacc

SEQ ID NO: 235610 - DNA, 201 bp, Homo sapiens
cagaccagcatcattggcctcacctggagcttgttagaaatgcagactctcgggccccaccacaaaactccaggtgtatcactgcattttaacaaaaaccraaatgattcatatacatatttgagtttcagaagttctgaactgattctctcttattttagttagtagtgcctggaagattttggcaaaagcaaagaggtg

SEQ ID NO: 235611 - DNA, 201 bp, Homo sapiens
tggtgtatatgtgccatattttctttatccagtctatcactgatgggcatttgggtaggttccaagtctttggtattgtgaatagtgctgcagtaaacatrtgtgtgcatgtgtctttacagtagaatgatttgtaatcctttgggtatatacccagtaatggaattgctgggtcaaatggtatttctggtttagatcctt

SEQ ID NO: 235612 - DNA, 201 bp, Homo sapiens
cttctcttaaaggattgaaaacgaagtccagaaaaatatcttcagctgagtcaaaagggcacattgtacttctagcctaaatctcggagtaaggcatttcmgtgtttcatctgtgacattgattcaactccacgacctactgggggaatccagtacctcctaaagttcatagtctctagtgcacaaatgggactcccttgg

SEQ ID NO: 235613 - DNA, 201 bp, Homo sapiens
aatgttgagtaatttagatgaaactttggatttattgccattcatggatagagaaaagggttagatatgatactctctgaagttcgtttcagtgctctgtrtgattctttattattattattatactttaagttttgggatacatgtgcagaacgtgcaagtttgttacataggtatacatgtaccatggtggtttgctgt

SEQ ID NO: 235614 - DNA, 201 bp, Homo sapiens
atatgcttggcagatgataaattctcactaaatatgtattggataaatgttgagtaatttagatgaaactttggatttattgccattcatggatagagaaragggttagatatgatactctctgaagttcgtttcagtgctctgtgtgattctttattattattattatactttaagttttgggatacatgtgcagaacgt

SEQ ID NO: 235615 - DNA, 201 bp, Homo sapiens
aatgtgaaaaaaaatttaaagctctgccaaaagggaagagctgaggtttttttttttctaggctcagttattaagtatctgttggaaataacctacctctrtcatagaatctgtttactctctccgtctgtccagggtggacaaatccagacttaaccactgtgagaactcagctctgcaaatgcttgctttattagaaat

SEQ ID NO: 235616 - DNA, 201 bp, Homo sapiens
ttttggagagtaggtctggaaaccatatgaactgtaaatagtttcaaaatgtgaaaaaaaatttaaagctctgccaaaagggaagagctgaggtttttttytttctaggctcagttattaagtatctgttggaaataacctacctctgtcatagaatctgtttactctctccgtctgtccagggtggacaaatccagactt

SEQ ID NO: 235617 - DNA, 201 bp, Homo sapiens
caagacctctcttccctgctaggctctgaactctaattattgtcttttctcacttctgggcagcttaggaattagcaagtgtttcaaggggaaaggtacaraatatcaggtttactttaatacatttctcttttcttccggatcttggctatttaaattctggctgttttgtcattccatgagatcttcaagtagctatgt

SEQ ID NO: 235618 - DNA, 201 bp, Homo sapiens
tacccatttccttatatgtgaggtaagatgagagtttatattttaatgaaataatttcatcaaaacctttgtttccaatattatttgttttaaagtttcarcagtgcaatagatgtcttgctcttaactgcttatgatctgcaacatctgttacaaatgggacagcttagctgtttaatctgttaacttttatgttttcaa

SEQ ID NO: 235619 - DNA, 201 bp, Homo sapiens
gtatggtagttttatttttaattttttgaggaactttcatactgttttctatagtgactacaccattttacatttctatgaacagtgcaccaggattccartctttctacatcctcaacaatacttgggattttctgttttgtttgtgtgttttttgtttgtttgttttctttctcccatttttgttttagaatcggggta

SEQ ID NO: 235620 - DNA, 201 bp, Homo sapiens
atagggttgctgagtcaaatggtagttcaactgttagttttctgagaaatctccaaatggctctccacagtggctggactcatttcatttgcaccaagagygtgtaagtatccccttttctccgcagcctcaccaatggctgttgttttttgattttttaacaaaaatttttctgactggtgtgagatggtatctcgttat

SEQ ID NO: 235621 - DNA, 201 bp, Homo sapiens
cctggataatatcctgaagggtgttttccaacttggttccattctccccatcactttcaggtacaccaatgaaacgtaggtttggtcttttcacatagtcscatatttcttggaggctttattcgttccttttcattcttttttctctaatcttttcttcatgctttatttcattaagttgatcttcaatctctctgatat

SEQ ID NO: 235622 - DNA, 201 bp, Homo sapiens
ttatgacaatagaaatgatcaaatgaacctgttttttatattccttttggcagggactgcatatcatgttgtttttgcccaaagcacatttttttttttttaagtggctaggtttgaagcctgagaaattgagtcttgggtcaagaatctggaataaacttcaagcgttgctgtcaacctgttattttatgtagattttgc

SEQ ID NO: 235623 - DNA, 201 bp, Homo sapiens
gagaaatgaaaagattacatagaaagaagagtaagttacttgtgaagaaggaactataaatggagtttcctttgttggcaaatggttcatgaaaataatcmataaatcaactgtgtggatgaaattgggcaagtttagtaacaattgagaggttaacggaaaaaaaccactaaccccaacggtctcaaagtggtttttatc

SEQ ID NO: 235624 - DNA, 201 bp, Homo sapiens
actttaacagaatttgagaagggagattaacttatttgagtgatgagaaacttaccctgcctcaaactcagaaacttcagtaaagccaaaacacttaatamattttatctgaatatatttaatgcacaaaggtaggtaggcagtttttaaaggatttttttcctgagtggagttattgatcccatttaggaagtgcatagg

SEQ ID NO: 235625 - DNA, 201 bp, Homo sapiens
gaaggtcatgtgcttcagaataaaaacacttgtttctgaatttgggaaatcaaagattccagtagatggagcatttcttaagttaataaatgagaataaarccaagtgacttaggtaatgacctaaccaaaggcactgagtgtcttactactggctaaaacattatgcccatttccaaattgccaggctggagctctggga

SEQ ID NO: 235626 - DNA, 201 bp, Homo sapiens
aagtatgatttataacttctactacaatttgatctgtcaggattagattcggtcccataaattagagctaaggtggtctctctttttgcctctctgtctaygcacacaaacagaacacatacacacacacacacacacacacccctctttatttatatacatatgtatgcatgtgtgtgtgtgtgtgtgtgtgtgtgtgtg

SEQ ID NO: 235627 - DNA, 201 bp, Homo sapiens
tatgcattgaagatacatgagagacaataatgaaatttgtctgatatttcttaattacttaatagtgtctcgatagagataaaaatggaccagtgcccccscagtgttatcttttgggtggaaaatttcttagtttttagatttaaaacttccttttgcaatgttgtttttacttataaaaaaaaaaggctttcactttac

SEQ ID NO: 235628 - DNA, 201 bp, Homo sapiens
aagggaagtttaatgcacaaaatccacccttgttttgggtagtggtcaggaaactgaaatgccaagttgtgggaaattcacttgaagtagtggcatgtggycacaataccacatattgctttgggccctctggagctgtggtcagagagggctctatttaaactatatcctactggctcatctttgattctgaggacctct

SEQ ID NO: 235629 - DNA, 201 bp, Homo sapiens
gaggctgagacaatctccatattcccatgcagttgatacgcaataattacatgatagtgggcaaaatgcactaaagtgaattaaataaagcctcttggggmaaaagcagaatatattttagactcctcttttcttccctgtaactaatatggggcaaggagaagtattcatatattgtgtgtttgtgcacatcgctgctgg

SEQ ID NO: 235630 - DNA, 201 bp, Homo sapiens
aaaagcctactgtgaattgtaaatttactttttacatggtgaaaaagctaatttaaacatcacatttcaggccaagtgaggtggctcatacctgtaatccycgtactttggaaggccaaggctagagaatcttttgagcccaagagtttgagaccagccctggtaacacagggaaatcccatctctaaaaaaaaaaaatca

SEQ ID NO: 235631 - DNA, 201 bp, Homo sapiens
atccacccttgttttgggtagtggtcaggaaactgaaatgccaagttgtgggaaattcacttgaagtagtggcatgtggccacaataccacatattgcttygggccctctggagctgtggtcagagagggctctatttaaactatatcctactggctcatctttgattctgaggacctctcatgcttgtatccaattataa

SEQ ID NO: 235632 - DNA, 201 bp, Homo sapiens
tctgaaagttacaaaatggattaggtaaggaagaagaactttaatcatcgggtcttccaacagtggagataaattgtattccagatggaagaaattgtagmaaaaggtgtcaggagacaattcaaagcatgaggctactagggtaatgtcctgatcatattcccaccatctttctttgtcttgataatagcactctattat

SEQ ID NO: 235633 - DNA, 201 bp, Homo sapiens
tgaaatccaatcaagtggtcagcagattcagtatctggtggggcttgcttccttgttcatagacagccatgtttttactgtgtcctcacatggcagaaggkatgagggagctttctgtggtccctttgacaggggtggcactaatttcatttgtgaggcctctgccttcatgacctaatcacctcccaaggtcccacctct

SEQ ID NO: 235634 - DNA, 201 bp, Homo sapiens
gtatagacattgaaaaaatagcttcacttaaacctttcaactacaagttctgactgtatttatcctagtctaagaagatcacatctcttgcagcttccagkattgttgttaacctaattgttgagaatcatgtacaacttaatggcccttgctcttaataaaagttaaattattgtgaaaaatatatatttttttctttca

SEQ ID NO: 235635 - DNA, 201 bp, Homo sapiens
ttatttcccaggggagaagacagacttgaacaagggctcatccctaaagaagcctttgataaggtaaaggccctaaagttctcaggccctaaacatgatgytgatatgtgagcaagaactcactatgtaccaggcaccatgctgagtaattgcacacattatcttgttaaacccttacagctcttgaaggaagagattatt

SEQ ID NO: 235636 - DNA, 201 bp, Homo sapiens
agtagagtaaaatacaacaaccctatgagctagtctaagtagagctgggatttgaacctatgcctatctgattttaagctttttttttttaacccctaaayggaatatccttttaagaaaggcagcatcctggtgtcttttgctcagtcttgcccagctttaaagaatatcactccagatggaaatgaatttggagagact

SEQ ID NO: 235637 - DNA, 201 bp, Homo sapiens
tgactatgtggaggaaatgagctctctattgaaagagacctcatgacttgcggggtgtgtcatagcttagagctgtgggagggacaggcctgtccctaggygaactgtttgtagaatcatctggaagcttgaggacaccttctgctggcaaacgctccaactcaactgccactgagaaacaaattaaatataatttgttct

SEQ ID NO: 235638 - DNA, 201 bp, Homo sapiens
ctctaaatactgtcagctgttggtgttagcagtgctcttgccgcttggggcattgccattgtaaagacttgggaaatccctagaaatgagccagtatatgsgcttttacattttagttggagaaataaacatatgatcatatatttcattacacagagaaaaagagagctaggcttgaccatgaacattcctttatcttcc

SEQ ID NO: 235639 - DNA, 201 bp, Homo sapiens
ttattcttcctcttttgttttttcacatttgaagatagaactgagatagtggagaggatcctgaggaagtaattcaaaatgatgataaactttgataaatyacatgacgtagattagggctaaagaactagggctatctggcttttttggtgtgactatttcagttatttgaacagttgtttaaatggatggacatgttgg

SEQ ID NO: 235640 - DNA, 201 bp, Homo sapiens
tgaatttttcaattcatttattgtattcttcagctccaaaatttgtttttaaaaatttttttaaagtctttttgttgatatttgtaaagataaaaaaaaawttttgttaattttgcttatgcgtcattttcttgagcttgtagagcatctttacaacagctattttgaattatttgccaggtaattcatatacctctgttt

SEQ ID NO: 235641 - DNA, 201 bp, Homo sapiens
ctgactgttaagctctattgctgtttagtgccttgtgcctggttttatgcattgaaatttgaatgtgggaaataagatcaaggtgaattttcaaaaaaaawttttttttcctttaaaatcaggatgggtagtttttggcccaagagcggcatcactttctttatgtggctttcctctgttcacagtgtgacaagtcagaga

SEQ ID NO: 235642 - DNA, 201 bp, Homo sapiens
aagccataataagcatgtgaatccttcaccggcaaccaaggtatccaggttctctcttcaaaattgactagaaggctggcatgacccacggagagaaggargagcagtgtggtgggcggcctacctgagagacatacagagaaggggaaccccctgcctccagccaagggaggcagtgagtgagcacgctacccagccggg

SEQ ID NO: 235643 - DNA, 201 bp, Homo sapiens
gtcctttttgttgatgttgatgctattcacttctgtttgttagttttccttctaacagtcaggcccctcagctgcaggtctgctggagtttgctggaggtycactccagaccctgtttgcctgagtatcaccagcggaggctgcagaacagcaaaaattgctgcctgttctttcctctggaagctttgtcccagaggggca

SEQ ID NO: 235644 - DNA, 201 bp, Homo sapiens
tctgtttgttagttttccttctaacagtcaggcccctcagctgcaggtctgctggagtttgctggaggtccactccagaccctgtttgcctgagtatcacyagcggaggctgcagaacagcaaaaattgctgcctgttctttcctctggaagctttgtcccagaggggcacttgccagatgtcagccaggactctcctata

SEQ ID NO: 235645 - DNA, 201 bp, Homo sapiens
tgttagacctatttgctaggcctcattttctgggccaaagccgtctattgcaaaatataaatcttcacattatgagctcactccagtctcccatttggctrgctttgtagtcagttgttaagtctcccttctcatatgtaaaaagggcagtttgcgaaaggcatattttctggaattatacaaaaaagtaatgaacttctg

SEQ ID NO: 235646 - DNA, 201 bp, Homo sapiens
gatttaagtgaaaaagaaaagaaacaaggacaatggaaaagtgaggacccaaatatgctagtcaagggatgacatcgttcttacaattgagcaccacattkgactgtaagcttctgggtagccaggacaaatactgaaatacagttgagtcacacatctctcattattagtatgcatatctaatagatgcagatgaccttc

SEQ ID NO: 235647 - DNA, 201 bp, Homo sapiens
gctacatgactgaggaccaaggacttgagttttctcatctatgaaacaaagatattggataccagtcattttcaaacatttctttttccaataagcagaayccttttcaaatgaaatcttatgtatagtgcagttgctcagagcaggtgctctcggctgccctctcaccctttatggtagatcttgaggagcctccacaag

SEQ ID NO: 235648 - DNA, 201 bp, Homo sapiens
atatgatgaacacgcagaaacccttcaccttaattatacaattattactattttgccacatgtgcttccttactgtctgtctctttttctatacaaacacrtgccctcatatgtacaaacacacacgtggggtctttttttttttttttttcaaatttcagtaggtttttggggaataggtagtgtttggttacatgagta

SEQ ID NO: 235649 - DNA, 201 bp, Homo sapiens
tcccgatgctctccctcccgttgttcccctaccccacaggccccagtgtgtgttcttcccctccctgtgtccatgtgttctcactgttcagctcccacttrtaagtgagaacatgcgatgtttggttctttgttcctgttttagtgtgctgaggataatggcttccagctccatccgtgtccctgcacaggacatgatctc

SEQ ID NO: 235650 - DNA, 201 bp, Homo sapiens
aacaaagtgttcattaaagtcttaaaagtgttccaaacctagaaacgttctcccaattcctctaaatactgtcagctgttggtgttagcagtgctcttgcygcttggggcattgccattgtaaagacttgggaaatccctagaaatgagccagtatatgcgcttttacattttagttggagaaataaacatatgatcatat

SEQ ID NO: 235651 - DNA, 201 bp, Homo sapiens
gcttccttactgtctgtctctttttctatacaaacacatgccctcatatgtacaaacacacacgtggggtctttttttttttttttttcaaatttcagtargtttttggggaataggtagtgtttggttacatgagtaagttctttagtggtgatttctgagatttggtgcacccatcacctgagcagtatacactgttcc

SEQ ID NO: 235652 - DNA, 201 bp, Homo sapiens
tacaggcatgcaccactacgcctggctaattttgtatttttagtagagatggggtttctccatgttgaggttggtcttgaactcctgacctcaggtgatcygcccgcctcggcctcccaaagtgctgggattacaggcgtgagccaccgcgcctggcatgtcttgcattctttaagatgtaaaaaggtctagccccttgac

SEQ ID NO: 235653 - DNA, 201 bp, Homo sapiens
agaaaacacactttgttttttaggttgagtaatttggttgagtaattaatagtattattaacacttttcagtttgctgaatccaatttctttaatatagcrtccacaccagagagtgttgattgtctcttttgtctctagttagtcagtgacaggctattatgtactttttccttcagtggacgtgtgtccaacctattat

SEQ ID NO: 235654 - DNA, 201 bp, Homo sapiens
ctgcgtttacttgttttccaatatgtaacaagtattttccttctgtgagtagtaaccctataaggaaagccttatttcgtttgtgccttgtaaagtgataygctcttttcaatttacaattatttttgcttaattaatggaatattgcagactcacagagaagcacggggaataacaacataccatttgcctaccacccat

SEQ ID NO: 235655 - DNA, 201 bp, Homo sapiens
ctacccagccggggaaactgtgctttttccacagaactgtgcaacccactgatcagaagatcccacttgcaaacccaccaaagtctagcatcccaactccrgaatgtgcacattctcagctggaatctgcttaagccctgctgaactccccgagggaggggtgaccaccactggctgctgctgcctgctgtctaagccttt

SEQ ID NO: 235656 - DNA, 201 bp, Homo sapiens
taaaataagaatgacaatttattaatttaaaatacatactctaactgtcaggagaaccagaatgttcacttcagcatgacaagtgcattctttccctgtgrgcaggcttctgtgggaaagcaaattattatcagcaggttgcttggtgagcatggaatcagagcaaggggaattagctgtaataacttgactgctgaacgg

SEQ ID NO: 235657 - DNA, 201 bp, Homo sapiens
ttacatcatgggccttcataaagatcttattcttctatgactctgtgtaagttgctacctggaatcttttataagctctaagatagaaaactggtagagtwgtttctgtaggtgatatgtggcctataagacctgttgtatgattgagtttaccagcacatttaatgaaagaaagtctcaattcaaagaggggtttgatgg

SEQ ID NO: 235658 - DNA, 201 bp, Homo sapiens
caacaaagcaacctaagtcttgttgttttaatgagttatttgtttctctgggcctacaatttaatttcatacttgatttctctctctttagaagtggaacrgatagtgaaagccaatgaccgtgaatataatgaaaagttccagtatgcggtaagtgaaacacacataacacatacgtactaggataggtcttacctaaag

SEQ ID NO: 235659 - DNA, 201 bp, Homo sapiens
tcaagcgattctcttgcctcggcctcccgagtagctgggactacaggcgtgtgccaccaagcctggctaattttttgtattttagtagatacggggttttrccatgttggccaggatagtctcaatctcctgacctcatgatccgcctgcctcggcctcccaaagtgctgggattacaggtgtgagccactgcgcccggcc

SEQ ID NO: 235660 - DNA, 201 bp, Homo sapiens
gcacagaggctctgcggaactttctgtggattcctctggtctcccaatgtcccttcatgggattctgagtgtccactttctcaatacagaaatctcaggargtaaaggaaatccaagaaaaaggggaaacttttcctttgtcccctgatgggaaacttcacacattgccaagtattttaaagcaagatttgaccctgaaca

SEQ ID NO: 235661 - DNA, 201 bp, Homo sapiens
ctgaagaatttgtgggggagaaaattgagggggtttatttcatacactccttagccagcaacatgaaatcccatttcaacatttttcttcaccaaagttcycctcagtttttggcctttttaatgtctccttcccccattctgtgctcagtgtagctggctccagtctcccctgtcttggtgtctggggcccctcaaattg

SEQ ID NO: 235662 - DNA, 201 bp, Homo sapiens
tctcattttttgactcaatgcatgaggtatttggtttatttttatttttagattaaaataaaagataatgttgtagatgatagagaagatgaagaactctrtgtgagaatggcctaaaaaataaaaggcgatccaaaagtgttcaacttaattctacaaatttatctttccatcaggtcatggagccacaatccaaatatt

SEQ ID NO: 235663 - DNA, 201 bp, Homo sapiens
tgtcatattctgttatctatcaatactttagtatttatcttgaacatataaggatttacatatatttagccatactaccattactacatttgacaaaatarcagtagtaccttaataaatatcacctaataaccacagactgagatgtattttgagggcagaggcaatatgttggtgtactgggtgggtatgaagagaggc

SEQ ID NO: 235664 - DNA, 201 bp, Homo sapiens
gtgcttcaaaacaattttgccttcaataagttaatttcagcttcttaagtcttggattgatcatttcttgggcagtttctggttctcagctttgcagatgraagggttcctttgccaatgggctggtttctgtatgtgagccgtgacattattgtagttcttttaaatgattttccactgtaatcagttattatattgcat

SEQ ID NO: 235665 - DNA, 201 bp, Homo sapiens
attctaacttttttacttttaatttatttttcttatctaattgcattggttagtactcttagaataatacaaagtaatatggtctttttttaaatatcttyatttctgacattagtgcatatgcttctagtattatcccactaaacagaatgaaaaatttggattagaatagatatatttttggaatattcatctattcca

SEQ ID NO: 235666 - DNA, 201 bp, Homo sapiens
taatttaaacagtacaaaagaacgtaaaatggaaacgaagtctctcttccatcccaatttccctcttcattttctttctctattgtcaaccacagtagttycttgtgtatctttcaagaaattttctatgcctataaaaatgtataatatatcctacatgcacttacttctttttacatttcctaataatgtaacttacag

SEQ ID NO: 235667 - DNA, 201 bp, Homo sapiens
cgatcctgcacatgtatcccctgaatctaaaataaaagttaaattattaaaaaataagatggtaagcatagtttttcacataataaatattttaaaaagcygaggattctctgttcattcttccaggctgctagcatcccttctttgtgtcattattaacaaatagagtccatatcacttcttaacatttttacttctcca

SEQ ID NO: 235668 - DNA, 201 bp, Homo sapiens
gtgtgtgatctgtgtaaccacacagggccccacactcagagggccttatgtttggtttattcaacttctgttgccatctagaaattcttaatacttttagracagaaggtcccacgttttcattttgcactgaaccctgcaaattatgtaggtggttctggttataaatcctttgagccccacctcacagttctcctccct

SEQ ID NO: 235669 - DNA, 201 bp, Homo sapiens
tatgtgatcttggcccagttgcatgacctgttagattcttcatttataaaattgggacatgatacccaggtctgcaacatttcctgactcctggtcacccktcataatgtagtattctgtgttgtgtactgggggtactatttatgtggaatacaaaccttctgggattatacaaaaacaatcctagtaggaatctaactc

SEQ ID NO: 235670 - DNA, 201 bp, Homo sapiens
taggatttgctgagctgctttcaaaatgggatgagaggatttgctcaggatcatgagctaaagaggggcagaagtcttctgagagttgggacagtgttttyctatatccctaagctatgtatgatttattactcagtgaagaaatcaaaagaaaaaaaagagtctagagttctgtccttgttgttaggcatattgatgaag

SEQ ID NO: 235671 - DNA, 201 bp, Homo sapiens
tagagaatggttgaaaggtttgggaatgtctgagtcagaataaatatttatgggagtcctatgagtggttctcaagtatttgaaggttatcaacatagaarggccttagacttggtctaggtgaccccaggcatggaatttgctatgtggcaagaagacacttctcaaaagaagacatacatgtgaccaacaaatatatga

SEQ ID NO: 235672 - DNA, 201 bp, Homo sapiens
cactttgagtctttatcatttctttgtgttgggaaagaaagtcctctcttctggctaacttgaaatatacaatacatggttgctaactatacccaccataytctgctgttgaactttataatttattccttccatctaactatacgtttgtactaattaaccaacctctcttcatcccccgcattcccacccatacaacct

SEQ ID NO: 235673 - DNA, 201 bp, Homo sapiens
atggcttttccttattaatctgttcatctatctatttttttaaacttagtagtatttgagactgttggccctgttttcttgacactcctgttttggtctcygtaaactttctggctcctgtttctcttcttgtcccattgttttctttctcaagctcctttgctgactattctccttcatcccattcttcaatattgatgt

SEQ ID NO: 235674 - DNA, 201 bp, Homo sapiens
ctgaggcaagtggattacttgaggtcaggagttcgagactaccctggccaacatgatgaaacgccctctctactaaaaatacaaaaatttaccaggcatgktggtgggctcctgtaatctcaactactcaggaggctgaggcaggagaatcgcctgaaccgtgtggtggaggttgcagtgagccgagatcaggccactaca

SEQ ID NO: 235675 - DNA, 201 bp, Homo sapiens
gcagtggctcatgcctgtaatcccagcactttgggaggctgaggcaagtggattacttgaggtcaggagttcgagactaccctggccaacatgatgaaacrccctctctactaaaaatacaaaaatttaccaggcatggtggtgggctcctgtaatctcaactactcaggaggctgaggcaggagaatcgcctgaaccgtg

SEQ ID NO: 235676 - DNA, 201 bp, Homo sapiens
tatatctatatcgtttattataaataaaaaataaattatcattatctattgtcatactaccgtgttatcaaatactagaacctgttccttctatctgactrtatgtttgtacccattaaccagcctaccttcacccccttcttcctcttccccttcctaacctctggtaaccaccattctccctctctaccttcatgagat

SEQ ID NO: 235677 - DNA, 201 bp, Homo sapiens
actcagctgttgctccatgctggcctttactacaaaatgtaaactcagagtgatttcagttttgatttttttaaatgtattttttattttttatgtgataygtaataactgcacatatttatggggtacatgtgatattttggtatatgcatacgatgtgtaattagcatatatatcacctcaaacatttaccatttcttt

SEQ ID NO: 235678 - DNA, 201 bp, Homo sapiens
ctatagcgctgatgaatattttccttgaatattgctctgacaagtagctcagatatctaatttgggagatgtctaattctctttcttttctttttttttttagaaacagggtctcactctgtcacccaggctggagtgcagtggtgatcatagctcactacagcctcaaactcttgggctcaaatgatcctcccacttcag

SEQ ID NO: 235679 - DNA, 201 bp, Homo sapiens
cgtaataggacctaggggtcatggaggttcaatgccaacagcattttggaaagtattgtttttgttctgcagttggggaataaagtctgtattttttttttgtataattagattacataacaccataaacattgctttgagcatatattatttaacaggtaatgtgcttgtcctttgatagagggtgataaaaaagatgaa

SEQ ID NO: 235680 - DNA, 201 bp, Homo sapiens
tatactatattagtaaaaaatataaatgacattatatagttttggaaggaccaattctactaattctgtaaatagaaatacagagataaaattcagagatrgctattaacaggggcaagtggcagataaccgttaaagaagaagaaattacaagaagcttcttggaaggctcttacgagatctttagataaaagttgctca

SEQ ID NO: 235681 - DNA, 201 bp, Homo sapiens
ttaaaaatataattttaattttttcatggaagtttaatttatatataaaaagcacacaggtctaggtgttcagctcagtgaacttcgacgattatatacayccatgtaactacaaagggtgtataaaacaagatatagaacattgatttctatcaccccagaaagttcccttgtgctccttttcgttcattctttctacac

SEQ ID NO: 235682 - DNA, 201 bp, Homo sapiens
ttatatagttttggaaggaccaattctactaattctgtaaatagaaatacagagataaaattcagagatagctattaacaggggcaagtggcagataaccrttaaagaagaagaaattacaagaagcttcttggaaggctcttacgagatctttagataaaagttgctcaactctaaactttttcaagattatcaaagtac

SEQ ID NO: 235683 - DNA, 201 bp, Homo sapiens
gataaaagttgctcaactctaaactttttcaagattatcaaagtacaaatcacactgtcatgtgacaggcatttctctgtgtagatgtatgaacagcggcratatggcaaaatagaattatttaccacccttcacagtgctgctgttgcatctaactggaagccatttgtgacattttttctttcctttatgtcacaaagg

SEQ ID NO: 235684 - DNA, 201 bp, Homo sapiens
atagaattatttaccacccttcacagtgctgctgttgcatctaactggaagccatttgtgacattttttctttcctttatgtcacaaaggcatagcttctkctttcaataaattgtgcacaattttggttcatcttaattaagtaaatattgatttaagttccccatatgttccagggccttcaagctaagggagaatgtg

SEQ ID NO: 235685 - DNA, 201 bp, Homo sapiens
aattttagaattttttttatacttctgtaaaaaaaataccattgaaattttgatggggatttctatggttcactttgggcaatatggagattttaacaatrttaagtcttctactccatgaccattggatacatattcatttatttgtgtctttaattgctttcatcaatgttttcttttttttttttttttttgagacag

SEQ ID NO: 235686 - DNA, 201 bp, Homo sapiens
atcagggatggaaagtatttattgaatcagaaaattgtactgctgcaaaggacctttgaagttagattgtttaaacatctcctttttacatgtagaaactragatacagtgatggtaagggatttacacaaatcacaatcagtttgtgattcttccagaccagtgattctaaatgtgtggtccagggaaccttagggaact

SEQ ID NO: 235687 - DNA, 201 bp, Homo sapiens
aggcacgtgtcaccacgcccggctaatgttttgtattttagtagagacagggtttcaccatgttggccaggatggtctcaatctcctgacttcgtgatccrcctaccttggcttctcaaaatgctgggattacaagcatgagccaccacacccggcctcatcaatgttttctaattttcagtgtgcaagggttttgagagc

SEQ ID NO: 235688 - DNA, 201 bp, Homo sapiens
cagggtttcaccatgttggccaggatggtctcaatctcctgacttcgtgatccacctaccttggcttctcaaaatgctgggattacaagcatgagccaccrcacccggcctcatcaatgttttctaattttcagtgtgcaagggttttgagagcccccagctcaaactggggctccagcgccagagcagctagcaacaacc

SEQ ID NO: 235689 - DNA, 201 bp, Homo sapiens
caaccccttggtgactagtttcctttcattcctcttacatatggaaggatcccatgatgcctatgaagtatcaggcattaggtcattgaacctctgagcckttctcaatgggaatagttatgggggatttgttttcagcgtcctttttttccaggatgtgatttattgccaaaaggtctttatatcccctcatacactgtg

SEQ ID NO: 235690 - DNA, 201 bp, Homo sapiens
ttatatttgtacatattatgtcacaagatcttattttcatgagtgctaatttgggaatgaaaaggtttttctgaaaactagatgagaaggctgcacattcrttagtgttgctacttgtgcatgggtttagcaagtagggaatttgatcctgaaacccaggtctttgaatttccctctgcactgcttgtattttatcacctg

SEQ ID NO: 235691 - DNA, 201 bp, Homo sapiens
ttgctatcttaaaccagaagctcttttagctcttttagtccactttaaacatgctggcttactatattttatacatccttatatattgccttactcctttytggaactggacaaattcagtgataattgtgcaggtgtgagttcacactggtaaatcatcaaccccttggtgactagtttcctttcattcctcttacatat

SEQ ID NO: 235692 - DNA, 201 bp, Homo sapiens
ctacttgtgcatgggtttagcaagtagggaatttgatcctgaaacccaggtctttgaatttccctctgcactgcttgtattttatcacctgttgtgctctytctgacatcagccccctgtaggctttaagaaaatacagctaagccctcaaaactttcattaaaaatggacttaggttattaagtaacattttaactgaat

SEQ ID NO: 235693 - DNA, 201 bp, Homo sapiens
aaaccatcagccctatgagataattctttttttgcagggaagtagggagctatagattaattattctgaaactgggttattctttttgataaatgttcccyaatatttaactgatttataaatgtttacttcctaaaataaatgaggtattctcatttaattatcttggagaatataactggaagtacatggctcaaagac

SEQ ID NO: 235694 - DNA, 201 bp, Homo sapiens
tctctgacatcagccccctgtaggctttaagaaaatacagctaagccctcaaaactttcattaaaaatggacttaggttattaagtaacattttaactgarttgggctttattttgtgttagaaactgccatcaacatcggttatgcctgcaacatgctgactgacgacatgaatgatgtgtttgtgatagcagggaataa

SEQ ID NO: 235695 - DNA, 201 bp, Homo sapiens
gattgagaccatcctggctaacatggtgaaaccccatctctactaaaaatacaaaaaattagccaggcgtgttggcaggcgcctgtagtcccagctactcrggaggctgaggtaggagaatggcatgaacctgggaggtggagcttgtagtgagctgcgattgcaccactgcactccagcctgggtgacagaacgagactc

SEQ ID NO: 235696 - DNA, 201 bp, Homo sapiens
gcttcattctgacctacaaattaagaatctacacggaatgggatatgggactttgtatttaataagcacctagatgaagcttatgatcagataagtttggraaacagctgtaaacagcatataaagatggaatagagtctttcagcattaaagaaagtagatattttgatgtagttactattgaacccagatatacactgt

SEQ ID NO: 235697 - DNA, 201 bp, Homo sapiens
agcactcaatgtttcagaatcatttttccttgttttcatacaagttgggggtattaatatcacagatgtaggccttgggaaaatttaacatttgactttartttatctaaatcttctatttcctggctaagaaatattatcttcttaggcaatttttcttcactttcatcaacagccctgtaaatgggcttttactgtagg

SEQ ID NO: 235698 - DNA, 201 bp, Homo sapiens
tagagcataacacagtgaatttgagatttaaattccaggtgctaggccagattcactcactagctcagggactcctcccacacagcagccatacagcattscagattcagaccagcaccccagagaaacaacaaatagaactgcttgtcaagtggttggtgctcatagcattgtataaagaagagagagagaacttagatt

SEQ ID NO: 235699 - DNA, 201 bp, Homo sapiens
atttcattttcatttaagaacagtgacatatttttaatatatataaagtgatgatgctatatgttatttcactgtaggtgactacttttacagttttgaayggttaattggtatttagtaacctttgctttttctcctaactaaaatttgcctttaaatgaaatttcagcttttatggatattttgggaaggaaaaacata

SEQ ID NO: 235700 - DNA, 201 bp, Homo sapiens
attgtctgtgcttttgttgtcatgtctatgcaagaagtcattgtcgagaccattgttatgaagcttttcttccatattttcttctaggagttttatagttkcagggattatgtttcaattttcaatgtattttaatttgatttttgtgttagatgtaagataatggtccatttttttcttttgcctgtgcatatctagttt

SEQ ID NO: 235701 - DNA, 201 bp, Homo sapiens
ctcatgatccaatcacctcccactaggccccacctccaacactggagattacatttcaatatgagacttgggtggggacacacatccaaactatatcacaygtattgagtaattcttgcttatcactttgttaaatgctctagacacttaaaaacgtataaggtctcagcccttcaggaactcttggaattttgagattat

SEQ ID NO: 235702 - DNA, 201 bp, Homo sapiens
tttgggaaacagctgtaaacagcatataaagatggaatagagtctttcagcattaaagaaagtagatattttgatgtagttactattgaacccagatatayactgtttatgtgaaataaaatactgtgagatttgtgtaactactgcacagtaccagaaaatacgtaagtgctgaaattggaggtagcagtggacagacat

SEQ ID NO: 235703 - DNA, 201 bp, Homo sapiens
gtttgttgagagtttttatgaagggatgttgaattttatcaaatgatttttctgcatcgattgagataactatatggtttttgtccttcattttgttgacrtgatgtatcatatttattacgtatgttgaaccatgcttgcattcctgggataaatttcacttgatcgtggtgtattatatttttgatctgttgtaggaat

SEQ ID NO: 235704 - DNA, 201 bp, Homo sapiens
gaaagagtatgggcttcatgtcagctggattcaagttggaatctcagcttcatgcttaggctgagtgggaaacttttgatatgggaataacctctgtttgyttggtttccttatttgtaaaatggggatacaaatatctactctatatcttattttatttgggggattagataagaacttaaagctttatgactgttccat

SEQ ID NO: 235705 - DNA, 201 bp, Homo sapiens
ttttacaattagaaaaaagctaaaaaaattatcttttttaatgagaagaaaaaatattcaaaagaaaaaaaataaagaatttccagctagactcaatattycaggagccttggggccaccttgctcagctgactggaaaataatgttatttctactcagacttgtaggtaaccccattcttagagtataagacagagaggc

SEQ ID NO: 235706 - DNA, 201 bp, Homo sapiens
ctagcagggggccagacatggtggttcatgcctgtaattccagcactttaggaggccaaggtgggaggattgtttgaggccaggagttcgggaccagcctragcaacatagtgagaccctgtctctacttattaaaaaaaaaaattctagcaagatagtattatgtccctctcatcttttaaacttgtttcttagtgatct

SEQ ID NO: 235707 - DNA, 201 bp, Homo sapiens
aaattctatgtaagagaaatcattatagttatagtgtgcattttcttaatactaggactgagggtaaaatggcatccaaaaaagctattgctcaaagttgytctctatactcctaatctcagctacttatatctaagcctacagctttgggatgaaatattgaaatcataaatttgcaccatctctttttcttgtgttatg

SEQ ID NO: 235708 - DNA, 201 bp, Homo sapiens
tgttcacaaactgatttttaggaagaggttgtaaatggcctgttttcttttgcctactggaagtggaagttggataatgtataatttattatattatgatkgagaagaggccagattaggagttgggtgttgcctttgaggacctggagtagaatcaatgggcatttgccaatttccattgaaaatattaaaaaaattact

SEQ ID NO: 235709 - DNA, 201 bp, Homo sapiens
gcgccatcttggctcactgcaacctccgcctcccaggttcaagtgattctcctgcctcagcctcccgagtagctaggattacaggcatgtgccaccaagcstagctaattttgtatttttggtagagatgggggtttctctatgttgttcaggctggtcttgaactcctgacctcaggtgatctgcccgcctcagcctccc

SEQ ID NO: 235710 - DNA, 201 bp, Homo sapiens
ctcttgctgtcttcctttgtgttttgtcagtctttcgtattaagatgctttgattcctttctgtttttcttttatgtaagttctataggtactttttctgkttgccttggagattacataagatgtcttatagttatgatagtttaagttgataacaagttaaatcacatacaaaaatgctatacttttaaatgtcacaat

SEQ ID NO: 235711 - DNA, 201 bp, Homo sapiens
ctctttgacctttggaccaaggcacacaccaatttgcagtttcccagtcatctatgcactgtaccaccaccatctccttatatctagaatctcctccgagyttcttttataagggaggcagttctgtgtttgcattctgactttaccgcataatcttgctaggactctgtttcttcccctgtaaagtagggctgataacag

SEQ ID NO: 235712 - DNA, 201 bp, Homo sapiens
tccctctcccctttgtaactccctaaatttcacacatagcactctgactttatacatctttttctttgattctgcaaactgattgttaaatgtgtgatatsattcttggaaccatgtgacctctgggttcctaaatgcagatgtgattttggtcttggacagcagaaggagatattgagctagaagttaatgtatcttttt

SEQ ID NO: 235713 - DNA, 201 bp, Homo sapiens
ggtttttggttacatggatgaattgcagtcgtgaagtctgagattacagtgcactcatcacctgagtagtgtgcattgtatctcatatgtagatttttatygcttaccctcttcccaccctcctcacttctgaatctgcaatgtctgttacaccactctatatacctttgcatacccatagcttagcttccacttataagt

SEQ ID NO: 235714 - DNA, 201 bp, Homo sapiens
aataatcagtttagagaggaacataaatgacctgatggagctgaaaaacacagtatgagaagttcgtgaaatatacacaagtatcaacagccgaattgacyaaacagaagaaaggatatcagagttcaaagactaccttactgaaataagacaagcagacaagaatagagaaaaaaagaacgaaaagtaaggaacaaagct

SEQ ID NO: 235715 - DNA, 201 bp, Homo sapiens; identical to SEQ ID NO: 45204

SEQ ID NO: 235716 - DNA, 201 bp, Homo sapiens
ttactatttcattgttgattgattttgtctacttgttggggggaaataatcctaaaggaatactggggctgtccttttaagtacacattttgagatgaaarcaggaagctttaacataaattactggggagaattagcattaggcgtctgtaacatccatgttagtagaaacctcacaatgtatcacttctttgggttgtg

SEQ ID NO: 235717 - DNA, 201 bp, Homo sapiens
aattttgcatttacacttgtgcatttctggtttggtttcttctgtggtttctcagcccaggttggtaaaagcatgtttttttttgtttgtttgtttgtttktttttgtatgatattacaaatgactcttcttcatagctctttactaataaattcagagcattttttaatggctgattcaagtaatagtattacaattatg

SEQ ID NO: 235718 - DNA, 201 bp, Homo sapiens
taataaattcagagcattttttaatggctgattcaagtaatagtattacaattatgtaattgatagttgacttgagctttgtacccaagaagaatatgtayctagctggaattttatttatttattttcttatttagatagtcaaccagtgagtactccttccatgcatactttagtttttgttgaaatgtttttggtatg

SEQ ID NO: 235719 - DNA, 201 bp, Homo sapiens
tttaaagccttattacctgaatgtgtcatgaataggtaaataaagtgaggctcctatttttttgttggtcttttcacacttggactgatattagaaggaasagctgagatgagactgtggtgatgtcctcttttagtgtccatgttttttaccccgtcttagatggcagaccgcctccaccaaattccttttcgttacatc

SEQ ID NO: 235720 - DNA, 201 bp, Homo sapiens
gaccagaggggaggctgttgcagtagcctgggcctcgaggatggtggcttggaccagggtgtgtgcagaggaggcctgagaagtggccgattctgagcatytaccacctttcttttctgcctcaaatcctggcccccttgtatctctttttaaagccttattacctgaatgtgtcatgaataggtaaataaagtgaggctc

SEQ ID NO: 235721 - DNA, 201 bp, Homo sapiens
cctctcagctagtcctagtcaccagaagggggccttaaaatttttccaaggggatctaaggaccacaagtagaagtggggcatttactagaataactattygagtagctggagatctcttgcaaggattcttcaacagaaacctgttgtagaagaaacattgcttggccaggaacggtggtttatgcttgtaatcccagca

SEQ ID NO: 235722 - DNA, 201 bp, Homo sapiens
atggagattatattctagtgggatgaagacagataataaagacataaatcagtaagataatatcagaattgttaagaaagaacttggtaatgtaaaaggtstcactgagagggtgaggtgacactggagttgtgacctgagtgttcagaggaaacttccatatgaataccttgggattaaagtgttccaggcagagggtac

SEQ ID NO: 235723 - DNA, 201 bp, Homo sapiens
tggattcaatggtagatctactttcatttcttggagaaatatccatattgttttccatagagggtgtactaatttatattcctaccagcagtgtacaagcyttcccttttcaataaaggttttttttaaattattcattattgtaggaactgaatttttctttgatcagttaattgcagaaggttcattttggaataaggg

SEQ ID NO: 235724 - DNA, 201 bp, Homo sapiens
aagactaccttactgaaataagacaagcagacaagaatagagaaaaaaagaacgaaaagtaaggaacaaagctccaagaaatatgggacttcataaaaacrccaaacctatgattgattggaggaccagaaggagaaggggaaaatggaaacaatctgaaaagaaacactttaggatattatccaggagaacttccctaac

SEQ ID NO: 235725 - DNA, 201 bp, Homo sapiens
gatcatcaggcatagaactggcatatgcacagttcacaacagggttcatgctcctatgataatcttatgcggctgctcatctgacaggaggtggagctcargctcgcttgcctgccactcacctgctgtgaggcctggttcataacaggctatggactgttataggctgttggggacccctgttttaaatgccaaaaaata

SEQ ID NO: 235726 - DNA, 201 bp, Homo sapiens
atcagttaattgcagaaggttcattttggaataagggtaagggtgatttctttgttctggttcaggattttgtattaaatgtgattaggtgttaccttgcrccagcctatggcaataggtcaaactttttctctctgctaacccagagtcagcatgtttcctggaaatttttattgtctctggaattccttgtttagtttt

SEQ ID NO: 235727 - DNA, 201 bp, Homo sapiens
ccatgttgcccacagagggaagcccatcagactatcagcagatctctcagcagaaactctacaagccagaagagattgggggtcaatattcaacattcttraagaaaagaattttcaacccaggatttcgtatccagccaaactaagattcataagtgaaggagaaataaaatcctttccagataagcaaatgctgaggga

SEQ ID NO: 235728 - DNA, 201 bp, Homo sapiens
ttgttgtttttacttctgggtaaggtgtgtgagcaaaatgactcatctcattaggaatgtgcagctctcaaaagttcttgtcagtatacaggctctgcagrtgaaacaatgcctggtggtagaaaaccttggtaggttttgggagcctagttgggaatggtgctttgaagctgtaactcaggaacactggaacatttttaa

SEQ ID NO: 235729 - DNA, 201 bp, Homo sapiens
tcccattactgggtatatacccaaaggaaaatactttttaaaagtatcaagaaggcctgtgtgtgattattcttcctcttttgttttttcacatttgaagrtagaactgagatagtggagaggatcctgaggaagtaattcaaaatgatgataaactttgataaattacatgacgtagattagggctaaagaactagggct

SEQ ID NO: 235730 - DNA, 201 bp, Homo sapiens
tggagccacagtatctggactaatggcatctgagatcactgcactgggctaagggtaagatgaaagagacacaatggtttttaaattcttcttcctcttayagttcattggctaacattgtcacctggccctgacttaactgcaagggaggctaggaaataacaagtatgaatacttgttgagcattaactgtctctacca

SEQ ID NO: 235731 - DNA, 201 bp, Homo sapiens
atgccaggataatgcataaggagccaggctggattaggtggatttcttacatggaactgcaggactggggttaagcatccccctcttcagcatgactcctyacactctcaatccaccataccctgcttggctttttcttcttcttatagcacttagcactgtctggcatactggataattcatttattttttaagttaatt

SEQ ID NO: 235732 - DNA, 201 bp, Homo sapiens
cattggggggccgagaggaagactagcgtcagggcccaaaaagacatgggagggcaaaggaaagtcctaacgtaaagagactgggaagagagtgtgaaacratggggtgaggaggaagctttagcttcctgaagtggccttgtaggaccaggaaggagtgctggatcctctcctcctggaaggcaggtgtctgggagaggg

SEQ ID NO: 235733 - DNA, 201 bp, Homo sapiens
agttaataagccctaaatccttcccacgattgctcttgctttccttggccttcgattgttttctccatcacttctttccaagccctaatttacacatttcwattttaatatctctgacacacacacacacactactatcagcacatggttttctaactactccatttcaccattcttctttcctttctttccttcctgtat

SEQ ID NO: 235734 - DNA, 201 bp, Homo sapiens
gttttcctctggtgattggaaaaagactttcttgactcatgggaatcaaaactagatattgcatcctttagtttaaattaaaataggatatcaacattgtrtatgtttggcaatgccctggctagctttggcaaggtataatcgatgagaagatatgggaggcacactctttaccatgttctgtctgtgctaagtacatgt

SEQ ID NO: 235735 - DNA, 201 bp, Homo sapiens
gagtggcagcaaaacttctgagaatttgcagaaactcattgaaaccttactctgatttttccttcctgtcttctcttgctccagctgtgaaatgagtcttmaaatctgagtgccggttgacaaatgctgatagttgtcaaataagtgtagcttgtaatgcgagcccatttgtgatgatgagggcacgctatgccagacttt

SEQ ID NO: 235736 - DNA, 201 bp, Homo sapiens
gacagttggctagcccagaaaatatcaggccttcgttctgtcctcgacagctgatagaaggaaataaacatagagtctggagaaggatcgcattatcctargccttgagatagttattaagttctaattctcttcttgatcttgacaagtcattccccactgtcttgttagttcattggtactttgatgaagatgcatttg

SEQ ID NO: 235737 - DNA, 201 bp, Homo sapiens
gctgtggtatcttggaactggcccatactgattcacaagagctgattgttaaattttcatgaattttgtgagccagtggttaaatacagccattattaaaygttatataaatttacaatttaagttatattaaaaataaaagacagttaatatactcaaaatgaatcccttgctaattattttcccatgttttactattta

SEQ ID NO: 235738 - DNA, 201 bp, Homo sapiens
tttcctggaaatttttattgtctctggaattccttgtttagttttgccttctttgtctctgggatcaaaccaagtccaggaacctcctcttgacagttgaytcacaccctttactattatagtaaataaaggttatgttccttccctctaagcattgtgtgttagtgggctttttttcctgtgagattttaaccactgtga

SEQ ID NO: 235739 - DNA, 201 bp, Homo sapiens
tcctctggtgattggaaaaagactttcttgactcatgggaatcaaaactagatattgcatcctttagtttaaattaaaataggatatcaacattgtgtatrtttggcaatgccctggctagctttggcaaggtataatcgatgagaagatatgggaggcacactctttaccatgttctgtctgtgctaagtacatgtttta

SEQ ID NO: 235740 - DNA, 201 bp, Homo sapiens
aacatgatgttgatatgtgagcaagaactcactatgtaccaggcaccatgctgagtaattgcacacattatcttgttaaacccttacagctcttgaaggargagattattgttagctcaatttatggataaagagacccaggtaaattgattaactttcccagtgtcatatggctgttaagtggagaagccagactatgaa

SEQ ID NO: 235741 - DNA, 201 bp, Homo sapiens
atatcccttttaatggctgtagtattccaccgtatgaatatgccataatttattcaaccatgttgctgttagattgcgtctacatttcactatggcaaatkatacaatggcaaagtttcatgtagtacataattctcagcatgatcctctagttattttctaaggttatctccttaaaggtgggaattctgggctagaaga

SEQ ID NO: 235742 - DNA, 201 bp, Homo sapiens
tggataaccttttgttgcttgggaaataatgaatacatcttgttcaaacaggaataatttctttaaaaaacttttaatttcggaataattttaaatttgtrgaagagttgcagatactgcaaagacagttcctgcataccctcacctagcttttctctgatgttaatattaacatcttacctcaccatggtgcatttgtta

SEQ ID NO: 235743 - DNA, 201 bp, Homo sapiens
gcaaatattaccacttgtttttatttctaggaagccctgaaaatgtctgttttaccataccagagttcttagacccaagtatgtaaatgtttgtaaccatrgatgctaggcaattttggcttcaatcaatcaaaaactgtggtctttaatatatagaataataactttaaggaattctgtgaataagctcactttgacagc

SEQ ID NO: 235744 - DNA, 201 bp, Homo sapiens
actgtcataatctttaggtttattgtcctttttatattattatttgtactggtgtttgcatttgctttcagaagagattttattctttggtcacttccagytaagggcagctctcagtctcctgattatgtgtcattcctcttaatatgcctgggctgcttacagatatcacctttggttctaagaccataaggtcagtga

SEQ ID NO: 235745 - DNA, 201 bp, Homo sapiens
agggcagtttgcgaaaggcatattttctggaattatacaaaaaagtaatgaacttctgaagaccttagatgtaaaggattaagcacattcatttctcagcrcccatgtttacaagtgtttcttttcttggagctttgtagctgcccagaatgtggaataaaataataaaaataaagcagtttctgggaaaagatggttatt

SEQ ID NO: 235746 - DNA, 201 bp, Homo sapiens
cactatgttaggggtactgctgcatgtattattttgtcctcactgccacactgcaggaagggtatacatcactttagagataaagaaactgccgtttagasagatctagtatcccattaaggcaccagagctgataagaggcaggtctaggaaagaattcatatttgtctgattccaaaagtcaactcccacccacctcag

SEQ ID NO: 235747 - DNA, 201 bp, Homo sapiens; identical to SEQ ID NO: 45210

SEQ ID NO: 235748 - DNA, 201 bp, Homo sapiens
tctcactatactgttcaggtttgtcttgaaggcctggcctgaagtaatctttcaccctgggcctcctaaagtgttaacaattacaggtgtgagccactgcrttcaacctcattatctgttttgacagtaaattcaaccgtatgttaacagaatttcagatccttgtaaagtttactttctgttctgaattttggaataaca

SEQ ID NO: 235749 - DNA, 201 bp, Homo sapiens
ctcccacttcagcctcccaagtagccacatctacaactgtgccaccacacctggctagttttttaattttttgtaaagatagggtctcactatactgttcmggtttgtcttgaaggcctggcctgaagtaatctttcaccctgggcctcctaaagtgttaacaattacaggtgtgagccactgcgttcaacctcattatct

SEQ ID NO: 235750 - DNA, 201 bp, Homo sapiens
ttttccttgaatattgctctgacaagtagctcagatatctaatttgggagatgtctaattctctttcttttctttttttttttagaaacagggtctcactstgtcacccaggctggagtgcagtggtgatcatagctcactacagcctcaaactcttgggctcaaatgatcctcccacttcagcctcccaagtagccacat

SEQ ID NO: 235751 - DNA, 201 bp, Homo sapiens
aaaaactctttttttcttggatttcatgaccctcatgcagattcttcttgcttctcaggctgctctgcctccgtctccttcattgcaccccagtggtggamtttccccctggctcagtcttctgcacttttctgtctgttcactttgttcctcagagaactcctcctctattttggtttctgttcatctctatggagataa

SEQ ID NO: 235752 - DNA, 201 bp, Homo sapiens
ttataaatattgcagggcataaaccttccattcataggttcatcagcttttatgattgggagtgacagggaggcagcattgcagtccttagtcctaggtgyggtctagaatttaccctgtatttaagtcactttggaatagaagttttttttctcggacaggatacactatatatttttaaatctcctcccatagtcgtag

SEQ ID NO: 235753 - DNA, 201 bp, Homo sapiens
gaagaacacagacaataatatgattataaatctagtcaatccataagaataatctgtaaaactttcagtaggacaatttggttgtgtctgattatgaaagwaacattaaaaaaattaaaagctttcttttagacaacaacaatttaaaaacttatcctatcagtaaaaagttttatattctgccctttgtatacgtgggtt

SEQ ID NO: 235754 - DNA, 201 bp, Homo sapiens
tgggaaatcatctttggttccactagagatgagagagaaagacttaatatcttccatttcactatactaaaattctgtgcaaaaagatgcttgaaattatygtagagactgaatctttgctgcttgttataaatattgcagggcataaaccttccattcataggttcatcagcttttatgattgggagtgacagggaggca

SEQ ID NO: 235755 - DNA, 201 bp, Homo sapiens
ttgagtgtcatctagcccaactttctcactttacagatgagaaaaaccaaggattaatttccactaagatcagaaataagctatggttcctgctattaccrtaactattttctactgttctggatatccttgtaaattacaaagacgtgaaactgaaatatccatgaataaaataagacatgaaactgaaataaacctatt

SEQ ID NO: 235756 - DNA, 201 bp, Homo sapiens
tttacatggagggtgggggtggggtgggatgcagaagagtaaaccatatatgaaaatatataaataaataaacaaagagtgtcagttatgtatcttaataycatatcatactctacatagtcacagtgtaatttcagggagaaaaaaactgctaccatccaaatagttaaaaaatgaattggcgccatacctcttttgggg

SEQ ID NO: 235757 - DNA, 201 bp, Homo sapiens
tttcatacttgtatgcattaattatggttttaaaatatcccatttctggccaggctcagtggctcacgcctgtaatcctagcactttgtgaggccgaggcrggcggattacctgaggtcaggaggttcaagaccagcctggccaacatggcgaaaccctgtctctactaaaaatacaaaaaaattagccaggcatggtggc

SEQ ID NO: 235758 - DNA, 201 bp, Homo sapiens
gattttggtgagatgtcttggcagccaaatgaactggaaagcgggcatgtctttgctgaggcatggatggcagggctgttttcagacctcctgaggggagraaaggctgtacttttataaaccctgtagttcacatcaaaggctgccagcatcattttaatggggaaacattttaagggacagtaaattacaagtgggaag

SEQ ID NO: 235759 - DNA, 201 bp, Homo sapiens
ctctaaaagagaggaaaaaggctgttttgggagaatgaaattataaattattatgctgactttgggcggtgcatgttagaaaatctttctatacaaatgtrtgctcatatgcattgaagatacatgagagacaataatgaaatttgtctgatatttcttaattacttaatagtgtctcgatagagataaaaatggaccagt

SEQ ID NO: 235760 - DNA, 201 bp, Homo sapiens
cgttgatctgtctaatattgacaatgaggtgttaaagtctcccactataattgtgtgggagtctaagtctgtttgtacgtctctaagaacttgctttatgratctgggtgctcctgtattggatgcatatatatttaggatagttaactcttcttgttgcattgatccctttaccattatgtaatgcccttctttgtctct

SEQ ID NO: 235761 - DNA, 201 bp, Homo sapiens
cagctatctaggaactctttgaaccctgttctttaaggctgttatggaggcattttttatataggcatgactgataaagtcattggccattggtgatcaayttaaccttcagtccctcttcccttccaggagattagaggctggggctgaaactcccaaccctctaatcctaccttagtctttctgatgagcagcccccat

SEQ ID NO: 235762 - DNA, 201 bp, Homo sapiens
tggtctgagagactgtttgttgtgatttccattcttttgcatttgctgaggagtgttttacttccaattatgtggtcaggtttagaataaatgcaatgtgrtgctgagaagaatgtatattctgttgatttggggtggagagttctgtagatgtctattaggtccgcttggtccagagttgagttcaagtgctgaatatcc

SEQ ID NO: 235763 - DNA, 201 bp, Homo sapiens
cttaaggggatttgaggctgagacgatggggttttctaaatatgcaatcatgtcatctgcaaacagagacaatttgatttcctctcttcctatctgaataycctttatttcgttctcttgcctgattgccctggtcagaacttccaatactatgttgaacagaagtggcgagagagagcatccttgtcttgtgctggtttt

SEQ ID NO: 235764 - DNA, 201 bp, Homo sapiens
caaatgagaggcatagcacatacattagggctacctgaagacctgtcaaatgctcatatatggtagagagaagaaaaagaaatactagactctccttttawgccacattatcaccaacatctgccaaaattcacccatagaacttatttgcatttagataagaatgaaacaatgtataatttagagccttctaaaaattcc

SEQ ID NO: 235765 - DNA, 201 bp, Homo sapiens
agtgaacatagtactgaataggtagttcttcaacccttaccccactccctacctccctgctgtagcagtccctggtgtctattgttgcacctttatgactrtgtgtacccaatgtttagctcccacttataaatgagaacatatagtgtttgattttgtgctcttacattagtttgcttaaggtaatggcctccagctgca

SEQ ID NO: 235766 - DNA, 201 bp, Homo sapiens
tctcttttggtagcagtacatgctgttttggttgctgtagccttgtagtatagtttgaagtcaggtagtgtaatgcctccagctttgttctttttgcttargattgtcttggctatatgggctcttttttggttccatatgaaatttaaagtagttttttctaattctgtgaagaaagtcaatggtagcttgatggggata

SEQ ID NO: 235767 - DNA, 201 bp, Homo sapiens
tcacctctcaactaggacacttcagcaggcttttcagctgtgtttagggggaagacttgctcccctgcatgttttaacctcatagaaataaaacggaaaayacacacattatctcccatttctgaggagattaaaaagttgagagtaaggatagccaagcagtgctcttggtacaaaatgaatttgagtgaaaaatttctc

SEQ ID NO: 235768 - DNA, 201 bp, Homo sapiens
atagggaatcctttctccattgcttgtttttgaaggtttgtcaaggatcagatgggttgtaggtgtgtggcgttatttctgaggcctctgttctgttcagytggtctatatatctcttttggtagcagtacatgctgttttggttgctgtagccttgtagtatagtttgaagtcaggtagtgtaatgcctccagctttgtt

SEQ ID NO: 235769 - DNA, 201 bp, Homo sapiens
tggtgatcaatttaaccttcagtccctcttcccttccaggagattagaggctggggctgaaactcccaaccctctaatcctaccttagtctttctgatgascagcccccatcctgaagctacctagggacttccagccatcagtcaactcattaacaaataaaaagacacatatcactgaggatttcaaggagttttaaat

SEQ ID NO: 235770 - DNA, 201 bp, Homo sapiens
ggtagaatttggctgtgaatccatctggtctgaacgtatttttggtttgtgggtttttaaattactaattcaatttcagaactcaatattggtctgttcarggtttcaatttcttcttgtttcaatcttgggatattgtgtgtttccaggaatttatccacttcctctaggttttccagtttgtgtgcatagaggtattca

SEQ ID NO: 235771 - DNA, 201 bp, Homo sapiens
tagtccatcttgagttaatttttgtataaggtgtaaggaaggggtccagttacagttttctgcatatggctagccagttttcccaataccatttattaaayagggaatcctttctccattgcttgtttttgaaggtttgtcaaggatcagatgggttgtaggtgtgtggcgttatttctgaggcctctgttctgttcagtt

SEQ ID NO: 235772 - DNA, 201 bp, Homo sapiens
tccatctggtctgaacgtatttttggtttgtgggtttttaaattactaattcaatttcagaactcaatattggtctgttcaaggtttcaatttcttcttgwttcaatcttgggatattgtgtgtttccaggaatttatccacttcctctaggttttccagtttgtgtgcatagaggtattcataatagcctctgaggatct

SEQ ID NO: 235773 - DNA, 201 bp, Homo sapiens
tatgtcctgaatggcattgcctaggttttcttctaggtttttatggttttaggtcttatgtttaactttttagtccatcttgagttaatttttgtataagktgtaaggaaggggtccagttacagttttctgcatatggctagccagttttcccaataccatttattaaatagggaatcctttctccattgcttgtttttg

SEQ ID NO: 235774 - DNA, 201 bp, Homo sapiens
tgagagagttcatacactttgccataaaaattctgcttctggagctggaagtcataaatgattactagaatgtaatcagaattatattaatcataattattgtaataattaatgtaattatgtaattagaatgtgatgcaacacttttcatggtaaatgggaagagtggtatgacaacacatcctgttttcactcagtatt

SEQ ID NO: 235775 - DNA, 201 bp, Homo sapiens
tgggcactcaatacatgttttctgaatgcacaaatgaaaacacggagtttgcctccttaaatattgtgaactatacctgtctcttgtcttacctagtcctsgccctgtgaggcttaattgaatatgtgaaggtctattgaattcctccctgcaaaaagaggtcttcagtataaacatagcacatattttctgggtagaatt

SEQ ID NO: 235776 - DNA, 201 bp, Homo sapiens
ttgagagagttcatacactttgccataaaaattctgcttctggagctggaagtcataaatgattactagaatgtaatcagaattatattaatcataattattgtaataattaatgtaattatgtaattagaatgtgatgcaacacttttcatggtaaatgggaagagtggtatgacaacacatcctgttttcactcagtat

SEQ ID NO: 235777 - DNA, 201 bp, Homo sapiens
accatagttcaaagacagacttatgtacatatcttttattcattttcaacttttagaatcaatctttagaccaataaaaagtatttaagtttggctacagraaagaacacaaatgttttaaacctctatagtgaaatagaaaaaaaaataaataggttggagggagaagtgaagaggagatgaggagtgggtaataacgtc

SEQ ID NO: 235778 - DNA, 201 bp, Homo sapiens
gaattatcctgtacattattttgaaacctcctctttaaacttagaattataatcacagacatcttttatgtctttaaacatttctcaataacattattttwatttacatttcccctaacttttaattttgaaaatgttgaattttacagaattgaaagaatgatatgatgaacacgcagaaacccttcaccttaattatac

SEQ ID NO: 235779 - DNA, 201 bp, Homo sapiens
gtttctcaagctttagcaatgcacttgcaatattgcttccaaaagtgttccttaaggtcaacacttgattttcagcttctgaaagcaatagtctagtgacrtggagcatgataggtgctacctcactctcagacttgcattttctcaaggagattttcagtgaagtctagcagctcttagtatgctatgcctcatcaggaa

SEQ ID NO: 235780 - DNA, 201 bp, Homo sapiens
attgagagagttcatacactttgccataaaaattctgcttctggagctggaagtcataaatgattactagaatgtaatcagaattatattaatcataattattgtaataattaatgtaattatgtaattagaatgtgatgcaacacttttcatggtaaatgggaagagtggtatgacaacacatcctgttttcactcagta

SEQ ID NO: 235781 - DNA, 201 bp, Homo sapiens
ttcttggacttgttacaatggcccatgacctgcaagactgatgtgataaaatgatcaccatcatttgtatcatcatgagtgggactgacacatctttagawgacatcagtttctgtagatctggcaatagtctggagagctttttattttaacctaaaacatgcattcatttatttagtcactccacaaacatttttgagt

SEQ ID NO: 235782 - DNA, 201 bp, Homo sapiens
gttaattgacagttttttgatgaggaatggaacttgttaatcctcctcacacagaacttcattttacagacaaatgctaattgctatatagtgagtctaasttttggctgtgtaactgtgtctgcattcgcttcctgacagtgactggcagagaaagctgaggccagtcacttcttcttggacttgttacaatggcccatg

SEQ ID NO: 235783 - DNA, 201 bp, Homo sapiens
actttcattaatcacgtcttcatctgggggagcattgccatttatttctccattttatttacaatgcacagtaatggcatctttggcatcttcccaaaccwgtttccatttgttggtaagtgagtcatgttgactagtggaacctagtgtctgctgctgtttacttgtcttataatttattttttgtgttaggtagagctg

SEQ ID NO: 235784 - DNA, 201 bp, Homo sapiens
ctttaaggtttcttttgtctgttatgagaatagctacttctgcttgcttttgttgtccatgtgcatagaatatctttttccaccccattaccttaagtttmtgtgagtctttatgacacacaggtttctgttgtttttgtcaaatgttgtagacatcatgacacttaccccaaatacttcagcacacatcccctaagaaca

SEQ ID NO: 235785 - DNA, 201 bp, Homo sapiens
gttctgtgaaaaatgatgttggtattttgatgggaattgcattgaatttgtagattgcttttggcagtatagtcatttttacaatattgattctacccatycatgagcatgtgtttccatttgtttgtgtcatctatgatttctttcagcagtgttttatagtcttccttgtagaggtctttcacctccttggttaagtat

SEQ ID NO: 235786 - DNA, 201 bp, Homo sapiens
ggaaaaaatgaaatataataatgatattattctggtttaaaaaaaataactgcctggagaagactacgttcatgagaataaattgaggaaaagttttggaytgcattttgtttctctagagcctgggcaataatttcctgtcacacatagctctcgaagttcagttgtggttctcagctgtggcttgtgaaagaatcacct

SEQ ID NO: 235787 - DNA, 201 bp, Homo sapiens
tgtgaagaaaattagaccacatgtagggaaaaaatgaaatataataatgatattattctggtttaaaaaaaataactgcctggagaagactacgttcatgrgaataaattgaggaaaagttttggattgcattttgtttctctagagcctgggcaataatttcctgtcacacatagctctcgaagttcagttgtggttctc

SEQ ID NO: 235788 - DNA, 201 bp, Homo sapiens
ctagcatccaataaggacaaagaaaggataagctgccaagtgcctggtactttgattagctttctgagagataaatgtcttctgcttgcattctcattgcygctgtttgggtgtagagtccccttttttttcatcttgcttgaagaattgttcttcctttcctctgctctggggactcagccaatgaacacagaacatgtt

SEQ ID NO: 235789 - DNA, 201 bp, Homo sapiens
ccattctacttagatacctcttctgtctccccgcaacctgcaggagcaaccacaggatcttgaccatggcaatgctctctgtcaccttatctataaaatgrggataacggtaattcctgctcgtagagttttggtgaggactgaataagacaacacgtgtcaagttcttagcacaaggccaagtccccagtgaatggcagt

SEQ ID NO: 235790 - DNA, 201 bp, Homo sapiens
tacttgaacagacagggtctcactatgttgcccaggctggtctctaactcctgggctcaagcaatccatctgcctcggccttccaaagtgctggaattacrggcatgagccaccatgtctggcccatacagatcatttatagactgcatatttaactatggaaacatttctagaattcagccccatttgccagttgtcatt

SEQ ID NO: 235791 - DNA, 201 bp, Homo sapiens
gaatggttaacaattccaggtgagcaaaggacacttactttggtaggatatttctatgttgtcagtttgtttatctgttgtgttaaggcgtacccagctayagttttttttaaatacataatcttaagaaatgcagccattgttttcccaaggaattagcttttgagtgttctttccaaagcaataggaattcatttctat

SEQ ID NO: 235792 - DNA, 201 bp, Homo sapiens
actaggcaggtgcaaacttcctgccacagggcagttctcgcgaaacatcacgaggtaaaatgatgctgttttaatcctcaaagacctcccgtttgcatttkattttatttacagatagccttggataccagttactggactttcattaatcacgtcttcatctgggggagcattgccatttatttctccattttatttaca

SEQ ID NO: 235793 - DNA, 201 bp, Homo sapiens
gacaaatgagagcttttctcttaccaaataagtacagtgattctgatcttaactcgagggaaaaagcattccaaggaatttcaggtttctcggtcctaaarattgagacataggaaaagagaacacccaggtatttctgtccggaatgatgaagaccttctgccaaagcttctattaggctttagaatatgtacaaagagt

SEQ ID NO: 235794 - DNA, 201 bp, Homo sapiens
accttggcagatataatggcttgcgtatagaagttctaaagtcaattttctaccagaaatatgaagtcagatcagtcccctgtgtgtgttcagaaagtggrgatgcccgcggttggcttggcaactaggcaggtgcaaacttcctgccacagggcagttctcgcgaaacatcacgaggtaaaatgatgctgttttaatcct

SEQ ID NO: 235795 - DNA, 201 bp, Homo sapiens; identical to SEQ ID NO: 45206

SEQ ID NO: 235796 - DNA, 201 bp, Homo sapiens
gtgagccgagatcgcgccactgcactccagcctgggcgacagagcaagactccgtctcaaaagaaaaaagaaagaaaggaaaaggaaaaatcatgcaggawctttcactttagtttatggcgtctgctggtttgttaatgtagaagaatgactagactttttgtgatcagcttcctgactatgggatgaaggctattcttt

SEQ ID NO: 235797 - DNA, 201 bp, Homo sapiens; identical to SEQ ID NO: 45207

SEQ ID NO: 235798 - DNA, 201 bp, Homo sapiens
aacttgaaaatggatgttgatgatattttgaaaatggggagatgacttatatcacaaaattttaattaaccagaaaggttaattaattaaatattcacccwatcttccacataggaaagacttgaaatagagaagaggaagttaatgtattgcaagaatctattttaaaacaaaccaaactaacaaaatgccttccatagt

SEQ ID NO: 235799 - DNA, 201 bp, Homo sapiens; identical to SEQ ID NO: 45208

SEQ ID NO: 235800 - DNA, 201 bp, Homo sapiens
ctttagtttcttgatggtggggaatttgaaggatcttaggggaagtgtcagggtgatgggaacactttgaagaagctcagggaaacagctgtttatcaacmatttatagaaatattttggtattttaataactactacagctgtaacagtgcaacctggctgaattccaggactgtctatacaaggtacagtgagaattca

SEQ ID NO: 235801 - DNA, 201 bp, Homo sapiens
aggaaagaacacaaatgttttaaacctctatagtgaaatagaaaaaaaaataaataggttggagggagaagtgaagaggagatgaggagtgggtaataacstcatcttaccagttagggagtgtttataattgatgaactgaaacaaaacaaaacagccttctgtatgttacttagagttgcagaaataatcattaaggaa

SEQ ID NO: 235802 - DNA, 201 bp, Homo sapiens
tgaaccagggaggcggaagttgcagtgagccgagattgcgccgttgcactccagcttaggcaacaagagcggaactccgtctcaaaaaaaaaaaaaaaaaagacaaatgataaattggataaaatatttgcattgttttttgacagaattaatagacttaataactatagaattcttacaaatcattaataaatacactga

SEQ ID NO: 235803 - DNA, 201 bp, Homo sapiens
ctcaatctgaaaatctatgctatttgttatcacagagcagttttctgctgtcatttctttgattgttacttttctatttattcctttttctctttctaaartgccattatttgtatattggagtcatagatctgagatctgtgaatttgctattcatgtctcatatctttttgcaaatggtttccatgtctccaagtcttt

SEQ ID NO: 235804 - DNA, 201 bp, Homo sapiens; identical to SEQ ID NO: 45209

SEQ ID NO: 235805 - DNA, 201 bp, Homo sapiens
gtggatgttttgctgtgccacccacatccccccttaggactgcagaacatattttcccagctgtcaggagtgctgcccacatataaccttcagctggcagycctctctgggaattgcccttggctgacgagagtgttttccttaaggacactcctcctttctggggtcatcctgcatccaatgactgaatcatgccatggt

SEQ ID NO: 235806 - DNA, 201 bp, Homo sapiens
agattcggtcccataaattagagctaaggtggtctctctttttgcctctctgtctatgcacacaaacagaacacatacacacacacacacacacacacccctctttatttatatacatatgtatgcatgtgtgtgtgtgtgtgtgtgtgtgtgtgtgtgtgtgtgtgtgtgtatttgataaagcttagaaattggccctag

SEQ ID NO: 235807 - DNA, 201 bp, Homo sapiens
gaacagaggtcttctaactccagatgcccagctccaaagctacgtgaacctcccttctttgtaaagataagtagaagctgtgggcctccccagtcacataktaagtacagggaattcgtggtccccacctctctcactcatgtgggaatacctaggataccagtatcacccttggctaacatgggagacaaacggttaata

SEQ ID NO: 235808 - DNA, 201 bp, Homo sapiens
atgtagtaaacatatgtaggtaaggttgtttttttggagatgttgcagctcaaatttcagtccacatatgaatcatcagtgtattttccataaagtgattygggcatatttgtgtgaaaacctcagttctgtcacttcttacctctataaacttggacgataatgtgccttctctgagactcagtttcttcctctgtaaaa

SEQ ID NO: 235809 - DNA, 201 bp, Homo sapiens
gatcaagtaattgctttaagttttttccttttgtgaatttcaaaaattcattcatgtctattgtattaagtggaacaatacaatacaaaaatttataaagrtgaagctaatggtagcttccctgaactccagtctcacccctacagaggtaaccactggtaacatctagtgtttatcatttcaccctttcctctggctcat

SEQ ID NO: 235810 - DNA, 201 bp, Homo sapiens
ctggccaacatggcgaaacgctgtctctactaaaaatacaaaaattagccaggtgtggtgatgcatgtctgtaatcccagctactcaggctgctgaggcaygagaatagtttgaacccaggaggtcaagggtgcagtgagccaagatggtgccactgcactccagcctggatgacagagtgagactccgtttcaaaaaaaa

SEQ ID NO: 235811 - DNA, 201 bp, Homo sapiens
cattatttttaatatttccaaattattcctcacttttgttgactttgttatctttaactatgtcaaactagaagcatattcatgtatagacattgaaaaaatagcttcacttaaacctttcaactacaagttctgactgtatttatcctagtctaagaagatcacatctcttgcagcttccaggattgttgttaacctaat

SEQ ID NO: 235812 - DNA, 201 bp, Homo sapiens
  misc_feature (1)...(201): n = A,T,C or G
ggaatactggggctgtccttttaagtacacattttgagatgaaagcaggaagctttaacataaattactggggagaattagcattaggcgtctgtaacatncatgttagtagaaacctcacaatgtatcacttctttgggttgtgcattgtatgtaaagagaaatgattatactattatttccttcttgtatttgaagaaa

SEQ ID NO: 235813 - DNA, 201 bp, Homo sapiens
gaacaatacaatacaaaaatttataaaggtgaagctaatggtagcttccctgaactccagtctcacccctacagaggtaaccactggtaacatctagtgtktatcatttcaccctttcctctggctcataaatatatacatatattcaagaatatttctagatatttaggtgatttgtttctttttaacaaaaagaactca

SEQ ID NO: 235814 - DNA, 201 bp, Homo sapiens
gctaaaagagatggaataagagaaacttttaggacagtcactgctttatcttttcaaaaattatttgttacaaaccggaagtaaagatatgctttttttttcttttttaaggaaaaaatatcccatggctgttaaggtttctgttattatttgttttttctatttttatttggacagtacagaaaactgtgtttcaaaata

SEQ ID NO: 235815 - DNA, 201 bp, Homo sapiens
ttttaacaaaaagaactcatagtatagccattaatatgcaacttgtttacttaacaattatcttggacatgactataaatcaggaaatatgggtctagctmtgcctaattaatagtctttaaacattaattaattttcaaattaatttttacatataaatataatataattttatataagggcttactttatatatgctgt

SEQ ID NO: 235816 - DNA, 201 bp, Homo sapiens
agaagaatattctgatttattaatcagttggtcatctgttgacttttattttagaccatggttttagtatttccatcttcataccattcagctggtccccratcttcagtataatctctcttgcctttccttttctacctatatctcgttctattctgttaaagttattcttaagtagtcatggaacaacctctagatgtt

SEQ ID NO: 235817 - DNA, 201 bp, Homo sapiens
ttaatatatattaaaatgttttagtttacaaaacattcatggcacatctctagtcacagaaaatacaaaggtttgatctctaacctaagaaactgagcacrgtgaagaggcagactcagaaatggatgttttcctataagatgacaagggctatagcagtgatatgcatagagtcctatggtatcccagaggacagatacc

SEQ ID NO: 235818 - DNA, 201 bp, Homo sapiens
gctcactttttgtaacatttttgcaagatttgaaaactttcagtaaatgttttggcactattggtacttgatgttttatctcttctttatgggaaattcaytggggagatttttgttacattagtccacgggtatttttttctctcctttacatgctggggaaaatgtactcattcttagaatcagagtcaagaataaaat

SEQ ID NO: 235819 - DNA, 201 bp, Homo sapiens
tgggttggttccaagtctttgctattgtgaatagtgccacaataaacatatgtgtgcatgtgtctttatagcagcatgatttatctacaactatctgatawttgacaaacctgagaaaaacaagcaatggggaaaggattccctatttaataaatggtgctgggaaaactggctagccatatgtagaaagctgaaactgga

SEQ ID NO: 235820 - DNA, 201 bp, Homo sapiens
cccattcacttgttcactatacagtactggctccggatgagtttctaaattgcttggcacatgacagttgttgtgaacatcgtcctcagcctcctcattakcattcattttctctgtccacctccattgctggagaggaccacctaatattatatttagcaccacaacaaatctgtgctttcctgactcaatgctaactct

SEQ ID NO: 235821 - DNA, 201 bp, Homo sapiens
actgactgttaagctctattgctgtttagtgccttgtgcctggttttatgcattgaaatttgaatgtgggaaataagatcaaggtgaattttcaaaaaaawtttttttttcctttaaaatcaggatgggtagtttttggcccaagagcggcatcactttctttatgtggctttcctctgttcacagtgtgacaagtcagag

SEQ ID NO: 235822 - DNA, 201 bp, Homo sapiens; identical to SEQ ID NO: 45205

SEQ ID NO: 235823 - DNA, 201 bp, Homo sapiens
atgtaacatgcatgtcccatttaagacaagaggagactaaatgcaaagattttaagtaacttgccaaagattgtcacacagctgtaacacaacttgtggcrcagttgggtaagaggcagatcagatatgtgaacccaggttttccaaaatctggtcttttaaggcctattatagctcactcacttttttccatagcttttg

SEQ ID NO: 235824 - DNA, 201 bp, Homo sapiens
gcttcattctttcagtgacagtaaagactttatcttctttgtctttggtttgtccatgtgtcaaataagatgctagaccactacaggatctcaaaaatccrttccatgctgtgattctcttctaagctgacactagactatacgattcttgcaggcaaagcacctattgatttgcctgttctccaacacttggtgccatgt

SEQ ID NO: 235825 - DNA, 201 bp, Homo sapiens
aatatactatattagtaaaaaatataaatgacattatatagttttggaaggaccaattctactaattctgtaaatagaaatacagagataaaattcagagrtagctattaacaggggcaagtggcagataaccgttaaagaagaagaaattacaagaagcttcttggaaggctcttacgagatctttagataaaagttgct

SEQ ID NO: 235826 - DNA, 201 bp, Homo sapiens
ggagggaggattgatgcctggaaattcaaggctgcagcaagcagagatcatgccatgcactccagtctgggcaacagagaccctgtttcaaaaaaaaaaaagtcatttggccaccttggatgaagattctgggccctacatagtggagagaggaactctagctctcaggcactctaaagtttgaagatgggcaaaagagaa

SEQ ID NO: 235827 - DNA, 201 bp, Homo sapiens
gttccaagatggagaaaactggggaagaagcatgtggtggtggtggtggttttctgcctggtctaggaaaccagaattctatcaagatattagtcattctrtagaggaatgcattactgaagcttaggggagaggtgtgggctgaagatataatttaaaagtcatcacactttgggaggctgaggcgggcagatcacctga

SEQ ID NO: 235828 - DNA, 201 bp, Homo sapiens
agccttcaaggaaactttcttttttttttttttttttctttttttttggagacaggatttcacttctgtctcccaggctggagtgcagtggtatgatctcrgctcactgcagcctctgcctcccacgttcaagtgattctcctgcctcagcctctcaagtagctgggatcacaagatgcacaccatcatgaccagccaatt

SEQ ID NO: 235829 - DNA, 201 bp, Homo sapiens
aaagaaaaggggaccaacatatttttgatctactgctagcagtaatggttaaaacaaaaatgattttatgcttggctatttgtaaatgaaaaatattcaaytaactggcatacacctatgttaaaattctatctacttattaggtattttttatagcattaggggatctgcacatgtgatgcatcaattctctacatcttt

SEQ ID NO: 235830 - DNA, 201 bp, Homo sapiens
tttcaaacaggtggggtgtatatgtgttaattgtgaaaagcttaatcttgccaacactgtttgtaatgtttgtaaatagacagcaggtcctggggttgggraggaggaaaaatattggttagttttgggggcagagtggatacagggagacaaagtttctaggttttcacagttgagaggtgatggtccctcagattagga

SEQ ID NO: 235831 - DNA, 201 bp, Homo sapiens
aaagtggattatatttgactcttgaatagtaaaatttccttcacatcttgtgtgagaacaagaaaatcttaccagaatgggggccgggagccctggcttcytgtcacagtgatggtgctgatctgtgtgagctggggcatgccacctgacttctccaggccttggtgtccttgtccattgatagagaaattgggacaggat

SEQ ID NO: 235832 - DNA, 201 bp, Homo sapiens
tggcatgaacctgggaggtggagcttgtagtgagctgcgattgcaccactgcactccagcctgggtgacagaacgagactccatctcaaaaaaaaaaaaaatccaaaatgaattattaagtattctttctgtgttattactctagttatacctaccactaggaattgtgcaatgaatatagatgacacagatatgatttgc

SEQ ID NO: 235833 - DNA, 201 bp, Homo sapiens
gaatgctcacagcctccctgtaatcctcattttatagcctaggaaaccaagacacagagagattgagtatcctactcaaattcacacagttctgtctgccractcccttacccttaagacaccagcttccttttattgagcaggttctgagtttggttcttgggccccacgggtgagttagattacccgctctcaagtagc

SEQ ID NO: 235834 - DNA, 201 bp, Homo sapiens
gcctggcagatttggtaatagccagcatctctttagaggccattcctgggtaggcctaatcttccatcactttctctgtccagtcctgacagcagtgagaytctcacacatattgtccaatgcagaacctgtggtctgaatgcttgctcatttaccaacaataaactgggtgccaatttagggccaggtgctctgatggcc

SEQ ID NO: 235835 - DNA, 201 bp, Homo sapiens
tcatggcacagtccctcaaggcttccctttgctaggggagggagttccctgactccttgcacttccccggtgaggtgacaccccaccctatttctgcttgmccttcatgggctgcacccactgtctaaccagtcccaatgagattagccagttaccttagttggaaatgcagaattgcctcccttctgtgttgatctcatt

SEQ ID NO: 235836 - DNA, 201 bp, Homo sapiens
atggacatgagtgttagcagtgaaggacataaacagaagtagaattatctatctatctatctatctatctatctatctatctatctatctatctatcataatcaccatcactcatggattttcagacacacatgcacacacaaatagaacagtacaatgaatccttttctatgtattacatagctgcagcaacttgctatt

SEQ ID NO: 235837 - DNA, 201 bp, Homo sapiens
taatgtcctgtagaacaggtgccatatggagctcactttgggacattgtggaatggatgcttctatagcaacaatttcaaaacttgacattgcctcactayttatcccagttctagtgttttgaaaacaataagatgtacaaagagcaaaatgataacaagaatattgtccccataggaacaggctctttatgtttctccc

SEQ ID NO: 235838 - DNA, 201 bp, Homo sapiens
tgagccggactagaaaacaggaaccatcacagagacctggctttattagataggcaagagggaaaccatgcaggtggttactggacagacaaaacaccctrcaaatggtagaaacccagtcataaccaaagacagagtgtcatttgtcaggagcagtccttagaggtgaccttcagtcttgggagttgaaccaccagggct

SEQ ID NO: 235839 - DNA, 201 bp, Homo sapiens
ccatggacatgagtgttagcagtgaaggacataaacagaagtagaattatctatctatctatctatctatctatctatctatctatctatctatctatcataatcaccatcactcatggattttcagacacacatgcacacacaaatagaacagtacaatgaatccttttctatgtattacatagctgcagcaacttgcta

SEQ ID NO: 235840 - DNA, 201 bp, Homo sapiens
tgatgccatggacatgagtgttagcagtgaaggacataaacagaagtagaattatctatctatctatctatctatctatctatctatctatctatctatctatcataatcaccatcactcatggattttcagacacacatgcacacacaaatagaacagtacaatgaatccttttctatgtattacatagctgcagcaact

SEQ ID NO: 235841 - DNA, 201 bp, Homo sapiens
attccagcactttgggaggctgaggcgggcagatcacttgaggccaggagttcaagaccagcctggccaacatggcgaaacgctgtctctactaaaaatayaaaaattagccaggtgtggtgatgcatgtctgtaatcccagctactcaggctgctgaggcatgagaatagtttgaacccaggaggtcaagggtgcagtga

SEQ ID NO: 235842 - DNA, 201 bp, Homo sapiens
gctccaaggaaatgctaaattcacagaatatcaatcttgtctaaatgactatagaccacttagcactattatttaagtgcctttctagaggggagtgttayggctcactgttacttaattaaaataatgcaactgggtggatgtattataattattgctcttactaatgtttgtgatttgtggagcacaacctgaccttca

SEQ ID NO: 235843 - DNA, 201 bp, Homo sapiens
tttatctaaaatttatcaactaaaaatgtgaaaaactcagaaaagtaaaaatgtctactttttagggaaatgtattatcccttgttgttgcatttttttttgtggcaaatatacatatatgcaaaagagcccatgcaatatatgcaattttgctttccacttttttcctttggaaaaaagtttttatttatttcttttatt

SEQ ID NO: 235844 - DNA, 201 bp, Homo sapiens
gatcaagatttgtcattcatggatttacattgactcgaactttgtttctcctcataatgaaggtgctgaaggtacaaagctgagggtctaatgacaggaaktactctggtaattgtaaggaagaagatttatcctggtcctgagaaaaatgtaagtgacataatggtcgaagcttcagagagtagagatattttacccatg

SEQ ID NO: 235845 - DNA, 201 bp, Homo sapiens
tttgttttttaaaaaagtatttttaaggagaccacattttctccaggctgttgttagacctatttgctaggcctcattttctgggccaaagccgtctattrcaaaatataaatcttcacattatgagctcactccagtctcccatttggctggctttgtagtcagttgttaagtctcccttctcatatgtaaaaagggcag

SEQ ID NO: 235846 - DNA, 201 bp, Homo sapiens
ttttatctaaaatttatcaactaaaaatgtgaaaaactcagaaaagtaaaaatgtctactttttagggaaatgtattatcccttgttgttgcatttttttttgtggcaaatatacatatatgcaaaagagcccatgcaatatatgcaattttgctttccacttttttcctttggaaaaaagtttttatttatttcttttat

SEQ ID NO: 235847 - DNA, 201 bp, Homo sapiens
tgtttaaatgaccgatcaagatttgtcattcatggatttacattgactcgaactttgtttctcctcataatgaaggtgctgaaggtacaaagctgagggtytaatgacaggaagtactctggtaattgtaaggaagaagatttatcctggtcctgagaaaaatgtaagtgacataatggtcgaagcttcagagagtagaga

SEQ ID NO: 235848 - DNA, 201 bp, Homo sapiens
agcagagagggcttggaggagtatgagaccagcctgtcattgctattaagcagaaaaacttcatcctggagctgggtggagcacataacttagagtgtttyccagaaagtaattaaaagggcaactttctggcagaaagttttcatcttcctaatagagaaaaatggagtctactccaggcaaaaaattatcatatagata

SEQ ID NO: 235849 - DNA, 201 bp, Homo sapiens
acctcctgacatccattattcttcctacaggtcactctgctctacccaactgggccaccttgctgttctctgagcatagtggatgctttcttgccttagggttgtttcatggggcctacttgcagtatagaatgctgcacgtcccagcatttccagctgtttcagaaagctgcatgttagatccatttccttcaggtctta

SEQ ID NO: 235850 - DNA, 201 bp, Homo sapiens
gacctgggaaatttgggggctgtaaaaagtaacatcatcagcaacatatggaaagaagactctggcagtgacattgtggaagagctgtgagatgaggaagmctgggaaatataattgagagtgatactgaatattgtagaaggaaggtaatggactctaatgatggagaaagaatagattttgaagatgtgaagaaagttg

SEQ ID NO: 235851 - DNA, 201 bp, Homo sapiens
tgtggaagtgagagaagaactcaggtaggtgttgaaggaaggaggaaaggatggaaggacgagagggagggagggaaaaaagatcagagagttgagaaagkgaaaagctatgctatagtttcctgtggtcttaacttagtataaagttctttgtgcatgtttcctaaacttcctttcattttggtgacaaactgagatgaa

SEQ ID NO: 235852 - DNA, 201 bp, Homo sapiens
gagaaaaacttgattctttttttaaaaaacaatattaataaaacacacttttatgggtgtaacagccataggcataacaatgagttcaaaagcaagctacmaagagtggtctcagtgctttttgaactcagtgaagtggtttaaaaatgaatattcaacttacagtaatagtgcttcaaaacaattttgccttcaataagt

SEQ ID NO: 235853 - DNA, 201 bp, Homo sapiens
tggatatttctcaaagaacctaaaacagaactactatttgacccagcaatttcattactggatatacacccagtggaaaataagtcattctaccataaatrcacacacacacatatgctcattgcagcactgttcacaatagcaaagacatggaatcttcctaaatgcccatcaataatggactggatgaagaaaatgtgg

SEQ ID NO: 235854 - DNA, 201 bp, Homo sapiens
tggctcccacttcagcgctctgcctactctacctgatgataagtgacctcttgggttgtcataaatttggaaaagctaatggccatatccttttttttttwaaaaatactgtcttccctcaacccctaatcagaaaatgtttgctttatttggaatctaaaggagaaatatccagaaacactcagttcaatatgactatgt

SEQ ID NO: 235855 - DNA, 201 bp, Homo sapiens
ccatatgttatcgtgaccatttaaaactatgtcctttttagtttatttaagaaatactaacttctgaaatgacttagattttattaactttgaacagaaaygaccagaaggcttggaagaaaagagatataaaacttgctgctaaagcaaatgtttaatgagtaaacataagcaggattccatgaaattggatttccacaa

SEQ ID NO: 235856 - DNA, 201 bp, Homo sapiens
cccaccaatctcagcatcattaatatttctttttcctgaaacatttaaagctttatatttaaagttttgaaggggtatatattaatatggctgtgctagcrtgataactaaatattattttcaagttggaaaaaaagtggaggcagtggtttgatggttagccaatcagaacatttaatcttgtccttgatcaaatatacc

SEQ ID NO: 235857 - DNA, 201 bp, Homo sapiens
aataaaaggatatggtctgtgtagtttccaagatgtattacatagagtatatttttcttaaaaaaaaaaatgccttgacccatccctatgcttttttactsaaatgtttcttccaactctaatggtagataaaagtattactatcaaagtgagtttctgaatgggttttactgtaaataattatgcaaattttatctgctt

SEQ ID NO: 235858 - DNA, 201 bp, Homo sapiens
ttcttaacgtttgagtataaagtgttttaataaaatcattaaattatacagttggagataaattaattccatttttacttttcagaaaggtgagatatttygacaaaaatgagttttaaaaattaagcctaagctatcaattatcaatacctttgcatagagttttccttccttgttcattgcaagatagaattcactttc

SEQ ID NO: 235859 - DNA, 201 bp, Homo sapiens
gtaaaatttccacattatgcttttcattatacatcattaaaagaaaaccaagaaatttgcacagctaaggagtgaggaaaccccagaaatatgctattaakatggtcagacatacaaactcccaaagtggtagcaatttgttaagtcatattgttgttagttgtattttatactgtgtagagaaagactatatgaacagaa

SEQ ID NO: 235860 - DNA, 201 bp, Homo sapiens
taaaagcatatgaaacagatacagcttattaaggttttttttttataaataacataaacttaaataacaaaacaataaagttcaaaaacaacttaaaatakagtttaatgctgtaaccataggaaaaaagcatgattatttgtgggaagaacattattaaaagccatattcccaaatatgaattatacaaagatagattat

SEQ ID NO: 235861 - DNA, 201 bp, Homo sapiens
tactctgaatttatcaagtggtagataaaggacattacaatgccctagaagtgctcacgatatcaagtaaagcatgttaaattcaagtacagaaaatgcartattcttactactgagataaaaaatggaatttaataaattacaggaatttcaagaaagctgagaatggagtggtcaataaaggcttctttttcggacttg

SEQ ID NO: 235862 - DNA, 201 bp, Homo sapiens
tatttgaatagacatttctcaaaaggagacatacaaatggcaaacagtcatatgaaaaggtgctcaacatcactgatcatcagagaaatgcaaatctaaactatagtgacatacaatctcaccccagttaaaatggcttatatccaaaagacaggcaataacaaatgctagtgaggatgtggagaaaagggaaccctcata

SEQ ID NO: 235863 - DNA, 201 bp, Homo sapiens
catcccttctcttctgtcattaaattgaatttgtagccaactcaaaggctgacaatttatactatggtttttattttttatattataatttatattatggyttatgtcaaaatgttttgttcactgctttgaaagtatcttttgtttacttttgttatcatttcatgttttaattttttcttttctaattgttagaaactc

SEQ ID NO: 235864 - DNA, 201 bp, Homo sapiens
tgtgactgttttgtttccacaaattttgaactattttcttcacttcgtttgagaaatataggtggattgagagacattcttcattcaaaccaaagtttaayggctatttctaaaacacatatcataggtgcactgtaaaaaaaaagtatcaagagaaggaaaaataaaaacagaaaacattttactcagtctacaaagaaa

SEQ ID NO: 235865 - DNA, 201 bp, Homo sapiens
ttaagaaacagaattgtatcatccctcttaacagcagctttgaaagatggaagagaatggaacaatgtcttacaaattctaagggaaaattatttataacstaggaccctagacccaaccaatttgtcaagtaagtgtaaagatgaactgaaggcattgttaacttatatacatcttttctcatcaagttattggagaaaa

SEQ ID NO: 235866 - DNA, 201 bp, Homo sapiens
gtccctatgattttgttggaggaatttgactttccacactatcagtggctgaattggcaactatttccatttttccctgaaatgatgacgttctcatttcrtcaactcaccatagaaccaagttcttctgaagctacactaagagaaagaatgcttagacactgtttttgccattgtctgtgcatagtcccctaaaagact

SEQ ID NO: 235867 - DNA, 201 bp, Homo sapiens
tgtgttgtctatctaaatcagtattaagaaagtatattaaaattatctttttcatgttatatactcctcaaaacacacacgcgtgcacgcgcgcgcgcgcrcacacacacacacacacactctctctctctctctctctctctctatgtgaaatgcactactttaccaccaggtggtgcatgtagaccaaataggaaaagg

SEQ ID NO: 235868 - DNA, 201 bp, Homo sapiens
gtttagagtgtctttcatgatcagttattagggactggaatctgtaatgtttgctggcttttcttttacagaacaattgtaaaacataaatgttgactgayagagttattattaattatgataggcagacatcttccctttttggtccagtcatgacaataagttcatattgcccctctcccaaaacattttcctctatcc

SEQ ID NO: 235869 - DNA, 201 bp, Homo sapiens
tcccattggtgaacatataaagtgctaccaagatctgccaatgaaagacttttgaagtggaaattcatccttgtaataatcctgttatctgtaggctgacytcaagccttcatgacattcagggccccttattcttaactgcatcttctattttgggcattgtgctcttgccatctaacaggaaaacaactttcagtgctg

SEQ ID NO: 235870 - DNA, 201 bp, Homo sapiens
gttatttattatatacaggtataagattataagcagatttatcagcagataccttgaaatccaggagagagtgggatgataacgaagtgttgaaaaaaaaactgccaacaaagaatttgataacctggcaaggctctccttcaaaaatggaagtcaagataacaagttttgcacacatggaaaaagtgttgggagtttatc

SEQ ID NO: 235871 - DNA, 201 bp, Homo sapiens
aagagcaaactctatgagatagaaaccctaagaatttacctccagcatcccttctcttctgtcattaaattgaatttgtagccaactcaaaggctgacaayttatactatggtttttattttttatattataatttatattatggcttatgtcaaaatgttttgttcactgctttgaaagtatcttttgtttacttttgtt

SEQ ID NO: 235872 - DNA, 201 bp, Homo sapiens
ctagcaaaaggaggtataaataacttggttgaattaattaaaaaaaaaagtcattaacctttaaaattttgcatatcttcattattcatgcaaacaaaggmggaaactatgtaacacctacaagtgaccttcctatgagagctgcctcaatatgaaccagataaactaggcctatggtcagaagtacagttagagaccccg

SEQ ID NO: 235873 - DNA, 201 bp, Homo sapiens
cagccattttataagcagataggaatatttaaataatcattatcagataatcaaatctaacatactcttaagggtaaattaatttaagaaaaaaattactrttactaacatcatgattgtacaaccagttttacaattttttacaacctttagttactaaatctgatttttgtgtatacttttcaaatctttctttaatgc

SEQ ID NO: 235874 - DNA, 201 bp, Homo sapiens
tacaagtatcaaaagaaataacaatatagtgcaagattatttacaatgggcctggtggattatataataacactttgtccacctaaattattattacaagraatactttttgaaagccttatatcagtgtaggaaaccacaggcttgcatatttgacctttaacatgattttattcagtgtttagggtaatgttagtagaa

SEQ ID NO: 235875 - DNA, 201 bp, Homo sapiens
ataggaatatttaaataatcattatcagataatcaaatctaacatactcttaagggtaaattaatttaagaaaaaaattactgttactaacatcatgattktacaaccagttttacaattttttacaacctttagttactaaatctgatttttgtgtatacttttcaaatctttctttaatgcagtgtcttaaaacaaaca

SEQ ID NO: 235876 - DNA, 201 bp, Homo sapiens
aagatagaattcactttccacccctttgattgccacaattccaactgccactgtcctgatttccatgatatctgcaaggaatcacagaaagacatgtcaartattcgttcagttttgcaaatgatccacgaatggccatttgttcttatttctgttttaatcggaagtttttaaaatttttaatgtgattatttactcagc

SEQ ID NO: 235877 - DNA, 201 bp, Homo sapiens
ttaagcctaagctatcaattatcaatacctttgcatagagttttccttccttgttcattgcaagatagaattcactttccacccctttgattgccacaatyccaactgccactgtcctgatttccatgatatctgcaaggaatcacagaaagacatgtcaaatattcgttcagttttgcaaatgatccacgaatggccatt

SEQ ID NO: 235878 - DNA, 201 bp, Homo sapiens
ggtgggggcagaaattgttgggcaaaaaatatccttcgggaaataaagtgtcagaatcaccgctttttaaatctacacatactctgtggagattctgattrcctaccctccctacaccctcgtttagaaaatccatcccctgcctaacccatccttcatgaggcttatcacagtagttagccaatgaaactaatagaatta

SEQ ID NO: 235879 - DNA, 201 bp, Homo sapiens
acatggtggcaggtgcctgtaatcccacctacttgggaggctgaggcaggagaatcgctttaacctaggaggcagaggttgcagtgagttgagatcgtgtyactgcactctagcctgagcaacagtgcgagactccatctcaaaaaataaaataaaaataaaattaagaaggacattctacttctaatatttcatgagtta

SEQ ID NO: 235880 - DNA, 201 bp, Homo sapiens
taataacctaattctagatacagaatttagaatacagattaaaaagaattcattgaaattcaatccaaggattctaaggaatacaataaaatgatacaggyggtagaagacaaaatggccatttttaaaaagaagaagcactgatacagctgaaaaacgcacttcaagaatttcagaatacagttgcaagtattaatgcag

SEQ ID NO: 235881 - DNA, 201 bp, Homo sapiens
atccactaggcagtgccccaatagggactctgtgggggctctgaccccacattttccttctgcactgccctagcagagattctccatgagggtccctcccrtgcagcaaacttctgcctgggtatcgaggcatttccatacatcctatgaaatctaggcggacgttcccaaacctcaattcttgacttctgtgcacctgca

SEQ ID NO: 235882 - DNA, 201 bp, Homo sapiens
ctgttttagggtgatcatagaaatgatacccacaagttagtcatagtggcctgcatccatttcgatgtatcagtgatgtattctgattggccagtaatcamccatactgactgttaaatatttttgttatcactcctatgcgtggtgaatttgagttctggttttctttagccttgtgttatttatgtgtaaagttggatt

SEQ ID NO: 235883 - DNA, 201 bp, Homo sapiens
caactctgttttagggtgatcatagaaatgatacccacaagttagtcatagtggcctgcatccatttcgatgtatcagtgatgtattctgattggccagtratcacccatactgactgttaaatatttttgttatcactcctatgcgtggtgaatttgagttctggttttctttagccttgtgttatttatgtgtaaagtt

SEQ ID NO: 235884 - DNA, 201 bp, Homo sapiens
atagatattttcccaactctgttttagggtgatcatagaaatgatacccacaagttagtcatagtggcctgcatccatttcgatgtatcagtgatgtattytgattggccagtaatcacccatactgactgttaaatatttttgttatcactcctatgcgtggtgaatttgagttctggttttctttagccttgtgttatt

SEQ ID NO: 235885 - DNA, 201 bp, Homo sapiens
cagttaatagatattttcccaactctgttttagggtgatcatagaaatgatacccacaagttagtcatagtggcctgcatccatttcgatgtatcagtgaygtattctgattggccagtaatcacccatactgactgttaaatatttttgttatcactcctatgcgtggtgaatttgagttctggttttctttagccttgt

SEQ ID NO: 235886 - DNA, 201 bp, Homo sapiens
atacactaaaagaaattagaaaactaattgaagcctgcaagaaagaaacacaagtagataaattattactgaaacccagaaagtataattcccctcaaatyagcatgaaattcaaaatagttccacatgattgcataattgctggtatcaagtataactgaaatgtcctgcaacaagagaactgattccacatcatcctca

SEQ ID NO: 235887 - DNA, 201 bp, Homo sapiens
tggcaaagaatttcatgtttataatttaattattagtttaaacttttttatattatcttaaacactgtggcctgtgtattatccttgtattttagaatgtrttgagttgttgtcatgtaataatgcatagtaaaacattataaatggaatctaatgacttgaaaacaaaagaatattctctgttggaaataggattctatg

SEQ ID NO: 235888 - DNA, 201 bp, Homo sapiens
atgtacacagacatatatacatgaaatcaacatacacatcaaggtatggaacatttccagcatgtagttgcaattttggtttgtatttttacctaagaatmtttcaaaatagtgctttttagtggcaaagaatttcatgtttataatttaattattagtttaaacttttttatattatcttaaacactgtggcctgtgtat

SEQ ID NO: 235889 - DNA, 201 bp, Homo sapiens
gtagggaaacaaaggacttgacaacactgaagacaaaatggacctaacagacatatacagaacattccatccaaagcagcagaatgcacatttttctcacrtgcacacaaaacattttccaggatagatcatatgttgggccacaaaacaagtcttaaccactttaagaaggctaaaatcatatcaagcatctcttctgac

SEQ ID NO: 235890 - DNA, 201 bp, Homo sapiens
gatccactaggcagtgccccaatagggactctgtgggggctctgaccccacattttccttctgcactgccctagcagagattctccatgagggtccctccygtgcagcaaacttctgcctgggtatcgaggcatttccatacatcctatgaaatctaggcggacgttcccaaacctcaattcttgacttctgtgcacctgc

SEQ ID NO: 235891 - DNA, 201 bp, Homo sapiens
gaaaagtcaaagtgtcaattatctgtgtgattgggccttcaaaaactattttctaaaatattgacttaaagaaaaaactaattgttttgccccataccttyacttcattctcttatttattttttttacttcatttttgctacctggataataaaatttctattcatgtcattgggatttaatgtagcccagctaatattt

SEQ ID NO: 235892 - DNA, 201 bp, Homo sapiens
aagaggaaaacagataatccatgcaaatgataataaaagagagtgagaaaagctctacttctatcagataaaatggacattaaaacaaaaacttaaaaaargagacaaagaggttattcatataataataaagcagtcaattcataaagaggatataacaatagtaaatatatatgcactagatgttggagcacctaaata

SEQ ID NO: 235893 - DNA, 201 bp, Homo sapiens
caggacacaggacactgctggctcttccactgagatggttaaccaacagccattgctgttttgacctcctggagagagagagagacactgctgtgctccakcctcaataagaagccactgttgtgctacccagggccaggacctactcacatccaaaaccatgcatgccacagactccagagccacagacactctttgcat

SEQ ID NO: 235894 - DNA, 201 bp, Homo sapiens
catcctttctgtcttcaggacacaggacactgctggctcttccactgagatggttaaccaacagccattgctgttttgacctcctggagagagagagagasactgctgtgctccagcctcaataagaagccactgttgtgctacccagggccaggacctactcacatccaaaaccatgcatgccacagactccagagccac

SEQ ID NO: 235895 - DNA, 201 bp, Homo sapiens
tttggggttgcagtattttatttattccatccaaaaatattggtagttctttttcttacaaagcatgccatagcagtacccatgtgttaaaataaatgttrtttattttcttctgaacatttcattataccataattaattacttattaaatttagagccaaatatcttataatcaatggaattattatggaaaactgaaa

SEQ ID NO: 235896 - DNA, 201 bp, Homo sapiens
tggtgtctcaacaggaattgtcaagcattcagcttcatagtagagcaaggtttatcattggaagtttctcaaacatttaaagaagaaaagggactaataargataagaataaatcaatgaaattaaaaacaaatgtgcactaaagaaaagcaacaaggccaaaactggttctttgcaaagattaataaaattgataagcct

SEQ ID NO: 235897 - DNA, 201 bp, Homo sapiens
aatacctttacaagagctaaggaatccaggtgagatattactagtcttcactatatgggagtcctaggcgtggcacagaaataagaaaagataccttgaakaggttaggaaggacattttcaagttaccaagcaagggcagaacagtgtggagagagatacctttcatgtgggaaagggaaaggagaatgaagtgagcaca

SEQ ID NO: 235898 - DNA, 201 bp, Homo sapiens
aactcattttcaacaaaggtgctaagtacatacattgaataaaggacagtttcttcaataaatggtgctgggaaaactggatatccatatgcagaagaatkaaactagacccctatctctttccatatacaaaaatcaaatcaaaagggattaaagacttaaatttaggatctcaaactatgaaactactacaagaaaaca

SEQ ID NO: 235899 - DNA, 201 bp, Homo sapiens
attctctaaaaggaggaagagaaggaggaaagaaaatataatgttattgtgttctgaatcacactccgctagtttgggaggtaacaataatgagcaggctyagaattcctaggacttagatattgcttctaaagaaataaaagttatcaatagtaagtttacagtgtaaagatattcaagagctactaaatccatttgttc

SEQ ID NO: 235900 - DNA, 201 bp, Homo sapiens
tagctccctctctcatttgcttactttcactccctctctccctgcccaccccccccacacacagatacacacacacacatacacacacacacacacacacwctcaaatgctttttctgtcattcccatgcttcaggtttctagaaaactcattaggtcattcttatattaattttctacttgtttatcattttttcaatct

SEQ ID NO: 235901 - DNA, 201 bp, Homo sapiens
aaaggaattgcaaattaaaacaacaatgagatacctctgtacaactattagcgtgactaaactccaaaaaactaacagtgctgtatgctggcaaggatgcraagcaaccaaaactctttcattactagtgggaatgcaaaatggtgcagtcacatgggaagacagtttggcagtttcttaaaaactaaacatactcttact

SEQ ID NO: 235902 - DNA, 201 bp, Homo sapiens
agctgcttagaaaagtggtagggacagcaagccagctgatgtggagcccagagggtttggcatgagagcatgtgtagcagaacacggccagggacagccaycctcctaggcttggcttgctcccataggagacattagccccaggagaactgtcggacctgaactctgcaggtcagtcttgcccatcagacggggccagtc

SEQ ID NO: 235903 - DNA, 201 bp, Homo sapiens
atttttaaaaagaagaagcactgatacagctgaaaaacgcacttcaagaatttcagaatacagttgcaagtattaatgcagaatagaccaagctgaggaargactcttcatggctcaaagactgattctccaaaatcaaccaatcagacaaatacaaagaaaaaacaatgaacaagaatgaacaaaaccttctagagatat

SEQ ID NO: 235904 - DNA, 201 bp, Homo sapiens
ttgtatttatatcactagagaaggaagatatattagttgagtattagttatatgacagtagattttgtgtgttttttaatagaaatgaaggacaatcaaaygaattgctttattgttctggatagcagatcaatatttttataagcagtggtcatttttatcaactagtctcgtaaaaaataattactaaatagagtagta

SEQ ID NO: 235905 - DNA, 201 bp, Homo sapiens
atactagctgcttcccatctgtcgtcttaaactcctctgtacatgactttctaaaagaggaaagcaacagcaaagttaagtgaaatgaataattatgaaaycttaattgttcattttattctctatctgaattaagtttttttcccaaaacattgtcagattgactggattttcaactcttacttgtttatgtccctcaat

SEQ ID NO: 235906 - DNA, 201 bp, Homo sapiens
gaaaagcacttaacacaatgctgaaatgcaggttcatttaaaaaatctcttttcactcttatatctcaaaaaaaagaaaagaaagaaaacagcactgcaaraatgtacaacacatggactaggaggttcagaaaattcatggaataaacatactaattacaggtgttctgattctaagagagtttttgaatttgttgtagg

SEQ ID NO: 235907 - DNA, 201 bp, Homo sapiens
ttgcagcactgttcacaatagctaagatttggaagcaacctaaatgtccatcaatagatgaaagaataagaaaatgtgtacatatacacaatggagtactrttcagccataaaaagagtaaggtccaggcatttgcaacaacatggaagaaactggagtgaaataagccaggcacagaaagacaaacattgcatgttctca

SEQ ID NO: 235908 - DNA, 201 bp, Homo sapiens
cctctttttatagtttggatgatggccaaggaatatgtatttaatgtttttcaaatctgcataaaatgaagcagagttattgactgtatacctactcagtrtctaacattgtgcatggatttttacagggaatacaaaaaataaattgttagctctctatctttgaggaactaattgccttttgagataatgagacctgca

SEQ ID NO: 235909 - DNA, 201 bp, Homo sapiens
gctttcctcttcttggtaagagttactgtagcctacccttacctccctactctatactttccagttctgtgccaacgaaagtggatcatgcacaatgaatsaaagatacaaagttaaaatagaatcagtagagactttttaacaaattatgttagaaattatatttgcccatgctggaaaagagaattatgagactggact

SEQ ID NO: 235910 - DNA, 201 bp, Homo sapiens
taaaattagggttttatatagcaaggaagaaatgtaaccatgtgtgggaaaacagaaattagggagtggtggtaagaaggaggagttggttaacaggaaayaggtagtcagttaggcaatcatgatgggtgatggtgaggagtctagaggctaattgtcaagatatagtgatttggtatgttttagttccttgacactatc

SEQ ID NO: 235911 - DNA, 201 bp, Homo sapiens
aacaaaggtttggagtataataattatgaaaaaatttcttacttgtttaatttgcaatatatttgcaattgactgtgctgtacataggcaatgctggttaytacattcttaccatatattttggaaaagaatttaatggtcaaaagagatttgtttgaggtttaatcttaatattaaaaagttttattttcttctgaaaat

SEQ ID NO: 235912 - DNA, 201 bp, Homo sapiens
aaattgaatgtataaagtgccttaggacctagagaataaaatgtatttatttattttgaatgtaatatcgtttataatttatcaataatctttcagaatayagtcatcctttctatacatgccaaagtcttcactagtctaagctgctttcataatctgatatatcatatcttatctttcaaagttgtattttaacttaat

SEQ ID NO: 235913 - DNA, 201 bp, Homo sapiens
ttctctcacctcagcctctcgagtagctgggacacctggctaatttttttgtatttttataagagactggggttttaccgtgttggccaggctggtctctygtactgttgacctcaagcaatccacctgccttggcctcccaaagtgctgggattacaggcgtgagccaccatgcctggccactctgttttgttttgtttc

SEQ ID NO: 235914 - DNA, 201 bp, Homo sapiens
ctgatttcaggtgatccacccacctcagcctcccagagtgctgggattacaggtgtgagccactgtgcctggccgaatttgaatttttattctgtagaggwtggtaagccactgaaaagtttagaaaaatacttctagcagcagtgtgggagataaattggcaagaggcaagaccagtgaagagattgtagtactgatcta

SEQ ID NO: 235915 - DNA, 201 bp, Homo sapiens
acaattgttccagggctcatgactcctagtttagattcatattctagtctatctctggactacagtgaggttgagagccacagtaaatgcctgttttgtgmctctctgtgggagtggtttcagggcataatttaatctctgaacctgatacagacagttttatggctcacgtctttgccagtgtgacagtactgctgctgc

SEQ ID NO: 235916 - DNA, 201 bp, Homo sapiens
cttggcctcccaaagtgctgggattacaggcgtgagccaccatgcctggccactctgttttgttttgtttcgttttacctttttttaaaattttttatggmgattggctcttgctgtgttgcccaacctggtctcaaactcctgggctcaagcagtcctcctgtcttggcctcccaaagtgtgctggtattataggcatga

SEQ ID NO: 235917 - DNA, 201 bp, Homo sapiens
agatcagctttatcctaggataaaaatagtaactctaaagcaaacaaacaaaaaacaaacaaaaaccttgtttgttgagccacatcaaatcagtttgaagwagtctaaaaaacgatatttctgtgcttataagagcgttagcaaatacttacaattttccccttacagaagctgccttgcctttcctcagaatctattcca

SEQ ID NO: 235918 - DNA, 201 bp, Homo sapiens
tcaagaggtaccttattgaaggcaaaatataaaggaataaggaaggaaagtaatagagaaatgagatggggaaaatagattatgatctgctacaagatatkatctactccaagataatcatctggtatccatttaataatacagccacaaagaattaaaagaatttaaaaatcaccttctttatattaatgactttgggac

SEQ ID NO: 235919 - DNA, 201 bp, Homo sapiens
aagtaatagagaaatgagatggggaaaatagattatgatctgctacaagatatgatctactccaagataatcatctggtatccatttaataatacagccacaaagaattaaaagaatttaaaaatcaccttctttatattaatgactttgggacaccagtctatcccttgattaccttggtgatgtagagaagacagagtc

SEQ ID NO: 235920 - DNA, 201 bp, Homo sapiens
cttcaaaatcttttaaatttttgacacagttttccagatttcaatgctggaaaactttcccaagtggctatgcgtcttatttaagatacacatttacaggrtttggaagagggcacttaacgtatttatatagcactctttttttcaaaatgacagggggacctttttggaaaagttttgcagtgttaagcactgggtatt

SEQ ID NO: 235921 - DNA, 201 bp, Homo sapiens
ttaaatttttgacacagttttccagatttcaatgctggaaaactttcccaagtggctatgcgtcttatttaagatacacatttacaggatttggaagaggrcacttaacgtatttatatagcactctttttttcaaaatgacagggggacctttttggaaaagttttgcagtgttaagcactgggtattattttcatatct

SEQ ID NO: 235922 - DNA, 201 bp, Homo sapiens
tgcagagtttcatcctacacaagtctcccaccatcccaaaaagtattctcttattcataaacttttaattatgttgactaactttctttgttttgctattwtttggttatattaaaagatcttgtatttagatttgcaaatattaatgttgtggttccacttcccttcttctcttcatttcccttgtttccttttcattcc

SEQ ID NO: 235923 - DNA, 201 bp, Homo sapiens
agttttattttcttctgaaaatatccccatttctaatgaaaaatatcataatatttatcttttttcctcacaacatgtcttgtcactgtttctcctttggytgacatacaaaggctccatctggtgtttgcacatgaatatgatcttaataagcagcaaagctgcaggcaaaacttcaaaggagtatcaacaatagttgac

SEQ ID NO: 235924 - DNA, 201 bp, Homo sapiens
tttaaaattaaaaattatgcctatataaaaaccactttctgaaagtcagtatttatgtttttcccggtatttaataacccaagtttaataaaatatcttcytactttattctgaccttcacagtgaggctaaggatggtttgcaggcacttcagatattaactggtgatgtatagaagtcaattttgaatcaatgacaatg

SEQ ID NO: 235925 - DNA, 201 bp, Homo sapiens
acaaaaatcaacttaagatggatgaaagacttaagtgtaagacctaaacctattaaaaaaactctggaagataacctaggacataccattctgaacgtagraaatggcaaagatttcatgataaagatgccaaaagcaattgcaagaaaaacaaaaattgacagatgaaacctaattaaactaaagaccttctgcgcagca

SEQ ID NO: 235926 - DNA, 201 bp, Homo sapiens
tgctgctataaagaactacctgaacctggataatttatgaagaaaagagatttaactgactcacagttctgcaggtttaacaggaagcatgactggggagsctcaggaaacttacaatcacagcagaatgtgaaggggaagcaagaaccttcttcacgtggtggtaggagagtgaagggggaagtgccatacacttttaag

SEQ ID NO: 235927 - DNA, 201 bp, Homo sapiens
gcacccactgacctgcgcccactgtctggcactccctagtgagatgaacccggtacctcagatggaaatgcagaaatcacccgtcttctgcgtcgctcacrctgggagctgtagaccggagctgttcctattcggccatcttggctcctccccatacacagactttttaaacatgtaaatagtgttcaggaatgacttgtt

SEQ ID NO: 235928 - DNA, 201 bp, Homo sapiens
gcaagatagggaactgcttgggattgggtagaggttttgatattataattttggattggagggaccagtggaccaagggtcttgaagtgcgctgtgatgascaagctattttaatttgttcactgtcttatctttagggaaaaggatgttctggagcaagtaactaagttatttttgcttactctcaatattgttaaacat

SEQ ID NO: 235929 - DNA, 201 bp, Homo sapiens
gaggaatctcactgttaacacatttttatttaaaatattaattcaaactaattccttttctgtttctcttttaagaaccagtgattctcaacatgatagamtagaggtgggggcagaaattgttgggcaaaaaatatccttcgggaaataaagtgtcagaatcaccgctttttaaatctacacatactctgtggagattct

SEQ ID NO: 235930 - DNA, 201 bp, Homo sapiens
acatttccagcatgtagttgcaattttggtttgtatttttacctaagaatctttcaaaatagtgctttttagtggcaaagaatttcatgtttataatttaattattagtttaaacttttttatattatcttaaacactgtggcctgtgtattatccttgtattttagaatgtattgagttgttgtcatgtaataatgcata

SEQ ID NO: 235931 - DNA, 201 bp, Homo sapiens
tatgggaacatctgaaatgatttattggtgtcatttttgcaagaaaatcattattcagtgacttttatcttgtataatttaaattttattacaaaattcartacattaaaagtcatctgccagttttttgcctacctatatataaatgttctgtcttccagcattttatcatcattagcttagttcatgaatttagagatg

SEQ ID NO: 235932 - DNA, 201 bp, Homo sapiens
tattcatttattcattctaattgcaggatgcttccattgtactgtatagtttttattaacgctaagcaaggagaatggcatctgtcttccagatgtagatrcaccacactgtttacacggagatactatgtgttctgttttgtgtcttacattcttcctgatagtgtccattactttattggtcatttgggaccactgcac

SEQ ID NO: 235933 - DNA, 201 bp, Homo sapiens
aaagtattctcttattcataaacttttaattatgttgactaactttctttgttttgctattatttggttatattaaaagatcttgtatttagatttgcaawtattaatgttgtggttccacttcccttcttctcttcatttcccttgtttccttttcattccatctgcttcctttcctaaacaatttagtattaaagccat

SEQ ID NO: 235934 - DNA, 201 bp, Homo sapiens
atgtcaacatattatagagtttttcccttttcccttcacttcccaagaaaaatcatggagatcttaaaagaataccatcacttaccagcaaatttgagcastaatagattaagtgactgtattagtctcctactactgttgtaaaaattatatatttagtggcttaaagcaatagaaattaattttcttagctgtggcggc

SEQ ID NO: 235935 - DNA, 201 bp, Homo sapiens
tttataacattatagtttcttaattagaaactagttaaggtgtttattatcaccttaataaacatttattattctagatgatagccaaaatgttttttagrtatgtcatgtatgtcttacgttattcatttattcattctaattgcaggatgcttccattgtactgtatagtttttattaacgctaagcaaggagaatggc

SEQ ID NO: 235936 - DNA, 201 bp, Homo sapiens
cagattcgaggcccaccccagcaccaggccaacccccacttcagtgtcaggttggcccctgtggacccaggcttcagtcctgcctccacagattaagtgtrcaggctgcacccagtggactgctgtgccaggtcaacatcccttgagcctaggactcaggaccactccggtggacccaagaggtaataccacctaagggaa

SEQ ID NO: 235937 - DNA, 201 bp, Homo sapiens
aaaactactgagtcattctatgtatgttcctgtttttttttctgtttacctacaaaattatttatgacttttcttttactttataatgaatcttgatccayttaagcggactttacaagtttattttatgcccaaggactaagcacctgttacagtaaagcacaatacataaaattatgaatcaaatgcttgctgtgcttt

SEQ ID NO: 235938 - DNA, 201 bp, Homo sapiens
agctcaggagttcgagcagcctggccaacatggtgaaacccatctctaccaaaaaaaaaaaaaaagaaaaagaaaagccagacatggtggcaggtgcctgyaatcccacctacttgggaggctgaggcaggagaatcgctttaacctaggaggcagaggttgcagtgagttgagatcgtgtcactgcactctagcctgagc

SEQ ID NO: 235939 - DNA, 201 bp, Homo sapiens
ccaacccccacttcagtgtcaggttggcccctgtggacccaggcttcagtcctgcctccacagattaagtgtacaggctgcacccagtggactgctgtgcsaggtcaacatcccttgagcctaggactcaggaccactccggtggacccaagaggtaataccacctaagggaacccagaggcccaaccccataaaccaaac

SEQ ID NO: 235940 - DNA, 201 bp, Homo sapiens
atactgctgtactattaattagcacccacctctattgttctcttgttatttataaattttgcctgtttttaaatctaggttgtagactatttgaagagacyatcttatgcttcagctaacccccagtacttggtacagggatttgtatttgacacaccctcaataaatgacaaaaacaccatattaagtagtgtgtcaaat

SEQ ID NO: 235941 - DNA, 201 bp, Homo sapiens
cctttgcctccagcccttctgactttaaccctttatgtattcataagatatatgttataaaggttactcttctgcttcaaaagtttcagtggtatactctrttaaaaacaaaagcaaacaaaaacctcttttatttactatccaaagctctccaaaatctgactccagcctacataattttctcccatttttcttctacaa

SEQ ID NO: 235942 - DNA, 201 bp, Homo sapiens
tccacatgattgcataattgctggtatcaagtataactgaaatgtcctgcaacaagagaactgattccacatcatcctcattattagggaataaatcaaamatacttcttattaatcccatatatattttataatgatgtcaaaaaccatttaaatgacatgtctggttaaccaaaaataattatgtcattcattcaggga

SEQ ID NO: 235943 - DNA, 201 bp, Homo sapiens; identical to SEQ ID NO: 45249

SEQ ID NO: 235944 - DNA, 201 bp, Homo sapiens
cttcatctcttgggtcccttttactttgcctcttttatcgatcctcaggtaccactgtgttcgacagaagagtcttctcactcttatatcccctccttccrtgtaatcataacttcttgtgtgtcgctcagggctggaacagttcacatttgtagccatttgctctggagtcatgtcattgcaagctaaagatatagtacc

SEQ ID NO: 235945 - DNA, 201 bp, Homo sapiens
ttacatttaaagttaatattgttatatctgaatttgatcctgtcattatgatgttagctggttattttgctcgttagttgatgcagtttcttcctagcctygatggtctttacaatttggcatgtttttgcagtggctggtactggttgttcctttccatgtttagtgcttccttcaggagctcttctagggcaggcctgg

SEQ ID NO: 235946 - DNA, 201 bp, Homo sapiens
catttacatttaaagttaatattgttatatctgaatttgatcctgtcattatgatgttagctggttattttgctcgttagttgatgcagtttcttcctagycttgatggtctttacaatttggcatgtttttgcagtggctggtactggttgttcctttccatgtttagtgcttccttcaggagctcttctagggcaggcc

SEQ ID NO: 235947 - DNA, 201 bp, Homo sapiens
ctgatggatattgatgcaaaaatcctcaacaagatactacaaaccaaattcaacaatacgtgagaaagatcattcatcaataccaagtggcatttattcckgaagtggaaggatggttcaacatatgcaaatcaatcaatgtaatacattgtattaacagaatgaaggataaaacccatatgatcatttcaactgatgctg

SEQ ID NO: 235948 - DNA, 201 bp, Homo sapiens
caaatagtttaagtgaatatcaaaggctggggtaaaagccttcttgctataaatattgttggtcaataaaatcaggtggaaaagccaaaccttttgaatgyttggaatttaggactcaaaagcaatacctcaagtaaatattgatcagataataattttgtgttcacccaacctacttctctcctaggaggtgggcagaca

SEQ ID NO: 235949 - DNA, 201 bp, Homo sapiens
ttataagaggtcccgaagagagtgctaaatatggaaaggaaagatttttactggccactaaaccaacaacattataaagcaatcacataaagaagtctgcrtaataaccagctaaaaacacaatgactgcattaaatctgcatatatcgataataaccttgaatgtaaatgggctaaatgcctcaattaaaagggacagag

SEQ ID NO: 235950 - DNA, 201 bp, Homo sapiens
aaaatattagaatgtttaataatacctcagtaatcaacttcagaatgttatataacaaaacaactcaatgggtggaaagagcattggcttttcatttctgkagagccctgagttcaggtcctgactctgttgtttactagaaccaaaccagtctctgactgtcaaactgagcctcattttcctcatttataaaatggaatt

SEQ ID NO: 235951 - DNA, 201 bp, Homo sapiens
cattcttaaaggaatttccaaacaagaattaatatccagccaaactaaacttcataagtgaaagagaaataagctccttttcagataagcaaatgttaagkgaattcactaccaacaaatctgctttataagaggtcccgaagagagtgctaaatatggaaaggaaagatttttactggccactaaaccaacaacattata

SEQ ID NO: 235952 - DNA, 201 bp, Homo sapiens
attttgataggctctcataaattcaatgataagaacttggaaaatgcaaccacatgataaccaggaagtaaaaggaaaacataagaggcatcttcccagaygagagtaaatatctggttccttgagaagtgtagtttgagaatggagaaatcagatgttattggaaagaggctaggactgtattatttcttgcttcctgtc

SEQ ID NO: 235953 - DNA, 201 bp, Homo sapiens
accagcagaccttccagcaaaagccctacaacccagaagagactggcagcctatattcagcattcttaaaggaatttccaaacaagaattaatatccagcyaaactaaacttcataagtgaaagagaaataagctccttttcagataagcaaatgttaagggaattcactaccaacaaatctgctttataagaggtcccga

SEQ ID NO: 235954 - DNA, 201 bp, Homo sapiens
ttaattatcctttgtaggaatggaccacgcagtatccctcaaggaagaatcaagaatgtttccacagagaatatacatatttcatctctttctctgatgartggatgcccactgaaagccatgaattactcttattagaccctgtagaatcccagtttatggcagtgacattaaaaacacctagtttatgacttggatcag

SEQ ID NO: 235955 - DNA, 201 bp, Homo sapiens
agaagaaatcttccccaagatacattataatgaaattctcaaaagtcaaagatgagataattttgaaagcagcaagaagaaagttatttattatatacagktataagattataagcagatttatcagcagataccttgaaatccaggagagagtgggatgataacgaagtgttgaaaaaaaaactgccaacaaagaatttg

SEQ ID NO: 235956 - DNA, 201 bp, Homo sapiens
gtttgtgggtgaggggaaagggattgtttggctgagtcatttatttttgcatttgggtgtctttcataccccagtttggtcgcccaactcacattgaagcytaagacccagctgatttctcttcatttctgcaaagttactgtaccatggcaggccaacgaacatgtcaaaggaggagcagcagagctggccccggggtaa

SEQ ID NO: 235957 - DNA, 201 bp, Homo sapiens
caaagccttcactctcactgagcctcctacacacaccatgtttgcctatacccataggctttgctcatctgcagtgtgcactccacagcttttaaactctmctcatcttttagggccatgctcaaagtccatttactgcatgatcttttttctaatggccccggccctatcccttccaggtaagtttagcatctctcataa

SEQ ID NO: 235958 - DNA, 201 bp, Homo sapiens
tgagtaatttttcttaattatatgtataaacattaagaatcacttctttgcatattgctttagcaccatttgttgaaaagattatcctctcctcatcgaaytatcttggaaatcaattgaccatacatattggtttatgtctgttctctgtattctgttccactgatgccaataaccagctacctttaaaactgtagtttt

SEQ ID NO: 235959 - DNA, 201 bp, Homo sapiens
tcatgaataacataatgaaaatgaatcttgagttgattgttactcctaggtcattgacctcttcctatctgtgaattgtagattgatttaagaaagagtasttgctctttccaaattgttagccttatccttttagttcctgataacaacacaggattcctccttaaataactctgttgataaatcctcataaaaacagtt

SEQ ID NO: 235960 - DNA, 201 bp, Homo sapiens
tttaaaatgctgctcattttccatagttagtgtggcttgattatctgacaaatcctgccagaagcctgtaggtctgatataccttatataacaacatctgyattattattattatagcagccattttataagcagataggaatatttaaataatcattatcagataatcaaatctaacatactcttaagggtaaattaatt

SEQ ID NO: 235961 - DNA, 201 bp, Homo sapiens
gaaagcatttaaaatgctgctcattttccatagttagtgtggcttgattatctgacaaatcctgccagaagcctgtaggtctgatataccttatataacawcatctgtattattattattatagcagccattttataagcagataggaatatttaaataatcattatcagataatcaaatctaacatactcttaagggtaa

SEQ ID NO: 235962 - DNA, 201 bp, Homo sapiens
agcagtgtgggtaggggtcacacggtctttagtctgggtgctttctggagaaatgcagagctgtgaccacccacagtattcaggcaaagttggggcattasgcattaggagcccaagtcagcaagccctgccggatgaggagcagtggggataggaggtcacatagtctgcagcctgggtgcttcctggagaaactcagag

SEQ ID NO: 235963 - DNA, 201 bp, Homo sapiens
gagcagtgtgggtaggggtcacacggtctttagtctgggtgctttctggagaaatgcagagctgtgaccacccacagtattcaggcaaagttggggcattmggcattaggagcccaagtcagcaagccctgccggatgaggagcagtggggataggaggtcacatagtctgcagcctgggtgcttcctggagaaactcaga

SEQ ID NO: 235964 - DNA, 201 bp, Homo sapiens
ggagcagtgtgggtaggggtcacacggtctttagtctgggtgctttctggagaaatgcagagctgtgaccacccacagtattcaggcaaagttggggcatkaggcattaggagcccaagtcagcaagccctgccggatgaggagcagtggggataggaggtcacatagtctgcagcctgggtgcttcctggagaaactcag

SEQ ID NO: 235965 - DNA, 201 bp, Homo sapiens
aaggagcagtgtgggtaggggtcacacggtctttagtctgggtgctttctggagaaatgcagagctgtgaccacccacagtattcaggcaaagttggggcattaggcattaggagcccaagtcagcaagccctgccggatgaggagcagtggggataggaggtcacatagtctgcagcctgggtgcttcctggagaaactc

SEQ ID NO: 235966 - DNA, 201 bp, Homo sapiens
atgttccttcagtgcctacttttttgaggatttttatcataaagggatgttgaattttatcaaatgctttttctgcatctattgagttgatcatatttttwaaaaaaattatatttatgtggtgaaccacatttgttgatttgtgtacgctgaaccaaccttgcatcacaggaataaagcttatttgatcatggtgaattc

SEQ ID NO: 235967 - DNA, 201 bp, Homo sapiens
tggtgataggtagaagtccagttttgttcttcagcgtatggctagccagttaccccaacaccatttattgaatagggagtcctttcctgattgcttgtttygtctacttgttgaagatcagatgtttataagtgtgcagctttatttttggcttatctgtcctgttctgtttgtctgtgtgtctgctgttcaaccagtacc

SEQ ID NO: 235968 - DNA, 201 bp, Homo sapiens
taaaaagagaatgctgatgcacaagtttagagtgtctttcatgatcagttattagggactggaatctgtaatgtttgctggcttttcttttacagaacaawtgtaaaacataaatgttgactgatagagttattattaattatgataggcagacatcttccctttttggtccagtcatgacaataagttcatattgcccct

SEQ ID NO: 235969 - DNA, 201 bp, Homo sapiens
gaaatagtactgattgcactatataaactcatgcgaacaacctacagttacttaaaaatatactttttattgctatggctcatatgcatcatttacaaaawttgcaacatttactttaggttcagggagtgcacgtgcaggttcgttacgtgggtatattgtatgaaagatcctgtcatccaggtagtaagtatagtatag

SEQ ID NO: 235970 - DNA, 201 bp, Homo sapiens
ccttttagagcactctatttggtaactacaacttcattgcagtaaaggaagcacaaagggaaataacatgcagaagaatactattaggttaaatttgtackaataaaatgaaaaatactgaagaaattcattgattcaacatatttgcaatacctccaaaatggaataaatgtatcagttaggttggtgcaaaagtaattg

SEQ ID NO: 235971 - DNA, 201 bp, Homo sapiens
accaattgatctgctcatgagaataaatgaaattgctgtcatcatgtaaacaaattccagttttaaattgtaatattgactttaatttcacacatttttttaagcctgacagagaaaaccaagattgcttattcgatagaatttcagaaagttatgtgacacttttcatgagcatacctctaagtcgaaaggatgcatttt

SEQ ID NO: 235972 - DNA, 201 bp, Homo sapiens
attattgtccttggttttatcggggcatgtattggcaaagtatttttagtgttgaagtttgggatgtgattcagtagatggtgcttaagcatgctggttaktagctgggcactcgctcagccaagtggctcttctgtatttcctcacatttacaaggcatgctcctttcaaagaagttttaaaattgtgactacttagttt

SEQ ID NO: 235973 - DNA, 201 bp, Homo sapiens
gaattaaagacttaaatatcagatctgaaactgtaaaactactagaagaaaacagaggaaaagctccatgacgttggtttgtacggtgattttttgagtaygaagccaaatgtacaggcaacaaaagcaaaaaatagacaaatggaattgcgtcaaactaaaaagcttcagcagagcaaagcaaacagtcaatagattgaa

SEQ ID NO: 235974 - DNA, 201 bp, Homo sapiens
tgatctctttacataatctcatatttctcagaggttttgttcattattttttatttatttttgtgtgactgagttatttctgagaagcaatctttgaggtmtgagattcattcctcatcttggtctattctgctgttaatacttgtgattgtattattaaatacttttagcgtgtttttcagctctgtcagttcagtttgg

SEQ ID NO: 235975 - DNA, 201 bp, Homo sapiens
gcagagtattggcataaaaacagacacatatacgcatagaacagaaaagagagcccccaaatgaatctacgcgtttacaactaattggttttcaacaaagrcgccaagaacacataacagagaatggacagtctccaataactgttgttgggataactgagtatccacatgcagaagacggaaattgaacccttatttcac

SEQ ID NO: 235976 - DNA, 201 bp, Homo sapiens
ccaacagacctgcagttgagggacctgattgttagaagaaaaattatgaaacagaaaggaatagcatcaacatccacaaaaaggacatccacaccaaaacytcttctgtaggtcaccaacatcaaagaccaaagttagataaaaccacaaagatggggagaaaccagagcagaaaatctgaaaattctaaaaaccagagca

SEQ ID NO: 235977 - DNA, 201 bp, Homo sapiens
aaaagtctttgtaaactgtgcattggacaaaggactaatatccagagtctacaaggaactcaaatcagcaagaaaaaaaagaaataattccatcaaaaagygggctaaggatatgaatagacaattctcaaaagaagatatacaaatggccaaaaaacctgtgaaaaaaatgctcaacatcattaattatcagggaaatac

SEQ ID NO: 235978 - DNA, 201 bp, Homo sapiens
cttttacaattaattaaattaaattaatacaatataaaataaaattaaaaatacttaggagtatgtctaaccaaggagatgaaagacctctacaagataarctataaaacactactgaaagaaatcatagatgacacaaacaaatggaaacacatctcatattcatggtgggtagaatcaatatcgtgaaaatgaccgtac

SEQ ID NO: 235979 - DNA, 201 bp, Homo sapiens
tgatgattatattgcaatgaatttcctggatgtccattgagcttcctctgtttgcatgtctagatttctagcaaggcagggaagtctttcttgattattcyctcaagtaagtttttgaaactttcagatttcctcctcaggaataccagttatttttaggtttggtcatgtaacataatctcagactccttggaggctttg

SEQ ID NO: 235980 - DNA, 201 bp, Homo sapiens
atagacatacaggtatgcctatccatcctctattgagatagagataaaaattctctaaatgctagattaatggcatagattgacatgcagtgggaatttayagaagagaaaaatcatcgtaaggcaggaccaagtctggtaatcattaaagaggagaatcttgattttgttcttgatggcagagcagggtatggattgata

SEQ ID NO: 235981 - DNA, 201 bp, Homo sapiens
tggacatatataacataagtgtgtgtgtatttgtgttgcttaagtagatgagtgtaggtggatggatagatagacacacaggtatgcctagttgcttaagyagataagtgtagatggatggatagatagacatacaggtatgcctatccatcctctattgagatagagataaaaattctctaaatgctagattaatggcat

SEQ ID NO: 235982 - DNA, 201 bp, Homo sapiens
ggactcaagtatgagaaagaaagaaaagaaaggagcctgttccatctttctgattttccttgtcatcttctcttttgcttctctttacttatgggcattcktgttaagtctgaagggcttcttctctcccaacagacaagaacatgtagagactagtgtacaatatgtctgaatgctggacaattggaggtcagggataga

SEQ ID NO: 235983 - DNA, 201 bp, Homo sapiens
gtttaaatgtaagttccttgctaaccaattctttaatccctggtggacataaatgcttacctgcctttagtatttcaagctaatgcctaatatttcctaaygtctaatgtcaaaaatcaacccaagtaactttctttaactcttaaaaggtttgtcatcaacattacaatcactagatctgattagtctacctggtaactg

SEQ ID NO: 235984 - DNA, 201 bp, Homo sapiens
gaacaattcatgttttgtgaccaatttgaattaaaacttgtaaataatgttggaatgtagtcagatatcaaccagtggctaatttgcaaaaaaaaaaaaaagtaacagtgaaagtaacttatattaagtgcttactagggatcaggcaccatgttaaataatttcacgtctgccttgatggcagacagggactagattgaa

SEQ ID NO: 235985 - DNA, 201 bp, Homo sapiens
tttacaactgaaaaatgaggtgagtagaatatttctatattccccttttccagcattttgttctttaaagacttctatccataggtgctgaataatcttcyaaagtgattgctgactgttcaggtgtaattagtaatagagactggtggtttaggattcatgatttgagaactcctctttctctatagctgtgtgtgtgtg

SEQ ID NO: 235986 - DNA, 201 bp, Homo sapiens
tatctagtgcttaggacaatggataaaaattgctgtatgccacagtaaattgtgagtcctcagaacccagagaacaaaaagaaaatgctaaaaaaaaaaaacttccagagaacagaaagattaagaaacagaattgtatcatccctcttaacagcagctttgaaagatggaagagaatggaacaatgtcttacaaattcta

SEQ ID NO: 235987 - DNA, 201 bp, Homo sapiens
tgaacataagattcagatcatgtatttactggtgccataagtatgcttttgtttggaggctttcctatactatagtccctaatgtttcatctgctctaatrtattcaacttgcacataaagaacttgaatgtctttgagcaggtcatacaacccctctgagctttatttttacaactgaaaaatgaggtgagtagaatatt

SEQ ID NO: 235988 - DNA, 201 bp, Homo sapiens
tcaaaaagttttccatgcttgaaaaacttgagtttctagtttgaaagaggttatctagtgcttaggacaatggataaaaattgctgtatgccacagtaaaytgtgagtcctcagaacccagagaacaaaaagaaaatgctaaaaaaaaaaaacttccagagaacagaaagattaagaaacagaattgtatcatccctctta

SEQ ID NO: 235989 - DNA, 201 bp, Homo sapiens
gccaaagtggtgcagaggcacaatggcaacaatgggccagaatttctaaacctctaaaagaaacacagcctccattgagaattacatgtctaccacacacygctgtttttgatggtggaattaaaagagaagttgttgtaacatttcaaagaggtaaagatcactaaagaggtattttttctataatcttctgcttagatt

SEQ ID NO: 235990 - DNA, 201 bp, Homo sapiens
tcacccatactgactgttaaatatttttgttatcactcctatgcgtggtgaatttgagttctggttttctttagccttgtgttatttatgtgtaaagttgsattatgggaggcaaataatcttttgtgtctcattcacgctcaagtaaatggcagtggagtagggatgtaaaccaaactgcatgataagccctgcaagtca

SEQ ID NO: 235991 - DNA, 201 bp, Homo sapiens
aacctacagaatcaatgcaatccctaacaaaattccagtgatgtttaaacagagatagaagaaaacagtcctaaaatttatatggaactgcagaagatccctgaatagtctgagcaatcttgagcaaaaagaacaaagcttgaagtatcaccctacctaacttcaaaatatactacaatgctgtagtaaccaaaaaaagca

SEQ ID NO: 235992 - DNA, 201 bp, Homo sapiens
aggtgaacaggaatatcaccagacttgaggtgcctgtcacattgcatgcatacaaatcacctgagacgccaattaacagcagagattttgactcaataggkgagggttgaggcctagagaatatgctttaaaacaagtaaagtaggtgatcctaatacaggtgatcccccaactacactttaaatcatactgctgtttagg

SEQ ID NO: 235993 - DNA, 201 bp, Homo sapiens
gcctagtctttatttacttatgtgtagtctagctaaaattcttgatcatttgagtttatatcaaaattagttctgaaatatgattttgtttttattttagrtatgacatatgaatgtgctagggttcttaatttcaaagaagcagaaaatatgaaggtttttctttttttgcagggggtgtggggaatggggcctcactct

SEQ ID NO: 235994 - DNA, 201 bp, Homo sapiens
agaagttttaaaattgtgactacttagttttatcaaatgacttttcaaaatctattgaaatgggctataggtaaattatactaacaaaagttttaatagtkattctttttgttaaatataaaagttttattggatttatcaatcagaattttaacatgtatttatatttttgtggtctcgttttcaggttatatgaccaaa

SEQ ID NO: 235995 - DNA, 201 bp, Homo sapiens
aattggctttgtttctggatgttttcagagggctgagactttgtgttgggtctttttttgtagctgaattattgtccttggttttatcggggcatgtattkgcaaagtatttttagtgttgaagtttgggatgtgattcagtagatggtgcttaagcatgctggttagtagctgggcactcgctcagccaagtggctcttc

SEQ ID NO: 235996 - DNA, 201 bp, Homo sapiens
ttttgccaagtgaaagcaagtttattaagaaagtaaaggaatgaaaaaatggctactccatagacagaggagccccaagggctgctggttacccatttttrtggttatttttgatgatatgctaaacaacgggtggattattcatgcctcccctttttagaccaaaaagagtaacctcctgacattgtcatgtcatttgta

SEQ ID NO: 235997 - DNA, 201 bp, Homo sapiens
aattttgtatcctgagacttcgctgaagttgtttatcagcttaaggagcttttgagactatagggtttctaggtataggataatgtcacctgaaaacaggrtagtatgacttcctttctttctatttggatgccctttatttctttctcctgcctgatagctctgactagggcttccaatactatgttcagtagaagtggt

SEQ ID NO: 235998 - DNA, 201 bp, Homo sapiens
tcccacctataagtgagaacatgcagtgtttggttttttgtccttgagatagtttgctgagaatgatggtttccatcttcatccatgtccctacaaaggayatgaactcatcattttttatggctgcatagtattccatggtgtatatgtgccacattttcttaatccagtctatcattgttggacatttggcttggttcc

SEQ ID NO: 235999 - DNA, 201 bp, Homo sapiens
aggagaagggattgacataaaagtttagacataggagtaagtgccacagacatgttagttggaacatggtatttcagaaaaaggaaacagaagatatactytatataataattccagttattcattcagctaacagtgtgtattaacatatacttatcacaattgctaattgatttcattgaataattttgtatataattt

SEQ ID NO: 236000 - DNA, 201 bp, Homo sapiens
agttatgtatagcttctgtgtatgtatatataaatacacacacatatatatagcttgcatacacacatacacacagacacccgtgtgtgtgtataaattcrtcttgtaatgaaataaaatacccacaagtaaacaaagtatgaacatatcctttcatatcttccttctgttttttaaaaaaggtaattttatatatatata

SEQ ID NO: 236001 - DNA, 201 bp, Homo sapiens
agatccttttccatccctttattttgagtctatgggtgtcatttcacatgagatgggtctcttgaagatagcagactattgggtcttgattcttttttcarcttggcactctgtgccttttaaaaagcttgaaagtgtattatatattttatttatctctaaatatttgaaatacgctttttatatctgacgctaaaacgt

SEQ ID NO: 236002 - DNA, 201 bp, Homo sapiens
atgagaaaggaggtttatacttctgcttaagctcctcttcaagctaaacgttatttctatcctcagctacaacttatatttttccctcgatagtttttaayattaattcaaacatagtgagtcctccttattcctctaattaattccaaaaaatgtcaattctaccacaacttcttctacacctgtttcttcctatcaatt

SEQ ID NO: 236003 - DNA, 201 bp, Homo sapiens
tatttttgggggaaggagcattcaaaggagttgattagctgtagctatactaactatatctctagtttagtttttttcccaaataggttcagcccacatgyggaaaagaataactgggcagcttcagacaaaaaacctaagctatccaattgcctgtaacagattttacagtaaaacagatgaggtttatttttaaatgaa

SEQ ID NO: 236004 - DNA, 201 bp, Homo sapiens
ttagacctagagcaaaatctctagttggagctactagtttgggtttttttttccacttgtacatttctatataatgaaagcatattatgtaattcattctwgattgtcttgattccccttaagttactgcttaactttaggaaacaatcaatttccttgagtaagtgctttacattggtacctagttttgacagcttcatg

SEQ ID NO: 236005 - DNA, 201 bp, Homo sapiens
tatccattcatcttttggtggctatttgtattgttctcagtatttggctattataaatacagctgctatgaacatttatatacaagtatttgttcggatayaggattttatttctctttgataaacatctagtagtgggatgacagagcagcatggttatgtaacgtattaggtcattcttgcattgctataaataaatat

SEQ ID NO: 236006 - DNA, 201 bp, Homo sapiens
aggcagaacaacattgcccctttcagagatcaccacacacccatgtttcctttgtttcaaagggcactttaatgggctgcactgccccttttccttggggmagcccatgctaagggctaggtctccaggaatcccacagctccctagcgtctggctggtcccctgtgattgccaaagtcagagtgtgttccagagcatgtt

SEQ ID NO: 236007 - DNA, 201 bp, Homo sapiens
cttcttgccaccaacccacaggcaatcatttatgtaatttttgtcactataggttagaatgcaattttctagaattttacataaatgaaattatatagagkgcatgctgtttttcaactaacattttttattccacataattattctgagattcattcatgttgttacatgtattaataatctcttcctttgtattgctga

SEQ ID NO: 236008 - DNA, 201 bp, Homo sapiens
tgtttagagtggttagatgacttatctaatcctacgcagcttaaaaggaacaaaaaaggaacttttttgttgtgaggatgaaatgtataattatcataaamatgctttgacaaattaaaaggtattttcaaaatccaaatttatttggctaaatatgtattttatattaacaggtttaaaacctcaaaaaggcttttggat

SEQ ID NO: 236009 - DNA, 201 bp, Homo sapiens
ctattttgtgagaaccatactgcactcagaactattgatttaaattaagtttttacaattactgctaacaaagtgtaactgctttctccctagacttcttyattatatgcttttacatttgtggttaatcaattattttctcctgaactgcccaggttttttaagttaaatgtcaggattgctctggagaacttcaacctt

SEQ ID NO: 236010 - DNA, 201 bp, Homo sapiens
agaaaatattggctacatttatgagcatgttatagtcataattattgttaacatataatattaataataatattagttcatatttgtgtcatactttcccrtttaccaacactgtaacatatatttcaaaataatttatgttattctcatttttattgctgaggatacagatgtttagagtggttagatgacttatctaat

SEQ ID NO: 236011 - DNA, 201 bp, Homo sapiens
caatttttctattaatgcacaatattttaaaacataggcaatctatctagaagcactcaagtgaatcaaactgaagtctgctaaataagtgataactgtayctaaaaacatttagaaaattacaatttgatggctcagtctagtgaataaccctcattgaacactcaccgctgagaaaatattggctacatttatgagcat

SEQ ID NO: 236012 - DNA, 201 bp, Homo sapiens
ccttttctttctccatgccctccaaccatctacccgagcccaaaacattgtggaagcagaattatacatctagatattttacttctcctgctagctccaakccatatttactagtatcttaaaaaaccacattcctgtgtggaagcattgcttctgctggtgaagtgagtagtcctctgaagcctattgacattctcaggt

SEQ ID NO: 236013 - DNA, 201 bp, Homo sapiens
attatcctgagggattggattctgtcttccacatctgtctctcaaggcggtcactgagtgcccagtgcactgctgctttctctcactcggcacctcaataytcagcttaaagagcagtgttatttctgtcaggtgcagaatgatagcctctgtctgctgttggactgcctggtgcagcagtaatctaaattcaccctctga

SEQ ID NO: 236014 - DNA, 201 bp, Homo sapiens
gacttctctactaaagatatgtccagatataatctcaaatgcagataaaaaacttggtccaaaagcggttaaacattcagggactctttaacacaattttscaaatcatgtggaaggcagaggattttcatttacaacctatttgaggggtaaaaatgttagatgttgtttagtaaaggagtttatattaaagtctatttc

SEQ ID NO: 236015 - DNA, 201 bp, Homo sapiens
agcatatgtttatctcaatagatgcagaaaaattatttgacaaaatccagcatcactttatgattaaaaccctcagcaaaattggcaaagaggagacatamctcagggtaataaagccatctatgacaaatacacagccaacattatactgaatggggagaagttgaaagcattgccccctgagaactggaacaagacaag

SEQ ID NO: 236016 - DNA, 201 bp, Homo sapiens
ctgtaaatatctgttaagtccatttgttctagggcataatttatgtccattatttctttgttgactttccatcttgatgacctgtttggtgtcgtcagtgragtattgaagtcctctactattactgtgttgctgtatatctaatttcttgtgcctagtaataattgttttacaaatctgtgagttcctatgttagatgca

SEQ ID NO: 236017 - DNA, 201 bp, Homo sapiens
gccttagccaaaatttgatgagattattgacctgaaattctgaatttgatatcttaatttgttagacaattagattttaagttggttacagtctttattgytaaaattttgtctacatcatcttatccagtctgataagataatttatttaaaattaaaaattatgcctatataaaaaccactttctgaaagtcagtattt

SEQ ID NO: 236018 - DNA, 201 bp, Homo sapiens
gtataaacacttggactgtataatctctctgtgaagttatttataattatgtatattatgttaacattacttggagaagcaattctaatttagagcattgwgaaggtccttaatctttcagtttgccaatttgaaccatgaatttcacacagagaggtgggaggatggatctgtaagtaggtatgtagagagatataactc

SEQ ID NO: 236019 - DNA, 201 bp, Homo sapiens
ccctggcagcatgtcagaattatctggggaagcttttaaaattcctgatgcccagactgtacctcagatcaatttaatgaaaaattttttgtgggtggaamctggcatcagtatttttttaaagttccccagctgattgtaatatttagacaaggttgagagatagaaaaatgtagaaaggcaaccctttcaatatatcta

SEQ ID NO: 236020 - DNA, 201 bp, Homo sapiens
gcaaaagaggtaatttcctttgaatggctgagtagtccatggtgtgtatgtgccacattttctttatcccatcattagttgatgggtacttaggttggttytacatctttgcaattgtgaattgtgctgctataaacatacatgggcaagtgtctttttcatataatgacttctttctttgggtagataccccacagtggg

SEQ ID NO: 236021 - DNA, 201 bp, Homo sapiens
acttcttcttaacctcacagaagctcaaaatgtatttacctctaagtaaagttcaaagtgataagagagtattttgccagccatgttacagagtttcttakttaatattctcaagctcttacaagtatcaaaagaaataacaatatagtgcaagattatttacaatgggcctggtggattatataataacactttgtccac

SEQ ID NO: 236022 - DNA, 201 bp, Homo sapiens
taagtaaagttcaaagtgataagagagtattttgccagccatgttacagagtttcttagttaatattctcaagctcttacaagtatcaaaagaaataacawtatagtgcaagattatttacaatgggcctggtggattatataataacactttgtccacctaaattattattacaaggaatactttttgaaagccttatat

SEQ ID NO: 236023 - DNA, 201 bp, Homo sapiens
atatttttaatgtataaaagttatgtatagcttctgtgtatgtatatataaatacacacacatatatatagcttgcatacacacatacacacagacacccrtgtgtgtgtataaattcgtcttgtaatgaaataaaatacccacaagtaaacaaagtatgaacatatcctttcatatcttccttctgttttttaaaaaagg

SEQ ID NO: 236024 - DNA, 201 bp, Homo sapiens
agaccaaagttagataaaaccacaaagatggggagaaaccagagcagaaaatctgaaaattctaaaaaccagagcacctcttctccaaaggatctcagccycttgccagcaatggaacaaagctggacagagaatgactttgatgagttgacagaagtaggctctaggaggtcagtaataacaaacttctgtgagctaaag

SEQ ID NO: 236025 - DNA, 201 bp, Homo sapiens
tcccacggtattagcaactggcagaccaggagattctctcctgtgcctggctcagtgggtcccacgcccacggaactttgctcactgctggtgcagcagtytgagatctgcgaggctgaagcctggtcgggggaggggtgtccaccattgctgaggcttgagtaggtaaacaaagtgggcaggaagcttgaactgggtgga

SEQ ID NO: 236026 - DNA, 201 bp, Homo sapiens
gaatgtaaagtagtacaatcactatggaaaacagtatggagattccttgaagaactaaaagtagatctaccatttgatccagtaatcccactattagataygtacccagaggaaaagaagtcattatataaaaaagacacttgcactcgcatgtttatagctgcacaatttgcatttgcaaaaatatggaaccagcccaaa

SEQ ID NO: 236027 - DNA, 201 bp, Homo sapiens
gaaactttcagatttcctcctcaggaataccagttatttttaggtttggtcatgtaacataatctcagactccttggaggctttgttcatttttaaaaaaattatttttcctttgtctttgttggactgggtcaatttaaaagccttcttgattttgagctctgaagttctttattctacttgtttgattctattgttgaa

SEQ ID NO: 236028 - DNA, 201 bp, Homo sapiens
tatccacacaacatagatggaactgaaaatttttatgttgagtgaaataagccaggcacagaaagacaaacattgcatttctcacttatttttgggttctraaaatcaaaacaattgaactcatggaaatagagagcagaaggagggttaccagaaactgggaaaaggagtgggaggattgtggggagatggggatggtta

SEQ ID NO: 236029 - DNA, 201 bp, Homo sapiens
tctaggtactagcaattaactattaaagaaatcaagaaaacaatctcttttacaataacatgaaaaaatacttatggataaatttaaagaaggaggtattrgcatgtagctttttttgttgtcttttcctagttttggtattaaggtaatactggcttcatagaatgatttagggaggattccctccttctctgtcttttg

SEQ ID NO: 236030 - DNA, 201 bp, Homo sapiens
cctgtggcatgacatccccctactcttgggaactgtgagtaataaaccatctttataaacgcaatctgctgatctgttggccttactatacttcaattttyctattaatgcacaatattttaaaacataggcaatctatctagaagcactcaagtgaatcaaactgaagtctgctaaataagtgataactgtatctaaaaa

SEQ ID NO: 236031 - DNA, 201 bp, Homo sapiens
aactggcaatgtgaaaagataaatttcgagtgttgtggctctatattaatgtcattctttggaacaattcatgttttgtgaccaatttgaattaaaacttktaaataatgttggaatgtagtcagatatcaaccagtggctaatttgcaaaaaaaaaaaaaagtaacagtgaaagtaacttatattaagtgcttactaggg

SEQ ID NO: 236032 - DNA, 201 bp, Homo sapiens
taggatggtgaaagatcgttaaatctttatcttccctagttggacgtcaatagaatgcctaaaattaatacatcaaaatgtaacaatatagcccttttttktgtgtgctatggttatgggtcccagataaagatagttgtttctgggaagcaagatatggtcttggggatgtgtgaggaactatgggactttggaaattaa

SEQ ID NO: 236033 - DNA, 201 bp, Homo sapiens
tttttcctctacacagtcttttagtaaccagcttgtgttgataaaaggaaagctggaaggtttaaagcaagattctatatatgaacttcttgctccttaayatacaatgatgttaatcacacaatggactcatcagacctactatgcaatatctaatctttgtaagttaactgactactcaaatattttcagaaaacaatc

SEQ ID NO: 236034 - DNA, 201 bp, Homo sapiens
gaaatataaatcattctgttacaaagacatgtacatgtgtgttcattgcagtactgttaactatagcaaagacatagaatcaacccaaatgcccatcagtrataggctggataaaggatatgcggtacatatacaccatggaatgctatgcaaccacagaaaggaacgagataatgtcctttgcaaggatatggatgcatc

SEQ ID NO: 236035 - DNA, 201 bp, Homo sapiens
ccccatctgcaaatgagcataagtctgcccacctaataagagccctgtgaagattaaattaaataatgtatataaagtgtttaacacagtgccaggcacayagaaaccactcacacatttaatttttgttgtagtagtcatttttgttatcttaatactaatggcccatgttttcattgagggaaaaaatttacttaagaa

SEQ ID NO: 236036 - DNA, 201 bp, Homo sapiens
tgcaatgcattagaaactatgatcaaaaaataggaagtctttatgtaagttgaaaattaaaaatatgtgcctacgtgtgtaactatgtaacaaacctgcaygttctgcacatgtaccccagaactgagagtataataataataaaaagaaatatgtgcctaataacatgctcatctatctgagcccccacccagttctgtt

SEQ ID NO: 236037 - DNA, 201 bp, Homo sapiens
tacaaagtaatatgcgatgttttaataacaccagtgacagtatagtgatacatgtgatgatactaaagctgtgctttggagttaaacctacttgcattcayatcccaactttgacagttactagctatgtaacctagagcaagttacttaattctgtgagccaaatctcccccatctgcaaatgagcataagtctgcccac

SEQ ID NO: 236038 - DNA, 201 bp, Homo sapiens
tgcacatgtatcccagaatgtaaagttaaataaataaataattaaaaaaataaatatttgaataggcaccttatcgaagaattcgtatgaatctaagaacwtcatctcaattattggcatagccataataattctggaagattgtgggtaatgataagggacaaaaaataattcagaaagaaatgtacaactcttagtaat

SEQ ID NO: 236039 - DNA, 201 bp, Homo sapiens
ccctgagaagtactgctgtggtgaatcagaagaaaattataccatgtcatgaaatgcactctccttttctctctatatatggaaatcctaactaatctttrtgtcccactttgtctgtaatgcttcctggtctactttcctggtctacttcagtcctctggagctcctgttggaactgtggccaataccatatgatttagc

SEQ ID NO: 236040 - DNA, 201 bp, Homo sapiens
acctcttcaaggagagctgcaaaccactgctcatggaaataagagaggacacaaacaaatggaaaaacattctatcctcatggataggaaaaatcaatatygtgaaaatggccatactgcccaaagtaatttataaatgtaattctatttccatcaaactaccattgacattcttcacagaattagcaaaaactactttaa

SEQ ID NO: 236041 - DNA, 201 bp, Homo sapiens
gacttatattcttaattgcttgacatatttaaaaaataccattaacactgggaaatcaacatatctaaaagacaattgcttgggaagagcattaagcagtrttggcagaatcagtagcttatcaaccctattttctagtctattttgttccatgtcctacaaccctcttttattcaagaaaagctcaagaataaagaaatt

SEQ ID NO: 236042 - DNA, 201 bp, Homo sapiens
aattgtgctagttttgtgagatgcaatacagcagagttcgagatagaaactatttctgccttcacatgatttccaacagcctttgactctcccacttccartctctttttcctaatcaacctaatcattagtggtgtgagcagcacatatttggtgaattgtagtgacttagtaggtatataggtgtcgtgtggaagcaca

SEQ ID NO: 236043 - DNA, 201 bp, Homo sapiens
aaggatggttcaacatatgcaaatcaatcaatgtaatacattgtattaacagaatgaaggataaaacccatatgatcatttcaactgatgctgaaaaaaakcatttgataaaattccatatcccttcataataaaaattatcaaaaaattggtgatataaggaatatacctcagcatagtaaaaaccatgtataacagact

SEQ ID NO: 236044 - DNA, 201 bp, Homo sapiens
ttcagagtcataagtgtctgatctcatatcacatcactttgacactgactgctttgcctttctcttccacatttaaggattcttgtgaattcaatgagcckgcctgaacaatataatcaccctattttatggtcagccaattagcaaacttaattctgtcttctcccttaagtccccttcaccatataacaagacatattc

SEQ ID NO: 236045 - DNA, 201 bp, Homo sapiens
taaatgtttaataatggctgtatttaataagttaacaaaatttttgaaaatttaacaattggctctcatggaccagtacaaggagcttcagcagaccaccraatatggtcaccctacttataactaatcccatatattcaaacattcattggctacatattttcaaacacttaatatgtgccaggaattgtgctagttttg

SEQ ID NO: 236046 - DNA, 201 bp, Homo sapiens
accacagtgttactgggcttggggtgtcccttaaagtagatacagcttatatcacaacacccaagctctttcaagtatctggaaaaccttcccaagtagarcagctataaataagcgcagacagtgaatattacaataaatacctaactctttaatgcccagacaccaaagaacatcaactggcatcaacacatccaggaa

SEQ ID NO: 236047 - DNA, 201 bp, Homo sapiens
ttcattttttcacaactaaaattttcattgcctaagtgacttatacacaataagagaaaaaaaggatcacaagaggctgtattagttttctattgctgctktaacaagttgccatttagtgatttataacaacacaaatgtatatcttacagttctggaagttagaagtccaactggagtaaaatcaagatattgacagag

SEQ ID NO: 236048 - DNA, 201 bp, Homo sapiens
attcacaatgaaacagttatagacactaaaccttaagtttaatctacattattaacatttttgtatcattcgcttaaatgtagaccatcaacaaaatagtraatcaagccctgatttgtagcattggccaatttatgtggtgtaggtgctcttatcatagttgggtccaagccaccaacaaaacatcactgaacagagttg

SEQ ID NO: 236049 - DNA, 201 bp, Homo sapiens
caaaatactgatcttcaagctctgaaaatttttcttctgcttagtctagactattgataaaactttcagtggtattttgaaatttctttggtgagttttttatttccagtgctctaattgatttcttttcatgatgtttagcacttccttcatttcctggattcctttagaagtttctttgtgttgatttttaatcttttc

SEQ ID NO: 236050 - DNA, 201 bp, Homo sapiens
taactgaatgtaattagacccacgtactacaatctattgatgttttgaagcagataatttcaatgttatttctttgtctacttactttttatcctaaaaawgtttttaaaggcaaatatgtgatcatctatattcttttttactttttcatactataaaacataatctgttactgtttaaaccaactttggttccgtgcat

SEQ ID NO: 236051 - DNA, 201 bp, Homo sapiens
ctctaagtaaagttcaaagtgataagagagtattttgccagccatgttacagagtttcttagttaatattctcaagctcttacaagtatcaaaagaaatamcaatatagtgcaagattatttacaatgggcctggtggattatataataacactttgtccacctaaattattattacaaggaatactttttgaaagcctta

SEQ ID NO: 236052 - DNA, 201 bp, Homo sapiens
gctgtaagtttgtcatagttggctgttattattttgaggtatgtaccttcaatatgtagtttaatgagagtttttcacatgaaaggatgttgaattttaaygaaagccttttctgcatctattgagataatcatgtcatttttttatttgagttttgtttatgtgatgaatcacatttattgatttgcatatattgatcca

SEQ ID NO: 236053 - DNA, 201 bp, Homo sapiens
cagtattaagaaagtatattaaaattatctttttcatgttatatactcctcaaaacacacacgcgtgcacgcgcgcgcgcgcgcacacacacacacacacwctctctctctctctctctctctctctatgtgaaatgcactactttaccaccaggtggtgcatgtagaccaaataggaaaaggaaattaaatctactcaac

SEQ ID NO: 236054 - DNA, 201 bp, Homo sapiens
gaaatacctaaggaatcaagttaaccaaagaagtgaaatatctctgcaatgaaaactatcatgaaggaaatttaagaggacaccaaaacatggaaagataktccatgtttatggattggaataatcaatattgttaaaatgtccaaactacccaaagcaatttacagatgtaatgcaatccctatcaaaataccagcgaca

SEQ ID NO: 236055 - DNA, 201 bp, Homo sapiens
ttcatacaatgaaatattaccagaaataagagtgaacaaattatatctatatacaacaatatggttaaatcacacaaacttagttaaacaaaaagaaaaarccagatacaagtgagtagatgctgtatgagtctatttatataaaggtcaacatctataaaactaatctattgtgttagtagtgagactaatagttaccct

SEQ ID NO: 236056 - DNA, 201 bp, Homo sapiens
tcactcaggtcatgaccatcaacctgtaactttaatctttctgaggagtactggcattcaaccaccataggcagccatcttaaaatcctataaaaacacaracctatattttttaagataaaagataaccatgctggtgagagtgcaggttaatacaataattttggacaactgccaatatctactaaagctgagcatatg

SEQ ID NO: 236057 - DNA, 201 bp, Homo sapiens
ttcttcatagcagtatgaaattgaactaatacagtgttctcccaacagttttgagcataattcccttagcttttcactcaggtcatgaccatcaacctgtractttaatctttctgaggagtactggcattcaaccaccataggcagccatcttaaaatcctataaaaacacagacctatattttttaagataaaagataa

SEQ ID NO: 236058 - DNA, 201 bp, Homo sapiens
gcccaataatgcgacggaaaagaaaagcccattttctgaggagaaattcaaaccagctgcagaaatttgcataagtaatgaggagccaactgttaattgcyaagacaatggggaaaatatctccagggcatgtcagaggtcttcacagcagcccctctcatcacaagctgaggcctaggaagaaaaagtggttttgtgggc

SEQ ID NO: 236059 - DNA, 201 bp, Homo sapiens
aggttgaaaagaaagttctagtaatttatgatagatatcctgagataaccctcattcatctggccctcaaatatgttatgtaaataggagcataatatgtkgcttcatatttctgtcttttgaagttctgataagtttgttatttactgattataaatctgtatatgctctcggacattaaaataatttcaaactctcaaa

SEQ ID NO: 236060 - DNA, 201 bp, Homo sapiens
atttgtttaccaaacattttttcccatagcaagtatagaaatagatgttaacaagggttcattttaattttcacaaatatgaaatagtaaggtaactggcrtttaaaattctggttggggccgggtgcagtggctcacacctgtaatcccagaacagtgggaagccaaggcaggcagataacttgaggtcaggagttcgag

SEQ ID NO: 236061 - DNA, 201 bp, Homo sapiens
aaagaaaaatacagttgttattacagagaatataaaatgggaaccaaacatgctactaccactttttgttgacctcaatgcaatattttaggatgattacytaagattatttataaaaattacatttccacagtggtaagagaaaggagaaaagtgattattatattagcagtacaatttttaactagagtaattttgtga

SEQ ID NO: 236062 - DNA, 201 bp, Homo sapiens
acatggtctacactgaactgtcctgcataagagccatgtgccacatgtggctactgaacccttgcaatgtgaatagttggaattaaggtgtgttgtaaagsaaaaacatgcattggattttgaaggacctgtacaaaaagaaagaatgtaaaatatctcattaatatttttatactgggccaggcacggtggcgcatgcct

SEQ ID NO: 236063 - DNA, 201 bp, Homo sapiens
aatcactaatttattataacataaaaaattttcatgtttttggatatactaaatttggtgcagagttagtgaaacctaacgatgctagcgatctacataastatacacttcatagttaacaaagtatatgtataaacacttggactgtataatctctctgtgaagttatttataattatgtatattatgttaacattactt

SEQ ID NO: 236064 - DNA, 201 bp, Homo sapiens
attcagtttaagagaatattaaaatgttctatcacatttcaagtgatagaatagtaggacttggtgattaaaaatgggagctagaagagatggaggaatgyaaggcttccactttggtcaactgagtaatatcagaactcttatgtaaaatgtataaggtaagagcaggattgagggggaagatcctgaattcaattggga

SEQ ID NO: 236065 - DNA, 201 bp, Homo sapiens
tttttgttatcactcctatgcgtggtgaatttgagttctggttttctttagccttgtgttatttatgtgtaaagttggattatgggaggcaaataatcttytgtgtctcattcacgctcaagtaaatggcagtggagtagggatgtaaaccaaactgcatgataagccctgcaagtcattctgatgtatcaattttgctta

SEQ ID NO: 236066 - DNA, 201 bp, Homo sapiens
cctgttttagttaatggcatcataattttccaaaccattcagctttgaaatttgaatgctttttaaaaaagttatctctcataacccatatctaattaccrctttctatggattccacctacagggtagtttacacgctgatttgatttttttccatttctattactaacaccgttgttaccgcatttggaatattatagt

SEQ ID NO: 236067 - DNA, 201 bp, Homo sapiens
atagactcatttttcaagtctgtactcaagttttctttcctcttgagaaatggaagtagaaaagtttctgttctctaaggaatttgataatgtagttactyataaaatgttatagatttttaagaaaaagtgactcaagtatttatattttactgaaaagttcagtcctcttgattttcctgttttagttaatggcatcat

SEQ ID NO: 236068 - DNA, 201 bp, Homo sapiens
caaataaatagttacatatttgagttcagctttttattctctagaattaaatttctaatttactataataataatagctaatgtttattgaactcataccrcatgccaaggattattgcattgctcttatgtattaactcatttactcataaccacagattgagacaggtagtcttgttatcccagttttacagatcagga

SEQ ID NO: 236069 - DNA, 201 bp, Homo sapiens
actcattttatagactcatttttcaagtctgtactcaagttttctttcctcttgagaaatggaagtagaaaagtttctgttctctaaggaatttgataatrtagttacttataaaatgttatagatttttaagaaaaagtgactcaagtatttatattttactgaaaagttcagtcctcttgattttcctgttttagttaa

SEQ ID NO: 236070 - DNA, 201 bp, Homo sapiens
gaataggctagagaaaattttaataattgcttacaagcacatgaaggattatgatgttgatgcattcatgtaacgttcaacacatcttcactgagagccarttctatgctaggcttaattcacagacaagccttgcccttttagagcactctatttggtaactacaacttcattgcagtaaaggaagcacaaagggaaata

SEQ ID NO: 236071 - DNA, 201 bp, Homo sapiens
tacatttcaatgcccatgattgtgagattgatgttgatgaatgaactaaacatttcaagattttttcccaagaattttcatgtcagcaatgtgcaaattgrgtgaactttaacaaaaagagctttaatactggcaaatggaaattttggattttaaatatctaaaatgcacatggaattttagagctggaaggatccttag

SEQ ID NO: 236072 - DNA, 201 bp, Homo sapiens
ccaggggctaagacactgttacgggttccttgcttatagatagcttttggacatgattttctcaaatggctcctgttgtagctgtgtattgggtgtatgarctgactcactgtcttctgtgtggctgagagtgtggatgtcttaggaagcttatctcctgccctagcatggtgtgcttcagcaggttatttggtggtgcag

SEQ ID NO: 236073 - DNA, 201 bp, Homo sapiens
ttccactgtggtctgataagatacttgatacaatttcagttttcgaaatttattgagacttgctttattgctaagcatctggtcagttttggagaatgttycatatgctgatgagaaaaatgtttcttttgcaattgttgggtagaatcttctttaaatgtctattaggttcgtttggtctagagtccagtttaagtccag

SEQ ID NO: 236074 - DNA, 201 bp, Homo sapiens
ctgtcaaaaaaagacattagtaatttgataggaattgcattgaatcagtagattgttttgggcatcatggtcattttaatgatattgattcttacaacccrtaaatatgggatcttttttgattcatttgtgtcttctgagatttctttcatcagtgttatgtagttctctttgtagagatctttcactttcttagttaaa

SEQ ID NO: 236075 - DNA, 201 bp, Homo sapiens
aattacgattataattggaaaaattctgtaaatgctcttttttaagaagatatggcatacttgatgctttttgcgttattctgaagcaattttcattcccrttttctctagactattttgtctaattttccaccaaagaaacaattattttatttgcaatttttacttgacaaaaatatttgtcattaattttgcttgtat

SEQ ID NO: 236076 - DNA, 201 bp, Homo sapiens
ccatatatcaaatacctaaaataacctaataactcccctacttgactcccagggattccataaaggaaccaatttcagatttttaaaaatacacttaaaayttatgtaatagagaataagcataaaaatattggcaaggcatagtaaaataaaggatatatcaagtatttaaattttgctcttagagaaagacattttatt

SEQ ID NO: 236077 - DNA, 201 bp, Homo sapiens
taaaagagttaaattttacattgcaaccttttcagatgaagagagagaaagggcaggacctgaagccttgacccactggagcatttgcaccccctggtacycaaagtgaagtagcacctcaccccctggggacccaaagtctcagcctaccagagcatcctgcttctccagtgccaaagctgagtcaatgctttcaccttc

SEQ ID NO: 236078 - DNA, 201 bp, Homo sapiens
cttcaacccatagaaaaaagctagtcactctctgtataagcccagaagtcagtagaggtcaatgactattggtaacctacctctgtataaaagtctgcaaytgcctttttacagttagaatatttctgatcagtgaatctctgctcaattccctttgatgctaccatatatcaaatacctaaaataacctaataactcccc

SEQ ID NO: 236079 - DNA, 201 bp, Homo sapiens
ataaacacctcctatggacaccagagccactgctgcagcatctgcatctgcattgtggactctagagcaacagtaaatttgcacatgcccatgctctggamcccagatcctagggcaacacctgcacccatgacactggacccactgcaacaccacctcagattcctgagctctgcctgaatttactctccagacctcatt

SEQ ID NO: 236080 - DNA, 201 bp, Homo sapiens
ctattggacaatgcaaatgtcagacatttccattgtcacagaaagtactatgaacaacactgccttgagtaagaagaaaagtttaatttattttatagaamttgatataccacctagggatatcagaaagccaacacatacagaactgtattttactttgtcacgtgcagccttctaattttagaagtttaggggcttaag

SEQ ID NO: 236081 - DNA, 201 bp, Homo sapiens
tggcctgctctgcaaaggatcctagcaaccttttctactaaggacttcaacagttcctgaggcagccacacactccctgcagctttcacatcagatgtccycttagtgttcatcctttctgtcttcaggacacaggacactgctggctcttccactgagatggttaaccaacagccattgctgttttgacctcctggagag

SEQ ID NO: 236082 - DNA, 201 bp, Homo sapiens
aaattgggtgtcaatgtcataaaattatctgttaatgagatttttcagataatggaaagcacacgttaacttgatgaaatgtgagctatcttaaaagtatwtttttgttcaaaacatacaggcctaaaaatcctgtggcaacgtagagataaaagacttcctctgccaaaatatgatggagaattgatatttcctctaatt

SEQ ID NO: 236083 - DNA, 201 bp, Homo sapiens
gtggcattgctccttactgaaacatattccagttcaaatttagctttcaggcatagtgacgtacattaatttatataaatgtgattttagaatttaaaaamtggcgaatttttattcggttaataaattgcaaggcaaatttaaaaaataataatttctttggcagctgacatatattaaaatttaaaaatataaaattaa

SEQ ID NO: 236084 - DNA, 201 bp, Homo sapiens
attcagggccccttattcttaactgcatcttctattttgggcattgtgctcttgccatctaacaggaaaacaactttcagtgctgccaccttttgaacagsagagatttctagagattagaaaattactaaatttaaatatacatagttttaaaatatgatattttctacccatgcattcaaatatattctaactttaaaa

SEQ ID NO: 236085 - DNA, 201 bp, Homo sapiens
gcttagtttggctggatatgaaattctgggttgaaaattcttttctttaagaatgttgaatattggcccccactctcttctggcttgtagggtttctgccragagatccactgttagtctgatgggcttccctttgagggtgacccgacctttctctctagctgcccttaacattttttccttcatttcaactttggtgaa

SEQ ID NO: 236086 - DNA, 201 bp, Homo sapiens
tgcacaacaaaagaaataatcgtcacagtaaacagcctcctgagtcggtgcaaacatttgcaagctatgcatccgacaaaggactaatatccagaatctayaagaaactcaaacgaatcagcaagaaaaaacaaataattccattaaaaagtgggcaaaggacatgaatagacagttctcaaaagaagatatacaaatggc

SEQ ID NO: 236087 - DNA, 201 bp, Homo sapiens
tcagacaagagaaagaagtaaaaggcattcaaataagaacagaggaagttaaactatccttgtttatagacaatatgatcctatatgtagcaaaaccaatmgtctctgcccaaaagctccttaagctgataaacaacttcagcaaagtttcaggatacaaaatcaatgtacaaaaatcaatagcattcccatataccaaca

SEQ ID NO: 236088 - DNA, 201 bp, Homo sapiens
gtttcataacagggatgcagggatggtttaacataccatcaatatgtcaataaatgtgatacatcacaaaaacaaaattaaaaagcatatgtttatctcartagatgcagaaaaattatttgacaaaatccagcatcactttatgattaaaaccctcagcaaaattggcaaagaggagacatacctcagggtaataaagcc

SEQ ID NO: 236089 - DNA, 201 bp, Homo sapiens
gtgggctgcagtggcggcccctgcagcagcggcgatcccagcctagcccggccgcccccgccacggaggcagcgcagtggcgggactcccagcctaccccrcctagtgagccgcgccgcgccaccccacccgccacccaccagtccgatggggccgcagcggcggctgtcccctgccacggccgccctgctctggggcttc

SEQ ID NO: 236090 - DNA, 201 bp, Homo sapiens
agaaatcttaaaagtaacccatttacaatagtcacacataaaattaaatacctaggaattatcaaagaagtgaaagaactctataatgaaaactataaaamtgatgaaataaattgaagaggacatcaaaaaatagaaatattggaaaaatattcaatgttcacagattggaataatcaatattgttaacatgttcatact

SEQ ID NO: 236091 - DNA, 201 bp, Homo sapiens
tactaataatcgaagagtagaaagcatgtgctaactgatctagactcttgtgacagctgtatatctacccagctgcgtgaccttaggtgtatcaaaatctyaatttcctagactacaaatgagtaagagggatggaggccccttacagttttaatattctagaattctaaaggtgtgtaactagagcaaattttattttct

SEQ ID NO: 236092 - DNA, 201 bp, Homo sapiens
tgttggtaggaaagtcacacacacaagaatgttttccaattccttgaaattcccaagtgatcaacaactaagaggatcgctgtgttcctgtggcacttccmtattgtttttatgctatagagctattatgttgcattgcagctacctaagaatacatctgagactcgtccccaccccatccccacagacagtgagccctgt

SEQ ID NO: 236093 - DNA, 201 bp, Homo sapiens
tttgaaattaaaaccacagtggttagcataccttttaaattagataaatattgacctcccattggtgaacatataaagtgctaccaagatctgccaatgamagacttttgaagtggaaattcatccttgtaataatcctgttatctgtaggctgacctcaagccttcatgacattcagggccccttattcttaactgcatc

SEQ ID NO: 236094 - DNA, 201 bp, Homo sapiens
ttttttcttttctaattgttagaaactcatgtatttaattttatctttcaaagaacatttttaaaaggcttactctgcttatatgtatattttgcacaaakctttccattcataaacaaaaggtgaataggaatcagaattgaaaactacataatttcttttctccttttgagtcaaatcatcacagtatagattagtcat

SEQ ID NO: 236095 - DNA, 201 bp, Homo sapiens
agtgacctgtggcccataattaaattttccagataactaaagctgatcatttgaagcactaacactttttatgttagccttttttttttttttttttttttgagacagagttttgctcttgtcacccaggctggagtgcaatggtgcaatctcagctcactgcagcctccacctcccaagatcaaacaattctcctgcctc

SEQ ID NO: 236096 - DNA, 201 bp, Homo sapiens
cccccagcccaccttgcagtttgatctcagactgctgtgctagcaatcagcgagactccgtgggcgtaggacccttccagccaggtgcgggatataatctsgtggtgcgccgttttttaagccggtcggaaaagtgcagtattcaggtgggagtgacacgattttccaggtgccgtccgtcacccctttctttgactcgga

SEQ ID NO: 236097 - DNA, 201 bp, Homo sapiens
ttgtttacctaatcaagcctgggcaatggcgggcgcccctcccccagcccaccttgcagtttgatctcagactgctgtgctagcaatcagcgagactccgygggcgtaggacccttccagccaggtgcgggatataatctcgtggtgcgccgttttttaagccggtcggaaaagtgcagtattcaggtgggagtgacacga

SEQ ID NO: 236098 - DNA, 201 bp, Homo sapiens
tagaactgagctttttctgtcaaatgtttaaataaccatgctagtagatttcctttacctgcagctttataatggcaggcaacaataaaagacactgcatycatgtaattagtgagtaactactctatgcaaagcactattctaatgctgagatgggagtgagggataaggaaaggggagagagtgacaagggaattggaa

SEQ ID NO: 236099 - DNA, 201 bp, Homo sapiens
tcttgccatctaacaggaaaacaactttcagtgctgccaccttttgaacagcagagatttctagagattagaaaattactaaatttaaatatacatagttytaaaatatgatattttctacccatgcattcaaatatattctaactttaaaatcctgtaaatacttatatttgtaatgattttacttatatgatccaatta

SEQ ID NO: 236100 - DNA, 201 bp, Homo sapiens
catgggatctccttgacaatccacttgaggaactagtatttactcaccactttgtttcatctccatgagagcagtgtatactagctgcttcccatctgtcrtcttaaactcctctgtacatgactttctaaaagaggaaagcaacagcaaagttaagtgaaatgaataattatgaaaccttaattgttcattttattctct

SEQ ID NO: 236101 - DNA, 201 bp, Homo sapiens
tgagtttgcatttatatcccttaagaaataatattaataacaatacttttttcttctttttaaaaattcaatagcttttgaggtacaatggttttttttttacatggatggatgaattacatagtgctgaattctgagattttagtgcacccatcacccaagtagcatacattttacctaatgtgtagttttgtatctcta

SEQ ID NO: 236102 - DNA, 201 bp, Homo sapiens
ccaggtaagacctagttttgctcctcctttgccttctgccatgattgtgcggcctccccagccgtgtgaaactgtgagtccattaaacctcttttttcttkataaattacccagtctggggtattttcttcatagcagtatgaaattgaactaatacagtgttctcccaacagttttgagcataattcccttagcttttca

SEQ ID NO: 236103 - DNA, 201 bp, Homo sapiens
tctttgccagtgtgacagtactgctgctgcttgtaaatggtgggtgggcggggggtctccacctttgggcccacatgagtgagttttggttctggtggtgrtgactggttaggtcagcctgactttgggccctggggaagtggtccagtgcctgtagagttggaacagggtaggggtagggtacgtaggtaatttccaggc

SEQ ID NO: 236104 - DNA, 201 bp, Homo sapiens
ccgtcacccctttctttgactcggaaagggaactccctgaccccttgcgcttcccaagtgaggcaatgcctcgccctgcttcggctcgcacacggtgagcrcacccactgacctgcgcccactgtctggcactccctagtgagatgaacctggtacctcagatggaaatgcagaaatcaccatcttctgcgtcgctcacgc

SEQ ID NO: 236105 - DNA, 201 bp, Homo sapiens
ctacataggcaggaacttgatctgttttcctattacacaattgttccagggctcatgactcctagtttagattcatattctagtctatctctggactacartgaggttgagagccacagtaaatgcctgttttgtgactctctgtgggagtggtttcagggcataatttaatctctgaacctgatacagacagttttatgg

SEQ ID NO: 236106 - DNA, 201 bp, Homo sapiens
cttggaggctttgctcatttccttttattcttttttctctaaacttcccttcttgcttcatttcattcatttcatcttccatggctgataccctttcttcyagttgatcgcgtcggctcctgaggcttctgcattcttcacgttgttctcaagccttggtgttcagctccatcagctcctttaagcacttctctgtattcg

SEQ ID NO: 236107 - DNA, 201 bp, Homo sapiens
aagtttctttgtgttgatttttaatcttttcttgaatctcattgagcttccttgcaatccatgctttaaattcttacttgtcatttctgagtttctttttyggtcaggaaccattgcggaggaactagagtgatcttttggtggtgttgcaacattcaggtatttttggtgtcagaattttttttttttcgagacagtctt

SEQ ID NO: 236108 - DNA, 201 bp, Homo sapiens
ttctttgagcaatgttttataattttcattttggagatctttcacctccctggttagctgtattcctaggtatttgtgtgtttgtgtgtgtgtgtgtgtgkgtgtgtctatgtgtgtgtggcaattgtggatgggattgtgttcctgatttggctttcagcttgactgttggtgtataagaatgctagtgatttttgtaca

SEQ ID NO: 236109 - DNA, 201 bp, Homo sapiens
aagctttccctgcaagaattccactaaagctgcaactttacagcatgaatgggagttaaccaggtgaagaggtactatacaaaaataaaaaataaaaaaawaataataataaaaaaacctgtccttttcacagtgaaacacaggtttggtcccagtagagagaatgagaagggactgtggtgcatgaagaggttggagagg

SEQ ID NO: 236110 - DNA, 201 bp, Homo sapiens
ttattctgttccatatcctgtcagttttcattcttccccaaaacatagataattctttttattagtttcttgtgtatcttttcagagtttcgctatgcttrtacaggcaaactggatacatatgtttgtgtgtatatgtatatacacatacatattattttttacttttaccctttttatacaaaaggtagcacgtcatat

SEQ ID NO: 236111 - DNA, 201 bp, Homo sapiens
agtttgataggaatagcattaaatttgtagattgctttgggcagtatggccatttttaacaatgttgattcttccattccgtgagtgtggaatgtttttcygtttgttcatgtcatctatgatttctttgagcagtgttttgtagttttccttgtagagatctttcacctccctggttagctgcattcctgggtattttat

SEQ ID NO: 236112 - DNA, 201 bp, Homo sapiens
gtgttgtctatctaaatcagtattaagaaagtatattaaaattatctttttcatgttatatactcctcaaaacacacacgcgtgcacgcgcgcgcgcgcgcacacacacacacacacactctctctctctctctctctctctctatgtgaaatgcactactttaccaccaggtggtgcatgtagaccaaataggaaaagga

SEQ ID NO: 236113 - DNA, 201 bp, Homo sapiens
tgaataggaatcagaattgaaaactacataatttcttttctccttttgagtcaaatcatcacagtatagattagtcattgtgtatgaagtgcattgccaakacatagtcacatttgtgtacaaatgtaaaggctatatctcaacagaaataaaaaacaaaaacatgccaaagaccattagctaataatactaataatcgaa

SEQ ID NO: 236114 - DNA, 201 bp, Homo sapiens
cattttaagtttacagaagatttaaaatccaataatttttatgtaaagtctttttccttttctcttttgctctttttcctcctgttcacaaagatattttyttcctctttatttttagatggacactagctaatgactctatcaagtactcatgaccactccagtagaagagattactttcttctggagggaagttaagca

SEQ ID NO: 236115 - DNA, 201 bp, Homo sapiens
ttaattctgtaaaagcatggactgtatatttgcttactattgcattcttagtctagcaaaaggaggtataaataacttggttgaattaattaaaaaaaaaagtcattaacctttaaaattttgcatatcttcattattcatgcaaacaaaggaggaaactatgtaacacctacaagtgaccttcctatgagagctgcctca

SEQ ID NO: 236116 - DNA, 201 bp, Homo sapiens
gcattaaaaagtaaaaaatatttcattcatttttttcacacttatgccttttccccatgtacccccctctcacttcatacacaacaattttaatgtatacyattttgtatgtgttcgaaatgaacattactgttttgtatgaatgtatttttattgttgtaaaatacacacaacatactgtttatcataaaaaagtgaaaa

SEQ ID NO: 236117 - DNA, 201 bp, Homo sapiens
tctcattttttaggtatagtagtaattgttttgtaaatttgggagctgcagttttaggtgcatatatatttaggattgtgatattttcctgttggactagkcctttcatcattatataatgtccctctttgtcttttttaactcttgttgctttaaagtttattttgtctgatacaagaatagctactcctgcacttttgg

SEQ ID NO: 236118 - DNA, 201 bp, Homo sapiens
acctcaagccttcatgacattcagggccccttattcttaactgcatcttctattttgggcattgtgctcttgccatctaacaggaaaacaactttcagtgytgccaccttttgaacagcagagatttctagagattagaaaattactaaatttaaatatacatagttttaaaatatgatattttctacccatgcattcaaa

SEQ ID NO: 236119 - DNA, 201 bp, Homo sapiens
ttgcaaaaacctatagaataaaaaagtgaccataagcaaaagaaattcaagagaactttttgtatcaataaaagcaaatgaaaacaaaattttatttcccyacagtaagtggaatcaataaaaaatctttcataatggtattacaaagattgaggaaaacttaaaatattagtagttgctatactgacatttctgccataa

SEQ ID NO: 236120 - DNA, 201 bp, Homo sapiens
tacatttaaaacagccttcacagaggatgtcaaaatctttaccactttatgtgtagatttataaaatttatgcatgagtagagacaaaacagaatatgacygtaccattcattccaattgctattttgtgagaaccatactgcactcagaactattgatttaaattaagtttttacaattactgctaacaaagtgtaactg

SEQ ID NO: 236121 - DNA, 201 bp, Homo sapiens
tacatgtgcacaatgtgcaggttagttacatatgtatacatgtgccatgttggtgtgttgcacacattaactcgtcatttagcattaggtatatctcctamtgctatccctcccccctccacccaccccacaacagtccccggtgtgtgatgttccccttcctgtgtccatgtgttctcattgttcaattcccacctataa

SEQ ID NO: 236122 - DNA, 201 bp, Homo sapiens
ccaccgaagatctttaactatcacatttgcaatatgcttttgccttataaggtaacatttacaggttccagggattagaacatgtatatattttgcaccartattcagtctatcacaatgacttgtaagagactttctaattctaaaattttacaaagtgatgggcttaatgtgtgattataaatacttatctgaatgcag

SEQ ID NO: 236123 - DNA, 201 bp, Homo sapiens
ggataatctccttattttaagtggggattaagttaagatctttaatcttaacccccaccgaagatctttaactatcacatttgcaatatgcttttgccttrtaaggtaacatttacaggttccagggattagaacatgtatatattttgcaccagtattcagtctatcacaatgacttgtaagagactttctaattctaaa

SEQ ID NO: 236124 - DNA, 201 bp, Homo sapiens
gacaaaacagaatatgactgtaccattcattccaattgctattttgtgagaaccatactgcactcagaactattgatttaaattaagtttttacaattacygctaacaaagtgtaactgctttctccctagacttctttattatatgcttttacatttgtggttaatcaattattttctcctgaactgcccaggtttttta

SEQ ID NO: 236125 - DNA, 201 bp, Homo sapiens
ttaatataaaaatattgtgtttttctatgttgagtcactccctgagaggaatttaatagtttagggatttgaaagctaacaggatactggtagtcccttayatttgttgatttctgatttttttttttttttttttgagatggagtctcactctgtcacccaggctggagttcagtggcgcaatcacggctcactgcaacc

SEQ ID NO: 236126 - DNA, 201 bp, Homo sapiens
aagttgcaaagcctcatttgagaacagacaagatgtacttaatgattagactcctggacttgcactaagtcttcctttaaaactccctgtccatgcatttrtgtgtgagagccacctgccttcaggatctcatcttttattgaccataatttcaattatttttaactaattcaaataagtgagggttttattactattaac

SEQ ID NO: 236127 - DNA, 201 bp, Homo sapiens
tactgaaattgactctttggtgttggtatccacacataggctgaattttttcaatggtgggtgcttgcattgtgtatctgtgcatacacagtacataataygtaatatatgctcagtaaatattgcaataaatagtattctaattgctggaaagagccactgcaactttcagaatacaaaccttctaagatattcttaaga

SEQ ID NO: 236128 - DNA, 201 bp, Homo sapiens
attcaagatggcttaaattgattcttgaatgatagattcatgcagagtatttaaaaagctggagatatttgcaatttatttctagcctttgagacagaccmcggaacatatgcacaaagggtccttggtctgcagtcagcagcagaatattaggctaagaaggttcctgattcaacttagatctgcttcattaggcttcat

SEQ ID NO: 236129 - DNA, 201 bp, Homo sapiens
caggaaatcaacctaagtgtccatcatggaaatcaacctaattgtctgtcaacgaatgaatggataatgtggtgtaagtacacaatagaatatgcttgggycttgaaaaaaggaaatcctaacatttgtgacaacctgaatgaacctggagaacattttgctaagtggaataagccaggctcataaagacaaacatcacat

SEQ ID NO: 236130 - DNA, 201 bp, Homo sapiens
gcgcatcacagtctagtttgtgattgagcatgacattttctttgcatatgtctgtggagtgttccctccatacatttctaaaaacctgttttccaactcaraaattttaacattagaattcacaggatgacagtatctctaaagttaagtaatctttatggatatctgatctcgtttacatgtatctttatttataattga

SEQ ID NO: 236131 - DNA, 201 bp, Homo sapiens
caaaaattattttgaactaaatgaaaatgaaaacagattaaaatgtgtgagatataactaaagcagtatttagagagaaaatcatagaattaaaatgcctrcattagaaaaaagagaaagttctccagaaagagaaagttcagcttctaccttaagaaagtggaaaaagaaaaaaaaaagccaaacctatggaaagcagaa

SEQ ID NO: 236132 - DNA, 201 bp, Homo sapiens
gattacaggcgtgagccaccgtgcacggccaaaggtttttcttagatgggttatataatttttagttaatttagtaaaaagaagtaaagtaattatgttastgagtgatagttaaatgttggtcttctgtagttatatgagtctactatagtgagaagagtgaaatatttactctcctgttatattttcctctttctaggg

SEQ ID NO: 236133 - DNA, 201 bp, Homo sapiens
ttaagggacacccttcaactgtcagccccttcattggtttacttacctccagagaacttcctcttctgagaaaacatctttccaggaaccatccagtgacrgctcaagttggagcagaaaggcttggctatttcagtccaatgcaggacagctctgatcaatactttcagctctagaactcttctttgagccagttgtggc

SEQ ID NO: 236134 - DNA, 201 bp, Homo sapiens
ggatctgtgctctagggcctaagagtgctgttaagggacacccttcaactgtcagccccttcattggtttacttacctccagagaacttcctcttctgagraaacatctttccaggaaccatccagtgacggctcaagttggagcagaaaggcttggctatttcagtccaatgcaggacagctctgatcaatactttcagc

SEQ ID NO: 236135 - DNA, 201 bp, Homo sapiens
tgtgcttgcaacttatacacagcgaacttccaggaaaagaaataagaaatataggcagggctagaccattaagaacttatgcagctagttgagtttggatwttttttttttttttttgagacggaatctcactgtgtcgcctaggctggagtgcagtggcacaatctcagctcactgaaacctctgccttccgggttccag

SEQ ID NO: 236136 - DNA, 201 bp, Homo sapiens
atggaaacttagattggttccataccttagctatcgtgaatagtgttccagtaaacctgagagtgcaggtatccctttgatttcctttcttttggagagakactgagtagtgggattgctggactaattgtatgacagttctatttttagttttttgagaaacctctgtactgttttccatgatagctgtactaatttaca

SEQ ID NO: 236137 - DNA, 201 bp, Homo sapiens
ttattcaaagccaggttttaaaaagtgtctcacctccgccaatgaaaaagatcagctttatcctaggataaaaatagtaactctaaagcaaacaaacaaawaacaaacaaaaaccttgtttgttgagccacatcaaatcagtttgaagtagtctaaaaaacgatatttctgtgcttataagagcgttagcaaatacttaca

SEQ ID NO: 236138 - DNA, 201 bp, Homo sapiens
aaaacagtttatattatacatgaattggtaaccatctcaggcacaagatgtggaacaaacacaacaaatatgttccaggtgggctgcagtagttcccttgrtgtccttacatcctggaatttctcccagcaagctgtttgagttcttggatgtatttcttttcattctttctagatgacacccttgtcactgcatttctac

SEQ ID NO: 236139 - DNA, 201 bp, Homo sapiens
tttttagtagaggaggggttttgccatgttagccaggctagtctcgaactcctgacctcaggtgatccacccacctcggcctcccaaagtgctgggattayaggcacgagtcactgtatccggcctcacatttgccatattcttaatgatggtttggattccctagcctctttagaatttttcttcttggcttcctttctg

SEQ ID NO: 236140 - DNA, 201 bp, Homo sapiens
gattaaactgctaacaatgtagtttcagaaatatctacttttaaatatctatcttctgtttttatatttgtttagacaagttttttttttttttttttttwctttcaatgttttgggaaaggattgcgctcagatgaaaacattcttagtcataaaagtttacttcagtcacatggtgtatctaagtatgttgaaatactt

SEQ ID NO: 236141 - DNA, 201 bp, Homo sapiens
acttcttgagatgctaaacataagttttgaaggggatcttctgaagctatggaagtagtttgtgactgttttgtttccacaaattttgaactattttcttyacttcgtttgagaaatataggtggattgagagacattcttcattcaaaccaaagtttaacggctatttctaaaacacatatcataggtgcactgtaaaaa

SEQ ID NO: 236142 - DNA, 201 bp, Homo sapiens
atcatcaatcactgttgctatcttatatacaagatttttggaaacatccttttagcaataccctttccacttgagcagcattagaaattttgttcttattwataggtataagcatgttctaatcctgtacttttgttaaattatctattttattgactttcataatagtttttttgagaattttttttctgattagagttt

SEQ ID NO: 236143 - DNA, 201 bp, Homo sapiens
ccagacagttttgttattcctttaaaattaaaagcatatgaaacagatacagcttattaaggttttttttttataaataacataaacttaaataacaaaayaataaagttcaaaaacaacttaaaatagagtttaatgctgtaaccataggaaaaaagcatgattatttgtgggaagaacattattaaaagccatattccc

SEQ ID NO: 236144 - DNA, 201 bp, Homo sapiens
gagggaaacttgccgttgagccagacagttttgttattcctttaaaattaaaagcatatgaaacagatacagcttattaaggttttttttttataaataamataaacttaaataacaaaacaataaagttcaaaaacaacttaaaatagagtttaatgctgtaaccataggaaaaaagcatgattatttgtgggaagaaca

SEQ ID NO: 236145 - DNA, 201 bp, Homo sapiens
cagaaaagggagggaaacttgccgttgagccagacagttttgttattcctttaaaattaaaagcatatgaaacagatacagcttattaaggtttttttttwataaataacataaacttaaataacaaaacaataaagttcaaaaacaacttaaaatagagtttaatgctgtaaccataggaaaaaagcatgattatttgtg

SEQ ID NO: 236146 - DNA, 201 bp, Homo sapiens
agcctcctgagtagctgtaattacaggttgtgccaccacaccagctaatttttgtatttttagtagaggaggggttttgccatgttagccaggctagtctygaactcctgacctcaggtgatccacccacctcggcctcccaaagtgctgggattacaggcacgagtcactgtatccggcctcacatttgccatattctta

SEQ ID NO: 236147 - DNA, 201 bp, Homo sapiens
cccatgcattcaaatatattctaactttaaaatcctgtaaatacttatatttgtaatgattttacttatatgatccaattaattggcaagaatatgtggtraaagattttttacatatttgtattgttctgtgtgagacatctattgtaagcattgcttcaggctcttatttttgtctgccttccaggatttgctggccca

SEQ ID NO: 236148 - DNA, 201 bp, Homo sapiens
agttagcttgatacgtcttttctggctgccctttagatcttgatacacgtgtcaggaagaccacagctccccactcagcaaactgtcaaacctgtgttcarctgcttcctagccaagaaattacctaatgtcagctagcttttctggatgctcattattgttacataaagcatgagatgctgttgtcactctcaaaaagac

SEQ ID NO: 236149 - DNA, 201 bp, Homo sapiens
aatattttgaaattaaaaccacagtggttagcataccttttaaattagataaatattgacctcccattggtgaacatataaagtgctaccaagatctgccwatgaaagacttttgaagtggaaattcatccttgtaataatcctgttatctgtaggctgacctcaagccttcatgacattcagggccccttattcttaact

SEQ ID NO: 236150 - DNA, 201 bp, Homo sapiens
gtgtgtatcttattccattacatttaatactattgaagttggttattcatcataaccattaaatgcaaaacacaaccctgatattttaacataagaagaawaactgattcttgggaaaaatgtaaggctttaaattgaaaaacatggaattaccatctcttccagcccacttttttcccctcacctttacatttttcttaa

SEQ ID NO: 236151 - DNA, 201 bp, Homo sapiens
gctttttttttttttcacttctaaagtcatgagataaaactagaagaaaaaatgaaaacaacacctgtgctgtcatgtctttcactttcttatccagaacktcactgtcacgagggattccaagtttcttccggtgctgtcatttattcctgcatgtgtcagcatttagttagcttgatacgtcttttctggctgcccttt

SEQ ID NO: 236152 - DNA, 201 bp, Homo sapiens
cctagctagcaaagtccttgaatcaggtgatagttcagaataccattcatgctctctcccaagagtatatctgaggaagggcagttctttctagttttctrcatcctggtcgtataggtcaaccacaggaaaattaaatgaatctattgtttttgttgacctagccttttcatataactctcatctataaatgtattacca

SEQ ID NO: 236153 - DNA, 201 bp, Homo sapiens
acacatgtaccctaaaacttaaagtataataaaaaaaaatagcctctccaaggaattggccggctacaaaataaacataccaaattaaaaaaaaaaaaaaagaaaattcagccatgattgcaccatagtttctatcctcatagagataatctgctgtatgttaccacggagaaaactttgggggataagaaaggcttgatg

SEQ ID NO: 236154 - DNA, 201 bp, Homo sapiens
ctaggactgtattatttcttgcttcctgtcaagtttttcaactcaagagaaagtaaattttcctgacaaaccattcaaaattaaaggataggtgggagtayatgtgtccctgaaggaacaagtgaccttcattgaaagcagcagcttggttgaataaatactgtacagaagtggaataaagagtagctgacaacaatgctg

SEQ ID NO: 236155 - DNA, 201 bp, Homo sapiens
acaaaaattgcaacatttactttaggttcagggagtgcacgtgcaggttcgttacgtgggtatattgtatgaaagatcctgtcatccaggtagtaagtatrgtatagtgagtttttcagtcctcacccccaacacctccctcttctatctagtagtccccagtgtctattgttctcatctttatatctatatgtattcaat

SEQ ID NO: 236156 - DNA, 201 bp, Homo sapiens
aaaattagatactcctttctcttatttgtcattagcaaatttgggaaatgtcttcatctgtaatgtcatgtaacttttccatctactatttatcattacawctgtgctttttttctacccatttgaagttacacgttttgattctagcccttttcttatgaggcataataagctttctattctcttcttgtcatatctttg

SEQ ID NO: 236157 - DNA, 201 bp, Homo sapiens
tgccctcaatatgctcacaagactacagttactgaagcctgacctcaaaacctagctagcaaagtccttgaatcaggtgatagttcagaataccattcatsctctctcccaagagtatatctgaggaagggcagttctttctagttttctacatcctggtcgtataggtcaaccacaggaaaattaaatgaatctattgtt

SEQ ID NO: 236158 - DNA, 201 bp, Homo sapiens
ccattgatattttgtgttttttttgttacacaagtaaatttactatgctgggcgacaagagtgaaactctgtcacacacacacacacacacacacacacamaaaacatgaaaggagcatagccctgcagacccatttcagattcccgacctctagacctgtgaaataataaactttgtgattttttaagccactttgttag

SEQ ID NO: 236159 - DNA, 201 bp, Homo sapiens
agaaatggtgagttttaattcagccactttaattctgtttataatttggcatggaataaatcacaaataactgatacatgagtatattaaaatgtatggtacccaaaaaattagatactcctttctcttatttgtcattagcaaatttgggaaatgtcttcatctgtaatgtcatgtaacttttccatctactatttatca

SEQ ID NO: 236160 - DNA, 201 bp, Homo sapiens
ctctgccctcaatatgctcacaagactacagttactgaagcctgacctcaaaacctagctagcaaagtccttgaatcaggtgatagttcagaataccattyatgctctctcccaagagtatatctgaggaagggcagttctttctagttttctacatcctggtcgtataggtcaaccacaggaaaattaaatgaatctatt

SEQ ID NO: 236161 - DNA, 201 bp, Homo sapiens
gtaaagtactgctttatggagcttttaattgtatatatgcgtgtatgtgtgcactagggcttgtttgtaaaatgtatttcttactgtatttcaaaccttamaaagtttgaaagccagtgatttagggagaaaggtgaattttctgggtagggaaagtagaatagcaaagtctataagccaagaagaattcacaaccatttt

SEQ ID NO: 236162 - DNA, 201 bp, Homo sapiens
aagaaatggtgagttttaattcagccactttaattctgtttataatttggcatggaataaatcacaaataactgatacatgagtatattaaaatgtatggtacccaaaaaattagatactcctttctcttatttgtcattagcaaatttgggaaatgtcttcatctgtaatgtcatgtaacttttccatctactatttatc

SEQ ID NO: 236163 - DNA, 201 bp, Homo sapiens
aacacatatgaaaaactaagtcctcctctgccctcaatatgctcacaagactacagttactgaagcctgacctcaaaacctagctagcaaagtccttgaawcaggtgatagttcagaataccattcatgctctctcccaagagtatatctgaggaagggcagttctttctagttttctacatcctggtcgtataggtcaac

SEQ ID NO: 236164 - DNA, 201 bp, Homo sapiens
taagaaatggtgagttttaattcagccactttaattctgtttataatttggcatggaataaatcacaaataactgatacatgagtatattaaaatgtatggtacccaaaaaattagatactcctttctcttatttgtcattagcaaatttgggaaatgtcttcatctgtaatgtcatgtaacttttccatctactatttat

SEQ ID NO: 236165 - DNA, 201 bp, Homo sapiens
tttcttttgtctataaacattcagtgaattcacactgaaaactgattatgaacagatagtctgctaggcactaaggaaacacatatgaaaaactaagtccycctctgccctcaatatgctcacaagactacagttactgaagcctgacctcaaaacctagctagcaaagtccttgaatcaggtgatagttcagaataccat

SEQ ID NO: 236166 - DNA, 201 bp, Homo sapiens
ttaagaaatggtgagttttaattcagccactttaattctgtttataatttggcatggaataaatcacaaataactgatacatgagtatattaaaatgtatggtacccaaaaaattagatactcctttctcttatttgtcattagcaaatttgggaaatgtcttcatctgtaatgtcatgtaacttttccatctactattta

SEQ ID NO: 236167 - DNA, 201 bp, Homo sapiens
cttaagaaatggtgagttttaattcagccactttaattctgtttataatttggcatggaataaatcacaaataactgatacatgagtatattaaaatgtatggtacccaaaaaattagatactcctttctcttatttgtcattagcaaatttgggaaatgtcttcatctgtaatgtcatgtaacttttccatctactattt

SEQ ID NO: 236168 - DNA, 201 bp, Homo sapiens
cccccaagtacctttggaaacatgagtggtccacatacaattgcttaagaaatggtgagttttaattcagccactttaattctgtttataatttggcatggaataaatcacaaataactgatacatgagtatattaaaatgtatggtacccaaaaaattagatactcctttctcttatttgtcattagcaaatttgggaaa

SEQ ID NO: 236169 - DNA, 201 bp, Homo sapiens
ggtaatatttctattgataaggagtgatttgcctaaatcacaagagggaggatgacattattgtctatgtgtaaggattcacatgtaaacactgagtagaytggaggtatgtatggagaggactggagggagtcaatgaaatttcacatcacaggagtgcttatgtcttctgacatgattttaaatgtatatttatttata

SEQ ID NO: 236170 - DNA, 201 bp, Homo sapiens
ttagagtttaagtagattataatttttcactagaaagcatttaaaatgctgctcattttccatagttagtgtggcttgattatctgacaaatcctgccagmagcctgtaggtctgatataccttatataacaacatctgtattattattattatagcagccattttataagcagataggaatatttaaataatcattatca

SEQ ID NO: 236171 - DNA, 201 bp, Homo sapiens
aaaataacagattctggagaggttgcagagaaaaggaatgcttatacactgctggtgggaatgtaaattagttcaaccgttgtggaaagcagtttggcaayttctcaaagaactgaaagcagaattaccattcaactcagcaatactattactgagtatatacccaaaggaatataaatctttctaccagaaagatacatt

SEQ ID NO: 236172 - DNA, 201 bp, Homo sapiens
agtataactccatagacaaagagcatttggtcctaacatagcttgtattttatatgtatatacactatttctatttaaatttctgtatagtcatgttttayccttttaaaatgaagattagttttagtgtgtattttcttttgtctataaacattcagtgaattcacactgaaaactgattatgaacagatagtctgctag

SEQ ID NO: 236173 - DNA, 201 bp, Homo sapiens
agcaaattttattttctaaaatttgcataataaatttaaaaataggagaaaaacaaataattaaagtacatatttctagaagtcttttttaggtgacttayactaccaggaatggatttaccactaaatgttggttttgcctaattcagcattgctatgtaatttgatggaagtataactccatagacaaagagcatttgg

SEQ ID NO: 236174 - DNA, 201 bp, Homo sapiens
agcatgtgctaactgatctagactcttgtgacagctgtatatctacccagctgcgtgaccttaggtgtatcaaaatctcaatttcctagactacaaatgaktaagagggatggaggccccttacagttttaatattctagaattctaaaggtgtgtaactagagcaaattttattttctaaaatttgcataataaatttaa

SEQ ID NO: 236175 - DNA, 201 bp, Homo sapiens
ggtttgttaaggttataaatttagcagcatatgacaatgaatgaacttatttatataatagtgaacatcatcatgacttcattaaatgacaaaaggatgarttaactaaactgtgagtaaatctgtctcatctttctaaattcctggcattcatatttgatatgtttgtggaggcactcaaaccattcttttctaaattga

SEQ ID NO: 236176 - DNA, 201 bp, Homo sapiens
aagaacatttttaaaaggcttactctgcttatatgtatattttgcacaaagctttccattcataaacaaaaggtgaataggaatcagaattgaaaactacrtaatttcttttctccttttgagtcaaatcatcacagtatagattagtcattgtgtatgaagtgcattgccaagacatagtcacatttgtgtacaaatgta

SEQ ID NO: 236177 - DNA, 201 bp, Homo sapiens
tctttatactttctcttgttaaccaatggtttgttaaggttataaatttagcagcatatgacaatgaatgaacttatttatataatagtgaacatcatcatgacttcattaaatgacaaaaggatgagttaactaaactgtgagtaaatctgtctcatctttctaaattcctggcattcatatttgatatgtttgtggagg

SEQ ID NO: 236178 - DNA, 201 bp, Homo sapiens
gctttgaaagtatcttttgtttacttttgttatcatttcatgttttaattttttcttttctaattgttagaaactcatgtatttaattttatctttcaaakaacatttttaaaaggcttactctgcttatatgtatattttgcacaaagctttccattcataaacaaaaggtgaataggaatcagaattgaaaactacata

SEQ ID NO: 236179 - DNA, 201 bp, Homo sapiens
ttctttatactttctcttgttaaccaatggtttgttaaggttataaatttagcagcatatgacaatgaatgaacttatttatataatagtgaacatcatcatgacttcattaaatgacaaaaggatgagttaactaaactgtgagtaaatctgtctcatctttctaaattcctggcattcatatttgatatgtttgtggag

SEQ ID NO: 236180 - DNA, 201 bp, Homo sapiens
tattttttatattataatttatattatggcttatgtcaaaatgttttgttcactgctttgaaagtatcttttgtttacttttgttatcatttcatgttttmattttttcttttctaattgttagaaactcatgtatttaattttatctttcaaagaacatttttaaaaggcttactctgcttatatgtatattttgcacaa

SEQ ID NO: 236181 - DNA, 201 bp, Homo sapiens
gttctttatactttctcttgttaaccaatggtttgttaaggttataaatttagcagcatatgacaatgaatgaacttatttatataatagtgaacatcatcatgacttcattaaatgacaaaaggatgagttaactaaactgtgagtaaatctgtctcatctttctaaattcctggcattcatatttgatatgtttgtgga

SEQ ID NO: 236182 - DNA, 201 bp, Homo sapiens
ttatactatggtttttattttttatattataatttatattatggcttatgtcaaaatgttttgttcactgctttgaaagtatcttttgtttacttttgttwtcatttcatgttttaattttttcttttctaattgttagaaactcatgtatttaattttatctttcaaagaacatttttaaaaggcttactctgcttatat

SEQ ID NO: 236183 - DNA, 201 bp, Homo sapiens
tttattcttctatttgtaaatagtgctccataaataaaatattgctggggtagagagtcattatacccctccaaaacgtgagaccaactccaatatgattrtcacaatattttctgtaacatacaagttatttaacaagtatttactgagtgtttattgccagacccattcttggcactaggactgtagtgatctgaagaa

SEQ ID NO: 236184 - DNA, 201 bp, Homo sapiens
aatttatactatggtttttattttttatattataatttatattatggcttatgtcaaaatgttttgttcactgctttgaaagtatcttttgtttacttttkttatcatttcatgttttaattttttcttttctaattgttagaaactcatgtatttaattttatctttcaaagaacatttttaaaaggcttactctgctta

SEQ ID NO: 236185 - DNA, 201 bp, Homo sapiens
ctagttcctaacaggccatggaccagtaccggtccccagcccaggggttgggggctcctgccgaaaactgatattttattccttgaaatagctatctagtwttttcaacattatttattaaacattctattcctttttttactgatgcctctcttttaccttttattgactgttttgtcccattgatttacctgtctgtca

SEQ ID NO: 236186 - DNA, 201 bp, Homo sapiens
cagcatcccttctcttctgtcattaaattgaatttgtagccaactcaaaggctgacaatttatactatggtttttattttttatattataatttatattayggcttatgtcaaaatgttttgttcactgctttgaaagtatcttttgtttacttttgttatcatttcatgttttaattttttcttttctaattgttagaaa

SEQ ID NO: 236187 - DNA, 201 bp, Homo sapiens
ttctaatgccacagctaatctgacaggaggtggaatgcttgctcacccgcagctcatctcctgctctgccgcctagttcctaacaggccatggaccagtamcggtccccagcccaggggttgggggctcctgccgaaaactgatattttattccttgaaatagctatctagtattttcaacattatttattaaacattcta

SEQ ID NO: 236188 - DNA, 201 bp, Homo sapiens
atagaaaccctaagaatttacctccagcatcccttctcttctgtcattaaattgaatttgtagccaactcaaaggctgacaatttatactatggtttttartttttatattataatttatattatggcttatgtcaaaatgttttgttcactgctttgaaagtatcttttgtttacttttgttatcatttcatgttttaat

SEQ ID NO: 236189 - DNA, 201 bp, Homo sapiens
ccaagagttctttcagtaacactttattttatgcactgtttggctcacttcacactccttgttctattcctaattctcatgtttcactaatcatacactaycggagtgcagggtgaaaaaattaatcaaactgatcaatttttgtgtaaccaattctatagatcttttgtgataatttattatattgtatctatgcttaaa

SEQ ID NO: 236190 - DNA, 201 bp, Homo sapiens
caccaactttcttgaacacgtagccagaatctgctcatttttcttcaatttaacttttgcatcctaacttctaatctctttattggcgttctctcttcaarctcatgaataaactcctaattgccaaatccaagagttctttcagtaacactttattttatgcactgtttggctcacttcacactccttgttctattccta

SEQ ID NO: 236191 - DNA, 201 bp, Homo sapiens
tcaaatggtagttctatatttaattcctcaagggaccttcattacagttttccatagaggttgtactaatttacattcccaccaatagtgaataagtgttycctttttcccacatccatgccaacctctattgttttttgactttttattaataatggccattctttcagaattcattgtgatatctcattgtggttttaa

SEQ ID NO: 236192 - DNA, 201 bp, Homo sapiens
ataaatatatacaaaaattcagttagtattttctttttccacagaaaaaataaaataagtgatacctggcagtatatgccaaatgcaaaaaaaaaaaaaccaaaaacaaaaaaacaaaacagcaaaataaataggaattcagaagaaagaagtggtcaagtggtcaacggaggatttgaggaatagatagagcttgaatta

SEQ ID NO: 236193 - DNA, 201 bp, Homo sapiens
gaaccagaagagcaaactctatgagatagaaaccctaagaatttacctccagcatcccttctcttctgtcattaaattgaatttgtagccaactcaaaggytgacaatttatactatggtttttattttttatattataatttatattatggcttatgtcaaaatgttttgttcactgctttgaaagtatcttttgtttac

SEQ ID NO: 236194 - DNA, 201 bp, Homo sapiens
ctttatgttctttggcagtctagagaaccagaagagcaaactctatgagatagaaaccctaagaatttacctccagcatcccttctcttctgtcattaaaytgaatttgtagccaactcaaaggctgacaatttatactatggtttttattttttatattataatttatattatggcttatgtcaaaatgttttgttcact

SEQ ID NO: 236195 - DNA, 201 bp, Homo sapiens
ctcgcacatctttatgttctttggcagtctagagaaccagaagagcaaactctatgagatagaaaccctaagaatttacctccagcatcccttctcttctktcattaaattgaatttgtagccaactcaaaggctgacaatttatactatggtttttattttttatattataatttatattatggcttatgtcaaaatgtt

SEQ ID NO: 236196 - DNA, 201 bp, Homo sapiens
aggagtaaggtcataataaaaacacactttggaaattgtaggatacaaatactggatatacagaccactgtttcacttgttaagtgtacagtatctctcargtgtttgggaatggaaaacaagagccagtaatattttagaaacttgatctgattactttaattatgatatcctatctggatattaataaatatatacaaa

SEQ ID NO: 236197 - DNA, 201 bp, Homo sapiens
tcgtaaggggcactgttttagagtttttcttgttataggattgcttttactacagctaggtcccctcgcacatctttatgttctttggcagtctagagaaycagaagagcaaactctatgagatagaaaccctaagaatttacctccagcatcccttctcttctgtcattaaattgaatttgtagccaactcaaaggctga

SEQ ID NO: 236198 - DNA, 201 bp, Homo sapiens
cagtaaagaggagtaaggtcataataaaaacacactttggaaattgtaggatacaaatactggatatacagaccactgtttcacttgttaagtgtacagtmtctctcaggtgtttgggaatggaaaacaagagccagtaatattttagaaacttgatctgattactttaattatgatatcctatctggatattaataaata

SEQ ID NO: 236199 - DNA, 201 bp, Homo sapiens
tctaacttcttattttacacctctactattagagaaatttcagtagaaaatcgtaaggggcactgttttagagtttttcttgttataggattgcttttacyacagctaggtcccctcgcacatctttatgttctttggcagtctagagaaccagaagagcaaactctatgagatagaaaccctaagaatttacctccagca

SEQ ID NO: 236200 - DNA, 201 bp, Homo sapiens
ctgactttaataatataatatcattgagtgtagagaaactatttgtaccgacattttacattatttatttatgtccaaaatatatagaacatatgtgattkattaattactattaaaaatgtctttggtaatggattaagatcttcttacccaatggataacttctttttgtgaaatatggacagtaaagaggagtaaggt

SEQ ID NO: 236201 - DNA, 201 bp, Homo sapiens
taagagaaaagaaatgttccgtctgtggtgggccccctttgcattattctctaacttcttattttacacctctactattagagaaatttcagtagaaaatmgtaaggggcactgttttagagtttttcttgttataggattgcttttactacagctaggtcccctcgcacatctttatgttctttggcagtctagagaacc

SEQ ID NO: 236202 - DNA, 201 bp, Homo sapiens
gattccagccatatgacattctggcaaaggcaaaactttagagacagtagtatcagtggtggcaagggccttgaggagagcagaaaaaggatgaaaagctsaatcacaggggatttttaaatcagtgaaactattctgcgtaatactgtaatagtggatacatgatatacatttgtcagaactcatagaactatacaaagc

SEQ ID NO: 236203 - DNA, 201 bp, Homo sapiens
ttgtcatattaacgcaaccacaaatatattatggagtaagatgcaaaaatcacatgagtcttaagagaaaagaaatgttccgtctgtggtgggcccccttkgcattattctctaacttcttattttacacctctactattagagaaatttcagtagaaaatcgtaaggggcactgttttagagtttttcttgttataggat

SEQ ID NO: 236204 - DNA, 201 bp, Homo sapiens
aaagacaaggggaaccttaagtacatattgctaagtgaaagaaaccagtctgaaaaagccacatactgtatgattccagccatatgacattctggcaaagrcaaaactttagagacagtagtatcagtggtggcaagggccttgaggagagcagaaaaaggatgaaaagctgaatcacaggggatttttaaatcagtgaaa

SEQ ID NO: 236205 - DNA, 201 bp, Homo sapiens
ggagtagggatgtaaaccaaactgcatgataagccctgcaagtcattctgatgtatcaattttgcttactggtgtttaattgcagacattgtcatattaaygcaaccacaaatatattatggagtaagatgcaaaaatcacatgagtcttaagagaaaagaaatgttccgtctgtggtgggccccctttgcattattctct

SEQ ID NO: 236206 - DNA, 201 bp, Homo sapiens
tacctcaaacctcagtatcacacaatatacccaggtaacagacctgcacatgtaccccctgaatctaaaataaaagttgaaattatttaaaaaggaattgmaaattaaaacaacaatgagatacctctgtacaactattagcgtgactaaactccaaaaaactaacagtgctgtatgctggcaaggatgcaaagcaaccaa

SEQ ID NO: 236207 - DNA, 201 bp, Homo sapiens
aaataatcttttgtgtctcattcacgctcaagtaaatggcagtggagtagggatgtaaaccaaactgcatgataagccctgcaagtcattctgatgtatcrattttgcttactggtgtttaattgcagacattgtcatattaacgcaaccacaaatatattatggagtaagatgcaaaaatcacatgagtcttaagagaaa

SEQ ID NO: 236208 - DNA, 201 bp, Homo sapiens
atatcatagatcattaaagaattgcaacatggatgcagccggaggccattatcctaagcaaattaacacatgaacagaaaactaaatactgcatgttttcmcttataagtgggagctaaacactgggtacttagggacataaagatggcaacaactgacactggggactactggcggggagtagatgagggaagggttgaa

SEQ ID NO: 236209 - DNA, 201 bp, Homo sapiens
atatttttgttatcactcctatgcgtggtgaatttgagttctggttttctttagccttgtgttatttatgtgtaaagttggattatgggaggcaaataatyttttgtgtctcattcacgctcaagtaaatggcagtggagtagggatgtaaaccaaactgcatgataagccctgcaagtcattctgatgtatcaattttgc

SEQ ID NO: 236210 - DNA, 201 bp, Homo sapiens
tctggacacctcactaaagatacacaaagggcaaataagcatatgaaaagatgctcaatatcatagatcattaaagaattgcaacatggatgcagccggargccattatcctaagcaaattaacacatgaacagaaaactaaatactgcatgttttcccttataagtgggagctaaacactgggtacttagggacataaag

SEQ ID NO: 236211 - DNA, 201 bp, Homo sapiens
ctgtcaagcctggattgttgagtgggaaatcttaactattatatatttttattatgtttaaggctatagattccattcattttacatcactaaaatacacygacatatacatatatgcaaaaaatatatcaatatatccaacatatacaaaaaacactgaaaacacaacaataagaaaaaaaaaacctagttaaaaagtgg

SEQ ID NO: 236212 - DNA, 201 bp, Homo sapiens
tacattttatgattttctgtcaagcctggattgttgagtgggaaatcttaactattatatatttttattatgtttaaggctatagattccattcattttayatcactaaaatacaccgacatatacatatatgcaaaaaatatatcaatatatccaacatatacaaaaaacactgaaaacacaacaataagaaaaaaaaaa

SEQ ID NO: 236213 - DNA, 201 bp, Homo sapiens
aaagaattgaaagtggttatttatatattacatggtttacaaatattcaaatgagtctgaattttcttcctgtatcctccttttgtcaaaaaaaaaaaaaatccttagtctcttgataactggagaaatctcacattcaaattcaattatacaatgtccaagaagatctgtgaaactttaatcatgtattattttcatagc

SEQ ID NO: 236214 - DNA, 201 bp, Homo sapiens
tttgctagacaagcaaaaaagggatataaggaatgtgtggaatttcttggaagtgcctcttggattagagaggtatttgagaaaaagtagtagaaaaagagtgataagaaagtaattctatgaacaaactgaattatctgaattatcatctagataattctttatttcaatgtgaatagaagagtcttaaagtgtttttta

SEQ ID NO: 236215 - DNA, 201 bp, Homo sapiens
ttattcttaactgcatcttctattttgggcattgtgctcttgccatctaacaggaaaacaactttcagtgctgccaccttttgaacagcagagatttctaragattagaaaattactaaatttaaatatacatagttttaaaatatgatattttctacccatgcattcaaatatattctaactttaaaatcctgtaaatac

SEQ ID NO: 236216 - DNA, 201 bp, Homo sapiens
aatatttttgttatcactcctatgcgtggtgaatttgagttctggttttctttagccttgtgttatttatgtgtaaagttggattatgggaggcaaataaycttttgtgtctcattcacgctcaagtaaatggcagtggagtagggatgtaaaccaaactgcatgataagccctgcaagtcattctgatgtatcaattttg

SEQ ID NO: 236217 - DNA, 201 bp, Homo sapiens
ttaaatatttttgttatcactcctatgcgtggtgaatttgagttctggttttctttagccttgtgttatttatgtgtaaagttggattatgggaggcaaakaatcttttgtgtctcattcacgctcaagtaaatggcagtggagtagggatgtaaaccaaactgcatgataagccctgcaagtcattctgatgtatcaatt

SEQ ID NO: 236218 - DNA, 201 bp, Homo sapiens
tatttttaggggcatagttcaacatagttcaatttagagaaattaggtgacattttatttaattttttttccaagaagcaaaaggaagatgagaaaacatrtcacctgaaaattgatccattaacagattgctaaggttcatgagcagtacttaaaattacttactgtaattattcttcatctcttgggtcccttttactt

SEQ ID NO: 236219 - DNA, 201 bp, Homo sapiens
tgactgttaaatatttttgttatcactcctatgcgtggtgaatttgagttctggttttctttagccttgtgttatttatgtgtaaagttggattatgggargcaaataatcttttgtgtctcattcacgctcaagtaaatggcagtggagtagggatgtaaaccaaactgcatgataagccctgcaagtcattctgatgta

SEQ ID NO: 236220 - DNA, 201 bp, Homo sapiens
aattactttttagtgtctcactacacagaatccatgcccaccaatctcagcatcattaatatttctttttcctgaaacatttaaagctttatatttaaagktttgaaggggtatatattaatatggctgtgctagcatgataactaaatattattttcaagttggaaaaaaagtggaggcagtggtttgatggttagccaa

SEQ ID NO: 236221 - DNA, 201 bp, Homo sapiens
agggtgatcatagaaatgatacccacaagttagtcatagtggcctgcatccatttcgatgtatcagtgatgtattctgattggccagtaatcacccatacygactgttaaatatttttgttatcactcctatgcgtggtgaatttgagttctggttttctttagccttgtgttatttatgtgtaaagttggattatgggag

SEQ ID NO: 236222 - DNA, 201 bp, Homo sapiens
aggatgtcacccttacacactagagactatgccctaaatagcttccctattttttatcctctggttcaataattcatgaatttatctaaacctttttgtckgtttattatttaaacctgtatcacacttggaatgaaaaatgggaaactttgatctaaattgcaattactttttaaaaaaattctctaaaatctttcataa

SEQ ID NO: 236223 - DNA, 201 bp, Homo sapiens
ccagagagaccagttaatagatattttcccaactctgttttagggtgatcatagaaatgatacccacaagttagtcatagtggcctgcatccatttcgatrtatcagtgatgtattctgattggccagtaatcacccatactgactgttaaatatttttgttatcactcctatgcgtggtgaatttgagttctggttttct

SEQ ID NO: 236224 - DNA, 201 bp, Homo sapiens
catgtaacgttcaacacatcttcactgagagccaattctatgctaggcttaattcacagacaagccttgcccttttagagcactctatttggtaactacarcttcattgcagtaaaggaagcacaaagggaaataacatgcagaagaatactattaggttaaatttgtactaataaaatgaaaaatactgaagaaattcat

SEQ ID NO: 236225 - DNA, 201 bp, Homo sapiens
agttcaaaaatataaataaaagagagagagaatcagctcatgcaatagaacatgaaaaaccaggcaatatgtcaagcacattgaccatttagccttgtcarcaatattgtcaataatagcacaaatttattatttaggatgtcacccttacacactagagactatgccctaaatagcttccctattttttatcctctggtt

SEQ ID NO: 236226 - DNA, 201 bp, Homo sapiens
gtagctgacaacaatgctgaaatagttacacatgaagttttaatgagctatttcatattaagatacatattgagaattcaaaccagagagaccagttaatwgatattttcccaactctgttttagggtgatcatagaaatgatacccacaagttagtcatagtggcctgcatccatttcgatgtatcagtgatgtattctg

SEQ ID NO: 236227 - DNA, 201 bp, Homo sapiens
ctttgctagacaagcaaaaaagggatataaggaatgtgtggaatttcttggaagtgcctcttggattagagaggtatttgagaaaaagtagtagaaaaagagtgataagaaagtaattctatgaacaaactgaattatctgaattatcatctagataattctttatttcaatgtgaatagaagagtcttaaagtgtttttt

SEQ ID NO: 236228 - DNA, 201 bp, Homo sapiens
attttgaagaattttgaagaacacaggcctgaataggctagagaaaattttaataattgcttacaagcacatgaaggattatgatgttgatgcattcatgwaacgttcaacacatcttcactgagagccaattctatgctaggcttaattcacagacaagccttgcccttttagagcactctatttggtaactacaacttc

SEQ ID NO: 236229 - DNA, 201 bp, Homo sapiens
gagaagtttgttcacattaagtagcacccagtaaatttatttccaaagatttaaagcatattacatagatgcatcaaattgttgacataatgtccatgatrgcataatggtagagttcaaaaatataaataaaagagagagagaatcagctcatgcaatagaacatgaaaaaccaggcaatatgtcaagcacattgaccat

SEQ ID NO: 236230 - DNA, 201 bp, Homo sapiens
tatgtgtccctgaaggaacaagtgaccttcattgaaagcagcagcttggttgaataaatactgtacagaagtggaataaagagtagctgacaacaatgctsaaatagttacacatgaagttttaatgagctatttcatattaagatacatattgagaattcaaaccagagagaccagttaatagatattttcccaactctg

SEQ ID NO: 236231 - DNA, 201 bp, Homo sapiens
cctcccttaaactgaaattctagatggtgatgcccaatctgtgagttaaacattaatgagctaatgaaatcacagaataataagtaattctgatatttttytggataattcatgccataaaaccattgctatctcaattacctgagtatttcagcaaaatactttttggtccaaatcattacataattcagaaagtgcttc

SEQ ID NO: 236232 - DNA, 201 bp, Homo sapiens
atattagggttaaggataccaaaaattctttgtaaagattctacgtttaactgagatgagaatagacttatattcttaattgcttgacatatttaaaaaayaccattaacactgggaaatcaacatatctaaaagacaattgcttgggaagagcattaagcagtgttggcagaatcagtagcttatcaaccctattttcta

SEQ ID NO: 236233 - DNA, 201 bp, Homo sapiens
gagtatatgtgtccctgaaggaacaagtgaccttcattgaaagcagcagcttggttgaataaatactgtacagaagtggaataaagagtagctgacaacartgctgaaatagttacacatgaagttttaatgagctatttcatattaagatacatattgagaattcaaaccagagagaccagttaatagatattttcccaa

SEQ ID NO: 236234 - DNA, 201 bp, Homo sapiens
tggaactgaaggcttgagtcacagtgcttgggttcagactgtctccttgctaagtgtatgactgttgtggatgtgtgtgtgtgtgtgtgtgtgtgtgtgtggcacgtgtgcacatgcagcgggggtgggtgtctgaacctatctcagcctgtttcctcatttataaaataggataataggagtacctacttcagaagtttt

SEQ ID NO: 236235 - DNA, 201 bp, Homo sapiens
tagataaataaataaataaaaataaggtgatgaacatttttaatcttatccctccacatattagggttaaggataccaaaaattctttgtaaagattctaygtttaactgagatgagaatagacttatattcttaattgcttgacatatttaaaaaataccattaacactgggaaatcaacatatctaaaagacaattgct

SEQ ID NO: 236236 - DNA, 201 bp, Homo sapiens
agtttttcaactcaagagaaagtaaattttcctgacaaaccattcaaaattaaaggataggtgggagtatatgtgtccctgaaggaacaagtgaccttcaytgaaagcagcagcttggttgaataaatactgtacagaagtggaataaagagtagctgacaacaatgctgaaatagttacacatgaagttttaatgagcta

SEQ ID NO: 236237 - DNA, 201 bp, Homo sapiens
gtggaactgaaggcttgagtcacagtgcttgggttcagactgtctccttgctaagtgtatgactgttgtggatgtgtgtgtgtgtgtgtgtgtgtgtgtgtggcacgtgtgcacatgcagcgggggtgggtgtctgaacctatctcagcctgtttcctcatttataaaataggataataggagtacctacttcagaagttt

SEQ ID NO: 236238 - DNA, 201 bp, Homo sapiens
ggtccagtcatgacaataagttcatattgcccctctcccaaaacattttcctctatcccctgcctgtctattgcccactgtttctttactgcactttacaraggggatggctggatgtggtagctcacacctgtaatcccagcactttgggaggccgagtcaggcggaacacttgaggtcaggaattcaatactaacctgg

SEQ ID NO: 236239 - DNA, 201 bp, Homo sapiens
cataagaggcatcttcccagatgagagtaaatatctggttccttgagaagtgtagtttgagaatggagaaatcagatgttattggaaagaggctaggactrtattatttcttgcttcctgtcaagtttttcaactcaagagaaagtaaattttcctgacaaaccattcaaaattaaaggataggtgggagtatatgtgtcc

SEQ ID NO: 236240 - DNA, 201 bp, Homo sapiens
ggtggaactgaaggcttgagtcacagtgcttgggttcagactgtctccttgctaagtgtatgactgttgtggatgtgtgtgtgtgtgtgtgtgtgtgtgtgtggcacgtgtgcacatgcagcgggggtgggtgtctgaacctatctcagcctgtttcctcatttataaaataggataataggagtacctacttcagaagtt

SEQ ID NO: 236241 - DNA, 201 bp, Homo sapiens
agccaattctatgctaggcttaattcacagacaagccttgcccttttagagcactctatttggtaactacaacttcattgcagtaaaggaagcacaaaggraaataacatgcagaagaatactattaggttaaatttgtactaataaaatgaaaaatactgaagaaattcattgattcaacatatttgcaatacctccaaa

SEQ ID NO: 236242 - DNA, 201 bp, Homo sapiens
caaatatttatagaagtgttaactatgggcggagcgcagtggctcacgcctgtaatcccagcactttgggaggccaacgcgggtggatcacctgaggtcargagttcaagaccagcctggcaaatatggtgaaaccccatctctactaaaaatacaaaaattagccaggcatgatggtgggtgtctgtaatcccagttact

SEQ ID NO: 236243 - DNA, 201 bp, Homo sapiens
gggtggaactgaaggcttgagtcacagtgcttgggttcagactgtctccttgctaagtgtatgactgttgtggatgtgtgtgtgtgtgtgtgtgtgtgtgtgtggcacgtgtgcacatgcagcgggggtgggtgtctgaacctatctcagcctgtttcctcatttataaaataggataataggagtacctacttcagaagt

SEQ ID NO: 236244 - DNA, 201 bp, Homo sapiens
cctactgtggttttaggacacaaattaagaaaaacagccctggtttctgacaccagaagttaaaacctaatagaaacagcaaacacgtccatatattttgmagaattttgaagaacacaggcctgaataggctagagaaaattttaataattgcttacaagcacatgaaggattatgatgttgatgcattcatgtaacgtt

SEQ ID NO: 236245 - DNA, 201 bp, Homo sapiens
tgggtggaactgaaggcttgagtcacagtgcttgggttcagactgtctccttgctaagtgtatgactgttgtggatgtgtgtgtgtgtgtgtgtgtgtgtktgtggcacgtgtgcacatgcagcgggggtgggtgtctgaacctatctcagcctgtttcctcatttataaaataggataataggagtacctacttcagaag

SEQ ID NO: 236246 - DNA, 201 bp, Homo sapiens
aaaatgcaaatgaatggatattaatcttttatatatttattaagcattatcacaatgcatacaaccctactgtggttttaggacacaaattaagaaaaacwgccctggtttctgacaccagaagttaaaacctaatagaaacagcaaacacgtccatatattttgaagaattttgaagaacacaggcctgaataggctaga

SEQ ID NO: 236247 - DNA, 201 bp, Homo sapiens
gagattttgtcaccaccaggcctgccctccaagagctgaaagaagcactaaacatggaaaggaacaaccggtaccaggcactgcaaaaacataccaaattrtaaagaccatcaatgctataaagaaactacataattaacgggcaaaacaaccagatagcatcataatggcaggatccagttcacacataacaatattaac

SEQ ID NO: 236248 - DNA, 201 bp, Homo sapiens
tgaacatcaccaaggcatatactcaccagactttccaaggtcagtgctaaagaaaaaatcttaaaagcagctagagaaaaaggccagataaagggaacacyttcaggctacagcagacttctcagcaaaaaccttataagccaggagagattgggggcctattttcagcattcttaaagaaaagaaattctaaccaagaat

SEQ ID NO: 236249 - DNA, 201 bp, Homo sapiens
atcacagtatagattagtcattgtgtatgaagtgcattgccaagacatagtcacatttgtgtacaaatgtaaaggctatatctcaacagaaataaaaaacmaaaacatgccaaagaccattagctaataatactaataatcgaagagtagaaagcatgtgctaactgatctagactcttgtgacagctgtatatctaccca

SEQ ID NO: 236250 - DNA, 201 bp, Homo sapiens
aaactacataatttcttttctccttttgagtcaaatcatcacagtatagattagtcattgtgtatgaagtgcattgccaagacatagtcacatttgtgtasaaatgtaaaggctatatctcaacagaaataaaaaacaaaaacatgccaaagaccattagctaataatactaataatcgaagagtagaaagcatgtgctaa

SEQ ID NO: 236251 - DNA, 201 bp, Homo sapiens
tttgaacccagacattctggctcttaatcattatataattacttttctatttggataaactttatcttaaaaattattgccaacagaatagctcttgaatrtactgaaagtgaagaaaattctaattaaagcaagtgtaaatgatggtaaacagagcctactgccttaaaaaaaagattgttttaaactgatagtattttg

SEQ ID NO: 236252 - DNA, 201 bp, Homo sapiens
gaacaagaaagcaaataacaaaatcacagaagtaaacccttacttaccaataataatattgagtgtaagtggactaaactctaattaaaagactggctgartggatgaaaaaacaagactcattgttctgttgccgacaaaaaacacacttcacctataaagatacacatagactgaaaataaagatatgaagaaaggtat

SEQ ID NO: 236253 - DNA, 201 bp, Homo sapiens
gcccatgattgtgagattgatgttgatgaatgaactaaacatttcaagattttttcccaagaattttcatgtcagcaatgtgcaaattgggtgaactttarcaaaaagagctttaatactggcaaatggaaattttggattttaaatatctaaaatgcacatggaattttagagctggaaggatccttagaggtcagttaa

SEQ ID NO: 236254 - DNA, 201 bp, Homo sapiens
gtattggaagatttaatattgttaatacaatactccccaaaatggtctacaaatgcaacacaatgcctattaaattctagctacctgttttgagaatggtrtagaaattcatatggaaatgcaagggaacaagaataaccaaatcactgttgagaaaggaagaacaaggttggaagactcacaattcctgatctcaaaact

SEQ ID NO: 236255 - DNA, 201 bp, Homo sapiens
aggcaacattgacagatgtgatcacatcaagttaaaaagcttctgtacagcagaggatacaatcaacaaagtgaagagacaacccacagaatggcagaaamtatttgcaaactacttatctgacaagggattaataaccagggtatataaggagctcaagtaactctatgggaaaagaattgaataatctagtcaacaaat

SEQ ID NO: 236256 - DNA, 201 bp, Homo sapiens
aatagaaatattggaaaaatattcaatgttcacagattggaataatcaatattgttaacatgttcatactaaccaaagcaatctgcagattcaatgctatycctatcaaaataccaatgatattctttacagaaatagaaaaaaaaaatcctaaaagaacaccaagaaaaaccaaagctatcctaagcaaaaagagcaaaa

SEQ ID NO: 236257 - DNA, 201 bp, Homo sapiens
gaagaggacatcaaaaaatagaaatattggaaaaatattcaatgttcacagattggaataatcaatattgttaacatgttcatactaaccaaagcaatctrcagattcaatgctatccctatcaaaataccaatgatattctttacagaaatagaaaaaaaaaatcctaaaagaacaccaagaaaaaccaaagctatccta

SEQ ID NO: 236258 - DNA, 201 bp, Homo sapiens
aagtaacccatttacaatagtcacacataaaattaaatacctaggaattatcaaagaagtgaaagaactctataatgaaaactataaaactgatgaaatamattgaagaggacatcaaaaaatagaaatattggaaaaatattcaatgttcacagattggaataatcaatattgttaacatgttcatactaaccaaagcaa

SEQ ID NO: 236259 - DNA, 201 bp, Homo sapiens
tggaataaagagtagctgacaacaatgctgaaatagttacacatgaagttttaatgagctatttcatattaagatacatattgagaattcaaaccagagakaccagttaatagatattttcccaactctgttttagggtgatcatagaaatgatacccacaagttagtcatagtggcctgcatccatttcgatgtatcagt

SEQ ID NO: 236260 - DNA, 201 bp, Homo sapiens
atgatatgatcctttcaattgatgctgaaaaagcatttgataaagtttaacatcccttcaagataaaaaccctcaaaaaactgggaatagcaggaacatamctcaacataataaaagccatatacaacagacccacatctagtattatattgagtgaggaaaaactaaaagctctaagatctagagcatgacattgatgcc

SEQ ID NO: 236261 - DNA, 201 bp, Homo sapiens
ggaataaagagtagctgacaacaatgctgaaatagttacacatgaagttttaatgagctatttcatattaagatacatattgagaattcaaaccagagagwccagttaatagatattttcccaactctgttttagggtgatcatagaaatgatacccacaagttagtcatagtggcctgcatccatttcgatgtatcagtg

SEQ ID NO: 236262 - DNA, 201 bp, Homo sapiens
atgaaactgttccacttcaaatcgtcaggcattagtgagattttcgtacggagcacgcaacctagatccctggcatatgcagttcacaatagggttcacgytcctatgagattctaatgccacagctaatctgacaggaggtggaatgcttgctcacccgcagctcatctcctgctctgccgcctagttcctaacaggcca

SEQ ID NO: 236263 - DNA, 201 bp, Homo sapiens
gtacccactagacagataatgtgaaagcatgatctgtagagcaaagttggcaggatccatgtcagtatccatttgtgcattatagtgtagtgctccgggtkttcatgaataacataatgaaaatgaatcttgagttgattgttactcctaggtcattgacctcttcctatctgtgaattgtagattgatttaagaaagagt

SEQ ID NO: 236264 - DNA, 201 bp, Homo sapiens
aatgaaagaaaataaattttgataggctctcataaattcaatgataagaacttggaaaatgcaaccacatgataaccaggaagtaaaaggaaaacataagmggcatcttcccagatgagagtaaatatctggttccttgagaagtgtagtttgagaatggagaaatcagatgttattggaaagaggctaggactgtattat

SEQ ID NO: 236265 - DNA, 201 bp, Homo sapiens
cacatggaaggattcatcaagagaagggtttttcataagtgaaatgttattttcatctcacatttcaattattagaatataaatgaaagaaaataaatttkgataggctctcataaattcaatgataagaacttggaaaatgcaaccacatgataaccaggaagtaaaaggaaaacataagaggcatcttcccagatgaga

SEQ ID NO: 236266 - DNA, 201 bp, Homo sapiens
tgaatattgagatagatgactacagccctggtctacaccttgattgcagcctcatgaggaattctgaccaaaaacactgtgctgaaccatgcccaggctcmtgagccacataaactatgagaaaacaaatatttgtttcaagccattaagttttaatttgttacacagcaatagataactaacacatggaaggattcatca

SEQ ID NO: 236267 - DNA, 201 bp, Homo sapiens
tgctacctggataataaaatttctattcatgtcattgggatttaatgtagcccagctaatatttgtcatttgcctcacatatatgttgcatatagaagccyttttcccaatatactatacttaacactagtcagagctcgtccagttgagagtttcacagctactcatctagaaattgggttttattaagaaaatgcaaat

SEQ ID NO: 236268 - DNA, 201 bp, Homo sapiens
ccctttctgagttgaatattgagatagatgactacagccctggtctacaccttgattgcagcctcatgaggaattctgaccaaaaacactgtgctgaaccrtgcccaggctcctgagccacataaactatgagaaaacaaatatttgtttcaagccattaagttttaatttgttacacagcaatagataactaacacatgg

SEQ ID NO: 236269 - DNA, 201 bp, Homo sapiens
ttcttttacctatgtctaacacagtgcaaagaaaagtcaaagtgtcaattatctgtgtgattgggccttcaaaaactattttctaaaatattgacttaaakaaaaaactaattgttttgccccataccttcacttcattctcttatttattttttttacttcatttttgctacctggataataaaatttctattcatgtca

SEQ ID NO: 236270 - DNA, 201 bp, Homo sapiens
tccctttctgagttgaatattgagatagatgactacagccctggtctacaccttgattgcagcctcatgaggaattctgaccaaaaacactgtgctgaacyatgcccaggctcctgagccacataaactatgagaaaacaaatatttgtttcaagccattaagttttaatttgttacacagcaatagataactaacacatg

SEQ ID NO: 236271 - DNA, 201 bp, Homo sapiens
tgtacttttatgcaatttgctattaattacattttctacatgaaggtacagtcctgagacattcttttacctatgtctaacacagtgcaaagaaaagtcawagtgtcaattatctgtgtgattgggccttcaaaaactattttctaaaatattgacttaaagaaaaaactaattgttttgccccataccttcacttcattc

SEQ ID NO: 236272 - DNA, 201 bp, Homo sapiens
taacatcgcttttgaaactaggctatatatattaaaataaaaaaacaaacctgtggcttccattttgggtacttcatctcacactttctgatttcttgctycgtgggaaacagactgtaatgttgtaagcagtgctatggagaggtccatgtggttaggaagtgataggtcctgataacagccagtgaggatctaaggtgg

SEQ ID NO: 236273 - DNA, 201 bp, Homo sapiens
aaagtaaaatctcaagatatttattaaaatgatgtaataattaaaattttaatgtacttttatgcaatttgctattaattacattttctacatgaaggtayagtcctgagacattcttttacctatgtctaacacagtgcaaagaaaagtcaaagtgtcaattatctgtgtgattgggccttcaaaaactattttctaaaa

SEQ ID NO: 236274 - DNA, 201 bp, Homo sapiens
ccagtgatccctgctttctggtatgtatgcccttgtataataccctcctcatgagtgtaggcagaggtaacatcgcttttgaaactaggctatatatattmaaataaaaaaacaaacctgtggcttccattttgggtacttcatctcacactttctgatttcttgctccgtgggaaacagactgtaatgttgtaagcagtg

SEQ ID NO: 236275 - DNA, 201 bp, Homo sapiens
cttccttaaatcctgtgttttaatgacacactaaataaagtaaaatctcaagatatttattaaaatgatgtaataattaaaattttaatgtacttttatgyaatttgctattaattacattttctacatgaaggtacagtcctgagacattcttttacctatgtctaacacagtgcaaagaaaagtcaaagtgtcaattat

SEQ ID NO: 236276 - DNA, 201 bp, Homo sapiens
tagaccctgtagaatcccagtttatggcagtgacattaaaaacacctagtttatgacttggatcaggcagcctgtaaaatggcttccagtgatccctgctytctggtatgtatgcccttgtataataccctcctcatgagtgtaggcagaggtaacatcgcttttgaaactaggctatatatattaaaataaaaaaacaaa

SEQ ID NO: 236277 - DNA, 201 bp, Homo sapiens
ttatatatatcttccttaaatcctgtgttttaatgacacactaaataaagtaaaatctcaagatatttattaaaatgatgtaataattaaaattttaatgyacttttatgcaatttgctattaattacattttctacatgaaggtacagtcctgagacattcttttacctatgtctaacacagtgcaaagaaaagtcaaag

SEQ ID NO: 236278 - DNA, 201 bp, Homo sapiens
tatccctcaaggaagaatcaagaatgtttccacagagaatatacatatttcatctctttctctgatgaatggatgcccactgaaagccatgaattactctyattagaccctgtagaatcccagtttatggcagtgacattaaaaacacctagtttatgacttggatcaggcagcctgtaaaatggcttccagtgatccctg

SEQ ID NO: 236279 - DNA, 201 bp, Homo sapiens
acttttaaatctttgttgaaatagtatttacaaaatgtgtttacacaagaatggtaacttactattttcctttattatatatatcttccttaaatcctgtrttttaatgacacactaaataaagtaaaatctcaagatatttattaaaatgatgtaataattaaaattttaatgtacttttatgcaatttgctattaatta

SEQ ID NO: 236280 - DNA, 201 bp, Homo sapiens
cgcagtatccctcaaggaagaatcaagaatgtttccacagagaatatacatatttcatctctttctctgatgaatggatgcccactgaaagccatgaattwctcttattagaccctgtagaatcccagtttatggcagtgacattaaaaacacctagtttatgacttggatcaggcagcctgtaaaatggcttccagtgat

SEQ ID NO: 236281 - DNA, 201 bp, Homo sapiens
atacctttgtaattaacttttaaatctttgttgaaatagtatttacaaaatgtgtttacacaagaatggtaacttactattttcctttattatatatatcktccttaaatcctgtgttttaatgacacactaaataaagtaaaatctcaagatatttattaaaatgatgtaataattaaaattttaatgtacttttatgca

SEQ ID NO: 236282 - DNA, 201 bp, Homo sapiens
caaaattatgaatcctgtttatataatacttcataactttatacctttgtaattaacttttaaatctttgttgaaatagtatttacaaaatgtgtttacayaagaatggtaacttactattttcctttattatatatatcttccttaaatcctgtgttttaatgacacactaaataaagtaaaatctcaagatatttatta

SEQ ID NO: 236283 - DNA, 201 bp, Homo sapiens
aaacaaaattatgaatcctgtttatataatacttcataactttatacctttgtaattaacttttaaatctttgttgaaatagtatttacaaaatgtgtttrcacaagaatggtaacttactattttcctttattatatatatcttccttaaatcctgtgttttaatgacacactaaataaagtaaaatctcaagatattta

SEQ ID NO: 236284 - DNA, 201 bp, Homo sapiens
tattatatatatcttccttaaatcctgtgttttaatgacacactaaataaagtaaaatctcaagatatttattaaaatgatgtaataattaaaattttaaygtacttttatgcaatttgctattaattacattttctacatgaaggtacagtcctgagacattcttttacctatgtctaacacagtgcaaagaaaagtcaa

SEQ ID NO: 236285 - DNA, 201 bp, Homo sapiens
ttaccactttatgtgtagatttataaaatttatgcatgagtagagacaaaacagaatatgactgtaccattcattccaattgctattttgtgagaaccatrctgcactcagaactattgatttaaattaagtttttacaattactgctaacaaagtgtaactgctttctccctagacttctttattatatgcttttacatt

SEQ ID NO: 236286 - DNA, 201 bp, Homo sapiens
gagctatttcatattaagatacatattgagaattcaaaccagagagaccagttaatagatattttcccaactctgttttagggtgatcatagaaatgatayccacaagttagtcatagtggcctgcatccatttcgatgtatcagtgatgtattctgattggccagtaatcacccatactgactgttaaatatttttgtta

SEQ ID NO: 236287 - DNA, 201 bp, Homo sapiens
ataatttcttttctccttttgagtcaaatcatcacagtatagattagtcattgtgtatgaagtgcattgccaagacatagtcacatttgtgtacaaatgtraaggctatatctcaacagaaataaaaaacaaaaacatgccaaagaccattagctaataatactaataatcgaagagtagaaagcatgtgctaactgatct

SEQ ID NO: 236288 - DNA, 201 bp, Homo sapiens
ttttaatattctagaattctaaaggtgtgtaactagagcaaattttattttctaaaatttgcataataaatttaaaaataggagaaaaacaaataattaargtacatatttctagaagtcttttttaggtgacttatactaccaggaatggatttaccactaaatgttggttttgcctaattcagcattgctatgtaattt

SEQ ID NO: 236289 - DNA, 201 bp, Homo sapiens
ttatatttgtaatgattttacttatatgatccaattaattggcaagaatatgtggtgaaagattttttacatatttgtattgttctgtgtgagacatctaytgtaagcattgcttcaggctcttatttttgtctgccttccaggatttgctggcccaagtgctgtgtgctagacttagtgtcagtcagaaaagggagggaa

SEQ ID NO: 236290 - DNA, 201 bp, Homo sapiens
aaatgttttgttcactgctttgaaagtatcttttgtttacttttgttatcatttcatgttttaattttttcttttctaattgttagaaactcatgtatttrattttatctttcaaagaacatttttaaaaggcttactctgcttatatgtatattttgcacaaagctttccattcataaacaaaaggtgaataggaatcag

SEQ ID NO: 236291 - DNA, 201 bp, Homo sapiens
tgcagctacattgggagttctaagtagccacatctcaggctaagaggaagtccagattggttcaaaccttttgttaattatcctttgtaggaatggaccaygcagtatccctcaaggaagaatcaagaatgtttccacagagaatatacatatttcatctctttctctgatgaatggatgcccactgaaagccatgaatta

SEQ ID NO: 236292 - DNA, 201 bp, Homo sapiens
ttattctcttgaggtagggcagctaaagggaggattatcttcatgttgagtctgatggcagggtaatttgcttcatgtggaggcaaagggatattgttagwtttgcagctacattgggagttctaagtagccacatctcaggctaagaggaagtccagattggttcaaaccttttgttaattatcctttgtaggaatggac

SEQ ID NO: 236293 - DNA, 201 bp, Homo sapiens
atagattagtcattgtgtatgaagtgcattgccaagacatagtcacatttgtgtacaaatgtaaaggctatatctcaacagaaataaaaaacaaaaacatrccaaagaccattagctaataatactaataatcgaagagtagaaagcatgtgctaactgatctagactcttgtgacagctgtatatctacccagctgcgtg

SEQ ID NO: 236294 - DNA, 201 bp, Homo sapiens
aaacactctatggcctagaggaattccagctggcatctatgatcttattctcttgaggtagggcagctaaagggaggattatcttcatgttgagtctgatrgcagggtaatttgcttcatgtggaggcaaagggatattgttagttttgcagctacattgggagttctaagtagccacatctcaggctaagaggaagtcca

SEQ ID NO: 236295 - DNA, 201 bp, Homo sapiens
catttaaaacaaaattatgaatcctgtttatataatacttcataactttatacctttgtaattaacttttaaatctttgttgaaatagtatttacaaaatrtgtttacacaagaatggtaacttactattttcctttattatatatatcttccttaaatcctgtgttttaatgacacactaaataaagtaaaatctcaaga

SEQ ID NO: 236296 - DNA, 201 bp, Homo sapiens
cattgctatgtaatttgatggaagtataactccatagacaaagagcatttggtcctaacatagcttgtattttatatgtatatacactatttctatttaartttctgtatagtcatgttttacccttttaaaatgaagattagttttagtgtgtattttcttttgtctataaacattcagtgaattcacactgaaaactga

SEQ ID NO: 236297 - DNA, 201 bp, Homo sapiens
tgattgccttcagcatctagaacaaaacactctatggcctagaggaattccagctggcatctatgatcttattctcttgaggtagggcagctaaagggagrattatcttcatgttgagtctgatggcagggtaatttgcttcatgtggaggcaaagggatattgttagttttgcagctacattgggagttctaagtagcca

SEQ ID NO: 236298 - DNA, 201 bp, Homo sapiens
tatagtacccactagacagataatgtgaaagcatgatctgtagagcaaagttggcaggatccatgtcagtatccatttgtgcattatagtgtagtgctccrggtgttcatgaataacataatgaaaatgaatcttgagttgattgttactcctaggtcattgacctcttcctatctgtgaattgtagattgatttaagaaa

SEQ ID NO: 236299 - DNA, 201 bp, Homo sapiens
tatcttaaaaattattgccaacagaatagctcttgaatatactgaaagtgaagaaaattctaattaaagcaagtgtaaatgatggtaaacagagcctactrccttaaaaaaaagattgttttaaactgatagtattttgatacattaaaagaccatttaaaacaaaattatgaatcctgtttatataatacttcataactt

SEQ ID NO: 236300 - DNA, 201 bp, Homo sapiens
ccaaatatgaattatacaaagatagattatgttacttgaaaaaaacttaaagatttctcaattttactttgaggatttataaaatgttattttgtggcaartaagatgaagtacagtattatcatcaatcactgttgctatcttatatacaagatttttggaaacatccttttagcaataccctttccacttgagcagcat

SEQ ID NO: 236301 - DNA, 201 bp, Homo sapiens
tatctcctgttctgtatatatctatatatctatagatatatatagaacaggggataccagtgtgtacctaccattgaaatcaattgttttcaagtcttttyaggtcttattctcagatggtcttgggtaagtggtggctgattgccttcagcatctagaacaaaacactctatggcctagaggaattccagctggcatcta

SEQ ID NO: 236302 - DNA, 201 bp, Homo sapiens
caggtagtcttgttatcccagttttacagatcaggaaactgaagcacagagaaactaagaaatttgcccaaattcttatacctgataagtagcagaactgkaatttgaacccagacattctggctcttaatcattatataattacttttctatttggataaactttatcttaaaaattattgccaacagaatagctcttga

SEQ ID NO: 236303 - DNA, 201 bp, Homo sapiens
ctctctctctctctctgtctctctctctgtctctctctctctctctctctctctctctctatatatatatatatatatatataaaatatatatatatatawaaaatatatatatatatataaaatatatatatatatataaaatatatatatatatctcctgttctgtatatatctatatatctatagatatatatagaac

SEQ ID NO: 236304 - DNA, 201 bp, Homo sapiens
acatgccaaggattattgcattgctcttatgtattaactcatttactcataaccacagattgagacaggtagtcttgttatcccagttttacagatcaggraactgaagcacagagaaactaagaaatttgcccaaattcttatacctgataagtagcagaactggaatttgaacccagacattctggctcttaatcatta

SEQ ID NO: 236305 - DNA, 201 bp, Homo sapiens
tgcactttgtattccataatcattctgatgcaaaaacaattgtaactctctttctagtgtctacatttcctgtgagccccagttgtgaatagcagaaatayggaggcatctaggaaaacctaggggcaggaggggctgggagggaataagacctttcaaggtgtttaaagaagggacaaagatgaagaagcaggcatagtt

SEQ ID NO: 236306 - DNA, 201 bp, Homo sapiens
taaatagttacatatttgagttcagctttttattctctagaattaaatttctaatttactataataataatagctaatgtttattgaactcataccacatkccaaggattattgcattgctcttatgtattaactcatttactcataaccacagattgagacaggtagtcttgttatcccagttttacagatcaggaaact

SEQ ID NO: 236307 - DNA, 201 bp, Homo sapiens
gagtgttggtgatttaccatattcacagagtcaaagggaaggagagacaagaataagagctgactaaattttgagtataaaagtgagaatatttacttccrgcactgctgattagaatatattctggaaaaaactttcagaaaatcagtttttcaattttatttcctgtaatcgtcctaagaaaatcagaaatataaagaa

SEQ ID NO: 236308 - DNA, 201 bp, Homo sapiens
tgtgtctgtatcaaataaatagttacatatttgagttcagctttttattctctagaattaaatttctaatttactataataataatagctaatgtttattkaactcataccacatgccaaggattattgcattgctcttatgtattaactcatttactcataaccacagattgagacaggtagtcttgttatcccagtttt

SEQ ID NO: 236309 - DNA, 201 bp, Homo sapiens
tatcatacagtgcttgatacaaacatggtagaattgtcaatatatgcttgtttaactgaagtagatgaatacacatatacataaacattgcatatatatatgtgtgtgtgtgtgcatatgtgtgtgtgtgtgtgcaatcaattactatattagagtgcaataggattcagagaaggaaaaaaattgttataaggcaggggc

SEQ ID NO: 236310 - DNA, 201 bp, Homo sapiens
tcagcccaagacccctgacccacaacagatacacacaaacaccaagatagtcattatataagggaagtgcaaaccgatggttttttattttgtagaaaatrtgtctgtatcaaataaatagttacatatttgagttcagctttttattctctagaattaaatttctaatttactataataataatagctaatgtttattga

SEQ ID NO: 236311 - DNA, 201 bp, Homo sapiens
ttatcatacagtgcttgatacaaacatggtagaattgtcaatatatgcttgtttaactgaagtagatgaatacacatatacataaacattgcatatatatatgtgtgtgtgtgtgcatatgtgtgtgtgtgtgtgcaatcaattactatattagagtgcaataggattcagagaaggaaaaaaattgttataaggcagggg

SEQ ID NO: 236312 - DNA, 201 bp, Homo sapiens
ttaaaatttttaatgtgattatttactcagcccaagacccctgacccacaacagatacacacaaacaccaagatagtcattatataagggaagtgcaaacygatggttttttattttgtagaaaatgtgtctgtatcaaataaatagttacatatttgagttcagctttttattctctagaattaaatttctaatttacta

SEQ ID NO: 236313 - DNA, 201 bp, Homo sapiens
ctaaatgcctcaattaaaagggacagagtgacaagttgaataaagaagacccaactgtatgctgtcttcaagagaccaatctcacatacagtgatacccayaggctcaaagtaaagggatggagaaaaatccacctagcaaacagaaaagaagcagaagttgctattctagtttaagataaaacaggcagaggcagagcac

SEQ ID NO: 236314 - DNA, 201 bp, Homo sapiens
atccacgaatggccatttgttcttatttctgttttaatcggaagtttttaaaatttttaatgtgattatttactcagcccaagacccctgacccacaacasatacacacaaacaccaagatagtcattatataagggaagtgcaaaccgatggttttttattttgtagaaaatgtgtctgtatcaaataaatagttacata

SEQ ID NO: 236315 - DNA, 201 bp, Homo sapiens
tcaaatattcgttcagttttgcaaatgatccacgaatggccatttgttcttatttctgttttaatcggaagtttttaaaatttttaatgtgattatttacwcagcccaagacccctgacccacaacagatacacacaaacaccaagatagtcattatataagggaagtgcaaaccgatggttttttattttgtagaaaatg

SEQ ID NO: 236316 - DNA, 201 bp, Homo sapiens
agtcccagctactcgggaggctgaggcaggaaaatggtgtgaacctgggaagcagagcttgcagtgagcagagatcgcacaactgcactccagcctaggtracaaagcgagactccatctgaaaaagaaaaacaaaactttgcctcgttcataatcatgtataatataatcagtagaagggaacataattaaatattttca

SEQ ID NO: 236317 - DNA, 201 bp, Homo sapiens
gaggctgaggcaggaaaatggtgtgaacctgggaagcagagcttgcagtgagcagagatcgcacaactgcactccagcctaggtgacaaagcgagactccrtctgaaaaagaaaaacaaaactttgcctcgttcataatcatgtataatataatcagtagaagggaacataattaaatattttcattacttttcattctta

SEQ ID NO: 236318 - DNA, 201 bp, Homo sapiens
aatgccattaaattgtagttatcctttgcatttctcttcttatgagagaaggtaaccatcatggacaagtgctacaaagaaaagatacatagtgccatgartatctataataagtggcaatatgtaagctttccctgcaagaattccactaaagctgcaactttacagcatgaatgggagttaaccaggtgaagaggtact

SEQ ID NO: 236319 - DNA, 201 bp, Homo sapiens
gtattccaggagcaataggaagccattataatatggtaagcagaagagtgacatgatcagaattttactctgcctctgttctggtcaaaacttaattcctrttggcagaatgggcttatgaaatattaaactgtgttcatttatcccatttttttctgttcttcatattttcaaaaagatattggaaaggaaaggttgagg

SEQ ID NO: 236320 - DNA, 201 bp, Homo sapiens
aatattaaactgtgttcatttatcccatttttttctgttcttcatattttcaaaaagatattggaaaggaaaggttgagggaaaaaagtcataaatgcttsctgactagggtaaaacatgaatccctttcaaaaggtcatgccaagcgcactgaaaataaaggaagcactagagtgcatttgagaagcagcccagggaagc

SEQ ID NO: 236321 - DNA, 201 bp, Homo sapiens
tggagctactagtttgggtttttttttccacttgtacatttctatataatgaaagcatattatgtaattcattcttgattgtcttgattccccttaagttwctgcttaactttaggaaacaatcaatttccttgagtaagtgctttacattggtacctagttttgacagcttcatgccattctaaatgttgaaaaatgttc

SEQ ID NO: 236322 - DNA, 201 bp, Homo sapiens
ttctcacagagagaattttgcttcatccctagaaggacatcatgacaaacacaaagaccttgtgcaattgaggttattacattgttagctctaaattgtcwttatttggttctacatgaattgtctatgtagcaaggcagcaaaatgaggggtaaaactagcaatagcaatttttcttttaaaaatgtttcctggatatca

SEQ ID NO: 236323 - DNA, 201 bp, Homo sapiens
gcataccttttaaattagataaatattgacctcccattggtgaacatataaagtgctaccaagatctgccaatgaaagacttttgaagtggaaattcatcyttgtaataatcctgttatctgtaggctgacctcaagccttcatgacattcagggccccttattcttaactgcatcttctattttgggcattgtgctcttg

SEQ ID NO: 236324 - DNA, 201 bp, Homo sapiens
acttatatgatccaattaattggcaagaatatgtggtgaaagattttttacatatttgtattgttctgtgtgagacatctattgtaagcattgcttcaggytcttatttttgtctgccttccaggatttgctggcccaagtgctgtgtgctagacttagtgtcagtcagaaaagggagggaaacttgccgttgagccagac

SEQ ID NO: 236325 - DNA, 201 bp, Homo sapiens
atatgatccaattaattggcaagaatatgtggtgaaagattttttacatatttgtattgttctgtgtgagacatctattgtaagcattgcttcaggctctyatttttgtctgccttccaggatttgctggcccaagtgctgtgtgctagacttagtgtcagtcagaaaagggagggaaacttgccgttgagccagacagtt

SEQ ID NO: 236326 - DNA, 201 bp, Homo sapiens
ctcgtgccagcacagcagtctgagctcaacctgggaccctcaagcttggtggggggaggggtgtccaccattgctgaggcttgagtaggcagttttaccckcacagtgtaaacaaagcctccaggaagttcgaactgggtggagcccaccgcagctcagcaaggccgctgctgcctctctagattcattcctctacgggca

SEQ ID NO: 236327 - DNA, 201 bp, Homo sapiens
tgtgagacatctattgtaagcattgcttcaggctcttatttttgtctgccttccaggatttgctggcccaagtgctgtgtgctagacttagtgtcagtcasaaaagggagggaaacttgccgttgagccagacagttttgttattcctttaaaattaaaagcatatgaaacagatacagcttattaaggttttttttttat

SEQ ID NO: 236328 - DNA, 201 bp, Homo sapiens
tcactagaaagcatttaaaatgctgctcattttccatagttagtgtggcttgattatctgacaaatcctgccagaagcctgtaggtctgatataccttatrtaacaacatctgtattattattattatagcagccattttataagcagataggaatatttaaataatcattatcagataatcaaatctaacatactcttaa

SEQ ID NO: 236329 - DNA, 201 bp, Homo sapiens
agacatctattgtaagcattgcttcaggctcttatttttgtctgccttccaggatttgctggcccaagtgctgtgtgctagacttagtgtcagtcagaaargggagggaaacttgccgttgagccagacagttttgttattcctttaaaattaaaagcatatgaaacagatacagcttattaaggttttttttttataaat

SEQ ID NO: 236330 - DNA, 201 bp, Homo sapiens
ttgattactaaaaaataaaaggaaagaaaattttgagaagaaagaaaacagtccacttaaagaaatctccctgctggaactggttctttatataccatatrcaattaagttattgccataggaagaaagtgggctgttttttgttctttcttcgttttttttcctcttacaggaatccccttttgatttaaggcaacaaac

SEQ ID NO: 236331 - DNA, 201 bp, Homo sapiens
taagtgttaatgttttcaatagcccttccctcaatttcctgagtatactacaaaactgctgataatgatgtattaaatagtgaaacttactagaactgcartcctattttacatataattctaggccatttagaatctgggtaagattccaacaatgatgttatttcctatagagtaagtcacatgtgcttataacctttt

SEQ ID NO: 236332 - DNA, 201 bp, Homo sapiens
gctgatgcatatgtgttgtaatggttttccagaattagttctttgaagttacaatcttcattgcattctttctgttaaaacaaacaaacaaacagacattwtccaaatgatttttagagaggctcaattaaacgaagagtaagcaggtaatatttggtagaattgaaacatacacaactttttttaaccctcagattgagc

SEQ ID NO: 236333 - DNA, 201 bp, Homo sapiens
ttcttgacaatatacgtttctttgttcaactgaattttttgaatttattgctgactctatgtttagggtgtgtgtgtgtgtgtgtgtgtgtgtgtgtgtgtttgtgtgtctcccactaaggcaatagagttgatactggtttggcagttgtttaatatatgcatatttatatttaagactcaagcattaaaattactgtta

SEQ ID NO: 236334 - DNA, 201 bp, Homo sapiens
gcatagatcactaagctgttacagtctttattcctaaattttatagttcttctgtctcctacttcaaaaatgttgtcacttcttattcttactaatttctyaagggcaaaacaccatgtctctacttatttttgtgtctccatgcctaatacaagtcctggcaattttgttgaattattttacttgaataagtgttaatgt

SEQ ID NO: 236335 - DNA, 201 bp, Homo sapiens
gttcttgacaatatacgtttctttgttcaactgaattttttgaatttattgctgactctatgtttagggtgtgtgtgtgtgtgtgtgtgtgtgtgtgtgtgtttgtgtgtctcccactaaggcaatagagttgatactggtttggcagttgtttaatatatgcatatttatatttaagactcaagcattaaaattactgtt

SEQ ID NO: 236336 - DNA, 201 bp, Homo sapiens
agaggctcaattaaacgaagagtaagcaggtaatatttggtagaattgaaacatacacaactttttttaaccctcagattgagcaggcctaatgtggtttrttagctatacttatgtagtatatttgcataaaaaggtatcttaaatttgaaataaaaacaccacataatacacagctagttatgaaatatgtgtagcttt

SEQ ID NO: 236337 - DNA, 201 bp, Homo sapiens
cactttccacccctttgattgccacaattccaactgccactgtcctgatttccatgatatctgcaaggaatcacagaaagacatgtcaaatattcgttcarttttgcaaatgatccacgaatggccatttgttcttatttctgttttaatcggaagtttttaaaatttttaatgtgattatttactcagcccaagacccct

SEQ ID NO: 236338 - DNA, 201 bp, Homo sapiens
gctaaatgcctcaattaaaagggacagagtgacaagttgaataaagaagacccaactgtatgctgtcttcaagagaccaatctcacatacagtgatacccmcaggctcaaagtaaagggatggagaaaaatccacctagcaaacagaaaagaagcagaagttgctattctagtttaagataaaacaggcagaggcagagca

SEQ ID NO: 236339 - DNA, 201 bp, Homo sapiens
cttagaggtcagttaattcaactcattttacagatgaagaaaccaaaatccaaagaacaagccatttgtccaaagtcacacagaaaacattttttcttaaygtttgagtataaagtgttttaataaaatcattaaattatacagttggagataaattaattccatttttacttttcagaaaggtgagatattttgacaaaa

SEQ ID NO: 236340 - DNA, 201 bp, Homo sapiens
cacatggcaaaagcaggatcaagcaagaggggggcagaggtgccacacaattttaaacaagcagacctcatatgaactcagagcaagagctcacttaccaycaagggaatggccccagccattcttgagggatctgcccccatgatccagccacctcccaccaggccccacatccaacattggggattacatttcaacatg

SEQ ID NO: 236341 - DNA, 201 bp, Homo sapiens
agttacaatcttcattgcattctttctgttaaaacaaacaaacaaacagacattatccaaatgatttttagagaggctcaattaaacgaagagtaagcagrtaatatttggtagaattgaaacatacacaactttttttaaccctcagattgagcaggcctaatgtggtttattagctatacttatgtagtatatttgcat

SEQ ID NO: 236342 - DNA, 201 bp, Homo sapiens
aatatgatttctatcttttattagttacaggaaattttcttgtttgctgtcatcctcagtgttttaccaaaacttcgtatatattgttatggggggtgggrggctatttctagggatttctgatagaaagagtaatagtctactatcttgagccaattttgtttatctgttttgacttctcaccctcacatatgaataact

SEQ ID NO: 236343 - DNA, 201 bp, Homo sapiens
agaaaattttgagaagaaagaaaacagtccacttaaagaaatctccctgctggaactggttctttatataccatatgcaattaagttattgccataggaasaaagtgggctgttttttgttctttcttcgttttttttcctcttacaggaatccccttttgatttaaggcaacaaacatttcccctccgttgtgtgtccat

SEQ ID NO: 236344 - DNA, 201 bp, Homo sapiens
ataaatcattctattataaagatacatgcacatgtatgtttattgcagcactattcacaatatcaaagacatgaaaccaacccaaatgtccatcaatgatwgaccggataaagaaaattttgtgttacatatacaccatggaatactatgcagccacgaaaaagaatcagatcatgccctctgcagggacatggatgaagc

SEQ ID NO: 236345 - DNA, 201 bp, Homo sapiens
gcagccattttataagcagataggaatatttaaataatcattatcagataatcaaatctaacatactcttaagggtaaattaatttaagaaaaaaattacygttactaacatcatgattgtacaaccagttttacaattttttacaacctttagttactaaatctgatttttgtgtatacttttcaaatctttctttaatg

SEQ ID NO: 236346 - DNA, 201 bp, Homo sapiens
aaactactttaaaattcagatggaaccaaaaaaagagcccacatagccaaggccttcctaagcaaaaagaacaaagctggaggcatcacactacctgactkcaaactatcctacaaggttacagtaaccaaaacagcaaagtactggtaccaaaacagacatatagaccagtggaacagaatagagacctcagaaataaga

SEQ ID NO: 236347 - DNA, 201 bp, Homo sapiens
atagcagccattttataagcagataggaatatttaaataatcattatcagataatcaaatctaacatactcttaagggtaaattaatttaagaaaaaaatyactgttactaacatcatgattgtacaaccagttttacaattttttacaacctttagttactaaatctgatttttgtgtatacttttcaaatctttcttta

SEQ ID NO: 236348 - DNA, 201 bp, Homo sapiens
gtgcagtcttgggacttggtgccctgtgtcccagccatggatgaaatggagccaacatacaatgtacagatcaggacattgcttcagagggtgcaagcctyggtggcttacacatggtgttgagcctgagggtgcacagaagttaagcattggggtttggtaccttctgcctagaaattagaggatgtatggaaatgcctg

SEQ ID NO: 236349 - DNA, 201 bp, Homo sapiens
attatctgacaaatcctgccagaagcctgtaggtctgatataccttatataacaacatctgtattattattattatagcagccattttataagcagatagraatatttaaataatcattatcagataatcaaatctaacatactcttaagggtaaattaatttaagaaaaaaattactgttactaacatcatgattgtaca

SEQ ID NO: 236350 - DNA, 201 bp, Homo sapiens
ggactaacagagaagaaatcccccttacaaattctctccctctctaccttctctccctatctccccatctctttctcttatatattcagtctgcatgaggracccaagagttgtgtaaccaattatcagatatttcctttgaaattttacatattgagtttttaatgatgcaataaagtccttggtcctagttaactgata

SEQ ID NO: 236351 - DNA, 201 bp, Homo sapiens
aattatctattttattgactttcataatagtttttttgagaattttttttctgattagagtttaagtagattataatttttcactagaaagcatttaaaakgctgctcattttccatagttagtgtggcttgattatctgacaaatcctgccagaagcctgtaggtctgatataccttatataacaacatctgtattatta

SEQ ID NO: 236352 - DNA, 201 bp, Homo sapiens
ggataatagatattaaaaataactctgatggctatttcaggaggaaataaataggttactatggtatcatttaacacagaaaggagaaggatgtttcaaawctcattacaaaatgtctttctgtagaattgctatttaagctcagatctgatacatgagaagaaatcagaagtggaggtagagcattctagataaaggtaa

SEQ ID NO: 236353 - DNA, 201 bp, Homo sapiens
aatgttattttgtggcaagtaagatgaagtacagtattatcatcaatcactgttgctatcttatatacaagatttttggaaacatccttttagcaataccytttccacttgagcagcattagaaattttgttcttatttataggtataagcatgttctaatcctgtacttttgttaaattatctattttattgactttcat

SEQ ID NO: 236354 - DNA, 201 bp, Homo sapiens
tatatcatgggacgttattgtgaaaacctaaaactgatttattctttgatttcagctataaatgggtttcaaagttgccaaaaaacaagtcaatgtacttygtgttcaaatcaattcttgtgacactgagaaaaaaaaaattttaagaataacagtgttgatattttgaaaaaaattaatccttagtaccctctctggtta

SEQ ID NO: 236355 - DNA, 201 bp, Homo sapiens
gcatataaatgatacctcatatataaatacatattatatatatattagtactatatataattaatataataataatataatatatatattaaatacatatrtattagtacgaatgagggacaaaacagcggagagtaaagaaactagttaaatatatatttgaatctcagtgttaaaattttaaaaataggggagagggca

SEQ ID NO: 236356 - DNA, 201 bp, Homo sapiens
cttacccaatggataacttctttttgtgaaatatggacagtaaagaggagtaaggtcataataaaaacacactttggaaattgtaggatacaaatactggwtatacagaccactgtttcacttgttaagtgtacagtatctctcaggtgtttgggaatggaaaacaagagccagtaatattttagaaacttgatctgatta

SEQ ID NO: 236357 - DNA, 201 bp, Homo sapiens
ttcctaacagatcttcagagggaaggcaccaagtgtggtcacagggaaaacacagaagctgggctgaagtgggaaaaagccaggaaccctgccctgggctrtggtgcaccaggacttattcctggttcccagcgactcaaggagaatgggccagttgaactggcaaggagcaaccggctctcaccatgggccttagtgcag

SEQ ID NO: 236358 - DNA, 201 bp, Homo sapiens
gtgtgtattagacactgcattcaacagtcaagactatacattcttttcaagtgaaggtacaaatggaacaattacaaacattttccacatactgtcataartgaaatctcagcaatatatagactttattaccttcctactgctcctaactcactgaagtcctttcttccttacctaaattaaacatggctaatcattata

SEQ ID NO: 236359 - DNA, 201 bp, Homo sapiens
taaggcatattgttagtggtgaagattgggaacccacctgtggaaaaaatttgagagcctataatttattttttaaaataatggaattaaattttagtttyttgttcagtgcagaagtctgacttacagtaaacattccgatggaaatattttagtgaaagggtagggaactgacactacgtcattaagacttctgctagc

SEQ ID NO: 236360 - DNA, 201 bp, Homo sapiens
gtttttcattaataattcaacaaaatcatattgggtaccaacagctgtgttagatgaatggtccctgccctcaattatcaaggcagaatatgataaggttytaaacaggactcaagtatgagaaagaaagaaaagaaaggagcctgttccatctttctgattttccttgtcatcttctcttttgcttctctttacttatgg

SEQ ID NO: 236361 - DNA, 201 bp, Homo sapiens
tttcatagtggtaggattggtccattcctgttgctattacaaaaaactacactcagttaacaaaaagtttcaagcaagcccttggcaaacatttcaaaatyctctcttccaattcaaaatcttccaatagactatcatgttacctttctccattacaaataatctgtggggaaattaagtctatgaccatttgaaataatt

SEQ ID NO: 236362 - DNA, 201 bp, Homo sapiens
gccaaaccttttgaatgtttggaatttaggactcaaaagcaatacctcaagtaaatattgatcagataataattttgtgttcacccaacctacttctctcytaggaggtgggcagacaaaggagaaagtaaacaaaacctactctattaccatgcatttgccccacaaaaatcacttccagcctctggctccgagtgattc

SEQ ID NO: 236363 - DNA, 201 bp, Homo sapiens
cagtgaggatctaaggtggatccctttctgagttgaatattgagatagatgactacagccctggtctacaccttgattgcagcctcatgaggaattctgamcaaaaacactgtgctgaaccatgcccaggctcctgagccacataaactatgagaaaacaaatatttgtttcaagccattaagttttaatttgttacacag

SEQ ID NO: 236364 - DNA, 201 bp, Homo sapiens
tgagttcaacgcattatttcttgacagatgcatttttaaaagcttcttacacttggataaccactccatcttaatgtcctttgctctttgtcttcttcacrttcttaaagtaaggacactcagggtggtctgttcattgtcttgccttgttactcaacctcacttttatatacactccactgcctgaattcattttccatg

SEQ ID NO: 236365 - DNA, 201 bp, Homo sapiens
taactacaacttcattgcagtaaaggaagcacaaagggaaataacatgcagaagaatactattaggttaaatttgtactaataaaatgaaaaatactgaakaaattcattgattcaacatatttgcaatacctccaaaatggaataaatgtatcagttaggttggtgcaaaagtaattgtggcttttgccattacttttat

SEQ ID NO: 236366 - DNA, 201 bp, Homo sapiens
caataggattcagagaaggaaaaaaattgttataaggcaggggcaagtttgggaatagctcattaaacttgagctttgtccttaagagcagagcagggtayggattgattgacagtaggaagtagagatattctaagcagtggggacagtatagacaaaactcagaggcagaatcaatttgcaacttgtgtaaatcatgat

SEQ ID NO: 236367 - DNA, 201 bp, Homo sapiens
taatcattatcagataatcaaatctaacatactcttaagggtaaattaatttaagaaaaaaattactgttactaacatcatgattgtacaaccagttttamaattttttacaacctttagttactaaatctgatttttgtgtatacttttcaaatctttctttaatgcagtgtcttaaaacaaacataaatgcacaagtcc

SEQ ID NO: 236368 - DNA, 201 bp, Homo sapiens
gttttagtgtgtattttcttttgtctataaacattcagtgaattcacactgaaaactgattatgaacagatagtctgctaggcactaaggaaacacatatraaaaactaagtcctcctctgccctcaatatgctcacaagactacagttactgaagcctgacctcaaaacctagctagcaaagtccttgaatcaggtgata

SEQ ID NO: 236369 - DNA, 201 bp, Homo sapiens
agagctttaatactggcaaatggaaattttggattttaaatatctaaaatgcacatggaattttagagctggaaggatccttagaggtcagttaattcaahtcattttacagatgaagaaaccaaaatccaaagaacaagccatttgtccaaagtcacacagaaaacattttttcttaacgtttgagtataaagtgtttta

SEQ ID NO: 236370 - DNA, 201 bp, Homo sapiens
ccaggaagtaaaaggaaaacataagaggcatcttcccagatgagagtaaatatctggttccttgagaagtgtagtttgagaatggagaaatcagatgttaytggaaagaggctaggactgtattatttcttgcttcctgtcaagtttttcaactcaagagaaagtaaattttcctgacaaaccattcaaaattaaaggata

SEQ ID NO: 236371 - DNA, 201 bp, Homo sapiens
tgaagaaaccaaaatccaaagaacaagccatttgtccaaagtcacacagaaaacattttttcttaacgtttgagtataaagtgttttaataaaatcattawattatacagttggagataaattaattccatttttacttttcagaaaggtgagatattttgacaaaaatgagttttaaaaattaagcctaagctatcaatt

SEQ ID NO: 236372 - DNA, 201 bp, Homo sapiens
gataaattaattccatttttacttttcagaaaggtgagatattttgacaaaaatgagttttaaaaattaagcctaagctatcaattatcaatacctttgcrtagagttttccttccttgttcattgcaagatagaattcactttccacccctttgattgccacaattccaactgccactgtcctgatttccatgatatctg

SEQ ID NO: 236373 - DNA, 201 bp, Homo sapiens
tctattgtaagcattgcttcaggctcttatttttgtctgccttccaggatttgctggcccaagtgctgtgtgctagacttagtgtcagtcagaaaagggarggaaacttgccgttgagccagacagttttgttattcctttaaaattaaaagcatatgaaacagatacagcttattaaggttttttttttataaataacat

SEQ ID NO: 236374 - DNA, 201 bp, Homo sapiens
ttttttaaattatcagatcttgtgagacttattcaccatcccaagaacagcagggaaaaacctaccgtcatgattcaattacttcccactgcaaccctccygcaacatgtgggcattgaagatgagatttgggtggggacacagccaaaccatatcagctggctttttgttttctttaagaagactaaccctaggctcact

SEQ ID NO: 236375 - DNA, 201 bp, Homo sapiens
atataatagatggaaagacctataatacttccaactcctggttctaaagtctaggagaatacagtaatctaaggagaaaatcataacagtaatgccttatrtttgtatactgttttacagttctcacattttactctcacaaggtactcagcagtgtgcaggggtggactgaaatggccaaggggagcttcgtggagagtt

SEQ ID NO: 236376 - DNA, 201 bp, Homo sapiens
cattgcttcaggctcttatttttgtctgccttccaggatttgctggcccaagtgctgtgtgctagacttagtgtcagtcagaaaagggagggaaacttgcmgttgagccagacagttttgttattcctttaaaattaaaagcatatgaaacagatacagcttattaaggttttttttttataaataacataaacttaaata

SEQ ID NO: 236377 - DNA, 201 bp, Homo sapiens
aggcaaagagagagcttgtgcggggaaactcccattttttaaattatcagatcttgtgagacttattcaccatcccaagaacagcagggaaaaacctaccrtcatgattcaattacttcccactgcaaccctcccgcaacatgtgggcattgaagatgagatttgggtggggacacagccaaaccatatcagctggctttt

SEQ ID NO: 236378 - DNA, 201 bp, Homo sapiens
ttctgatgtgtttatttacagcacaatcttttactctcaaaagtgttccagtttggatgatagattatatgtagaagcatgatgtaaatgtttaacaactgactctcagggaaaaaaagtgtacatatatatgcacacatagttcattacaaattctactgatataaaggaagcatagcacacaagcatataaataataaa

SEQ ID NO: 236379 - DNA, 201 bp, Homo sapiens
atttctctgccttttatctctcctgatttcttgatatatctgtgtattgcttttccttctctttagtgagcactccttcctcacttctccccctgcttgtrtctttctccatttacttcctaacatccttcctttaattctgtctctcccatttatccttgttttgtgctatcttctctttttataatatgaagttaaaat

SEQ ID NO: 236380 - DNA, 201 bp, Homo sapiens
aagtgctgtgtgctagacttagtgtcagtcagaaaagggagggaaacttgccgttgagccagacagttttgttattcctttaaaattaaaagcatatgaarcagatacagcttattaaggttttttttttataaataacataaacttaaataacaaaacaataaagttcaaaaacaacttaaaatagagtttaatgctgta

SEQ ID NO: 236381 - DNA, 201 bp, Homo sapiens
ctcagtccttctaaaatactctgggcgaagtgaataggaaagcctatactgcaagaaagtttgttctattatttatgagattttacaaaaaaaaaaaaaaacccttattttccttcaacttcaaaaattgggtgtcaatgtcataaaattatctgttaatgagatttttcagataatggaaagcacacgttaacttgatga

SEQ ID NO: 236382 - DNA, 201 bp, Homo sapiens
agttcaaaaacaacttaaaatagagtttaatgctgtaaccataggaaaaaagcatgattatttgtgggaagaacattattaaaagccatattcccaaataygaattatacaaagatagattatgttacttgaaaaaaacttaaagatttctcaattttactttgaggatttataaaatgttattttgtggcaagtaagatg

SEQ ID NO: 236383 - DNA, 201 bp, Homo sapiens
ggaagaacattattaaaagccatattcccaaatatgaattatacaaagatagattatgttacttgaaaaaaacttaaagatttctcaattttactttgagratttataaaatgttattttgtggcaagtaagatgaagtacagtattatcatcaatcactgttgctatcttatatacaagatttttggaaacatcctttta

SEQ ID NO: 236384 - DNA, 201 bp, Homo sapiens
tatcaaaagaaataacaatatagtgcaagattatttacaatgggcctggtggattatataataacactttgtccacctaaattattattacaaggaatackttttgaaagccttatatcagtgtaggaaaccacaggcttgcatatttgacctttaacatgattttattcagtgtttagggtaatgttagtagaatcacag

SEQ ID NO: 236385 - DNA, 201 bp, Homo sapiens
ctgtctttttgtttgtctgtgccctgcccccagaggtggagcctacagaggcaggcaggcctccttgagctgtggtgggctccacccagttcgagcttccygactgttttgtttacctaatcaagcctgggcaatggcgggcgcccctcccccagcccaccttgcagtttgatctcagactgctgtgctagcaatcagcga

SEQ ID NO: 236386 - DNA, 201 bp, Homo sapiens
aagaaaaagtggttttgtgggctgggtccagggccttgctgctttgtgcagtcttgggacttggtgccctgtgtcccagccatggatgaaatggagccaamatacaatgtacagatcaggacattgcttcagagggtgcaagcctcggtggcttacacatggtgttgagcctgagggtgcacagaagttaagcattggggt

SEQ ID NO: 236387 - DNA, 201 bp, Homo sapiens
cacctcctttttctttataatttacccagtcttaggtatttcttcacagcagtatgataacagactaatacagtaaattggcaccaggagagcagggtackattaagatacgcaaaaatgtggaagcaactttggaacaggataacaggcagagaggttgaaacagtttggagggctcagaagaaaacataaacatgtgga

SEQ ID NO: 236388 - DNA, 201 bp, Homo sapiens
ataaagggcagctccgcctgcacatgctctctcttgccagccaccatgtaagatgtgcctttgctctcctttgctttccaccatgattgtgaggtctcccyggctatgtgaaactgtgagtttaattacacctcctttttctttataatttacccagtcttaggtatttcttcacagcagtatgataacagactaatacag

SEQ ID NO: 236389 - DNA, 201 bp, Homo sapiens
ttcccacgctgttctcatgatagtaaataagtctcacaagatctgatggttttataaagggcagctccgcctgcacatgctctctcttgccagccaccatrtaagatgtgcctttgctctcctttgctttccaccatgattgtgaggtctccctggctatgtgaaactgtgagtttaattacacctcctttttctttataa

SEQ ID NO: 236390 - DNA, 201 bp, Homo sapiens
atgggaggtaattgaatcatggggatgagtttttcccacgctgttctcatgatagtaaataagtctcacaagatctgatggttttataaagggcagctccscctgcacatgctctctcttgccagccaccatgtaagatgtgcctttgctctcctttgctttccaccatgattgtgaggtctccctggctatgtgaaactg

SEQ ID NO: 236391 - DNA, 201 bp, Homo sapiens
ctcacaatcgtggtggaaggcagggagaagcaagtcatttcttacatggatggcagcaggcaaagagagagcttgtgcggggaaactcccattttttaaaytatcagatcttgtgagacttattcaccatcccaagaacagcagggaaaaacctaccgtcatgattcaattacttcccactgcaaccctcccgcaacatgt

SEQ ID NO: 236392 - DNA, 201 bp, Homo sapiens
cacatcttcctgtcttctgggccctccaaattgttccaacctctgcctgttacccagttccaaagtctcttccacattttttggtatctttttagcagcascccactataccggtaccaatttactgaattagtctgcttttgtgctgctaataaagacatacacgagactgggtaatttatacaggaaaaagatttaatg

SEQ ID NO: 236393 - DNA, 201 bp, Homo sapiens
tctgccaaataacctaaatcatctctctcaagttcgaagttccacagatctctagggcagggcctaaatgccaccagtctctttgctaaaatataacaagrgtcacctttgctccagtttccaacaagttcttcatctccatctgagaccacttcagactggatttcattgtccatatcactattagcataaaaatgctga

SEQ ID NO: 236394 - DNA, 201 bp, Homo sapiens
atgcttttaacagcatccaagtcacatcttgaatgctttgctgcttagaaatttcttctgccaaataacctaaatcatctctctcaagttcgaagttccamagatctctagggcagggcctaaatgccaccagtctctttgctaaaatataacaagagtcacctttgctccagtttccaacaagttcttcatctccatctg

SEQ ID NO: 236395 - DNA, 201 bp, Homo sapiens
cactattactgtattgctgtccatctcttttctaaggtttattattctttgttttatgaatctttgtgctccattgttggcttcatatatatttaagatcrttaaatcttgttgaattgaacccttcaatatcatatgatatccttctttgtctttttttttaccattgttgttttaaagtctgctttatttgatgtaaga

SEQ ID NO: 236396 - DNA, 201 bp, Homo sapiens
atggggtctctatctaccacagtaactcatacatacaagccaaaggagacttcatctcatttataatcagtgcagcaggtggaagagaattgggtggcccrtatagtggttcttaaagcttccactcggaaaagacacatttcatttgagctcaaatttcttcatttcatttcccagagcaagccccgtgttcatacttat

SEQ ID NO: 236397 - DNA, 201 bp, Homo sapiens
ctgcactcagaactattgatttaaattaagtttttacaattactgctaacaaagtgtaactgctttctccctagacttctttattatatgcttttacattwgtggttaatcaattattttctcctgaactgcccaggttttttaagttaaatgtcaggattgctctggagaacttcaaccttatctttatgttctacagca

SEQ ID NO: 236398 - DNA, 201 bp, Homo sapiens
agtgatcatctttgtcttgtttctgttctcaggggaaatgcttacaacttttccccattcaataagatgttggctatgggtttgtcatatatggattttaytattttgatataggtgccttctatgcctggttcttataaagggatgctgtagtttatcaaatgctttttctgcatctattgggataataatatagttttt

SEQ ID NO: 236399 - DNA, 201 bp, Homo sapiens
tttttttttttcattgtgttactgttttatagacccagtgagttttaagctttcaagaggttctattttggtgcgtattgggcttttgttttaaggcttaraaccccttttattaataacaatattgattaccatttatacaacctttacaatatgccagacactgtgtttttgcatatatattctcattttatccactta

SEQ ID NO: 236400 - DNA, 201 bp, Homo sapiens
gggaattattaatactttagtacatattgttgtcattttaaatcttggatctataatcttaactattactagtcacagcagaacagtttataaggcatttytgtgccacagcttatttatactttgagtagcagaatgaaaacaatgccaatctggtataatatgactgtttaattctgttggtaggaaagtcacacacac

SEQ ID NO: 236401 - DNA, 201 bp, Homo sapiens
cagtttttgctactagtgctcaaagagtaaaatacccttgagaaattgaggagttcatacaagtttcttagtcaaagtttttttggttgtaacacaaatcsgcttgaactgtgtaatggatgttaaaatgaggctgtttctgttctagtttcttctgaattcttaaaggctgatgacattaataggtacatcctaaagaga

SEQ ID NO: 236402 - DNA, 201 bp, Homo sapiens
tccctcagtcccagtgaggaacacattgggatgttaaaccaagaaacagaagctgctggctcctcattcaaagccaggtgtctcctgtatttggggggagwatgacaaatggtagagaaaactatggcccatcattagcacgtgagattatgagtctcaacaacctggcacattatctttttctttgtttgtctttaaata

SEQ ID NO: 236403 - DNA, 201 bp, Homo sapiens
tgtgtaatctcatcttttgtagacttctccaccacctatacatatattttttctagtttatatattgttctgctttttttaatccagatttaattttccartccatcaactgtttattctttgttagggagctaagattacacaagaatggaacacctcaaaatgtttatgcacgacagcacaaagtaggaaaaaaagaca

SEQ ID NO: 236404 - DNA, 201 bp, Homo sapiens
tatgtggtgtggtagagatcaaatttactttttcctaaacagttaacatttgccttatttctttttattcaatgattcatcttttcttaatgattaggaaygtcacatttgctaaatagtaaacgcattaatatttgcttgaaactataaattatgttactcttccctaatgattgcaatacctaattttatgtccacacc

SEQ ID NO: 236405 - DNA, 201 bp, Homo sapiens
cttataccttcataatttttattctatacatttagaaatatcatgtgtatctttagtttgtaatgttctgcatctaggtcctaaacatttcttaaataatwtcttcctacatatttcacatattttaaaattaggcatgagattttaaaatattttattgtctaactggtcaactgctgacatttataacagtgataaatt

SEQ ID NO: 236406 - DNA, 201 bp, Homo sapiens
ttatgacaaaaactgtaattacctttgcaccaacctaatatttaaaagacatatggaatagttggtttctaaagatcttagcattgtaaaatatcattaakaagtcaatattttcttttccttcaagtctctttactcctgccattcctccctttatttaatatattttcttttagataaaaagagaatgctgatgcacaa

SEQ ID NO: 236407 - DNA, 201 bp, Homo sapiens
ctaacacaaggggcttctgccgacatttcattgaccacagctgtgtcacaaggggccaattaaatcaaatcaaatccaattcagaggagttaagtagctcmagtgtttagcttgagtagaaaaaaataaagggcagaaaaaaaataaagtagaaaaaaaagtaaaggactttgaagtggatgttaaatgagccaatttaca

SEQ ID NO: 236408 - DNA, 201 bp, Homo sapiens
tgtatcagttaggttggtgcaaaagtaattgtggcttttgccattacttttatgacaaaaactgtaattacctttgcaccaacctaatatttaaaagacawatggaatagttggtttctaaagatcttagcattgtaaaatatcattaagaagtcaatattttcttttccttcaagtctctttactcctgccattcctccc

SEQ ID NO: 236409 - DNA, 201 bp, Homo sapiens
aagaacattattaaaagccatattcccaaatatgaattatacaaagatagattatgttacttgaaaaaaacttaaagatttctcaattttactttgaggawttataaaatgttattttgtggcaagtaagatgaagtacagtattatcatcaatcactgttgctatcttatatacaagatttttggaaacatccttttagc

SEQ ID NO: 236410 - DNA, 201 bp, Homo sapiens
gcattagaaattttgttcttatttataggtataagcatgttctaatcctgtacttttgttaaattatctattttattgactttcataatagtttttttgakaattttttttctgattagagtttaagtagattataatttttcactagaaagcatttaaaatgctgctcattttccatagttagtgtggcttgattatctg

SEQ ID NO: 236411 - DNA, 201 bp, Homo sapiens
aaattttgagaagaaagaaaacagtccacttaaagaaatctccctgctggaactggttctttatataccatatgcaattaagttattgccataggaagaamgtgggctgttttttgttctttcttcgttttttttcctcttacaggaatccccttttgatttaaggcaacaaacatttcccctccgttgtgtgtccattta

SEQ ID NO: 236412 - DNA, 201 bp, Homo sapiens
tagagaggctcaattaaacgaagagtaagcaggtaatatttggtagaattgaaacatacacaactttttttaaccctcagattgagcaggcctaatgtggwttattagctatacttatgtagtatatttgcataaaaaggtatcttaaatttgaaataaaaacaccacataatacacagctagttatgaaatatgtgtagc

SEQ ID NO: 236413 - DNA, 201 bp, Homo sapiens
aacaaaaagagctttaatactggcaaatggaaattttggattttaaatatctaaaatgcacatggaattttagagctggaaggatccttagaggtcagttrattcaactcattttacagatgaagaaaccaaaatccaaagaacaagccatttgtccaaagtcacacagaaaacattttttcttaacgtttgagtataaag

SEQ ID NO: 236414 - DNA, 201 bp, Homo sapiens
gatcctttgtatttctctgatatcagtggtaagtcagttttaccatttctgactgtgcttatttgaatcttctttcttttttgcttggcaaatctacctartggtctatcaatcttgtttctcctttcaaataaccaacttttcatttcattaatgttttgtatcactttcttaatctcaattacattcacttctgctctt

SEQ ID NO: 236415 - DNA, 201 bp, Homo sapiens
ctaatttactataataataatagctaatgtttattgaactcataccacatgccaaggattattgcattgctcttatgtattaactcatttactcataaccrcagattgagacaggtagtcttgttatcccagttttacagatcaggaaactgaagcacagagaaactaagaaatttgcccaaattcttatacctgataagt

SEQ ID NO: 236416 - DNA, 201 bp, Homo sapiens
tctttttggatgtgctgttggaatcagtttgctggttgtttttttgaaaatttttacatccgtgttcatcagaaatattgaactgtagttttcttttttayggtgtccttacctgattttggtactgggtgatactggttttgtagaatcagttagatgagattccctcctccttgatgttttggagtagtttcaataaga

SEQ ID NO: 236417 - DNA, 201 bp, Homo sapiens
atactttttctcattctgtagattgtctgtttactctgtttattatttcttttgctgtgcagacggtttttaggttacgtctcactggtctgttttgtttycattacatttgcctttgaagtcttagtcataaattctttgcccaagacaatgtcaagaagaattcttcctagtttttttttctggaattattttatagtt

SEQ ID NO: 236418 - DNA, 201 bp, Homo sapiens
ccagcatgtagttgcaattttggtttgtatttttacctaagaatctttcaaaatagtgctttttagtggcaaagaatttcatgtttataatttaattattagtttaaacttttttatattatcttaaacactgtggcctgtgtattatccttgtattttagaatgtattgagttgttgtcatgtaataatgcatagtaaaa

SEQ ID NO: 236419 - DNA, 201 bp, Homo sapiens
tccagcatgtagttgcaattttggtttgtatttttacctaagaatctttcaaaatagtgctttttagtggcaaagaatttcatgtttataatttaattattagtttaaacttttttatattatcttaaacactgtggcctgtgtattatccttgtattttagaatgtattgagttgttgtcatgtaataatgcatagtaaa

SEQ ID NO: 236420 - DNA, 201 bp, Homo sapiens
ttccagcatgtagttgcaattttggtttgtatttttacctaagaatctttcaaaatagtgctttttagtggcaaagaatttcatgtttataatttaattattagtttaaacttttttatattatcttaaacactgtggcctgtgtattatccttgtattttagaatgtattgagttgttgtcatgtaataatgcatagtaa

SEQ ID NO: 236421 - DNA, 201 bp, Homo sapiens
ttagaaaaatcacatcattttcttcatctgtttactttgtaaagttgttctgattaaacaataaaatggttttttgagaattctaatattttaataatattgttgaatattaattacgattataattggaaaaattctgtaaatgctcttttttaagaagatatggcatacttgatgctttttgcgttattctgaagcaat

SEQ ID NO: 236422 - DNA, 201 bp, Homo sapiens
cttagaaaaatcacatcattttcttcatctgtttactttgtaaagttgttctgattaaacaataaaatggttttttgagaattctaatattttaataatattgttgaatattaattacgattataattggaaaaattctgtaaatgctcttttttaagaagatatggcatacttgatgctttttgcgttattctgaagcaa

SEQ ID NO: 236423 - DNA, 201 bp, Homo sapiens
tcttagaaaaatcacatcattttcttcatctgtttactttgtaaagttgttctgattaaacaataaaatggttttttgagaattctaatattttaataatattgttgaatattaattacgattataattggaaaaattctgtaaatgctcttttttaagaagatatggcatacttgatgctttttgcgttattctgaagca

SEQ ID NO: 236424 - DNA, 201 bp, Homo sapiens
aatcaaatccaattcagaggagttaagtagctcaagtgtttagcttgagtagaaaaaaataaagggcagaaaaaaaataaagtagaaaaaaaagtaaaggwctttgaagtggatgttaaatgagccaatttacataactaccatagaaagaatccaaactttgtccctgattttaatggcatgcatcaaattattctgcat

SEQ ID NO: 236425 - DNA, 201 bp, Homo sapiens
agcctagcccggccgcccccgccacggaggcagcgcagtggcgggactcccagcctaccccgcctagtgagccgcgccgcgccaccccacccgccacccascagtccgatggggccgcagcggcggctgtcccctgccacggccgccctgctctggggcttcctgctccagctgacagccgctcaggaagcaatcttgcat

SEQ ID NO: 236426 - DNA, 201 bp, Homo sapiens
attttattatggtgggatgaactgttacatattttgcattgtagtgaagtggggacaatgtgaataattacatttcaatgcccatgattgtgagattgatrttgatgaatgaactaaacatttcaagattttttcccaagaattttcatgtcagcaatgtgcaaattgggtgaactttaacaaaaagagctttaatactgg

SEQ ID NO: 236427 - DNA, 201 bp, Homo sapiens
ttgataaggagtgatttgcctaaatcacaagagggaggatgacattattgtctatgtgtaaggattcacatgtaaacactgagtagattggaggtatgtayggagaggactggagggagtcaatgaaatttcacatcacaggagtgcttatgtcttctgacatgattttaaatgtatatttatttataaggatgataaact

SEQ ID NO: 236428 - DNA, 201 bp, Homo sapiens
aaggatgataaacttgtttactagttaatgtacactaattcattagcagaacatttaaatataatttttggatgatctttggagttttattaaaaacttgrtcacttgatatttgaattatgagtaaaacaggagaaaaactttgatgtctaggatttagagctgaatgcatggtatatctttaaactgcagaatcttgga

SEQ ID NO: 236429 - DNA, 201 bp, Homo sapiens
ctatactgcaagaaagtttgttctattatttatgagattttacaaaaaaaaaaaaaaacccttattttccttcaacttcaaaaattgggtgtcaatgtcayaaaattatctgttaatgagatttttcagataatggaaagcacacgttaacttgatgaaatgtgagctatcttaaaagtatatttttgttcaaaacataca

SEQ ID NO: 236430 - DNA, 201 bp, Homo sapiens
ttccttcaacttcaaaaattgggtgtcaatgtcataaaattatctgttaatgagatttttcagataatggaaagcacacgttaacttgatgaaatgtgagmtatcttaaaagtatatttttgttcaaaacatacaggcctaaaaatcctgtggcaacgtagagataaaagacttcctctgccaaaatatgatggagaattg

SEQ ID NO: 236431 - DNA, 201 bp, Homo sapiens
ttatttatgtgtaaagttggattatgggaggcaaataatcttttgtgtctcattcacgctcaagtaaatggcagtggagtagggatgtaaaccaaactgcrtgataagccctgcaagtcattctgatgtatcaattttgcttactggtgtttaattgcagacattgtcatattaacgcaaccacaaatatattatggagta

SEQ ID NO: 236432 - DNA, 201 bp, Homo sapiens
tttcagataatggaaagcacacgttaacttgatgaaatgtgagctatcttaaaagtatatttttgttcaaaacatacaggcctaaaaatcctgtggcaacrtagagataaaagacttcctctgccaaaatatgatggagaattgatatttcctctaattgtctgaaaagaggaaaaacagagacacagtgtgatcccaaac

SEQ ID NO: 236433 - DNA, 201 bp, Homo sapiens
tctctaatataatgtattaatcaattcttttaattttaaatatactaaataaagcctcaaaacttgtcatctattttctaaatactgaagtaatagacattggaaatctattgtcactgggacctgggaccacttcaaagattctgctctaagatcatactcattttatagactcatttttcaagtctgtactcaagtttt

SEQ ID NO: 236434 - DNA, 201 bp, Homo sapiens
aagtgatgcctaacgaaagataaataacatcagtaaaggcttaatttttctaacattaattaaatgtttaacttgtgctaaaattagcacaaaaatgattagattcatttaattgttttttatatcattatgaacgctttccaaaagtataccatttaactgatgactataaaaattcctattctctaatataatgtatta

SEQ ID NO: 236435 - DNA, 201 bp, Homo sapiens
tcacatggtagttctattttaaatttctttaggaactctcatactgttttcctcaatagctgcaccagtctacattcttaccagtagtgtacaagggttcycatttatgcacacccttaccaatttttttaatctcttgactttttaatagccattctatgtgaggtgatattcatagtggttttaatttgcatttcccta

SEQ ID NO: 236436 - DNA, 201 bp, Homo sapiens
caattagaaacaaaatgggagacattacaaccgataccacagaaatacaaaagatcatttagggctactatgaacacctttatgcacacaaattacaaaawctacaggagatggataaattccaggaaatatacaactgtcctaggttatatcaggaagaaatagaaactctgaatggagcaataacaagtagtgagattg

SEQ ID NO: 236437 - DNA, 201 bp, Homo sapiens
acatggacacaggaaggggaccatcacacaccggggcctgttgtggggtgaggggaggggggacggatagcattgggagatatacctaatgctaaatgacragttaatgggtgcagcacaccaacatggcacatgtatacatatgtaacaaacctgcacgttgtgcacatgtaccctaaaacttaaagtataataataata

SEQ ID NO: 236438 - DNA, 201 bp, Homo sapiens
cagctttttcttcatgtactattttccaggaagagataccctttcttctgactcccttccccatttcctaccctcttctctagcctgattcactcccactkgctctttgagatgtggttaaaatatgttttttgagagtattgccctttctctcccaggttctgttagctggcctccactagagtcctctaactccctgaa

SEQ ID NO: 236439 - DNA, 201 bp, Homo sapiens
ttctcactcataggtgggaattgaacaatgagaacacatggacacaggaaggggaccatcacacaccggggcctgttgtggggtgaggggaggggggacgratagcattgggagatatacctaatgctaaatgacgagttaatgggtgcagcacaccaacatggcacatgtatacatatgtaacaaacctgcacgttgtgc

SEQ ID NO: 236440 - DNA, 201 bp, Homo sapiens
tcagctttttcttcatgtactattttccaggaagagataccctttcttctgactcccttccccatttcctaccctcttctctagcctgattcactcccacyggctctttgagatgtggttaaaatatgttttttgagagtattgccctttctctcccaggttctgttagctggcctccactagagtcctctaactccctga

SEQ ID NO: 236441 - DNA, 201 bp, Homo sapiens
tgacccagccatcccgttactgggtatatacccaaaggattataaatcatgctgctataaagacacatgcacacgtatgtttattgcggcactattcacartagcaaagacttggaaccaacgtaaatgtccaacaacgatagactggattaagaaaatgtggcacatatacaccatggaatactatggagccataaaaaa

SEQ ID NO: 236442 - DNA, 201 bp, Homo sapiens
ggtaacatttaacaactgtaatctattcaagaaatctggcctacctctcttcaatttatatttataaaacaaatacaaaaacaaaaactgaggcctaggakagtcaactatttgcccaaggtcattcagttaattattggaagaaaaaggattaacacccaggttccataatatatgatacagtattatttccttgtcctc

SEQ ID NO: 236443 - DNA, 201 bp, Homo sapiens
gtggaagtcagtgtggtgattcctcagggatctagaactagaaataccatttgacccagccatcccgttactgggtatatacccaaaggattataaatcaygctgctataaagacacatgcacacgtatgtttattgcggcactattcacaatagcaaagacttggaaccaacgtaaatgtccaacaacgatagactggat

SEQ ID NO: 236444 - DNA, 201 bp, Homo sapiens
ttcacatagtcccatatttcttggaggctttatttctttttattctttttcctctaaacttctctgctcatcatcactggccatcagagaaatgcaaatcmaaaccacaatgagataccatctcacaccagttagaatggcgatcattaaaaagttaggaaacaacaggtgctggagaagatgtggagaaataggaacact

SEQ ID NO: 236445 - DNA, 201 bp, Homo sapiens
agccttcatgacattcagggccccttattcttaactgcatcttctattttgggcattgtgctcttgccatctaacaggaaaacaactttcagtgctgccaycttttgaacagcagagatttctagagattagaaaattactaaatttaaatatacatagttttaaaatatgatattttctacccatgcattcaaatatatt

SEQ ID NO: 236446 - DNA, 201 bp, Homo sapiens
atcgaagagtagaaagcatgtgctaactgatctagactcttgtgacagctgtatatctacccagctgcgtgaccttaggtgtatcaaaatctcaatttccyagactacaaatgagtaagagggatggaggccccttacagttttaatattctagaattctaaaggtgtgtaactagagcaaattttattttctaaaatttg

SEQ ID NO: 236447 - DNA, 201 bp, Homo sapiens
ttggcctgccttgctagatgggggagttctcctggataatatcctgcagagtgttttctaacttggttctattctccccatcactttcaggtacaccaatsagacgtagatttggtcttttcacatagtcccatatttcttggaggctttatttctttttattctttttcctctaaacttctctgctcatcatcactggcc

SEQ ID NO: 236448 - DNA, 201 bp, Homo sapiens
aatattgttatatctgaatttgatcctgtcattatgatgttagctggttattttgctcgttagttgatgcagtttcttcctagccttgatggtctttacawtttggcatgtttttgcagtggctggtactggttgttcctttccatgtttagtgcttccttcaggagctcttctagggcaggcctggtggtgacaaaatct

SEQ ID NO: 236449 - DNA, 201 bp, Homo sapiens
gttaatattgttatatctgaatttgatcctgtcattatgatgttagctggttattttgctcgttagttgatgcagtttcttcctagccttgatggtctttrcaatttggcatgtttttgcagtggctggtactggttgttcctttccatgtttagtgcttccttcaggagctcttctagggcaggcctggtggtgacaaaa

SEQ ID NO: 236450 - DNA, 201 bp, Homo sapiens
aacagaattgaagggagaaataacagcaatacattaacaataggagactttaaggccatattttcaaaaatggatagatcatatggagagaaaattaatayggaaatagaggacttgaacaactctctagacaaaatggtcctaacagacacatacagatcattctatccaaaagcaacaaaatgcaaatttttctcaagt

SEQ ID NO: 236451 - DNA, 201 bp, Homo sapiens
gcccaaatttgagcctcttctccattcatattaagcagatgaattggactaaataaatttcaagtccctatgattttgttggaggaatttgactttccacrctatcagtggctgaattggcaactatttccatttttccctgaaatgatgacgttctcatttcatcaactcaccatagaaccaagttcttctgaagctaca

SEQ ID NO: 236452 - DNA, 201 bp, Homo sapiens
tcttactagaaacaaacatatcagtaagggtcaggatagaacagaaatatctgaaactgaaagtaaaaggggtgatagttaacctatatgggctctcaggstagtttctaggggtagctggtattcactatggaatagctgaatgaatgacaaagcatacagcaagtaatgataatttttacttcttttcaatatttgtat

SEQ ID NO: 236453 - DNA, 201 bp, Homo sapiens
tgctcactacttttcttgtagatctccaatagtcgattagatggaagcagatttttaaaaactatatgggaattacatgttttagaaaaaaatcaacattrtcctatggtaagatctcatttgctgtcatgacttggagttgcatgctccagagtttgggcggaattggccgtatcttctttccgtatcttccaggaaaga

SEQ ID NO: 236454 - DNA, 201 bp, Homo sapiens
gatgctaccatatatcaaatacctaaaataacctaataactcccctacttgactcccagggattccataaaggaaccaatttcagatttttaaaaatacayttaaaacttatgtaatagagaataagcataaaaatattggcaaggcatagtaaaataaaggatatatcaagtatttaaattttgctcttagagaaagaca

SEQ ID NO: 236455 - DNA, 201 bp, Homo sapiens
agcaacccttggagctgtctctgttaaaggacataaattataaaaatgctggaatttctgtaaatcaacaacttgtttatccagccttatcagggagtgayctgtggcccataattaaattttccagataactaaagctgatcatttgaagcactaacactttttatgttagccttttttttttttttttttttttgagac

SEQ ID NO: 236456 - DNA, 201 bp, Homo sapiens
atgtgtactgcaagcaggtacagccaggctggggccctgggagaggccagcagaccaaggggtgcccaagatggattggccccattttttgggcaagatgrccttgcgtagttcaggtctgacagttcccctagggctgtcatcttgttgttagtttgttattatgcagacttgattgtgtgggtactttttagtgtcact

SEQ ID NO: 236457 - DNA, 201 bp, Homo sapiens
gatcaaaaggtgcaaagtttcacttacaccagagaaataagttttaatgatctattatactgcatggtgaccacaataaataatacatttcaaatttgatraaataatttgataaaatttttaaaatgggcagaggctctaaacacttctcaaaggaagacatacaaatagctatgtgaacagtatttgaaaaactgctca

SEQ ID NO: 236458 - DNA, 201 bp, Homo sapiens
aaaatttttaaaatgggcagaggctctaaacacttctcaaaggaagacatacaaatagctatgtgaacagtatttgaaaaactgctcaacatcactaatcrttaggggaatacaaaccaaaaccaccatgggatgtcatctcacacaactgtttgatgtgtgagattttatctcacatgactgttatcaaaaagatgaaag

SEQ ID NO: 236459 - DNA, 201 bp, Homo sapiens
atgttatttcctatagagtaagtcacatgtgcttataaccttttaaaaaatgtttttgatacatggatgttgggtaaactacaaatctaacattaaaataktttacttataggcaaaggtaaacattaaacagaatataactgctctaagatcagtttaggccacatgctaataagcttatttcaagaatgtagtttttag

SEQ ID NO: 236460 - DNA, 201 bp, Homo sapiens
ttaaagagtctttaaggttctcagtatatgtaaaaatgaaagctgggtgtggtggctcacacctgtaatcccaatactttgggaggccaaggcaggaggawtgctagagcccaggagtttgaagttcaagaccagtctgggcaagatagcgagaaactgtctactactcaggaagctgaggcaggaggattcctttgagcc

SEQ ID NO: 236461 - DNA, 201 bp, Homo sapiens
attattagggaataaatcaaacatacttcttattaatcccatatatattttataatgatgtcaaaaaccatttaaatgacatgtctggttaaccaaaaatrattatgtcattcattcagggatttattaagaaaataaaacattagaaaatctttagaaagtacatcagcatgtggtacaattatagcaatactttctttt

SEQ ID NO: 236462 - DNA, 201 bp, Homo sapiens
atacctgattaaatcacatggctctcttttcctttaagaagtggcacgaatccctctgtaccctcatgcatattcatgccagttgaaaggaaaggtcaccragtctcctcttatctgggtgtattgtcagaatatggaaaaacaggactctgacaggcagaggcccaggttgcttattgcatttaattagagggtcattgc

SEQ ID NO: 236463 - DNA, 201 bp, Homo sapiens
ctgcttttaggctgattgacatacctgattaaatcacatggctctcttttcctttaagaagtggcacgaatccctctgtaccctcatgcatattcatgccrgttgaaaggaaaggtcaccaagtctcctcttatctgggtgtattgtcagaatatggaaaaacaggactctgacaggcagaggcccaggttgcttattgca

SEQ ID NO: 236464 - DNA, 201 bp, Homo sapiens
ttgtcatcaacattacaatcactagatctgattagtctacctggtaactgataatcagtgccagagtctagaacaaacctctcagatcaccttttttctcrgatgttaagatacacttaatacctagcttctgcttttaggctgattgacatacctgattaaatcacatggctctcttttcctttaagaagtggcacgaat

SEQ ID NO: 236465 - DNA, 201 bp, Homo sapiens
ctactcttttataaaacatatgtaatgtttggctccacagagccttaaatacatcagtttcttattcagatacttgtcactttggttcttataaaaaaaaatagaaatgctttaaaaataataacttgtgtcttgcatctataacttgcctgagcaatgatttggtccttagagatacaaatataattcatagtaagaaat

SEQ ID NO: 236466 - DNA, 201 bp, Homo sapiens
atttatttatgcttaaatgtaaatagtatttgctatgattaaactgctaacaatgtagtttcagaaatatctacttttaaatatctatcttctgtttttawatttgtttagacaagttttttttttttttttttttactttcaatgttttgggaaaggattgcgctcagatgaaaacattcttagtcataaaagtttactt

SEQ ID NO: 236467 - DNA, 201 bp, Homo sapiens
agttttcactaataaagtccgtcttgtaacatggacttccaggacaatactggaccttgttaaacacagaatgaagtcaaccagaaagtttgcaacaaaarcaaaactgaaattgcagttcttgacaatatacgtttctttgttcaactgaattttttgaatttattgctgactctatgtttagggtgtgtgtgtgtgtgt

SEQ ID NO: 236468 - DNA, 201 bp, Homo sapiens
atatttcaaacctgttttctctccttttgctttgatgccatgctcaccaagcaatttcaagttatttaacttccaagataattttccatgtctaccataasatcgcctgcaaatacctcccccagatatattggtctgttggttggtagcattagtcagaggggctgggtttaattttgaaacagcaggtttccattatat

SEQ ID NO: 236469 - DNA, 201 bp, Homo sapiens
actagaagttctgtctctgagaagaacaaaatggacaaacctttagctagaatgactattaaaaaatagggaagactataattactaaaattataaaaaartgggggcaatattttcaattttatggaggttgaaaggattataagagtgttgtaaatgaatatatgccaacaaattggaataatgtagttgaaatagaca

SEQ ID NO: 236470 - DNA, 201 bp, Homo sapiens
gcagagtgaataacataaggcacagagtagcccaaagaaccggaaatttggtagaaatttaacggaactattcagattattatgagttagatttcatcatwatttggagaatatgtatatttcaaacctgttttctctccttttgctttgatgccatgctcaccaagcaatttcaagttatttaacttccaagataatttt

SEQ ID NO: 236471 - DNA, 201 bp, Homo sapiens
taaaaagaaactaccaatatcttttatggtgaattttgagacaaaaatcctcaacaaaatactagcaaatcaaaagcaacagcatattaaaaggattatayaccataaccaatgggatttattcctggaatgtaaggataattaactcatcaaatgtttgcatgctttttgttgccaggtactgtgctaaggccttgaaat

SEQ ID NO: 236472 - DNA, 201 bp, Homo sapiens
taaattaaactataggaagaacaactataaagtattgagattaacctacttcttccaacacacccgtaagcacgtgcagaataagaagtatcagacaagtycagcccttcagacaagccccctagggagactataactttgtgccagtcacacttcacacttctaaatactattttagaacttataaagctagttttccag

SEQ ID NO: 236473 - DNA, 201 bp, Homo sapiens
aaaccaccaaaataaggcgtaaattaatgaagaggttaagatgagagtcaagaaatggaggctttaacacatgagacatgtaaattgaatctccaaaataytggtgaagggagctccctaaatgataactgcacaggcctaatgaaaaaatttgttcagattcgagcacattggcaggctttgggagagatgtctccaaga

SEQ ID NO: 236474 - DNA, 201 bp, Homo sapiens
gtttaagtagattataatttttcactagaaagcatttaaaatgctgctcattttccatagttagtgtggcttgattatctgacaaatcctgccagaagccygtaggtctgatataccttatataacaacatctgtattattattattatagcagccattttataagcagataggaatatttaaataatcattatcagataa

SEQ ID NO: 236475 - DNA, 201 bp, Homo sapiens; identical to SEQ ID NO: 45247

SEQ ID NO: 236476 - DNA, 201 bp, Homo sapiens
caatgaggtcaatgaagaaataggaatttaaaaaaccagaactctggagtttaagaatacagtgaatgaaatgaaaaatgcaatagacagtgtcaacagcwgacttgatcaagcagaagaaagaatctgtgaactctaagacaggtcaattgaaagtatccagtcagaggagcaaaaggaaaaaagaatgaagaaagtcta

SEQ ID NO: 236477 - DNA, 201 bp, Homo sapiens
ttaatgcagaatagaccaagctgaggaaagactcttcatggctcaaagactgattctccaaaatcaaccaatcagacaaatacaaagaaaaaacaatgaayaagaatgaacaaaaccttctagagatatgggattatgtaaagagaccaaatctatgactcattgacatccttgaaagagggagagaaagcaagcagcatg

SEQ ID NO: 236478 - DNA, 201 bp, Homo sapiens
ttgtgttctgaatcacactccgctagtttgggaggtaacaataatgagcaggctcagaattcctaggacttagatattgcttctaaagaaataaaagttaycaatagtaagtttacagtgtaaagatattcaagagctactaaatccatttgttccatactgaacctacagtttttaaaccaagaaatcagtaagtgagaa

SEQ ID NO: 236479 - DNA, 201 bp, Homo sapiens
catataaagtgctaccaagatctgccaatgaaagacttttgaagtggaaattcatccttgtaataatcctgttatctgtaggctgacctcaagccttcatracattcagggccccttattcttaactgcatcttctattttgggcattgtgctcttgccatctaacaggaaaacaactttcagtgctgccaccttttgaac

SEQ ID NO: 236480 - DNA, 201 bp, Homo sapiens
agttttacaattttttacaacctttagttactaaatctgatttttgtgtatacttttcaaatctttctttaatgcagtgtcttaaaacaaacataaatgcrcaagtccagcttgatcagtttttcagtagttttccagcctttcttgattactaaaaaataaaaggaaagaaaattttgagaagaaagaaaacagtccact

SEQ ID NO: 236481 - DNA, 201 bp, Homo sapiens
ctgccaatgaaagacttttgaagtggaaattcatccttgtaataatcctgttatctgtaggctgacctcaagccttcatgacattcagggccccttattcytaactgcatcttctattttgggcattgtgctcttgccatctaacaggaaaacaactttcagtgctgccaccttttgaacagcagagatttctagagatta

SEQ ID NO: 236482 - DNA, 201 bp, Homo sapiens
tgggtgctttctggagaaatgcagagctgtgaccacccacagtattcaggcaaagttggggcattaggcattaggagcccaagtcagcaagccctgccggrtgaggagcagtggggataggaggtcacatagtctgcagcctgggtgcttcctggagaaactcagagccatgaccacccaggttcaggttggggtggggcc

SEQ ID NO: 236483 - DNA, 201 bp, Homo sapiens
tgaaagacttttgaagtggaaattcatccttgtaataatcctgttatctgtaggctgacctcaagccttcatgacattcagggccccttattcttaactgyatcttctattttgggcattgtgctcttgccatctaacaggaaaacaactttcagtgctgccaccttttgaacagcagagatttctagagattagaaaatt

SEQ ID NO: 236484 - DNA, 201 bp, Homo sapiens
ttagggacataaagatggcaacaactgacactggggactactggcggggagtagatgagggaagggttgaaaaaccattaggtactacgctcagtacctgrgtgatgggagcaatcatacctcaaacctcagtatcacacaatatacccaggtaacagacctgcacatgtaccccctgaatctaaaataaaagttgaaatt

SEQ ID NO: 236485 - DNA, 201 bp, Homo sapiens
aactttcagtgctgccaccttttgaacagcagagatttctagagattagaaaattactaaatttaaatatacatagttttaaaatatgatattttctaccyatgcattcaaatatattctaactttaaaatcctgtaaatacttatatttgtaatgattttacttatatgatccaattaattggcaagaatatgtggtgaa

SEQ ID NO: 236486 - DNA, 201 bp, Homo sapiens
gtgcttctgtagggttttctttatatttctttatatttacagtagttttaatatgtgttgcacttttaattaataaaaatatattttcttctattaaaacycaaatgagtttacaaataagggaaatattcttttttgtctaacatatatcttacttgaacagtttagatacatttgttactcttctttttacaataaata

SEQ ID NO: 236487 - DNA, 201 bp, Homo sapiens
aacttactagcaactatcgtaacttaccaaattatttcctatggcagtacattaagggtaaaagtcacattgtttatctttgtatccattattacacaatstcacctgtacatcgaaggtgctctatgagtactgaattgaactgcactaatttaaatcttaatgaactagatctaattgccctttgattccatgtaacat

SEQ ID NO: 236488 - DNA, 201 bp, Homo sapiens
cagcagagatttctagagattagaaaattactaaatttaaatatacatagttttaaaatatgatattttctacccatgcattcaaatatattctaactttwaaatcctgtaaatacttatatttgtaatgattttacttatatgatccaattaattggcaagaatatgtggtgaaagattttttacatatttgtattgttc

SEQ ID NO: 236489 - DNA, 201 bp, Homo sapiens
gcttttgtgctgctaataaagacatacacgagactgggtaatttatacaggaaaaagatttaatggacttagggttccacatggctggggaggcctcacawtcgtggtggaaggcagggagaagcaagtcatttcttacatggatggcagcaggcaaagagagagcttgtgcggggaaactcccattttttaaattatcag

SEQ ID NO: 236490 - DNA, 201 bp, Homo sapiens
aattttgaagaacacaggcctgaataggctagagaaaattttaataattgcttacaagcacatgaaggattatgatgttgatgcattcatgtaacgttcarcacatcttcactgagagccaattctatgctaggcttaattcacagacaagccttgcccttttagagcactctatttggtaactacaacttcattgcagta

SEQ ID NO: 236491 - DNA, 201 bp, Homo sapiens
ataatttttcactagaaagcatttaaaatgctgctcattttccatagttagtgtggcttgattatctgacaaatcctgccagaagcctgtaggtctgatayaccttatataacaacatctgtattattattattatagcagccattttataagcagataggaatatttaaataatcattatcagataatcaaatctaacat

SEQ ID NO: 236492 - DNA, 201 bp, Homo sapiens
tgtactgttgacctcaagcaatccacctgccttggcctcccaaagtgctgggattacaggcgtgagccaccatgcctggccactctgttttgttttgtttygttttacctttttttaaaattttttatggagattggctcttgctgtgttgcccaacctggtctcaaactcctgggctcaagcagtcctcctgtcttggcc

SEQ ID NO: 236493 - DNA, 201 bp, Homo sapiens
cattcaaatatattctaactttaaaatcctgtaaatacttatatttgtaatgattttacttatatgatccaattaattggcaagaatatgtggtgaaagaktttttacatatttgtattgttctgtgtgagacatctattgtaagcattgcttcaggctcttatttttgtctgccttccaggatttgctggcccaagtgct

SEQ ID NO: 236494 - DNA, 201 bp, Homo sapiens
tattctaactttaaaatcctgtaaatacttatatttgtaatgattttacttatatgatccaattaattggcaagaatatgtggtgaaagattttttacatrtttgtattgttctgtgtgagacatctattgtaagcattgcttcaggctcttatttttgtctgccttccaggatttgctggcccaagtgctgtgtgctaga

SEQ ID NO: 236495 - DNA, 201 bp, Homo sapiens
ttaaaaaataccattaacactgggaaatcaacatatctaaaagacaattgcttgggaagagcattaagcagtgttggcagaatcagtagcttatcaaccckattttctagtctattttgttccatgtcctacaaccctcttttattcaagaaaagctcaagaataaagaaattaacattatcactcttttgttcacttgca

SEQ ID NO: 236496 - DNA, 201 bp, Homo sapiens
cttatatgatccaattaattggcaagaatatgtggtgaaagattttttacatatttgtattgttctgtgtgagacatctattgtaagcattgcttcaggcycttatttttgtctgccttccaggatttgctggcccaagtgctgtgtgctagacttagtgtcagtcagaaaagggagggaaacttgccgttgagccagaca

SEQ ID NO: 236497 - DNA, 201 bp, Homo sapiens
gaacagagatgaagaatgtcattgacaaacttatcacataaacttgtcacacccaaggaaagaatccattaacttgaacatagatcagagaaattacccamactgaaacacagagagaaaaaagagtgaaaaatacagaacagagcatccaagacctgtaagacaacctcaaactgtcaggcatatatgtaattggaatcc

SEQ ID NO: 236498 - DNA, 201 bp, Homo sapiens
tccaccccctgaacaaaccactcgagccccttttagctatgactggagtggctggaacacaggaaaccaagtccctaggctgcacagagcagggagccctrggcccagctgacaaaaccatctttcccttctaggcctccaagcctgtgatgggaggggctgccatgaagacctctgacatgccctgatgacattttcccc

SEQ ID NO: 236499 - DNA, 201 bp, Homo sapiens
aacggggcggggcctgaggagaggggaggagtcaggcctggcgtcctgaacccaccggtccctttgcgctcttccgcaggttcttctgagcaacgcgctgkcgcggctcagaggcttcaaagatcacttcaccttttgccaacagctaaacatcagcatctgcccgctcagccagacggcggcgcgcgtgagccgggacgg

SEQ ID NO: 236500 - DNA, 201 bp, Homo sapiens
ctaggccgggcacggtggctcatgcctgtaatcccagcactttgggaggctgaggcgggcggatcatgaggtcaggagatcgagaccatcctggctaacayggtgaaactccgtctctactaaaaaatgcaaaaaattagccgggtgtggtggcgggcacctgtagtcccaggtactcatgaggctgaggctggagaatgg

SEQ ID NO: 236501 - DNA, 201 bp, Homo sapiens
aatgtttttggaggactatacaggagtgaaattacgtgggctgcgaagctgggtcagcagagagaacaacgcatctcgagggggcttggccttaagtgccrtgaccacactaggaccagccaggggtgtttctgtgcaaagtgggtgggtttggagaaggcctgctgtgacccatgccctctctgacccccgcctccccag

SEQ ID NO: 236502 - DNA, 201 bp, Homo sapiens
ctcaggtgaaagtgcacctccattcattataaaaattgtgtctaggccgggcacggtggctcatgcctgtaatcccagcactttgggaggctgaggcgggyggatcatgaggtcaggagatcgagaccatcctggctaacacggtgaaactccgtctctactaaaaaatgcaaaaaattagccgggtgtggtggcgggcac

SEQ ID NO: 236503 - DNA, 201 bp, Homo sapiens
acctgggaggcggagtttgcagccagctgagatcgtgccactgcactccagcttgggcgacagagtcagactcagtctcaaaaaaaaaaaaaaaaaaaaaagtttattgagcacctactgtgtacattgggggacacagctcgtgcaaaacaaacatccttttcctcacataggtcactttcttgttcctccaccttgctc

SEQ ID NO: 236504 - DNA, 201 bp, Homo sapiens
aacctgggaggcggagtttgcagccagctgagatcgtgccactgcactccagcttgggcgacagagtcagactcagtctcaaaaaaaaaaaaaaaaaaaaaagtttattgagcacctactgtgtacattgggggacacagctcgtgcaaaacaaacatccttttcctcacataggtcactttcttgttcctccaccttgct

SEQ ID NO: 236505 - DNA, 201 bp, Homo sapiens
tcccagcactgctatttcaccaaaacagctcttttatgtcatttatttttatttattttttctttttaaaattttatttatttatttatttattgagacaagagtcttgctttgtcacccaggctggagtgcagtggcatgatcttgcctcatggcaacctctgcctcctgggttctagtgattctcctgcctcagcctcc

SEQ ID NO: 236506 - DNA, 201 bp, Homo sapiens
ggtacaggcatcccctaacacgttctccttatttttaatttttttgagacagtcttactctgtcacccaggctggagtgcagtggtgcgatctcggctcamtgcaacctctgcctcctgggttcaaacaagcacatccagctaatttttgtatttttgcactggggtctcatcatgttgtccaggctggtctcaaactcct

SEQ ID NO: 236507 - DNA, 201 bp, Homo sapiens
caagaggtggagcttgcagtgagctgagattgagccactgcactacagcctgggcaacaaagtaagactccgtcccaaaaaaaaaaagttgtgttttttgktaacaatctgacagtcctgcaaaacgattattcctgccctataatgtcacacttagtttttccacaaaagtttttaataataaagttggaattattgtaa

SEQ ID NO: 236508 - DNA, 201 bp, Homo sapiens
acaaatttgaagtgtcatggtgagctgtgtggactctgggtcagcaggtccctaggcttatgacctcctgtcacaactcccctcattgtgtgtccttgagyaagtgacctttgtctgagcctcagtgtcctttcctgggactgttatgaggacccagtgtgatcatgggtgacacttgacagacatgtcagagttggtggc

SEQ ID NO: 236509 - DNA, 201 bp, Homo sapiens
ggccgggcacggtggctcatgcctgtaatcccagcactttgggaggctgaggcgggcggatcatgaggtcaggagatcgagaccatcctggctaacacggkgaaactccgtctctactaaaaaatgcaaaaaattagccgggtgtggtggcgggcacctgtagtcccaggtactcatgaggctgaggctggagaatggcgt

SEQ ID NO: 236510 - DNA, 201 bp, Homo sapiens
acttagagacggagtctcgctctgtcgcccaggctggagtgcagtggcgtgctctcggctcactgcaacctccgcctcctgggttcaagtgattcttctgyctcagcctcccaagtagctgggactacagtcgcgtgccaccacgcccagctaatttttgtatttttagtagacagggtttcaccatgttggccaggatgg

SEQ ID NO: 236511 - DNA, 201 bp, Homo sapiens
cattctcacctcttctgcctctctcttccacattttatttatttacttagagacggagtctcgctctgtcgcccaggctggagtgcagtggcgtgctctcsgctcactgcaacctccgcctcctgggttcaagtgattcttctgtctcagcctcccaagtagctgggactacagtcgcgtgccaccacgcccagctaattt

SEQ ID NO: 236512 - DNA, 201 bp, Homo sapiens
ggccggtattaccgcaccaaccacactgtgatgaccatgggctcggacttccaatatgagaatgccaacatgtggttcaagaaccttgacaagctcatccrgctggtaaatgcgcaggtcagtgcgcctaccctgtggtacccttgtgcacatgtgcgcttgcatccgggggccttgggttatgtgcatagctctcagtgc

SEQ ID NO: 236513 - DNA, 201 bp, Homo sapiens
atatacatcaaaacacagctatacacagggatggcccaggatcctctggcttcaggactcccctcttgcctgcagggccggtattaccgcaccaaccacaytgtgatgaccatgggctcggacttccaatatgagaatgccaacatgtggttcaagaaccttgacaagctcatccggctggtaaatgcgcaggtcagtgcg

SEQ ID NO: 236514 - DNA, 201 bp, Homo sapiens
agaactgctcaacaactggtggctacttttatctgtgtccccacgctcccaagtgccatacccccacccatgcctgtgcacccaacatccttgaccccatrtacatcaaaacacagctatacacagggatggcccaggatcctctggcttcaggactcccctcttgcctgcagggccggtattaccgcaccaaccacactg

SEQ ID NO: 236515 - DNA, 201 bp, Homo sapiens
aaaaaaaaagagtgggggagccagatcccaagcctgatcagctcacccccaaccccaggcgggattatcgacccacctggaaactgaaccagacggagccygtggcaggaaactactatccagtcaacacccggatttacatcacggtagctctcccccatcctgcacctccccacctcgatagaaagggaatcacccctt

SEQ ID NO: 236516 - DNA, 201 bp, Homo sapiens; identical to SEQ ID NO: 45264

SEQ ID NO: 236517 - DNA, 201 bp, Homo sapiens
tctgggagggtgttcatcacccctggggtcagattgagggtacgaggacagtggccagattgagggtatgaggacattggacctgggggtggtattcgggrccggggaagcaggttaagagtctgggattgaggccctggagacagattcggggatatgcagctgtgtctagacccaggggaggaagcatcgtggggtgag

SEQ ID NO: 236518 - DNA, 201 bp, Homo sapiens
tgtacacaggcaggctttcacattcccagtatcacccaccctactcccactcctggctctgaccgctgaccctgaccttgcctgtcctggcacagggcgcytggagttcgccaatggtggctgggtgatgaacgatgaggcagccacccactacggtgccatcgtggaccagatgacacttgggctgcgctttctggagga

SEQ ID NO: 236519 - DNA, 201 bp, Homo sapiens
gctttcacattcccagtatcacccaccctactcccactcctggctctgaccgctgaccctgaccttgcctgtcctggcacagggcgcctggagttcgccartggtggctgggtgatgaacgatgaggcagccacccactacggtgccatcgtggaccagatgacacttgggctgcgctttctggaggacacatttggcaat

SEQ ID NO: 236520 - DNA, 201 bp, Homo sapiens
tcttctttgggcgccttgattatcaagataagtgggtacggatgcagaagctggagatggagcaggtgtggcgggccagcaccagcctgaagcccccgacygcggacctcttcactggtagggggcttggtgagggcagggccagccatggtgccacacactcagaagggccctgggcttgatatctgctctgttgtcact

SEQ ID NO: 236521 - DNA, 201 bp, Homo sapiens
tgttctctactccacccccgcttgttacctctgggagctgaacaaggccaacctcacctggtatttggggaaactggggagcttgggggggttggcatgcmccgtgggtcatgaccctgccctcaatgcccctgccgctgtaggtcagtgaaacatgacgacttcttcccttacgcggatggcccccaccagttctggacc

SEQ ID NO: 236522 - DNA, 201 bp, Homo sapiens
agtcccaacccccctggactgtgtagaggcacagccctagctcatgcccctaaaccaccaactcacctccggccccgcccatttcactttagccccgcccyctcaccgcccccaggctctgtcctgcctcacccagccccgcggcttcagccccgccgtaactcccaaagtctcaggtcacatcagttctgctccatcggg

SEQ ID NO: 236523 - DNA, 201 bp, Homo sapiens
tcgggggttattgacaaggtatgtgtgtttggggtccctgtgcagacatgccccacagtgcagccgaacatgctgaacgtgcacctgctgcctcacacacwtgatgacgtgggctggctcaaaaccgtggaccagtacttttatggaagtgagtagaggatggggactggtccctgggatccccatggtccctgtaatccc

SEQ ID NO: 236524 - DNA, 201 bp, Homo sapiens
cgggggagccaggcagggtgcagtggctcacgcctgtaatcccagcactttgggaagccgaggcgggcagatcacaaggtcaggagatcgagactgtcctrgctaacatggtgaaaccccgtctctactaaaaatacaaaaaaatcagccgggtgtggtggcgggcacctgtagtcccagctactcgggaggctgaggcag

SEQ ID NO: 236525 - DNA, 201 bp, Homo sapiens
gtgaacccgggaggcggagcttgcagtgagccgagatcgcgccactgcactcccgcctgggcaaaagagcgagactccgtctcaaaaaaaaaaaaaaaaaagaattatgtggcggtgactgaaggttgaccttgatgtaggccttaatggggtttatggccagggttgggggacatttgtaggactcacctctgctcaggt

SEQ ID NO: 236526 - DNA, 201 bp, Homo sapiens; identical to SEQ ID NO: 45277

SEQ ID NO: 236527 - DNA, 201 bp, Homo sapiens
atcacttgaacccgggaggtggggggtgcagtgagccaagattgcaccactgtactctagcctgggctacagagtgagactcagtctcaaaaaaaaaaaaagaaaaaagaaaaattaaaaaaagaaaacacacacacatacacacacaaacccatctgtggacccttttctgcccagcacatccgggcaacgtttgatcct

SEQ ID NO: 236528 - DNA, 201 bp, Homo sapiens
gaacccgggaggcggaggttgcagtgagccaagatcacgccactttctgcactccagcctgggcgatagagcgagactcagtctcaaaaaaaaaaaaaaaacaaaaaacccaggccaggtgcagtggctcacgcctgtaatcccagccctttgggaggccaaggcgggtggattacctgaggtcaggagttggagaccagc

SEQ ID NO: 236529 - DNA, 201 bp, Homo sapiens; identical to SEQ ID NO: 45278

SEQ ID NO: 236530 - DNA, 201 bp, Homo sapiens
agggtaggggaggatttacttttccttcagatcagtgggctaagacccacagatcagcgggggaaatatttgagggtccttccatagaattgatattcatrgctggtcgtatgagagtctccccataggacacatcatacaaagccattcacatctgctgtggacgtttacatacttagttttggaaattgggggtggggc

SEQ ID NO: 236531 - DNA, 201 bp, Homo sapiens
gggccaccccttgaacttggtgtgacctgcaggtgtgcttcccaatggttacaacccgccaaggaatctgtgctgggatgtgctgtgtgtcgatcagccgstggtggaggaccctcgcagccccgagtacaacgccaaggagctggtcgattacttcctaaatgtggccactgcccaggtaaccctggtgtccagaacctt

SEQ ID NO: 236532 - DNA, 201 bp, Homo sapiens
gcctagctcttacacttcctgagtgtgtgacgttgggcaagtcacctatcctctctaagcctcagtgccttcatctggaaactggggataacatcaccccmcctcccacggtggccgtctgctgtcggcaaatgctgaacaaacatcagctacttctattattattttcccggagtgtgaatgagagctgccctgtggggt

SEQ ID NO: 236533 - DNA, 201 bp, Homo sapiens
atctgagtataggactgtgtctgattgtacctgcctccgtgtctccgggatgcttgcctagactttgtctgcacttaactgtgggattggaggggcaggasgtggcagggggtgagcagtgtatgtgtggggggaggtgctggctgagagctgggactctggagtctgcctgaaattccagcctagctcttacacttcctg

SEQ ID NO: 236534 - DNA, 201 bp, Homo sapiens
cttctttgggcgccttgattatcaagataagtgggtacggatgcagaagctggagatggagcaggtgtggcgggccagcaccagcctgaagcccccgacckcggacctcttcactggtagggggcttggtgagggcagggccagccatggtgccacacactcagaagggccctgggcttgatatctgctctgttgtcactg

SEQ ID NO: 236535 - DNA, 201 bp, Homo sapiens
agcagggtggggctagaaggggttttggggcgactcttgagggaggcgggacagagaccggaacggggcggggcctgaggagaggggaggagtcaggcctsgcgtcctgaacccaccggtccctttgcgctcttccgcaggttcttctgagcaacgcgctggcgcggctcagaggcttcaaagatcacttcaccttttgcc

SEQ ID NO: 236536 - DNA, 201 bp, Homo sapiens
tggtaagggaagatcaccaggcctgagggtggggtggtggtgctcggcatggagctagggccccttacctgactctcacctgccccaactccaggtacaaygccagtataggtgacaacgaaagtgaccaggcctcaggtgcctacatcttcagacccaaccaacagaaaccgctgcctgtgagccgctgggctcagatcc

SEQ ID NO: 236537 - DNA, 201 bp, Homo sapiens
acccttttctgcccagcacatccgggcaacgtttgatcctgacacagggctgttgatggagattatgaacatgaatcagcaactcctgctgcctgttcgcyagaccttcttctggtaagggaagatcaccaggcctgagggtggggtggtggtgctcggcatggagctagggccccttacctgactctcacctgccccaac

SEQ ID NO: 236538 - DNA, 201 bp, Homo sapiens
ccatcccattgggtacagcgacacctgggggaaggaggtcatcagccgttttgacacaccgctggagacaaagggacgcttctacacagacagcaatggcygggagatcctggagaggaggtggggggtgactgagagcactgagggggtggtctgtggtgtgttggggcccaggggtggtgagggaaatttgctgattac

SEQ ID NO: 236539 - DNA, 201 bp, Homo sapiens
gggaggcggagcttgcagtgagccgagatcgcgccactgcactccagcctgggtgacagagcgagactccatctcaaaaaaaaaaaaaaaaaaaaagagtkggggagccagatcccaagcctgatcagctcacccccaaccccaggcgggattatcgacccacctggaaactgaaccagacggagcccgtggcaggaaact

SEQ ID NO: 236540 - DNA, 201 bp, Homo sapiens
acagagcgagactccatctcaaaaaaaaaaaaaaaaaaaaagagtgggggagccagatcccaagcctgatcagctcacccccaaccccaggcgggattatygacccacctggaaactgaaccagacggagcccgtggcaggaaactactatccagtcaacacccggatttacatcacggtagctctcccccatcctgcacc

SEQ ID NO: 236541 - DNA, 201 bp, Homo sapiens
gctgggatgggccctccaagcccaagcctcctgctccgggggcagaccagactctgactctcctcttggggctgctgccattaaaacgctactactaagastcaggtcgctctgtgactgagtgtgggttttttttgtctgttatttgcttgttagagggggacagaatttatgacccagagccgggtgtggtggcttgct

SEQ ID NO: 236542 - DNA, 201 bp, Homo sapiens
ctctactaaaaatatgaaaattagccaggcggggtggtgggcacctgtaatcccagctacttggatagctgaggcacgagaatcacttgaacccgggaggkggggggtgcagtgagccaagattgcaccactgtactctagcctgggctacagagtgagactcagtctcaaaaaaaaaaaaagaaaaaagaaaaattaaaa

SEQ ID NO: 236543 - DNA, 201 bp, Homo sapiens
tgccctctactttcacccttcaactcccaggatggaaacatgcagctgactgtgctgactgaccgctcccaggggggcagcagcctgagagatggctcgcyggagctcatggtgagtgggtcagagccccatccgagccagggtcctcccaacctggacccctgctggaccttgaaggctgtttctggcccagttctctgc

SEQ ID NO: 236544 - DNA, 201 bp, Homo sapiens
cttctgcttctgcatctctggtttctgagatttgtcatgccacgtgcaagctgtataacatgcgtgtcgctccgcctgcctggactctccatttggagacstcctatacatcccacaaagccccacctgctgtgcatcctctgggaagcctgccatgcagggggcctctttcccatatctgggaactatggcctgggagcg

SEQ ID NO: 236545 - DNA, 201 bp, Homo sapiens
atgaggcagccacccactacggtgccatcgtggaccagatgacacttgggctgcgctttctggaggacacatttggcaatgatgggcgaccccgtgtggcytggcacattgaccccttcggccactctcgggagcaggcctcgctgtttgcgcaggtgcgacccgggacctctcttgggcccacttcttcactcactctgg

SEQ ID NO: 236546 - DNA, 201 bp, Homo sapiens
tacacagacagcaatggccgggagatcctggagaggaggtggggggtgactgagagcactgagggggtggtctgtggtgtgttggggcccaggggtggtgrgggaaatttgctgattacatgagtgtgggagacagaggacgaagggagagtgaagggcgggggagccaggcagggtgcagtggctcacgcctgtaatccc

SEQ ID NO: 236547 - DNA, 201 bp, Homo sapiens
gcttcttctttgggcgccttgattatcaagataagtgggtacggatgcagaagctggagatggagcaggtgtggcgggccagcaccagcctgaagcccccraccgcggacctcttcactggtagggggcttggtgagggcagggccagccatggtgccacacactcagaagggccctgggcttgatatctgctctgttgtc

SEQ ID NO: 236548 - DNA, 201 bp, Homo sapiens
acatccttgaccccatatacatcaaaacacagctatacacagggatggcccaggatcctctggcttcaggactcccctcttgcctgcagggccggtattaycgcaccaaccacactgtgatgaccatgggctcggacttccaatatgagaatgccaacatgtggttcaagaaccttgacaagctcatccggctggtaaatg

SEQ ID NO: 236549 - DNA, 201 bp, Homo sapiens
acttcctgcaggtgggtaggagccgggctagagggggcatgcagccccgaggcccgacaggctgggcgccccaacatacccctctgcctccaggtgtgcarccagctggaggcgctggtgggcctggcggccaacgtgggaccctatggctccggagacagtgcacccctcagtaagtgtcgggcccaagaggggaagagg

SEQ ID NO: 236550 - DNA, 201 bp, Homo sapiens
ttgacttcagccaaaattcattttcacacccaaccattggcttgcacgccaaatatgtatttagagaaactgaacctatgggatgcatgaatgtgcacacrtgtgtggaagtgtgggcccccaggaaggtgcggactcccgagggctcactccgtcgcctcccccagcagcaggcaaaaggaagcagtgtccatgttctct

SEQ ID NO: 236551 - DNA, 201 bp, Homo sapiens
ccaagattcttgcacatgaagaagcttatcaagcacagctttctataaatactaaaaatgacttgattaaatcctaagacttcgttaccttagagagatcrctgacaaggaatgggactaatccatgattcacaacttgctgtatctggtcctggcggctggctgtgatgtttgacattgtccacgtagcttccttctgaa

SEQ ID NO: 236552 - DNA, 201 bp, Homo sapiens
agtgtaaaaagtgctacaataacaaaccacatttaagaaagagttcttagtagagaaacaataagacaaaataccaaacatagtacacaacaaatttatgyctcagctacatgatctaaaagttaaaggtcccaggagccccatcctgaacttggaaagtgtagccttcagaggtagtttctggcacaacgttttgatctt

SEQ ID NO: 236553 - DNA, 201 bp, Homo sapiens
gaactgttcaagtatagtttcagtgtaaaaagtgctacaataacaaaccacatttaagaaagagttcttagtagagaaacaataagacaaaataccaaacrtagtacacaacaaatttatgcctcagctacatgatctaaaagttaaaggtcccaggagccccatcctgaacttggaaagtgtagccttcagaggtagttt

SEQ ID NO: 236554 - DNA, 201 bp, Homo sapiens
tggggttggtgagcaggctgggaaagacggcgagtgctcctgcatcaatcacaacctgagtctgttcatctgtaccagtgacgatattccctatggctctyagggcaggagtctgaaaaggaaaaaatgttgatgctggttaccttatatttttctcagcacttcagaaattctgtactccaaaagttttaacaagaggcc

SEQ ID NO: 236555 - DNA, 201 bp, Homo sapiens
aagattgaggatgagaggggaaaaaatcaacattaggaaacagaatgttgatttcctttgtcctaaaaatgcaatatagcaatgaaagaatcaatactttrttaaatgtttaacactgatgtccaatcttttaaagttacccttttaagattatttcaacaagcaaaataagtcttagcagtttttactttgataattgcc

SEQ ID NO: 236556 - DNA, 201 bp, Homo sapiens
gacttgattaaatcctaagacttcgttaccttagagagatcgctgacaaggaatgggactaatccatgattcacaacttgctgtatctggtcctggcggcyggctgtgatgtttgacattgtccacgtagcttccttctgaatgttagttttggggttggtgagcaggctgggaaagacggcgagtgctcctgcatcaatc

SEQ ID NO: 236557 - DNA, 201 bp, Homo sapiens
aattccacatagaaattagaaacctagtcagaggacaagcttcatacagtatgtacagttggaactgttcaagtatagtttcagtgtaaaaagtgctacartaacaaaccacatttaagaaagagttcttagtagagaaacaataagacaaaataccaaacatagtacacaacaaatttatgcctcagctacatgatctaa

SEQ ID NO: 236558 - DNA, 201 bp, Homo sapiens
tcaagtccaaattcaaacaaagccaccttgataggacttacctgaaagatatttgaaatggcatccaggataaccagaataatcttggtatcttttgcagktaagaggttcatcaacggttctattatgccacagtgaacaaggtacacaatctgttcaactgttccacggcccatacagcttccttttgtgtctcaaaat

SEQ ID NO: 236559 - DNA, 201 bp, Homo sapiens
acccaagattcttgcacatgaagaagcttatcaagcacagctttctataaatactaaaaatgacttgattaaatcctaagacttcgttaccttagagagawcgctgacaaggaatgggactaatccatgattcacaacttgctgtatctggtcctggcggctggctgtgatgtttgacattgtccacgtagcttccttctg

SEQ ID NO: 236560 - DNA, 201 bp, Homo sapiens
tgttctcagggagggagtgttactatttgttctcagaaccctggcctggccaggcgtggtggctcacgcctgtaatcccagcactttgggaggccgaggcrgaggatcatttgaggtcaggagtttgagaccagcctggccaacatggtgaaaccccatctctactaaaaatacaaaaattagctgggcgaagcaggagga

SEQ ID NO: 236561 - DNA, 201 bp, Homo sapiens
ctcagaaccctggcctggccaggcgtggtggctcacgcctgtaatcccagcactttgggaggccgaggcggaggatcatttgaggtcaggagtttgagacyagcctggccaacatggtgaaaccccatctctactaaaaatacaaaaattagctgggcgaagcaggaggatcgcttgaacccgggaggtggagacgagatt

SEQ ID NO: 236562 - DNA, 201 bp, Homo sapiens
ctgtgtatggtgagcttatacattctcctcacaggtggccagacagcatggtaaagcccggatgcagagcttgcttctgcactattgcagatttcatctckgggggataaaaatgcttgtccatctggcataacttggaccaggtgatgctagagccccagaagggtagaactctgccttttgtccataatctatagtcct

SEQ ID NO: 236563 - DNA, 201 bp, Homo sapiens
ttctcagggagggagtgttactatttgttctcagaaccctggcctggccaggcgtggtggctcacgcctgtaatcccagcactttgggaggccgaggcggrggatcatttgaggtcaggagtttgagaccagcctggccaacatggtgaaaccccatctctactaaaaatacaaaaattagctgggcgaagcaggaggatc

SEQ ID NO: 236564 - DNA, 201 bp, Homo sapiens
ttgcccaggctggcctcacacttctgggctcaagcgatcctcccacctcagcctcctaagcagctaagaccataagtggttgctaccgcacctgactcatraaatcatttttgaaatcgccagtgataagggctctgtgtttagaaaactttcttccacgagggcttctgtaactctttggtctcaggaactgcttagaac

SEQ ID NO: 236565 - DNA, 201 bp, Homo sapiens
acatggatgagaaaggccacctgggtgagttttaacatccccatatgcagcaccgggtcctagaacacccaggttgtaatgctgattttgctgttttgccragacagaaagtcacttctctgtgggcctcaactgtatactgtgtatggtgagcttatacattctcctcacaggtggccagacagcatggtaaagcccgga

SEQ ID NO: 236566 - DNA, 201 bp, Homo sapiens; identical to SEQ ID NO: 45329

SEQ ID NO: 236567 - DNA, 201 bp, Homo sapiens
gccacctgggtgagttttaacatccccatatgcagcaccgggtcctagaacacccaggttgtaatgctgattttgctgttttgccaagacagaaagtcacytctctgtgggcctcaactgtatactgtgtatggtgagcttatacattctcctcacaggtggccagacagcatggtaaagcccggatgcagagcttgcttc

SEQ ID NO: 236568 - DNA, 201 bp, Homo sapiens; identical to SEQ ID NO: 45330

SEQ ID NO: 236569 - DNA, 201 bp, Homo sapiens
caggtatggtggtcacaaagaaaatggaagacagcaccatggcacgtgtatacctatgtaacaaacctgcacatgtatcccaggacttaaagtattaaaamaaaaaaaaatggaagaggggctgggaagctttgggctgtcagagaaagtcaatttccaggcattagccactcaaacggacttacacttcagacttaggag

SEQ ID NO: 236570 - DNA, 201 bp, Homo sapiens
gccctgtgatccccaagtctgggtaagtgcccagcgaggaggatccctctcctttcctgccagaatgacctcgatggctactggagaggtctgtgtgctgyggaaacagatgcagcaccagttgaaccaagcgggccctgttctggatggtccctgcctcagagaggtgcagaaacagcatagaagacatgctggggggtg

SEQ ID NO: 236571 - DNA, 201 bp, Homo sapiens; identical to SEQ ID NO: 45332

SEQ ID NO: 236572 - DNA, 201 bp, Homo sapiens; identical to SEQ ID NO: 45322

SEQ ID NO: 236573 - DNA, 201 bp, Homo sapiens; identical to SEQ ID NO: 45323

SEQ ID NO: 236574 - DNA, 201 bp, Homo sapiens; identical to SEQ ID NO: 45324

SEQ ID NO: 236575 - DNA, 201 bp, Homo sapiens
aaaaattagctgggcgaagcaggaggatcgcttgaacccgggaggtggagacgagattatgccactgcactccagcctgggcaacagtgtgagactctgtstcaaaaaaaaacaaaaaacaaacaaaaaagaccctgacctgagaattcttgtctctgttggtctattataaagctctggcctcttctgaattcctgaatt

SEQ ID NO: 236576 - DNA, 201 bp, Homo sapiens
tctttgacatcagcaacagtcagctgctcacaaatgataataaagatctgggagggtgaaggggccaaggagaatctgtccttccagcggctctctgggamcttgccagagaaggctggagcaggggagggccttcaccagacgtggcctggttctcacctagatgctgggcagagaccaaggagcacgtgcgagggcctt

SEQ ID NO: 236577 - DNA, 201 bp, Homo sapiens; identical to SEQ ID NO: 45325

SEQ ID NO: 236578 - DNA, 201 bp, Homo sapiens; identical to SEQ ID NO: 45326

SEQ ID NO: 236579 - DNA, 201 bp, Homo sapiens; identical to SEQ ID NO: 45327

SEQ ID NO: 236580 - DNA, 201 bp, Homo sapiens; identical to SEQ ID NO: 45328

SEQ ID NO: 236581 - DNA, 201 bp, Homo sapiens
gaactgcttagaactttgtaactaatggtgctagttatgtttccttgaggctactcacctaggaagcccttggacaccatctgtgtcagcagttctgggtytccacctccaaaccgctccccaaagactttgcccagatcttccgccacatgtttcgctacatccacaccaacttcatccaccagtgtggcggcacccaca

SEQ ID NO: 236582 - DNA, 201 bp, Homo sapiens
acaccctcctgatagatgtaaaagcccttcccagatttacgacctaaaacaggcaagaaaagggagtgttactatttgttctcagggagggagtgttactrtttgttctcagaaccctggcctggccaggcgtggtggctcacgcctgtaatcccagcactttgggaggccgaggcggaggatcatttgaggtcaggagtt

SEQ ID NO: 236583 - DNA, 201 bp, Homo sapiens
ttgttctcagggagggagtgttactatttgttctcagaaccctggcctggccaggcgtggtggctcacgcctgtaatcccagcactttgggaggccgaggyggaggatcatttgaggtcaggagtttgagaccagcctggccaacatggtgaaaccccatctctactaaaaatacaaaaattagctgggcgaagcaggagg

SEQ ID NO: 236584 - DNA, 201 bp, Homo sapiens; identical to SEQ ID NO: 45333

SEQ ID NO: 236585 - DNA, 201 bp, Homo sapiens
ttgaacctgggaggcagaagttacagtgagccaagatcatgcccctccactccagcctgggtgacagaatgatactctgccaaaaaaaaaaaaaaaaaaatatatatatatatatatatatatacacacacacacacacacacacacatatatatatatatagtttttgtttcaagtgaaatcttaccaggcagtaatttc

SEQ ID NO: 236586 - DNA, 201 bp, Homo sapiens
tgacccatttcacagcccagagaggcagccccacatctcccatcttgggatcttgtatctgggccctgcgactgaccaagttttgccccagtcttctccargccttcagtgccccaaggtctccaaaatgagcttccaggctccaattttgaggaatgaaaacacttttgttatggaaaggaaatctgtgctgcatgctac

SEQ ID NO: 236587 - DNA, 201 bp, Homo sapiens
gtgcactggtgcatggctgtaatcccagctattgggaggctgaggtaggagagtcacttgaacctgggaggcagaagttacagtgagccaagatcatgccmctccactccagcctgggtgacagaatgatactctgccaaaaaaaaaaaaaaaaaaatatatatatatatatatatatatacacacacacacacacacaca

SEQ ID NO: 236588 - DNA, 201 bp, Homo sapiens; identical to SEQ ID NO: 45336

SEQ ID NO: 236589 - DNA, 201 bp, Homo sapiens
taaaaggaccagacctctcagagtatttgctagaggaacaatctcccactgctgagaaagccctttctttgttttcatgcttggggcaccatgaatgagtrgtggtcatcagcacaggatcccatacagccctccccatccaagcacatgcaagaacatgcattagacaaaaggaggaggaatagatgtggccactgtctt

SEQ ID NO: 236590 - DNA, 201 bp, Homo sapiens
aaatggaagggatgtggctccttgagcaagtctggcaactctctccaggttaaaaggaccagacctctcagagtatttgctagaggaacaatctcccactsctgagaaagccctttctttgttttcatgcttggggcaccatgaatgagtggtggtcatcagcacaggatcccatacagccctccccatccaagcacatgc

SEQ ID NO: 236591 - DNA, 201 bp, Homo sapiens; identical to SEQ ID NO: 45337

SEQ ID NO: 236592 - DNA, 201 bp, Homo sapiens
aaaatggaagggatgtggctccttgagcaagtctggcaactctctccaggttaaaaggaccagacctctcagagtatttgctagaggaacaatctcccacygctgagaaagccctttctttgttttcatgcttggggcaccatgaatgagtggtggtcatcagcacaggatcccatacagccctccccatccaagcacatg

SEQ ID NO: 236593 - DNA, 201 bp, Homo sapiens; identical to SEQ ID NO: 45338

SEQ ID NO: 236594 - DNA, 201 bp, Homo sapiens; identical to SEQ ID NO: 45339

SEQ ID NO: 236595 - DNA, 201 bp, Homo sapiens; identical to SEQ ID NO: 45340

SEQ ID NO: 236596 - DNA, 201 bp, Homo sapiens
aagataaaatttcacttccttttgaaacatgatcctcaatcaatggctaagagagtttagtttggggattggaattacaacactgtgaactctagtcgatracaattaaacaagcataccccatgctttcatgtgaacttcactctccctttcactctgtcaaattatgctatttccatttcccaagttactttaaattgc

SEQ ID NO: 236597 - DNA, 201 bp, Homo sapiens
ttctcattttctgttgacccaacaaagctcaatggtaacctatgtctcagtcttagcctgacccttggaaacctcacattgagaaagtgatatgctagttrtcagcaggagtgttgtgataaaatattatgtaagataaaatttcacttccttttgaaacatgatcctcaatcaatggctaagagagtttagtttggggat

SEQ ID NO: 236598 - DNA, 201 bp, Homo sapiens
gagcatgtgtgtgtgacccatggcaaatccttgagctctctggttctcattttctgttgacccaacaaagctcaatggtaacctatgtctcagtcttagcstgacccttggaaacctcacattgagaaagtgatatgctagttatcagcaggagtgttgtgataaaatattatgtaagataaaatttcacttccttttgaa

SEQ ID NO: 236599 - DNA, 201 bp, Homo sapiens
agatcacttgcctcatgtcttagaatccagtaggtggccccttggccatgaaatgtgtgggagtggcttttccctaacttgacccttctttcagtgggagrgaactattgagaggaacaaagagcttataaatacattaggacctggaattcagttgtcgagccaggacggtgacagcgtttaacaaagtaagtactgatc

SEQ ID NO: 236600 - DNA, 201 bp, Homo sapiens
ttgatatgtatatagaaggtatagcagatttgggtgaaatgatcctccttctgcccgtatgtccacctgaggaaaaagatgccaagcttgccttgatcaargagaaaataaaaaatcgctacttccctgcctttgaaaaagtaagtgaagcagttcagtgttttggggaactgagtttagaggccaatagaaaaatagtgg

SEQ ID NO: 236601 - DNA, 201 bp, Homo sapiens
ccattctccaggtcttaaagagccatggacaagactaccttgttggcaacaagctgagccgggctgacattcatctggtggaacttctctactacgtcgargagcttgactccagtcttatctccagcttccctctgctgaaggtgacccatttcacagcccagagaggcagccccacatctcccatcttgggatcttgta

SEQ ID NO: 236602 - DNA, 201 bp, Homo sapiens
gattgatatgtatatagaaggtatagcagatttgggtgaaatgatcctccttctgcccgtatgtccacctgaggaaaaagatgccaagcttgccttgatcmaagagaaaataaaaaatcgctacttccctgcctttgaaaaagtaagtgaagcagttcagtgttttggggaactgagtttagaggccaatagaaaaatagt

SEQ ID NO: 236603 - DNA, 201 bp, Homo sapiens
gaaaacattccaggaactcctccaacacagtcatgaagaaggaaggttcttcttcagtattgttggtggttttcaactacatatcctaaagtacatttttkattctatcgtttcaattattcattcattcattcattcattcaggcttagagaaacctccaggagactgctatcatggcagagaagcccaagctccactac

SEQ ID NO: 236604 - DNA, 201 bp, Homo sapiens
catttggttgtttctgtctttcaggattgatatgtatatagaaggtatagcagatttgggtgaaatgatcctccttctgcccgtatgtccacctgaggaamaagatgccaagcttgccttgatcaaagagaaaataaaaaatcgctacttccctgcctttgaaaaagtaagtgaagcagttcagtgttttggggaactgag

SEQ ID NO: 236605 - DNA, 201 bp, Homo sapiens
cctctgatgagggtatctagtagaaggtacacggggaggtttgcgcagccggcaatgtctatgggtgtggggcatggtatttgtacatggtgcagagggaraaagtggttaaaatggaagggatgtggctccttgagcaagtctggcaactctctccaggttaaaaggaccagacctctcagagtatttgctagaggaaca

SEQ ID NO: 236606 - DNA, 201 bp, Homo sapiens
aggtatttgaccatttggttgtttctgtctttcaggattgatatgtatatagaaggtatagcagatttgggtgaaatgatcctccttctgcccgtatgtcmacctgaggaaaaagatgccaagcttgccttgatcaaagagaaaataaaaaatcgctacttccctgcctttgaaaaagtaagtgaagcagttcagtgtttt

SEQ ID NO: 236607 - DNA, 201 bp, Homo sapiens
ttaggtcatcttaagttggatttaaaattgtgttatcacatacttttcccacagaaactatgagatgttgcttactgaagcattgtgccttaaataaaaakggactgtaattaagaaaaagatgaacagatttgacctattaattcttaaaatttcttctcatctaaaagcaaacatattaaaatacaattaagacactaa

SEQ ID NO: 236608 - DNA, 201 bp, Homo sapiens; identical to SEQ ID NO: 45354

SEQ ID NO: 236609 - DNA, 201 bp, Homo sapiens; identical to SEQ ID NO: 45355

SEQ ID NO: 236610 - DNA, 201 bp, Homo sapiens; identical to SEQ ID NO: 45356

SEQ ID NO: 236611 - DNA, 201 bp, Homo sapiens; identical to SEQ ID NO: 45357

SEQ ID NO: 236612 - DNA, 201 bp, Homo sapiens
acttgagactggtttgctggaatctgagggtggccactgctgggtaacaatttgagccaagaaaacattccaggaactcctccaacacagtcatgaagaargaaggttcttcttcagtattgttggtggttttcaactacatatcctaaagtacatttttgattctatcgtttcaattattcattcattcattcattcatt

SEQ ID NO: 236613 - DNA, 201 bp, Homo sapiens; identical to SEQ ID NO: 45358

SEQ ID NO: 236614 - DNA, 201 bp, Homo sapiens; identical to SEQ ID NO: 45359

SEQ ID NO: 236615 - DNA, 201 bp, Homo sapiens; identical to SEQ ID NO: 45360

SEQ ID NO: 236616 - DNA, 201 bp, Homo sapiens; identical to SEQ ID NO: 45361

SEQ ID NO: 236617 - DNA, 201 bp, Homo sapiens; identical to SEQ ID NO: 45362

SEQ ID NO: 236618 - DNA, 201 bp, Homo sapiens
aaaaggtatttgaccatttggttgtttctgtctttcaggattgatatgtatatagaaggtatagcagatttgggtgaaatgatcctccttctgcccgtatstccacctgaggaaaaagatgccaagcttgccttgatcaaagagaaaataaaaaatcgctacttccctgcctttgaaaaagtaagtgaagcagttcagtgt

SEQ ID NO: 236619 - DNA, 201 bp, Homo sapiens; identical to SEQ ID NO: 45365

SEQ ID NO: 236620 - DNA, 201 bp, Homo sapiens
aggcaaaaggtatttgaccatttggttgtttctgtctttcaggattgatatgtatatagaaggtatagcagatttgggtgaaatgatcctccttctgcccktatgtccacctgaggaaaaagatgccaagcttgccttgatcaaagagaaaataaaaaatcgctacttccctgcctttgaaaaagtaagtgaagcagttca

SEQ ID NO: 236621 - DNA, 201 bp, Homo sapiens
ataaaatctaaggcaaaaggtatttgaccatttggttgtttctgtctttcaggattgatatgtatatagaaggtatagcagatttgggtgaaatgatcctycttctgcccgtatgtccacctgaggaaaaagatgccaagcttgccttgatcaaagagaaaataaaaaatcgctacttccctgcctttgaaaaagtaagtg

SEQ ID NO: 236622 - DNA, 201 bp, Homo sapiens
taaatgttaatatacctgtaaaactcagagcataatgactagactataaaaggcacccactggaggtgaattattttgccatcacctgatactctactccsttaggtttttataaacctataaaatctaaggcaaaaggtatttgaccatttggttgtttctgtctttcaggattgatatgtatatagaaggtatagcaga

SEQ ID NO: 236623 - DNA, 201 bp, Homo sapiens
ccttacaccctcctctctagcctcctagaaaaatatgctaatatgtgtccttagcacaaggaaaagtctgtttttactcatattgtgccgtcttggtgtgyttgggtgacagttcaagaattgtttatttcttttctgttggatacatctttacagaattgtaaaaatgaagaatttagaaaaccagggcttcagcattta

SEQ ID NO: 236624 - DNA, 201 bp, Homo sapiens
tagagatctatctaccttgataggttaagagataaatgttaatatacctgtaaaactcagagcataatgactagactataaaaggcacccactggaggtgmattattttgccatcacctgatactctactcccttaggtttttataaacctataaaatctaaggcaaaaggtatttgaccatttggttgtttctgtctttc

SEQ ID NO: 236625 - DNA, 201 bp, Homo sapiens
cttataaatacattaggacctggaattcagttgtcgagccaggacggtgacagcgtttaacaaagtaagtactgatcttataaatttctctacattgcctyacaccctcctctctagcctcctagaaaaatatgctaatatgtgtccttagcacaaggaaaagtctgtttttactcatattgtgccgtcttggtgtgtttg

SEQ ID NO: 236626 - DNA, 201 bp, Homo sapiens
cgtttcaattattcattcattcattcattcattcaggcttagagaaacctccaggagactgctatcatggcagagaagcccaagctccactacttcaatgyacggggcagaatggagtccacccggtggctcctggctgcagctggagtagaggtaggttctgagttaggtcatcttaagttggatttaaaattgtgttat

SEQ ID NO: 236627 - DNA, 201 bp, Homo sapiens
ttctatcgtttcaattattcattcattcattcattcattcaggcttagagaaacctccaggagactgctatcatggcagagaagcccaagctccactactycaatgcacggggcagaatggagtccacccggtggctcctggctgcagctggagtagaggtaggttctgagttaggtcatcttaagttggatttaaaattg

SEQ ID NO: 236628 - DNA, 201 bp, Homo sapiens
gtccagagtttgttccttctgatgttcagatgtgttcagagtttcttccttctggtgggttcgtggtctcgctggctcaggagtgaagctgcagactttcrcgtgagtgttacagctcttaatgtggcacctctggagttgttagttcctcccagtgggttcgtggtctctcaggcttcaggagtgaagctgcagaccttt

SEQ ID NO: 236629 - DNA, 201 bp, Homo sapiens
ttctgttcttccatccacagagaacacagagtgatttaggtccttccttgagtgggtgggacgatggcagggcatcatgaccagcagcaggctgggccttrggcatgtacgctgaggtccagtattgcagagtcccatgtagatgagggaacagtgaacatggggagggttcaggcaagggtgattctagaagaggatgca

SEQ ID NO: 236630 - DNA, 201 bp, Homo sapiens
ttgcggtgtcacagttcttaaaggcggcgtgtccagagtttgttccttctgatgttcagatgtgttcagagtttcttccttctggtgggttcgtggtctcrctggctcaggagtgaagctgcagactttcgcgtgagtgttacagctcttaatgtggcacctctggagttgttagttcctcccagtgggttcgtggtctct

SEQ ID NO: 236631 - DNA, 201 bp, Homo sapiens
aacctcagtatcctcaaatgtaaaatgagaataacaactgcattcatcttaggtgatttttgtaggataaaacgaagagaagtttagaagaatgaccagtrtgtaactgatgttgaacaaatgctagctccttccatattgcaaaattaatgcagcaacatctcttcttccagcttataaaacaaaatgcaccccatagag

SEQ ID NO: 236632 - DNA, 201 bp, Homo sapiens
tcgtttcaattattcattcattcattcattcattcaggcttagagaaacctccaggagactgctatcatggcagagaagcccaagctccactacttcaatrcacggggcagaatggagtccacccggtggctcctggctgcagctggagtagaggtaggttctgagttaggtcatcttaagttggatttaaaattgtgtta

SEQ ID NO: 236633 - DNA, 201 bp, Homo sapiens
gaaactatgagatgttgcttactgaagcattgtgccttaaataaaaatggactgtaattaagaaaaagatgaacagatttgacctattaattcttaaaatytcttctcatctaaaagcaaacatattaaaatacaattaagacactaatcacaaagtgcagaacttaagtggattagaatttaaacaaactgtaaagaata

SEQ ID NO: 236634 - DNA, 201 bp, Homo sapiens
gggaaagacataaaggagagagccctgtacggtatattttctgttcttccatccacagagaacacagagtgatttaggtccttccttgagtgggtgggacratggcagggcatcatgaccagcagcaggctgggccttaggcatgtacgctgaggtccagtattgcagagtcccatgtagatgagggaacagtgaacatgg

SEQ ID NO: 236635 - DNA, 201 bp, Homo sapiens
gtccttccttgagtgggtgggacgatggcagggcatcatgaccagcagcaggctgggccttaggcatgtacgctgaggtccagtattgcagagtcccatgkagatgagggaacagtgaacatggggagggttcaggcaagggtgattctagaagaggatgcagtccatggatccagcacctcacggtaatttccaaacacg

SEQ ID NO: 236636 - DNA, 201 bp, Homo sapiens
ggtgggtttcatagacacttcactctccttttttttcttccttctaaagatggatatttgatgttccagcaagtgccaatggttgagattgatgggatgawgctggtgcagaccagagccattctcaactacattgccagcaaatacaacctctatgggaaagacataaaggagagagccctgtacggtatattttctgtt

SEQ ID NO: 236637 - DNA, 201 bp, Homo sapiens
gcagaggaagattttttaaaatggattttagagtaagttgcagacatcagtgcagttcacccgtaaacgcttcagcttgcagattataacatagtgccagktgggagtgagagtcaatgctgtaagaaagatgaattcaggttcacccaggtttcctacagatcccagggagatagagcagggaatgaggagagcagacaa

SEQ ID NO: 236638 - DNA, 201 bp, Homo sapiens; identical to SEQ ID NO: 45343

SEQ ID NO: 236639 - DNA, 201 bp, Homo sapiens; identical to SEQ ID NO: 45344

SEQ ID NO: 236640 - DNA, 201 bp, Homo sapiens; identical to SEQ ID NO: 45345

SEQ ID NO: 236641 - DNA, 201 bp, Homo sapiens; identical to SEQ ID NO: 45346

SEQ ID NO: 236642 - DNA, 201 bp, Homo sapiens
gtgctttatgaattacaggccctgaaaaccagaatcagcaacctgcccacagtgaagaagtttctacagcctggcagcccaaggaagcctcccatggatgmgaaatctttagaagaagcaaggaagattttcaggttttaataacgcagtcatggaggccaagaacttgcaataccaatgttctaaagttttgcaacaata

SEQ ID NO: 236643 - DNA, 201 bp, Homo sapiens
ggaagctgagtttgcagtgagccaagatcacgccattgctctccagcctgggcaaaaacagtgaaactccatctcaaaattaataataaataaataaatayattagttgttaaaggcaagtatatttttgttccacactcaacaaccacaaaactttgcaagaagaatcttaatgttaaatatcagagctgggggtttgga

SEQ ID NO: 236644 - DNA, 201 bp, Homo sapiens
aagaagaaaagtttgcactggttgtaactgtatagagaatttcaccagggaaggggattcttaggtggggtctcaggaaaggcacacatggctagagttgsgcaacagcacatggaaagggctgtggaaatgtgtttcatgggtgtaattgaaagaactgcaaatatggggcatagaagcagccctgggagctgtaaaatg

SEQ ID NO: 236645 - DNA, 201 bp, Homo sapiens
ctcccattctccaggtcttaaagagccatggacaagactaccttgttggcaacaagctgagccgggctgacattcatctggtggaacttctctactacgtsgaggagcttgactccagtcttatctccagcttccctctgctgaaggtgacccatttcacagcccagagaggcagccccacatctcccatcttgggatctt

SEQ ID NO: 236646 - DNA, 201 bp, Homo sapiens
gtgcatgtgttcctgatctgattcctcccattctccaggtcttaaagagccatggacaagactaccttgttggcaacaagctgagccgggctgacattcayctggtggaacttctctactacgtcgaggagcttgactccagtcttatctccagcttccctctgctgaaggtgacccatttcacagcccagagaggcagcc

SEQ ID NO: 236647 - DNA, 201 bp, Homo sapiens
accctaattcctttattaaattgagaattttaccctattgtgcctcgtacttcagaagagaaaattacagttgcaagtgtgaaagctgtgcaacagtggcracctatttcacacttagcagggttcctgagaagtggggagatacaaattacagcagaggctccttggtggcaaaatgtttgatagccattagcccatggc

SEQ ID NO: 236648 - DNA, 201 bp, Homo sapiens
cgccgattggctgccgggcgcgcgggcggagcgggcggcggcggcggcggcgcggaggggccgctcaccccgcagcccggcctcggcctccgccgcttgtygtcgcgccccgcccgcgagcccgccccgcacgtcccccgccggcggccaccatgagcacaggcctgcggtacaagagcaagctggcgaccccaggtgagc

SEQ ID NO: 236649 - DNA, 201 bp, Homo sapiens; identical to SEQ ID NO: 45370

SEQ ID NO: 236650 - DNA, 201 bp, Homo sapiens; identical to SEQ ID NO: 45402

SEQ ID NO: 236651 - DNA, 201 bp, Homo sapiens; identical to SEQ ID NO: 45371

SEQ ID NO: 236652 - DNA, 201 bp, Homo sapiens
cagctggagggggtggttcttgatgagggaggagatgaggagggagcatgcctggttgggcatagcctggaaaggccctggaatgtgagccacatgggctytggctccagccaggggcagagaggccagaaaggggcaacgccaggatctctttgaggagagatagttgatggtgatgctggaggggtgccccgggagtta

SEQ ID NO: 236653 - DNA, 201 bp, Homo sapiens
ggaggccaaggggcagcgggtccggggccgactgtacccctgggggatcgtggagggtgagtagagtcttggggtaccaggtctggtgggggaaggctgtyctgggccggcgccagcccactacccacccccaccccgcagtggagaaccaggcgcattgcgacttcgtgaagctgcgcaacatgctcatccgcacgcata

SEQ ID NO: 236654 - DNA, 201 bp, Homo sapiens
ggggacttgtctggcctcaaatctgatggtccttgccccaccacagatccgggaggagattgacaagtttgggatccatgtataccagttccctgagtgtractcggacgaggatgaggacttcaagcagcaggaccgggaactgaaggtgaacatgcagactggtggggcaggggggatggagctggtgaggggcagaac

SEQ ID NO: 236655 - DNA, 201 bp, Homo sapiens; identical to SEQ ID NO: 45374

SEQ ID NO: 236656 - DNA, 201 bp, Homo sapiens
cgtgacgtgcgacgtgcactacgagaactaccgcgcgcactgcatccagcagatgaccaggtgcgcgccccagccgcgagccagacctcgcccctctggcsccgcccacgtctccataactgagggccggtcctgtcagcccacccagacttgaactttgcaccattccctaagccccccccctcccccagagcctggtct

SEQ ID NO: 236657 - DNA, 201 bp, Homo sapiens
ggctttttctgaaaagagtcaagctatttgtagcccaagttggttgaacagatttttcttggtgtagcttatttttttattcattaacttcttttccttaygaattaaaaaatagcattttttttttccacaaaggagtgctttatttacttctttttgtaccacagccagcgcttcctctgcctgctggggaaagtggat

SEQ ID NO: 236658 - DNA, 201 bp, Homo sapiens
cttccaccttcagcttctcataaaatcacagaactgcagtgaggacctctgcctgccgggacagcctggggatggtcccgtgcagccccctcaggcagcawccctgtggagggttcccctccgccccctaccgtggggagctcttcccagctgagtcacactgcacgcctggtccctaccctgggctgctctctgtgttat

SEQ ID NO: 236659 - DNA, 201 bp, Homo sapiens
catctggggttcaagccacatcttgggcctatacacagccagctagtgagtgagcgagcgagtgagtgaggccctgcaagatggtcatctgtcttgtcccrcaaaggccaagacaaacgccgtgtcagcggcagcctctccaacccagtctgtgatggccagtggtggtcagtgagggctgggccgcgaggctcacagctc

SEQ ID NO: 236660 - DNA, 201 bp, Homo sapiens
agctggagggggtggttcttgatgagggaggagatgaggagggagcatgcctggttgggcatagcctggaaaggccctggaatgtgagccacatgggctcyggctccagccaggggcagagaggccagaaaggggcaacgccaggatctctttgaggagagatagttgatggtgatgctggaggggtgccccgggagttac

SEQ ID NO: 236661 - DNA, 201 bp, Homo sapiens
ccaccttcagcttctcataaaatcacagaactgcagtgaggacctctgcctgccgggacagcctggggatggtcccgtgcagccccctcaggcagcatccstgtggagggttcccctccgccccctaccgtggggagctcttcccagctgagtcacactgcacgcctggtccctaccctgggctgctctctgtgttatctt

SEQ ID NO: 236662 - DNA, 201 bp, Homo sapiens
gcttctcataaaatcacagaactgcagtgaggacctctgcctgccgggacagcctggggatggtcccgtgcagccccctcaggcagcatccctgtggaggrttcccctccgccccctaccgtggggagctcttcccagctgagtcacactgcacgcctggtccctaccctgggctgctctctgtgttatcttgcaggcgcc

SEQ ID NO: 236663 - DNA, 201 bp, Homo sapiens
ctgcctgccgggacagcctggggatggtcccgtgcagccccctcaggcagcatccctgtggagggttcccctccgccccctaccgtggggagctcttcccrgctgagtcacactgcacgcctggtccctaccctgggctgctctctgtgttatcttgcaggcgccgtcccagatccttcaggggactctgaaggcccatca

SEQ ID NO: 236664 - DNA, 201 bp, Homo sapiens; identical to SEQ ID NO: 45376

SEQ ID NO: 236665 - DNA, 201 bp, Homo sapiens; identical to SEQ ID NO: 45410

SEQ ID NO: 236666 - DNA, 201 bp, Homo sapiens; identical to SEQ ID NO: 45377

SEQ ID NO: 236667 - DNA, 201 bp, Homo sapiens; identical to SEQ ID NO: 45379

SEQ ID NO: 236668 - DNA, 201 bp, Homo sapiens; identical to SEQ ID NO: 45380

SEQ ID NO: 236669 - DNA, 201 bp, Homo sapiens
ttggatcccttctctgcctcactgaggtctttggggtgcaaatgtacagcccaggagaaagtggcccagggtcttaggtggcccccagccaagagaaggamgctcctctggtctgtgggaaaaggccccagcaggagatagggggagtgggcagcccactgcttgcaaggcttgaggtctcctgggccagtgtgtcgctca

SEQ ID NO: 236670 - DNA, 201 bp, Homo sapiens; identical to SEQ ID NO: 45373

SEQ ID NO: 236671 - DNA, 201 bp, Homo sapiens; identical to SEQ ID NO: 45375

SEQ ID NO: 236672 - DNA, 201 bp, Homo sapiens
cagaggtgcagcagtgggccaggcccccaaccccaaccctcttcccatgggtcaccagaggaaggggctgccccagtggcacaccctggctcccagatttmtgagctccagggttggtggctttgggtgccccggcagctagagtgatgatggagaccatgccaggggcaggtggccaccagggcaggggcatcagcatgg

SEQ ID NO: 236673 - DNA, 201 bp, Homo sapiens
gccccatgtcctgctccgctgggcttgcctgttgggattctactggggtcatggaggtgggtggcccacagagcggagctcgggagacccccgcagtcccyggagtagccacatgggagggaggcccggctggcaggagctcccagtccctccaatcctgtgggtcagagctggtgaggatgctcagagggcaagggaatg

SEQ ID NO: 236674 - DNA, 201 bp, Homo sapiens; identical to SEQ ID NO: 45378

SEQ ID NO: 236675 - DNA, 201 bp, Homo sapiens
cacctcaccccatcccaggcctcccaggcctccaagcccagaggaagaaggcactgtgtggccaaggaagggagccccggagcaggagccaggccaggtgyctgggtgaccagtgggtctgggggagctggaagcacatggcagcttccctgctaccaccgttgctgagcctcagcctgtccaagcattctttttgctctt

SEQ ID NO: 236676 - DNA, 201 bp, Homo sapiens
tgtccccaaggtatcacagagcacctcaggtgcagacacttggaatggagaaccctggtgactggctgaccccgagaggggacggttcagtgacccaccckcaaaggcccagatctggttcaccctcaccactcaggacatgacagctcagtctcctgaccaggagctggtcctcttccttgagggccaggagaggcccag

SEQ ID NO: 236677 - DNA, 201 bp, Homo sapiens
tcctccccgctctgggaaacagcaccagcaggtagctcttttgcaagggagcagagtaaccccacctttccttttctcccattctcttaaaagatccttakaaatcttatataataacatcttcagttttcagaggagaaaactgagagctaggggaggtgattaatttcaaggccatacatgtggtgctggaaccaggac

SEQ ID NO: 236678 - DNA, 201 bp, Homo sapiens
tcctgtagaaaagtttcaccttatgaagaatagcaggtaaaatacaagcctggaccacttcccgtgtggtatgcagggaacggttgatggggcaaagggcyttgggctatatagccctaggaatttcagagatcctgatgatggctctgggatcctccgtctcctggatcctgcatttttctctgcaggctctgatggtgg

SEQ ID NO: 236679 - DNA, 201 bp, Homo sapiens
aaaacaagagaatagtgtttgtctttaagtggagccttggactcaaaataggacctgagctctgtggataatttcttttttttttttttttttggagttgytctgttgcccaggctggagtgtcgtggcatgttcttggctcactacaacctctgcctcctgtgttcaagtgattctcgtatctcagcttccctagtagct

SEQ ID NO: 236680 - DNA, 201 bp, Homo sapiens
tcgctcaggaagacgggcagcagctcagcactcagttgtgccaggtgtgtgaggcctgggccaggctgcggcaccaccagcaagtcaccctgacggatgcrcagcagggccacgtgcgcccgcagcaggctcagtgagtgctgcagcaggctccgcagctgcccagagaagcctacatcaaagccacgcaacagtatctcc

SEQ ID NO: 236681 - DNA, 201 bp, Homo sapiens
tgcagttctgggcaccccacctggtggggcctcacttgggcctggagacagggaatggtagagggattatcaacctcaatgcctttgaccccacactcccraagacaatgacgcagttcctagagcagggagaggccaccctctcagtggcaagaaggtaagtaagtgggcagcatcgccctgacacagctgccctggtcc

SEQ ID NO: 236682 - DNA, 201 bp, Homo sapiens
caagggagcagagtaaccccacctttccttttctcccattctcttaaaagatccttataaatcttatataataacatcttcagttttcagaggagaaaacwgagagctaggggaggtgattaatttcaaggccatacatgtggtgctggaaccaggactctatacttcatcacactgcctcctctgggaatgaagtcctgg

SEQ ID NO: 236683 - DNA, 201 bp, Homo sapiens
ccttcagagtctgcaacatcctctcaactcatccaagtgactactgcctggtgctcttggggatgcagggaggcctgagaaggccaatgtctatacagaargttctaacatagtgcactgagtcaatgtgggcactttaaagccctttcacctgccaagtcacgaagcacccctatagttgtgtttgtaaaatactggggg

SEQ ID NO: 236684 - DNA, 201 bp, Homo sapiens
aatgcctttgaccccacactcccaaagacaatgacgcagttcctagagcagggagaggccaccctctcagtggcaagaaggtaagtaagtgggcagcatcsccctgacacagctgccctggtccccccacatcctccccgctctgggaaacagcaccagcaggtagctcttttgcaagggagcagagtaaccccacctttc

SEQ ID NO: 236685 - DNA, 201 bp, Homo sapiens
ctgccagcatccggtacacgaggcttctctgtcctggctagaaccattgcctcactgctttatagatgctgtctttttttttttttttttttttttttttwaagtatggtcttactgtgtcacccaggctggagtgcagtggcccaatcccagctcactgaagcctcaacctcctgggttcaagcagttctcccgcctcag

SEQ ID NO: 236686 - DNA, 201 bp, Homo sapiens
acatcttcagttttcagaggagaaaactgagagctaggggaggtgattaatttcaaggccatacatgtggtgctggaaccaggactctatacttcatcacrctgcctcctctgggaatgaagtcctggactgactgacgggtctgggcccgggggtcctaaaaggcatcttatgcagctgggggagtgatatagactccca

SEQ ID NO: 236687 - DNA, 201 bp, Homo sapiens
ccttttctcccattctcttaaaagatccttataaatcttatataataacatcttcagttttcagaggagaaaactgagagctaggggaggtgattaatttsaaggccatacatgtggtgctggaaccaggactctatacttcatcacactgcctcctctgggaatgaagtcctggactgactgacgggtctgggcccgggg

SEQ ID NO: 236688 - DNA, 201 bp, Homo sapiens
ctaagtccctccattgtgaagatgcatttccatttttgtaattaacaagcaatctatgtggtagtttgagatcacataaccatcttattgccccgtagatkctcatccaaggatcctgtagtcatccttactgaatccattattgcattgggggatgaagaacaatgacttttcttttcttttgtgatggagtctctgtca

SEQ ID NO: 236689 - DNA, 201 bp, Homo sapiens
ctctgggaaacagcaccagcaggtagctcttttgcaagggagcagagtaaccccacctttccttttctcccattctcttaaaagatccttataaatcttayataataacatcttcagttttcagaggagaaaactgagagctaggggaggtgattaatttcaaggccatacatgtggtgctggaaccaggactctatactt

SEQ ID NO: 236690 - DNA, 201 bp, Homo sapiens
tccttataaatcttatataataacatcttcagttttcagaggagaaaactgagagctaggggaggtgattaatttcaaggccatacatgtggtgctggaaycaggactctatacttcatcacactgcctcctctgggaatgaagtcctggactgactgacgggtctgggcccgggggtcctaaaaggcatcttatgcagct

SEQ ID NO: 236691 - DNA, 201 bp, Homo sapiens
tggattcagcccaatcatgatacgatctttttagaacggaacatcactgcagccatacagaaattagaaggattataagggagcaatttcatgccaaaaatttgacaatttaaatgtaatagacaatttcctagaaagagacaagttgcaaaaactaaccaagacaaaggagaaaatcttaatagacttatatcaagttaa

SEQ ID NO: 236692 - DNA, 201 bp, Homo sapiens; identical to SEQ ID NO: 45418

SEQ ID NO: 236693 - DNA, 201 bp, Homo sapiens
ccttctcagggcatcccttccctctcctacacccaccctcccagtgcacccctcccttctcctaacccccaccttctcagggcacccttccctctcctacmcccaccctcccagggcacccctccccttgtcttctttaccataagctacagtctggccgggtttggtggctcacacctgtaattccagcactttgggaaa

SEQ ID NO: 236694 - DNA, 201 bp, Homo sapiens
ttaattcttcatgctgtgaaatatttcattatttatgtgtgatgtaaagtaatccccccttaactgaagctttgctttccaaagttttagctatctgtggycaactgcagttcaaaaaacttacataaaatattttcaatgagaaagaccacattcacataactttcattacagtatgttgttataactgttctattttat

SEQ ID NO: 236695 - DNA, 201 bp, Homo sapiens
agaaaacaaagtagagtcagcccttcgtggccatgggctccacatccgcagattcagccaaacttggatcgaaaatattcagaaaaaaaaaaaaaaaaaamcaataaaaataccaatacaacaataaaaaacagtacaaataaaaaaccaatattgtataataactggttacatagtatttacattgtattaggtgttgta

SEQ ID NO: 236696 - DNA, 201 bp, Homo sapiens
ccaggttcacgccattctactgcctcagcctcccgagtagctgggaccacaggcacccgccaccatgcccagctaatttttttgtatttttagtagagacrgggtttcaccatgttggccaggttggtcggaaactcctgacctcgtgatccacccacctcagcctcccaaagtgctggggttacaggcgtgagccaccgt

SEQ ID NO: 236697 - DNA, 201 bp, Homo sapiens
agacctgcatagtaggtaaatgggtggaggcttgggcttggtcttttcagacagagagagagagagagacaaaaagacacacagacgaactacaagctccwttgggtcacacatcctagcatcttgctcctctgatactcagaaaattgcaaatggagcagtaacggtcaccctcatgagcccagtcccatgacccggtca

SEQ ID NO: 236698 - DNA, 201 bp, Homo sapiens
ctttcggtttctgcagaaacatatgctgaaagaggggaagggccggatgctgcaggccatcagcccgaagcagagccccagcagcagccctactcgcgagsgctccccctccccctctttccgatggcccttctccggcaagacttccccaccttgctccccagcaaatctctccaggcacaaggctgcagcctatgatat

SEQ ID NO: 236699 - DNA, 201 bp, Homo sapiens; identical to SEQ ID NO: 45426

SEQ ID NO: 236700 - DNA, 201 bp, Homo sapiens
ggtgggcgacggggtgcctgaggctgagaagaacgcaggggagcccgagaacacctatattctgcggcctgttttccagcagaggcgggtagaggacgggstgtggcggggcgacctcgagcgcgctggtctgaggggcggagctcgcctgggacctgggccacggaaggagcgcgggggacgcgcggggtccgcggggcg

SEQ ID NO: 236701 - DNA, 201 bp, Homo sapiens; identical to SEQ ID NO: 45428

SEQ ID NO: 236702 - DNA, 201 bp, Homo sapiens
tcctggttcaaagcgattctcctacctcagcctcctgaatagctgggactacaggcatgtgccaccatgcctggctaatttttgtatttttagtagagacrgggtttcaccacgttggccaggctggtctcaaacttccgagcttaggtgatctactaacctcagcctcccaaagtgctgggattacaggtgtgaccacca

SEQ ID NO: 236703 - DNA, 201 bp, Homo sapiens
ctattccagtcagagggctcgtggttgctatttttatattccctcttttctcacggactgagagaaactagttaagaaagaagtaacctctttctcatactttttttttttttgagacagagtcttgctttgtcacccaggctggagtgcagtggtgcgattttggctcactgtagcctctgcctcctgggttcaagcaat

SEQ ID NO: 236704 - DNA, 201 bp, Homo sapiens
agctctgtgtatatagggagaaaacaaagtagagtcagcccttcgtggccatgggctccacatccgcagattcagccaaacttggatcgaaaatattcagaaaaaaaaaaaaaaaaaaacaataaaaataccaatacaacaataaaaaacagtacaaataaaaaaccaatattgtataataactggttacatagtatttac

SEQ ID NO: 236705 - DNA, 201 bp, Homo sapiens
aaacaaagtagagtcagcccttcgtggccatgggctccacatccgcagattcagccaaacttggatcgaaaatattcagaaaaaaaaaaaaaaaaaaacawtaaaaataccaatacaacaataaaaaacagtacaaataaaaaaccaatattgtataataactggttacatagtatttacattgtattaggtgttgtaagt

SEQ ID NO: 236706 - DNA, 201 bp, Homo sapiens
gactccctatggttaacatctacatagtatggaacatttattataattaatgaaacaatattgatacagtgttatcaaataaagctttgttctgatttctrgtttgttcctaatgtcctttttctgctttaggattctatctaggataccacattaaatgtctctttgggctcttcttggcggtaacagtttctcagactt

SEQ ID NO: 236707 - DNA, 201 bp, Homo sapiens
atgaaacaatattgatacagtgttatcaaataaagctttgttctgatttctagtttgttcctaatgtcctttttctgctttaggattctatctaggatacmacattaaatgtctctttgggctcttcttggcggtaacagtttctcagactttcttgtttttcatcaccttgacttttttgaggagtactggttaggtgtt

SEQ ID NO: 236708 - DNA, 201 bp, Homo sapiens
tttttttttttttttttgatagagtttcactcttgtcacccaggttggagtgcagtggtatgatcatggctcactgcagcctccgtctcttgggttcaaaygattctcctgcctcagtctcctgggtagctgggattacaggcacctgccaccacgcccagcttatttttgtagttttagtagagaccgggcttcaccatg

SEQ ID NO: 236709 - DNA, 201 bp, Homo sapiens
tttagtagagaccgggcttcaccatgttggccaggctggtctcgaactcctgacctcaggtgatcctcccgccttggcctctcaaagtgttgggattacargtgtgagccaccacacctggcctagctttttttttttttttttttttgagatgaggtcttgctctgtcacccaggcgggagtacagtggaacgatcttgg

SEQ ID NO: 236710 - DNA, 201 bp, Homo sapiens
ttgtgctgagtcagttcctgggtcggggccacaagatcagatgagccagtttatccatctgggtggtgccagctgatccatcaagtgcagggtctgcaaartatctcaagcgctgatcttaggagcagtgtagggagggtcagaatcttgtagcctccagctgcatggctcctaaaccatcatttctaatcttgtgactaa

SEQ ID NO: 236711 - DNA, 201 bp, Homo sapiens
gctcaggagtttgaggctacagtgtgctatgattatggctgtgagagccgagatcgtgccactgcactctagccagggtgacagagtgagactctttctcaaaaaaaaaaaaaaggaaagaaggagaaggacatttaaaaaatacattatgctggtcctagctattctggaggctcagatgggaggattgcttaagctcag

SEQ ID NO: 236712 - DNA, 201 bp, Homo sapiens
atgggaggattgcttaagctcaggagtttgaggctacagtgtgctatgattatggctgtgagagccgagatcgtgccactgcactctagccagggtgacasagtgagactctttctcaaaaaaaaaaaaaggaaagaaggagaaggacatttaaaaaatacattatgctggtcctagctattctggaggctcagatgggag

SEQ ID NO: 236713 - DNA, 201 bp, Homo sapiens
tcattgagcaggaaggggcatcgacactgagaagttatctagtctatccccttatctgggcagaactatctttcaactgtccccagcaaggtttttgaaayctttacagaaagacgttacacattctcctagataattttgccagctctctctcaaccttaaagtctggtgacaagataagcaagtcgccttgcccagctt

SEQ ID NO: 236714 - DNA, 201 bp, Homo sapiens
gtgtcagggtcttatgaaattcatcctcccttaagactgagattctgatgttggttactatctcaactctatttttgtagtgatgttccccttagaggccscggtgtcttctccagctaactgtccttatttggggtaccttagtctaaccgccatgttcaaagacatatttgaaattcaggtttaaatcctttttccccc

SEQ ID NO: 236715 - DNA, 201 bp, Homo sapiens
acatgtttcatctgtgatttgttttgttaattgctttgtggattatttgtggcagaatttaaatcctaattcctttctacaatttagccagtaaattcaargaatgtacctttttacgtttgcagcatgtgccgaagcgccacctcagaagataaaaagaaatgagtctcatatttggcattcttttaggtttgttaccta

SEQ ID NO: 236716 - DNA, 201 bp, Homo sapiens
aattattttattttattttatttttgagacagagtctcactctgtcacccaggctggagtgcagtggcgccatctctgctcactgcagcctccaccttccrggttcaagcaattctcctgcctcagcctcccgagtaattgggattactggtgcccaccaccacacccgcctagtttttgtatttttagtagtgacaggat

SEQ ID NO: 236717 - DNA, 201 bp, Homo sapiens
tctttctcgtctggcttatttcacttagcataatgtcctccaggttcagtttgtacttaaaaattatgatacagtactttgtaagcagtaagtactcatakttttgactgcctgatattattgacttgccagatgccaaattgctgattatatttctcatagtggattttgtctctctacacttagaagaattgagcagat

SEQ ID NO: 236718 - DNA, 201 bp, Homo sapiens
attggtctgaccctggaaggtggcggtttctgtagtctgtttccctcacccatgatatgctgctggagttcccttccccatccccccacagcagagctgcygcgactccctttctatctgttccaggatggtgtcctctccctgcacgcaggcaagctcacggacttgctcccgtatcctgggactgagccttgggactgc

SEQ ID NO: 236719 - DNA, 201 bp, Homo sapiens
gaggcacgagaatcccttgaaccctggaggcggaggctgcagtgagctgagatcgcgccactgcactccagcccgggcgacagagcgaggctccgtctttwaaaaaaataaaagaataagtaaataagtttaaaaggtcttttacttcagtccagttggtaactaaaaaataataatacattttttttacatccttcttcc

SEQ ID NO: 236720 - DNA, 201 bp, Homo sapiens
aaataaaacatctctattaaaaaaacgtaaatagaatgttagctgtggattctattaaagacaactttttcttcagtgtcttgtcttctctaattatttgatgacttttactcatgtaagtttttgcagatgggggaaaagagtgaagatgtgaaataaaacactgtccaaaaaatcttagtattcagaaagaccagaaag

SEQ ID NO: 236721 - DNA, 201 bp, Homo sapiens
attgtgatccccagtgctagaggtggggcctggcagaaggtgtgtggatcatgaggcggatccctcacggctcagagctgtctttgtgatagtgggttccygcgagatctggtcatttagaagcgtgtggcacctctggcctctctctcgcctgctcctgctctcactatgtgactcgcctgctccctcttcacctgctgc

SEQ ID NO: 236722 - DNA, 201 bp, Homo sapiens
ttcaataaaattcacctattttaagtgcaaagtttaatgagttttgtcaatatgtacagttatgtattcaccaccagaatctagacacagaatgcttccamcccttcagaaagcttcccatgccccatactaatcctctttcccattctcagcccatggcaaccgctcatctgctctccgttaaaagttttgccttttcta

SEQ ID NO: 236723 - DNA, 201 bp, Homo sapiens
gcagtgagctgggatcgtgccagtgcactccagcctgggcaacagagcgagactctgtctcaaaataaataaataaataaataaataaataaataaataaaataatcctcatcttcacctttatgctcagtagcttttctaaagattctgactttctaatgagcattttatagctttcaatctgcagactttattctttcc

SEQ ID NO: 236724 - DNA, 201 bp, Homo sapiens
tgcagtgagctgggatcgtgccagtgcactccagcctgggcaacagagcgagactctgtctcaaaataaataaataaataaataaataaataaataaataaaataatcctcatcttcacctttatgctcagtagcttttctaaagattctgactttctaatgagcattttatagctttcaatctgcagactttattctttc

SEQ ID NO: 236725 - DNA, 201 bp, Homo sapiens
aaaaggaaacaattaaatcctagtcactggggaagattcctaaggagcagagtttttaagcaggttgcttggctctcattggtctgaccctggaaggtggyggtttctgtagtctgtttccctcacccatgatatgctgctggagttcccttccccatccccccacagcagagctgctgcgactccctttctatctgttcc

SEQ ID NO: 236726 - DNA, 201 bp, Homo sapiens
ttgcagtgagctgggatcgtgccagtgcactccagcctgggcaacagagcgagactctgtctcaaaataaataaataaataaataaataaataaataaataaaataatcctcatcttcacctttatgctcagtagcttttctaaagattctgactttctaatgagcattttatagctttcaatctgcagactttattcttt

SEQ ID NO: 236727 - DNA, 201 bp, Homo sapiens
gttgcagtgagctgggatcgtgccagtgcactccagcctgggcaacagagcgagactctgtctcaaaataaataaataaataaataaataaataaataaataaaataatcctcatcttcacctttatgctcagtagcttttctaaagattctgactttctaatgagcattttatagctttcaatctgcagactttattctt

SEQ ID NO: 236728 - DNA, 201 bp, Homo sapiens
tggctttgcagttggctttgatgatcactcccaaaagttcagtgaatgaattaccactatgttaactgttcacaaaaagaatgaaacagacagtttctgcygttacggtctggtaccaacacattcgtataaagccatacagccaactaaataaatgagtaatttatatagtgcagtatttctgtcaataaatggaaaacg

SEQ ID NO: 236729 - DNA, 201 bp, Homo sapiens
tatctgcaaagcctctttactatttttatttttatttatttttatttgtatttttgagacagagtctcgctttgtcacccaggctggagtgcagtggtgcrgtcccggttcactgcaacgtctgcctcttgggttcaagtgatttccctgcctcagcctcccaagtggctgggattgcaggtgcccaccaccatgcctggc

SEQ ID NO: 236730 - DNA, 201 bp, Homo sapiens
cctcaagtgatcctcctgctttagcctcccaatatgctgggagtacaggcatgaaacaccatgcctggctgctttttcctacattttgaattgttgccttyatctttctcacacagtgtttttgctcagctcttgccatcctatgtcttacatagcttattagcctaaacacccatccattttctttgtccacagtgtcag

SEQ ID NO: 236731 - DNA, 201 bp, Homo sapiens
agaaacatatgctgaaagaggggaagggccggatgctgcaggccatcagcccgaagcagagccccagcagcagccctactcgcgagcgctccccctccccstctttccgatggcccttctccggcaagacttccccaccttgctccccagcaaatctctccaggcacaaggctgcagcctatgatatcagtgaggatgaag

SEQ ID NO: 236732 - DNA, 201 bp, Homo sapiens
gctggactagcacgggtagatggagaaagctgttgggaagttgcataatgtggtcatctgtgcctaattaaatgaggttagaggtgtgcacaccaccacaytgcctgggatctaaatcttcagatattaacgtttgaggctatggagctgtttccctgaatcacacacgagaaagcagtcaacatgggtgggccaaatgtg

SEQ ID NO: 236733 - DNA, 201 bp, Homo sapiens
agtgttttgattccttgcagaaaagtttattctaacaagctgatcttgggtctgtagaagctctaagagacaggaagcctagcttgggaccaggcaggtcrggtgtgaaagttaacatccacagcgttagatcaggctcgtcatacaaatgtgggtccccagagtcagagtcaacaggactgcgttcatgtgagctgccag

SEQ ID NO: 236734 - DNA, 201 bp, Homo sapiens
taccacttcttgtgtgtgcatccacagcatatcttatctgttattatgctgagagtggggtagattaaagcaaagcaaaattctagactgaaaacagtgtyaattgagtgcttgagccatgttttttcgttctcttatggtagagaagtttaggatgagcattatttctcagaagagttatttctttatctaggagaagaa

SEQ ID NO: 236735 - DNA, 201 bp, Homo sapiens
acagagcgaggctccgtcttttaaaaaaataaaagaataagtaaataagtttaaaaggtcttttacttcagtccagttggtaactaaaaaataataatacwttttttttacatccttcttccataatattgtgtagcctcttacatctacggaatcaaaagggatccttcccaaggttcattctagcaaaggaaaacgttt

SEQ ID NO: 236736 - DNA, 201 bp, Homo sapiens
tgtgtgtgaatatagtctggaaaaagttgttatggaagcaatattgcattcagagacaattcataatttggggactgttgatttccattataacttttagmtgcatgcatttggaaagtttatatagcattttagaagctaacctcttagattaataggagttaattttgttagcatgctgaaatctgtgttctatagaat

SEQ ID NO: 236737 - DNA, 201 bp, Homo sapiens
tggggttgcctgtttggctttccttacttatcgcctgacccctggtctccttattttttgggataggaattatctgtatgaccgttcgctctggaactccrtctgcctggagccctctgcagctgttgtctggcacgtgtccctcttctccgcccttctgtgcatcagcctgctccagcttctcctggtggtcgttcatgt

SEQ ID NO: 236738 - DNA, 201 bp, Homo sapiens
gttctatttttcaaagtcataacaatgattgttcttgttttctctcatagaatagactgccatcggataaagagtggtccctagcttctatttttccaagyaaataagtagaacatgttcttgggattataccattaaatgttaattttcttgaagaagaaagattgttgtctgccaagattttatgttagcgctcggatt

SEQ ID NO: 236739 - DNA, 201 bp, Homo sapiens
ctggacaaacagggatattaaggcagcctgtgtgtgtgcgtgtattttttttcccctttgaatgtagatatttaaagccacctccttttccagagccatcrctgtaccttacttgaatggtattggttgatgacagaggcgcacttatcataaactgagagtccaagaaatattgttcctcattgttggaggtattccaaa

SEQ ID NO: 236740 - DNA, 201 bp, Homo sapiens
tcccaagtctttgggagtttgagttgggaggatcacttgaggccaggaattcaagaccagcctgggcaacatagcgaggcctgtctcttaaaaaaaaaaawaactaggtgtggtggcatgtgcctgtagtcccaactacttgggaggctggggcaagaggatcgcttgagctaacgaggttgaagctgcagtgaggcaaga

SEQ ID NO: 236741 - DNA, 201 bp, Homo sapiens
cattgatggacatttgggttgtttctactttttggctattacgagtaatgcaagtgtgaacatttttcatgtataagttttttgtttttgtttttgttttrttttgtttttttgaggcagagtctttctctatctcccagacgagtacggtagcacaatctcagctcactgcaacctccacctcctgggttcaagtgattc

SEQ ID NO: 236742 - DNA, 201 bp, Homo sapiens
accattatattgctgaggcttgggtaagaaagttagggatgtgaggaggttgaaaatcctgaagaagagaaaaaatatgagggaggctaaggaaacttagmcactttctgatcactgatgactccttaggctgcacctgagtgatggtggtgtttttggaggctgtacctgagtgatggtggtttttggggggctgcacct

SEQ ID NO: 236743 - DNA, 201 bp, Homo sapiens
gctaggaataaagcaaaggaagccagtcttttcagtggaatgagctctgagaaaacttaaatttcttggtctttagactctgggaatcttttttttttttwaattcttctggggagtcttaatgctttaaattactttgcttcatatattcatgtgaaatcagttcagtgacttgctgctacctattccacattcctccct

SEQ ID NO: 236744 - DNA, 201 bp, Homo sapiens; identical to SEQ ID NO: 45421

SEQ ID NO: 236745 - DNA, 201 bp, Homo sapiens
cttgaagtccttggctcaagtgattctcctgccttggcctccccaagtgcccaagtgctaggattataggtgtgagccaccacacccagcctcacccttgkttctattttttttttttttttttttttggagacagagtttcattcttgttgcccaggctggagtgcaatggcatgatcttggctcaccacaacctcagcc

SEQ ID NO: 236746 - DNA, 201 bp, Homo sapiens
gcagtgtgtttactgaagtcgtgcgcatgctcacttgaggcgtttttcccttacccgcggagcagcactagaggaaggtcacacacaccagctaaactccrccattttgcttcttagtgtagatgcttgagcccactcgcccaattcctgagctcttaccaggaagctgctgatcaccaagttcaggtattttctatctat

SEQ ID NO: 236747 - DNA, 201 bp, Homo sapiens
ccatgatatgctgctggagttcccttccccatccccccacagcagagctgctgcgactccctttctatctgttccaggatggtgtcctctccctgcacgcmggcaagctcacggacttgctcccgtatcctgggactgagccttgggactgcagccctgtttgctgctggggccaacgtggcactcctccttcctaactgg

SEQ ID NO: 236748 - DNA, 201 bp, Homo sapiens
cgtaaattctttggaattttcagcacaggaaatttgtctctcctctcccatttatttatgtattctgtcatttatttcaacatggactcatggatattttrtactttggatgattattcaatactactttatttattttgtagttctaattgttccagcttggccattgagagctttcagtggattcctgtgtcccactga

SEQ ID NO: 236749 - DNA, 201 bp, Homo sapiens
actgtgcttaatttataaataaaactttatcatagctctgtgtatatagggagaaaacaaagtagagtcagcccttcgtggccatgggctccacatccgcmgattcagccaaacttggatcgaaaatattcagaaaaaaaaaaaaaaaaaaacaataaaaataccaatacaacaataaaaaacagtacaaataaaaaacca

SEQ ID NO: 236750 - DNA, 201 bp, Homo sapiens
agtggctcactcctgtaatcctaccactttcgaaggccaaggcgggcagattgcctgagctcaggagttggagaccaacctgggcaatatggtgaaacccygtctctaccaaaaatacaaaaaattagggccaagcacagtggctcatgcctgtaatcccagcactttgggaggccgaggccggtggatcacttgaggtca

SEQ ID NO: 236751 - DNA, 201 bp, Homo sapiens
caacctgggcaatatggtgaaaccccgtctctaccaaaaatacaaaaaattagggccaagcacagtggctcatgcctgtaatcccagcactttgggaggcygaggccggtggatcacttgaggtcaagaattcgagaccagcctgcccaacatggtgaaaccccgtctctactaaaaatacaaaaattagccgggcgtggt

SEQ ID NO: 236752 - DNA, 201 bp, Homo sapiens
  misc_feature (1)...(201): n = A,T,C or G
aagggggtgccatggacagaattctcccccatgacaggacggaagaacactgagaccagagaagtcagacctgtgcagaccgccccacagactccccagcngcgaccccgtcttagctcagcgtttctcctccctccgcaggctccccagctgcgaccccgtcttagctcagtgtttctcctccctccgcaggtgcttact

SEQ ID NO: 236753 - DNA, 201 bp, Homo sapiens
gaggcggaggttgcagtgagccaagagcatgccgctgcactccagcctgggcaacaagagcgagactgtgtctcaaaaaaaaaaaaaaaaaaaaaaaaaargaattgctttttgcgtcagcagtgtccccactagactttaagctcctcaaggaaagggattacatctttttcatcgttatatccctagccccccaagtgt

SEQ ID NO: 236754 - DNA, 201 bp, Homo sapiens
caggctggtcttgaactcctgacctcaggtgatctgccggctttggcctcccaaagtgctgggattacaggcgtgagccactgcacccggctaaaaataawtttttttcaataaaaaataaataaataaattaaataaataaataaatagcgagccttaaggggagacagacgtgtaactgaactgcacagtgggaacagg

SEQ ID NO: 236755 - DNA, 201 bp, Homo sapiens
attttggtcttggggcctgaagtcaggtcctcactgtgaccctcagtaacgctaagttcttgggcaagttgcttcatctttccagtttcaggctttcatcygtaaaatgggagctgatcaagtcaagggagtagtgcttagtgaagcccagacgtctgtaccagtgtgaggacccagacgtctgtaccagtgtgagaaact

SEQ ID NO: 236756 - DNA, 201 bp, Homo sapiens
cagctaagaaaaccacattttctctttccttgcctctgctaggactgtgagcatctcatagtccactccctaaacactttctggtaacacctagttttccrcctgagggtcagaggctagaatcattgcctgcacagcaggactaccttggttcttaaaacttggatcacccaggcaaggcgtggtggctcacgcctgtca

SEQ ID NO: 236757 - DNA, 201 bp, Homo sapiens
agggcctataagacatccaaatagtaattggacagatgagctcattgtttacattcactgaaatggcaataggagtcagggagaatgattgcttttctttyatttttaaaaccagatcctggctgggcgcagtggctcatgcccgtaatcccaacactttgggaggccgaggagggtggatcacgaggtcaagtgatcgag

SEQ ID NO: 236758 - DNA, 201 bp, Homo sapiens; identical to SEQ ID NO: 45417

SEQ ID NO: 236759 - DNA, 201 bp, Homo sapiens
tctccaagcttctgggcagcaccatgttccccagtgcctgcagtggaagctgcttgtagtacgcctggttcagctgcagcctctcagggagctggcgcctygagctgctcaccccctggcagctggcgtgcctggctgtgcgcagtggccggaccctgtgctggctcgcctgtgcacctcttgccgctccgtgcctggctt

SEQ ID NO: 236760 - DNA, 201 bp, Homo sapiens; identical to SEQ ID NO: 45419

SEQ ID NO: 236761 - DNA, 201 bp, Homo sapiens; identical to SEQ ID NO: 45420

SEQ ID NO: 236762 - DNA, 201 bp, Homo sapiens
ggaggctaaggaaacttagccactttctgatcactgatgactccttaggctgcacctgagtgatggtggtgtttttggaggctgtacctgagtgatggtggtttttggggggctgcacctgagcgatagtgatttttttttggaggctgcacagctggtcagaccatctctagatgttctttccacagtggttcatagggc

SEQ ID NO: 236763 - DNA, 201 bp, Homo sapiens
gaggagagagaaagagaagagctgtagccctttgggaagcccagacctaggagctccttgagccagggctgtgacaccctctttggagctctgtggttccyggcctctccaagcttctgggcagcaccatgttccccagtgcctgcagtggaagctgcttgtagtacgcctggttcagctgcagcctctcagggagctggc

SEQ ID NO: 236764 - DNA, 201 bp, Homo sapiens; identical to SEQ ID NO: 45422

SEQ ID NO: 236765 - DNA, 201 bp, Homo sapiens; identical to SEQ ID NO: 45423

SEQ ID NO: 236766 - DNA, 201 bp, Homo sapiens
gggaggctaaggaaacttagccactttctgatcactgatgactccttaggctgcacctgagtgatggtggtgtttttggaggctgtacctgagtgatggtggtttttggggggctgcacctgagcgatagtgatttttttttggaggctgcacagctggtcagaccatctctagatgttctttccacagtggttcataggg

SEQ ID NO: 236767 - DNA, 201 bp, Homo sapiens
ggcagagtaaaattgttcaactgtaagaactattacatgtgtccctcatggttttttctttcctgaaatattctactacatgtccaggccgaagaagtatwagctttattatgtgtgccagtggctaacccagggtctggcacagagtaagtgccgctcagtgtttgttgaataagggtttctctgacgaaattagaggga

SEQ ID NO: 236768 - DNA, 201 bp, Homo sapiens
ttatagctgcacaacgttaggtttcactccctatacttaggagaaacggattcagcctaaaccccagccaggaaggacagctgtatttgtcttctacctgsaaatatacacagtatgtgagaaagactgaagaaacagttgtgaaagataagatacttaaaatatctctttttttttttttttgagatggagttttgctcc

SEQ ID NO: 236769 - DNA, 201 bp, Homo sapiens
caggaaggacagctgtatttgtcttctacctggaaatatacacagtatgtgagaaagactgaagaaacagttgtgaaagataagatacttaaaatatctctttttttttttttttgagatggagttttgctccactgcccaggctggagtgcagtggcgtgatctcggctcactgcaacctccgcatcccgagttcaagca

SEQ ID NO: 236770 - DNA, 201 bp, Homo sapiens
gtgttctggaggatgaaccactaaacaaacaggaagtgttggcccatcctagtagggctcttgagggaggttctctattctatctccaaatacttttcttyctgtctcattcctaagggtcagtctgcagggcattgagtaatgcactgccccatgttcgcctcctactgtattggctctgaggaggcgcgatcatttccc

SEQ ID NO: 236771 - DNA, 201 bp, Homo sapiens
agatggtcctttttgcatgtttgatgtttcatccttcaatcagacacaagcttggaaatatggttacccattcaaagacctgcatagtaggtaaatgggtrgaggcttgggcttggtcttttcagacagagagagagagagagacaaaaagacacacagacgaactacaagctcctttgggtcacacatcctagcatcttg

SEQ ID NO: 236772 - DNA, 201 bp, Homo sapiens
tgtattttttttcccctttgaatgtagatatttaaagccacctccttttccagagccatcactgtaccttacttgaatggtattggttgatgacagaggcrcacttatcataaactgagagtccaagaaatattgttcctcattgttggaggtattccaaatggttactgggcagttatcgatgttgtaatggtggtgtgg

SEQ ID NO: 236773 - DNA, 201 bp, Homo sapiens
gatgatagtacagtctgtctttctcagctgagtacactggctcttgtttccatttttaaatgaaggatgtagtacagcctctctaacacacatgaagtatwtgggtaccagcaaactaaacctggagagaggagcttcaagctcctcgactgtgccatctggcatttattcactgcttgtagctgagtttctgtggtcaca

SEQ ID NO: 236774 - DNA, 201 bp, Homo sapiens
atgcgccctggacgctgacacccgagttcctggccgaacaccgggtaagaaactggacacatattcccattccttgtttcagaatcccctcaactctcaargctgctggcacgtaggctggttttccactagccgtgttttacttctacctcttatgtaagtttcgtaggagatgacagtgatattactagtgataacagt

SEQ ID NO: 236775 - DNA, 201 bp, Homo sapiens
ttttttgtacttttagtagagatggggtttcaccatgttggccaggatggtctcgatctcttgacctcgtgatccacccgcctcagcctcccaaaggctgrgattacaggcgtgagccactgtgcccagcctgtttctcctttcaaaactgaatttttgtactcgacatctccctttttgctctccaccctcttctgtcca

SEQ ID NO: 236776 - DNA, 201 bp, Homo sapiens
taggttgggtggtttgtgaatagattgtagaatttatgagcaaagcaaagagagatatgaagtccactgaggcctggcctctgcctattgtcctttttctsggcctgagaacattgactgggtctttctgaatggcagttatcatgggttttaatgatgtttccttattttcagattgattttgtagcccatgatgatatt

SEQ ID NO: 236777 - DNA, 201 bp, Homo sapiens
taggctccacccactaaccggttcaccagcaaaccctctggccctattgaccacagcaagatgactggtatacagagtgagggtaacagttctagcagacyaggagaaatagctacaaaagcagctggctaacttcatatgtatactccataaatcattaggttgggtggtttgtgaatagattgtagaatttatgagcaa

SEQ ID NO: 236778 - DNA, 201 bp, Homo sapiens
cctttctaagaacgtgggcaccgcaaatcaaactatttactgttgattgggatggaaagacactgctgtcttagtcattcatctttgacttgtgaatgaartgattttactgttagtttttgtgttactaaagcagaaacctagagtgctgcttataggcaaggaaacttacatgtttacatatgacataatttttcatgg

SEQ ID NO: 236779 - DNA, 201 bp, Homo sapiens
aaaccccgactctactaaaaatacaaaaattagccgggcgtggtggcgcatgcctgtaatcccagctactcgggatgaggcacgagaatcccttgaaccckggaggcggaggctgcagtgagctgagatcgcgccactgcactccagcccgggcgacagagcgaggctccgtcttttaaaaaaataaaagaataagtaaat

SEQ ID NO: 236780 - DNA, 201 bp, Homo sapiens
caaaaattagccgggcgtggtggcgcatgcctgtaatcccagctactcgggatgaggcacgagaatcccttgaaccctggaggcggaggctgcagtgagcygagatcgcgccactgcactccagcccgggcgacagagcgaggctccgtcttttaaaaaaataaaagaataagtaaataagtttaaaaggtcttttacttc

SEQ ID NO: 236781 - DNA, 201 bp, Homo sapiens
tgtaatcccagctactcgggatgaggcacgagaatcccttgaaccctggaggcggaggctgcagtgagctgagatcgcgccactgcactccagcccgggcracagagcgaggctccgtcttttaaaaaaataaaagaataagtaaataagtttaaaaggtcttttacttcagtccagttggtaactaaaaaataataatac

SEQ ID NO: 236782 - DNA, 201 bp, Homo sapiens
ccggtcaggggagaccccagttttctactggggttgcctgtttggctttccttacttatcgcctgacccctggtctccttattttttgggataggaattayctgtatgaccgttcgctctggaactccgtctgcctggagccctctgcagctgttgtctggcacgtgtccctcttctccgcccttctgtgcatcagcctgc

SEQ ID NO: 236783 - DNA, 201 bp, Homo sapiens
agagattcggctgaggggcagaagtgggtttaaggcagagggagaggctgaagcaagtttgagagcaggagtgaaggtttattaaaaagtttttgagcagsaatgaaaggaagtaaagtacacttggaaaagggccaagtgcgtgacttgagacacccaaatgtgctgttagacccttgacttggcgcctgcctgccgcac

SEQ ID NO: 236784 - DNA, 201 bp, Homo sapiens
attttctatctattgggagactgtctttcccaacgctggctgtgaccaatattattttagaaagacagtgtaacaaccgcctggccatcacctgatagtcmcctgacattactggggtagaggccctctcccgccctgctcatgtctgctctatttcttaccacacttgattagaattactttttggccagcctgacccac

SEQ ID NO: 236785 - DNA, 201 bp, Homo sapiens
cttgggaccaggcaggtcgggtgtgaaagttaacatccacagcgttagatcaggctcgtcatacaaatgtgggtccccagagtcagagtcaacaggactgygttcatgtgagctgccagccactctaacagctgtgggcagcacctagaaacagccggcaaagtcgatttccccatctcaacattcttctctctcctgcag

SEQ ID NO: 236786 - DNA, 201 bp, Homo sapiens
ccatgttggccaggatggtctcgatctcttgacctcgtgatccacccgcctcagcctcccaaaggctgagattacaggcgtgagccactgtgcccagcctrtttctcctttcaaaactgaatttttgtactcgacatctccctttttgctctccaccctcttctgtccatctcttgtaaccaccattccattctgtacttc

SEQ ID NO: 236787 - DNA, 201 bp, Homo sapiens
cctcctgtatggccaaatcccctgcccccataggccacagatgctatggcccacgtggccggcttcactgtggctcatgacgtgagtgctcgtgactggcwaatgagacgtaatgggaaacaatggctgctgggaaaaaccttcgacaccttctgccctctgggccctgccttggtgaccaaggacagtgtagcaggtagg

SEQ ID NO: 236788 - DNA, 201 bp, Homo sapiens
gtggagccttggactcaaaacaggatctgagccctgaggatttttttttttttaattgagatggagtcttcgtctgtcacccaggctggagtgcagtggckcgatctcagctcactgcaacctccttcccctgggttcaagcgattctcgtgtctcagcctccctagtagctgggattacaggtggctgccaccacactcg

SEQ ID NO: 236789 - DNA, 201 bp, Homo sapiens
cctgtatggccaaatcccctgcccccataggccacagatgctatggcccacgtggccggcttcactgtggctcatgacgtgagtgctcgtgactggcaaaygagacgtaatgggaaacaatggctgctgggaaaaaccttcgacaccttctgccctctgggccctgccttggtgaccaaggacagtgtagcaggtaggtcc

SEQ ID NO: 236790 - DNA, 201 bp, Homo sapiens
cagcctccctagtagctgggattacaggtggctgccaccacactcggcgagttttttgtatttttagtggaaacggggtttcaccacgttggccaggctgrtcttgaactcctgacctcaagtgatccacccacctcggcctcccaaattgttagggatatcacgcatgagccactacaactggcccttgtgggaaggcac

SEQ ID NO: 236791 - DNA, 201 bp, Homo sapiens
ctgtatggccaaatcccctgcccccataggccacagatgctatggcccacgtggccggcttcactgtggctcatgacgtgagtgctcgtgactggcaaatragacgtaatgggaaacaatggctgctgggaaaaaccttcgacaccttctgccctctgggccctgccttggtgaccaaggacagtgtagcaggtaggtccc

SEQ ID NO: 236792 - DNA, 201 bp, Homo sapiens
tttctcccgttctcttaaaagatccttagaaatcttacataataacatcttcagttttcagaggagaaaactgagagctaggggaggtgattaacaatttsaaggccatacatgtggtgctggaaccaggactctatacttcatcacactgcctcctctgggaatgaagtcctggactgactgacgggtctgggcccgggg

SEQ ID NO: 236793 - DNA, 201 bp, Homo sapiens
ggccaaatcccctgcccccataggccacagatgctatggcccacgtggccggcttcactgtggctcatgacgtgagtgctcgtgactggcaaatgagacgyaatgggaaacaatggctgctgggaaaaaccttcgacaccttctgccctctgggccctgccttggtgaccaaggacagtgtagcaggtaggtccctggtcc

SEQ ID NO: 236794 - DNA, 201 bp, Homo sapiens
cagctcctacaaggagagaggactgcaaggaggttttctataagacacttggttcctgggtttggactagattaggtgagagtgtccctgaagcctggacycctatagaatctggtctaaggagctgatgaacaataaattaaaaatactttaagatgtcattttcatctattaaaatggaaaaaaatacaaatgtttcac

SEQ ID NO: 236795 - DNA, 201 bp, Homo sapiens
tgcccccataggccacagatgctatggcccacgtggccggcttcactgtggctcatgacgtgagtgctcgtgactggcaaatgagacgtaatgggaaacartggctgctgggaaaaaccttcgacaccttctgccctctgggccctgccttggtgaccaaggacagtgtagcaggtaggtccctggtccctgcccccttat

SEQ ID NO: 236796 - DNA, 201 bp, Homo sapiens
tccctgcccccttatacctaccattgcacagatgaacagcgcttcagggaggagcatgggttcaggtacatgtggcacctgccctccctggccgccctttsactgctgactccatacagggcaagtctcttatcctcagccacgagttctcccatgggcttccttcccaagccccctagagggaacacaactgcagaggat

SEQ ID NO: 236797 - DNA, 201 bp, Homo sapiens
cactgcagctcactgttcctctcccaccctacaggaggtagattgggaagtggagctggccgtggtcattggaaagaaaggcaagcacatcaaggtgaggkggaaagggtgggctcccagtccagagtgcagcagaggccccagctcctgcctctcctagttctgacctcactcaccaacacacggtgccagctgtccctg

SEQ ID NO: 236798 - DNA, 201 bp, Homo sapiens
gtctcaggctttgtttgatggaggctactgtttccacctcatgtcgccgcccctttgcttatggactcttgcagagttggattgagctcgggctgtgtgayatagtggttgttgcagaagccccagggccactttctgactagtaccttgggcacctgacatcatccctttgagtctcagtgtcctcttctttaaagtgag

SEQ ID NO: 236799 - DNA, 201 bp, Homo sapiens
tggcagagagagagacagagaaagaatgagaatgagaggaagcaagcagtttcatattttatcttataagggcactaatcccatcatgagggctccatccycatgacccaatagcctcccaaaggccccatctccaaataccaccccactggtagttagggtttcaacatacatttgggagtatacaaatatgcagtccac

SEQ ID NO: 236800 - DNA, 201 bp, Homo sapiens
aagccccagggccactttctgactagtaccttgggcacctgacatcatccctttgagtctcagtgtcctcttctttaaagtgagggcgctctacctgaggrgattgctgtaaggttggaatgaacctgcatgtgtgtgtcatgtgggaagggaacagtcagtggggcctggggttctcttggagagctggtaaccagcctc

SEQ ID NO: 236801 - DNA, 201 bp, Homo sapiens; identical to SEQ ID NO: 45466

SEQ ID NO: 236802 - DNA, 201 bp, Homo sapiens
ctcccaccctacaggaggtagattgggaagtggagctggccgtggtcattggaaagaaaggcaagcacatcaaggtgaggtggaaagggtgggctcccagkccagagtgcagcagaggccccagctcctgcctctcctagttctgacctcactcaccaacacacggtgccagctgtccctgacactaggaagcagtcagcc

SEQ ID NO: 236803 - DNA, 201 bp, Homo sapiens
tctgaaacaatctaagttgagcatcatggagcatagttatcccaaggccaaggcattttccacactacaggagatgaaagccagtgtgactcacccagccmctgtggaaatagaacagcactgaccacacacagtcaggatacagcgccaggatgggggcagtgccccagagggcagagcgcagcctcttacacagccacc

SEQ ID NO: 236804 - DNA, 201 bp, Homo sapiens
cgcttttctctcgggtgatccggccgagtggccctgggttagcagctgctgcatttccccggctggctgcggtcactggtggcagtgctcaggcgcccgcygcccttgaccttcggccccgcgagctctaaccctacagcgcaggaagatcggccgccgcggccaggtaggacgagcctggctgggtctaggccagaaggg

SEQ ID NO: 236805 - DNA, 201 bp, Homo sapiens
gtgatccggccgagtggccctgggttagcagctgctgcatttccccggctggctgcggtcactggtggcagtgctcaggcgcccgccgcccttgaccttcsgccccgcgagctctaaccctacagcgcaggaagatcggccgccgcggccaggtaggacgagcctggctgggtctaggccagaagggtgtccgtggcgccg

SEQ ID NO: 236806 - DNA, 201 bp, Homo sapiens
gcgagctctaaccctacagcgcaggaagatcggccgccgcggccaggtaggacgagcctggctgggtctaggccagaagggtgtccgtggcgccggtctcycgcggagcgcagaactagtaccggatccccagccgcttctgaccacacagacggggcggacctgtgtgagcactcactaactgtcggggctggagctggg

SEQ ID NO: 236807 - DNA, 201 bp, Homo sapiens
tgtgcagatggagtgcagtggcataatttcagcacacctctgcctcctgggttcaagtgattctcctgcctcagcctcctgagtagctgggattataggcrtgtaccaccacacctggctaatttttgtatgtttagtagagacggggtttcatcatgttggctaggctggtcttgaactcctcacctgaggtgatccacc

SEQ ID NO: 236808 - DNA, 201 bp, Homo sapiens; identical to SEQ ID NO: 45467

SEQ ID NO: 236809 - DNA, 201 bp, Homo sapiens
acctgacatcatccctttgagtctcagtgtcctcttctttaaagtgagggcgctctacctgaggagattgctgtaaggttggaatgaacctgcatgtgtgwgtcatgtgggaagggaacagtcagtggggcctggggttctcttggagagctggtaaccagcctcgtccctgaggcaacagccagagggcgcctgtagttt

SEQ ID NO: 236810 - DNA, 201 bp, Homo sapiens; identical to SEQ ID NO: 45469

SEQ ID NO: 236811 - DNA, 201 bp, Homo sapiens
agagaagtcaaagccctcggttttctagtcaaactggtgggccacaacagtggtgacctaagtctaatgaatcttcaactgaacaaggcagattgaatctycaggtgaggaccaagagtctggggatcagctgcctccacatttttgggcatagaaggctgtacaataccgcctttgttgtaagagcaaggaaccattcag

SEQ ID NO: 236812 - DNA, 201 bp, Homo sapiens; identical to SEQ ID NO: 45471

SEQ ID NO: 236813 - DNA, 201 bp, Homo sapiens
  misc_feature (1)...(201): n = A,T,C or G
tggcttatttctagaagacgctaaggtggaaaagagactgtccatctcccaaccaggtttctgccaggacactcgtgtcctcccatcctttctgtctcccnaggggaacacattatcttcattaccgtttctctcaacctaggtgctggacatcccgagagtgctggacatgctgaggcaacagagaatgatgctggtgca

SEQ ID NO: 236814 - DNA, 201 bp, Homo sapiens
tatgagacttctggaagttaatcatgttataggtcaacagagcaaacagtacaataaatagaagtatgtatatatgtgtgtatacacacacatatgtacartcatatgccgaatgacattttgttcaacaaaagacctcatataggacagtggtcccataaaattataacactatttttagcgtaccttttctgtgtttag

SEQ ID NO: 236815 - DNA, 201 bp, Homo sapiens
tgtcctgctcatggaaattatcaaaaataatgaatttagaaattgtaatcttgagtatactgtatcatcaagaaagacattttatcagttgacatcttttyttgatcctatagctgttttcctattttagctttggaccaacttgtaataactacattgtatacctctaagatttatttcaactagttacaagaaccattg

SEQ ID NO: 236816 - DNA, 201 bp, Homo sapiens
catagacaaaaactacttaacaaaaaaagtaccacagatttaaatttgctttttttttttttttttttttttttagaacagtcttgccctgttgcccaggytggagtgcagtggtgtgatctcagttcactgcaacctctgcctcctgggttcaagcgattcccctgccttgtgatctggctgcctcagcctcccaaagtg

SEQ ID NO: 236817 - DNA, 201 bp, Homo sapiens
gtcctgttagtgccttttttccagtggagagggacggcttgttctttggccacagcttgactggcttttctttatataagcaaagcccagcgttacgtttrcttaactaacggcgttcctctttccccagcgctggcgtcaatgctcccttcctcgggccattggagactccgttgctttttaatggcggcagcggctgct

SEQ ID NO: 236818 - DNA, 201 bp, Homo sapiens
gattttgtcggagatcatgatcgcctgcctggaacacaatgaggtgatggcgcttatgatcacctggcctttttgggtggaaatgaggctggggaagagarggacatagtgacttaatagctctttttgcgcacatttccttggactgtggtggcctcaagatgttactaatgttccctgcaaaaggctgtgtcttcttgg

SEQ ID NO: 236819 - DNA, 201 bp, Homo sapiens
aaatttccattttctaatatacccccaaaggtcatcctgatctctagtacagtttactgacttcattctttcttttttgttcattttaatttttttagagwcaaggtaggtctagctatgttgcccaggttggtctcaaattcctaggctcaagcgatcctcccgcgataggcatgtgccaccatgtccggctcttgactt

SEQ ID NO: 236820 - DNA, 201 bp, Homo sapiens
tgctagctgattaaaaccactgtttttttttttcttttttctgttttggttttttttgagacagagtctcgttctgttgcccagactggcatgcagtggcrcaatcttggttcactgcaacttctgcctcccaggttcagacaattcttctgcctcagcctcccaagtagctgggattacaggtgcctgccacctcgcctg

SEQ ID NO: 236821 - DNA, 201 bp, Homo sapiens
ggttacaggcatgagtcaccatgcccagccctgatatttgggataataagcaattacttggtggtttaagaaaagttcaagatttcaccctaagatttttyagggagttgttttatcccccaccttcccactcatctgccttaagtatggagagcaggatctcatgtgataccctcagcattcagcacatactggttttca

SEQ ID NO: 236822 - DNA, 201 bp, Homo sapiens; identical to SEQ ID NO: 45501

SEQ ID NO: 236823 - DNA, 201 bp, Homo sapiens
tgtatcattcttcttgtcagatacacactttatgtgaatatggcattttcttttctattaacaaggattcatcattcttttaacagtatgccaatttagcraatattttcctattcagttctctgagcaatttgttcataaacaaatgtcacttagatttcctttatcttttaatgaattgacagaacatacagaggcaat

SEQ ID NO: 236824 - DNA, 201 bp, Homo sapiens
ggattcgcttgaacctgggaggtggaggttgcagtgagctgagatcgtgccactgcactccagcctggtgacagagcaaaaaaaaaaaaaagaaaaagatytagttacctctacgtgtggtagaggtggaaattgaaagcagatcagtttcattagaacctattgcttatccccttccaaataaaataaacttttgcctct

SEQ ID NO: 236825 - DNA, 201 bp, Homo sapiens; identical to SEQ ID NO: 45504

SEQ ID NO: 236826 - DNA, 201 bp, Homo sapiens
ctgaggtgggcagatcacgaggtcaggagatcgagaccatcctggcaaacatgttgaaaccctgtctccactaaaatacaaaaaattagccaggtgtggtrgcatgcaccggtagtctcagctactcagaaggctgaggcaggggattcgcttgaacctgggaggtggaggttgcagtgagctgagatcgtgccactgcac

SEQ ID NO: 236827 - DNA, 201 bp, Homo sapiens
ggctcttgtgagaagccagttaattccttagaaagatgattacctatgtaaacaaagctcccatatagtaacaatagtcataattttgcctgatagtgacragagtcattaacagtcaatggccatgattccttctaagaaattggggtgaattgtcacatacttaccactgtgtgttttcttcagggatggttacaagat

SEQ ID NO: 236828 - DNA, 201 bp, Homo sapiens
tccttttgccttagcctgccaagagctgggactacaggtacactccaccacacccagctaattttttttttaacttgtgtttttgagatggagtcttgctrtgtcgcccaggctggtctgggagttgtttcctctagttatcttcctgcctcaactttgtgagtaggtgggattacaggcgtgtgccaccttgcctggctt

SEQ ID NO: 236829 - DNA, 201 bp, Homo sapiens; identical to SEQ ID NO: 45509

SEQ ID NO: 236830 - DNA, 201 bp, Homo sapiens
tgtttggtttctttttatttatttcaataggtttttggggaacaggtggtgtttgcttacatgaataagttcttcttatttatttagttacttttttttttgagatggagtctcgctctatggaccaggctggagtgcagtggcacgatctcggctcactgcaacctcctccgcctcctgggttcaagcgattctcctgcc

SEQ ID NO: 236831 - DNA, 201 bp, Homo sapiens
tcagattaaaatgtgttacaacaaaatagcaagggatttttaagttatctatctatatacatctttagtagtgtttatatattagtgaaatattctgttatctaaggggcttccttttgggaaaaaatgaacttggaatacctcaatgaaatatgagacttctggaagttaatcatgttataggtcaacagagcaaacagt

SEQ ID NO: 236832 - DNA, 201 bp, Homo sapiens
aaagggcatccaaatcggtaaagaggaagtcaaaccgtctctattcactgatgatatgaacgtatacctagaaaacccctaagactcatccaaaaagctcytagatcgataaatgaattcagtaaatgttttagtctgttttcatgctgctgatagtcatagctgagactgggcaacttacaaaaggaagatttaatggac

SEQ ID NO: 236833 - DNA, 201 bp, Homo sapiens
aacagcattaaaaacaatatgatcatctcaatagatgcagaaaaggcatttaacaaaatccagcattcctttatgattaaaaccctcagtaaaattggcayagaagggacataccttaaggtaataaaagccatctatgacaaacccagagctaacattatactgaatggggaagagttgaaagcattccccctgaaaact

SEQ ID NO: 236834 - DNA, 201 bp, Homo sapiens
aaaattttttgtaaagacagggtcttgctttgttgcccaggctggtcttgaactcttggcctcaagtttctcccactttggcctcctaaagtgctaggatyacaggcatcagccactgtgcctggcaagttttgtaattttgaaataagtttatctatttttttctttgttgctcatgtttttggtgttatactcaagcat

SEQ ID NO: 236835 - DNA, 201 bp, Homo sapiens
aaacaagaattcttggatctgcaaattccgacttgtgatttctgcaaatcctgattagattggccgctcttggcatgctcgtcctattttcttttttgctragaaagccttatactaatagcgtatgctcacaaacacattcagaacattcgtgtgctccaagtgacaactgctgtatgcctaatagttgctgacagttta

SEQ ID NO: 236836 - DNA, 201 bp, Homo sapiens
aggtcttacctcctttttttccttcagtttttgctgttgttcttctctgagaagaaaggcaataagagactgctgtcatttggtcacaggtcagggattaktgcgactgaagtcattgaaatccttttgtatgttattgcctccttcaatgaccttctgtctttccaggtcacttacttcagcctctggtactacaacaag

SEQ ID NO: 236837 - DNA, 201 bp, Homo sapiens
cctttcattacaacagaactttgtaaccaatagtgtttcaaaaccttctatctggaagactttatcagggctttggccttgaaaggaatgtcttcctactmatgtttgttaaacaagtggtgtgtgaaggagtgtaatctttctgggtttattggcaaaggagaacactccctctgtgtgttcctggtcttcagtgcattg

SEQ ID NO: 236838 - DNA, 201 bp, Homo sapiens
atagcacaagtgatccccaaagccccaaccctccgttgttggtccactgcagtgctggggtaggaaggactggcgtggtgattttgtcggagatcatgatygcctgcctggaacacaatgaggtgatggcgcttatgatcacctggcctttttgggtggaaatgaggctggggaagagagggacatagtgacttaatagct

SEQ ID NO: 236839 - DNA, 201 bp, Homo sapiens
ctgcagttttcacatgagaagtataaggaattgtatttataacaaacccccaagctgaagtttaagcagtcaattaacatttactctatactctctctgtrtggggctataccaaatgctaaggaggtttatgcagatgagtatttccacatcttaagaagtttatcttcagcctggaccacagggccagaccctgtctct

SEQ ID NO: 236840 - DNA, 201 bp, Homo sapiens
gagatgtaaaaagtgaaactaaggttgaagtcagaagataagtttgaaactttgccctctcgccccacatttttagccacggtgttacaaagagattctcwtatgtggcatgtcagagtgttttactgcatgttgggtaacttatgggttcactaggcacaaaggaataattaaagggaaaaatgatggatttaccctctc

SEQ ID NO: 236841 - DNA, 201 bp, Homo sapiens
aaatatactttatatagctataacaaatttgacttctgaaatattagcataccatctagatatactgcgtattgaattttgttgtgcatattttgcaatgmaatttaaatataattaacgtgaatgtttgtcattctatatagcggattttggtgactttgatcagtatgaatcccaggactttcttcagaaatttgcctt

SEQ ID NO: 236842 - DNA, 201 bp, Homo sapiens
ttcccaagtcattttgaaactgtttaatatgagaatcacactgttagaacagattgttttgtcttcataaattaaatcctacttgtggtattcataccatrggcacagtgttggaaaatgaaaggcttatagtgttctgaaagtgactttgtcatatgatgtcacccattatgtctttagacaaactctgcattaaacgta

SEQ ID NO: 236843 - DNA, 201 bp, Homo sapiens
tgcgacaagtgtgtgggtgatgtagccttgtctctttccccactgcttatggctaatccagaggtttattggatgggcctgggaagtatgctctgatcccyttgtgggtccaggcgatgatgctgtgtggggagcctgaaaccacagggcaggttgacgggttggggcagcaggaaagggctgaggccccacgggccgaca

SEQ ID NO: 236844 - DNA, 201 bp, Homo sapiens
tttgtaaccaatagtgtttcaaaaccttctatctggaagactttatcagggctttggccttgaaaggaatgtcttcctactaatgtttgttaaacaagtgktgtgtgaaggagtgtaatctttctgggtttattggcaaaggagaacactccctctgtgtgttcctggtcttcagtgcattgaaacttcttttcacagggg

SEQ ID NO: 236845 - DNA, 201 bp, Homo sapiens
gatttatttcaactagttacaagaaccattgtaattcttgaaaggtaaaaagggaataatatcctttatttgtttaaatcaatcctctggtaagcattttkagtcattaaagattattcagcttttccagctatctgaagaatttttgcccctccttcctggtgtgcatttttcttagcccacatgggtttcttactgttt

SEQ ID NO: 236846 - DNA, 201 bp, Homo sapiens
ttagatcagaaatctgcttcaaacccactgtctctcactctaagccccagaactggtcatgctgtaagcaccctccctgatttatataaggaaaatgccgrgagagttggggagtcatgagaggccccttggtgtaggtggctcccctgctcttttctgtgaggaaaagggaggatggtatccttcaacctgcaaagccaa

SEQ ID NO: 236847 - DNA, 201 bp, Homo sapiens
atttatttcaataggtttttggggaacaggtggtgtttgcttacatgaataagttcttcttatttatttagttacttttttttttgagatggagtctcgcyctatggaccaggctggagtgcagtggcacgatctcggctcactgcaacctcctccgcctcctgggttcaagcgattctcctgcctcagcctcccgagtac

SEQ ID NO: 236848 - DNA, 201 bp, Homo sapiens
ctatgctatgtattcatctagttcaaagactttgtctgctaataggtcatattttaagaagaaagatatgccagtcagtgagtttgatgaggttatattcrcttacagtttaagtacacttcatatgtttggtttctttttatttatttcaataggtttttggggaacaggtggtgtttgcttacatgaataagttcttct

SEQ ID NO: 236849 - DNA, 201 bp, Homo sapiens
tttgcacagtgacaaaatctgatgatgcctttctcaacacattcccatccttgacacatgactatatacatatacatttattaatactatgctatgtattyatctagttcaaagactttgtctgctaataggtcatattttaagaagaaagatatgccagtcagtgagtttgatgaggttatattcgcttacagtttaagt

SEQ ID NO: 236850 - DNA, 201 bp, Homo sapiens
tctcattttgaactcattttttctagataacctctttgtgcccaaccagaacggatactactgtcactctcagacaagcttggatagagcccagattgacytcaacggtcggatccgtaatggcagtgtctacagtgcacacagcaccaactccttaaataatcctcagccctacttgcagccctcgccgatgtcgtccaa

SEQ ID NO: 236851 - DNA, 201 bp, Homo sapiens
aggtgtgtagtaggctatacaatatagcctaggtgtggagtaggctgcaccacctaggtttgtgtaagtatactctgatgtttgcacagtgacaaaatctratgatgcctttctcaacacattcccatccttgacacatgactatatacatatacatttattaatactatgctatgtattcatctagttcaaagactttgt

SEQ ID NO: 236852 - DNA, 201 bp, Homo sapiens
tcatgttataggtcaacagagcaaacagtacaataaatagaagtatgtatatatgtgtgtatacacacacatatgtacaatcatatgccgaatgacatttygttcaacaaaagacctcatataggacagtggtcccataaaattataacactatttttagcgtaccttttctgtgtttagatacacaaataccattgtgtt

SEQ ID NO: 236853 - DNA, 201 bp, Homo sapiens
tgaccatttttaccactcgtgttaacagcttagtgctggctgccactacttctcatcagaatactgaggtagccttctgactttcctgtttctgtgccttygctgcctgtagcttattttccatatgtcagccagaatgatcttagtttaacctgaatcagatcctgacactgacactcttcttttttttttttttttttt

SEQ ID NO: 236854 - DNA, 201 bp, Homo sapiens
atcagattaaaatgtgttacaacaaaatagcaagggatttttaagttatctatctatatacatctttagtagtgtttatatattagtgaaatattctgttatctaaggggcttccttttgggaaaaaatgaacttggaatacctcaatgaaatatgagacttctggaagttaatcatgttataggtcaacagagcaaacag

SEQ ID NO: 236855 - DNA, 201 bp, Homo sapiens
gccttcagtttctcagctgcagcaggagattaccaggtgagaaattacatgccgtttgtttttaggaaatagtctagtgagatgtaaaaagtgaaactaargttgaagtcagaagataagtttgaaactttgccctctcgccccacatttttagccacggtgttacaaagagattctcatatgtggcatgtcagagtgttt

SEQ ID NO: 236856 - DNA, 201 bp, Homo sapiens
tgaaataagatgataaagactcatatgaaatgattaaaggggtgggctgtcagaggaattcaaacatgaactgtaactgggttgcacttcacaggcaccaratacggaggacagtttggattccagatggctccatagactgcactggcagagtgtctgtgatttccatttagtacggtatccccagcatctagaataatg

SEQ ID NO: 236857 - DNA, 201 bp, Homo sapiens
ggatcccagaactgccagcatcccattagctatagagggaaatccatgggtttggctgttagcaggtggaaggagaaaagctggatccaaattcttcttamttgaatggatggtgttttggtcaggttctttggtaataaagaacagaggtttacatgtctgtggctgaaataagatgataaagactcatatgaaatgatt

SEQ ID NO: 236858 - DNA, 201 bp, Homo sapiens
ctgaaaatgcagaaagaaatcgattccaagatgttcttccttatgatgatgtgagagtggagttggtcccaactaaagaaaacaacactggttacatcaaygcatcacatattaaggtgagaggaacgcctcaagtaatcaacagcacatgcagtttcagttaagttacaagaatggtaagaattgtattcatgtctgttt

SEQ ID NO: 236859 - DNA, 201 bp, Homo sapiens
cctgggtggcatagcgagacttcgctctataaaacacgttgtaaggagcgtattttgaggtcctgtggctccaaagcgggcatcctatggggcccgcccarcctctccaccgccagtagggcacgcgctggtccctttaaatgttcccttcgggagccgagggaccggtccttttagagcgcgtccgtccagaaacgcggc

SEQ ID NO: 236860 - DNA, 201 bp, Homo sapiens
ttctttagctttacttaatgatatcttacacagtgccttgcagatagtaagaacctggtactgtcccatgtttgtggagtgctgtttgagtctgccagttratgattaggagagaatggaaagtcaaagcagtaggatccagtggtaggataaacacaaactgactgtaaaagtctgagatagaaatattgaagagaaaag

SEQ ID NO: 236861 - DNA, 201 bp, Homo sapiens
gaaacagacttagatattaactaacttttccaaggtcacatgactagtgagtgactgaactggaattttaaacccatacttagaagcccattctgttatcrtctacactgtagatgtatgttctgcattgaagtatactgtatatgttctattaagtcataattgcttgttgaagccttgctagtctttcactgaaacttt

SEQ ID NO: 236862 - DNA, 201 bp, Homo sapiens
ttttttttttcttttgccttttttgagatagagtcttgctctgtcgcccagacaggtggagtgcagtggtatgatcatggctccctacagccttgaccttstgttgcctggctttagaactttgtccttctaaatctgaagacctctttttagctcataaattctgggagccactgaattgctagtttttcctcatcacat

SEQ ID NO: 236863 - DNA, 201 bp, Homo sapiens
tgagttgggggtcagggagaggagaggaaaatggatccgtggcttcacctgaagagcagggctctgatggtgcccaaagtgtcacatggaaacttgaggcwtctacctggcttcctttatcactggataggaattttcacagttgccttaatgtgatgctaataatctttagatttaacaaacaacggaatccgtactaag

SEQ ID NO: 236864 - DNA, 201 bp, Homo sapiens
tatcatcaagaaagacattttatcagttgacatcttttcttgatcctatagctgttttcctattttagctttggaccaacttgtaataactacattgtatrcctctaagatttatttcaactagttacaagaaccattgtaattcttgaaaggtaaaaagggaataatatcctttatttgtttaaatcaatcctctggtaa

SEQ ID NO: 236865 - DNA, 201 bp, Homo sapiens
  misc_feature (1)...(201): n = A,T,C or G
agggaccattacagaatacctgtcaagatttttggcagatggtatgggaacagggaattgcaattatagcaatggtgacagcagaagaggtaggtacttanttctcttaagtgattttctcagcctctgaagaacagttaatgttaatcatctggaatcctgacctgtggagaaaaaggcagggtagggttgtggttctgt

SEQ ID NO: 236866 - DNA, 201 bp, Homo sapiens
acaacactgtcacctatggaaggtttaagatcacgacccggttccgcacagactctggctgctatgccaccacaggcctgaagatgaagcacctccttacygggcaagagaggaccgtctggcacctccaatacacagactggcctgaacatggctgtccagaagacctcaagggatttttatgtgagtgactttaacttt

SEQ ID NO: 236867 - DNA, 201 bp, Homo sapiens
ctttaattccttaaaatctgttatctggaaaacccaaagttcatgtccaaccaaaagcttatattgtttttataaggcaggaaaacatattctatcacttytgttttttggttcctttgtgtctaccatttgttgagtgcttatcatgagtcagataaactatgctgagcattttttgtgaattttttttagtgtaatctt

SEQ ID NO: 236868 - DNA, 201 bp, Homo sapiens
tgaaatggtcttgaaatagagttcctaaggagggccaaactttttcaatttttatacttacctataagatcatagatctcattcagacttttgtcttcctkaatagttactctgtaggtcttcggaactttctacatctgggaaaccagtccagggaactctagcagcagttcctctgcatctgcttcctgggtgtttctt

SEQ ID NO: 236869 - DNA, 201 bp, Homo sapiens
ctgcatggagctgcggcattggagaatcccagaaggtgatccagaggaaatgatgcatagacagagtcttgaaggatattagggattggccaggtccacargtgagtcacaggcacaccaagaagagggattctcatgtgcaaaagcccagaggggctagggaacatattctatctgaagagatgcagagtttgggatggc

SEQ ID NO: 236870 - DNA, 201 bp, Homo sapiens
ttagctggattgagagagaatgggcctattagagtcaatcaataggattgctcatcgattaggtataggagcacctgatagagaagttgtatcggtaaggrttaagtatagctatatataacaaaaaccctaaatatcattgacttctgtgagagttcagaagtcagccttgcagagcttgtctgacagctccacagagtc

SEQ ID NO: 236871 - DNA, 201 bp, Homo sapiens
aagctctttctattaaaccagatttttgttttctataagttgcagtttaaaaaaagaaaagaacagtacttgttttctataaatgtatgatacatattctrtgcttacagataataagcaattcattttaaaatgtcataacctcagaatataattaacaatgggacttggcctttcagatatattacaatgtgcttggat

SEQ ID NO: 236872 - DNA, 201 bp, Homo sapiens
gttcagtatatgccttttcaccttcttggtcaaatttattcctacatattttgttcttttggatattactgtaaatggaattgttttctttttttgacatrtacattgctggtatatagcagctgatttttgcatgttgatcttgtaccctgcaaacttcactgaatgtattacctcgagtagggcaggggtgtgtgtgtg

SEQ ID NO: 236873 - DNA, 201 bp, Homo sapiens
ttatttctttgggaaatgaagcgcttcataactaactttgcctgataaacaaggttgactcctttgtccaaactatttggagtgctaagttttggaaacartttataaatttctatctgtcgtaaataaaggatactacctctgcttttaggaacagtgattgttgttgaatacatgactaattaatgtttggagttattt

SEQ ID NO: 236874 - DNA, 201 bp, Homo sapiens
attcttaagaaacggctagttgatggggagtgctcaacagcacgactccctgaaaatgcagaaagaaatcgattccaagatgttcttccttatgatgatgygagagtggagttggtcccaactaaagaaaacaacactggttacatcaacgcatcacatattaaggtgagaggaacgcctcaagtaatcaacagcacatgc

SEQ ID NO: 236875 - DNA, 201 bp, Homo sapiens
ttatctcatataagcttcggacttgttttaacataaagaatacaagtgttttggggagggttaacgaggtttataaattatgatttggtagtgagtagaaygccacagctgactcagtatctccgtcatttcattttgtagatcagaaagtggacagaggtagtgacttgctcagggtcacactgtccctttgtggttggg

SEQ ID NO: 236876 - DNA, 201 bp, Homo sapiens
tcttacctcctttttttccttcagtttttgctgttgttcttctctgagaagaaaggcaataagagactgctgtcatttggtcacaggtcagggattattgygactgaagtcattgaaatccttttgtatgttattgcctccttcaatgaccttctgtctttccaggtcacttacttcagcctctggtactacaacaagcaa

SEQ ID NO: 236877 - DNA, 201 bp, Homo sapiens
ataattaacaatgggacttggcctttcagatatattacaatgtgcttggattttcaaaaattttatttgcatgcagcttgtcaaggattttttttttttttaaggcagagtctcactttgttacccaggctggagtgcagtggtgcagtcttagctgactgcagcctctgtctacctcctgggttcaagtgatcagcctgc

SEQ ID NO: 236878 - DNA, 201 bp, Homo sapiens
atacatgtatccaatgtagttaacttaggttgctaactttcttttaaattcaccatatttgaactacagaaagtaacttctttttttttttttttttttttatttgagacagagtctcgctctatcgcccaggctggagtgcagtggcgtgatctcggctcactgcaacctccgtctcccaggttcatgccattctcctgt

SEQ ID NO: 236879 - DNA, 201 bp, Homo sapiens
ttatgttttttactgtatgttagacactgtcccaagtactttattaatttaattctcataacaaatcctgtgatgtaggtgctattatctctattttgtakatgaggaaaccaagacacagaagggttgaacaccttgcccaaggtcacactgctagtatatactggaactgggactcaagcaggctggctcctgggtcct

SEQ ID NO: 236880 - DNA, 201 bp, Homo sapiens
aaagaaattgtggggactgttttacagggcatgaagcagatgactaattgtcttataggatcgttttaattttgaaataactataatctgggataagtaaytcatcacatatactttaatatgtgtaagtgtcatgtggttgaggactttctcatccttgtttgaaactgtctaggggctctgtgtggtggttcatgtccg

SEQ ID NO: 236881 - DNA, 201 bp, Homo sapiens
ttttgtattttttgttgtgatggggtctcactatgttgcccaggctgttcttgaactccttggctcaagtgatcctctggcctcagtctcccaaagcactrggattacagatgggagctactgcacctggcctacagttaacttttttataaataggagtacactctaaataaaaagtataataaatgcataaatcagtaa

SEQ ID NO: 236882 - DNA, 201 bp, Homo sapiens
gggagtggttcaggtacagatggtagccacctggagttggatagggttggagagaggtggttggaatctggatcaggacctaccgagtaatagagaagggwtagcatgggtcctggttgatattcaggttttcagtagatggtggggctataacagagaggaaatgtgaaaggaagtgcagatctattaggggcaaggagg

SEQ ID NO: 236883 - DNA, 201 bp, Homo sapiens
attttgaaataactataatctgggataagtaattcatcacatatactttaatatgtgtaagtgtcatgtggttgaggactttctcatccttgtttgaaacygtctaggggctctgtgtggtggttcatgtccgtagtcccaacattttgaatccaagcactaggattgcctgagcccaggagttagagaacagcctgggca

SEQ ID NO: 236884 - DNA, 201 bp, Homo sapiens
tcaggtgatcctcccacctcggcctcctaaagtgctgggattacaggcatgagccaccacacctggccttcgataataaattaacctcagcttactataaygtttttgctttacaaacttttaaatttttaaaacttttgactcttgtaataacataggttaaaacacagacacattgtacagctatacaaaaatatctat

SEQ ID NO: 236885 - DNA, 201 bp, Homo sapiens
tgtgctgtacaggtttgtagcctagcagcagtaggctatatcacatgccctaaatgtgtaggaggctataccatttaggtttgtgtaagtacactccatamtgttcacacaatgaaatagcctaatgatgcattcccacatcgttaagggacacgtgactactaaaatttcccctttaatcctagtttactctttaaaaac

SEQ ID NO: 236886 - DNA, 201 bp, Homo sapiens; identical to SEQ ID NO: 45505

SEQ ID NO: 236887 - DNA, 201 bp, Homo sapiens
  misc_feature (1)...(201): n = A,T,C or G
ataaaattccaccctgccttccgggtcctgttagtgccttttttccagtggagagggacggcttgttctttggccacagcttgactggcttttctttatanaagcaaagcccagcgttacgtttgcttaactaacggcgttcctctttccccagcgctggcgtcaatgctcccttcctcgggccattggagactccgttgc

SEQ ID NO: 236888 - DNA, 201 bp, Homo sapiens
gtaggatacagtgaagggtggagtctgaccctgagcctagcacaactctgagataaaattccaccctgccttccgggtcctgttagtgccttttttccagyggagagggacggcttgttctttggccacagcttgactggcttttctttatataagcaaagcccagcgttacgtttgcttaactaacggcgttcctctttc

SEQ ID NO: 236889 - DNA, 201 bp, Homo sapiens
ctatgaaaaaacaacaccttatccaaaataggaagaggatcacaattactaactacaaaatttgggattatagtagtgctggctattatctcatttaatcytgaggatggcccagtttgctatccctatttgtaggatacagtgaagggtggagtctgaccctgagcctagcacaactctgagataaaattccaccctgcc

SEQ ID NO: 236890 - DNA, 201 bp, Homo sapiens
  misc_feature (1)...(201): n = A,T,C or G
ttatagcatggttgtaatctctttaaagacagcgacggtttagggattcgtcttagatttctcacgatgctcattacgctgtcttgttcccagagacgcantacacatttgtggaatggaatttcaaaatgttaagtttggcaaagccgagggtagtagcggaacccttttctccaggtctgccattccctaaccctaagt

SEQ ID NO: 236891 - DNA, 201 bp, Homo sapiens
ctctgacatttggagtattacaacctgaaagagttacctatgaaaaaacaacaccttatccaaaataggaagaggatcacaattactaactacaaaatttrggattatagtagtgctggctattatctcatttaatcctgaggatggcccagtttgctatccctatttgtaggatacagtgaagggtggagtctgaccctg

SEQ ID NO: 236892 - DNA, 201 bp, Homo sapiens
ttcaggttcgctctcatatacttgagtaatttctaaaaggagtcttgaacttctattccgaacgccctggccgattgttgcgggttaattctggatcaggsttttaaatgtgttaggcatatttgtgcctctcagaatatataaacgtgaaattcgccagataactttggcgagaaggggcgcagggaaggactgtttggt

SEQ ID NO: 236893 - DNA, 201 bp, Homo sapiens
ttcttccttacccttactatagtgagctcaaaaggtgtaagtcattgagacaaacatttgctaggtatttccaccatctaacacttttatttatttatttwtttaaagagacggggtcttgctctgtcttccaggctggagtgtggtggtgtgatcatagctcactgtaacctcagactcccgggcttaagggatccactg

SEQ ID NO: 236894 - DNA, 201 bp, Homo sapiens
agccaattgatgtgacattaacagtttgaaattggctgtgatgggagtatttacaccatggatatgggcaaacaccgatcaaaacttccttccaagagccwgttgttaaatattaccagcacatcactgttttctgcacgttagaatcattaaatttcagcctaagcaggaagtgtttagtctgtatgcctgtgtctggat

SEQ ID NO: 236895 - DNA, 201 bp, Homo sapiens
cagcgtgtcccagtgtgggatattttgagtcattttcaggcagagaagtgccagagctagttcatattgactagcaagagccgacttaaatgttcaggaaycttgtgagccaattgatgtgacattaacagtttgaaattggctgtgatgggagtatttacaccatggatatgggcaaacaccgatcaaaacttccttcca

SEQ ID NO: 236896 - DNA, 201 bp, Homo sapiens
attcagatattttaaaatttatttttattgtattgttttagataaacaccctagttttaaacatttgtgacaaactgtactgcaagctgggaaatccacayaccagtgctagataaaaagcgtctatcagacagagccaaagtcatgtctactctccatgtgcgaaaccactctgcccccaacactgttaccaggactcag

SEQ ID NO: 236897 - DNA, 201 bp, Homo sapiens
tcccttatgggtttggtgttcacattccacgagataatcatgtacagtccttagcacagtttcaataaataatattgattttacttgggctggtagacttktttcttttttttaaagacaccaggtcctagtatcccagtttcccaggtagaatatggtgggaattcgcagatgggatcgtagtgcactacagccatgaac

SEQ ID NO: 236898 - DNA, 201 bp, Homo sapiens
gcacgccaccacgcctggctaatttttgtattttttagtagacatggggtttcaccatgttggccagactggtctcaaactcctgacctcagatgatccasgtatatttgggttcttgaatgtatgtaaaaacatgcagtatcaaattttgatgctccactggtctcaaatttggccaatgggaaactatcaagctggttc

SEQ ID NO: 236899 - DNA, 201 bp, Homo sapiens
taagtcaaacaaaaaggtaaaggaaaaaatgtaagaaaaacatactgtttgcggttccaagatagccaaataggaacagctccagtctacagctcccagcrcgagtgacgcagaagacaggtgatttctgcatttccaactgaggtaccgggttcatctcacggggcttgtcggacagtgggggcaggacagtgggtgcag

SEQ ID NO: 236900 - DNA, 201 bp, Homo sapiens; identical to SEQ ID NO: 45495

SEQ ID NO: 236901 - DNA, 201 bp, Homo sapiens
agtaagtaactccagactcccatatatttgtaattctttgtaaattctatttaaggggtttttgtttgttatgtacgtgttctcctttgctaaaaagaatrttgcccatcacttccctctactgccaacttgctattattaaataagcccttttcctttaatttgtcatcttttaatctgctttggattggattaccaaat

SEQ ID NO: 236902 - DNA, 201 bp, Homo sapiens
gacattctatttatagctaaaactaatcagaaaatcagaagtaggcaatcatggcttatttctagaagacgctaaggtggaaaagagactgtccatctccyaaccaggtttctgccaggacactcgtgtcctcccatcctttctgtctccctaggggaacacattatcttcattaccgtttctctcaacctaggtgctgga

SEQ ID NO: 236903 - DNA, 201 bp, Homo sapiens
gtatagcatttaaacagaaactttgaggtgtgattttttatataagacattgaaccagaaatgaataagttagagcaaatatggaagagtcaattctcatracagtataatgtaaggcaaaaatatttttgtggaaggctacattaattgggtccaagtatgttgctttttcatgttttttgttttttgttttgagacaga

SEQ ID NO: 236904 - DNA, 201 bp, Homo sapiens
gaaatgaataagttagagcaaatatggaagagtcaattctcataacagtataatgtaaggcaaaaatatttttgtggaaggctacattaattgggtccaartatgttgctttttcatgttttttgttttttgttttgagacagactctctctgtgatgcccaggctggagtgcaatggcaccatcttagctcactgcaacc

SEQ ID NO: 236905 - DNA, 201 bp, Homo sapiens
acagtataatgtaaggcaaaaatatttttgtggaaggctacattaattgggtccaagtatgttgctttttcatgttttttgttttttgttttgagacagastctctctgtgatgcccaggctggagtgcaatggcaccatcttagctcactgcaacctctgcttcctgggttcaagcgattctcctgcctcagcctcccaa

SEQ ID NO: 236906 - DNA, 201 bp, Homo sapiens
cagttctctatttgctgttctttaggtggcatgacattgccaacatgtcccacaacaagtccttttttgcattagagctggcaaataaagaggagaccatycaatttcaaactgtgagtaaacattaggggtctgcatggaatgtttttcctaaaagttaacaagttctacttctgcgtgcctgtatgtgtttggaggcag

SEQ ID NO: 236907 - DNA, 201 bp, Homo sapiens; identical to SEQ ID NO: 45508

SEQ ID NO: 236908 - DNA, 201 bp, Homo sapiens
agccaccgcaccctgcccagatcctttcactcttcttaaccctcctttggcattccacttctttttttaagtaatttttttagtttgtttttgagacagcyctgtcacccaggctgagtacagtggcatgatcatggctcacagcagcctctcaacctccctgggctcaggtgatcctcccacctcagcctcctgagtagc

SEQ ID NO: 236909 - DNA, 201 bp, Homo sapiens
attcgcagatgggatcgtagtgcactacagccatgaactcctggattcaagggatcctcctgcctcagccttccaagtcgctggcactacacgggcatgtkccaccacgcctggctcagcctttttaatttttattttgtcttctttggcacacagattctagtgatttcttctcagttatttagcagcacccatcaacat

SEQ ID NO: 236910 - DNA, 201 bp, Homo sapiens
tcttgcctttatttgaaaacaatagttacaaatgggcttttctgtgtctgtttcctttttttaccttattgtttttttaaagatagaacttgctgtgtgartagttgaaaatctcacattatcacattagtgtttgtcagcactccctaatacgtttaggtacttttttttttttttttttttgaggctagaatctcgctc

SEQ ID NO: 236911 - DNA, 201 bp, Homo sapiens; identical to SEQ ID NO: 45493

SEQ ID NO: 236912 - DNA, 201 bp, Homo sapiens
tgcccacccggacggggagctggccagtggtttgcatgtatggcccagtccctgtctcttctctgccttcccctgcaccatgtttgcatccgagtccccaycgctggtctggtgatgggattttcgtaagcactgacagggaggaggaacctgctttctttgtaaatatgggaagcggtttctgctaggggcctgggtgta

SEQ ID NO: 236913 - DNA, 201 bp, Homo sapiens
catccttgtttgaaactgtctaggggctctgtgtggtggttcatgtccgtagtcccaacattttgaatccaagcactaggattgcctgagcccaggagttmgagaacagcctgggcaacatggtgaaactcccatctctgtaaaaaatagaaaaatttgtcaggcatagtggtatgcacctgtagtcccagctactcagga

SEQ ID NO: 236914 - DNA, 201 bp, Homo sapiens; identical to SEQ ID NO: 45494

SEQ ID NO: 236915 - DNA, 201 bp, Homo sapiens
gctacattaattgggtccaagtatgttgctttttcatgttttttgttttttgttttgagacagactctctctgtgatgcccaggctggagtgcaatggcaycatcttagctcactgcaacctctgcttcctgggttcaagcgattctcctgcctcagcctcccaagtagctgggactacaggcatgtgccaccacgcctgg

SEQ ID NO: 236916 - DNA, 201 bp, Homo sapiens; identical to SEQ ID NO: 45496

SEQ ID NO: 236917 - DNA, 201 bp, Homo sapiens
tgcgagccccatgagcgcgccgcggcccgggctggcgtgcgggtgcggctgcggcggccgcgcggcggggccccgggaggcgggtcgctgagcggggcgckcggccccgaggatgcgggagcgggagcgggagcaggtgagggcgcggtccccggccggcgggaggggcgggcggctggcccgagcggtggggtgtgtcca

SEQ ID NO: 236918 - DNA, 201 bp, Homo sapiens
ttaattgggtccaagtatgttgctttttcatgttttttgttttttgttttgagacagactctctctgtgatgcccaggctggagtgcaatggcaccatctyagctcactgcaacctctgcttcctgggttcaagcgattctcctgcctcagcctcccaagtagctgggactacaggcatgtgccaccacgcctggctaatt

SEQ ID NO: 236919 - DNA, 201 bp, Homo sapiens
gtatgttcagtcctgtgaaggggtgatggtaccctcattttactggtgatagaatttaaattcaccagattatgacttgcccaagttcgtgcagaatactratttggagagttcaggtctacttgactctaaaccttgttctggtaactgatgccctatatattgaaagtacaaacagggtggtaaacagaagtaaaccca

SEQ ID NO: 236920 - DNA, 201 bp, Homo sapiens
attgagacaaacatttgctaggtatttccaccatctaacacttttatttatttatttatttaaagagacggggtcttgctctgtcttccaggctggagtgyggtggtgtgatcatagctcactgtaacctcagactcccgggcttaagggatccactggcctcagccctcagcttctgaagtagccaggattataagcgtg

SEQ ID NO: 236921 - DNA, 201 bp, Homo sapiens
ctgggaagatttctgatggggcattatttcaaacaataactggcatttagccttgggagtgaaatttaatcagaataattattaataaaactccttcagcyataagaaggcatggagacatgtatcatttttaaacaaatgcctgatgcacatggagccacattccttttcaaggtactttagattttcttaagtatcact

SEQ ID NO: 236922 - DNA, 201 bp, Homo sapiens
tttttattttttaaaacccagacacgccatgcagacttgtgtcaccaaaataaatactggaagaatggaatatcttttggaaaagagacatttatttttcmttaacagcctgaatactttccagtaacaaagaaatgaaattatttataaaagctagtaaaagcagttgtaatcacctgatgttaaaactagtatgtacta

SEQ ID NO: 236923 - DNA, 201 bp, Homo sapiens
atttttattgtattgttttagataaacaccctagttttaaacatttgtgacaaactgtactgcaagctgggaaatccacataccagtgctagataaaaagygtctatcagacagagccaaagtcatgtctactctccatgtgcgaaaccactctgcccccaacactgttaccaggactcagggcgcacttatttgcccggc

SEQ ID NO: 236924 - DNA, 201 bp, Homo sapiens; identical to SEQ ID NO: 45506

SEQ ID NO: 236925 - DNA, 201 bp, Homo sapiens
tttgagataggttctcatggttcactgcagcctcaacctcctgggctcaagcaatcctcctgcctcatcctcccaagtagatgggaccacaggcatgcacyaccacacctggctcgttttttaattttttgcagagacggggtctcactgtgtttctcaggctggtcctgaactcctaggctcaagtgatcctccctcctt

SEQ ID NO: 236926 - DNA, 201 bp, Homo sapiens
ttttgttgcagtgctcaggcttccagctcttcctggcccacatctccactcctcatgccctgcacttgagccaggctaacttgattagggcctccatcctwtctcctgttggcttccagtgtcctggcaactagggttctcctccccccatcgctgctaaactgcaaactccgacaggacggctcatctcaagtgtggttc

SEQ ID NO: 236927 - DNA, 201 bp, Homo sapiens
actggtctcaaatttggccaatgggaaactatcaagctggttcctgtgtccttttaccaccaccctattagcctttaagtgcttctttgctatctgacaaagaattcccagggttacttttctttccctgccagaggctttcctattgtaaaagttaaacacatgactactgcagttttcacatgagaagtataaggaatt

SEQ ID NO: 236928 - DNA, 201 bp, Homo sapiens
tgagcggggcgcgcggccccgaggatgcgggagcgggagcgggagcaggtgagggcgcggtccccggccggcgggaggggcgggcggctggcccgagcggyggggtgtgtccactcgcccggaccccggagcgcgcccgcggccccggaatcccggagaatggggcgcggcggccagacccgtagcgggagcgtaacaaag

SEQ ID NO: 236929 - DNA, 201 bp, Homo sapiens
atggtcttgatctcctgacctcgtaatccgcctgccttggccttccaaagtggggattacaggtgtgagccactgtgcccagccctttctcactgacttayaagagtactctctgtgtgctgcttctgcttgctggttacccgcccactcctctgtctttgccactctgttaaagcggccctctgggagcctcccagcacc

SEQ ID NO: 236930 - DNA, 201 bp, Homo sapiens
gaaggactggcgtggtgattttgtcggagatcatgatcgcctgcctggaacacaatgaggtgatggcgcttatgatcacctggcctttttgggtggaaatraggctggggaagagagggacatagtgacttaatagctctttttgcgcacatttccttggactgtggtggcctcaagatgttactaatgttccctgcaaaa

SEQ ID NO: 236931 - DNA, 201 bp, Homo sapiens
catggaaattatcaaaaataatgaatttagaaattgtaatcttgagtatactgtatcatcaagaaagacattttatcagttgacatcttttcttgatcctrtagctgttttcctattttagctttggaccaacttgtaataactacattgtatacctctaagatttatttcaactagttacaagaaccattgtaattcttg

SEQ ID NO: 236932 - DNA, 201 bp, Homo sapiens
ctaatttttttttttagttttttagagatggggtcttgctgtgttgcccaggctggtcttaaacccctggcctcaagtgatcctcacatctcagcctcctragtacctgggattacaggaaggaatctattccttgaactatctattagtgcatgagctttcaatggcatctttttgtttatcaaaatcttaactccctta

SEQ ID NO: 236933 - DNA, 201 bp, Homo sapiens
tgatccttgagtacttttctatttcattgattttccacagcatatcttgaagagatccagtctgttcgacgccatacaaatagcacaagtgatccccaaarccccaaccctccgttgttggtccactgcagtgctggggtaggaaggactggcgtggtgattttgtcggagatcatgatcgcctgcctggaacacaatgag

SEQ ID NO: 236934 - DNA, 201 bp, Homo sapiens
ctatctaaaaaaaaaaaaaaaaacacacacaaccatgtgggattaaggttttatttcactggtttatgcttctctaccaaattatggttaaatgcattgtrtctcaatgagataatattgacattgaccttatacaactgacattttttataggtatcagtattatctgcaactgaagaaagatatcttggaaggaagtat

SEQ ID NO: 236935 - DNA, 201 bp, Homo sapiens
attactatcccattattgatgaaggtatggagacttacagaagtgaaatgtcttgccctgccacacaactagtaagtggagcagcaagactcgagcctgtkctcttagccgctgtgctagcctgttagagtagttcctgcctgcttttttcatattgacagatatcaactgacagatcattttcatttgatctgtctctct

SEQ ID NO: 236936 - DNA, 201 bp, Homo sapiens
tgagggcagggtctcctcttcctcatcttcgtgtcccctgtctggcaaggtgcccggtgcataagggcttagtgaacaatgggagccggagtgtggcagtkatgggagtcacaggggagaagagcacttttgctcctttgtctcttccttttattacagattgtaaatgaggcatggggtggaggcaaagtctaacaaggg

SEQ ID NO: 236937 - DNA, 201 bp, Homo sapiens
cactggtctcaaatttggccaatgggaaactatcaagctggttcctgtgtccttttaccaccaccctattagcctttaagtgcttctttgctatctgacaaagaattcccagggttacttttctttccctgccagaggctttcctattgtaaaagttaaacacatgactactgcagttttcacatgagaagtataaggaat

SEQ ID NO: 236938 - DNA, 201 bp, Homo sapiens
tcttccttttattacagattgtaaatgaggcatggggtggaggcaaagtctaacaagggcattttgtcccttagcaccaggaaggaaggagaaaggctgtkgaagtgccttctgtcttgcagggtgtgagagaaactctgggcaggagcagcagtgtaaagataacatgcggggatgcccacccggacggggagctggcca

SEQ ID NO: 236939 - DNA, 201 bp, Homo sapiens
taatcccagctgctcggaaggctgaggcaggagaatcccttgagcctgggaggtggaggttgcagtgagccaggatcgcaccactgcatttcagcctgggmgacagagcaagactccatctccaaaaaaaaaaaaagaaaaccacacatttcatggggctggagtgacactagggcctctccctccatcagtattccttcc

SEQ ID NO: 236940 - DNA, 201 bp, Homo sapiens
ttttattacagattgtaaatgaggcatggggtggaggcaaagtctaacaagggcattttgtcccttagcaccaggaaggaaggagaaaggctgtggaagtkccttctgtcttgcagggtgtgagagaaactctgggcaggagcagcagtgtaaagataacatgcggggatgcccacccggacggggagctggccagtggtt

SEQ ID NO: 236941 - DNA, 201 bp, Homo sapiens
ctgaggcaggggattcgcttgaacctgggaggtggaggttgcagtgagctgagatcgtgccactgcactccagcctggtgacagagcaaaaaaaaaaaaaagaaaaagatttagttacctctacgtgtggtagaggtggaaattgaaagcagatcagtttcattagaacctattgcttatccccttccaaataaaataaac

SEQ ID NO: 236942 - DNA, 201 bp, Homo sapiens
gccgcctccgaaacttcccccggacgttcaggctcccccctcttttttgggccccagcccgttcctgctccgcgcttctggagcactggccaaggcgggcmgattcaggacccaggttacttgggcggcgagctggactgtttctactcctccctcctcctccactgcggggtctgaccctactccttgtgtgaggactcc

SEQ ID NO: 236943 - DNA, 201 bp, Homo sapiens
ggagggaaggaagggggtagagttggaagcaggcagcaccgtggctggactggcatgaggtggtttctccagcaaaagctccctttcctcaggaggaagcyggcccagttgcaggtggcctatcaccagctcttccaagaatacgacaaccacatcaagagcagcgtggtgggcagtgagcggaagcgagtgagtgcgacc

SEQ ID NO: 236944 - DNA, 201 bp, Homo sapiens
ctttgttcctgtggtgcctggcgcagtgcctggtgggtggctggcttgtggcgggcacatccctttctgttggatttgccaggcggatatctacaaggcgracttccaggctgagaggcaggcccgggagaagctggccgagaagaaggagctcctgcaggagcagctggagcagctgcagagggagtacagcaaactgaa

SEQ ID NO: 236945 - DNA, 201 bp, Homo sapiens
gtggaactccacgggcagttccgagggctcctctcacctggccccagcactgcgggatgcaggcgaccccatccttttctcggaccacccccttcccctgrcttccaggtctccttgccatctgtacttggtcacctgctgggcccctgcattgaagcaaacacgtcttaagcaaagctcctcacctgctgctcccacctg

SEQ ID NO: 236946 - DNA, 201 bp, Homo sapiens
cgtccccctccatcctccccttccctctgactcttctcttttcccagcctacctctcctctcccctggccctgcccagccagaggaggagcccccccgagkagccacctgacttctgctgtcccaagtgccagtatcaggcccctgatatggacaccctgcagatacatgtcatggagtgcattgagtagggccggccagt

SEQ ID NO: 236947 - DNA, 201 bp, Homo sapiens; identical to SEQ ID NO: 45536

SEQ ID NO: 236948 - DNA, 201 bp, Homo sapiens
gggctgctttcctggaacagcagattctaggatcacgtgccctcaagtgccaccctgcctacctcccgcaccgagtgaggcatcaggcgtggaagaagccygggagccggagctgttccaggtgctgcctgagcacgccacctcccatctcccccccagcaggaagaggaaaaaacaaaccacgaggctcttcagagagag

SEQ ID NO: 236949 - DNA, 201 bp, Homo sapiens
aaagggcagggaggtttctgtggttctcattcggtcctgcttctgccctccagacagatggatcagctgccaggggggccccagccatcccagcacagtargcggtcaaggtgcacttggggcagccagcagggcagaggggaggggagcttgacccaggctctgatgggcagagggaacccgtgcagggtgtgggggcag

SEQ ID NO: 236950 - DNA, 201 bp, Homo sapiens; identical to SEQ ID NO: 45538

SEQ ID NO: 236951 - DNA, 201 bp, Homo sapiens; identical to SEQ ID NO: 45541

SEQ ID NO: 236952 - DNA, 201 bp, Homo sapiens; identical to SEQ ID NO: 45543

SEQ ID NO: 236953 - DNA, 201 bp, Homo sapiens
gctccggagaccccttccagggtttccaaaagcaatgaggtgggtttaggggcctccagggtgctccttgatgaggatagaccggggcaggctgcgtaaasacgtcggggcagacgtcgggagaggtctgggccaggcatccgggacctgggtcccagccggctctccgcactctgtgaccctttgatggagtttggatta

SEQ ID NO: 236954 - DNA, 201 bp, Homo sapiens
ggtccctctcctctcacctgagcttccaagagctgctttgacactagtccagccaaggagctttacagaaatgcgtggcttgactggacggtttctgtttycaaaggatcgaggacatgaggaagcggcatgtcgaggtctcccaggcccccttgccccccgcccctggtgagtgagcgagaactgggcctgcgggaggag

SEQ ID NO: 236955 - DNA, 201 bp, Homo sapiens
gaggccggcccgccggctgcctgccatacccgctgccgctgctctgcatccccaattccggcgggcacgggtgcagctccgcgtagtgctcccgcatcccmatcgccggcccggccccgcccctactgtccggtttccccgcctgccccggcggcctcgcgcgctcgcggagggctccacttccgccggcagcgtggccac

SEQ ID NO: 236956 - DNA, 201 bp, Homo sapiens
gcgtgcccgtgtgagcagtgggtgcgacactggggggtcgccagtggtgaccccgcagtgggtgcgacactggggggttgccagtggtgaccacaggagayggatggctcctggtgttctgggttagggctcactgtggtccctctcctctcacctgagcttccaagagctgctttgacactagtccagccaaggagcttt

SEQ ID NO: 236957 - DNA, 201 bp, Homo sapiens; identical to SEQ ID NO: 45533

SEQ ID NO: 236958 - DNA, 201 bp, Homo sapiens
tgttgacggtgcctccaccctgccgcctggcatcagctcgcagtcacagggtgttcagagccgacccccaccccccgcccacgccctgcgcatagcccctsccgtccccccgttcgtcctccctgagtctgctctttccccgtgccagggcccgggcggccagcgagcaggcgcggcagctggagagtgagcgcgaggcgc

SEQ ID NO: 236959 - DNA, 201 bp, Homo sapiens; identical to SEQ ID NO: 45531

SEQ ID NO: 236960 - DNA, 201 bp, Homo sapiens
aacctgacagcttggtcaagagtctactcgtgccatgtgggtgggggcaattcaaggggtccttagtgaaaagcagttgggagcttctcatcttccccacrccctcctctttcctgaggaccacagcaggggagggatctgcccaaggacacaaggtgacttagtagaagcagggcatgatgaagatctctagccaccaac

SEQ ID NO: 236961 - DNA, 201 bp, Homo sapiens
gtctcaatctcctgacctcatgatccacccgtgtcggcctcccaaagtgctgggattacaggcgtgagccaccgtgaccggcaatttttttttttttttttagtagaggcagggtttcaccgtgttagccaggctggtctcgatctcctgacctcatgattggcccgcctcggcctcccaaagtgctgggattacaggtgt

SEQ ID NO: 236962 - DNA, 201 bp, Homo sapiens
gccctattcgtgtctggcctccttttgtcccaagtctcagagagacggagagagatcccctgctggggctgtagctgcaaggccaccgggttcagccctcraggcctgcttgccggggcagtgactaagccgttgacaacctcaaggcagctttgtgctccttcgtctctttggggatctctttttgccccatctgtgtgt

SEQ ID NO: 236963 - DNA, 201 bp, Homo sapiens
gcgctggaggccggcccgccggctgcctgccatacccgctgccgctgctctgcatccccaattccggcgggcacgggtgcagctccgcgtagtgctcccgmatccccatcgccggcccggccccgcccctactgtccggtttccccgcctgccccggcggcctcgcgcgctcgcggagggctccacttccgccggcagcgt

SEQ ID NO: 236964 - DNA, 201 bp, Homo sapiens; identical to SEQ ID NO: 45539

SEQ ID NO: 236965 - DNA, 201 bp, Homo sapiens
gctggactggcatgaggtggtttctccagcaaaagctccctttcctcaggaggaagctggcccagttgcaggtggcctatcaccagctcttccaagaatasgacaaccacatcaagagcagcgtggtgggcagtgagcggaagcgagtgagtgcgaccactggggctctagggctggccttgcctcttcctctccccgtgg

SEQ ID NO: 236966 - DNA, 201 bp, Homo sapiens
tcaggacgtactgggcgaagagtctcctctggggaagccagccatgctgcacctgccttcagaacagggcgctcctgagaccctccagcgctgcctggagragaatcaagagctccgaggtgaggaaagagtcaggggatccagccctgctgaggggaaggcgtcttctccccacctgcacctctgcgtttcctgggcctg

SEQ ID NO: 236967 - DNA, 201 bp, Homo sapiens
cgaagagtctcctctggggaagccagccatgctgcacctgccttcagaacagggcgctcctgagaccctccagcgctgcctggaggagaatcaagagctcygaggtgaggaaagagtcaggggatccagccctgctgaggggaaggcgtcttctccccacctgcacctctgcgtttcctgggcctggggtggggatgtgct

SEQ ID NO: 236968 - DNA, 201 bp, Homo sapiens
tgcctacctcccgcaccgagtgaggcatcaggcgtggaagaagcctgggagccggagctgttccaggtgctgcctgagcacgccacctcccatctcccccmcagcaggaagaggaaaaaacaaaccacgaggctcttcagagagaggaccccttgtcccctacccacagtgctggagctggcacttcctatttctgctttg

SEQ ID NO: 236969 - DNA, 201 bp, Homo sapiens
ttcagagccgacccccaccccccgcccacgccctgcgcatagcccctgccgtccccccgttcgtcctccctgagtctgctctttccccgtgccagggcccsggcggccagcgagcaggcgcggcagctggagagtgagcgcgaggcgctgcagcagcagcacagcgtgcaggtggaccagctgcgcatgcagggccagagc

SEQ ID NO: 236970 - DNA, 201 bp, Homo sapiens
ccttagggaatgcagctggaagatctcaaacagcagctccagcaggccgaggaggccctggtggccaaacaggaggtgatcgataagctgaaggaggaggscgagcagcacaagattgtgatggagaccgttccggtgctgaaggcccaggtgagggccctcctctctgacccaccctggcactgggacctggagagtctc

SEQ ID NO: 236971 - DNA, 201 bp, Homo sapiens
gggccccagcccgttcctgctccgcgcttctggagcactggccaaggcgggccgattcaggacccaggttacttgggcggcgagctggactgtttctactsctccctcctcctccactgcggggtctgaccctactccttgtgtgaggactcctctagttcagagacatattctgttcaccaaacttgactgcgctctatc

SEQ ID NO: 236972 - DNA, 201 bp, Homo sapiens
gggagctgcaggagagccagagtcgcttggaggctgccactaaggaatgccaggctctggagggtcggtgagtcgggggagccggctccggagaccccttscagggtttccaaaagcaatgaggtgggtttaggggcctccagggtgctccttgatgaggatagaccggggcaggctgcgtaaacacgtcggggcagacgt

SEQ ID NO: 236973 - DNA, 201 bp, Homo sapiens
gccggctgcctgccatacccgctgccgctgctctgcatccccaattccggcgggcacgggtgcagctccgcgtagtgctcccgcatccccatcgccggccmggccccgcccctactgtccggtttccccgcctgccccggcggcctcgcgcgctcgcggagggctccacttccgccggcagcgtggccacgcctcctctgg

SEQ ID NO: 236974 - DNA, 201 bp, Homo sapiens
gggaatgcagctggaagatctcaaacagcagctccagcaggccgaggaggccctggtggccaaacaggaggtgatcgataagctgaaggaggaggccgagyagcacaagattgtgatggagaccgttccggtgctgaaggcccaggtgagggccctcctctctgacccaccctggcactgggacctggagagtctctttgg

SEQ ID NO: 236975 - DNA, 201 bp, Homo sapiens
caaactgaaggccagctgtcaggagtcggccaggtgggcctctgagagcgtgcccgtgtgagcagtgggtgcgacactggggggtcgccagtggtgacccygcagtgggtgcgacactggggggttgccagtggtgaccacaggagacggatggctcctggtgttctgggttagggctcactgtggtccctctcctctcac

SEQ ID NO: 236976 - DNA, 201 bp, Homo sapiens
agagcaaaggggaaccctactgatttcaacaaaacaaagttgcccaacccgaagctggccacaggcggaggcagtgaaatgacaaaatcagcttggaaaarcctaaggaccctgggccctcgtttcaaaagctgtcatttgctacacgaaatgctgaggttcaggaaaaggaagacacttgctccaactcacacagcaagc

SEQ ID NO: 236977 - DNA, 201 bp, Homo sapiens
tacgcagaaggcaacggggatccatggtagggttctcagtagaggaggaatgtgatcggaattacgtcttacactgatcgttctagcagtggtggggagamcagaccatagtgggcaagggtaaaagaagggtggcgtggtaagaggtaattgcagtaatccagctcagagacagtgctttgagcattttattattggaaa

SEQ ID NO: 236978 - DNA, 201 bp, Homo sapiens
ggggcctgggagatactcaccgatgcacccatgatgatgaatatgtgtgtatccgactgatggaaggcatcgccctggaaaagctcttcccgcaggatccygcacacctgggtccggctcagggccacctgctctgccatgacgctgtctggtggaagaaaggctcgttaacaaggcagaagaacaggagagcattgagaa

SEQ ID NO: 236979 - DNA, 201 bp, Homo sapiens
gggagatactcaccgatgcacccatgatgatgaatatgtgtgtatccgactgatggaaggcatcgccctggaaaagctcttcccgcaggatcccgcacacstgggtccggctcagggccacctgctctgccatgacgctgtctggtggaagaaaggctcgttaacaaggcagaagaacaggagagcattgagaagttagcc

SEQ ID NO: 236980 - DNA, 201 bp, Homo sapiens
tgggagatactcaccgatgcacccatgatgatgaatatgtgtgtatccgactgatggaaggcatcgccctggaaaagctcttcccgcaggatcccgcacamctgggtccggctcagggccacctgctctgccatgacgctgtctggtggaagaaaggctcgttaacaaggcagaagaacaggagagcattgagaagttagc

SEQ ID NO: 236981 - DNA, 201 bp, Homo sapiens; identical to SEQ ID NO: 45545

SEQ ID NO: 236982 - DNA, 201 bp, Homo sapiens
tggctttcctgattggcagtatcaatcacatatgttttctttacctgacaattgataatatgcttctgtattcttttttcgttttcctgtaagttcgaagmattcagcaaacaatggcaaggcagagccaccagaaacgtacacctgattttcatgacaaatacggtaatgctgtattagctagtggagccactttctgta

SEQ ID NO: 236983 - DNA, 201 bp, Homo sapiens
aaagaaagtgactattgatactttaagttattgagatatatatgtgaatttcagcattttttaaaattcaatgattatcattcctatattgcagtttttcrgaggctggtacttctacattcaggcttataaagcactgaagcataagacagcaaatatggacgtactgattgtgctggcaaccaccattgcatttgccta

SEQ ID NO: 236984 - DNA, 201 bp, Homo sapiens; identical to SEQ ID NO: 45548

SEQ ID NO: 236985 - DNA, 201 bp, Homo sapiens
atagctcagccttcatcggaaatgccgcttttgacttcaactaatgaattttatactaaagggatgacaccagttcaagacaaggaggaaggaaagaattmatctaagtgttacatacaggtcactggcatgacttgcgcttcctgtgtagcaaacattgaacggaatttaaggcgggaagaaggtgagacactcttgaag

SEQ ID NO: 236986 - DNA, 201 bp, Homo sapiens
aacattactctttttaaaaagaatgttatctgtattgtttttcttatcaatgctcttaggaatatattctatacttgtggccctgatggctggcaaggcakaagtaaggtataatcctgctgttatacaacccccaatgatagcagagttcatccgagaacttggatttggagccactgtgatagaaaatgctgatgaagg

SEQ ID NO: 236987 - DNA, 201 bp, Homo sapiens
aaaagttactggttaagttagagtctcttactaatatcacaaatatttctgttcttagaatgatcttctggatgtagtggcaagtattgacttatcaagaragacagtcaagaggattcggataaattttgtctttgctctaatttataatctggttggaattcccatagctgctggtatgtgactcttaactagtactgc

SEQ ID NO: 236988 - DNA, 201 bp, Homo sapiens; identical to SEQ ID NO: 45552

SEQ ID NO: 236989 - DNA, 201 bp, Homo sapiens
attttgactccttattacaaatttttttttgcatgtcagtttttataatatcatccttatactggatgaaatggtcacaatgtatatctctctgtagtatrtagaatctttacccattagctatttatgaccatgatttttctttttttattttttccatataagatggagacggtcttttcttgtgagtctgtttttctg

SEQ ID NO: 236990 - DNA, 201 bp, Homo sapiens
tatatgatggttatggaccaccactttgcaactcttcaccataatcaaaacatgagtaaagaagaaatgatcaaccttcattcttctatgttcctggagcrccagattcttccaggattgtctgttatgaatttgctgtcctttttattgtgtgtacctgtacaggcaagtgaattgttagcaaatatatttgttaataat

SEQ ID NO: 236991 - DNA, 201 bp, Homo sapiens
ttatgaccatgatttttctttttttattttttccatataagatggagacggtcttttcttgtgagtctgtttttctgtattcctgtaatggggctgatgayatatatgatggttatggaccaccactttgcaactcttcaccataatcaaaacatgagtaaagaagaaatgatcaaccttcattcttctatgttcctggag

SEQ ID NO: 236992 - DNA, 201 bp, Homo sapiens
aagtggatgtggaacttgtacaacgtggagatatcattaaagtagttccaggaggcaaatttccagtggatggtcgtgttattgaaggacattctatggtrgatgagtccctcatcacaggtatgttctttcaaaggatcatgaccaaaatgttaagaaaaatagacatgaaagatgaagcactttttgtagaagctatga

SEQ ID NO: 236993 - DNA, 201 bp, Homo sapiens
tgaatgatcaatactgcaaatgaaaagaatctttccctttctaccagacacgaatgagccgttggtagtaatagctcagccttcatcggaaatgccgcttytgacttcaactaatgaattttatactaaagggatgacaccagttcaagacaaggaggaaggaaagaattcatctaagtgttacatacaggtcactggcat

SEQ ID NO: 236994 - DNA, 201 bp, Homo sapiens; identical to SEQ ID NO: 45557

SEQ ID NO: 236995 - DNA, 201 bp, Homo sapiens
attattttttaaatgaattgagtttattttcatcacataggttggcattactaaggtgtttgctgaagttctaccttctcacaaggttgctaaagtgaagyaacttcaagaggaggggaaacgggtagcaatggtgggagatggaatcaatgactccccagctctggcaatggctaatgtgggaattgctattggcacagg

SEQ ID NO: 236996 - DNA, 201 bp, Homo sapiens
aagagaagttaagttacttatccaaagtcacatagctaataactgtcataactgggatttgagcctaattactctgactccaaaagctcatgcttgttctrttcactgtgcactgccaacaaatgtaagatggcagcatttcccctagcagttggaaatgtaatgtgtattactatctatggtcagataagtcttgcttag

SEQ ID NO: 236997 - DNA, 201 bp, Homo sapiens
tggtgggacatcataggagcgcctccagatcttcacctgggcctcaccatgctttgcagcagtttctgctttattgagaccggttagacccccatagtgcygctcattgaggcgccaagtcctcaccactggcagccacatctgatcaatggcatctagcactgtccagagggtccggatcactctcttctgcactgaggt

SEQ ID NO: 236998 - DNA, 201 bp, Homo sapiens; identical to SEQ ID NO: 45559

SEQ ID NO: 236999 - DNA, 201 bp, Homo sapiens
gaacttgtacaacgtggagatatcattaaagtagttccaggaggcaaatttccagtggatggtcgtgttattgaaggacattctatggtagatgagtccckcatcacaggtatgttctttcaaaggatcatgaccaaaatgttaagaaaaatagacatgaaagatgaagcactttttgtagaagctatgaataactaaatt

SEQ ID NO: 237000 - DNA, 201 bp, Homo sapiens
tgctggttccattaaccagaacgggtcactgcttatctgcgcaacacatgttggagcagacacaaccctttctcaaattgtcaaacttgtggaagaggcayaaacatcaaaggtaacttaactccctaggagaaacacaaactattttctttaaagccttctcagtataaatcttcacctagtttttacgttttccaataa

SEQ ID NO: 237001 - DNA, 201 bp, Homo sapiens
ggcgtgagccactgcacccagctaagaagtctttatttcagaaaatgaaagactgtctagaaagaacgaattttttttcctatttatttctatggttactrcttttacacttaatattttttgttttcggtatttttatatgtttgattgctgtctttaaagtgccttatcagatttatggctctgtactatgaattttgg

SEQ ID NO: 237002 - DNA, 201 bp, Homo sapiens
ttttataatacatactctctctgtacaatcttattcatgctcatcacttagtctaccacccacagacttccactaccgctctaaaatccatatctttagcyaagtcctgtttccttggctccatgccgatctatctatctgcccccaaaacatgatctacccacctaagtgttccaacacctccctcccgatttgtgcctg

SEQ ID NO: 237003 - DNA, 201 bp, Homo sapiens
cgtagcgcctgcccgccgcgcttcgcctcctcgtggcccgccgggctcagatcggcgtcgtaccagcagctgaagcggttctccaggttccatgtgctctygccgtgccggatcagcaccagtttgtaggcggccatggcggtgggctgcaatactttttataccatttgaagtaaaaggtacaaaaggttatacgctgaa

SEQ ID NO: 237004 - DNA, 201 bp, Homo sapiens; identical to SEQ ID NO: 45562

SEQ ID NO: 237005 - DNA, 201 bp, Homo sapiens
ggggtttcaccatgttggccaggctggtctccatctcctgatcttgtgatccacccgcctcggcctccccaagtgctgggattacaggcgtgagccaccgygcccagccgtgactttttatttttaactaatttcaagcttacaaaaaaactgcaagaaatagtagagaattcctgtttaccaatttcatgcaggttccac

SEQ ID NO: 237006 - DNA, 201 bp, Homo sapiens
ttctttttctataacaacatgtatacatatgtgaagtttatggaagcataagcctagaaatctatgaaagccccttccagctgtgtttctatatagatctrtaattcttggatgaatatttaagtatttgagaacttaacctaacactgtaaaactgttactgataagagctgcagtgagccatgatggcactaatgtact

SEQ ID NO: 237007 - DNA, 201 bp, Homo sapiens; identical to SEQ ID NO: 45563

SEQ ID NO: 237008 - DNA, 201 bp, Homo sapiens
gcaatggctgcttcatctgtttctgtagtactttcttctctcttccttaaactgtaagtatgatagcttgctcacatttgtattttgtattcctgttatcrtctagtcattcttggtaggttttattcttgtattgatcaatgataagcccaaaccattcttaatgagaattattattagcggccgggcgtggtggctcac

SEQ ID NO: 237009 - DNA, 201 bp, Homo sapiens
gttatggaccaccactttgcaactcttcaccataatcaaaacatgagtaaagaagaaatgatcaaccttcattcttctatgttcctggagcgccagattcktccaggattgtctgttatgaatttgctgtcctttttattgtgtgtacctgtacaggcaagtgaattgttagcaaatatatttgttaataataaaaaataa

SEQ ID NO: 237010 - DNA, 201 bp, Homo sapiens; identical to SEQ ID NO: 45565

SEQ ID NO: 237011 - DNA, 201 bp, Homo sapiens
tatcagaacagtagaggaaatccttttgtttctgtttgttaggagctggacactgaaaccttgggtacctgcatagatttccaggttgtgccaggctgtgrtattagctgtaaagtcaccaatattgaaggcttgctacataagaataactggaatatagaggacaataatattaaaaatgcatccctggttcaaattgat

SEQ ID NO: 237012 - DNA, 201 bp, Homo sapiens
atatatttataggttacatgagatgttttgatacaaacatgcaatgcataataatcacatcatggaaaatggggtatccatctcttcaagcatttatccttgtgttataaacaattcaattatattctgttacttttaaatgtacaattaaattatgattgactatagtcacactgttgtgccatcaaatactaggtccta

SEQ ID NO: 237013 - DNA, 201 bp, Homo sapiens
cttcccgtcgtcctttctcctggagggggtcttctgtgctgtcagtttgtactacgagtgtggtgagaaggtcatgttagtctggggcagtctcgaaagtytcacttattcacaattcaggtattaactacatttatgttttacctcccctaacaggggatagaggaggggaaattaaatcctgacctgtgtcactttctt

SEQ ID NO: 237014 - DNA, 201 bp, Homo sapiens
aataagtcttaagtggtaatacatgtgaatgtattttaaaagtttcagtatgctatagaattggtgttcaagtgatttaaagcattttattagttcagttmagatcctatttgtatagatgacattatcattaccatttttgtgaaactagttttactgagtacctgctatgtgccagttaccaagattgcaaagcttcaa

SEQ ID NO: 237015 - DNA, 201 bp, Homo sapiens
ggtgagtggtagaagaggaggccaggtaaacttgagggggacaggcatgggaaatcatgtgggaccttgttggctgttgtaaggatttgaggcatttttgrttagttcttaattcgtacttacaaatgttaaatgagattatgtatgggaaacattagtaatcaggaaagcactctatgaaagctagttacttgtattaaa

SEQ ID NO: 237016 - DNA, 201 bp, Homo sapiens
gtaaaagatgtgaataggcacttcacctagaagatatgaaaatagcaaataaaggaaatgcagattaggcagatgaaaattaaaaccaaaataacaattayaacaaatgtaccactctggtatgtgatgttgctaacgagggaggttgtatgtatatggtggtaggaggtatttgtgaaatctctgtactttctgcccaat

SEQ ID NO: 237017 - DNA, 201 bp, Homo sapiens; identical to SEQ ID NO: 45567

SEQ ID NO: 237018 - DNA, 201 bp, Homo sapiens
gtgtgttggcacgtgcctgtagtcccagctactcaggaggctgaggtggaaggatcgcttgagcctggaaggttgaggctgcagtgagctgagatcacacyactgcactccaccctggatgagagagtgacagagtgagaccctgtcttgtccggaaaaaaaaaaaaagcctgtcttgtctggctcagtccaggtgctaga

SEQ ID NO: 237019 - DNA, 201 bp, Homo sapiens
aaccattactcacggaaccccagtggtgaatcaagtaaaggttctaactgaaagtaacagaatatcacaccataaaatcttggccattgtgggaactgctkaaagtaacagtgaacaccctctaggaacagccataaccaaatattgcaaacaggtacatttttttcctcttgtttattagtgtagtcatctcctgtagga

SEQ ID NO: 237020 - DNA, 201 bp, Homo sapiens
cgatttgctttccaagcctctatcacagttctgtgtattgcatgtccctgttcactgggactggccactccaactgctgtgatggtgggtacaggagtagrtgctcaaaatggcatactaataaaaggtggagagccattggagatggctcataaggtaagacagtccccagaactaaaacctgtaccaccaaactatcaa

SEQ ID NO: 237021 - DNA, 201 bp, Homo sapiens
ataggagcgcctccagatcttcacctgggcctcaccatgctttgcagcagtttctgctttattgagaccggttagacccccatagtgccgctcattgaggygccaagtcctcaccactggcagccacatctgatcaatggcatctagcactgtccagagggtccggatcactctcttctgcactgaggtgaggcagatgtc

SEQ ID NO: 237022 - DNA, 201 bp, Homo sapiens
ggctacaatagaagtatctcccgaacagaaacgataatacgatttgctttccaagcctctatcacagttctgtgtattgcatgtccctgttcactgggacyggccactccaactgctgtgatggtgggtacaggagtaggtgctcaaaatggcatactaataaaaggtggagagccattggagatggctcataaggtaaga

SEQ ID NO: 237023 - DNA, 201 bp, Homo sapiens; identical to SEQ ID NO: 45570

SEQ ID NO: 237024 - DNA, 201 bp, Homo sapiens
tatttttaattctaggctcctatccagcagtttgcagacaaactcagtggctattttgttccttttattgtttttgtttccattgccaccctcttggtatrgattgtaattggatttctgaattttgaaattgtggaaacctactttcctgtaagtgacttgtaataactcgttactatatgcagaacaatttgtgagtct

SEQ ID NO: 237025 - DNA, 201 bp, Homo sapiens
aaacccatgagtccttttagtaaaaagtggtaactcgggctgggcatggtggatcacttgaggtcaggagttcgagaccagcctggccaacatggtgaaamcccctgtctctacaaaaaagataaaaaattagccaggcatggtagaacatgcctgtaaccccagctacttgagaggctgaggcagaagaatcacttgaac

SEQ ID NO: 237026 - DNA, 201 bp, Homo sapiens
atcatttatgctccttaaatctatctttactctccatacaggggaggcaatgcctgtggctaagaaacctggcagcacagtgattgctggttccattaacyagaacgggtcactgcttatctgcgcaacacatgttggagcagacacaaccctttctcaaattgtcaaacttgtggaagaggcacaaacatcaaaggtaac

SEQ ID NO: 237027 - DNA, 201 bp, Homo sapiens
tgtgcctcctgcgtacataaaatagagtctagtctcacaaaacacagagggatcctatactgctccgtggccctggcaaccaacaaagcacatattaaatrtgacccagaaattattggtcctagagatattatccatacaattgaagtaagtgccaagaatttatgtttctgtgttcttacctatttaatcagcactccc

SEQ ID NO: 237028 - DNA, 201 bp, Homo sapiens; identical to SEQ ID NO: 45575

SEQ ID NO: 237029 - DNA, 201 bp, Homo sapiens; identical to SEQ ID NO: 45577

SEQ ID NO: 237030 - DNA, 201 bp, Homo sapiens; identical to SEQ ID NO: 45576

SEQ ID NO: 237031 - DNA, 201 bp, Homo sapiens; identical to SEQ ID NO: 45578

SEQ ID NO: 237032 - DNA, 201 bp, Homo sapiens; identical to SEQ ID NO: 45579

SEQ ID NO: 237033 - DNA, 201 bp, Homo sapiens; identical to SEQ ID NO: 45580

SEQ ID NO: 237034 - DNA, 201 bp, Homo sapiens
ttaatgacaataccatggcttagaatttctctatacaatatttatatgttcagtgaaataatttttttctcatgaatttccttagagcttaggttttgaascttctttggtcaagaaggatcggtcagcaagtcacttagatcataaacgagaaataagacagtaagtactttggagtgtcagtaaaaaacagattttgac

SEQ ID NO: 237035 - DNA, 201 bp, Homo sapiens
ttcagtgaaataatttttttctcatgaatttccttagagcttaggttttgaagcttctttggtcaagaaggatcggtcagcaagtcacttagatcataaaygagaaataagacagtaagtactttggagtgtcagtaaaaaacagattttgactccttattacaaatttttttttgcatgtcagtttttataatatcatcc

SEQ ID NO: 237036 - DNA, 201 bp, Homo sapiens; identical to SEQ ID NO: 45583

SEQ ID NO: 237037 - DNA, 201 bp, Homo sapiens; identical to SEQ ID NO: 45584

SEQ ID NO: 237038 - DNA, 201 bp, Homo sapiens
agtgaaataatttttttctcatgaatttccttagagcttaggttttgaagcttctttggtcaagaaggatcggtcagcaagtcacttagatcataaacgakaaataagacagtaagtactttggagtgtcagtaaaaaacagattttgactccttattacaaatttttttttgcatgtcagtttttataatatcatcctta

SEQ ID NO: 237039 - DNA, 201 bp, Homo sapiens
taagtactttggagtgtcagtaaaaaacagattttgactccttattacaaatttttttttgcatgtcagtttttataatatcatccttatactggatgaartggtcacaatgtatatctctctgtagtatgtagaatctttacccattagctatttatgaccatgatttttctttttttattttttccatataagatggag

SEQ ID NO: 237040 - DNA, 201 bp, Homo sapiens; identical to SEQ ID NO: 45586

SEQ ID NO: 237041 - DNA, 201 bp, Homo sapiens
caaaacatgagtaaagaagaaatgatcaaccttcattcttctatgttcctggagcgccagattcttccaggattgtctgttatgaatttgctgtccttttwattgtgtgtacctgtacaggcaagtgaattgttagcaaatatatttgttaataataaaaaataagcaaaatttggcaggcaaggtttattttcagctaca

SEQ ID NO: 237042 - DNA, 201 bp, Homo sapiens
aagtaaaaggtacaaaaggttatacgctgaaaattctttttcccacccttattccctaaccactcatttcccctcaccagaggaaccactgtttccatggsatatattagattgatttatatgaaattgccggtgtttgactatgatgatttcatgtggttcagcctaatatcagtgaaaaaacagagtcctatcttcatg

SEQ ID NO: 237043 - DNA, 201 bp, Homo sapiens
gatttttttttcccactttctttggagatttgctttttgccctggcttcaggggagtttgaataggatatggggtgtgtgtttgtgagtgtgagtgtgtgwgtgtgtgtgtgtgtgtgtgtgtgtgtgtgtgttttcagtattaattctgttttttttcctctaaactccttaggcctgtagttttgtttattggttttag

SEQ ID NO: 237044 - DNA, 201 bp, Homo sapiens
aactaaaagtatcccttatgggaaacgaagggatgggcctaattaaaggcataggttgggctagttaactgcggcaggagcacgtccttaaggcacagatsgctcatgctattgtttgtggcttaagaatgcctttaagcagttttccactctgggctgggtgggccaggtgttccttgccctcattccggtaaacccaca

SEQ ID NO: 237045 - DNA, 201 bp, Homo sapiens; identical to SEQ ID NO: 45678

SEQ ID NO: 237046 - DNA, 201 bp, Homo sapiens; identical to SEQ ID NO: 45629

SEQ ID NO: 237047 - DNA, 201 bp, Homo sapiens; identical to SEQ ID NO: 45634

SEQ ID NO: 237048 - DNA, 201 bp, Homo sapiens; identical to SEQ ID NO: 45664

SEQ ID NO: 237049 - DNA, 201 bp, Homo sapiens
ttatatcaaggcccagtctcagaaatatttcttcatctcagaaatactttcatgactctgattctatgaggaaagacatcatgcaacattcagccattgtyaatatcacttttttctctttttcttgaacttacgcaatgatgttcataaatatccattttcaatgtatctattgatccatgaatacatttctgaaaggtc

SEQ ID NO: 237050 - DNA, 201 bp, Homo sapiens; identical to SEQ ID NO: 45693

SEQ ID NO: 237051 - DNA, 201 bp, Homo sapiens
aaatactttcatgactctgattctatgaggaaagacatcatgcaacattcagccattgttaatatcacttttttctctttttcttgaacttacgcaatgaygttcataaatatccattttcaatgtatctattgatccatgaatacatttctgaaaggtcatagaaacttgacactaacttctaaggctttagaactttct

SEQ ID NO: 237052 - DNA, 201 bp, Homo sapiens
gatagtataacacagtcacatgaaataaagcaaaatgagatgaaaaacagtgtgctagttactatcattctatcatttaatactcaacataactctagcaygtaggctatgctatttataatttcaaaatgaggagacaatttcaagtagatgtagtacattgaagtcacatggtaaagagcagaggatttgggatttata

SEQ ID NO: 237053 - DNA, 201 bp, Homo sapiens
ggatttgggatttatatgaagatctgttagccttagagcagggtattcaaattttgccttccctgggccacattataagaagaagaattgtcttgggccamatataaaatatattaatcatagctaatgagctttaaaaaaattgcaaaaaatgtcataatgttttaagaaatttacgaatctgtgttgggccgcattcaa

SEQ ID NO: 237054 - DNA, 201 bp, Homo sapiens
aagaagaagaattgtcttgggccaaatataaaatatattaatcatagctaatgagctttaaaaaaattgcaaaaaatgtcataatgttttaagaaatttaygaatctgtgttgggccgcattcaaagctgtcctggcccacatgcggcccgcgggttgtaggttggacaagcttgccttagagcctacgtatgtgaagtaa

SEQ ID NO: 237055 - DNA, 201 bp, Homo sapiens
tagctaatgagctttaaaaaaattgcaaaaaatgtcataatgttttaagaaatttacgaatctgtgttgggccgcattcaaagctgtcctggcccacatgyggcccgcgggttgtaggttggacaagcttgccttagagcctacgtatgtgaagtaaattatattccattaaaatcttaaaggagtttatcataactacca

SEQ ID NO: 237056 - DNA, 201 bp, Homo sapiens
ttctaaagaatcatattttcatagataaaacacttagtgccatagcaagacctgctcatgatgactggacacttcagaggcaaaggaaacaagccttggtktagccttgtgccctttcagagtgagcctttccaccctcttctgatggaaaaacttccactcaagcttaacatctcactaaagcattacctttcccctgaa

SEQ ID NO: 237057 - DNA, 201 bp, Homo sapiens; identical to SEQ ID NO: 45644

SEQ ID NO: 237058 - DNA, 201 bp, Homo sapiens
tttccaccctcttctgatggaaaaacttccactcaagcttaacatctcactaaagcattacctttcccctgaagacagacaggtggtggctctttcctccrtgtcctcaggattaggactgcttgtagaatatttctgcacccccaacacctagctcagatacgagaacacaaaagaaatgtgataagtatgtgaaagaag

SEQ ID NO: 237059 - DNA, 201 bp, Homo sapiens
cctttcccctgaagacagacaggtggtggctctttcctccatgtcctcaggattaggactgcttgtagaatatttctgcacccccaacacctagctcagayacgagaacacaaaagaaatgtgataagtatgtgaaagaagaaaaaaggtgagatgctgatcactgcaagccttgacaacagtagccatatgccatgacat

SEQ ID NO: 237060 - DNA, 201 bp, Homo sapiens
ttcccctgaagacagacaggtggtggctctttcctccatgtcctcaggattaggactgcttgtagaatatttctgcacccccaacacctagctcagatackagaacacaaaagaaatgtgataagtatgtgaaagaagaaaaaaggtgagatgctgatcactgcaagccttgacaacagtagccatatgccatgacatcca

SEQ ID NO: 237061 - DNA, 201 bp, Homo sapiens
ttctggtcagctatcctggccaacccccagtctgcttttctaacatgtaacattagcagagaccatcatttatccggatctgtgaagcctcccagaagagmctgcaaggtgaacagcagccaaaaatcagtgctgtggaaaaatgtgagcttctacctcacatgcctcctttcctgtttcccgcagtgttcagagatggct

SEQ ID NO: 237062 - DNA, 201 bp, Homo sapiens
tgccattgcactccagcctgagtgacacagcgagactgcatctcaaaaaaaaaacaaaacaaaaatctgaaaaacaagaaattatgacataagccaattgytttagaaatacaggtggacatcatactcaggagaaaaatgattaaagtgattgtccctagcaaactaatgtaaccacaaataaaaaagtaaaattaccta

SEQ ID NO: 237063 - DNA, 201 bp, Homo sapiens; identical to SEQ ID NO: 45650

SEQ ID NO: 237064 - DNA, 201 bp, Homo sapiens; identical to SEQ ID NO: 45631

SEQ ID NO: 237065 - DNA, 201 bp, Homo sapiens; identical to SEQ ID NO: 45632

SEQ ID NO: 237066 - DNA, 201 bp, Homo sapiens; identical to SEQ ID NO: 45635

SEQ ID NO: 237067 - DNA, 201 bp, Homo sapiens
ggtctcacagccttcagagctgagagccccgaacagagatttacccacatattgattaacagcaaacaagtcattagcattgtttctatagatattaaatwaactaaaagtatcccttatgggaaacgaagggatgggcctaattaaaggcataggttgggctagttaactgcggcaggagcacgtccttaaggcacagat

SEQ ID NO: 237068 - DNA, 201 bp, Homo sapiens
ttcttcccatcctgctatcctgactcgaagatttcagaacatagtagccatcaggaccccctgacagatagctgcttctctccatttcaaggactaaaackgttttgcattaagtaaaaacctgtgaccagaactgaaggaagactctaggaactgaaaactgcaacagaaattagcacaatttgaaaacaaaacaaaatt

SEQ ID NO: 237069 - DNA, 201 bp, Homo sapiens
gcttaataaacaagcaattacttaatagacattaatggcctgctgtattattgcctgtaacataaagggatagtgagaggtacaaataaaacccaacattyatacatcatcttaaggtattagagagtattttataatataggcattacttgttaagcaattgcgcactttgctaattgacttggggtgatggatgaaaga

SEQ ID NO: 237070 - DNA, 201 bp, Homo sapiens
attcttcccatcctgctatcctgactcgaagatttcagaacatagtagccatcaggaccccctgacagatagctgcttctctccatttcaaggactaaaaytgttttgcattaagtaaaaacctgtgaccagaactgaaggaagactctaggaactgaaaactgcaacagaaattagcacaatttgaaaacaaaacaaaat

SEQ ID NO: 237071 - DNA, 201 bp, Homo sapiens
tacaaataaaacccaacatttatacatcatcttaaggtattagagagtattttataatataggcattacttgttaagcaattgcgcactttgctaattgayttggggtgatggatgaaagattagcataaataacccctttttgaagtaaactaacattagcaaggaagccacatggcactggattttgactaatttgatc

SEQ ID NO: 237072 - DNA, 201 bp, Homo sapiens
cttatcgtaattgtttcattttgcttcacagctgagtgtcttttcttctactcaggtgaccagttaatcctgacagaagctcccagccctctgtaattcakccctgtcatccttgtgacgtggattacctttctggctacaaattgaatcatggtgcctcatcacagtgttgttctccaagcctggaaggtatcctctgaa

SEQ ID NO: 237073 - DNA, 201 bp, Homo sapiens
tctggctacaaattgaatcatggtgcctcatcacagtgttgttctccaagcctggaaggtatcctctgaacagacagcatgccaacccatgtcacccttgccttcttccccccacctctcattacggtattgcacagagattggactggaagtcagacagatgtgggctgaagccctggctcccctaactgtggaatggtg

SEQ ID NO: 237074 - DNA, 201 bp, Homo sapiens
gcctcatcacagtgttgttctccaagcctggaaggtatcctctgaacagacagcatgccaacccatgtcacccttgccttcttccccccacctctcattamggtattgcacagagattggactggaagtcagacagatgtgggctgaagccctggctcccctaactgtggaatggtgctgttttctcagtctctctggtcc

SEQ ID NO: 237075 - DNA, 201 bp, Homo sapiens
tttataaaatcggtggacagtgggagcatataataatctcaagtacttaaaaaagttttaacttcttctaagctcctagtaattgcttttatttctcttayaacattttaattttttatcaaaataacacatgtatggaattcaaaatggaaacaaaactaaaaaagcaaaaagactttttccattccacttttcccactg

SEQ ID NO: 237076 - DNA, 201 bp, Homo sapiens
taacacatgtatggaattcaaaatggaaacaaaactaaaaaagcaaaaagactttttccattccacttttcccactgccaaggacagactctgatcaatcytcagaaagtctcaaattagactgtaacttggatagcaaacaatgaagaagcttaaaagaaagagaaaagtaaaaatataaggtaagttggtaatttaaga

SEQ ID NO: 237077 - DNA, 201 bp, Homo sapiens
gtaacttggatagcaaacaatgaagaagcttaaaagaaagagaaaagtaaaaatataaggtaagttggtaatttaagaaatgcatataggaagtaatttawctcaaaatatattccaccactcagaagcagataatatacattttatcctagaaatgtaacataggatattgctctaatccaaaactaccctgggaaaatg

SEQ ID NO: 237078 - DNA, 201 bp, Homo sapiens
caccactcagaagcagataatatacattttatcctagaaatgtaacataggatattgctctaatccaaaactaccctgggaaaatgaaaggaggtggtgaktgtgtgtgtgttcaacaatggtatcctcattttgcatagcagcaagtcaacagacaattcttaaaactgaaaaacagggccaggcgcagtggttcatgcc

SEQ ID NO: 237079 - DNA, 201 bp, Homo sapiens
ggtgggtggatcacctgaggtgaggagttcgagaccagcctgaccaacatggcaaaaccctgtctctactaaaaatacaaacattaattgggcatggtggyaggtgccggtaatctcagctactcgggagcctgaggcaggagaattgcttgaacccaggaggcggaggttgcagtgagccgagatcatgccattgcactc

SEQ ID NO: 237080 - DNA, 201 bp, Homo sapiens
gaaaatttctttatattattccaaaagtatatcattagagctggaatttagtaggtgacctataatactggtgtttctggtcagctatcctggccaacccscagtctgcttttctaacatgtaacattagcagagaccatcatttatccggatctgtgaagcctcccagaagagactgcaaggtgaacagcagccaaaaat

SEQ ID NO: 237081 - DNA, 201 bp, Homo sapiens
gtctcaagtattccttcatagcaatgcagactaacaaatgctacaacctcagttttctgatgggtccaagaaaagtcattgattttcattttgctcagatytcttgttgctgtggggcagatataacgacttcccaggtctttacatgtctgagctgaaactggagtccttatatcagtggtaaaaataaatactctactt

SEQ ID NO: 237082 - DNA, 201 bp, Homo sapiens
ctctaggaactgaaaactgcaacagaaattagcacaatttgaaaacaaaacaaaattgcaaaagacttagttgctttccacctaagaagctaatcaatggrgaaaatgtccactggggtttcagtaatgaacttttgagtttgggtgcaagcaaatgtaccaagaccagctcagtcagggagaccctaccccagtggtgct

SEQ ID NO: 237083 - DNA, 201 bp, Homo sapiens; identical to SEQ ID NO: 45682

SEQ ID NO: 237084 - DNA, 201 bp, Homo sapiens
tttgaagtaaactaacattagcaaggaagccacatggcactggattttgactaatttgatcaagaaacggtcttcctttgttcatttatatataagtttgytaatttgcccaaactaagctcaagtctagaaaacagtacttcatagttgcaagtaaacctgagcggggccttcttatcgtaattgtttcattttgcttca

SEQ ID NO: 237085 - DNA, 201 bp, Homo sapiens; identical to SEQ ID NO: 45683

SEQ ID NO: 237086 - DNA, 201 bp, Homo sapiens; identical to SEQ ID NO: 45630

SEQ ID NO: 237087 - DNA, 201 bp, Homo sapiens
atacgtttgttcttaatcattgccataatctccaatttctgccttccttaccattataagcataatcatgataaaatattatcttttcctagaccaatagygtccttctgacttcttttcctttctccagagtccagataaactgcctcggttcccttgtcttcttaccctctgcctaaggcatcctaggaatgtttatct

SEQ ID NO: 237088 - DNA, 201 bp, Homo sapiens; identical to SEQ ID NO: 45660

SEQ ID NO: 237089 - DNA, 201 bp, Homo sapiens
caaaaagaatgactcaaagaaaggcccagctctcaagctgaatgacaaaaatgctgttgtaaatttagtctcaggtgtaaatacccaagccctctggtacycagggagctggctggtctgtggtgcatgtgtgtccttgtgatggcaagcattgtagttgatggccttcagaagaattgaggatctgatggaggtttttta

SEQ ID NO: 237090 - DNA, 201 bp, Homo sapiens; identical to SEQ ID NO: 45638

SEQ ID NO: 237091 - DNA, 201 bp, Homo sapiens
attctcccgagacttatattcaatattttaagaatcacaatgttactaccattattcgtctgaataaaaggatatatgatgccaaacgctttacggatgcrggcttcgatcaccatgatcttttctttgcagatggcagcacccctactgatgccattgtcaaaagatttctggatatctgtgaaaatgctgagggtgcca

SEQ ID NO: 237092 - DNA, 201 bp, Homo sapiens; identical to SEQ ID NO: 45642

SEQ ID NO: 237093 - DNA, 201 bp, Homo sapiens
aaaccctgtctctactaaaaatacaaacattaattgggcatggtggtaggtgccggtaatctcagctactcgggagcctgaggcaggagaattgcttgaamccaggaggcggaggttgcagtgagccgagatcatgccattgcactccagcctgagtgacacagcgagactgcatctcaaaaaaaaaacaaaacaaaaatc

SEQ ID NO: 237094 - DNA, 201 bp, Homo sapiens
gggcatggtggtaggtgccggtaatctcagctactcgggagcctgaggcaggagaattgcttgaacccaggaggcggaggttgcagtgagccgagatcatkccattgcactccagcctgagtgacacagcgagactgcatctcaaaaaaaaaacaaaacaaaaatctgaaaaacaagaaattatgacataagccaattgct

SEQ ID NO: 237095 - DNA, 201 bp, Homo sapiens
taatctcagctactcgggagcctgaggcaggagaattgcttgaacccaggaggcggaggttgcagtgagccgagatcatgccattgcactccagcctgagygacacagcgagactgcatctcaaaaaaaaaacaaaacaaaaatctgaaaaacaagaaattatgacataagccaattgctttagaaatacaggtggacatc

SEQ ID NO: 237096 - DNA, 201 bp, Homo sapiens
tcagctactcgggagcctgaggcaggagaattgcttgaacccaggaggcggaggttgcagtgagccgagatcatgccattgcactccagcctgagtgacasagcgagactgcatctcaaaaaaaaaacaaaacaaaaatctgaaaaacaagaaattatgacataagccaattgctttagaaatacaggtggacatcatact

SEQ ID NO: 237097 - DNA, 201 bp, Homo sapiens
gctactcgggagcctgaggcaggagaattgcttgaacccaggaggcggaggttgcagtgagccgagatcatgccattgcactccagcctgagtgacacagmgagactgcatctcaaaaaaaaaacaaaacaaaaatctgaaaaacaagaaattatgacataagccaattgctttagaaatacaggtggacatcatactcag

SEQ ID NO: 237098 - DNA, 201 bp, Homo sapiens
ctactcgggagcctgaggcaggagaattgcttgaacccaggaggcggaggttgcagtgagccgagatcatgccattgcactccagcctgagtgacacagcragactgcatctcaaaaaaaaaacaaaacaaaaatctgaaaaacaagaaattatgacataagccaattgctttagaaatacaggtggacatcatactcagg

SEQ ID NO: 237099 - DNA, 201 bp, Homo sapiens
gatattcttctcccatctcccctggctgtgctgacctttacactgtgtagtgttgtcatctggtggattgtttgtgactacattcttcccatcctgctatyctgactcgaagatttcagaacatagtagccatcaggaccccctgacagatagctgcttctctccatttcaaggactaaaactgttttgcattaagtaaaa

SEQ ID NO: 237100 - DNA, 201 bp, Homo sapiens
gacttcccaggtctttacatgtctgagctgaaactggagtccttatatcagtggtaaaaataaatactctacttaatgttattccattttacattcaatgyaatcaaggaaattaaattcttatacaaggagcctgaccgtgttcccattggaaagagttttatctagtaatttcactctaggtaggtgattaaatcacat

SEQ ID NO: 237101 - DNA, 201 bp, Homo sapiens
caaacatggtgaaaccttgcctctactaaaaacacaaaattagccccttctctcttgtgccctctcttgacacatgacaatggctccccttcaccttctgycatgattgtaagcttcctgaggccctcatcagaagcagatcaccacacttcccatgcagcctgcagaagtatgagccaaaatataccaactaactttata

SEQ ID NO: 237102 - DNA, 201 bp, Homo sapiens
cttaaaactgaaaaacagggccaggcgcagtggttcatgcccgtaatccaagcactttgggaagctgaggtgggtggatcacctgaggtgaggagttcgaraccagcctgaccaacatggcaaaaccctgtctctactaaaaatacaaacattaattgggcatggtggtaggtgccggtaatctcagctactcgggagcct

SEQ ID NO: 237103 - DNA, 201 bp, Homo sapiens
tctcccatctcccctggctgtgctgacctttacactgtgtagtgttgtcatctggtggattgtttgtgactacattcttcccatcctgctatcctgactcraagatttcagaacatagtagccatcaggaccccctgacagatagctgcttctctccatttcaaggactaaaactgttttgcattaagtaaaaacctgtga

SEQ ID NO: 237104 - DNA, 201 bp, Homo sapiens
ttcttaaaactgaaaaacagggccaggcgcagtggttcatgcccgtaatccaagcactttgggaagctgaggtgggtggatcacctgaggtgaggagttcragaccagcctgaccaacatggcaaaaccctgtctctactaaaaatacaaacattaattgggcatggtggtaggtgccggtaatctcagctactcgggagc

SEQ ID NO: 237105 - DNA, 201 bp, Homo sapiens
ctcttttatacaggcctttcaaagttacagggtcacaaagtgccttgaaataaatttcaaagggaacagcaaattctggaatcacacccaaactctttatrttcatgactgtaacagagttaataaattgtgggcataaatgaataactgcaatgtcctgcttggaaacccagtggtgagtgtgttcatcagataaaaatg

SEQ ID NO: 237106 - DNA, 201 bp, Homo sapiens
tatgacaattaaatgctgagcatggttagatgcttttgagaatacactgtaccatcctggtggcttatgagctttaggggagaatgacgcataaatatgaragaatatcaagaactaagagattcatagaagtgctaagtgcaggcccattatggaacatatcagcttacaggccagacactgaaataatgggattatgat

SEQ ID NO: 237107 - DNA, 201 bp, Homo sapiens
ttccattttacattcaatgcaatcaaggaaattaaattcttatacaaggagcctgaccgtgttcccattggaaagagttttatctagtaatttcactctasgtaggtgattaaatcacatggggacaaagtgagtgggcttatgctgcacagtgaattagtaaaagagcttcagatgagctggatttacatggactattcc

SEQ ID NO: 237108 - DNA, 201 bp, Homo sapiens
agagagcattttatatgacaattaaatgctgagcatggttagatgcttttgagaatacactgtaccatcctggtggcttatgagctttaggggagaatgaygcataaatatgagagaatatcaagaactaagagattcatagaagtgctaagtgcaggcccattatggaacatatcagcttacaggccagacactgaaata

SEQ ID NO: 237109 - DNA, 201 bp, Homo sapiens
ctggagcctacatggatggaatttttctgaaacatttcaaataaaagtaaaataagcaatctatcaattgccattaagtaacagaaaatttctttatattattccaaaagtatatcattagagctggaatttagtaggtgacctataatactggtgtttctggtcagctatcctggccaacccccagtctgcttttctaac

SEQ ID NO: 237110 - DNA, 201 bp, Homo sapiens; identical to SEQ ID NO: 45643

SEQ ID NO: 237111 - DNA, 201 bp, Homo sapiens
tttttttttgatgaatgccagccaaatcaatagcacccaagccaatctcactggtaatgttcttaaaggaaatatatacccagaatacttgccaggcgtgrcctaaacagctactatatgcatattatttccagattcttaatgtgtccctagcccagagaaaggcctactttagccttgttacagcttatatcaaggccc

SEQ ID NO: 237112 - DNA, 201 bp, Homo sapiens
ttctctttttcttgaacttacgcaatgatgttcataaatatccattttcaatgtatctattgatccatgaatacatttctgaaaggtcatagaaacttgamactaacttctaaggctttagaactttcttctttgcaaagaaccaaatcttgtttatttttcattcacattagatagtataacacagtcacatgaaataaa

SEQ ID NO: 237113 - DNA, 201 bp, Homo sapiens
aggggggcagatcccttaggtcaggagtttgagaccagcctgacaaacatggtgaaaccttgcctctactaaaaacacaaaattagccccttctctcttgygccctctcttgacacatgacaatggctccccttcaccttctgtcatgattgtaagcttcctgaggccctcatcagaagcagatcaccacacttcccatgc

SEQ ID NO: 237114 - DNA, 201 bp, Homo sapiens; identical to SEQ ID NO: 45646

SEQ ID NO: 237115 - DNA, 201 bp, Homo sapiens; identical to SEQ ID NO: 45674

SEQ ID NO: 237116 - DNA, 201 bp, Homo sapiens; identical to SEQ ID NO: 45651

SEQ ID NO: 237117 - DNA, 201 bp, Homo sapiens; identical to SEQ ID NO: 45652

SEQ ID NO: 237118 - DNA, 201 bp, Homo sapiens; identical to SEQ ID NO: 45653

SEQ ID NO: 237119 - DNA, 201 bp, Homo sapiens
gcagttttccactctgggctgggtgggccaggtgttccttgccctcattccggtaaacccacacccttccagcgtgggcattagggccattatgaacatgwtacagtgctgcagagattttatttatggccagttttggggccagtttatggctggattttggggggcttgctcccaaaaagaatgactcaaagaaaggcc

SEQ ID NO: 237120 - DNA, 201 bp, Homo sapiens
tttcatagagacggggtttcaccatgttggtcaggatgatctcaatctcttgacctcatgatccacctgctgcggcctcccaaagtgctgggattacaggygtgagccactgtgcccggcccatttttagttttatctgttttttcttcatctgtttaatgtgtattaagtacttactgcgtactggagatagtgtcatgt

SEQ ID NO: 237121 - DNA, 201 bp, Homo sapiens
tcaggaagaggttgctctttctcaccttagatattttgtacagagttatccttttatgaacgttataagatcagactctcatgctgtcagtaggaagcaarttgaggaatcctcttctgctatcatcaaccggccaattacttactgtgatttgccctttggcctgcctgaagagtgttaactgggtatcttaaattctac

SEQ ID NO: 237122 - DNA, 201 bp, Homo sapiens
gagtcgacttcaatgttcctatgaagaacaaccagataacaaacaaccagaggtaaggtccctgctaatccttgggctgggtttaagatgtgtgtaggtayacaggatgaaatgtttttcctttcatattgtattatggaactgtagcaacttaaaacaaatgattttggctttctatcaacccactctctgatctgcttt

SEQ ID NO: 237123 - DNA, 201 bp, Homo sapiens
atttattaaggtcattgggagtgcctgctttcaagcagtttctttttttagcaccaaagatgctggtcttgccttatcctgcttttggcatggtcttgctrcagtattaggagtcaaatgctgacctaaaatttggtgtccttttaatctggaactcatgatgcatgaactctagggcttagaagtggcaggaggcaaagg

SEQ ID NO: 237124 - DNA, 201 bp, Homo sapiens; identical to SEQ ID NO: 45738

SEQ ID NO: 237125 - DNA, 201 bp, Homo sapiens
tgtctttggagccatcacattttctgtttttgtttttctctataggttaaagccgagccagccaaaatagaagctttccgagcttcactttccaagctagkggatgtctatgtcaatgatgcttttggcactgctcacagagcccacaggtaccaagaaccttgtagactaccacactgagaacagtattcctatttactt

SEQ ID NO: 237126 - DNA, 201 bp, Homo sapiens; identical to SEQ ID NO: 45739

SEQ ID NO: 237127 - DNA, 201 bp, Homo sapiens
ccaaagaagatagtagataacttgtgtgcatataagctagaacagtataaggggccgggcatggtggcttacgcctgtaatcccaggactttgggaggccraggcgggcagatcacctgtcaggagtttgggaccagcctggccaacatggtgaaaccccgtttctaccaaaaatacaaaaattagccgggcgtggtggcg

SEQ ID NO: 237128 - DNA, 201 bp, Homo sapiens
aggtagtgttgtcattagcagtcattactacctgggcagtacagaggaacttcagataaagctcctggcatccactgaggcggggagggacagatagaaayttggtctgagagttatggtctagtagacctggaatccacaatgtaaaagttggccagctcctggccatatatcctaaaaaagagctggcatgttattggg

SEQ ID NO: 237129 - DNA, 201 bp, Homo sapiens
  misc_feature (1)...(201): n = A,T,C or G
tcctggaaggtgagggtcttctgttttttggcttgtttgggataagggtggactgtgcagtgagaggtgggtagaatggagtggagaaagttagaaggtantgttgtcattagcagtcattactacctgggcagtacagaggaacttcagataaagctcctggcatccactgaggcggggagggacagatagaaacttggt

SEQ ID NO: 237130 - DNA, 201 bp, Homo sapiens
agggtcttgttctgttgcccatggtggagtgcagtggcatgacattaattattgcagcctcaaacttgagggctgaagtgatcctcctgcctcatccttgyagggagctaggactacaggcacataccaccatgtccaactgacctttacttttttttttttttcctggtagagacggggtcttgctatgttgcccaggct

SEQ ID NO: 237131 - DNA, 201 bp, Homo sapiens
  misc_feature (1)...(201): n = A,T,C or G
ccagtttggagctcctggaaggtgagggtcttctgttttttggcttgtttgggataagggtggactgtgcagtgagaggtgggtagaatggagtggagaangttagaaggtagtgttgtcattagcagtcattactacctgggcagtacagaggaacttcagataaagctcctggcatccactgaggcggggagggacaga

SEQ ID NO: 237132 - DNA, 201 bp, Homo sapiens
agttagggaactgtatgggtaccctaaaaggacatgtagctctcctcttctctctaatttcactttggtcaatatttttgcaggtaaccgctgccctgctrtggagatagaagaacccaataatttatgtccatgaaaaatacctggtttccacatttccccaaatgacataggcctttgtaatctggacaaagtaggagt

SEQ ID NO: 237133 - DNA, 201 bp, Homo sapiens
atcgacttatttcataaagaaactaagtctcaaaaaaaaaaaaacttaagtttctgaaaggcagtcatacgattaaagttagaggcagtggtgctgttggkctttagagctcagcccattcaatcagcaaactttttctataaatggccagatagttaatattttaggctttctgtgttgtgcagtcacttccatctgcat

SEQ ID NO: 237134 - DNA, 201 bp, Homo sapiens
aatttttgagtataaagggcatgaacaggtttataaagactgaagggtactatttgtttctagaagaaactttggtgtgcagccctgagttctggtcttgstggaggtggtgtttaagtagcttttcttgatagctcatcttctctttcacctctacccctcagggcttggactgtggtcctgaaagcagcaagaagtatg

SEQ ID NO: 237135 - DNA, 201 bp, Homo sapiens
tcttaagatgtgtaaagtatgttcctttaaatctctctttaagatagaggtacaggtatcgacttatttcataaagaaactaagtctcaaaaaaaaaaaaacttaagtttctgaaaggcagtcatacgattaaagttagaggcagtggtgctgttggtctttagagctcagcccattcaatcagcaaactttttctataaa

SEQ ID NO: 237136 - DNA, 201 bp, Homo sapiens
taatagaaatacaatgtgagccaaattgtgttaattaaattaaagggacatttaacttttttggtactaagtcttcaagatctggcatgtgtttttatactacagcacatctcaatttgatctagttatatatctggtactcaacagacacacatgactaaatgactgtcgtaatggacagtgcaggtctagcccagaaca

SEQ ID NO: 237137 - DNA, 201 bp, Homo sapiens
ggatgaaaaccatgatttcttgcagtccagaagtagaaatattttagtgataaggagctggcctctaggactaggaggaatgatagggattgactagaatytgaatgtctttgatcttttctagctccatggtaggagtcaatctgccacagaaggctggtgggtttttgatgaagaaggagctgaactactttgcaaagg

SEQ ID NO: 237138 - DNA, 201 bp, Homo sapiens
gaactgagggtggggccaaacagtctgtttgaataagccctcctggtgattctcatgcatggcaaagtttgagtactactgatctagtttactgtcattcycaacactattgacatctgttgttttgtgggggactgttgaattgtaaggttgtttaaagcatccttggccactagatgccagtagcaccctcccaagttg

SEQ ID NO: 237139 - DNA, 201 bp, Homo sapiens; identical to SEQ ID NO: 45735

SEQ ID NO: 237140 - DNA, 201 bp, Homo sapiens
ccagtcggcgagatgggacttaatgcttatcctgcaaatctctaggcttcaaggaagggaccttgaaaggtcattttactttcccttcccccacgctcctrgaccgtcgcagccaaatgagaaacggcccacatctcacaggttcctgcacaaaaggatatttttccaagaggatgttgatttaacttcaggagtagaccc

SEQ ID NO: 237141 - DNA, 201 bp, Homo sapiens
acagaggaacttcagataaagctcctggcatccactgaggcggggagggacagatagaaacttggtctgagagttatggtctagtagacctggaatccacmatgtaaaagttggccagctcctggccatatatcctaaaaaagagctggcatgttattgggaagataaagtgggggaaatctggcttactgggccctatag

SEQ ID NO: 237142 - DNA, 201 bp, Homo sapiens
gtggctagaaaagtagaattttaaaattgggggaagtttcctcgtgcactttgggtctcttactctgcgcatgtggatctctagtcacttgccaacacggyttctctcttatctgccagaattgttggtagagtgggcagcttttacatttatcctttttgtcacgtgtgatatatttgtgcataccaggagcaaggtgca

SEQ ID NO: 237143 - DNA, 201 bp, Homo sapiens
tttcttctctgttactggactttcttagatatatcaaacactatcctaagatgaaacttctgttttgaggatccttggctataaattctcaattatgataygaacatttattttacaaattctacaaaagtatgttgaacttaagaaaaacaaaacaggtgtgtttatattctcaaaagctttgccatctttcccaatatg

SEQ ID NO: 237144 - DNA, 201 bp, Homo sapiens
acagttggtaaatgatggagctaggactagaacctaggccttctgacttgctgcctccctgagaacattcaagtaataatatcctatgctatataatgaakatttatctcctatgatgttgatcaggtctatttttatacattttacctgtttttatattacctttccctaatactgaaaaacactaaaactgatacgaga

SEQ ID NO: 237145 - DNA, 201 bp, Homo sapiens
tctgaaggaatttttaacctaaccaaagaagatagtagataacttgtgtgcatataagctagaacagtataaggggccgggcatggtggcttacgcctgtratcccaggactttgggaggccaaggcgggcagatcacctgtcaggagtttgggaccagcctggccaacatggtgaaaccccgtttctaccaaaaatacaa

SEQ ID NO: 237146 - DNA, 201 bp, Homo sapiens
gctctatgtttaacttctacattttcttcctctctttttgtagaagtatatttcttgttttctcagatgcctagcttccagagaaggtcataaaatacctytttgtcaatgtgaagtgtttctgaggttcttttctgttgtcatgtttccatctgccttctctgtcccagcttgcccttgttgcttttatgaggaatatgt

SEQ ID NO: 237147 - DNA, 201 bp, Homo sapiens
aatatgtgtatatatgtgtgtgtgtgtgtgtacatatatagatattttagatatatagacatatctatatatctagatctagatctatatatagatttttytttttctgatacagggtctcactctgctgcccaggctgaagtgcagtggcatgatcacagctcactgcagctttgaccttccaggctcaagcgatcctcc

SEQ ID NO: 237148 - DNA, 201 bp, Homo sapiens
gcattttttagtactttccactattctggtctttagtatctcggagaacaagatgctctgagtctagtgtctcagtctcctttggcttctcacatttattraggtcattgggagtgcctgctttcaagcagtttctttttttagcaccaaagatgctggtcttgccttatcctgcttttggcatggtcttgctgcagtatt

SEQ ID NO: 237149 - DNA, 201 bp, Homo sapiens
ctttgttcttcaactttctgtagacctggaatatgggagtgagtgccacctagtgctaccttatggttaggtttttaggttcagactgaaatagctgttacggggaattggatgtgagatttttttgccacctttcttgtagtgtagtttccctaggccattaacagtttttgggaaaacttttatattttattaaacaaa

SEQ ID NO: 237150 - DNA, 201 bp, Homo sapiens
tatcatcatcacacttggttaactagaatatctcctcagtcagtatatatattttcccagcactgtgaataaaagtcagttgaatgagaaattgaaagtayctctgattggtcccttcctgcaaccaatcaggctggtggcaggccaagttttcatttgtataggagtgtaactttgtaacttcacttcagcctctgattg

SEQ ID NO: 237151 - DNA, 201 bp, Homo sapiens
tctctagggaaactggcttgaggaagctagctgggggcgggattggaggagctgcttaacttttctccctctggacctaataaagtttcatttagcacacrctaacccaaagccttgaaatgattggctagtcctgttttgctgatggaaaatgacctgttcagggttactgaactaccaagttggtggcagagctaggag

SEQ ID NO: 237152 - DNA, 201 bp, Homo sapiens
tagcggctgctcagcagggcgcgccgagagcagcggccgggaaggggcggtgcgggaggcggggtgtggggcggtagtgtgggccctgttcctgcccgcgsggtgttccgcattctgcaagcctccggagcgcacgtcggcagtcggctccctcgttgaccgaatcaccgacctctctccccagctgtatttccaaaatgt

SEQ ID NO: 237153 - DNA, 201 bp, Homo sapiens
ggattgagtttttgggttggagaaacatagggcaaagttaggcagtacttttgtcactttgagactttctctgttcctgtgccttgaaatagaaactcagkttctatgtaataccacttctctagtccattcttctttaagtgatgattcttgctttctcttgtagagctaaagttgcagacaagatccagctcatcaata

SEQ ID NO: 237154 - DNA, 201 bp, Homo sapiens
aacagtattcctatttacttgagtagcccaagctctgggttgtttttggagagttttgtattatactgtaatcctttcagcttctctaattggaactgccrctatggctcttgttgagtagctctcatccaaagaggaaataaaggtaaaaaaatgttggtaattgtagggctttttgtggagtttcaggaagaggttgct

SEQ ID NO: 237155 - DNA, 201 bp, Homo sapiens
gacagtaagtaactatattaccttataaaataaagtagtatttaaatgtagatcagaaattatgctgtcaaagataaatctgctgactaggctgtagaatytgaaacttaaatgctactatcagtgatagaaggcagaaaagtgtctcaaaaacagaattgccatattaggactcaacattaatgaaactattaagaaaca

SEQ ID NO: 237156 - DNA, 201 bp, Homo sapiens
atggagtggagaaagttagaaggtagtgttgtcattagcagtcattactacctgggcagtacagaggaacttcagataaagctcctggcatccactgaggyggggagggacagatagaaacttggtctgagagttatggtctagtagacctggaatccacaatgtaaaagttggccagctcctggccatatatcctaaaaa

SEQ ID NO: 237157 - DNA, 201 bp, Homo sapiens
ggactacaggtgtgcaccaccatgcccagctaatttttgtatttttcatagagacggggtttcaccatgttggtcaggatgatctcaatctcttgacctcrtgatccacctgctgcggcctcccaaagtgctgggattacaggcgtgagccactgtgcccggcccatttttagttttatctgttttttcttcatctgttta

SEQ ID NO: 237158 - DNA, 201 bp, Homo sapiens
caccaccatgcccagctaatttttgtatttttcatagagacggggtttcaccatgttggtcaggatgatctcaatctcttgacctcatgatccacctgctkcggcctcccaaagtgctgggattacaggcgtgagccactgtgcccggcccatttttagttttatctgttttttcttcatctgtttaatgtgtattaagta

SEQ ID NO: 237159 - DNA, 201 bp, Homo sapiens; identical to SEQ ID NO: 45762

SEQ ID NO: 237160 - DNA, 201 bp, Homo sapiens; identical to SEQ ID NO: 45764

SEQ ID NO: 237161 - DNA, 201 bp, Homo sapiens; identical to SEQ ID NO: 45765

SEQ ID NO: 237162 - DNA, 201 bp, Homo sapiens
gaaccgcaggtgcagcgggctggcaggtgaggaggaaggacgagctgtggggctgtcctgccagggcctttcaggcctctggctgtgctccgacttgaccmttctgctacctgctggtcttgagccccgggcattcaggtgagggcagggcatggcttctgcaagagctggccagagcttttggcaacgcatccccttaag

SEQ ID NO: 237163 - DNA, 201 bp, Homo sapiens
tccgtcttaaagaatttcctttggaaatcagggggagatcctccactggggcaaacctcattttcatgtccctgaagtcctccaggcccacacctccaccygccttctgtcctgtatctgcggaaatatttattttctgtaatgaactttcttggggctccagacaccctctcagcctcttcccacacagaactagaaatg

SEQ ID NO: 237164 - DNA, 201 bp, Homo sapiens
tgctagggagaaagggagtgtacggatgggtggtggggtggtgccacccaagccaggctatgacaagattgatctggttactgcaggagagccagcctggmagtgtaacaaggaaggctggggctggttgcctgtgggaagcctttgcagtgtgacatggcgagggcctaacccatggaagcatgggagtccatgacccac

SEQ ID NO: 237165 - DNA, 201 bp, Homo sapiens
ctttgacaggttggggcacttcaaggccatgaaaaacagctaggctgtgctttgtcttgttggggtggggcagggcatgctagggagaaagggagtgtacrgatgggtggtggggtggtgccacccaagccaggctatgacaagattgatctggttactgcaggagagccagcctggcagtgtaacaaggaaggctggggc

SEQ ID NO: 237166 - DNA, 201 bp, Homo sapiens
caggagccaggtgtacacgcatgcagaaagcgagctgacagtctagtgcagcgcttctcagcctcagcccgcagcagcatcgcctggcagccttgtccaayggcagatgctgggcgccacccccagagtgtccggttcggtaggcctggggtggggcccgagactctgcattttgaatgagttcctaggcggtgatgataa

SEQ ID NO: 237167 - DNA, 201 bp, Homo sapiens
gagagctgtttgttgaacacttcagtgtgccaggctctgcagcaggagccaggtgtacacgcatgcagaaagcgagctgacagtctagtgcagcgcttctyagcctcagcccgcagcagcatcgcctggcagccttgtccaacggcagatgctgggcgccacccccagagtgtccggttcggtaggcctggggtggggccc

SEQ ID NO: 237168 - DNA, 201 bp, Homo sapiens
ctctgcccacagtattcgctctcccactggtttcccgtgagtgccggggaacattgctacatcaccctgtgtggaatatggctttatgatcatgatcattygaagttttctcttttcactcaagagcttgtcacaaataatagccttgttgaccccaggccctcattttctggaaaccaggctgtattttctccatcttcc

SEQ ID NO: 237169 - DNA, 201 bp, Homo sapiens
tccctgtggatattttgggcaggataactctctgttgtgcaggactgtcctgcacattgcaggatccttagcagattccctggcctctgcccactagatgmtagtagcacccccccaagttgtgacagctgaaaatgtcttcagacattgccaatgtcccctgaagggcaaaatcgccccagttgaaaatcactggcttag

SEQ ID NO: 237170 - DNA, 201 bp, Homo sapiens
catgtgagctaaggacaaactccagcctgctaaggtatcagaatatgtgccctgtgggggatgaagatgaccggaaggaggcaggaagggttgtgggcacrttcaggtccttggtgtgggtgctgcagtcagtttttgagcattcatccagctgtttgcttatggtctacacacttttcggtatatatttcatattcaata

SEQ ID NO: 237171 - DNA, 201 bp, Homo sapiens
tgaaaagagaaaagaaatagagttaaaatctcaatatgtcatagtctcaaggacaaagaaccagcaaaaatgcatgggttgtgtaaaccaaaaataaattmtaagccccccaccccacccacctgccatctgaatggacctctcctcttgaccaagggcattccaaagttaacatgaaaactagttcaggccatgatggga

SEQ ID NO: 237172 - DNA, 201 bp, Homo sapiens
cctgtgacattttcaagtctctctctgccaggaaaggagcctgtcacaaaagcagcctctgcccacagtattcgctctcccactggtttcccgtgagtgcyggggaacattgctacatcaccctgtgtggaatatggctttatgatcatgatcatttgaagttttctcttttcactcaagagcttgtcacaaataatagcc

SEQ ID NO: 237173 - DNA, 201 bp, Homo sapiens
gtctgggattacatcttaataatgaacctctcacacaaaagactgaagaaaatgtccagaagaggttttatgtcttctatagcttggtttgaaagcaatgctttctttattttttttcattgttgtttcagcaaaggggtgagcagtaaacttgggggtcacatacaagtttggtttccccgtggttctgaatgtctaatt

SEQ ID NO: 237174 - DNA, 201 bp, Homo sapiens
aattcgggggcatgtgcgtctgtcagcaaaggcttgcctgaggagctaattctggaaacacacaggagttagcagggcaaggagaatatgtgagtatttawgtgcatgggtggtgagtgttttagggatgaggatggcatcccattgcaggcaacagaggccctaaaaagcaggcgagagcacgtggcacaattagagact

SEQ ID NO: 237175 - DNA, 201 bp, Homo sapiens
tctgggattacatcttaataatgaacctctcacacaaaagactgaagaaaatgtccagaagaggttttatgtcttctatagcttggtttgaaagcaatgctttctttattttttttcattgttgtttcagcaaaggggtgagcagtaaacttgggggtcacatacaagtttggtttccccgtggttctgaatgtctaatta

SEQ ID NO: 237176 - DNA, 201 bp, Homo sapiens
tactgccacttccattttgtaagtgaagcccagagaagcaaagaaatgtgccctaggtcacatagctagtcggtggcagagctgtgattggcaggttggtygaatgcctccaaagccctcgaccttcccactatacttcacgcatctctagagaagagacagaagtagccaggatgaaggtcttcaggtttaagaagaact

SEQ ID NO: 237177 - DNA, 201 bp, Homo sapiens
ctgggattacatcttaataatgaacctctcacacaaaagactgaagaaaatgtccagaagaggttttatgtcttctatagcttggtttgaaagcaatgctttctttattttttttcattgttgtttcagcaaaggggtgagcagtaaacttgggggtcacatacaagtttggtttccccgtggttctgaatgtctaattac

SEQ ID NO: 237178 - DNA, 201 bp, Homo sapiens
acatgtaggaaaccttagatttgtttttggtgaagtgaaagagagaagttgctctaaaaggttggaaaccagcccctaagaaaaaaagaaagaactgagasaaatcaactcaggagggcctgggacccagcgtgcgtaagagtctaccttgtctagacatggctcttacgcagtgattcctcacagcacagcacccggtga

SEQ ID NO: 237179 - DNA, 201 bp, Homo sapiens; identical to SEQ ID NO: 45775

SEQ ID NO: 237180 - DNA, 201 bp, Homo sapiens
tgggattacatcttaataatgaacctctcacacaaaagactgaagaaaatgtccagaagaggttttatgtcttctatagcttggtttgaaagcaatgctttctttattttttttcattgttgtttcagcaaaggggtgagcagtaaacttgggggtcacatacaagtttggtttccccgtggttctgaatgtctaattact

SEQ ID NO: 237181 - DNA, 201 bp, Homo sapiens
tgctccattttggcactccaatagccctgaactgggggtgtggctctgaatatttacagggaaatacaagcagataaatgctgctgactgatcagccaggrgagtccgtggtaaatagagaccattcccctccagtcataactgctgaactgcttaatgtttcagactaatcataggtctacttgcaagcatggaagggat

SEQ ID NO: 237182 - DNA, 201 bp, Homo sapiens
tacatcttaataatgaacctctcacacaaaagactgaagaaaatgtccagaagaggttttatgtcttctatagcttggtttgaaagcaatgctttctttattttttttcattgttgtttcagcaaaggggtgagcagtaaacttgggggtcacatacaagtttggtttccccgtggttctgaatgtctaattactaattca

SEQ ID NO: 237183 - DNA, 201 bp, Homo sapiens
atcccaacactttggaaggccaaggcaggtggataatgaggtcaggagttcaagaccagcctggccaagatggtgaaaccctgtctctactaaaaatccaraaattagctgggtgtggtggcaggtgcttgtaatcccagctacttgggagactgaggcagagaattgcttgaacccaggaggcggaggttgaagtgagcc

SEQ ID NO: 237184 - DNA, 201 bp, Homo sapiens
taggagattctgattgtgcactcaagttctggcaaccactattcaagtctaggccaagtaaactacagagtttttctcaaccagtgagtattcattgagcrtctgccatacgtttggttccataaagggtgccgtgaaaataaaaagacctatcccagctcctctcaagcatctggtgggttagattcttggaaaagaaat

SEQ ID NO: 237185 - DNA, 201 bp, Homo sapiens
catctcccagcttaggacgtcaagatcaaagcccaaatgcagcgttgccactgctcttcctccacggtttgcccagagctggtgcttccacaagcccaggytgggaccagctttctcctctgagtgagactctgtggcagtccaaggaaaacctgtccatctggaggctgattatagaagcttggccagaattctcctccc

SEQ ID NO: 237186 - DNA, 201 bp, Homo sapiens
cagtccaaggaaaacctgtccatctggaggctgattatagaagcttggccagaattctcctcccctccctttcacttcccaaagacacaggcagcaagtgsggctgcttcccaaggagcaatgaggaggcagtcccaaaggggtgaaggcccaaacctcatctgcccagggggctgcattcacgaggcctttcttacccag

SEQ ID NO: 237187 - DNA, 201 bp, Homo sapiens
gattatagaagcttggccagaattctcctcccctccctttcacttcccaaagacacaggcagcaagtgcggctgcttcccaaggagcaatgaggaggcagycccaaaggggtgaaggcccaaacctcatctgcccagggggctgcattcacgaggcctttcttacccagctcggagcaggcctcagactgtaacatgatgt

SEQ ID NO: 237188 - DNA, 201 bp, Homo sapiens; identical to SEQ ID NO: 45761

SEQ ID NO: 237189 - DNA, 201 bp, Homo sapiens; identical to SEQ ID NO: 45763

SEQ ID NO: 237190 - DNA, 201 bp, Homo sapiens
gctggctgtggctgtggccgcacatgcttacaggtcagcctgcccagttctctgttgcggcaggccagccctcgtggccctcggctctggcaggactcggygtgagccgggcagtgctgtgcattccttttgctgcactccttggttcctctcccagataatacattgtccgtcttaaagaatttcctttggaaatcaggg

SEQ ID NO: 237191 - DNA, 201 bp, Homo sapiens
atcagacatggctaagatggctaattatctaattttttgaggctagaatgcatgtgttatcattattgaccttgtatttcttaaagtttccatttataagwaaaagctattagctgaaagaatatcatcgattctcccaaaggatccaaatgattagccagcatcatttccaccttcagtcgctggtctgggtcagaggcc

SEQ ID NO: 237192 - DNA, 201 bp, Homo sapiens; identical to SEQ ID NO: 45766

SEQ ID NO: 237193 - DNA, 201 bp, Homo sapiens
ctacttaaaaaaaaaaaaatcagccaggcatggtggtgcatgccagtagtcccatctactgtggaggctgaggcaggagaatcacttgaacccagaaggcrgaggttgcagtgagccaagattgcaccagtgcactccagcctgggcgacagagtgatactccatctgaaaaaaaaaaaaaaaaaaaaaaaaaaaaaaagt

SEQ ID NO: 237194 - DNA, 201 bp, Homo sapiens
gcagtgttctaggacttccaagaggaacagagggtgaccaaggagccatttttaccctcaagaagagttatctagaaggagggtgtgtctgcacagcttargggtcagcgtccccacagcagctgcataggcagatagatgcacatagcctggcccaggggaggtgctcaggaaacacttgttgatgattgaggaaagaat

SEQ ID NO: 237195 - DNA, 201 bp, Homo sapiens
gatccctaagcctactgtggtctggaagtgcttgtaacaagattgtctttgtaacaacttccttaaggagacttcaaagccctttattaacccacacagtrgctgagctggtagggacagagcagtaacaccccttgaaatgtgggtggcatctgctttttggtggctcttggaggagaagttactccatcccttcaaacc

SEQ ID NO: 237196 - DNA, 201 bp, Homo sapiens
gcctagtgatccatcataattgtccagtaaagtggatccttcaggcagtggtggcaacatacccacagctttgcccttctgatagcaatcgtcaatcctgrctcagcctatcctgttctgtcccagtttaacctgccctgtctctgttgcagatgggctccttcaatccgtcctatgacaagatcttcagtcaccttcaac

SEQ ID NO: 237197 - DNA, 201 bp, Homo sapiens
gaaaggggctagttcatgtttctaggctcagtcgctctgttcagctgcacttatgccctacggagggaggctgacactatcacctctgcaacatgtctctmtaggccaggaagcattcgtcccgggattcaacattgaagagctgcttccggagaggaccgctgaatattaccgctaccgggggtccctgaccacaccccc

SEQ ID NO: 237198 - DNA, 201 bp, Homo sapiens
acggccctgaggggacaattacaatagtccagtctcgaccttccagtctcttccctgtggatattttgggcaggataactctctgttgtgcaggactgtcstgcacattgcaggatccttagcagattccctggcctctgcccactagatgctagtagcacccccccaagttgtgacagctgaaaatgtcttcagacattg

SEQ ID NO: 237199 - DNA, 201 bp, Homo sapiens
ttttggtgaagtgaaagagagaagttgctctaaaaggttggaaaccagcccctaagaaaaaaagaaagaactgagacaaatcaactcaggagggcctgggrcccagcgtgcgtaagagtctaccttgtctagacatggctcttacgcagtgattcctcacagcacagcacccggtgagataggtactgccacttccatttt

SEQ ID NO: 237200 - DNA, 201 bp, Homo sapiens
agtgtgtctgtaagaaggagaaggggccaacaacaaaaccaccgtgacagctgacattgaggggcaagtggccacagagatctgagaaagggcagggaaaygggaggacaattcaacaaagcagtgtccccagaaacagagggttcagaaatcaggagtggggggttagtgccaccagggtcaagggctgcatgaagtgcg

SEQ ID NO: 237201 - DNA, 201 bp, Homo sapiens
aaaattaccaattacattggaaaattaaaaacaaaattaattacaaacactgaggcaaagaaatggaacagaataacaaaaaatatgagattaaaccggcttttttttaaaaaaaaagccaagttcactttttaacttttaaaaaacacaatttccttaagtaggaaatgccaggagtgataagtgaccagattgcttgtc

SEQ ID NO: 237202 - DNA, 201 bp, Homo sapiens
gtgaacggtaaagtttccgcctgcttctttcctaacactcctgagcgctcagccgcccctgggctgaaggctcttcaatgataaagtaaaatcattgctgsggggagcagggaaggtgtagtaccaaatagtagattctcaagaaaggatgctccgttttcctttgctgaggttgggtcgggaagcacgttgctttctagt

SEQ ID NO: 237203 - DNA, 201 bp, Homo sapiens
tacggggtcctctatccctatctctctgttacagccctcctgggcagaatgagatggcgacagggaacagagacattgtgtgaaggtgtgggaggacaaattttttttttttttttggagtctcattctcacccagggtggagtgcagtggcgtgatcttggctcactgcaacctctgcttcctgggtccaagggattctc

SEQ ID NO: 237204 - DNA, 201 bp, Homo sapiens; identical to SEQ ID NO: 45772

SEQ ID NO: 237205 - DNA, 201 bp, Homo sapiens
acatacacacacttttagagagacttcctgaggtcagagctgagctggggccctgatcctcacccgatgaacccccttgactcaccatcctcacttacaaygccgcttctccccagccctccagctcctgagcccctccagacactgccatttatacccaaagtgccgagtctggagtcccaagccagctcactcacagag

SEQ ID NO: 237206 - DNA, 201 bp, Homo sapiens
ctgcttggaaccgtgcttaggtgaaatcttaaagagactccttgtggcagtttcctaagagtcccactgtttttttttttttttttttttttttttctagkgacggggtttcactgtttcactgtgttgcccaggtgggtctcaaactcctgggctcaagtgatctacctgccttggcctcccaaagtgctctaagattgt

SEQ ID NO: 237207 - DNA, 201 bp, Homo sapiens
tccccatccctctaaaggtgacttaatctccctcagtgcagccagaaccacgtctccatctctgttatgttacttgacacaccatagagtaattattaccmcacagcaaagacgaatagaaaaagaacaatacgtacatattatacacatactacaagctccttaaggccagggatgactgacgtgttactcatttttatg

SEQ ID NO: 237208 - DNA, 201 bp, Homo sapiens
gagattcatccttactctgatagcttttttagtccttccccaagaaaaaaccaaaccaaactaaaacaaaacaaaaaacccaaaaacaaaacaaaaaaaamccctagtgtgttcaaaacaacagagcaaccagaaagaatgactgtattggagctagacccgagagcacatcatgttagctgagaatgggcgtggtgtttc

SEQ ID NO: 237209 - DNA, 201 bp, Homo sapiens
ggaagatgcttatgaatccccccacccctggccccatgctagctttccagcttcactgtatttacatccgatgccacctcaagtgtcaggaagaaactgtkgacagctttaaaataatagtttattcaccgattcgcttattctcccctccagtctttaatgaatccctttgtgggctggtcacagggaaccagagacaga

SEQ ID NO: 237210 - DNA, 201 bp, Homo sapiens
ctgatttgacagggggcggagctcaggctgtaatgcttgcttgcccgctgctcacctcctgctgtgcggcccagttcctaacaggccacagaccggtactsgtccacagcctgggggctgggcacccctgctctatatgtaccctggaatgaattctttttttatcccaagatagaggaatgtcttctgattggcttgcat

SEQ ID NO: 237211 - DNA, 201 bp, Homo sapiens
catattcaataaaagagttacaaagttccagctggctgggagattcatccttactctgatagcttttttagtccttccccaagaaaaaaccaaaccaaacyaaaacaaaacaaaaaacccaaaaacaaaacaaaaaaaaaccctagtgtgttcaaaacaacagagcaaccagaaagaatgactgtattggagctagacccg

SEQ ID NO: 237212 - DNA, 201 bp, Homo sapiens
gatggttttgggatgaaactgttccacctcagatcatcaagcattagttagattccgtaaggaatacacagcctagatcccttgcatgcgcagttcacaawagggcttgtgctcctatgagaatgggaggcctctgctgatttgacagggggcggagctcaggctgtaatgcttgcttgcccgctgctcacctcctgctgt

SEQ ID NO: 237213 - DNA, 201 bp, Homo sapiens
aggtgcttagtcctagtattcttaataaatatcagagcttaagagccagaaggaaccttccagaacatagcttccacacacatcccatccccaccactacscccaccacccccaccatttgcacgaagggcaatggaggctccagcagggaacataacccactgaagtgttgggacagctgatgctggaatctcattctct

SEQ ID NO: 237214 - DNA, 201 bp, Homo sapiens
attccaggcctataattatttaacatttgtcaatcatccctatcagattgggttctatagttactctaaatgtgggtatcaagagtcaatgtcctcagggktttctcttcaggaaggtcatacttgcaaagccagcagccacaaagacctatttaggttggtgcaaaagcagttgtggtttttgcctgaaaggaatggcaa

SEQ ID NO: 237215 - DNA, 201 bp, Homo sapiens
caggacacatatcctattataaacaaagaagaaagggctcctctctgaaagtttggctgaggtcccagaacttaagctgtcagtatgtctagaattaactkcttgttgccgtgattgtaagctagcgatggatgaagaggtgttggtcagtgcttagtgaaagagggatgcttgtcttaaatgaagcgagaggagcaccag

SEQ ID NO: 237216 - DNA, 201 bp, Homo sapiens
atccatttacattgtcacggtgaaattcaacagaactgttttagggtaaagaccttgcggcccacagtgaatttcctagtgggcaaaatgtgaggtgtgtwgcttttttatctttgtagccgtcttatttaggaatagaatgggaggcagctcccagcttgacttttctctttggcttagtgatttgggggtctcgagatt

SEQ ID NO: 237217 - DNA, 201 bp, Homo sapiens
aagcctccaatttgagttttcctgcccttccagatcaaaccagtgtatcttgtacgtattgattgatgtattatgtctctaaaatgtatcaaaacaagccrtgccctgaccaccttgggcacatgtccttatccttggcaaaataaggggagggtctgagagacctaacctagtctggggggctgagggggctggggttct

SEQ ID NO: 237218 - DNA, 201 bp, Homo sapiens
  misc_feature (1)...(201): n = A,T,C or G
cttctttccccacatcacttaagagcaggtggtcctgagtggttgctggacctgattctggaggccaagactctgagccttgaagatttacctccggggantcagaaaagaggagaaaaggagtaattgtattgaacagagaattagaagataaggaaaatccctttgtgagaaactctaaatcttgagcatggatctctg

SEQ ID NO: 237219 - DNA, 201 bp, Homo sapiens
ataattaaaatttaaaaattaaaaaaaaattccctatgagagaaagtacatggactttggggaaggatctgaagtttagccaggttgggacaatttggacygaatcatttaacttaaccctgctattttcctcaactgtgcttagaaaaggggtacaggacctgatttctgtccttaagaggtttatagtccagctacacc

SEQ ID NO: 237220 - DNA, 201 bp, Homo sapiens
gtgcttagaaaaggggtacaggacctgatttctgtccttaagaggtttatagtccagctacaccttagcctgggggcagagtttctcaaccttagcactaytgacaacttaggcaggataattcttacagtggggggtgtcctgtgtgttgtagcattggcagcaccgttggtctctacccagtagatgccagttgcccct

SEQ ID NO: 237221 - DNA, 201 bp, Homo sapiens
ggtgtcctgtgtgttgtagcattggcagcaccgttggtctctacccagtagatgccagttgcccctccccagttttaacaggcaaaactgtttccagacaytgccaactctgtgcaggcaggaggggcaagttttcccctgatggaaaaccactgccccagggtttctgcggcccagaactcattgttttcactgatgtca

SEQ ID NO: 237222 - DNA, 201 bp, Homo sapiens
caaaaggaagccaagaagtttctataatcacatcattagtgggcttgctctaagcaactgcatgtcacccaccagagcagctatggcacactcagacaagsgtgccaggcagcaaaccgcaagggcaaatctatagtcctgcaattaggatctgcttaagcctagacctgggcaattttatgaaaccttaaaaggagggag

SEQ ID NO: 237223 - DNA, 201 bp, Homo sapiens
agagtaattattaccacacagcaaagacgaatagaaaaagaacaatacgtacatattatacacatactacaagctccttaaggccagggatgactgacgtrttactcatttttatgcctggcatggtgcctggtgctcaatataagcttgttgaaagaatgtccctgacccatctccagttccctcccctcctcagtgtct

SEQ ID NO: 237224 - DNA, 201 bp, Homo sapiens
cctgtaccatctttgatgcctgttctctacagtgcctagaggcttcgctctcacccagccgaggctctgctgggaaacaggctttggcttcgcactcaggytctagttctctggttgccctgacagttctccctgtgtcccgaaagtctcgctgactttctctctcccatcagataacagatgttttggcatctgcctcca

SEQ ID NO: 237225 - DNA, 201 bp, Homo sapiens; identical to SEQ ID NO: 45760

SEQ ID NO: 237226 - DNA, 201 bp, Homo sapiens
tagtccttctttccccacatcacttaagagcaggtggtcctgagtggttgctggacctgattctggaggccaagactctgagccttgaagatttacctccrgggattcagaaaagaggagaaaaggagtaattgtattgaacagagaattagaagataaggaaaatccctttgtgagaaactctaaatcttgagcatggat

SEQ ID NO: 237227 - DNA, 201 bp, Homo sapiens
agctgtttgcttatggtctacacacttttcggtatatatttcatattcaataaaagagttacaaagttccagctggctgggagattcatccttactctgayagcttttttagtccttccccaagaaaaaaccaaaccaaactaaaacaaaacaaaaaacccaaaaacaaaacaaaaaaaaaccctagtgtgttcaaaacaa

SEQ ID NO: 237228 - DNA, 201 bp, Homo sapiens
cttatgccctacggagggaggctgacactatcacctctgcaacatgtctctctaggccaggaagcattcgtcccgggattcaacattgaagagctgcttcyggagaggaccgctgaatattaccgctaccgggggtccctgaccacacccccttgcaaccccactgtgctctggacagttttccgaaaccccgtgcaaatt

SEQ ID NO: 237229 - DNA, 201 bp, Homo sapiens
gacttccaagaggaacagagggtgaccaaggagccatttttaccctcaagaagagttatctagaaggagggtgtgtctgcacagcttaggggtcagcgtcyccacagcagctgcataggcagatagatgcacatagcctggcccaggggaggtgctcaggaaacacttgttgatgattgaggaaagaatgggttatttctc

SEQ ID NO: 237230 - DNA, 201 bp, Homo sapiens
aggaggcaggaagggttgtgggcacgttcaggtccttggtgtgggtgctgcagtcagtttttgagcattcatccagctgtttgcttatggtctacacactyttcggtatatatttcatattcaataaaagagttacaaagttccagctggctgggagattcatccttactctgatagcttttttagtccttccccaagaaa

SEQ ID NO: 237231 - DNA, 201 bp, Homo sapiens
atttgtctgacgtggcttttgtgaactcagagctccttaagttctgtgtgacatggatgttagtcaaagccttcaggctcatatctggatcatcaagagcrcacacggtaccctatgccccaggacattcaagcccaactccttaagctgaaaacaggacgtcctgagatgcaagaggcaggaccattacactaactccca

SEQ ID NO: 237232 - DNA, 201 bp, Homo sapiens
ggggtgcgggagtgtggtgccaagacattgggatcttctgtgaatgcagctctggcactgatgccctcaagaagttggctgagagctccctggctgccacrggaaccaggcgccttgtgagactaggtgtggggctcactggggtccccccttcagtgagtctttgcagagaagcaaaaagccgaggcccccaggcacatg

SEQ ID NO: 237233 - DNA, 201 bp, Homo sapiens
aggaagggttgtgggcacgttcaggtccttggtgtgggtgctgcagtcagtttttgagcattcatccagctgtttgcttatggtctacacacttttcggtrtatatttcatattcaataaaagagttacaaagttccagctggctgggagattcatccttactctgatagcttttttagtccttccccaagaaaaaaccaa

SEQ ID NO: 237234 - DNA, 201 bp, Homo sapiens
ctgaggcaggagaatcgcttgaacccgggaggcggaggttgcagtgagccgagatcacgctattgcactccggcctgggcaacagagcgagactccgtctcaaacaaacaaacaaaggaacgaaaacctccggtctccggcacggcaagctctgcgtgaattactttctccattgcaactcccctgtcttgataaatgggc

SEQ ID NO: 237235 - DNA, 201 bp, Homo sapiens
cccggccccacagaagctggttccagaggcttctcccaggtgcaagagcggagagctagcctcttcccaggggatcaggtgaggaggtcattctgcctgcrggctatttctgctcttgccctcagctgctggctttggagacagccctgtactgcacacacatggacgacccttcccccagagaaatgatcaacaacttcc

SEQ ID NO: 237236 - DNA, 201 bp, Homo sapiens
ttgacagctttaaaataatagtttattcaccgattcgcttattctcccctccagtctttaatgaatccctttgtgggctggtcacagggaaccagagacasagcccttaccttcaatgggctggtaggtgagggggaggtagacatataagcaggtaattacaatgaagcacactaagtgctatgatgacgtgtgctggtg

SEQ ID NO: 237237 - DNA, 201 bp, Homo sapiens
caggaagggttgtgggcacgttcaggtccttggtgtgggtgctgcagtcagtttttgagcattcatccagctgtttgcttatggtctacacacttttcggkatatatttcatattcaataaaagagttacaaagttccagctggctgggagattcatccttactctgatagcttttttagtccttccccaagaaaaaacca

SEQ ID NO: 237238 - DNA, 201 bp, Homo sapiens
aacccgcaatcagatggcctgtgaaactcttaactccctcctttattccttctgatatgaccatcagaacaagccctgcgaccctctggttgagagctggsctctaatttaagttcatgagaggaactcagtctctgtggaggttaaggagcactccatcaccccaggtttccctccacgcagggcagattccaggtataa

SEQ ID NO: 237239 - DNA, 201 bp, Homo sapiens
aagtgtcaggaagaaactgttgacagctttaaaataatagtttattcaccgattcgcttattctcccctccagtctttaatgaatccctttgtgggctggkcacagggaaccagagacagagcccttaccttcaatgggctggtaggtgagggggaggtagacatataagcaggtaattacaatgaagcacactaagtgct

SEQ ID NO: 237240 - DNA, 201 bp, Homo sapiens
gtagaagtctgtgggatcacccgcgggttagtgacaaagctgagacccaaagttaggtcatctgagttccatgtcactgctcatacctgtcctccacagcytaaattcatgagaagaaaaatggctccccaggagacggggctggggccagcactacaccctggctcacagccccacgccagcttcatgcgtccagggcag

SEQ ID NO: 237241 - DNA, 201 bp, Homo sapiens
tgattgatgtattatgtctctaaaatgtatcaaaacaagccatgccctgaccaccttgggcacatgtccttatccttggcaaaataaggggagggtctgaragacctaacctagtctggggggctgagggggctggggttctgtcctcacagttggagtcaagtcttctgcagaagcgacaggctcccatgagtcgcttat

SEQ ID NO: 237242 - DNA, 201 bp, Homo sapiens
aatgtatcaaaacaagccatgccctgaccaccttgggcacatgtccttatccttggcaaaataaggggagggtctgagagacctaacctagtctggggggmtgagggggctggggttctgtcctcacagttggagtcaagtcttctgcagaagcgacaggctcccatgagtcgcttatctcctaatgggtggcttctcccc

SEQ ID NO: 237243 - DNA, 201 bp, Homo sapiens
cctggcctcgcttgtggaatcagtttaatccttttaagccttctgttcttacagctagaagtggggaaccagggggtgcaattcctgaataaagcacactktcgtgcgcgtgcacacacacacacgcacacatacacacacttttagagagacttcctgaggtcagagctgagctggggccctgatcctcacccgatgaac

SEQ ID NO: 237244 - DNA, 201 bp, Homo sapiens
caggttgggaccagctttctcctctgagtgagactctgtggcagtccaaggaaaacctgtccatctggaggctgattatagaagcttggccagaattctcctcccctccctttcacttcccaaagacacaggcagcaagtgcggctgcttcccaaggagcaatgaggaggcagtcccaaaggggtgaaggcccaaacctca

SEQ ID NO: 237245 - DNA, 201 bp, Homo sapiens
cttcaatgataaagtaaaatcattgctgcggggagcagggaaggtgtagtaccaaatagtagattctcaagaaaggatgctccgttttcctttgctgaggytgggtcgggaagcacgttgctttctagtggcgcttggcgcagatttggtgttaaaatgtttgcgtgtactcccgggcaccgccagctctgaagatgtggc

SEQ ID NO: 237246 - DNA, 201 bp, Homo sapiens; identical to SEQ ID NO: 45774

SEQ ID NO: 237247 - DNA, 201 bp, Homo sapiens
aggttgggaccagctttctcctctgagtgagactctgtggcagtccaaggaaaacctgtccatctggaggctgattatagaagcttggccagaattctcctcccctccctttcacttcccaaagacacaggcagcaagtgcggctgcttcccaaggagcaatgaggaggcagtcccaaaggggtgaaggcccaaacctcat

SEQ ID NO: 237248 - DNA, 201 bp, Homo sapiens
gaatattaccgctaccgggggtccctgaccacacccccttgcaaccccactgtgctctggacagttttccgaaaccccgtgcaaatttcccaggagcaggwaactgtcgtgccagactcagccagagtccacgcggcacctcagtccccatcatcctccatatcacaatcaatgacttgatttcctcatttagtttcattg

SEQ ID NO: 237249 - DNA, 201 bp, Homo sapiens
ccaattacattggaaaattaaaaacaaaattaattacaaacactgaggcaaagaaatggaacagaataacaaaaaatatgagattaaaccggctttttttwaaaaaaaaagccaagttcactttttaacttttaaaaaacacaatttccttaagtaggaaatgccaggagtgataagtgaccagattgcttgtcacttaag

SEQ ID NO: 237250 - DNA, 201 bp, Homo sapiens
ggttgggaccagctttctcctctgagtgagactctgtggcagtccaaggaaaacctgtccatctggaggctgattatagaagcttggccagaattctcctcccctccctttcacttcccaaagacacaggcagcaagtgcggctgcttcccaaggagcaatgaggaggcagtcccaaaggggtgaaggcccaaacctcatc

SEQ ID NO: 237251 - DNA, 201 bp, Homo sapiens
gaggtgggaggatcacattagcccaagagtttgaggctgcagtgagccatgatcacaccactgcactccagcttgggtgacagagtgagaccctgtctcttaaataattaaaatttaaaaattaaaaaaaaattccctatgagagaaagtacatggactttggggaaggatctgaagtttagccaggttgggacaatttgg

SEQ ID NO: 237252 - DNA, 201 bp, Homo sapiens
aggtgggaggatcacattagcccaagagtttgaggctgcagtgagccatgatcacaccactgcactccagcttgggtgacagagtgagaccctgtctcttaaataattaaaatttaaaaattaaaaaaaaattccctatgagagaaagtacatggactttggggaaggatctgaagtttagccaggttgggacaatttgga

SEQ ID NO: 237253 - DNA, 201 bp, Homo sapiens
ggtgggaggatcacattagcccaagagtttgaggctgcagtgagccatgatcacaccactgcactccagcttgggtgacagagtgagaccctgtctcttaaataattaaaatttaaaaattaaaaaaaaattccctatgagagaaagtacatggactttggggaaggatctgaagtttagccaggttgggacaatttggac

SEQ ID NO: 237254 - DNA, 201 bp, Homo sapiens
ctgaggcagagaattgcttgaacccaggaggcggaggttgaagtgagccaagatcgcaccactgcattccagcctgggcggcagagcgagattccatctcaaaaaaaaaaaaaaaaaggagcatcggaaggagggattgcagtatgaattccctagatgggcaatttcctgtacttcatcaggcaatccctgagccaaggg

SEQ ID NO: 237255 - DNA, 201 bp, Homo sapiens
tgaggcagagaattgcttgaacccaggaggcggaggttgaagtgagccaagatcgcaccactgcattccagcctgggcggcagagcgagattccatctcaaaaaaaaaaaaaaaaaggagcatcggaaggagggattgcagtatgaattccctagatgggcaatttcctgtacttcatcaggcaatccctgagccaagggt

SEQ ID NO: 237256 - DNA, 201 bp, Homo sapiens; identical to SEQ ID NO: 45777

SEQ ID NO: 237257 - DNA, 201 bp, Homo sapiens; identical to SEQ ID NO: 45778

SEQ ID NO: 237258 - DNA, 201 bp, Homo sapiens; identical to SEQ ID NO: 45757

SEQ ID NO: 237259 - DNA, 201 bp, Homo sapiens; identical to SEQ ID NO: 45758

SEQ ID NO: 237260 - DNA, 201 bp, Homo sapiens; identical to SEQ ID NO: 45759

SEQ ID NO: 237261 - DNA, 201 bp, Homo sapiens
aaggaaatcagacatggctaagatggctaattatctaattttttgaggctagaatgcatgtgttatcattattgaccttgtatttcttaaagtttccattwataagtaaaagctattagctgaaagaatatcatcgattctcccaaaggatccaaatgattagccagcatcatttccaccttcagtcgctggtctgggtca

SEQ ID NO: 237262 - DNA, 201 bp, Homo sapiens
gaaggaaatgttttatatcttgattggggtggagcttacacaagtgtacacatttggtaaaattcatccagctgtacactttgaatctgtgcgttttattktatgtaaattgttccttgattttaaaggaaagtgtaaagagatcacagtggaaaaggttatttgcttttctgggcctaatcaggaaagacttcccaaagg

SEQ ID NO: 237263 - DNA, 201 bp, Homo sapiens
tgaggcaggagaatcgcttgaacccgggaggcggaggttgcagtgagccgagatcacgctattgcactccggcctgggcaacagagcgagactccgtctcaaacaaacaaacaaaggaacgaaaacctccggtctccggcacggcaagctctgcgtgaattactttctccattgcaactcccctgtcttgataaatgggct

SEQ ID NO: 237264 - DNA, 201 bp, Homo sapiens
aggcaggagaatcgcttgaacccgggaggcggaggttgcagtgagccgagatcacgctattgcactccggcctgggcaacagagcgagactccgtctcaaacaaacaaacaaaggaacgaaaacctccggtctccggcacggcaagctctgcgtgaattactttctccattgcaactcccctgtcttgataaatgggctct

SEQ ID NO: 237265 - DNA, 201 bp, Homo sapiens
ccattcttaatcattgtttttctccaggagggctctactatgctgaatgtacgtgtgtgtgcacgtacacacacacacgcacgcgcgcacgcacacaaacmacacacacacacacacacacacacagcatatttctgattgtaattagaacactaaatcccaaaaggctggaggctgagggactgaatggaggctccgtgg

SEQ ID NO: 237266 - DNA, 201 bp, Homo sapiens
ctgcccctgtttacaactgaagccaggaaagctcaaaactgtcaggtggctccagcagcctgaggagcagagtcagaacttgggcctcttaactccctccyggtgctctttcccagtccattggtggatgctcgttttatgccaggcactgtgtgccctgcactacacctcatgccgttgaggaaatgcagggattttttt

SEQ ID NO: 237267 - DNA, 201 bp, Homo sapiens
gtggcaccttctcgacctggctgctgtgcagataacaccagagcatgggacaggctgccttcaggctctctgccccacctctggccctggcacaaggggcrcagccactccactagcctgtagctcatctgcactgtcctggtccctttcttctcctgaacatgctaagtttgtccctgtgtcttttactgagtgatgctg

SEQ ID NO: 237268 - DNA, 201 bp, Homo sapiens
agcactctctccaggggatgctggaggctctgggctctgaggatcctgccagggccgcacttcccagaagaagcacatctctcaggatggggcaggagacyggcctgagcactgtagttcattggctgtgcagctggagtgaattctggaccataaacgattcaaggaaccacacagtttggcggggggtgcccaggcttt

SEQ ID NO: 237269 - DNA, 201 bp, Homo sapiens
gccattcaggtgagggagaggccttggagacctgaggggtatgtctgagtctccctcagctgccaggcctgtccttttccatctggcagggaggtgttccrtggaagcatccaggaggaggggtggggcggggcgggggtgtctttgagagattccaggagcactctctccaggggatgctggaggctctgggctctgagg

SEQ ID NO: 237270 - DNA, 201 bp, Homo sapiens
atttttgcaccaagataatacttggcactgtggtcagtaagacactaatttttcccacctggggtggccccgcagatttgctaaattcttccccgctagawtgccagcttggatgagcaggggctctattgtattcaacctggcagccccaagacccagagtaattcctggctcataataggtactggctaagcagatgct

SEQ ID NO: 237271 - DNA, 201 bp, Homo sapiens
tgtcttactccagtttggccctggagtgcctgctttgatatcctccagcctccctcttccctagtcaccatcttggtgtagttgagttattttgaggcctygaaaataagaatagtagagctcagcggagactctgccatgcccaagtgagaagactggtgtccagtgaaaggttggactggagattctgcaattccgtca

SEQ ID NO: 237272 - DNA, 201 bp, Homo sapiens
gaaaacccttctaatccagttccctttagtcatgtgtgcaaagagaaagcttctcaatgatgcatctctttacttcctgagttttttgcattcatgcctgsctggcagcttccgccctgctggctgtgggcccaggcagtattgtgagcacagaaaaggctggcagcctcacttagggagtcttaccctgtgctgtgtctc

SEQ ID NO: 237273 - DNA, 201 bp, Homo sapiens
gaggcaggagaatcgcttgaacccgggaggcggaggttgcagtgagccgagatcacgctattgcactccggcctgggcaacagagcgagactccgtctcaaacaaacaaacaaaggaacgaaaacctccggtctccggcacggcaagctctgcgtgaattactttctccattgcaactcccctgtcttgataaatgggctc

SEQ ID NO: 237274 - DNA, 201 bp, Homo sapiens
tgcccagtagctgccttgacatgagcaacctctctgactcattcaaatttgcctgacagatggagaaggtgcttagtcctagtattcttaataaatatcaragcttaagagccagaaggaaccttccagaacatagcttccacacacatcccatccccaccactacgcccaccacccccaccatttgcacgaagggcaatg

SEQ ID NO: 237275 - DNA, 201 bp, Homo sapiens
atggttgacaaggcttggtccctaccattatgagactaagaatctggaggacagagcaattaagcggggccttacagtacagaggagagagacctcactcrgtattttggaggaaaggattaaagaaggcttcctgggggaggtgatgtccaagatgagacctgaaggacacataagagcaagccaggcaaagggcagggg

SEQ ID NO: 237276 - DNA, 201 bp, Homo sapiens
aggtgcacaaaatctcctggataaatactgaaggacacataagtcctgtgacccaagcaaagtaactgttacttagccaaagtcaaacttccggcaaatckcttaaatctctatttttcacccataaaatggtgcaattctgccttgcttaccccgtaaggttatagagttataaggatcaaagctactacaatataataa

SEQ ID NO: 237277 - DNA, 201 bp, Homo sapiens
gtgtacggatgggtggtggggtggtgccacccaagccaggctatgacaagattgatctggttactgcaggagagccagcctggcagtgtaacaaggaaggytggggctggttgcctgtgggaagcctttgcagtgtgacatggcgagggcctaacccatggaagcatgggagtccatgacccactaagggcaaaggataga

SEQ ID NO: 237278 - DNA, 201 bp, Homo sapiens
tgtcccagtctctgggcctttctttgtcttcatgcctgtttggtctcatttcgttgtttccaaggagagtccatttaggccttgacaagtggtcctcaagkagcaaagatcccaggtcacagcactgggttcaactatgctgttgcttacaggacctccaacaggaaccccgcgtaataaccgggggaagccagactctcc

SEQ ID NO: 237279 - DNA, 201 bp, Homo sapiens
gtgggaggatcacattagcccaagagtttgaggctgcagtgagccatgatcacaccactgcactccagcttgggtgacagagtgagaccctgtctcttaaataattaaaatttaaaaattaaaaaaaaattccctatgagagaaagtacatggactttggggaaggatctgaagtttagccaggttgggacaatttggacc

SEQ ID NO: 237280 - DNA, 201 bp, Homo sapiens; identical to SEQ ID NO: 45776

SEQ ID NO: 237281 - DNA, 201 bp, Homo sapiens
tttgatacaaaactacctatcaattatctagctagctagctagctatctcgagacatgctttcattctattgctcaggatgggaagcagtgggattaccayagctcactgcagccttgagctcctggcctcaagtgatcctcctgcctcagcctcctaactagctagggccacaggtggacacagttacgcctgggttttt

SEQ ID NO: 237282 - DNA, 201 bp, Homo sapiens
acagttacgcctgggtttttgtttgtttgttttgtagagacagggtttcactacattgcccaggctggtgtcaaactttggagtctcgctgtgtcgcccargctggggtgcagtggtgcgatctcggcccaatgcaacctccgcctccccagttcaagtaattctcctttaccagcctcccaagtagctgggactacaggc

SEQ ID NO: 237283 - DNA, 201 bp, Homo sapiens
caggcgctgcgcgccaaccggccggcccctgtcgcagaaggtgcaaccgatcgcactgtcgcgcagaagctcctcaatggccagcgccagctgcagccccrgctgcccactcgcctcacctgagcctgggtacgtgcgccccacaacacctccaccagccagggcccggggactcccggtagcgtccccggctacctggcg

SEQ ID NO: 237284 - DNA, 201 bp, Homo sapiens
aaactttgtagcggggtagaaggggctaggaaacgaagaaaacatctttttaaaaatataagcgatcggctgggcgaggtggcccacgcctgtaatcccarcactttgggaggtcgaggcgggtggatcacgaggtcaggagttcaagaccagcctggccagcatggtttcactgaaacccggtctctactaaaaacacaa

SEQ ID NO: 237285 - DNA, 201 bp, Homo sapiens
gtggcccacgcctgtaatcccagcactttgggaggtcgaggcgggtggatcacgaggtcaggagttcaagaccagcctggccagcatggtttcactgaaayccggtctctactaaaaacacaaaaattagttgggcctggtggcgggtgcctgtaatcccagctactcgggaggctgaggcagagaattgtttgaacccgg

SEQ ID NO: 237286 - DNA, 201 bp, Homo sapiens
gaattccaatcctgggtatcctgttaaatttagttcttctagtagttctgagatgggctgcctttctacatttctaacaagatcccaggtgatgctgatgytgctggatggtagatcacactttataaagcaaggggctagactctagatatgcactttttattaaatagtacagcagcctgtagccacatgtggctatta

SEQ ID NO: 237287 - DNA, 201 bp, Homo sapiens
tggggaaactgtattgctaattaccaaattattttgagaatggaggagtgggatgaatcataaaaggttaaagcatatttaattaaatggaaataaagacwtatataacctgaaaaaatcagaattatgtagtcatatagaagtgaaagtgattttagtgaaaggaaaatcatccattatctaaaacattagatgacacta

SEQ ID NO: 237288 - DNA, 201 bp, Homo sapiens
ctgtaatcccagctactcgggaggctgaggcagagaattgtttgaacccgggatgcggaggttgcagtgagctgagatcgcgccactgcactccagcctgkgcaacagaccaagactccgtctaaacaaacaaatatatgtgtgtatatacatgcgatcgagcccgggaggttgagattacagtgagctgagattatataa

SEQ ID NO: 237289 - DNA, 201 bp, Homo sapiens
actctgtctctaaaaaattatatgcaagtgagagcttttcttccagccctcatgctcagactgaagaaagtaattgggccaggcccggtggctcacgcccstaatcccagcattttgggaggcggaggcggaagcgggtggatcgcttgagctcaggagttccagactagtttgggcaacatggtgaaaccctgtctctac

SEQ ID NO: 237290 - DNA, 201 bp, Homo sapiens
attattgttctttaacagtcatcagttaattcatatatagaattgcaacttaattgttttgtttatttgcattctatagctggcagcctgttatcaattayattgatagtaaatttgaggactacctaaatgcagaatcgcaagtgaacagatgtcagatgcctggtaacagggtgcactgttgtttatacttcattgctc

SEQ ID NO: 237291 - DNA, 201 bp, Homo sapiens
gcaagtgagagcttttcttccagccctcatgctcagactgaagaaagtaattgggccaggcccggtggctcacgcccctaatcccagcattttgggaggcrgaggcggaagcgggtggatcgcttgagctcaggagttccagactagtttgggcaacatggtgaaaccctgtctctacaaaaatacaaaaaattagttggg

SEQ ID NO: 237292 - DNA, 201 bp, Homo sapiens
atctgagttatgtggtatgtaacagtgatcttctaaatgatgtgcatccatcactgatactgaggatgatcagaaactattacaactcttatttattgatstttacttttaatctacagataaatgataatacatattaatacttaatattcagattgccaatagtatatatttggtgggtaaatatcttttggatctgca

SEQ ID NO: 237293 - DNA, 201 bp, Homo sapiens
ttttcttccagccctcatgctcagactgaagaaagtaattgggccaggcccggtggctcacgcccctaatcccagcattttgggaggcggaggcggaagcrggtggatcgcttgagctcaggagttccagactagtttgggcaacatggtgaaaccctgtctctacaaaaatacaaaaaattagttgggcatggtggcatg

SEQ ID NO: 237294 - DNA, 201 bp, Homo sapiens
ggataagggagccttaattatatacttatatttttgcactgtcagattggagtggggtaaaaatgtttcttcttttatgtctaatactcttgttttttttkgtttttttgctgtgccctagaccgttacataactgaagactcccaccttcaggcaggattgggtagtacatgtttgtaactacctggcattgccttttgt

SEQ ID NO: 237295 - DNA, 201 bp, Homo sapiens
ccagaagttatgtgaaacaggcaggaatgtcttcaaaacatccacataaccatttatttttcaactgaaatggccacagagtttagtcaagcaattttttycctttatttttgttaaataagattccagaaagtatagtgcaaacactcagtagaaaagttgcaattaagaaatgtacattcacatttaacatttcagtcc

SEQ ID NO: 237296 - DNA, 201 bp, Homo sapiens
gagcgaaactcaaaaaaaaaaaaaaattagttgggcatgggggtgcactcctgtagtcctagctacccaggagtcgaagtggaagaattggaggctatggwgagctatgactacaccactgtactccagcctgggtgacagagcaagaccctgtcaaaaaaataaataaatagaaatggataggttcttttagttaacact

SEQ ID NO: 237297 - DNA, 201 bp, Homo sapiens
ctcttgaatcttctgccttagttttcccctcaaagctcttacccattgtcatagtatccttatcctttgtcagtttttaaatatggctgttttaagttttkttttttttttgaggcagagtctcgctgtgttgcccaggttggagtgcagtggcatgatctcggttcactgcaagctctgccttctgggttcacgccattc

SEQ ID NO: 237298 - DNA, 201 bp, Homo sapiens
ctagtcattagcctccttttattttcccagatgctaatatattttttacctttttccccccaagcatgggacaactttctgtagtgatttttagtaaatartttgaccagtatatgcttgaatattcttaactttaaagagaatatttaattttatttattatttaccttggtggtaatatcatgtgatgtcaatttacta

SEQ ID NO: 237299 - DNA, 201 bp, Homo sapiens
attgtattggtttaatctgatatttaatcttctgtattatagtaagctgaaaccaaaattgagacatgattgttttatgtttgttgctattatttttgaaktttttttttttttttttaaagacaaggtcttgctatgttgcccaactggcctcaaactcctgagctcaaagtgatcctcccacatgctcctcccacatca

SEQ ID NO: 237300 - DNA, 201 bp, Homo sapiens
ctttaatttttaggatattgtttcaagttactgtccttattgacaattttcccgccagtgacccctgtaccttgttcccagctctctctgtcatgcccagscaactttcagttgctgagttgaggctttagaacttacataccccttaaaaataggcaccagagaaattgatttgcatctctcttttgtagtttacccctc

SEQ ID NO: 237301 - DNA, 201 bp, Homo sapiens
tttaatttttaggatattgtttcaagttactgtccttattgacaattttcccgccagtgacccctgtaccttgttcccagctctctctgtcatgcccaggsaactttcagttgctgagttgaggctttagaacttacataccccttaaaaataggcaccagagaaattgatttgcatctctcttttgtagtttacccctct

SEQ ID NO: 237302 - DNA, 201 bp, Homo sapiens
agttatggtacagcaatgggaaatggaagagacaaattcctgaaactgtggggaaactgtattgctaattaccaaattattttgagaatggaggagtgggwtgaatcataaaaggttaaagcatatttaattaaatggaaataaagacttatataacctgaaaaaatcagaattatgtagtcatatagaagtgaaagtgat

SEQ ID NO: 237303 - DNA, 201 bp, Homo sapiens
ataagggagccttaattatatacttatatttttgcactgtcagattggagtggggtaaaaatgtttcttcttttatgtctaatactcttgtttttttttgkttttttgctgtgccctagaccgttacataactgaagactcccaccttcaggcaggattgggtagtacatgtttgtaactacctggcattgccttttgttg

SEQ ID NO: 237304 - DNA, 201 bp, Homo sapiens
aatataagtggtataattagaaggctgaaaagaatccttggaaacgtgagtttaatttgatagctaagaaactgaggacaagatacttattctttgtagcrtattttctaatgtcatttcattgtctcaccaagaaatacttgcataaagcaagttcaattatagcatctgttgaatatttaaggttgggtaaagtgggtg

SEQ ID NO: 237305 - DNA, 201 bp, Homo sapiens
atgaatgataatacatcttctgatacagagcttgaggttacagaatatcttaaattgttccaggaactgttgttatcatttaagtccaataatcagtaagrtttcaccctaccagaatacacttttttttattaactgtctggacttttgctgattacattgtccagaatgtggagtatcgcatttgagaagaggattgga

SEQ ID NO: 237306 - DNA, 201 bp, Homo sapiens
gctaagaaactgaggacaagatacttattctttgtagcgtattttctaatgtcatttcattgtctcaccaagaaatacttgcataaagcaagttcaattayagcatctgttgaatatttaaggttgggtaaagtgggtgagtttaacagatattttcccttatttcttttaggtgaatctggactgggaaagttgacatta

SEQ ID NO: 237307 - DNA, 201 bp, Homo sapiens
ctatttcatcattctgtaaacatgattgagtgtacctacataaacctagatggtagagccttctgcacacctaggttatgtggtctagctatcgcttgtargctgtaaacctatacagcatgttactgtactgaatgttatagacagttgtaacataatgttaagtatttgtgtatctaaacatagaaaaggtgcagtaaa

SEQ ID NO: 237308 - DNA, 201 bp, Homo sapiens
gagcagctaagggtatcttcggtgtcttgaataattaaataatgatgacatcatcccgtatttattgtagatttatctcatatgtattgattttatatatratagaaatgctgtaagcaaaaatttgtttaaccaaaataccacattcacctagacagtttgaagaaacagaaatttactctaaaattccctagtttgaaa

SEQ ID NO: 237309 - DNA, 201 bp, Homo sapiens
cacgcccctaatcccagcattttgggaggcggaggcggaagcgggtggatcgcttgagctcaggagttccagactagtttgggcaacatggtgaaaccctktctctacaaaaatacaaaaaattagttgggcatggtggcatgcacttgtagtctccgctacttgcgaggctgaggcgggaggatcgctcagctgcagcct

SEQ ID NO: 237310 - DNA, 201 bp, Homo sapiens
ttggtaaaggatatccatggagcagctaagggtatcttcggtgtcttgaataattaaataatgatgacatcatcccgtatttattgtagatttatctcatrtgtattgattttatatatgatagaaatgctgtaagcaaaaatttgtttaaccaaaataccacattcacctagacagtttgaagaaacagaaatttactct

SEQ ID NO: 237311 - DNA, 201 bp, Homo sapiens
ggatgcggaggttgcagtgagctgagatcgcgccactgcactccagcctgggcaacagaccaagactccgtctaaacaaacaaatatatgtgtgtatatayatgcgatcgagcccgggaggttgagattacagtgagctgagattatataagcgatcaagcacgggaggttgaggttacagtgagctgagattgcgccatt

SEQ ID NO: 237312 - DNA, 201 bp, Homo sapiens
attgggtaatcccaaaataaatcagtgatttcagtatgaagttttctcaacataaatctgctataattaaaaattacaggccttcaggaagtgtcgagtcygggacgcccagcgcgggcccgagcagggggaagggaagcgcagctcggtccgcgtgggtggaggggacgtgaagccgccctgagatgatggttgaggaag

SEQ ID NO: 237313 - DNA, 201 bp, Homo sapiens
ctaatgataaggaagtgatgctgttctgttctgttttgttttttgtttttgtgtttttttttcttttttgagatggggtctttgcccaggttggagtgagktggtgcaaacaaggctcactgcagccttgaccttcgggctcaaggaatccttccctgtcagcctccccggtagctaggactacaggtgcatgctaccacg

SEQ ID NO: 237314 - DNA, 201 bp, Homo sapiens
atactgcagtgataatattttggatgtatcgggttaaataaaattgactgatttcacctttttcctattttaaaagtggctactaagaaaattttaaattrcttacatgattgacatggtatttttatttggcagcgctgctctaagctgttaatgaaaaatattgttggtgagctctgcttaggtaatatataggacacg

SEQ ID NO: 237315 - DNA, 201 bp, Homo sapiens
cgtcgcaacattgggcagggtaatgacaaaacatcccagcagacatatctactatcttgaaacccttctagatgtcgagttatacatttagtttctattartcaaaaagaccttggagacatttccttcattaggtggcaagaaagaaaagatggagaaaaggataaacttaatataagaatccacagagcagtagtttga

SEQ ID NO: 237316 - DNA, 201 bp, Homo sapiens
taggctaaacatgcctattatgctaagtgagttattaacaataaatactttaactctgtgccatgttaattatcataatctgatttataatttgttttaascttaggttatatataccttgaagccatttatattttggtatacttgtaatagttactatacactggactatgtatattggactaaacatggagagtcaaa

SEQ ID NO: 237317 - DNA, 201 bp, Homo sapiens
gtggcatgatctccgctcactgcaagctccgcatcccgggtgccaccacgcccagctaattttttgtatttttagcagagacgaggtttcactgtgttagscaggatggtctcggtctcctgacctcgtgatccaaccgccttggcctcccaaagtgctgggattacaggcatgagccacggtgcccggcctcagctgact

SEQ ID NO: 237318 - DNA, 201 bp, Homo sapiens
ttcttgtttattattcattcattattgtctattaataaagaaaaactttatttcactgaagcagtgatacataatccaacttggatttttaaataatgacygacttttttctttgggaatacattactgttaaaaatgtagattattagatacattacttttaatgaatataagtggtataattagaaggctgaaaagaat

SEQ ID NO: 237319 - DNA, 201 bp, Homo sapiens
atgttctgcaaatataaaatataccacagatttctaagactgagcatggaaaagaaaatctccgtaattttttatattgattgtatactgcagtgataatrttttggatgtatcgggttaaataaaattgactgatttcacctttttcctattttaaaagtggctactaagaaaattttaaattacttacatgattgacat

SEQ ID NO: 237320 - DNA, 201 bp, Homo sapiens
ctgaattgtgatgttctgcaaatataaaatataccacagatttctaagactgagcatggaaaagaaaatctccgtaattttttatattgattgtatactgyagtgataatattttggatgtatcgggttaaataaaattgactgatttcacctttttcctattttaaaagtggctactaagaaaattttaaattacttaca

SEQ ID NO: 237321 - DNA, 201 bp, Homo sapiens
ctgagcagtaactcatacatatcatactgcaagaccccaaaggagtaattttgtgaagtaaatatcttatttctcctttttaatgtttccattttaggaatttttttttttttttttttttttttagtaaccttcatagggcttgagatttaaaattacctgcaaaattctactctaaaaacttgatcctacatgcttatt

SEQ ID NO: 237322 - DNA, 201 bp, Homo sapiens
tttttttttttttttttagtaaccttcatagggcttgagatttaaaattacctgcaaaattctactctaaaaacttgatcctacatgcttatttattttgkgataaatattggaaattttaaacctaagtaagaaaatgaactttgaactatcttaatttgggtatctgttatgaataccttcacttaagtatttatgaat

SEQ ID NO: 237323 - DNA, 201 bp, Homo sapiens
tatttgtattattagatgcacatttaagttatgtattacatgtctttagtggtgatcactattttatcagttcctctgtctttctttataccaagtatgaytcataaacccagtattaattttccaagagattggcatactatttgtatatacgcttttctttcaaataatctggattcccaatgcccacaatcattgatc

SEQ ID NO: 237324 - DNA, 201 bp, Homo sapiens
gcttgagatttaaaattacctgcaaaattctactctaaaaacttgatcctacatgcttatttattttgtgataaatattggaaattttaaacctaagtaaraaaatgaactttgaactatcttaatttgggtatctgttatgaataccttcacttaagtatttatgaatttagatatgaaaggtaaaactaaccactatcc

SEQ ID NO: 237325 - DNA, 201 bp, Homo sapiens
ttggcataggtgtttattcttattattcgccacttagagaaactggtaacaataatttattccaaaaagtgtttatcatatcttagcttcaatcttgagtyaccaattttgttaaaattcctattttctgctatctgcattgggacacaaaaggtaatggtgtgttccttgtaaagggggacttatagttgaagaggtatg

SEQ ID NO: 237326 - DNA, 201 bp, Homo sapiens
accactatccaaattaatatacagttcatttccagaaccctagtttcttccatgtgctcactctcattcagtattacaacccccaaagataaacaccatastgactgccttctccataaatttgcctgttcttgaacgttatatacatatacttttttgtatctgttttctttcagtgcagattatgtctgtattatttac

SEQ ID NO: 237327 - DNA, 201 bp, Homo sapiens
ggcaagggatttgaggctcagtgtaaggagacagggatatgaggagtggagaggttcagaatagaaagccaaattagagttttgggatcaactttcttctyagtaaagtagttctgggtcttcatgagaagaaagtattctttaggcataactgttctactattggttacttcctctttcattttcttgtggaacacgatg

SEQ ID NO: 237328 - DNA, 201 bp, Homo sapiens
gatacataggaaaattagtctctttgctttatcgttatactttgtgttgaggtttaatactgaaataactatggaaagtgaaatagaagaggctctttttstttcttaatgtgaaaaacttgtgaaaactgtataagggaaggctagtttttgagtcaaaagctagaatttgaatgttaaaaggtgcacaacctggtagct

SEQ ID NO: 237329 - DNA, 201 bp, Homo sapiens
tcttagtaaagtagttctgggtcttcatgagaagaaagtattctttaggcataactgttctactattggttacttcctctttcattttcttgtggaacacsatgaaatatttaagatgatatttgtcttttgagccaataaataagggaaatagatagtttttgtgtttgagctaagtggagtatctcaggccattccaat

SEQ ID NO: 237330 - DNA, 201 bp, Homo sapiens
ctaagtggagtatctcaggccattccaatgtcttcagagttttggctgtaatgctacctcttgagcaagtgtaggtagaggtaagctcttgaaagaaaatrttaaccctctcttcaaaatgttatatgcttaattaaataacttcttaatttaccttaataaatggcacgtaaacattaagttagaaaaggttagtgtata

SEQ ID NO: 237331 - DNA, 201 bp, Homo sapiens
aaaaccattcttcctatcagatgagaaaaaaaaaatccctacattgtgtcttgcacacctgctgaaagagaaggaaagcctatgggagcaggacattgagrccatcccgattagaggaccaggactagtaaagaggagctcttactaatgaattagaaaagcagcagcagagaggaaatcatgaagaaaaagtataatagg

SEQ ID NO: 237332 - DNA, 201 bp, Homo sapiens
gaaaactcagacttaggactaaggggagtcaactatcagagaattgcatggaaatgtcagtacgatatgaatcagagtaattgaatatcacattttattcycaaagggggagattcaagaagctggattgtgaagtaacagtaaaggttttctggatgtaaggaatgataaaaacagtacaacaatacgcttttttttttg

SEQ ID NO: 237333 - DNA, 201 bp, Homo sapiens
cacccagctgatttttgtatttttagtagagatggggttccaccatgttggccagcctggtctcaaactccttgagctcaggcaatccacctacctcggcmtcccaaagttctgtgattacaggcatgagccaccacacccagccaacaatacacctttgtgtttgtctcccagaagggagttttagtaaagtggtgaaga

SEQ ID NO: 237334 - DNA, 201 bp, Homo sapiens
agggtgtgtggctgggcagcaggcaccagcaccaagaggagtacaaacaaggtccctgggctgaggatcccactgtgggcaaagcctgtagtgcagagaartggcggaaaacttagggctccaagaggcagacctacagggagctggccatttgcactcacccttcctatcctaggcaaaagagggagcgagctgaggaaa

SEQ ID NO: 237335 - DNA, 201 bp, Homo sapiens
caggaatctcaaaatatctcaatataaagacaccactccttcccctctcttcactgctcccgcaaaagcaggtcctccacgccactgctgcctacccagascgctgcactctcactaatgaggccatttctttcttgacttcgctgtgctcttggcccagtgacaacaatcagaaataatccggcgcgatcaagcccatgc

SEQ ID NO: 237336 - DNA, 201 bp, Homo sapiens
agtttaattagatcccatttgtcaattttggcttttgttgccattgcttttgttgttttagtcatgaagtccttgctatgggtctcaaaatctctatggartctaaatttggtgtcaagttagcttattttttattctactttgggtgtaaatgaaagcagatgaatgccaccttccttaacaatagtcttttgttcattt

SEQ ID NO: 237337 - DNA, 201 bp, Homo sapiens
ttaattgttcccatgtctcaaatgtaaggctttttaaagtagtgctgttggatgcaggtaagataattcagagaaaaatagtaaactttacagtatcattwggtttttttccgcatacacaaaattctgtgtggatacgtgagttaaactatatcccaggtgaaaacataaatagtagaattctactggaaatatatctct

SEQ ID NO: 237338 - DNA, 201 bp, Homo sapiens
attcccaatgcccacaatcattgatcctaaagaaaatgtgggagtaggtagataaactcaaacatccctaccatcacccctggtaggaaatcactggtgtratgtatgatactaacatctgcaccaattactcttataggtggaacaatccaaagttttaatcaaagaaggtggtattcagttgctgcttacaatagttga

SEQ ID NO: 237339 - DNA, 201 bp, Homo sapiens
tagaatataagctaaactttttaaagatgttagacattgaatagtaaaatacattcatgcgccacataacgatgttttggtcaatgactgactgtatataygacaagatcccataatattataatgtctataccatagagcctaagtgtgtagtaggttatactatctacagtcgtgtaagtacactctgtgttgttcaca

SEQ ID NO: 237340 - DNA, 201 bp, Homo sapiens
ggttatatataccttgaagccatttatattttggtatacttgtaatagttactatacactggactatgtatattggactaaacatggagagtcaaaaaagwgtatgtggtcagagtagaaatcatgccctagcttccttcgtgtctacctcctaccttgagtagaagcggtagaaaaagtaattacctaagattttttgga

SEQ ID NO: 237341 - DNA, 201 bp, Homo sapiens
tcaattatagcatctgttgaatatttaaggttgggtaaagtgggtgagtttaacagatattttcccttatttcttttaggtgaatctggactgggaaagtygacattaatcaactcattattcctcacagatttgtattctccagagtatccaggtccttctcagagaattaaaaagactgtacaggtctagatattagta

SEQ ID NO: 237342 - DNA, 201 bp, Homo sapiens
agcagatttttgctttttatagctgcatgatttcttgtttattattcattcattattgtctattaataaagaaaaactttatttcactgaagcagtgatayataatccaacttggatttttaaataatgactgacttttttctttgggaatacattactgttaaaaatgtagattattagatacattacttttaatgaata

SEQ ID NO: 237343 - DNA, 201 bp, Homo sapiens
gactgaagaaagtaattgggccaggcccggtggctcacgcccctaatcccagcattttgggaggcggaggcggaagcgggtggatcgcttgagctcaggarttccagactagtttgggcaacatggtgaaaccctgtctctacaaaaatacaaaaaattagttgggcatggtggcatgcacttgtagtctccgctacttgc

SEQ ID NO: 237344 - DNA, 201 bp, Homo sapiens
gagtatctcaggccattccaatgtcttcagagttttggctgtaatgctacctcttgagcaagtgtaggtagaggtaagctcttgaaagaaaatgttaaccctctcttcaaaatgttatatgcttaattaaataacttcttaatttaccttaataaatggcacgtaaacattaagttagaaaaggttagtgtatatgaagct

SEQ ID NO: 237345 - DNA, 201 bp, Homo sapiens
gtactgttacagttggtttgtgatcaagtagtcaggctagtcattagcctccttttattttcccagatgctaatatattttttacctttttccccccaagyatgggacaactttctgtagtgatttttagtaaataatttgaccagtatatgcttgaatattcttaactttaaagagaatatttaattttatttattattt

SEQ ID NO: 237346 - DNA, 201 bp, Homo sapiens
agtatctcaggccattccaatgtcttcagagttttggctgtaatgctacctcttgagcaagtgtaggtagaggtaagctcttgaaagaaaatgttaaccctctcttcaaaatgttatatgcttaattaaataacttcttaatttaccttaataaatggcacgtaaacattaagttagaaaaggttagtgtatatgaagctg

SEQ ID NO: 237347 - DNA, 201 bp, Homo sapiens
gaaataggctatctgtaaaagtgtcccaaactttttgtcttgtaaattagcttatcagcatacttggagcctcttgccttaataaggacttgatataaatrtgtatcaggagaaagcctatcttatgaaggaattattccctttttatttgaatccgtgtttgctttatcttgggctcctgaaaactgatactttgcattt

SEQ ID NO: 237348 - DNA, 201 bp, Homo sapiens
catactctaccccacaaatatgtacaattatgtttcaattaaaaataataaaaaccaaccaaaaattcacatcaacacaattttctgtattttaatttatygtggttttctaagtactttgtccctaaaaatggtatactgaataatggcattatgtaggcaaataccttggaataatgaaatgcttatacctcgccagtg

SEQ ID NO: 237349 - DNA, 201 bp, Homo sapiens
aatgttaaccctctcttcaaaatgttatatgcttaattaaataacttcttaatttaccttaataaatggcacgtaaacattaagttagaaaaggttagtgyatatgaagctgtataatcaacattgtttgactttttttcctcagattgtaaaactgaaaactcggtatactaatactcttgtatactgtatacactcagt

SEQ ID NO: 237350 - DNA, 201 bp, Homo sapiens
agcatacttggagcctcttgccttaataaggacttgatataaatatgtatcaggagaaagcctatcttatgaaggaattattccctttttatttgaatccrtgtttgctttatcttgggctcctgaaaactgatactttgcatttaatagcagcatatgcccaggatgaatgataatacatcttctgatacagagcttgag

SEQ ID NO: 237351 - DNA, 201 bp, Homo sapiens
agaaaagtttgaaattcttggacttgaactaatttgttttccatggatcccatgaggatacttgtaaaagcagatgataggatacagttggatcctgtgartggcactagtttacagttatgttttctggatctcttccatatgtcgctgacttctttgtatttgaccatgtatggacatacagaatttcataggccagag

SEQ ID NO: 237352 - DNA, 201 bp, Homo sapiens
aagaagctttataaacattccttatgtgtgtaaaatacaaatcttcatttgtcttagcaagtcaataagtaattaagttgttggactgatttttttttttraacagggaaatatcttaaaatttaagctgttaggttaaaatgtgtatttggtatacagcatattactgaaggtagaatgggcttcatttggtaataaagg

SEQ ID NO: 237353 - DNA, 201 bp, Homo sapiens
tttaagttatgtattacatgtctttagtggtgatcactattttatcagttcctctgtctttctttataccaagtatgactcataaacccagtattaatttkccaagagattggcatactatttgtatatacgcttttctttcaaataatctggattcccaatgcccacaatcattgatcctaaagaaaatgtgggagtagg

SEQ ID NO: 237354 - DNA, 201 bp, Homo sapiens
gtatttggtatacagcatattactgaaggtagaatgggcttcatttggtaataaaggaaccagaaatatttttaagtaaaattgggagatgattcatgtarattaactatgttgttgtatcactttctagaatacagtactatgttgtttaaaagagtaagtacgtaaaggagtggtataattactttggatatttctgct

SEQ ID NO: 237355 - DNA, 201 bp, Homo sapiens
agaatggagggtgttccagccaaggtaatagcctgtggccagatgccaaagtatggtgcttttaaggaattgtaagaagtaaaagtaaaagaagtaaaagsctggcacattggaagtaggaggcaaaggaaaggccaggaatgctaagagatgaggtcagctggagaatctaggtcttcacaagcctcgtaggccatacta

SEQ ID NO: 237356 - DNA, 201 bp, Homo sapiens
agtggtttgggccaaacttgatagagaatagtccaggaagacatttactataaacagtagattaaatgttcttgcctgattaattacatttgaactctgtkaatgactgaatcactcaatctgcttatttgtattattagatgcacatttaagttatgtattacatgtctttagtggtgatcactattttatcagttcctc

SEQ ID NO: 237357 - DNA, 201 bp, Homo sapiens
agtgagctgagatcgcgccactgcactccagcctgggcaacagaccaagactccgtctaaacaaacaaatatatgtgtgtatatacatgcgatcgagcccrggaggttgagattacagtgagctgagattatataagcgatcaagcacgggaggttgaggttacagtgagctgagattgcgccattgcactccagcccgtg

SEQ ID NO: 237358 - DNA, 201 bp, Homo sapiens
actgaaggtagaatgggcttcatttggtaataaaggaaccagaaatatttttaagtaaaattgggagatgattcatgtagattaactatgttgttgtatcwctttctagaatacagtactatgttgtttaaaagagtaagtacgtaaaggagtggtataattactttggatatttctgcttcagccacagttaccatgaat

SEQ ID NO: 237359 - DNA, 201 bp, Homo sapiens
agatgattcatgtagattaactatgttgttgtatcactttctagaatacagtactatgttgtttaaaagagtaagtacgtaaaggagtggtataattactktggatatttctgcttcagccacagttaccatgaataaatgatctgtctttataaaggagagggaggtgaattcaagatattgagatgttagatttgactg

SEQ ID NO: 237360 - DNA, 201 bp, Homo sapiens
gtagattaactatgttgttgtatcactttctagaatacagtactatgttgtttaaaagagtaagtacgtaaaggagtggtataattactttggatatttcygcttcagccacagttaccatgaataaatgatctgtctttataaaggagagggaggtgaattcaagatattgagatgttagatttgactgggttgtccttt

SEQ ID NO: 237361 - DNA, 201 bp, Homo sapiens
ctgttaatagccctggaacaattctattttagagggacttaaaacaagaattagatgtgttgtttaaatctgaagaatagctgaacttgtccagtcagctrtaatttgtctcaaggttagatctggagaagtggatgctgttcttagcagctatccagtaattacctgtttctgacaaagaacgtatggagccatcaaagt

SEQ ID NO: 237362 - DNA, 201 bp, Homo sapiens
gattaactatgttgttgtatcactttctagaatacagtactatgttgtttaaaagagtaagtacgtaaaggagtggtataattactttggatatttctgcktcagccacagttaccatgaataaatgatctgtctttataaaggagagggaggtgaattcaagatattgagatgttagatttgactgggttgtcctttgac

SEQ ID NO: 237363 - DNA, 201 bp, Homo sapiens
tgtaagagtttcctatttaaaagcaggcaggcaatgatataacttaaatggtttttccagctgtttaataaaaggttttacttggaaaaaaatagtaaatrtgaagacaaaaagtgatttccctatattttctgccttgtaagcataattctttatttcaattttctaaaaattcataaagatgtctagaagtgaggtgtt

SEQ ID NO: 237364 - DNA, 201 bp, Homo sapiens
ttactatacagggatttttaatacttaaattttgaatttaaaagaagtgtttttttttcccttcgagatggagccctgctctgtcacccaggctggagtgyagtggcacgatcttggctcactgcaacttttgcctcctgggttcaagcaattctgctgcctcagcctcccaagtagctgggattacaggtgtgcaccagc

SEQ ID NO: 237365 - DNA, 201 bp, Homo sapiens
gtgtgcaccagcacatctggctaatttttgtatttttagtagagatgaggtttcaccatgttgtccaggctggttttgaactcctgaccttgtgatctggmggccttggcctcccaaagtgctgggattacaggtgtgagccactgtgcctggcctaaaagaagattttgaaacatcattgcatgttttctctgcagtctc

SEQ ID NO: 237366 - DNA, 201 bp, Homo sapiens
cttgtagttatttaaataataatttaggtagcaaaattacctgctccttcccaaggataaagtaaaataaacattttatagatgagttatataagtaggastagatatttaattatatctgatttctaatttaatgtatttacaatcacaattatgttgttgaataatcttaagttgcttaaatatacatattcggttact

SEQ ID NO: 237367 - DNA, 201 bp, Homo sapiens
aatttaatgtatttacaatcacaattatgttgttgaataatcttaagttgcttaaatatacatattcggttacttaagatgagcaattaatcgtttttagattatttcttttctagagcctaaaaaagatttgtggggtgttaggggacagcgggaattacagactctttgaaaatgtaacaaaagctttggaccctttca

SEQ ID NO: 237368 - DNA, 201 bp, Homo sapiens
cactgtgtgtgctcaggagatcagaggcaactatattaaaaaacacctgccattaatatgaggaatatattattaagaaggatctcatcaacttttaaccaaaaaaaaaaaaaaagatatttacacttgaaaatgtatttcagctgactccacttttttttttttttttttttggagatggaatctcgctctgttgcccgg

SEQ ID NO: 237369 - DNA, 201 bp, Homo sapiens
actgtgtgtgctcaggagatcagaggcaactatattaaaaaacacctgccattaatatgaggaatatattattaagaaggatctcatcaacttttaaccaaaaaaaaaaaaaaagatatttacacttgaaaatgtatttcagctgactccacttttttttttttttttttttggagatggaatctcgctctgttgcccggg

SEQ ID NO: 237370 - DNA, 201 bp, Homo sapiens
taatatgaggaatatattattaagaaggatctcatcaacttttaaccaaaaaaaaaaaaaaagatatttacacttgaaaatgtatttcagctgactccacttttttttttttttttttttggagatggaatctcgctctgttgcccgggctgtagtgcagtggcatgatctccgctcactgcaagctccgcatcccgggtg

SEQ ID NO: 237371 - DNA, 201 bp, Homo sapiens
ccaaaaaaaaaaaaaaagatatttacacttgaaaatgtatttcagctgactccacttttttttttttttttttttggagatggaatctcgctctgttgccygggctgtagtgcagtggcatgatctccgctcactgcaagctccgcatcccgggtgccaccacgcccagctaattttttgtatttttagcagagacgaggt

SEQ ID NO: 237372 - DNA, 201 bp, Homo sapiens
gaggctgaggcaggcggatcacctgaggtcgagagttcgagaccagcctgaccaacatggagcaaccccatgtctactaaaaatactaaattagctggccrtggtggcacatgcctgtaatcccagctactagggaggctgagtcaggacagttgcttgaacctgggaggtggaggttgcgatgagccgagatcacaccat

SEQ ID NO: 237373 - DNA, 201 bp, Homo sapiens
attctttgtagcgtattttctaatgtcatttcattgtctcaccaagaaatacttgcataaagcaagttcaattatagcatctgttgaatatttaaggttgrgtaaagtgggtgagtttaacagatattttcccttatttcttttaggtgaatctggactgggaaagttgacattaatcaactcattattcctcacagattt

SEQ ID NO: 237374 - DNA, 201 bp, Homo sapiens
ccaaaccccagatgctggctctcaaactaacactgagccctcagtgcccacagggagatacaatcagtgcactttccagatggggaaatgggctcagagargtgcaacagccttgcccaatgccccagaccacggctccaggcccagagtgttcttttgtcactgtgtccagagggcagcagctgctgtgatgtacccacc

SEQ ID NO: 237375 - DNA, 201 bp, Homo sapiens
aattactgtgttaaacacagtttcatagaaaataaaagaccaatcaaatacaataagctgcctttttagatgggtatgttattcttcttttacagctaaakaaacaggctcagagaatgttatttgattggaccgtgttgcatctctggacagtgcagctgaaatcagactgtgtgtgtaactccactagcctaccagggt

SEQ ID NO: 237376 - DNA, 201 bp, Homo sapiens
gatttgactgggttgtcctttgactagaagatcaccagataaagaaaatgtaaacttcctaaaccagataagatgatattgttaaaaattttttttggccyagcactttgggaggctgaaatgggaagattgcttgaacccaggagtttgaagctgcagtaagctatgatctaccatgcactccagcctgggcaacagagt

SEQ ID NO: 237377 - DNA, 201 bp, Homo sapiens
ctgtgttaaacacagtttcatagaaaataaaagaccaatcaaatacaataagctgcctttttagatgggtatgttattcttcttttacagctaaagaaacrggctcagagaatgttatttgattggaccgtgttgcatctctggacagtgcagctgaaatcagactgtgtgtgtaactccactagcctaccagggtgcctc

SEQ ID NO: 237378 - DNA, 201 bp, Homo sapiens
tgcctttttagatgggtatgttattcttcttttacagctaaagaaacaggctcagagaatgttatttgattggaccgtgttgcatctctggacagtgcagytgaaatcagactgtgtgtgtaactccactagcctaccagggtgcctctcataaagttagtaagaaatgtaaatttggcctaatatacaaagttgccaggg

SEQ ID NO: 237379 - DNA, 201 bp, Homo sapiens
tcactgatagtttgtatcaggatcaaagcagtttgaagaacattaatctaaaagataagactttggcatctcatttctctaaaagataagtcatgcatgtmcacatctcaggcaatttttttcagttttataagttttattcttgataataaaattcttttaacagaaaactcttgattgctatagacctctgctgtgtat

SEQ ID NO: 237380 - DNA, 201 bp, Homo sapiens
catcatctcagaaagtgttattggatagtgtggctacagacttttcttgctcagcaatcttagtctccgcatgttagtctcttcatgcattaggtagcatytataaaacatgccaaaaggaaataggctatctgtaaaagtgtcccaaactttttgtcttgtaaattagcttatcagcatacttggagcctcttgccttaa

SEQ ID NO: 237381 - DNA, 201 bp, Homo sapiens
cccaatgcccacaatcattgatcctaaagaaaatgtgggagtaggtagataaactcaaacatccctaccatcacccctggtaggaaatcactggtgtaatrtatgatactaacatctgcaccaattactcttataggtggaacaatccaaagttttaatcaaagaaggtggtattcagttgctgcttacaatagttgatac

SEQ ID NO: 237382 - DNA, 201 bp, Homo sapiens
tgactgaatcactcaatctgcttatttgtattattagatgcacatttaagttatgtattacatgtctttagtggtgatcactattttatcagttcctctgtctttctttataccaagtatgactcataaacccagtattaattttccaagagattggcatactatttgtatatacgcttttctttcaaataatctggattc

SEQ ID NO: 237383 - DNA, 201 bp, Homo sapiens
gactgaatcactcaatctgcttatttgtattattagatgcacatttaagttatgtattacatgtctttagtggtgatcactattttatcagttcctctgtctttctttataccaagtatgactcataaacccagtattaattttccaagagattggcatactatttgtatatacgcttttctttcaaataatctggattcc

SEQ ID NO: 237384 - DNA, 201 bp, Homo sapiens
actgaatcactcaatctgcttatttgtattattagatgcacatttaagttatgtattacatgtctttagtggtgatcactattttatcagttcctctgtctttctttataccaagtatgactcataaacccagtattaattttccaagagattggcatactatttgtatatacgcttttctttcaaataatctggattccc

SEQ ID NO: 237385 - DNA, 201 bp, Homo sapiens
ctgaatcactcaatctgcttatttgtattattagatgcacatttaagttatgtattacatgtctttagtggtgatcactattttatcagttcctctgtctttctttataccaagtatgactcataaacccagtattaattttccaagagattggcatactatttgtatatacgcttttctttcaaataatctggattccca

SEQ ID NO: 237386 - DNA, 201 bp, Homo sapiens
tgactccacttttttttttttttttttttggagatggaatctcgctctgttgcccgggctgtagtgcagtggcatgatctccgctcactgcaagctccgcrtcccgggtgccaccacgcccagctaattttttgtatttttagcagagacgaggtttcactgtgttagccaggatggtctcggtctcctgacctcgtgatc

SEQ ID NO: 237387 - DNA, 201 bp, Homo sapiens
acattggtaaaggatatccatggagcagctaagggtatcttcggtgtcttgaataattaaataatgatgacatcatcccgtatttattgtagatttatctyatatgtattgattttatatatgatagaaatgctgtaagcaaaaatttgtttaaccaaaataccacattcacctagacagtttgaagaaacagaaatttac

SEQ ID NO: 237388 - DNA, 201 bp, Homo sapiens
ttattaatacacttactagtgccagtaatatgctaataatttagctgtgtttcaacaataaatattttctttcatttggaaagttttgaaataataaagayttattcaacataatttatatttttgaatctttatatagaataacttgacatgtcttccattggtaaattcattttgcctatttgaaaatattgattattg

SEQ ID NO: 237389 - DNA, 201 bp, Homo sapiens
gcatttaaaaaaatatttgcttctgattatctctaaagtatgtgtgtgtgttttaaatcattgaatttaagactgaaatatttaagtggaattattattattttttttttttgagatggagtctctctctgtcacccaggctggagtgcagtggcgtgatctcggctcactgcaagttccacttcccaggttcatgccatt

SEQ ID NO: 237390 - DNA, 201 bp, Homo sapiens
aagcacatgttgtaacttttattatgcttccttagaggtaagatgcaaatttgcccttagccagtgtaagatggtaaatatgacttcataaaattaaaaaracagaagaagtacagttaatcaaaagaattatcttgactagaactttccaaatttgtcctaaggattctcctagagatgacactgtgacatagtaaccaa

SEQ ID NO: 237391 - DNA, 201 bp, Homo sapiens
tggagcaggtgtttgagatgaaggtcaaagaaaaagttcaaaaactgaaggactctgaagctgaggtaatcagtccaatattccatctcttagcagacatkgtgttcctttttaaatagtatcttcagtaaaatttatagataatataaccttcttatacatattttttaaaaattaataccctagcataacaaaatggag

SEQ ID NO: 237392 - DNA, 201 bp, Homo sapiens
gggcgggatgtaaccggctgctgagctggcagttctgtgtccccaggcttcggcccggccgccgccgcacataaactgcgaggaggagctttacgacttcycggtcttcggggccgggcgcagcaagggccagactctgcgctagcaggcgctgcgcgccaaccggccggcccctgtcgcagaaggtgcaaccgatcgcac

SEQ ID NO: 237393 - DNA, 201 bp, Homo sapiens
tccgcgtgggtggaggggacgtgaagccgccctgagatgatggttgaggaagggctctacggctcccaagctaggccaaatgcctccggcggccgcgcccrggcgccccttcccctgtggggcaaccctagcttgggacgcgtgaaccacctccgtagctgccccaccagcacccccagccgtgcgcccctgcaccatgca

SEQ ID NO: 237394 - DNA, 201 bp, Homo sapiens
tgataagctggaataatattaatacacacaaagcacatgttgtaacttttattatgcttccttagaggtaagatgcaaatttgcccttagccagtgtaagrtggtaaatatgacttcataaaattaaaaaaacagaagaagtacagttaatcaaaagaattatcttgactagaactttccaaatttgtcctaaggattctc

SEQ ID NO: 237395 - DNA, 201 bp, Homo sapiens
tcatttttacttctattactgctactgcttgtaactgcttgtaactgtttgtgcttttttgatatgaaagtccaccatcagggagcactgtagtggaaaakgtattaggccaggcatagcctttagttctctggccttgggtccttcatctgtgatattcagttaacaatacctagccagtaggggtgttaaagattaaat

SEQ ID NO: 237396 - DNA, 201 bp, Homo sapiens
gctacacaaagctcaggctccacgggcctcgccttggctcccagggatgctctgcagccagcgggcggatgacctgaggtcgggcctgggcctgtcccttkgtgcatgcggcgtgatttcaaattcaaactaagttccacaccattaggagttttcacggcatgcagttccagagtgcaaatggcttgcatatgtgcagtt

SEQ ID NO: 237397 - DNA, 201 bp, Homo sapiens
cttgccttaataaggacttgatataaatatgtatcaggagaaagcctatcttatgaaggaattattccctttttatttgaatccgtgtttgctttatcttsggctcctgaaaactgatactttgcatttaatagcagcatatgcccaggatgaatgataatacatcttctgatacagagcttgaggttacagaatatctta

SEQ ID NO: 237398 - DNA, 201 bp, Homo sapiens
tatcaggagaaagcctatcttatgaaggaattattccctttttatttgaatccgtgtttgctttatcttgggctcctgaaaactgatactttgcatttaayagcagcatatgcccaggatgaatgataatacatcttctgatacagagcttgaggttacagaatatcttaaattgttccaggaactgttgttatcatttaa

SEQ ID NO: 237399 - DNA, 201 bp, Homo sapiens
tcaaatacaataagctgcctttttagatgggtatgttattcttcttttacagctaaagaaacaggctcagagaatgttatttgattggaccgtgttgcatytctggacagtgcagctgaaatcagactgtgtgtgtaactccactagcctaccagggtgcctctcataaagttagtaagaaatgtaaatttggcctaatat

SEQ ID NO: 237400 - DNA, 201 bp, Homo sapiens
tggcctaatatacaaagttgccagggcagcactgggtcaattctacatacaatacttctatgttcatcaagggaaaccttaagggaaagtgaaaatgcttytagaaggcgactggacaccagcgcctttgcttgttgcctttgggctcttcttctaaggccaacagtgacctgaaattattgactgacttttccaatcagg

SEQ ID NO: 237401 - DNA, 201 bp, Homo sapiens
ttgcttaatcttcctcaaagggttatggactctcagagccagaagaaggtcatctctcctttgctcctcgtatgctgggatctgccacatcaatggcaacmgctgggcctccagaatttgctccagggtgtttggaagtcctgacaccctcctgatcttctctgtaacatgcacactttggcctgtgtcagtttgctggaa

SEQ ID NO: 237402 - DNA, 201 bp, Homo sapiens
ttataagtcaagacaaatactgctacatgcttcttgagttagctatcctgttataatcgcattctcagttgattttttacaccatagcagaacttataagrttcttcgtccatgtgaaagttttgctgccacagctttaaatttgttcagcttatactgaagtttttcagtttattcaatgttaaaaaaatattagtcatt

SEQ ID NO: 237403 - DNA, 201 bp, Homo sapiens
ataaataaagcaactaaaagaatatctacaggggatgatatttagagtttacattttaacaagtcttattacagcagtaaaaaatgcaaacataataagcctagtaaattagtaatttaaaaagttaaaagaaatgaatggattcaaagcatattatagacatgacatgttattttcagaccattaaacatgaccatgatg

SEQ ID NO: 237404 - DNA, 201 bp, Homo sapiens
tggggacacagagccaaaccatttctataaccaaaacaagaaaattgctagaatgactaagcagtttaataaaatcacaagttacaaactgaatatagagmatcaattgcatgtttctacagtagcagcaaattattggaaaataaagtttaaaactgccatttacaataacattaaaatcaaaatgtttcagaacacatt

SEQ ID NO: 237405 - DNA, 201 bp, Homo sapiens
aaattggactaaaatattttaggaaatgcaaaaagcctaacatttctgaaatcatgtttgaaaaagaacatacaaaattgagggattcaccttttcgaagktcacaacttaccataaatctagagcagttatcataatatctcattctcacatgagacataaataaatcattgcataaattaataaatacagaaatacaat

SEQ ID NO: 237406 - DNA, 201 bp, Homo sapiens
gattttgtgggggagttatagagccctgttttgtcatgtaaatgccctaaatgctccacttaaaagatgcagaatggcagagtgaattaaaaaaaaaaaaacagtcaaatatctgttgtcatcaagagattcatctaacacattaaggattcatagaaacttgaagtaaaggtgtggaaaaagatattccatgcaaatgga

SEQ ID NO: 237407 - DNA, 201 bp, Homo sapiens
aaatgaatatatatgctcataagatcacttataaatgaatgtttggagcccctttaatcataataccaaacaccatatacagactcatgtcctacagtccwtccaaagataaatgaataaataattttggtataatcccccaataatatgtaactaagaagaaatgaaacatagaaatactgatacccatgataatatgga

SEQ ID NO: 237408 - DNA, 201 bp, Homo sapiens
tcaaatgatcgacccacctcggcctcccaaagtgctgggattacaggcatgagccattgtgcccagcctaacacacacacacacacacacacacacacaaacttgacttaataatatctgcagtgggttcatttttgctggctttattttccctaatttgtcaatacctgattaatttttgaactcatatatagttttaac

SEQ ID NO: 237409 - DNA, 201 bp, Homo sapiens
gaagaataccactggtagttttataggagtagaattaaatctataaatgaactaaatctataaatctataaaatgatgtcttttggcctaggaacagagcycctcttaaagacttgctggaaaaagctagagtgaaattctattttgctccatctctcttaccttctgacattctctcagtggctgagagaatctatcttt

SEQ ID NO: 237410 - DNA, 201 bp, Homo sapiens
tgtataaggaaaccagtcatattcgatcaagagcccaccctgctccattatgactgcatcttaactaattacacctacaatgaccgtatttcctataaggytatattctgagatactaggggctagaaatttggggggtagccacaattcaaatcataacaaacagtaagcttaagtacagcaggaactgagccatgagag

SEQ ID NO: 237411 - DNA, 201 bp, Homo sapiens
acctcaaatgatcgacccacctcggcctcccaaagtgctgggattacaggcatgagccattgtgcccagcctaacacacacacacacacacacacacacacaaacttgacttaataatatctgcagtgggttcatttttgctggctttattttccctaatttgtcaatacctgattaatttttgaactcatatatagtttt

SEQ ID NO: 237412 - DNA, 201 bp, Homo sapiens
aaaatctgcaaaaatcttacctatagcttaacaaatggtaaaaaataaaaagtgaatatattcaggtaatcattactaagtaatggttagtaatgagtaargtcaagagatagagcattactagcaattttgaggtttctccatcatcccttcctaaatatttctccccttcctcacataaacaccaaataatttataaat

SEQ ID NO: 237413 - DNA, 201 bp, Homo sapiens
ccatacagtgtaaagtagttttgtggttttatattttcacaaaaattagtattgccatctgtattgttttatttcagatattctgatatttatgaattgtyatcttataatgatcttaatttgtatttgtgttttcataattataagatgtttgattagtgatgtttgattttgtttagtgaacatttggcctggctgatt

SEQ ID NO: 237414 - DNA, 201 bp, Homo sapiens
gcttattttaatccagttgtccttttcagcccataattcttttattttggtttctgtcatctccttttgatatggatatactgatgaagacttcaaaattyaccaagaatctttgggatctaatttcttcaaccaatttactttagggtcctttttactgctggtggtggatctgcttggttctcaatttggcaacctctc

SEQ ID NO: 237415 - DNA, 201 bp, Homo sapiens
tgtagcaatagttgtcagattatacatttcaacttagaactagggggatgagaaatgatgcttacttgccctattctcatgagatgctcttttcttttatwaggagccaaagggagatggagcctaattttttttacttgttttagtggagcttctctcatgcaaatatgtttgagaaaagaggataggtggaagtggaaa

SEQ ID NO: 237416 - DNA, 201 bp, Homo sapiens
aaaacttttgattcatatatttgattgcttgtctattctctattttattaattttcacactgttattcccctgcttccatgtgctttggctacagtctgtytgtcttcaaatggtgccataagttggaaagttaggttattgatttgagtttgctcttctcttttagtgtagatatttacagctataaattaatgctgtaa

SEQ ID NO: 237417 - DNA, 201 bp, Homo sapiens
agagttgggaaaccatcactacaataaattttaaaacatttttattcacacacacaaattccattagcagtcactaatcattcaccactaattgtgcgttragaattttagcaacaatattcctaataaatattggtccgtagttttctttgcttgtaatgactttgtccaattttgttatcaggttaatattggcttctt

SEQ ID NO: 237418 - DNA, 201 bp, Homo sapiens
actgaaccaaaatttagggtagcatttacctcaaccaaagaaaatctttaatataaaatgaggtagaatataaaaacaaatataacttcatacgtatgttyatattttcatgccataatggtagtttgggagggatgtttagttcaatattaatgagtctatgatataaaataaagtataaacatacatagataatgtatg

SEQ ID NO: 237419 - DNA, 201 bp, Homo sapiens
aattgggaagttttccctttccttctatactttggaaatgtttgtaaatatatgaaattagttatttaaatgttctgtggaattcaccaccgaagccaccygaaccttggatttttcttttgggtagtttgtaaattgcaaatgcaacgaattttacatataaaatatatatactttttaattcattcttgttagttcatg

SEQ ID NO: 237420 - DNA, 201 bp, Homo sapiens
tgttctgtggaattcaccaccgaagccacctgaaccttggatttttcttttgggtagtttgtaaattgcaaatgcaacgaattttacatataaaatatatmtactttttaattcattcttgttagttcatgcattttaggaatatgaccatttcatctatgttatctaatttgttagcatataattgtttatagaattccc

SEQ ID NO: 237421 - DNA, 201 bp, Homo sapiens
tatactttggaaatgtttgtaaatatatgaaattagttatttaaatgttctgtggaattcaccaccgaagccacctgaaccttggatttttcttttgggtrgtttgtaaattgcaaatgcaacgaattttacatataaaatatatatactttttaattcattcttgttagttcatgcattttaggaatatgaccatttcat

SEQ ID NO: 237422 - DNA, 201 bp, Homo sapiens
tatattgttgttgaattgtccatttctttcttcaattcttctagtttctgtttcatgcattttggaacactgttgtatttgtgtatatttttataattctyatatgcttgtgatggattggcttttatcattataaattgtctttatgtctagttatgtcatttatgtcttatagtgtacagtgcctaatattaccacagt

SEQ ID NO: 237423 - DNA, 201 bp, Homo sapiens
ttactatctatgtcatgtcattattccagtacagctttgttcttacccacctactttgtgttgttattgtcaattaatttcatttttatatgctgttgttstaacaatacaatcataaatatatgttgtttgtacaatgctctttacattagttatgagaaaaaggagaatagataagcatccctgctgtattttagaatg

SEQ ID NO: 237424 - DNA, 201 bp, Homo sapiens
ttaactgaggataatatagttagctttatatcactaacttcaaaaaaaagctcagaataattcctcctcaatgatacattaaaacatttgacaaaattgartatatccattcatgataaaaaactctcacaacagtaggtattgaagaaaataccatcaaacttttaaaggctatctcaaaaaccgtatggcaaatatcaa

SEQ ID NO: 237425 - DNA, 201 bp, Homo sapiens
aggagaatagataagcatccctgctgtattttagaatgtcataattacctctactggtgctcttaatttttgtctgtttgtttgttttcagttgcagtccrtaggcacttgctttaaccgtgaagaattaccttcagtacttcaggtaagacacatctgctagttatgaattctctcagaattcatttctctggaggcatt

SEQ ID NO: 237426 - DNA, 201 bp, Homo sapiens
ttaccattctttaactttcaatgtatttgtatctttgcatctgaaatctaaaacgtgtcagctgtagatagtatataattaaatctttttaatcaactctrgcaatctcttcctcttaattagatttgtaaattctttcaaaattaatattattcatgtagtgtgcaaattcctctgccatttctatttttatatgactcg

SEQ ID NO: 237427 - DNA, 201 bp, Homo sapiens
acacatggggaacatgggagctacaattcaatgtcagatttgggtggggacacagagccaaaccatttctataaccaaaacaagaaaattgctagaatgaytaagcagtttaataaaatcacaagttacaaactgaatatagagaatcaattgcatgtttctacagtagcagcaaattattggaaaataaagtttaaaact

SEQ ID NO: 237428 - DNA, 201 bp, Homo sapiens
tttttcttcattgatttttccttattcttcagcattcataatctccatagatctgccttctattttgggaattctaccacttcaaatatactatttccacycaccttattttcattgtagttgttattgtttgccaccacatgggtgagctggagtgagagtaatcagtattccactgtccttggatacacttggaataga

SEQ ID NO: 237429 - DNA, 201 bp, Homo sapiens
aaatacatcttattacatgtacttatataaaagtaattctgttgaaacagaattattatccttatatgtctttattcctacttttttgaggggggtattgwtgtatacattaattgtacatatgttaaaaatttaaaaatgtaatattataactttacagaattatatctatttgaaagaggctgagagaagaaataaagc

SEQ ID NO: 237430 - DNA, 201 bp, Homo sapiens
agcaacacaatagtgggggggacttcaatactccactgacagcacgaggcagattattaagagagaaattcagcaaagaaacaatggacttaaactatacyttaaaacaaatagacctaacaattttttacagaacattcttccaaacaactgcagaataaacattattttcatcagcacatggaacattttccaagatag

SEQ ID NO: 237431 - DNA, 201 bp, Homo sapiens; identical to SEQ ID NO: 45845

SEQ ID NO: 237432 - DNA, 201 bp, Homo sapiens
aggaagttactaagctgaaggtgagtgacactgtcattccactttacatcccacagtgtggagaatgcaaatttggtctaaatcctaaaactaacctttgscagaagataagagtcacgaagtttattttctaatatccatgggttggtaaagattactatcctttaattgtatgaaaatccaaactgctaggtattttgt

SEQ ID NO: 237433 - DNA, 201 bp, Homo sapiens
agaagatcacttagagatagatgtgggaaaaattggagagtgtaaagggatttcaagagacagggtatgatgtgggggatctatgtttgttagattgactragggatgcctctctgattagatggcccactaacagtgtattaattccccagccctgccataacaaattacgacaactaagttgtttaaataaacagaaat

SEQ ID NO: 237434 - DNA, 201 bp, Homo sapiens
atggagccaatgataccctgagatggcagcctccctaacgctggcaagctgtcttataaataattgtccatggaaacatcaatgtagataaggcagccttrctggcagtgttggggtggagggcagagttggggatggtatgcaagattctattggggagagtttaggatagactttaaaaagtgtctccttatggagagt

SEQ ID NO: 237435 - DNA, 201 bp, Homo sapiens
ttttcagattcaaagtaagggatgcataatttttaaatacaaagctagagattttagttttacaaaatattagtttttttttgttgttgttgttgttgttkttttttactatttgtgtagccccaactgaatactgaataacagttgttattatttgatctgtcatactgaagctgttacttttgaagtcatgtaaaagtt

SEQ ID NO: 237436 - DNA, 201 bp, Homo sapiens
ttttctctgtagaaaatgttttcagattcaaagtaagggatgcataatttttaaatacaaagctagagattttagttttacaaaatattagtttttttttkttgttgttgttgttgttgttttttactatttgtgtagccccaactgaatactgaataacagttgttattatttgatctgtcatactgaagctgttacttt

SEQ ID NO: 237437 - DNA, 201 bp, Homo sapiens; identical to SEQ ID NO: 45848

SEQ ID NO: 237438 - DNA, 201 bp, Homo sapiens
aggcaggaatgggctgcttggggatccagcaagctcccagtgcctttctgctacttcctctacccctgtatttcgctcggcttggctttctaacttgactmaactccagctaaagtcaggaatttctccagcaaacagaccttcagcttctccagtgggggtgtgtctacctcattaattttaactctgtgacttattcca

SEQ ID NO: 237439 - DNA, 201 bp, Homo sapiens
tttttaatcacaggttttggatttttttgtttaataaaacaagtttgaatattattcctatctttgtatttactagtataaaatgattgttattcatctgkatatgaatagaccaccagaaaaaataacgggcatcagaaaaattgtttgaattctaccatttctttgcagattacaaaagtgtcctattcgttttttgtt

SEQ ID NO: 237440 - DNA, 201 bp, Homo sapiens
acctgctcatgaaattatccattgtagagagaaacctgggaaacaaagctatacgtcctttaatttttttccccattttcatttaaagttcagaagaacawaatatgttggaatgatcaatgattctgaattaatatagatatttgaatgtcacagtatctgtatattaatatcctaaagtggtgttactatattggttag

SEQ ID NO: 237441 - DNA, 201 bp, Homo sapiens; identical to SEQ ID NO: 45852

SEQ ID NO: 237442 - DNA, 201 bp, Homo sapiens
gttaagttggtggaaagaccttgaaatctgaaaagtggtaattaaaaaacaatggaatgcctaaaccatactgtataaacatgaaagtcttacataagagrctggtgttacatgttttgctgctgttttttaggtaatctgtcatatatatcagaaatatatatagcaatcaggttttagtttctagtacagttgaccata

SEQ ID NO: 237443 - DNA, 201 bp, Homo sapiens
ctgtattgacaaagttaaaacccctacttgctgattgacctcttataattgacgtttacatctttcctatgcttttctaacaatctgaatgtgtttttttktttgtttgtttgtttgtttttagaaagaagaaaaaagggaaaaaggggaaaaaagatagtagctcaagtggaagtggcagtgacaatgatgttgaagtga

SEQ ID NO: 237444 - DNA, 201 bp, Homo sapiens; identical to SEQ ID NO: 45854

SEQ ID NO: 237445 - DNA, 201 bp, Homo sapiens
cttgactaattcagtctttgaagaatatctgaccaagaaatatcttaatatggcccggcgtgggtggctcacgcctataatctcaggactttgggaggccraagcaggtggatcacttgaggttaagagtttgagaccagcctgaccaacatggtgaaaccctgtctctactaaaagtagctgggcgtgatagtgcgtgcc

SEQ ID NO: 237446 - DNA, 201 bp, Homo sapiens
aacatggaaaagcatcttttttttaactaatgtactaaatttaaagagcttgctggaaagacataagtaaatctcagttttgttaactgttttattttaargctctggggcatgatagaattttgcttggattggaaatagtagcattgtgtttacagttaaataattagaatagaaattatgtatgataaaatataaaag

SEQ ID NO: 237447 - DNA, 201 bp, Homo sapiens
aaaagtgtctccttatggagagttggaagtactagaaatatttgctgcttaaggtcatagaaatcctgaaatttaaaataccaggtttgcatttaataaaygctcatttaataaatgaattaaatggtaagcttttttactttataggcaaattaaaatatctattctctctagaatatgaacttcctattagcctaggaa

SEQ ID NO: 237448 - DNA, 201 bp, Homo sapiens
gctgactcgcttgggaaatagcaccttcttcagttataaaatagttataataaattgctatcttactgtttgaaagtaagataaatatactcattaacttytattctagtgcattatagatgcacaattaaatatataatgcccaatattatgaaataaatgatttaaagctagaatcaattgtaaattaaataggaaaga

SEQ ID NO: 237449 - DNA, 201 bp, Homo sapiens
aggccgaggcaggcggatcacttgaggccaggagttcaagaccaacctggccaacatggcaaaaccctgtccctactaaaaatacaaaaaaaaaaaaaaaattagccgagcatggtggcaggcacctgtagtctcagctactcgggaggctgaggcaggagaatggcttgaacccgggaggcggagattgcagtgagccga

SEQ ID NO: 237450 - DNA, 201 bp, Homo sapiens
ataaggtaggctattagatcagaagcctggaaaattgggagtatgtattaggattggaaacagtgtttagagctgaccagagttaagatagtagtgttcawctttcaacttagctgctctggttatctcttcctgcgtaacaattatcccaagccttagtagcttaaagtgacaagaatcagctgggtgcaatggctcata

SEQ ID NO: 237451 - DNA, 201 bp, Homo sapiens
tattatgaaataaatgatttaaagctagaatcaattgtaaattaaataggaaagactgggtttttattataccaataatgacttaattgaatctgaaacayattataaaatgtgcttatggattcttctgcattattaaattattggtgtgataaaactcaaacttttttaatcttcctaacaagactctttgagcattga

SEQ ID NO: 237452 - DNA, 201 bp, Homo sapiens
tttcctagttttactgggtcagggatttaatagaggtttacttggacagttctaaacattttatcaacttttctctctaatatctttatggttttttatgyaaaaaaattcaccaataggtggcaatgtaacactgaaaaataatttgcatttgttactattataatagcatgtgacaaaacctttatttgacctttcttc

SEQ ID NO: 237453 - DNA, 201 bp, Homo sapiens
tggtgacttcattattatctcgtgaattccaccattttggggtacagatcattatgccttagttttatatatatatatatatatatatatatatatatatwttttttttttttttttttttttgagacagagtctcactctgtcacccaggctggagtgcagaggcatgatctcggctcactgcagcctccacttccctgt

SEQ ID NO: 237454 - DNA, 201 bp, Homo sapiens
tttattataccaataatgacttaattgaatctgaaacacattataaaatgtgcttatggattcttctgcattattaaattattggtgtgataaaactcaamcttttttaatcttcctaacaagactctttgagcattgatatggtttactccactttattgatactgaattttgctgttctcttcaattatttaaagagtt

SEQ ID NO: 237455 - DNA, 201 bp, Homo sapiens
atttttttgtggatatttaaacgaaggtgacaatctgttttcttataggtggtaagttttcttcatacagttcttttgtgtgacaaactggatttcagcayggcgttagtggtttgtcctcttaatactgctttgaattggatgaatgaatttgagaagtggcaagagggattaaaagatgatgagaagcttgaggtaact

SEQ ID NO: 237456 - DNA, 201 bp, Homo sapiens; identical to SEQ ID NO: 45858

SEQ ID NO: 237457 - DNA, 201 bp, Homo sapiens
ttgtctttacctatatgtaagttgaaggattagtgttgagacactgtatcctactagtgcagcctgtatgcctaggagcttaaaaactgggaccaaatgtmtgcctatttgaaatagcagattatgaagagagaacaaggtagtggctctaaatatttggcatttgggagttgtggagcaaagcagttaactgtctataag

SEQ ID NO: 237458 - DNA, 201 bp, Homo sapiens
ctacttaatgtacttaaacaatctggtggagttttctaattcacattactgtttttagaagaatgttccacattttgtagcttgagaggacataatttttwtgtgtgtgcatgaatgtgcatatgcacaggattaactcaaggtactgtttgctttaagcaataagatatatctatgtaattttataaaataatgacaggt

SEQ ID NO: 237459 - DNA, 201 bp, Homo sapiens; identical to SEQ ID NO: 45861

SEQ ID NO: 237460 - DNA, 201 bp, Homo sapiens
taatgtatggacatacgtagctggtattgtataactttaaaaaaaatgactttcttacagtaaatataagaaaatctgaataggaagtattaaggggctastctgcctccttagcgcagtaggcagcacatcggtctcataatctgaaggaagtattaaagggttaacaatgttgtacctggaatttgaaatggatattaa

SEQ ID NO: 237461 - DNA, 201 bp, Homo sapiens
tgtaggatcatatattaggcttcagcttcatccgaagttttaacagtgttaaaatttgatgaagatggaatgtggaagcacatttgtttcttatatcttayatacttttctgagcatttaaatttttgtaacaaaaatatattttaaaatactttgcattaaaaagcaattgagaaagtgtataaacatgctaaacctgca

SEQ ID NO: 237462 - DNA, 201 bp, Homo sapiens; identical to SEQ ID NO: 45862

SEQ ID NO: 237463 - DNA, 201 bp, Homo sapiens; identical to SEQ ID NO: 45864

SEQ ID NO: 237464 - DNA, 201 bp, Homo sapiens
tctacagtcttattggatgtgaaatcaaggaaaaaatttagggagaccacagcagctgtaacatgagtagagagatcccatctagaaaagagccacagaaygggaaaaccagattgcacgaaaactctcccaatagctctggtcctgttgcctaagtgcactccagattccaaccagcctggttaggactaaaagaacaga

SEQ ID NO: 237465 - DNA, 201 bp, Homo sapiens
tctttttctgtgtataaatgtgtgaataatagccactcctttctcctagaagatgggcttcatgggattgtgagctgcactgcttgtggacaacaggtcartcattttcaaaaagattccatttatagacacccttcattgcaagttcttatttgtaaggtatgtaatgatctgttgatatttcataccgtaaatatttga

SEQ ID NO: 237466 - DNA, 201 bp, Homo sapiens
tgacctaaagtgaactgttacttgttgtggcattatttataataatgaaaaattgaaaattaacccaaatcctcaacttttggggatagtttatattatgrtatatcaccataatctaataccatgcaggaagatacattaaatattataacatagaatattgtgtgttaatatttaggaatatatagaatatattatgta

SEQ ID NO: 237467 - DNA, 201 bp, Homo sapiens
atcagtaatgtaattttatttattatggtaaactatgctaaacagatgaaatctttcatgaattaagcaaaattgctgatgagtttttctttatggcaatmtactaccataaagttttaccatttcatattaaccagtaaccgtatttatccttgattaagtttcatgcttacaaaattttatttttttgtatattcttcc

SEQ ID NO: 237468 - DNA, 201 bp, Homo sapiens
gacagtgagctagctgcaggagttttttttttttccccctcttcataccccagtggtgcctggaaccccagtgagatagacccattcactcccctggaaakggggctgaagccagggagctaggtggtcttgcttagcgggtcccactcccacagaacccagcaagctaagaaccactggcttgaaattctcattgccaac

SEQ ID NO: 237469 - DNA, 201 bp, Homo sapiens
agcaagctgacattacatcctcatcttcttctgatatagaagatgatgatcagaattctataggtgagggaagcagcgatgaacagaaaattaagcctgtsactgaaaatttagtgctgtcttcacatactggattttgccaatcttcaggtatgcaaaaataaataaaaaattcataatttgtacttccccctcttgagt

SEQ ID NO: 237470 - DNA, 201 bp, Homo sapiens; identical to SEQ ID NO: 45855

SEQ ID NO: 237471 - DNA, 201 bp, Homo sapiens
caataaatctttgcccacaccagtgtcctggagattttccccagtgtttttaattacttaaaaaaataaagtttttgtcctttatgaatgttatcaatttygaattaaatttccccttcctcttttcttttaatagaattgctttaagtattacatgagtgatgatattagccgtgactcagatggaatggatgaacaatg

SEQ ID NO: 237472 - DNA, 201 bp, Homo sapiens
catctagtttgtttatttttcactgctctatagaattatgttatatcaataagccactattcatttcccacataggaagttattcccaatttttcattttytaattttctaattagtgctgtggtgaatatccttatatttgattccttgtgcacatgtgggagaaaatctccaaagaattacctagttttgtttaattct

SEQ ID NO: 237473 - DNA, 201 bp, Homo sapiens
gaggccggagaatggtgtgaacccgggaggcagagcttgcagtgagccaagatcacgccactgcactccagcctgggtgacagagcaagactccgtctttwaaaaaaaaaaaaaaaaaaaaagagttgatgctataaaacttagttaatgaaatatttccctgggcgatggagctcttgcaagtcctgttgtattttttgt

SEQ ID NO: 237474 - DNA, 201 bp, Homo sapiens
ttggtttactcttgcttttcttattctttaagatgtgttgttaggttgtttatttgaagtatttcttcttttttcatgtaggcactcacagctataaacttcccttttagtaatgcttttgctgtatcccataggttttggtatgttgtgtttcagtatcatttgtttcaatgaattttccaattttcttcttaatttttg

SEQ ID NO: 237475 - DNA, 201 bp, Homo sapiens
ccatcttatgacatccagagtatattcagagtttatcgctttggacaaactaagcctgtttatgtatataggttcttagctcaggtaggtttataattctmtttttcatattgaaagtttatgtgaaactgataatattttagagatatggaacatatgtgtattacagagagggaaacaaagttggaaataccatttctg

SEQ ID NO: 237476 - DNA, 201 bp, Homo sapiens
gttggtttactcttgcttttcttattctttaagatgtgttgttaggttgtttatttgaagtatttcttcttttttcatgtaggcactcacagctataaacttcccttttagtaatgcttttgctgtatcccataggttttggtatgttgtgtttcagtatcatttgtttcaatgaattttccaattttcttcttaattttt

SEQ ID NO: 237477 - DNA, 201 bp, Homo sapiens
cttgggaaatcccgaatatcttaaaataccttaattatttttcctcaattgtacagtaataaggagtaaatagaaaatttttcttttagtggaaggagaayatgaatctctcagaggcccaagtacaggcgttagcattaagtagacaagccagccaggagcttgatgttaaacgaagagaagcaatctacaatgatgtat

SEQ ID NO: 237478 - DNA, 201 bp, Homo sapiens
aatcatgggagtgcagataactctttgatatactgatttcctttctttggggtacatatttagcagtggaattgctggattatatggtagctctctagttyttttttttttttttttttttcatttttgagacagggtctcactctgttgcccaggctggaatgcagtggcggaggttcacttcagcctcaacctcgcagg

SEQ ID NO: 237479 - DNA, 201 bp, Homo sapiens; identical to SEQ ID NO: 45857

SEQ ID NO: 237480 - DNA, 201 bp, Homo sapiens
tggtggagttttctaattcacattactgtttttagaagaatgttccacattttgtagcttgagaggacataatttttatgtgtgtgcatgaatgtgcatawgcacaggattaactcaaggtactgtttgctttaagcaataagatatatctatgtaattttataaaataatgacaggtttccatagtgtattgaaccatct

SEQ ID NO: 237481 - DNA, 201 bp, Homo sapiens
atgcagaaaaatattcacagtatcttaatggaaagaaaagattataaagcagtaaccatttcgttttgttaaaatcaggtctatgttagctttttttttttgagatggaatctcgctctgtcacccaggctaaagtgcagtggcgtgatctcggctcactgcaacctccgcctcctgggttcaagtgatgctcctgcctca

SEQ ID NO: 237482 - DNA, 201 bp, Homo sapiens
ggggaggggtgggcgggcgcgaggatgtgagatcccaggacgacttagaggcgtttaggttgctggagatgggaagcacccgggccctgcgggattttttytctgcagccccaggagacaagcctttttttgattgggttgtggtgcagttccaggtatttaggtatcttttctactccatatcctgaaggatatccttgg

SEQ ID NO: 237483 - DNA, 201 bp, Homo sapiens
ttccacattttgtagcttgagaggacataatttttatgtgtgtgcatgaatgtgcatatgcacaggattaactcaaggtactgtttgctttaagcaataasatatatctatgtaattttataaaataatgacaggtttccatagtgtattgaaccatcttaagttaacagactcttttagtcaggcttgaatttttgaaca

SEQ ID NO: 237484 - DNA, 201 bp, Homo sapiens
agtttagtccatttatattcactgttattctgtttttaaactttcattttaagttcatggatacatgtgcaggtttgttatataggtaaatctgtgtcackggtttgttgtacagattattttgtcacccaggtattaagcctagcacccataagttatttttcctgatcatctccctcctctcagcctccaacctctggt

SEQ ID NO: 237485 - DNA, 201 bp, Homo sapiens
cgtgtgcctgcctttctcttttttccctcccctctcccaagtccccatcagtttctttcttactctccccatgggtaggtctttttctgtctctcttgctytctttccatttcttttctaatttacctacttatgttccatttgtcttatttaggtaaagctacttcttcttctaatccaagcagcccagctccagactgg

SEQ ID NO: 237486 - DNA, 201 bp, Homo sapiens
gtaatcctagcactttgggaggctgaggcgggtggatcacgaggtcaggagatcgagaccatcctggctaacatggtgaaaacccgtctctactaaaaatmcaaaaaaaaaaaaaaaaaaaaaaaaatccgggcatggtggcgggcgcctgtagtgccagctgctcgggaagttgaggcaggagaacttcgtgaacctggg

SEQ ID NO: 237487 - DNA, 201 bp, Homo sapiens
aactggtaagggaataaattacccttatctgtaacttccctagtttttttatacagagaatgatgctctagttaggcattttcctaggtatatacttgcamtttttatctttctcatttccccgctttctttgtttctagagtgagtttttggcatatctttaacatatatatgtgtagtatatatgtgtatttttacatt

SEQ ID NO: 237488 - DNA, 201 bp, Homo sapiens
cttatctgtaacttccctagtttttttatacagagaatgatgctctagttaggcattttcctaggtatatacttgcactttttatctttctcatttccccrctttctttgtttctagagtgagtttttggcatatctttaacatatatatgtgtagtatatatgtgtatttttacatttgactgtagttaaatataagctt

SEQ ID NO: 237489 - DNA, 201 bp, Homo sapiens
ctaatacttgagactaatcacagtacagaacacattactatggcaactaagctaaatgctgcttgcaatataatagtcaagacattaagagaatttagccmtaaatgatcttactaactggtttctacagtaatggtcctgtgaatgccatcacattagtaatggtgttaacaataatgtgttttccttttggtatggtac

SEQ ID NO: 237490 - DNA, 201 bp, Homo sapiens
agatcatgtcatctgcaagtacagataatttcctttctaatctgaatggcttttatttgtttgcttatccagttgccctggttaagacctcaagtacaatrttgagtgaaagtggcaagagctggcatccttgtcttgtctctaatcatagtgtgaaggaatccagtttttcaacattttgtatgatgttagttttgtgga

SEQ ID NO: 237491 - DNA, 201 bp, Homo sapiens
aatgatttctttgagcttaactatcaacaactccttttcttgtaggtgatagaaattgaagatgcttcacccaccaagtgtccaataacaaccaagttggktttagatgaagatgaagaaaccaaagaacctttagtgcaggttcatagaaatatggttatcaaattgaaaccccatcaagtagatggtaagaaactatta

SEQ ID NO: 237492 - DNA, 201 bp, Homo sapiens; identical to SEQ ID NO: 45851

SEQ ID NO: 237493 - DNA, 201 bp, Homo sapiens
tacttaatagtttaaaaagaatctaagcatattttatgtgtagttgaattatgtattctaacctgggtagattttcagtctgcaaaaccactcgtgtctgyagtgttttattgttacgggggaaattgtaggataatagtaaagaggctttatagaaaaactgcctcagtctaactttgggcttttctactttctgtttgt

SEQ ID NO: 237494 - DNA, 201 bp, Homo sapiens
ttgcttgttttgaatagccaaacttctttttcattaatttacctttggtaattacatatattttattgacaggtaatttattcttattctgtcaattcatrtacaattgaatacttatattttaatgtacaaccacagttttataattacattagaaatacatctgaattttatgtatatcatgtaaagcattaactggta

SEQ ID NO: 237495 - DNA, 201 bp, Homo sapiens
catggtgtatatgtgccacattttcttaatccagtctatcattggtgggcatttgggttggttccaagtctttgctattgtgaatagtaaacatacatgcscatgtgtttttctagcagcatgatttataatcctttgggtatatacccagtaatgggattgctgggtcaaatggtatttctagttctggatccttgagga

SEQ ID NO: 237496 - DNA, 201 bp, Homo sapiens
taatatcctaaagtggtgttactatattggttaggttgactgattcatacatgtaagtcttttaacactcctggagtaagagtagcaagaaactgaagctrtgatccttttaagggtttaagtaggtgaatacctcacttttgtctcttccattactagtgttttcatgaccaagttttttacatcagatttattattttg

SEQ ID NO: 237497 - DNA, 201 bp, Homo sapiens
ttttggtttttagaaaaataatagagagaagttactatatattttataaaagctccagtggggcctgatgcagcaccagataatcaaacacatagtatttytgcagcaaaacatttgaagattcacatttaaaggaataagcagtttagaccaggttttgctgccagattgtctttggtaccctcttacagaaactttcca

SEQ ID NO: 237498 - DNA, 201 bp, Homo sapiens
agcgtagtttgggaagaaagaaccttcaaatttgaaagtagaggctttttgaccaggaatattaaatttctttactaagaagctagatttatttaagcaakaaaaggaatttttcatagctttttgagtgggtcatgtggcagttaagtattctggtgattttatttccagatattacaaaactcaaattgaaagtaatgg

SEQ ID NO: 237499 - DNA, 201 bp, Homo sapiens
tttgagtgggtcatgtggcagttaagtattctggtgattttatttccagatattacaaaactcaaattgaaagtaatggcaagcaaaatatttttgaaacrtggcaaaccccctcccttacccccaggcaaagccttgattatttttttagatattttattttcaaggttgaatttcagaattaattagatgggaattttt

SEQ ID NO: 237500 - DNA, 201 bp, Homo sapiens
gcagctgcaccattttacatttccattaatagtgaacagggtttcactttctccacatccttactgacagtggttattttgtctggattaatgtagctttstgtaccaatttctaagcccagaaatatttttctcaccaaaagttgttacttttttttttaaatctctgtgacctgttatgaagaaaacagtattcaaatt

SEQ ID NO: 237501 - DNA, 201 bp, Homo sapiens
taatggaattttatttaagccattctaattcattattttacatttgtagtgatgtgagtgttctattttctgaagacaaaatactatcctgaatgatgacycatatatgaataaatttcttctcatagtgaaatcagccaatttgaatttttgtatttaagcaggcttacataaagtaaaaggtgtctgtaatatgtttga

SEQ ID NO: 237502 - DNA, 201 bp, Homo sapiens
tttcaagtgccttgttgttgagggttccctatgcagaaatatcacattctccaaaagattacccctgaatagacgaataaatttttgttttatttgttgaycgttttgaaccaacatgatgttgtaaaatgtggtttgttcagagcacaaaggaatcagtcggtgaattaatgtagtttgaattattttaattaagaaaca

SEQ ID NO: 237503 - DNA, 201 bp, Homo sapiens
ctggcattacaggtgtgagccaccaagtccagctaaaacttactcctttcgaacattaaaaatacttatttttaattttttatgttagtaaatgttatatwcatttctatcttataattcatattctatttaatatgatgaataacatgtttaatatatgaataacaattttaactttttcattgactcagggttattaat

SEQ ID NO: 237504 - DNA, 201 bp, Homo sapiens
ttgtagagacggggtctcactatatttcccaggctggtctcaaactctcgggcttaaacgatcctctgacctcagcctcccaaagtgttgggattacaggygtgagtgaccatgcccagcctctcattgtagtgttgatttgcattatctaatgactgatgatgttgagtgccttttcctatgcctgtttgccatttgtat

SEQ ID NO: 237505 - DNA, 201 bp, Homo sapiens
atattttctgagtttaagcttttaagatcttttatagcttaaaagctgttctccctaccctccatacccatgtaacaaccagtttcactttcttttatcakttaaaatttttccccagcaatgaatgttagttatttggactaagtgggaagtattatatggtctgttgtgacatatattattcttaaagtgtaacttttg

SEQ ID NO: 237506 - DNA, 201 bp, Homo sapiens
ccatttttgtctgttgatcctctctctcttcctttggggtaaaaattgtggcttgtgatggtggtttgtggggaaagaaaaagttggtaagctacaagctmtgagcctttaatgtgtttttgttaaccatgcagacagacattagatacatagatacaacatagatgagttaaatttgaaagaaggcaccaaactttgtta

SEQ ID NO: 237507 - DNA, 201 bp, Homo sapiens
aggcatgagccactatgcctgtccactttattattttaaatcccctcattggattcttactgttgctgcttttcccttttggaaatataatagccttgacrtcctgtgaacctattttttaataagttgatttaagggcctcctgaatcatctctaccaagtatctgtgcatctttttagttgttcaggataatgtttctc

SEQ ID NO: 237508 - DNA, 201 bp, Homo sapiens
ggggagcgcagatcggcgcccagcaatcacagaagccgacaaggcgttcaagcgaaaacatgaccgctgagcccatgaggtaaaacgcaaccccgtctcaygggccccagcggtctgggcccaggcaccgtctgagtcgggtgtttgggaaggcgttcgcttggtgggttaggcctgtgtgttgcttagccgaaagaggca

SEQ ID NO: 237509 - DNA, 201 bp, Homo sapiens
acaagttcttaactccttttggttctgtttctctggaaaaccctgactaatacaaacgtcatttcacattaagagtgtaaaggcaagccacaaagttggaraagctatttccaatatatagatataaaaaggtctcatccaggatatataaataactcttaaaaatcaattggataaactagacaacccaatagaaaaatg

SEQ ID NO: 237510 - DNA, 201 bp, Homo sapiens
cagcagctacagtgacgactaagactccagtgcatttctatcgtaaccgggcgcgggggagcgcagatcggcgcccagcaatcacagaagccgacaaggcrttcaagcgaaaacatgaccgctgagcccatgaggtaaaacgcaaccccgtctcatgggccccagcggtctgggcccaggcaccgtctgagtcgggtgttt

SEQ ID NO: 237511 - DNA, 201 bp, Homo sapiens
tgtagtgctaggccaatacaagcaactatcttttttgtaagccactagttctgattgcatattcaggttatttcttcagtgtaaatttctgcttctacctrttgcaacttgaacttatttccttgggtagagctcttagttgaaatttgtgtttctccatcttcaaaatcatttttcggtttatgtagtgtgacttctacc

SEQ ID NO: 237512 - DNA, 201 bp, Homo sapiens
tgatagaaattgaagatgcttcacccaccaagtgtccaataacaaccaagttggttttagatgaagatgaagaaaccaaagaacctttagtgcaggttcayagaaatatggttatcaaattgaaaccccatcaagtagatggtaagaaactattagatgattcaataatttttagttaaatttttaccaatatttgggtgt

SEQ ID NO: 237513 - DNA, 201 bp, Homo sapiens
cttacctttttatgcaagtatccatctcaaattctttttttcttggatgtgtatgcctttttttctaattgaaaaaaaaatcataaataaaatgactttcwtaagcattaatgaatttttaacaaggaaattctgggttttctatatcagtgaagatataggtaagaaacatggaaaagcatcttttttttaactaatgta

SEQ ID NO: 237514 - DNA, 201 bp, Homo sapiens
tactagtctattcagagattcagttttttcctggttcagtcttggagggtgtgtttgtccaggaaattgtctgtttcttctggattttctagtttatatgmgcagaggtatttatattattctctgacggttgtttgcatttctgtggggtcagtggggatgtcccccttatttctgattttattttttatttgattttta

SEQ ID NO: 237515 - DNA, 201 bp, Homo sapiens
taaataaaatgactttcttaagcattaatgaatttttaacaaggaaattctgggttttctatatcagtgaagatataggtaagaaacatggaaaagcatcytttttttaactaatgtactaaatttaaagagcttgctggaaagacataagtaaatctcagttttgttaactgttttattttaaggctctggggcatgata

SEQ ID NO: 237516 - DNA, 201 bp, Homo sapiens
tttatttgatcattatcaagttgttgataaggagaaaaacgtggccatttacagatataacttaaaacatgcctcatgagcgaaatgtaagtttaatcatrttcttttgacagttttaaggattctaatcaaggaaacccttttaagaaattctcatgtagatgaaataggctttaaaaatacctgtgctcatcactatct

SEQ ID NO: 237517 - DNA, 201 bp, Homo sapiens
tagatgaaataggctttaaaaatacctgtgctcatcactatctatttgaatgaaatctgtggttaatttatttataatgtaatgactccttgattaagaaragtatataatgtattttgctatacaaatagaatatatataacccacttttaaatgatgagcaaggtggaaaatctgttcttaccagtaagcagagcgata

SEQ ID NO: 237518 - DNA, 201 bp, Homo sapiens
aagcctgaactggcctttcacaagtttgtcttgagacttgtcattgtttcagtttttatgttttcttttattaaattaacatgcttgttttaaaaagttcraaaagtacaaaagtacttttaggttcagtggctcatgcctgaaatcccagcactttgggaagccgaggcaggtggatcacttgaggtcaggagttcgaga

SEQ ID NO: 237519 - DNA, 201 bp, Homo sapiens
gacagaagtaaaattagagattatccatagaacattttaatcttgtaatttatttggtgtgttgtagaacacctgacttttctcattgtatttggtaaatrtgttaaaaatgttaagtcagtgttatctggttttattttatctcttgagtcatgtttggcatgtatgtgttgggggggtgggcataggagttacacattt

SEQ ID NO: 237520 - DNA, 201 bp, Homo sapiens
tcatatttaagacactattgaggttttatttttgttgagaaagtctgggtaattgtcattgtcaaagtgatagtaatctttagaatccttggctttgcctyttttttaaagataatgaggtagttaatacatagcaaaataactgccatcacaaatctaaggcctaataataagtttatctctttcccacgattaaatagg

SEQ ID NO: 237521 - DNA, 201 bp, Homo sapiens
actgaacatagtactcagtagttagtttttcagtctttgccccctttctctctccccactctagtagtcctccgtgtctgtcgctctcctctttatatccrtgtgtacccagtgtttagctcttacttatatgtaagaacacgccgtatttggttttctgtttctgtgttaattcacttagtatataatggcctccagctg

SEQ ID NO: 237522 - DNA, 201 bp, Homo sapiens
ctagtatcattgtagcagattttttccacaagatttccttgaaactgtttaatacaacagtttcaggtgcttagtgtacttatttgttcatgaaaaaaatkaagaaaaaaaagaaattaaagcttctaacatgaagggtaacatttgtcattgccatattttatcatttagtgacatttaaaaaaaatttttggccgggca

SEQ ID NO: 237523 - DNA, 201 bp, Homo sapiens
ttgtctgcctttggtatcagggtgatgcttacctcacaaaaagagtttggaagtatttcctgtaattctgttttttggaagagtttaagaattggtattcrtggttttttgaatgtttggtagaattcagttttgaagctatctggttctgggtgatttttgttgggaggtttttttttattactacttatttctttttct

SEQ ID NO: 237524 - DNA, 201 bp, Homo sapiens
tagcagattttttccacaagatttccttgaaactgtttaatacaacagtttcaggtgcttagtgtacttatttgttcatgaaaaaaatgaagaaaaaaaaraaattaaagcttctaacatgaagggtaacatttgtcattgccatattttatcatttagtgacatttaaaaaaaatttttggccgggcatggtggtgcact

SEQ ID NO: 237525 - DNA, 201 bp, Homo sapiens
gtgtttgtttcattgatcttttctacttttctacttttaaactttttgatgtgttgttgaattaggttagtattttattgagggttttaatatctatgttsatcagtgatattggcctatggttttcttttctttcagcatctttgtctgcctttggtatcagggtgatgcttacctcacaaaaagagtttggaagtattt

SEQ ID NO: 237526 - DNA, 201 bp, Homo sapiens
agatcttttatagcttaaaagctgttctccctaccctccatacccatgtaacaaccagtttcactttcttttatcagttaaaatttttccccagcaatgartgttagttatttggactaagtgggaagtattatatggtctgttgtgacatatattattcttaaagtgtaacttttgaaatttgtcttttcatgtatatat

SEQ ID NO: 237527 - DNA, 201 bp, Homo sapiens
agccaatgtctagaagggtttttccaatctcatcttctagaatttttatagtttcaggtcttaggtttaagtccttaatccatcatgaggtgatttttgtrtaagatgagagacgaagatgcagtttaattctcctacatgtgggtagccaattatcccagcaccatttgttgaaaagggtgtcttttccccactttatgt

SEQ ID NO: 237528 - DNA, 201 bp, Homo sapiens
gtaggtgatagaaattgaagatgcttcacccaccaagtgtccaataacaaccaagttggttttagatgaagatgaagaaaccaaagaacctttagtgcagkttcatagaaatatggttatcaaattgaaaccccatcaagtagatggtaagaaactattagatgattcaataatttttagttaaatttttaccaatatttg

SEQ ID NO: 237529 - DNA, 201 bp, Homo sapiens
gatgggagaaggagaggtttgctgaatccatggcaggacagtttgctgaggctaaaggtagttgatgtgaacctagggaaatgacttgtgaattaccctcrttttcgtatgtctgtggtgacactaaagaagggaacatgagattattcagcaagtaactaattgaaatttcctgttataatctctcactttttttctttt

SEQ ID NO: 237530 - DNA, 201 bp, Homo sapiens
aaaacgatattccaagagaatttataagcttctctacactgccaaaagtgtttatgtcacaagtaagattaaaactcctaatctagaaacttggttgatayagacaatttttgtgtctttaaccatatttcttttgatcaggtgtgggcaataatagtgaaggtggaagaggaaaggcaggtgcaaagcttttccaagatt

SEQ ID NO: 237531 - DNA, 201 bp, Homo sapiens; identical to SEQ ID NO: 45954

SEQ ID NO: 237532 - DNA, 201 bp, Homo sapiens; identical to SEQ ID NO: 45955

SEQ ID NO: 237533 - DNA, 201 bp, Homo sapiens; identical to SEQ ID NO: 45956

SEQ ID NO: 237534 - DNA, 201 bp, Homo sapiens; identical to SEQ ID NO: 45957

SEQ ID NO: 237535 - DNA, 201 bp, Homo sapiens
gagtgccactgcactccagtatgagtaatagagtgagaccccatctcaaaaataataattataataatttatcctctacagaatactaattgagatgtgarggtaattttgctgggacttctgttaattatttgatcagcagagttgattcaatagcagtgtcatgtgcctgtagtcccagctactcagaaggctaagaca

SEQ ID NO: 237536 - DNA, 201 bp, Homo sapiens
attatacttccttttgaagaagaaatgattttttttaatgttaaaaacttcttctcgcctctacttttttttaagaaatagagtgccactgcactccagtmtgagtaatagagtgagaccccatctcaaaaataataattataataatttatcctctacagaatactaattgagatgtgagggtaattttgctgggacttc

SEQ ID NO: 237537 - DNA, 201 bp, Homo sapiens
ctttgcttccaaactattttagcttataaaggaaagatataggctttatttttatttattcatctatttatttattatttatttatttatttatttatttwtgagatggagttttgctcttgttgcccagactggagtgcaatggcgcaatctcggctcactgcaacctctgcctcccgggttcaagcgattctcctgcct

SEQ ID NO: 237538 - DNA, 201 bp, Homo sapiens
ctggagtgcagtagcataatcatagctcactgcaacctccgcccctaggctcaagctgtcctcacacctcaacttccctagtagctgggactacaggcatstgccaccatgcccagcttatattttgtactttttgtagagatggggttttgtcactttgcccaggctggcctcaaacccctggactcaagtgatcttccc

SEQ ID NO: 237539 - DNA, 201 bp, Homo sapiens
aatggcgtgaacccgggaggcagagcttgcagtgagccgagatcgccccactgcactccagccagcctgggcgacagagtcattccatgtcaaaaaaaaawatatatatatatatatgtacatatatatgtacacatacatacacacacacctactatgtacccacaaaaatttaaatttaaatttaaaaaagaatgaggc

SEQ ID NO: 237540 - DNA, 201 bp, Homo sapiens
tctgttattaaactcctttactattttaaaattaatatatgctcattatagaaaatgtaaaaaaacaggagcatgaaacattccaccactgaaaaactaaytatttttaaattgtaatatatttctttccacttataaaaaccttaaaaactgtatatataaaattttgacacttcacaccccctttttaaactggagtta

SEQ ID NO: 237541 - DNA, 201 bp, Homo sapiens
gagcccagcctgaacaacatagccagactcatctctacccaccccagatagatagatagatagatagatagatagatagatagatagatagatagatgagggaactgacagtaagcaagagggtggttgggggcttgctcatagaagcacagctctaagaaactgagctgggatcccacactggtctgtctagttccaaag

SEQ ID NO: 237542 - DNA, 201 bp, Homo sapiens
agagtgatctcttaatcacttttcctcttacttataggataagtaggttattttacccctttactatttttttctttaaatgtcatatctgttattaaackcctttactattttaaaattaatatatgctcattatagaaaatgtaaaaaaacaggagcatgaaacattccaccactgaaaaactaattatttttaaattg

SEQ ID NO: 237543 - DNA, 201 bp, Homo sapiens
caaggtgggcggatcacgaggtcggagttcgagaccagcctggccaagatggtgaaaccccgtctctactaaaaatacaaaaattagccggcgtggtggcrcgcgcctgtcatcccagctactcaggaggctgaggcagaataatcacttgaacccgggaggcggaggttgcagtgagccgagaacgtgccactggactcc

SEQ ID NO: 237544 - DNA, 201 bp, Homo sapiens
tatctgcaaaaaattctatgtcttaactaaacagatgcacattttcatattcctgttatctaatcaagacaagaacagtttgaccatgaatattttattayttttttgtttcctagtgttttgtgcttgctatgacatctggtcaaatgtggaaccatataagaggaccaccatatgcccataagaatccccacacgggac

SEQ ID NO: 237545 - DNA, 201 bp, Homo sapiens
gttaccttaggaatggtgcttttatgtgaagctgctacctctgacatggatattggaaagcgaaagagtaagtcaccttactcaaaatgtaacagtgctgyctgtactatggaaaaagagtgatctcttaatcacttttcctcttacttataggataagtaggttattttacccctttactatttttttctttaaatgtca

SEQ ID NO: 237546 - DNA, 201 bp, Homo sapiens
caaattatgctggtccccttatgttgggattgcttttggctgttattggtggacttgtgtatcttcgaagaagtaatatggaatttctctttaataaaacwggatgggcttttgcagctttggtgagtgaatttcagaagacaaaaaattatttgaataaaattcctaatagtgtatttttaggtaagcttttatttatgt

SEQ ID NO: 237547 - DNA, 201 bp, Homo sapiens
ctatataaaaataggtaaaatatagtgaaagtggaatatatttttttcagtggctataagacattaaatgggattgctcttatgtaagatctagagtagcraactaaaagttaaacttgagctaaccataaaatgtagttatcaatgctaacctactagaatatggaaattgagtagtatttaaataacatacatttttat

SEQ ID NO: 237548 - DNA, 201 bp, Homo sapiens
gaatagagaaatgtggtgctcatcagtaaacatttatggaccttcttagaatagactatttctgcatatagccaccattttgtattgcttttcactgctgytttagagcattattttattatcttggttcctccaaattgagaatatactctatttggagcttactcagctacataagattattttagtgctcataaatgt

SEQ ID NO: 237549 - DNA, 201 bp, Homo sapiens; identical to SEQ ID NO: 45958

SEQ ID NO: 237550 - DNA, 201 bp, Homo sapiens
agtgacagaattacaggcgtgagccactgagcccagccatttattctctgatatttatcgaatgcattctacatgccaggcactatagtttacactcattwtctataatacacacattaacattgcagagtaagtattaaccccttcgaaagataaggggactttaaagatgaggggactggccaggcatggtggctcatg

SEQ ID NO: 237551 - DNA, 201 bp, Homo sapiens
tgagaacatgccatatttgtctttctgtgcctggcttatttcacataataacttccagttccatccatattgctgcaagtaacatgatttcattctttttwatggtggagtagtattccattgtgtatacacaccacattttttttttctttgagatggagtctttctctgtcgcccaggctagagtgcagtggcacaatc

SEQ ID NO: 237552 - DNA, 201 bp, Homo sapiens
gccgccgccgccgccgccaggtagaccaggcctggctgggttaggccagaagggtgtccctggcgcaggtctcccgcggagggcagaactagaaccaggtycccggccgtttccgaccacacggatggggcggacccatgtgagccctcactaattgcaggggacgaagctgggcatatggggaaactgggggtttccagg

SEQ ID NO: 237553 - DNA, 201 bp, Homo sapiens
taaatcatgcagtttttgttagctggcattcttctatgaaaaaagcctggccagacacattggctcacacctgaaatctcagcactttgggaggccaaagygggcagatcacgagttcaggagatcaagaccatcctggctaacacagtgaaaccccatctctactaaaaatacaaaaaattagccaggcgtggtggcggg

SEQ ID NO: 237554 - DNA, 201 bp, Homo sapiens
acctcccgccccgcgagccctaactcagcgcaggaggaccggctgccgccgccgccgccgccaggtagaccaggcctggctgggttaggccagaagggtgwccctggcgcaggtctcccgcggagggcagaactagaaccaggttcccggccgtttccgaccacacggatggggcggacccatgtgagccctcactaattg

SEQ ID NO: 237555 - DNA, 201 bp, Homo sapiens
agcgggcagatcacgagttcaggagatcaagaccatcctggctaacacagtgaaaccccatctctactaaaaatacaaaaaattagccaggcgtggtggcrggtgcctgtagtcccagctactcgggaggctgaggcgagagaatggtgtgaacccaggaggcggagcttgcagtgagctgagattgcaccactgcactcc

SEQ ID NO: 237556 - DNA, 201 bp, Homo sapiens
gtggccatgtccgttacctttttgtgaattgcttactcaagtcctttgtggcatgtcaatctttctcttactaaagtgagttaatagattaaaacacttaraacagtgcctgacacacagtaaggttacatattgctaggggatattacttcgtatttatcctttgttaaaagtatccagagtgacttttaaactcagtgc

SEQ ID NO: 237557 - DNA, 201 bp, Homo sapiens
gccatgtccgttacctttttgtgaattgcttactcaagtcctttgtggcatgtcaatctttctcttactaaagtgagttaatagattaaaacacttagaayagtgcctgacacacagtaaggttacatattgctaggggatattacttcgtatttatcctttgttaaaagtatccagagtgacttttaaactcagtgccct

SEQ ID NO: 237558 - DNA, 201 bp, Homo sapiens
atttatcctttgttaaaagtatccagagtgacttttaaactcagtgccctggacacgtgttgctcttctgcagtcacagtggtgtggggacctgtgcctgyattccatgatgctgtctgccactgcccaaaatgtatgggtctacaagtcacacctcccttgtcattcactgggctctggttcagggtgatggcaaacgtg

SEQ ID NO: 237559 - DNA, 201 bp, Homo sapiens
tatcctttgttaaaagtatccagagtgacttttaaactcagtgccctggacacgtgttgctcttctgcagtcacagtggtgtggggacctgtgcctgtatyccatgatgctgtctgccactgcccaaaatgtatgggtctacaagtcacacctcccttgtcattcactgggctctggttcagggtgatggcaaacgtggga

SEQ ID NO: 237560 - DNA, 201 bp, Homo sapiens
ctgcccagcctgcccgggattgcccacctgttcccagccagaccctctcacctgctctggtctctacagagccttggctgcccagttgccagtcctaccayggtcggaggtaaccttcctggctccagtcacatggccagataaggtggtgtgtgtgggcatgaattatgtggaccactgcaaagaacagaacgtgcccgt

SEQ ID NO: 237561 - DNA, 201 bp, Homo sapiens
cctcctgtatggccaaatcccctgcccccataggccacagatgccatggcccacgtggccggcttcactgtggctcatgacgtgagtgctcgtgactggcwaacaagacgcaatgggaaacagtggctgctgggaaaaaccttcgacaccttctgccctctgggccctgccttggtgaccaaggacagtgtagcaggtagg

SEQ ID NO: 237562 - DNA, 201 bp, Homo sapiens
ggccaaatcccctgcccccataggccacagatgccatggcccacgtggccggcttcactgtggctcatgacgtgagtgctcgtgactggctaacaagacgyaatgggaaacagtggctgctgggaaaaaccttcgacaccttctgccctctgggccctgccttggtgaccaaggacagtgtagcaggtaggtccctggtcc

SEQ ID NO: 237563 - DNA, 201 bp, Homo sapiens
acctgacgtcatccctttgagtctcagtgtcctcttctgtaaagtgagggcgctttacctgaggggattgctgtaaggttggaatgaacctgcatgtgtgwgtcatgtgggaagggaacagtcaatggggcctggagttctcttggagagctggtaaccagcctcgtccctgaggcaatagccagagagcgcctgtagttt

SEQ ID NO: 237564 - DNA, 201 bp, Homo sapiens
cagagggcagagcgcagcctcttaacacacagccacccacaactgtggtggaggtggggggtgtccacatgggccagccatgccaggataccaaagacccyagtgcctcacagcacccacacagagtcctcggcaaagttaaattgtgtttcagctgctctacttaagggtggtagaacactaagaccaacaccaacagtt

SEQ ID NO: 237565 - DNA, 201 bp, Homo sapiens
cctgtatggccaaatcccctgcccccataggccacagatgccatggcccacgtggccggcttcactgtggctcatgacgtgagtgctcgtgactggctaayaagacgcaatgggaaacagtggctgctgggaaaaaccttcgacaccttctgccctctgggccctgccttggtgaccaaggacagtgtagcaggtaggtcc

SEQ ID NO: 237566 - DNA, 201 bp, Homo sapiens
agtggctgctgggaaaaaccttcgacaccttctgccctctgggccctgccttggtgaccaaggacagtgtagcaggtaggtccctggtccctgccccctgrtacctaccattgcacagatgaacagccctccagggaggagcatgggttcaggtacatgtggcacctgccctccctggctgccctttgactgctgactcca

SEQ ID NO: 237567 - DNA, 201 bp, Homo sapiens
tctgtaaagtgagggcgctttacctgaggggattgctgtaaggttggaatgaacctgcatgtgtgtgtcatgtgggaagggaacagtcaatggggcctggrgttctcttggagagctggtaaccagcctcgtccctgaggcaatagccagagagcgcctgtagtttccccacgcatggctgtttgcagggcctctggagga

SEQ ID NO: 237568 - DNA, 201 bp, Homo sapiens
ttggaatgaacctgcatgtgtgtgtcatgtgggaagggaacagtcaatggggcctggagttctcttggagagctggtaaccagcctcgtccctgaggcaayagccagagagcgcctgtagtttccccacgcatggctgtttgcagggcctctggaggatctcctgtgggaggtccctacttctcactacaatctttagggc

SEQ ID NO: 237569 - DNA, 201 bp, Homo sapiens
ccagccagaccctctcacctgctctggtctctacagagccttggctgcccagttgccagtcctaccatggtcggaggtaaccttcctggctccagtcacayggccagataaggtggtgtgtgtgggcatgaattatgtggaccactgcaaagaacagaacgtgcccgtgcccaaggagcccatcatcttcagcaagtttgc

SEQ ID NO: 237570 - DNA, 201 bp, Homo sapiens
agccagaccctctcacctgctctggtctctacagagccttggctgcccagttgccagtcctaccatggtcggaggtaaccttcctggctccagtcacatgrccagataaggtggtgtgtgtgggcatgaattatgtggaccactgcaaagaacagaacgtgcccgtgcccaaggagcccatcatcttcagcaagtttgcca

SEQ ID NO: 237571 - DNA, 201 bp, Homo sapiens; identical to SEQ ID NO: 45973

SEQ ID NO: 237572 - DNA, 201 bp, Homo sapiens
tattctccctgacatatttaggttaccttggagttttgtgatgtacagggtagtttatattcctgagtaccttactgctggatacttgtttccagtttttkgtttctataaataaatgtcgcaatgaacatccttatgtagaaaagactttgcatgtccattaatatattattatttccttttttttttttttttttgaga

SEQ ID NO: 237573 - DNA, 201 bp, Homo sapiens
taaaagccctgctctgacagcaaaggacaatagtcagtggttttcacactgactctgatggttgatagagctaggaaatagatttcaaaaagcaaaacctktagctgctgcaggatctgcccagcctgcccgggattgcccacctgttcccagccagaccctctcacctgctctggtctctacagagccttggctgcccag

SEQ ID NO: 237574 - DNA, 201 bp, Homo sapiens
cttaacacacagccacccacaactgtggtggaggtggggggtgtccacatgggccagccatgccaggataccaaagaccctagtgcctcacagcacccacrcagagtcctcggcaaagttaaattgtgtttcagctgctctacttaagggtggtagaacactaagaccaacaccaacagttaaaagtgctggttagccagg

SEQ ID NO: 237575 - DNA, 201 bp, Homo sapiens
agccagtgtgactcacccagccactgtggaaacaacagcattgaccacacacagtgaggggacagcgccaggttggaggcagtgtgccagagggcagagcrcagcctcttaacacacagccacccacaactgtggtggaggtggggggtgtccacatgggccagccatgccaggataccaaagaccctagtgcctcacagc

SEQ ID NO: 237576 - DNA, 201 bp, Homo sapiens
tttacatggacatgagttacctaagggggagaggaaatcaatactggataaataaaagccctgctctgacagcaaaggacaatagtcagtggttttcacamtgactctgatggttgatagagctaggaaatagatttcaaaaagcaaaacctgtagctgctgcaggatctgcccagcctgcccgggattgcccacctgttc

SEQ ID NO: 237577 - DNA, 201 bp, Homo sapiens
tttgtatcttttacatggacatgagttacctaagggggagaggaaatcaatactggataaataaaagccctgctctgacagcaaaggacaatagtcagtgrttttcacactgactctgatggttgatagagctaggaaatagatttcaaaaagcaaaacctgtagctgctgcaggatctgcccagcctgcccgggattgcc

SEQ ID NO: 237578 - DNA, 201 bp, Homo sapiens
tttatattcctgagtaccttactgctggatacttgtttccagtttttggtttctataaataaatgtcgcaatgaacatccttatgtagaaaagactttgcrtgtccattaatatattattatttccttttttttttttttttttgagacagagtctttctctgttgccaggctggagtgcagtggtacaatcttggttcac

SEQ ID NO: 237579 - DNA, 201 bp, Homo sapiens
gccaccacgcccacctaatttttgtatttttagtagagatggggttttaccatgttggccaggatggtctcagtctcttggccttgtgatctgcctgcctsagcctcccaaagtgctgggattacaggtgtgagtcaccacacccggccttattatttcctttgaatgaactcttaggatttgaatattatcaaactacag

SEQ ID NO: 237580 - DNA, 201 bp, Homo sapiens
tggggggtgtccacatgggccagccatgccaggataccaaagaccctagtgcctcacagcacccacacagagtcctcggcaaagttaaattgtgtttcagstgctctacttaagggtggtagaacactaagaccaacaccaacagttaaaagtgctggttagccaggatgttcttacagtaatccatcccctgccagcggc

SEQ ID NO: 237581 - DNA, 201 bp, Homo sapiens
tctcagtctcttggccttgtgatctgcctgcctcagcctcccaaagtgctgggattacaggtgtgagtcaccacacccggccttattatttcctttgaatraactcttaggatttgaatattatcaaactacaggcagtatttcaaaacccttgagaaaatctcccaattgtcctttaagcaaattgtaagagcaacttac

SEQ ID NO: 237582 - DNA, 201 bp, Homo sapiens
aatactggataaataaaagccctgctctgacagcaaaggacaatagtcagtggttttcacactgactctgatggttgatagagctaggaaatagatttcaraaagcaaaacctgtagctgctgcaggatctgcccagcctgcccgggattgcccacctgttcccagccagaccctctcacctgctctggtctctacagagc

SEQ ID NO: 237583 - DNA, 201 bp, Homo sapiens
cactaagaccaacaccaacagttaaaagtgctggttagccaggatgttcttacagtaatccatcccctgccagcggctgatacacgaggcttctctgtccyggctagaaccactgcctcactgctttatagattctgagtctttttttttttttttttggcatggtcttactgtgtcacccaggctagagtgcagtggccc

SEQ ID NO: 237584 - DNA, 201 bp, Homo sapiens
ttagtgtatatacccttactaacactggttacttttcctcgcaaatttttattttagaaatgtcttgggaattatagaaaagctgaaataatacagtgaaygctcatatacttttcacctggtttcactgtagacatttgctgtatttgctttctctcccttgccctctccctgcccttcacatggcaaacacacattttt

SEQ ID NO: 237585 - DNA, 201 bp, Homo sapiens
caccaacagttaaaagtgctggttagccaggatgttcttacagtaatccatcccctgccagcggctgatacacgaggcttctctgtcccggctagaaccaytgcctcactgctttatagattctgagtctttttttttttttttttggcatggtcttactgtgtcacccaggctagagtgcagtggcccaatcccagctca

SEQ ID NO: 237586 - DNA, 201 bp, Homo sapiens
cttgccctctccctgcccttcacatggcaaacacacattttttttttggcaggggttggggtgacacattgcaaatattgtcataaaactgaaatagacaytttataaggacaatggcttgcatgaccataccattatcacagccaagaaaattaacttgaatgatatttaatatgaaatccagttgccccaaagatgact

SEQ ID NO: 237587 - DNA, 201 bp, Homo sapiens
aggcttctctgtcccggctagaaccactgcctcactgctttatagattctgagtctttttttttttttttttggcatggtcttactgtgtcacccaggctrgagtgcagtggcccaatcccagctcactgaagcctcaacctcctgggttcaagcggtcctcccacctcagcctcctgagtagctgggactacaggcacgc

SEQ ID NO: 237588 - DNA, 201 bp, Homo sapiens
gcccttcacatggcaaacacacattttttttttggcaggggttggggtgacacattgcaaatattgtcataaaactgaaatagacactttataaggacaayggcttgcatgaccataccattatcacagccaagaaaattaacttgaatgatatttaatatgaaatccagttgccccaaagatgacttttaatttggttac

SEQ ID NO: 237589 - DNA, 201 bp, Homo sapiens
ttttttttttttttggcatggtcttactgtgtcacccaggctagagtgcagtggcccaatcccagctcactgaagcctcaacctcctgggttcaagcggtyctcccacctcagcctcctgagtagctgggactacaggcacgcaccaccacgcctgactaatgtttttattattttgcatagagacaagcactcactgtgt

SEQ ID NO: 237590 - DNA, 201 bp, Homo sapiens
tttggttactttgttgctctgtgatcaaccaagggcacacactgtattcagttatatctctttagtagttttaactagaacagggttccatagactttttmttaaagggctgtattagtctgttttcttgctgctaataaagacatatccgagactgggcaatttacaaaagaaaaaggtttaattggacttacagttcca

SEQ ID NO: 237591 - DNA, 201 bp, Homo sapiens
cctcacaatcatggcagaaggcaaggaggagcaagtcacatcttaggtggatagcagcaggcagaaaagagcttgtgcagagaaactcccgtttttaaaaytatcagatctcgtgagacccattcactatcatgagaacagcacgggaaagacctgcccccatgattcagtcatctcccaccgggtccctcccatagcaca

SEQ ID NO: 237592 - DNA, 201 bp, Homo sapiens; identical to SEQ ID NO: 45964

SEQ ID NO: 237593 - DNA, 201 bp, Homo sapiens
cagtggctgctgggaaaaaccttcgacaccttctgccctctgggccctgccttggtgaccaaggacagtgtagcaggtaggtccctggtccctgccccctkgtacctaccattgcacagatgaacagccctccagggaggagcatgggttcaggtacatgtggcacctgccctccctggctgccctttgactgctgactcc

SEQ ID NO: 237594 - DNA, 201 bp, Homo sapiens; identical to SEQ ID NO: 45966

SEQ ID NO: 237595 - DNA, 201 bp, Homo sapiens
ctgtatggccaaatcccctgcccccataggccacagatgccatggcccacgtggccggcttcactgtggctcatgacgtgagtgctcgtgactggctaacragacgcaatgggaaacagtggctgctgggaaaaaccttcgacaccttctgccctctgggccctgccttggtgaccaaggacagtgtagcaggtaggtccc

SEQ ID NO: 237596 - DNA, 201 bp, Homo sapiens
tgcccccataggccacagatgccatggcccacgtggccggcttcactgtggctcatgacgtgagtgctcgtgactggctaacaagacgcaatgggaaacartggctgctgggaaaaaccttcgacaccttctgccctctgggccctgccttggtgaccaaggacagtgtagcaggtaggtccctggtccctgccccctggt

SEQ ID NO: 237597 - DNA, 201 bp, Homo sapiens
caagagtctggggctcagctgcctcaacatttttgggcatagaaggctgtacaatacaaactgcctttgttggaagagcaaggaaccattcagggaaggcmccatgtggtaaggaatagtggccagacttggattcagaacaaaacaagagaatagtgtttgtctttaagtggagccttggactcaaaacaggacctgagc

SEQ ID NO: 237598 - DNA, 201 bp, Homo sapiens
actggggggtttgagggggaaaagggataactccaaggttccatctttgcatttcagatccacacaacttaaagatctgctgccgagtgaatggggaagtsgtccagagcagcaacaccaaccagatggtattcaagacagaggacctgatagcctgggtctcccagtgagtgacaagggctgtcctgccagccccgctcc

SEQ ID NO: 237599 - DNA, 201 bp, Homo sapiens
ttgagggggaaaagggataactccaaggttccatctttgcatttcagatccacacaacttaaagatctgctgccgagtgaatggggaagtcgtccagagcrgcaacaccaaccagatggtattcaagacagaggacctgatagcctgggtctcccagtgagtgacaagggctgtcctgccagccccgctccacctgccaca

SEQ ID NO: 237600 - DNA, 201 bp, Homo sapiens
gctgccctggtccccctgcaccctccccgctctgggaaacagcaccagcaggtagctcttttgcaagggagcagagtaaccccacctttccttttctcccrttctcttaaaagatccttagaaatcttacataataacatcttcagttttcagaggagaaaacagagagctaggggaggtgattaacaatttgaaggccat

SEQ ID NO: 237601 - DNA, 201 bp, Homo sapiens
agtatagcaggtaaaatacaagcctggaccgcttcccgtgtggtatgcagggaacggttgatggggcaaagggccttgggctatagccctaggaatatcarggatgctgatgatggctctgagatcctccatctcctggatcctgtgtttttctctgcaggctctgatgctggtgtctggtagaagaagattactcacagc

SEQ ID NO: 237602 - DNA, 201 bp, Homo sapiens
gtggagcctggggcctgcagggctcggcgtctgctgcagaacctgggccatggaagatgcgccatgagtgcgctcaccacagggactgtgtctgcatggcycaggggccaggcctgtcccccagaaacctgccttgagacctctggccccttagacctcagtgtttgcatgcaaatgctgccgcaaagcagccccacctag

SEQ ID NO: 237603 - DNA, 201 bp, Homo sapiens; identical to SEQ ID NO: 45976

SEQ ID NO: 237604 - DNA, 201 bp, Homo sapiens
taaaactgaaatagacactttataaggacaatggcttgcatgaccataccattatcacagccaagaaaattaacttgaatgatatttaatatgaaatccarttgccccaaagatgacttttaatttggttactttgttgctctgtgatcaaccaagggcacacactgtattcagttatatctctttagtagttttaactag

SEQ ID NO: 237605 - DNA, 201 bp, Homo sapiens
gcagagaagtcaaaactctgttttctagtcaaactggcgggccacaacagtggtgacctaagtctaatgagtctttaactgaacaaggcagattgaatctycaagtgaggaccaagagtctggggctcagctgcctcaacatttttgggcatagaaggctgtacaatacaaactgcctttgttggaagagcaaggaaccat

SEQ ID NO: 237606 - DNA, 201 bp, Homo sapiens
gcagagcttgcagtgagccaagattgcgccactgcactccagcctgggcgacagagcgagactccatctcaaaaaaaaaaaaaaaaaaaagaattaaatcrgacattgtaggtagagcacttaatagttggcattcagcggcagcagttactgttatgttagcatgtggagtgtctgagtgtgtgcactttggctcgaaca

SEQ ID NO: 237607 - DNA, 201 bp, Homo sapiens; identical to SEQ ID NO: 45977

SEQ ID NO: 237608 - DNA, 201 bp, Homo sapiens
ctggagttctcttggagagctggtaaccagcctcgtccctgaggcaatagccagagagcgcctgtagtttccccacgcatggctgtttgcagggcctctgsaggatctcctgtgggaggtccctacttctcactacaatctttagggcctttggaggatttcctatggaaggtccccacttctcaccacaacattctgggt

SEQ ID NO: 237609 - DNA, 201 bp, Homo sapiens; identical to SEQ ID NO: 45978

SEQ ID NO: 237610 - DNA, 201 bp, Homo sapiens
cccattgcatctgactgggaggctcatgtcagtggtcccagaatttgaccacttggtttagctgacgttcactaggtccctccattgtgaagacgcatttycatttttgtaattaacaagcaatctatgtggtagtttgagatcacataactatcttattgccccatagattctcatccaaggatcctgtagtcatcctta

SEQ ID NO: 237611 - DNA, 201 bp, Homo sapiens
tttctgctgctatctcagagttgactgggagctggtgaggggagacaacattccaggcacagaacatccgaaggcccgagatgatgaagagcaaatatccsccctggggcctcagaggggtccagcttgctggagggagggcagagaggagagcagcctgccatgagtcccgaggcttccaactcaagacttgggtttggg

SEQ ID NO: 237612 - DNA, 201 bp, Homo sapiens
gagagaggtgtgggaaccaggatggaagagtcaggcctccagatagcgtttacttctcctttcttccttgaatcactgtctcagagataattaggttcagragaggaggaaaaaaaagatgacgtcaacatggagcagagtttttcttagaccttagcctagcaaggaaagagaaatgcctggtctcagtgctgggaagct

SEQ ID NO: 237613 - DNA, 201 bp, Homo sapiens
gaaggcttcctggaggaggtgatgtttctgctgctatctcagagttgactgggagctggtgaggggagacaacattccaggcacagaacatccgaaggccygagatgatgaagagcaaatatcccccctggggcctcagaggggtccagcttgctggagggagggcagagaggagagcagcctgccatgagtcccgaggct

SEQ ID NO: 237614 - DNA, 201 bp, Homo sapiens
ctcccttgtggacatgacagtctggggagatagaccgagaggaagcaattttgaatgagatgggtgtgaaggggccatgaatctgtgtcagagcagccagrcctaccagggaaggtcaaagaaggcttcctggaggaggtgatgtttctgctgctatctcagagttgactgggagctggtgaggggagacaacattccagg

SEQ ID NO: 237615 - DNA, 201 bp, Homo sapiens
ccaagctctaggtgaggccacggggactcagcagaaacaaggccgacctgggtcctcccttgtggacatgacagtctggggagatagaccgagaggaagcrattttgaatgagatgggtgtgaaggggccatgaatctgtgtcagagcagccagacctaccagggaaggtcaaagaaggcttcctggaggaggtgatgttt

SEQ ID NO: 237616 - DNA, 201 bp, Homo sapiens
taagtgacagcatcctctgttcactcgattggtcagttgtagcttcatccaggagatggtcatggggttcctgctgcataccaagctctaggtgaggccayggggactcagcagaaacaaggccgacctgggtcctcccttgtggacatgacagtctggggagatagaccgagaggaagcaattttgaatgagatgggtgt

SEQ ID NO: 237617 - DNA, 201 bp, Homo sapiens
atgggatgcagggctggcttccctgccaacgcctggcgctgatggattcttcccgcattgctggaaagggcagactgaggcgctgacaaaagaagagttgyagctggtcataagtgacagcatcctctgttcactcgattggtcagttgtagcttcatccaggagatggtcatggggttcctgctgcataccaagctctag

SEQ ID NO: 237618 - DNA, 201 bp, Homo sapiens
tgggatgagatggggacttgggagagatgcattatcagtcctgttctctcctggggccccaagccagaaagggtcagctcgagcaggcccagtggtgtccrctgggtgacactgctattctctcactgctgtgccttttaggctgcaggagcagtgcagactcctctgctgctccattctgtagccccaggatcacacttc

SEQ ID NO: 237619 - DNA, 201 bp, Homo sapiens
tgaatgagcagatgctgcctcgttgcagtctggtagtgtaattccaggctgcccatgtggacttcgacttctgcccctgcccagggcagagaccaccgtgytgctttatgcctcgctggtgagagggggtcataaacagtttgtgctccatgaaccgttcctgcccacctccaaggtcgtgtttctgctccctctcttctc

SEQ ID NO: 237620 - DNA, 201 bp, Homo sapiens
tgaaggaatgccgggcagtggtcattgcggggggtaccatgcagccggtaaggacacctttcccagcccctcgtgccccaggtgttgggatgagatggggrcttgggagagatgcattatcagtcctgttctctcctggggccccaagccagaaagggtcagctcgagcaggcccagtggtgtccactgggtgacactgct

SEQ ID NO: 237621 - DNA, 201 bp, Homo sapiens
acatgaatgagcagatgctgcctcgttgcagtctggtagtgtaattccaggctgcccatgtggacttcgacttctgcccctgcccagggcagagaccaccrtgttgctttatgcctcgctggtgagagggggtcataaacagtttgtgctccatgaaccgttcctgcccacctccaaggtcgtgtttctgctccctctctt

SEQ ID NO: 237622 - DNA, 201 bp, Homo sapiens
gtgggtggctgaggggttgctccatgggggctccctccctcccttccttccttagatggacgaggtgggtcgcatcctctgtaacctgtgcggtgtggttyctggaggggtggtctgtttcttcccctcctacgagtacctgcgccaggtccatgcccactgggagaagggtggcctgctgggccgtctggctgccaggaa

SEQ ID NO: 237623 - DNA, 201 bp, Homo sapiens
agtatacattgggggaggcagagctggaatcattggcatatgtggaatgaaattaatgcatgtattagcacataagggatgtgaatagcaatacttttcayaaacaaaaaaagcaggattattggttgtaaaatttatctaccatgttaatatgctgaataatcctgtacgttttctatccttgtgaatacttgggctggc

SEQ ID NO: 237624 - DNA, 201 bp, Homo sapiens
attaaaatcaactcataagttatgccttgattatattacagcaagatgacagtggttttataacattgcttacaacaatcgtaagattattgatcattcayaatttcaaggatcccagaaatgacactgacataaactgagggcaaagctgactgtaactaaaagattttagccaaatgtcaaagtcaaagataaatgtca

SEQ ID NO: 237625 - DNA, 201 bp, Homo sapiens
ggttgtcctagagattaaatggtgtttaatttaaagagaaagcactagcacttgtgcctcagacctggactcacctgggggaccccctttgctgggacgayagaagtgtctgttgggcttgcactcacctcccaccgatctgtttttccaggcagcctcagtgagagcaccctgaagtttttgctcctgaatccagctgtg

SEQ ID NO: 237626 - DNA, 201 bp, Homo sapiens
ccacgtcagcctcctgagcagctgggactacaggtgtgcgccatcacacctagctaattttttaatttgtagaaatgagatctcactatgctgctcaggcyggtggtcttagacccctaggctcaagcaatcctccctccttggcctcccatagtgctgagatgacaggcgtgagccactgtacctgaccccttttacctt

SEQ ID NO: 237627 - DNA, 201 bp, Homo sapiens
tggtgaaatcgcaaactgggcgtctgttccggcgccggacccctgtttgcaaaggtgggtggcccgtccggagcggaaaaacattccggaagtggagggcygggccagcgtgattgacaagcgggaacccctgtgtggggacggggcaggcctaggaaggttgtgcctgcggtggaacggcgcggtgcgcaggagtgggca

SEQ ID NO: 237628 - DNA, 201 bp, Homo sapiens
gcccagggcagagaccaccgtgttgctttatgcctcgctggtgagagggggtcataaacagtttgtgctccatgaaccgttcctgcccacctccaaggtcrtgtttctgctccctctcttctcccttagagcccatggggacaaggcagagaacttgagtggagatgaaggtggtgaatattagaggaacaaagtgctcct

SEQ ID NO: 237629 - DNA, 201 bp, Homo sapiens; identical to SEQ ID NO: 46109

SEQ ID NO: 237630 - DNA, 201 bp, Homo sapiens
ccttagagtgtaacccactaaggatgcctggtcactaggctctaaagtcacgtggaaccaggcttctctccgtgtgcttctgttgtcagtttcatagatarctaggctgtttttgtttcattttcttttcaattttagaatttgctttcttcttttctgacttgtagtttttaaatatgtaaatatttgtatggctcaaaa

SEQ ID NO: 237631 - DNA, 201 bp, Homo sapiens
gtggacttcgacttctgcccctgcccagggcagagaccaccgtgttgctttatgcctcgctggtgagagggggtcataaacagtttgtgctccatgaaccsttcctgcccacctccaaggtcgtgtttctgctccctctcttctcccttagagcccatggggacaaggcagagaacttgagtggagatgaaggtggtgaat

SEQ ID NO: 237632 - DNA, 201 bp, Homo sapiens
ggtgtgctcaataaaatcgagttgacatgaatgagcagatgctgcctcgttgcagtctggtagtgtaattccaggctgcccatgtggacttcgacttctgsccctgcccagggcagagaccaccgtgttgctttatgcctcgctggtgagagggggtcataaacagtttgtgctccatgaaccgttcctgcccacctccaa

SEQ ID NO: 237633 - DNA, 201 bp, Homo sapiens
ttatctgctctatcctataatatacttaaaagttttgaaatcatagtaccaatattacttctaacaatagatctgattgaaattgcctttcctctttgccyttagagtgtaacccactaaggatgcctggtcactaggctctaaagtcacgtggaaccaggcttctctccgtgtgcttctgttgtcagtttcatagatagc

SEQ ID NO: 237634 - DNA, 201 bp, Homo sapiens; identical to SEQ ID NO: 220486

SEQ ID NO: 237635 - DNA, 201 bp, Homo sapiens
tccctggctgggctcgagctgcttcagggcaggaaccacgtctttacagtttgatgttcccagagctgacccagtgtttggcataggggtgtgctcaatamaatcgagttgacatgaatgagcagatgctgcctcgttgcagtctggtagtgtaattccaggctgcccatgtggacttcgacttctgcccctgcccagggc

SEQ ID NO: 237636 - DNA, 201 bp, Homo sapiens
tgtctgcaccttatacacaaggaggctgcagccccacaaggagagactccttggctgaggccacaagcctcggcagtggagagctgggctagaactcagcyggcctggctctagatctcaggctctgaggcagctgactgcactgggtaacctttgaggtgccaaccgtcaaggcgtccttagcctgagctttccttctcc

SEQ ID NO: 237637 - DNA, 201 bp, Homo sapiens
tgggctgtgagtggttgaggcgtggatcctaggagtcgacctctctccagccaggcagccaggcctatgtgaatgggcgtggtgtgctttgtctctggcaygtggggaggtgggtactggtgctgagacttcttcctccctccccacctccactgcccctgtccagaggcaggaagaagaagaaacagagaatctcctccg

SEQ ID NO: 237638 - DNA, 201 bp, Homo sapiens
agcgaggctgggacctgcagggatgaggtcccgggaggggatgcggcagcccttgagtgctggttggggaaggagagctgcccccagtgaggaggcgccgrgctgagtggcccagactccttaggagaggcctggttttgggcttcctggtgattttccttcatgtctgcctcctgtaggcggagcaggccaggaggaagc

SEQ ID NO: 237639 - DNA, 201 bp, Homo sapiens
cgccttccacagtgagcagcgaggctgggacctgcagggatgaggtcccgggaggggatgcggcagcccttgagtgctggttggggaaggagagctgcccscagtgaggaggcgccgagctgagtggcccagactccttaggagaggcctggttttgggcttcctggtgattttccttcatgtctgcctcctgtaggcgga

SEQ ID NO: 237640 - DNA, 201 bp, Homo sapiens
tttgggaggagcgtgccgccttccacagtgagcagcgaggctgggacctgcagggatgaggtcccgggaggggatgcggcagcccttgagtgctggttggrgaaggagagctgcccccagtgaggaggcgccgagctgagtggcccagactccttaggagaggcctggttttgggcttcctggtgattttccttcatgtct

SEQ ID NO: 237641 - DNA, 201 bp, Homo sapiens; identical to SEQ ID NO: 46063

SEQ ID NO: 237642 - DNA, 201 bp, Homo sapiens
ctgttgtgcctaccatgcccttccccgccttggatgcacaggtgccccaccttagctgcccgagatgctgtttatccttgatagtcaccttttaagccttmtacaggtctatcaagttgagtcaccattaccacttggtgtgtgctgtgccttgtgtaacactgcagttccgggagtcctccaacctggaatgcatgcttt

SEQ ID NO: 237643 - DNA, 201 bp, Homo sapiens
actaaaataagtgtagtataatactgatgtttaaaaaataaaatgtaataccactttttaaatgtatccgatgaaatgtagacactgcagtgattttttttggccaccaccgttcctgtaaaacacacatgaacacttttttcaccagcaggaaattttatatcactcttgtttctttttggtcttatattttcattctac

SEQ ID NO: 237644 - DNA, 201 bp, Homo sapiens
agcctcttgctttttctctgacccacagtggacactggaggaaaccttcccttccttcccttttctcttagctcccaccagcctaagggctgtggaaaccmgtaccttttgtctgcacccagccccctctcctccctttggtggcttcctgtgtgtccagggctagcgtcttctaggtgaatctaagatgtcagtacctta

SEQ ID NO: 237645 - DNA, 201 bp, Homo sapiens
tctcttagctcccaccagcctaagggctgtggaaaccagtaccttttgtctgcacccagccccctctcctccctttggtggcttcctgtgtgtccagggcyagcgtcttctaggtgaatctaagatgtcagtaccttagccctcggctgcttgctcagagcctggtttgtgttctttccccagctctgccaggcccattcc

SEQ ID NO: 237646 - DNA, 201 bp, Homo sapiens
aatgcctgtttctccagagtggttacttttggatttttgccagtctagcaggtgaaagcctggagattgttattcagtagtttgggctggggcctggccaygtgtatttttgaaaattttcgctggtgattttgctgcatggccagggttgataatgactgtgccagatttgctggatttcctttgctattcctgcacata

SEQ ID NO: 237647 - DNA, 201 bp, Homo sapiens
taccattctgtatcccaccagtactgtctaggaatgcctgtttctccagagtggttacttttggatttttgccagtctagcaggtgaaagcctggagattsttattcagtagtttgggctggggcctggccacgtgtatttttgaaaattttcgctggtgattttgctgcatggccagggttgataatgactgtgccagat

SEQ ID NO: 237648 - DNA, 201 bp, Homo sapiens
tgtgaaatttcatgagaattgtaccattctgtatcccaccagtactgtctaggaatgcctgtttctccagagtggttacttttggatttttgccagtctarcaggtgaaagcctggagattgttattcagtagtttgggctggggcctggccacgtgtatttttgaaaattttcgctggtgattttgctgcatggccaggg

SEQ ID NO: 237649 - DNA, 201 bp, Homo sapiens
agatcatggttcactgcagcctcgaccttctggcatcaagtgatcttcccacgtcagcctcctgagcagctgggactacaggtgtgcgccatcacacctarctaattttttaatttgtagaaatgagatctcactatgctgctcaggctggtggtcttagacccctaggctcaagcaatcctccctccttggcctcccata

SEQ ID NO: 237650 - DNA, 201 bp, Homo sapiens
ttagctcccaccagcctaagggctgtggaaaccagtaccttttgtctgcacccagccccctctcctccctttggtggcttcctgtgtgtccagggctagcrtcttctaggtgaatctaagatgtcagtaccttagccctcggctgcttgctcagagcctggtttgtgttctttccccagctctgccaggcccattcccagc

SEQ ID NO: 237651 - DNA, 201 bp, Homo sapiens
acattctgagatgctgggggttaggatttcaacacaggaatttggaggaatacaattcaatcaggcttatggacaattctggtcttaagtcaagagtagtsttctccagtctgtatgtggaggcgcacacctatggtcccagccacttgggaggctgaggccagagaattgtgtgagcccaggaggagttccataccagcc

SEQ ID NO: 237652 - DNA, 201 bp, Homo sapiens; identical to SEQ ID NO: 220482

SEQ ID NO: 237653 - DNA, 201 bp, Homo sapiens
ctgtgccttgtgtaacactgcagttccgggagtcctccaacctggaatgcatgctttgcggggatctatgatgccctcgaattgtatgttacatgtgaacytgtgagcattttctaggggctctgcacctttgtgttctcagctctgagccccatgcttgctgcaaccagcaggtgttcagagtgaatgaatttgcttatc

SEQ ID NO: 237654 - DNA, 201 bp, Homo sapiens
gagacgtgggagaagaaagctgcaaaagtcattatgagcaacacccttgatcttaggggtgctggtctttgagaagagagctctaagccttttgtagaggyattagaaaggtatcggcgccacggtgaaatgcaggggagattgggtttaggggctttcctggtctgcattctgctacagccgttaaatgccgctagatgg

SEQ ID NO: 237655 - DNA, 201 bp, Homo sapiens
tggggcacccccttgctggaaggtgtctgtggaagtggaagctgcagaaagcctgtgggagctcctggcgggagctggtctcgtgttgctgctctgagccrccagctctgctttgcctcaggctcaccagtggcctgggtagctcctctgtgctccggtgccctgcataccttggtctggctgctgtgtcccggcctcctg

SEQ ID NO: 237656 - DNA, 201 bp, Homo sapiens
gaccatcctggctaacacggtgaaaccccgtctctaccaaaaaaaaaaaaaaaaaaaaattagccggccgtggtggcgggcgcctgtagtcccagctactygggaggctgaggcaggagaatggtgtgaacccgggaggcgagcttgcagtgagccgagatcgcgccactgcactccagcctgggtgacagagtgagactc

SEQ ID NO: 237657 - DNA, 201 bp, Homo sapiens
gaatccttgttgatagacgcataaactagagctcggagcaagggctgctcccagcacgggagcctgggatcttctgactccagctcccacgcctctttgcrtgaccctgtcacgtccccttcttttatgatggggcacccccttgctggaaggtgtctgtggaagtggaagctgcagaaagcctgtgggagctcctggcgg

SEQ ID NO: 237658 - DNA, 201 bp, Homo sapiens
gggtaaaataatgctagttctgtgagttctcttcttgtgcaaatccataaactgccaccaatctgtagtcattttaattgctcctaaaccgaagagcatcrtggcaactacctttcccctcgtagagtgacactatcactagtcttattgaggccaaagttataaagatgggctctcgatctactaatattagtaaaatgg

SEQ ID NO: 237659 - DNA, 201 bp, Homo sapiens
atacctctgtaaagacagagggtaaaataatgctagttctgtgagttctcttcttgtgcaaatccataaactgccaccaatctgtagtcattttaattgcycctaaaccgaagagcatcatggcaactacctttcccctcgtagagtgacactatcactagtcttattgaggccaaagttataaagatgggctctcgatct

SEQ ID NO: 237660 - DNA, 201 bp, Homo sapiens
ccttcttgtaataattcctctacctctgtagtcatgtttttcttttttcattttgtcttgtccccagaatgtctaacaaaacagccaaatatacctctgtraagacagagggtaaaataatgctagttctgtgagttctcttcttgtgcaaatccataaactgccaccaatctgtagtcattttaattgctcctaaaccga

SEQ ID NO: 237661 - DNA, 201 bp, Homo sapiens
gagctgccttgcagctctagtctgcttctgtttttggctttcccagatagtttcaattcttactctcagtttgtgaacctcccttcagtgaacctcccttyacttatgctggatatctcttgcgactggatgagcttcactaaagcacagtcatttggacctggattcgaatccctggttttccactttttagctgtgagt

SEQ ID NO: 237662 - DNA, 201 bp, Homo sapiens
tggaagcctctttagggaatcgaggagcgcactggtgcaggggctgggtggagccatcctccgatggagcacaggcagatggaagcccccaccccagctgygtggcctgaagccagcctcccgctccccgaaggtggtctccacacagaactgggacagttccatccccgccccttcctccagggcagcagggctgaggat

SEQ ID NO: 237663 - DNA, 201 bp, Homo sapiens
gctggtgtctcctgccccctccggaagcttggatgcccctccacaccctcttgatcttccctgtgatgtcacctggacccctgctgctggcattggccacraagcctcctggtctggctccaaagcctggcagggtcttttccccgggggagctgcaggcagggaacagtcctgatgggtcatccccttcactcccagccc

SEQ ID NO: 237664 - DNA, 201 bp, Homo sapiens
ctattacaggagccgccttgccatccctgcagcccaggtgagggccctgcagggccagaaagccgctcttggctctcactgtggtctaggccatgaggggsgtcctcatcacactgtagtttgggggatgccccccaccgtggtcaggttgatggcaccttaacccattctctcctgaggcgtgagttggaggaggcgcgt

SEQ ID NO: 237665 - DNA, 201 bp, Homo sapiens
gctgaaaggtccaggggctgatgaggccacgtgtaagcgaaagtttgggataagcagaaaccgagtgcgctgagggagtgagattgtggctgtatccggcrcctggctgagcaggagagtgaaccccgtgggtgtgtgtttgctggtgacgttcctggagctgtcttgaagtccgagctgccttgcagctctagtctgctt

SEQ ID NO: 237666 - DNA, 201 bp, Homo sapiens
tcctctatttatggaatgtatattccagtgaggaagaataaataggttcagatggtgctaagagctatgaataaattaaatacagagtaatgtgatttttwaaaagtgacttagagcaagctagggggtgaggagtgggggtggtgtttgaccactgtccagcggccagacagccggagaggcttctctgaggaggtgagc

SEQ ID NO: 237667 - DNA, 201 bp, Homo sapiens
cccagcgatactaactttagcaaggatacagctgggatcctaaacttggcgatcagagcccagagccgataaagttagctgcgtgagtctagcttcccccrgggcgggaatcgaggcggagcagggtacagtacggaggccagggatgagtgcagttgaccagattgttgacggaagtgtcataaaagtggacttaaatgt

SEQ ID NO: 237668 - DNA, 201 bp, Homo sapiens
acttgagctttttttagacccatgggttctttgcccatgttctgaggactttttatttcaggcgctgctctggggggatattaaggatacagcatcacatrgacacacggtgtttccgtgatgggcatagttctgtgggttgttcgaagcacttgcatatgcggttttgtgtgccctgtgagaacgcagtgctggtatttg

SEQ ID NO: 237669 - DNA, 201 bp, Homo sapiens
tacgggtgagatgtgactctctgaggtagtgggacagtcccttggtggccccctgcatgggcctctgagaggcagcactttggttcccacctctggcccgkgctgtggcggggtggagctgcatgccattcatgtcctaggcacatcatggtgtgtgctgcacacagacctggaaggctggggactgaccgctggctctga

SEQ ID NO: 237670 - DNA, 201 bp, Homo sapiens
tgaggaatgctcaagatcagtgcaggctcctcctgctgccctatcatgcgccatgcatggcaccaggtgtctctggtcttcacgctgactctgccatgggkgtggtgttcctgttttacattggaaacgtggagattcagagatggtcaagctctgtcctgaggtcatgcagctcatgagtgtggagctggggtgtgccca

SEQ ID NO: 237671 - DNA, 201 bp, Homo sapiens
gttgttgcctcctctccctggctgggctcgagctgcttcagggcaggaaccacgtctttacagtttgatgttcccagagctgacccagtgtttggcatagrggtgtgctcaataaaatcgagttgacatgaatgagcagatgctgcctcgttgcagtctggtagtgtaattccaggctgcccatgtggacttcgacttctg

SEQ ID NO: 237672 - DNA, 201 bp, Homo sapiens
tggggctgtggtgctttccaggtgtgtgaagttaaaacattttagggccatacggtaggtagcacctgccacatagttgtcttggtcagccccggctgccrtgacaaaataccataaactgggtggcttagacacagaaatgtgttttctcacagtcccagaggcttgggatgtccaggatcaatgtggggaggacacaac

SEQ ID NO: 237673 - DNA, 201 bp, Homo sapiens
acagtcggagagggctgacggaaggggtagaacggagcagctggtgacatgggtgatgacccgggagttcctgacgtccacccactgggctcttgtctccyccccacgtgtgtggtgatggtgggcatgcccttccccaacatcaggtctgcagagctgcaggagaagatggcctacttggatcaaaccctcgtgagtgac

SEQ ID NO: 237674 - DNA, 201 bp, Homo sapiens; identical to SEQ ID NO: 220405

SEQ ID NO: 237675 - DNA, 201 bp, Homo sapiens
ctagggtccatgagtgccagtggcagtgaggacagtcaccggcctggcctgtgtcctctcagctgtcctcacagcagctcaggcagggcaggaacatttgygtctgcaccttatacacaaggaggctgcagccccacaaggagagactccttggctgaggccacaagcctcggcagtggagagctgggctagaactcagcc

SEQ ID NO: 237676 - DNA, 201 bp, Homo sapiens
gctataaacagtgaaaagcaaaacaaagccgttcaaatacagatgctcttcttacttgatgtgcagtgtggagggagagaagatagggaagggttgggggkcctgagaaccaccattgtgacctatttccattctcttttttagggaacattaagcaaaatcccaatacacagagtctgtcacagacaggtaagagagttg

SEQ ID NO: 237677 - DNA, 201 bp, Homo sapiens
gtcagagaggttagacaactcttccagagtcacacagctgggaagtagcagctccaggagcagaagctggggccgcttcctggtgcaccgatggtcttcargtgttttgtggaaactcgggggcctccggggcgaccttgaggacatggacaaggctaagcaggggttcccttcacccagccctgcccttggtttactcag

SEQ ID NO: 237678 - DNA, 201 bp, Homo sapiens
gtctcccagcccagtgacagctgaagctgactgcttccgatatcacaggcagcacagaagagccgccctccaggtgctgctgggaaatgctgcctggaacyctttgccatttactttctatcaaaagctgagggaaatggtacatatggggctttcctaaaaatatgggatccatccatttgtcagcaatgtcattctatc

SEQ ID NO: 237679 - DNA, 201 bp, Homo sapiens
gaacttcctcagctcactttcaaatggagggcactggctttctaaccattgtgtctcccagcccagtgacagctgaagctgactgcttccgatatcacagrcagcacagaagagccgccctccaggtgctgctgggaaatgctgcctggaactctttgccatttactttctatcaaaagctgagggaaatggtacatatgg

SEQ ID NO: 237680 - DNA, 201 bp, Homo sapiens
  misc_feature (1)...(201): n = A,T,C or G
tgatagtcaccttttaagccttctacaggtctatcaagttgagtcaccattaccacttggtgtgtgctgtgccttgtgtaacactgcagttccgggagtcntccaacctggaatgcatgctttgcggggatctatgatgccctcgaattgtatgttacatgtgaacctgtgagcattttctaggggctctgcacctttgtg

SEQ ID NO: 237681 - DNA, 201 bp, Homo sapiens
taaccctcactttgaaataggatgtgtcaaccctattttgcagatgaggaaagcaagggtcagagaggttagacaactcttccagagtcacacagctgggragtagcagctccaggagcagaagctggggccgcttcctggtgcaccgatggtcttcaggtgttttgtggaaactcgggggcctccggggcgaccttgagg

SEQ ID NO: 237682 - DNA, 201 bp, Homo sapiens
ttttccagtttttcctttttgtaatatcagtactcttaactggaaagctttccctaacttacacctacctgcagcacgtgagaatactgtcttctctgccwcaacttctcttgatttttaaacagaaggaagaactgctaatgtagcagatgaaaagtagtatctcactgttacttggtgggtgcagtttcactatttcct

SEQ ID NO: 237683 - DNA, 201 bp, Homo sapiens
aacaaagtgctccttcaggtctgggcaagagccgtggatcctgtaggtcagcttccggggcttcccatgccctcacgtttcaggagataacgtgagcctcrgaggacctgagttctgaatagaaaatttttgctcttcatttcttcacacacccagcctctcagtgagctcctgctggctttgtccagcatgcgacataag

SEQ ID NO: 237684 - DNA, 201 bp, Homo sapiens
cacagctgggaagtagcagctccaggagcagaagctggggccgcttcctggtgcaccgatggtcttcaggtgttttgtggaaactcgggggcctccggggygaccttgaggacatggacaaggctaagcaggggttcccttcacccagccctgcccttggtttactcaggagtcagaccagccctagtttcctgtgtttca

SEQ ID NO: 237685 - DNA, 201 bp, Homo sapiens
atcaggagctcagtgtcaggcaggcaagcctcctgcaggggagccccgccctgctcaggtggcctcatctcccctcccagctggtggtgctgccctatcaratgctgctgcatgcggccactcggcaggctgcgggcatccggctgcaggaccaggtggtgatcatcgacgaggcgcacaacctgatcgacaccatcacgg

SEQ ID NO: 237686 - DNA, 201 bp, Homo sapiens
cttctctgacaacctaggccggtaagtagtggttctgctcatctcctgggtcgtgatacatggccggccctcactcccagcagctgggcccctgcctgctstctgctgccattagagcccacagctgggctgcgactgctcagaccagccagctggagggaggggctcagcagctctgggtttggccctgagagagtagtt

SEQ ID NO: 237687 - DNA, 201 bp, Homo sapiens
agattccatacttgaggaattcagcctcttgctttttctctgacccacagtggacactggaggaaaccttcccttccttcccttttctcttagctcccacyagcctaagggctgtggaaaccagtaccttttgtctgcacccagccccctctcctccctttggtggcttcctgtgtgtccagggctagcgtcttctaggtg

SEQ ID NO: 237688 - DNA, 201 bp, Homo sapiens
tcctgtgtttcatgtattggcttttcatgtgaaactcgaggagagcttgtccgttgctacaagctgttttttgaatgtctctacacagtccaggcaggaartagaagcactcacatcaggagctcagtgtcaggcaggcaagcctcctgcaggggagccccgccctgctcaggtggcctcatctcccctcccagctggtgg

SEQ ID NO: 237689 - DNA, 201 bp, Homo sapiens; identical to SEQ ID NO: 46087

SEQ ID NO: 237690 - DNA, 201 bp, Homo sapiens
cccatattggtgtttctaagtaaaaatcaaaggatttgtttacttgaccttttattgtacctctttttctcttaagcctgaacatgtgtgctacattaacwtacttatctgctctatcctataatatacttaaaagttttgaaatcatagtaccaatattacttctaacaatagatctgattgaaattgcctttcctcttt

SEQ ID NO: 237691 - DNA, 201 bp, Homo sapiens
ctgagggtcgcgagggaaagatctcttcaggcccctttccttggcttataggggcgtgttctccttgggtatcatgacatcgcctgccttctgtgcatgtytgcatccacgtgtcccctttccaataaggatattagccctttaggctgggtcccgtcctagtagtctcatcttaactaattacatttgtgacagtcctat

SEQ ID NO: 237692 - DNA, 201 bp, Homo sapiens; identical to SEQ ID NO: 46088

SEQ ID NO: 237693 - DNA, 201 bp, Homo sapiens
gtgggccttgctggggtggtgggatgtgcgcttcaggtgtcttgagcctggcagagcctccgatccacccagcctctctctcatggctgttcctcgttccyctccactgctctctctcatcccacccagctctttggcttcactgaacggtacggagcagtgttctcatcccgggagcagcccaaactggctgggtttcag

SEQ ID NO: 237694 - DNA, 201 bp, Homo sapiens
cctgcagcccaggacgactgaaggtgaggcaggagggtgagcaggcagagccggctgcacgcatgggcaaggacttctgttcctcatgtgtggacctgacmagagggaggcctcctccccattctgctctgtgcagctcttgcagcccctgcagacgagagtcaggccagcgtcccgcaaccagcttccccactgatgcac

SEQ ID NO: 237695 - DNA, 201 bp, Homo sapiens
aaggtgaggcaggagggtgagcaggcagagccggctgcacgcatgggcaaggacttctgttcctcatgtgtggacctgacaagagggaggcctcctccccrttctgctctgtgcagctcttgcagcccctgcagacgagagtcaggccagcgtcccgcaaccagcttccccactgatgcacatcgaaggcttcctggcagc

SEQ ID NO: 237696 - DNA, 201 bp, Homo sapiens
ttcttactgtggagcaagaaaagaggaggaggagaaaaacaaatctttggtgtctctttctcttttatgaggacaagggctgctcccttatggctgctcckttatgacctcctttacccttgaaggccagatctgtagtacagtcacatggcagggttaggatttcaacatatgtttgtttgttaagatgggcagtctcac

SEQ ID NO: 237697 - DNA, 201 bp, Homo sapiens
  misc_feature (1)...(201): n = A,T,C or G
agtggatgaggatgaggatgacctggaggaagaacacataactaaggtaacacgagtgtcctcagctggtgctgtgctgggggctatgggctgggctgtgnacccttggggaagaggctggagtcactcggctacttctcaccctcctctccacaaaggaggagcttccagcacttggactctgttgcttcttgcacgcaa

SEQ ID NO: 237698 - DNA, 201 bp, Homo sapiens
tggagaaccggcctgggttactcagtttgtgcagaagaaagaagagagggacctggtgaaccgactgaaggtgagacctggggtatccggaagtgggagtrctggaggaaacagggcttcagcgattgttgtggggcgattccgagactcaggcagtgcatgctcccctgccgttgctgtgcctctcagctcttccctcag

SEQ ID NO: 237699 - DNA, 201 bp, Homo sapiens
agcccacagctgggctgcgactgctcagaccagccagctggagggaggggctcagcagctctgggtttggccctgagagagtagttggattttaggctggycattgctgtatcaggacccaatcaattggcctagacgggatctctcagccttacaagccctctccaggtggtaggtacagagtggagagaggctgagttt

SEQ ID NO: 237700 - DNA, 201 bp, Homo sapiens
cctgcgaaggggctgcaggcaccccgaggcctgctggagaaccggcctgggttactcagtttgtgcagaagaaagaagagagggacctggtgaaccgactraaggtgagacctggggtatccggaagtgggagtgctggaggaaacagggcttcagcgattgttgtggggcgattccgagactcaggcagtgcatgctccc

SEQ ID NO: 237701 - DNA, 201 bp, Homo sapiens
tgctgctggcattggccacaaagcctcctggtctggctccaaagcctggcagggtcttttccccgggggagctgcaggcagggaacagtcctgatgggtcwtccccttcactcccagcccagagcccccggccaggcacccccagggaaggctctggtggagaacctgtgcatgaaggccgtcaaccagtccataggtgag

SEQ ID NO: 237702 - DNA, 201 bp, Homo sapiens
tttggcataggggtgtgctcaataaaatcgagttgacatgaatgagcagatgctgcctcgttgcagtctggtagtgtaattccaggctgcccatgtggacytcgacttctgcccctgcccagggcagagaccaccgtgttgctttatgcctcgctggtgagagggggtcataaacagtttgtgctccatgaaccgttcctg

SEQ ID NO: 237703 - DNA, 201 bp, Homo sapiens
cccttaggaacttcctcagctcactttcaaatggagggcactggctttctaaccattgtgtctcccagcccagtgacagctgaagctgactgcttccgatrtcacaggcagcacagaagagccgccctccaggtgctgctgggaaatgctgcctggaactctttgccatttactttctatcaaaagctgagggaaatggta

SEQ ID NO: 237704 - DNA, 201 bp, Homo sapiens
tgttgatgataccccaggaaggtgagcctttggttataaatccttttaacattttccagtctaaaagttttgtggtcttattacaggatgtagaaaacagkgggcctcagttattcttttgctgttgtgccggagtataccacggttgtttttgaaagataactttgaccatacccttaggaacttcctcagctcactttc

SEQ ID NO: 237705 - DNA, 201 bp, Homo sapiens
gaaagttgaagatccagattctggcagggttctggttctggggagggggtctcttcctggcttgcagatggctgcgttcttactgtggagcaagaaaagasgaggaggagaaaaacaaatctttggtgtctctttctcttttatgaggacaagggctgctcccttatggctgctcctttatgacctcctttacccttgaag

SEQ ID NO: 237706 - DNA, 201 bp, Homo sapiens
tataattctaagttttagtctctgctgagtgaaccagtgcgttatgattatgttttgaacataattttgtcttgaacaatatgtcttaatattctgttttytctagttaataattgcccttttaaagttagtttagtttttaatatacctatgccagttcctcccacatcatccagtggcctctcaatatgattttccgta

SEQ ID NO: 237707 - DNA, 201 bp, Homo sapiens
cagaacagtgagctggataattaaagaagctttttcctgcttcttgggcccagtttccatttcttccttttttctgtttttcctggctattctagtgctartttccttcctttcctttcctaggctggccttagagcatcctctcctatgtacagccagaccttctttcaagcttttattaaaatggggaaaggtcatttg

SEQ ID NO: 237708 - DNA, 201 bp, Homo sapiens
cctcctgctgccctatcatgcgccatgcatggcaccaggtgtctctggtcttcacgctgactctgccatgggggtggtgttcctgttttacattggaaacktggagattcagagatggtcaagctctgtcctgaggtcatgcagctcatgagtgtggagctggggtgtgcccactggtttctgactgtgaaacccccacga

SEQ ID NO: 237709 - DNA, 201 bp, Homo sapiens
catttccctgcacctcacctgcccccatgctcctgagtccctccagccctggatgccagcagccagttctgcaagccagggagatggcatgtgtgaggcaraagtcccctcaggattggattttgtcattactgaagttgtctggaggggactgaattgaggaatgctcaagatcagtgcaggctcctcctgctgccctat

SEQ ID NO: 237710 - DNA, 201 bp, Homo sapiens
catcggaggctgaccatggctttccagtgcatcccagaactctggggaccccgctatgacagagtgcctcatttccctgcacctcacctgcccccatgctmctgagtccctccagccctggatgccagcagccagttctgcaagccagggagatggcatgtgtgaggcagaagtcccctcaggattggattttgtcattac

SEQ ID NO: 237711 - DNA, 201 bp, Homo sapiens
actttgaccatacccttaggaacttcctcagctcactttcaaatggagggcactggctttctaaccattgtgtctcccagcccagtgacagctgaagctgwctgcttccgatatcacaggcagcacagaagagccgccctccaggtgctgctgggaaatgctgcctggaactctttgccatttactttctatcaaaagctg

SEQ ID NO: 237712 - DNA, 201 bp, Homo sapiens
ggacctgacaagagggaggcctcctccccattctgctctgtgcagctcttgcagcccctgcagacgagagtcaggccagcgtcccgcaaccagcttccccrctgatgcacatcgaaggcttcctggcagctctcactacggccaaccaggacggcagggtcatcctgagccgccaaggtaatcaggtggttcttggccagg

SEQ ID NO: 237713 - DNA, 201 bp, Homo sapiens
tgagcaggcagagccggctgcacgcatgggcaaggacttctgttcctcatgtgtggacctgacaagagggaggcctcctccccattctgctctgtgcagcwcttgcagcccctgcagacgagagtcaggccagcgtcccgcaaccagcttccccactgatgcacatcgaaggcttcctggcagctctcactacggccaacc

SEQ ID NO: 237714 - DNA, 201 bp, Homo sapiens
ctccaggtgcctcagaaggtagcactgcgttgtgctgcctgggtggtagaagtggtgttttttgttttgtgtttaagattacagcttgctcagtttgcacwcatgcctacagctgggcttggtttttgcaggtgcagcgatactgtgagaagagcatgatcagcagaaaggtaactgctcccatcttgtggtcctgaacaa

SEQ ID NO: 237715 - DNA, 201 bp, Homo sapiens; identical to SEQ ID NO: 46093

SEQ ID NO: 237716 - DNA, 201 bp, Homo sapiens
ggccctggcttaacagcagtgcggaaaagcttttctcttggggctgtggtgctttccaggtgtgtgaagttaaaacattttagggccatacggtaggtagyacctgccacatagttgtcttggtcagccccggctgccatgacaaaataccataaactgggtggcttagacacagaaatgtgttttctcacagtcccagag

SEQ ID NO: 237717 - DNA, 201 bp, Homo sapiens
  misc_feature (1)...(201): n = A,T,C or G
ctctcacacacacagagtggatgaggatgaggatgacctggaggaagaacacataactaaggtaacacgagtgtcctcagctggtgctgtgctgggggctntgggctgggctgtgcacccttggggaagaggctggagtcactcggctacttctcaccctcctctccacaaaggaggagcttccagcacttggactctgtt

SEQ ID NO: 237718 - DNA, 201 bp, Homo sapiens
gagtctcaaggtgaagacgcggtttgtgggtggctgaggggttgctccatgggggctccctccctcccttccttccttagatggacgaggtgggtcgcatyctctgtaacctgtgcggtgtggtttctggaggggtggtctgtttcttcccctcctacgagtacctgcgccaggtccatgcccactgggagaagggtggcc

SEQ ID NO: 237719 - DNA, 201 bp, Homo sapiens
gctttgtctctggcacgtggggaggtgggtactggtgctgagacttcttcctccctccccacctccactgcccctgtccagaggcaggaagaagaagaaasagagaatctcctccgcctcagcagggagatgctagagacaggcccggaggctgagcggctggagcagctggagtctggggaggaggagctggtcctcgcc

SEQ ID NO: 237720 - DNA, 201 bp, Homo sapiens
tgtgcctggggtgtgcagcccctgattgtcattgtggtgcccatcaggaccctggacagaagaagggaggactcagtgccagggcaatagggaggcccccyagggacgctagtgctgtgacatgtgtcagaaaggcgcagtcagcagcagcggctgggtgtgtttggtgggaggtggcacctaccaccccgtggttcccac

SEQ ID NO: 237721 - DNA, 201 bp, Homo sapiens
cccccagtgaggaggcgccgagctgagtggcccagactccttaggagaggcctggttttgggcttcctggtgattttccttcatgtctgcctcctgtaggyggagcaggccaggaggaagcagcgagaagaacgcctgcagcagctgcagcacagggtgcagctcaagtatgcagccaagcgcctggtgagcctcatttct

SEQ ID NO: 237722 - DNA, 201 bp, Homo sapiens
ctggaggtcagcagggccttctccacacaaggaactgttggtgcccatttattactcacctgggaaaggacctgatcgttgccattggcagcatggttcartggctgcaaatggatctgatggagagcgtgtggctttgggaggagcgtgccgccttccacagtgagcagcgaggctgggacctgcagggatgaggtcccg

SEQ ID NO: 237723 - DNA, 201 bp, Homo sapiens
ccgctcacttgttatttgccaggtaatcctctaatccagaggatttggccttttgtgtgtgttaatgtcctgcttgcaccagctctatgaggaaggtgctrctgttgtcatttccatttctgcactcgtggaaacaagcgtagtgaggccagcctgagccacagagctgcaggtaggggaggcagctggaaccctggcgcc

SEQ ID NO: 237724 - DNA, 201 bp, Homo sapiens
agcaatcctccctccttggcctcccatagtgctgagatgacaggcgtgagccactgtacctgaccccttttaccttgtttagcctgacaacccatcttctscctctcaggtctttccatctcagtcttctgcactccaggcttctgcatcttcctcctatgctcagcctttaattgtcgatgtttctggttctatagcttc

SEQ ID NO: 237725 - DNA, 201 bp, Homo sapiens
tttcagcctgaccctcctctccctccctcttgcctcctcaatctgccagttgcctccagggctctcctagctcagcttccacttagagcccacttcctgtsttctgcaaggagcaggagcagggattgcaacctgggaatctaattgttcttaaacagaatttcaacccgtccctttgttttcagtggcctgctgtgttcc

SEQ ID NO: 237726 - DNA, 201 bp, Homo sapiens
caccattgtgacctatttccattctcttttttagggaacattaagcaaaatcccaatacacagagtctgtcacagacaggtaagagagttgccctcagagsgcccagagctgatctgagccacttccgagcttaaccctgggactgaaacctgaggcttagggtgaagctcccaaggcccttcatgtgtttgctctcaggg

SEQ ID NO: 237727 - DNA, 201 bp, Homo sapiens
agctgcaaaagtcattatgagcaacacccttgatcttaggggtgctggtctttgagaagagagctctaagccttttgtagaggtattagaaaggtatcggmgccacggtgaaatgcaggggagattgggtttaggggctttcctggtctgcattctgctacagccgttaaatgccgctagatggagtgcgtgattctggta

SEQ ID NO: 237728 - DNA, 201 bp, Homo sapiens
gaagtagcttcggcttgtgaatgtgcattgcagagacgtgggagaagaaagctgcaaaagtcattatgagcaacacccttgatcttaggggtgctggtctktgagaagagagctctaagccttttgtagaggtattagaaaggtatcggcgccacggtgaaatgcaggggagattgggtttaggggctttcctggtctgca

SEQ ID NO: 237729 - DNA, 201 bp, Homo sapiens
atgattttccaggacttcacaacgggataaagtgaagtagcttcggcttgtgaatgtgcattgcagagacgtgggagaagaaagctgcaaaagtcattatragcaacacccttgatcttaggggtgctggtctttgagaagagagctctaagccttttgtagaggtattagaaaggtatcggcgccacggtgaaatgcagg

SEQ ID NO: 237730 - DNA, 201 bp, Homo sapiens
acatagaatctgataaactgcttcaaatttgttttcagaacagtgagctggataattaaagaagctttttcctgcttcttgggcccagtttccatttcttycttttttctgtttttcctggctattctagtgctaatttccttcctttcctttcctaggctggccttagagcatcctctcctatgtacagccagaccttct

SEQ ID NO: 237731 - DNA, 201 bp, Homo sapiens
actcgtgactgatcatcctgtatccacgcacgagctgcacgaaggccgcgcggtcactgtggctccccgttggcgagtacctgggatttcttgctcagcaktttggggccttaattcttttaggggactttttgtctaatgtctccccttcttctaattatgtgcgatatttacatagaatctgataaactgcttcaaatt

SEQ ID NO: 237732 - DNA, 201 bp, Homo sapiens
aaaaaaaaaaaaacacaaaccgtaaacactggcactcgtgactgatcatcctgtatccacgcacgagctgcacgaaggccgcgcggtcactgtggctcccygttggcgagtacctgggatttcttgctcagcagtttggggccttaattcttttaggggactttttgtctaatgtctccccttcttctaattatgtgcgat

SEQ ID NO: 237733 - DNA, 201 bp, Homo sapiens
cacgtggaaccaggcttctctccgtgtgcttctgttgtcagtttcatagatagctaggctgtttttgtttcattttcttttcaattttagaatttgctttyttcttttctgacttgtagtttttaaatatgtaaatatttgtatggctcaaaagtcaaagcaatataaaaagatctattcaggaaagcctcactctcatcc

SEQ ID NO: 237734 - DNA, 201 bp, Homo sapiens
tgcaggggagccccgccctgctcaggtggcctcatctcccctcccagctggtggtgctgccctatcagatgctgctgcatgcggccactcggcaggctgcvggcatccggctgcaggaccaggtggtgatcatcgacgaggcgcacaacctgatcgacaccatcacgggcatgcacagcgtggaggtcagcggctcccagg

SEQ ID NO: 237735 - DNA, 201 bp, Homo sapiens
ggaaggggatccaggtggagagtccccctcagtgcctgctttcagcctgaccctcctctccctccctcttgcctcctcaatctgccagttgcctccagggytctcctagctcagcttccacttagagcccacttcctgtgttctgcaaggagcaggagcagggattgcaacctgggaatctaattgttcttaaacagaatt

SEQ ID NO: 237736 - DNA, 201 bp, Homo sapiens
tcctgcaggggagccccgccctgctcaggtggcctcatctcccctcccagctggtggtgctgccctatcagatgctgctgcatgcggccactcggcaggcygcgggcatccggctgcaggaccaggtggtgatcatcgacgaggcgcacaacctgatcgacaccatcacgggcatgcacagcgtggaggtcagcggctccc

SEQ ID NO: 237737 - DNA, 201 bp, Homo sapiens
tcttagacttgggagagacatttggaaagagggtctcccccctgaggaggacactgcgttgtgggcaggggcagtagaggcgggggtggcctcggagaggrgatgacaaggttggtggcaaggaggctccaggtgcctcagaaggtagcactgcgttgtgctgcctgggtggtagaagtggtgttttttgttttgtgttta

SEQ ID NO: 237738 - DNA, 201 bp, Homo sapiens
caaactcaagcgatcctcccctctcagcctcccaagtacctggtggctggcaagatccaagattactggtgcacaccaccatacacagcttcttttgtttkgtttttgttctttaaaaacttttttttaacatgcattttggtggggatacaattcagtccacagcagtgaccaattccatttttaccttggagccctcct

SEQ ID NO: 237739 - DNA, 201 bp, Homo sapiens
tcccgggaggggatgcggcagcccttgagtgctggttggggaaggagagctgcccccagtgaggaggcgccgagctgagtggcccagactccttaggagasgcctggttttgggcttcctggtgattttccttcatgtctgcctcctgtaggcggagcaggccaggaggaagcagcgagaagaacgcctgcagcagctgca

SEQ ID NO: 237740 - DNA, 201 bp, Homo sapiens
ctcccatcttgtggtcctgaacaagacccagctgtgccccaaccccctgccgttgccatgctttcctcccctgccctcagggaactccagagtccccttcrtctccaccctccttggtgcagtgggccttgctggggtggtgggatgtgcgcttcaggtgtcttgagcctggcagagcctccgatccacccagcctctctc

SEQ ID NO: 237741 - DNA, 201 bp, Homo sapiens
agtacagtcacatggcagggttaggatttcaacatatgtttgtttgttaagatgggcagtctcactatgtggcccaggctggtctcaaactcaagcgatcytcccctctcagcctcccaagtacctggtggctggcaagatccaagattactggtgcacaccaccatacacagcttcttttgttttgtttttgttctttaa

SEQ ID NO: 237742 - DNA, 201 bp, Homo sapiens
atcagcagaaaggtaactgctcccatcttgtggtcctgaacaagacccagctgtgccccaaccccctgccgttgccatgctttcctcccctgccctcaggraactccagagtccccttcgtctccaccctccttggtgcagtgggccttgctggggtggtgggatgtgcgcttcaggtgtcttgagcctggcagagcctcc

SEQ ID NO: 237743 - DNA, 201 bp, Homo sapiens
agagctgtaccgggttttggaggctggcaagattgggatatttgagagtccaactggcactgtgagtatgaacagtgagagatactgaaaaggacaacttwacggcagctgtgctagcttttcctgtttgcccatccagagattttcatagtatgaagttgggcagaatagttgctctcagtttatctttctgagtaatag

SEQ ID NO: 237744 - DNA, 201 bp, Homo sapiens
gcaacacgcctgtgagacaaaagtcatcatcttttagagtgaaggccacagggatgagggatgggtgagaaagggacctttcttggtgccccatagaacakatagagactccaggtccttgctgtctcaccccatcttctggcacagtctccctcaggcttatggacaggaataggatgttgatttgttctgtgcaacccc

SEQ ID NO: 237745 - DNA, 201 bp, Homo sapiens
cataggtcttgaggccagaaaagttagtaggtggcggctctggtcggtgctggaaatggaggccaggatgaactaagaagcaaactaaagatacttgtaakataaggacgtgtaggctgggtgcggtggctcacgcctgtaatcccagcacttcgggaggccaaggcgggcggatcacgaggtcaggagatcgagaccatc

SEQ ID NO: 237746 - DNA, 201 bp, Homo sapiens
gagaagtgagttccaaagagagaggtgtgggaaccaggatggaagagtcaggcctccagatagcgtttacttctcctttcttccttgaatcactgtctcasagataattaggttcagaagaggaggaaaaaaaagatgacgtcaacatggagcagagtttttcttagaccttagcctagcaaggaaagagaaatgcctggt

SEQ ID NO: 237747 - DNA, 201 bp, Homo sapiens
taaactgccaccaatctgtagtcattttaattgctcctaaaccgaagagcatcatggcaactacctttcccctcgtagagtgacactatcactagtcttaytgaggccaaagttataaagatgggctctcgatctactaatattagtaaaatgggtttgggacttactaacatttgtgcttagaagagacagacctggcaa

SEQ ID NO: 237748 - DNA, 201 bp, Homo sapiens
ttactctcagtttgtgaacctcccttcagtgaacctccctttacttatgctggatatctcttgcgactggatgagcttcactaaagcacagtcatttggayctggattcgaatccctggttttccactttttagctgtgagtttgagcaattatttaatttctgtaagcatcagtatccagtagctgtatccttatagtgt

SEQ ID NO: 237749 - DNA, 201 bp, Homo sapiens
cagcagcagcggctgggtgtgtttggtgggaggtggcacctaccaccccgtggttcccacccaggggagccaagtcctcttccttggctgtagtcctgccragggtctctcctcagttttgagtctcaaggtgaagacgcggtttgtgggtggctgaggggttgctccatgggggctccctccctcccttccttccttaga

SEQ ID NO: 237750 - DNA, 201 bp, Homo sapiens
caggttctggcccccgttttctgtgggtaatacctcataccgtgaccaggcacaggggcggaggagaccccgggatgggagcctcacccttcgtgcgctcrcccaggctctcctgctttgctccctgctgcctgctgcccagtgtgactggcgatggtgggtgggtgagcgctgtcagtcgctgttcctgtgctggatgat

SEQ ID NO: 237751 - DNA, 201 bp, Homo sapiens
tctcttgccctttggttatatctgcccctgctgggggcagggatgtggggcttgggggcatctcctgtggtgtgcctggggtgtgcagcccctgattgtcrttgtggtgcccatcaggaccctggacagaagaagggaggactcagtgccagggcaatagggaggccccccagggacgctagtgctgtgacatgtgtcaga

SEQ ID NO: 237752 - DNA, 201 bp, Homo sapiens
tttgagctggaggtcagcagggccttctccacacaaggaactgttggtgcccatttattactcacctgggaaaggacctgatcgttgccattggcagcatrgttcaatggctgcaaatggatctgatggagagcgtgtggctttgggaggagcgtgccgccttccacagtgagcagcgaggctgggacctgcagggatgag

SEQ ID NO: 237753 - DNA, 201 bp, Homo sapiens; identical to SEQ ID NO: 46036

SEQ ID NO: 237754 - DNA, 201 bp, Homo sapiens
tggaaactttcctaacaacaaacacctaaagacctgcagagttgcttttatttttgttaccccagctccacgccttaaccctcactttgaaataggatgtrtcaaccctattttgcagatgaggaaagcaagggtcagagaggttagacaactcttccagagtcacacagctgggaagtagcagctccaggagcagaagct

SEQ ID NO: 237755 - DNA, 201 bp, Homo sapiens
agtatgcagccaagcgcctggtgagcctcatttcttggggggcaggattatgtccaggcagggtcgccctgcttggaggctcatgggtgcgtggccagggycttggtctcccctccatgaccctcactggctatgtgctcccgtacagaagctgggctgtgagtggttgaggcgtggatcctaggagtcgacctctctcca

SEQ ID NO: 237756 - DNA, 201 bp, Homo sapiens
gctacagccgttaaatgccgctagatggagtgcgtgattctggtatggcctcatgtggacctgcgaaggatggagagaacatggtctctgcttcccagaawaaaaggagaaatttggtaacaagtgtggagactgctcttaaataatgctccagatttcaagccacttcttcctggaccatgagagagctccctaatgttg

SEQ ID NO: 237757 - DNA, 201 bp, Homo sapiens
tcttaactaattacatttgtgacagtcctatttccagataaggccacattctgagatgctgggggttaggatttcaacacaggaatttggaggaatacaaytcaatcaggcttatggacaattctggtcttaagtcaagagtagtgttctccagtctgtatgtggaggcgcacacctatggtcccagccacttgggaggct

SEQ ID NO: 237758 - DNA, 201 bp, Homo sapiens
cgtgtcccctttccaataaggatattagccctttaggctgggtcccgtcctagtagtctcatcttaactaattacatttgtgacagtcctatttccagatmaggccacattctgagatgctgggggttaggatttcaacacaggaatttggaggaatacaattcaatcaggcttatggacaattctggtcttaagtcaaga

SEQ ID NO: 237759 - DNA, 201 bp, Homo sapiens
tctgtgcatgtctgcatccacgtgtcccctttccaataaggatattagccctttaggctgggtcccgtcctagtagtctcatcttaactaattacatttgygacagtcctatttccagataaggccacattctgagatgctgggggttaggatttcaacacaggaatttggaggaatacaattcaatcaggcttatggaca

SEQ ID NO: 237760 - DNA, 201 bp, Homo sapiens
tacggaggccagggatgagtgcagttgaccagattgttgacggaagtgtcataaaagtggacttaaatgttgataagcagctggttgggttccacacaggktgcgagctcaggatgcacgttggaggggacacagggccagagcaaggtgggaatgcgggtattatgggccaggccatcctccagctggtggagcaccgca

SEQ ID NO: 237761 - DNA, 201 bp, Homo sapiens
gggccgggccagcgtgattgacaagcgggaacccctgtgtggggacggggcaggcctaggaaggttgtgcctgcggtggaacggcgcggtgcgcaggagtsggcattaacagcagccgcgtgtctgggtcttagatttggcctagctgtgttgagcttttcatggattatgttacgtagataagacactgcaacagtgagt

SEQ ID NO: 237762 - DNA, 201 bp, Homo sapiens
atcttctgccaccatcagggacaaaccgggggcaggaggaaagtcactgatgcccagctgtttgcatcctgcacagctacaggtccttaattaaaagtgtrctgttggtttctgctgagttttttattgatatgtgctgctgttttctctggaagcctctttagggaatcgaggagcgcactggtgcaggggctgggtgga

SEQ ID NO: 237763 - DNA, 201 bp, Homo sapiens; identical to SEQ ID NO: 46060

SEQ ID NO: 237764 - DNA, 201 bp, Homo sapiens
caaagcctggcagggtcttttccccgggggagctgcaggcagggaacagtcctgatgggtcatccccttcactcccagcccagagcccccggccaggcacmcccagggaaggctctggtggagaacctgtgcatgaaggccgtcaaccagtccataggtgagcctggctgcctccagctgggtggacagatgggggctgga

SEQ ID NO: 237765 - DNA, 201 bp, Homo sapiens
cccgggggagctgcaggcagggaacagtcctgatgggtcatccccttcactcccagcccagagcccccggccaggcacccccagggaaggctctggtggasaacctgtgcatgaaggccgtcaaccagtccataggtgagcctggctgcctccagctgggtggacagatgggggctggagaaggggagaacaggaaagagg

SEQ ID NO: 237766 - DNA, 201 bp, Homo sapiens
aggcacccccagggaaggctctggtggagaacctgtgcatgaaggccgtcaaccagtccataggtgagcctggctgcctccagctgggtggacagatgggrgctggagaaggggagaacaggaaagaggggttgcctgccctgtttcctatataagtctgaggaaggggagggggtcgccatgggaatgtgctgtaggggg

SEQ ID NO: 237767 - DNA, 201 bp, Homo sapiens
gaagaccatcaacgactttctcttccagagccagatcgacaacatcaacctgttcaaggtagaggtttccaccttgccatgttccacatccaatttccttyctgtcaccacctgtgggtagagtactatgttaagactatagaaggaagaaaaagcaaaacagacgtgtaattacttaacccttaacgcaacacgcctgtg

SEQ ID NO: 237768 - DNA, 201 bp, Homo sapiens
tgagccacttccgagcttaaccctgggactgaaacctgaggcttagggtgaagctcccaaggcccttcatgtgtttgctctcagggacggagctgaagacyatcaacgactttctcttccagagccagatcgacaacatcaacctgttcaaggtagaggtttccaccttgccatgttccacatccaatttccttcctgtca

SEQ ID NO: 237769 - DNA, 201 bp, Homo sapiens
aaggtgtcagcatgcttggtcccttctgagggtcgcgagggaaagatctcttcaggcccctttccttggcttataggggcgtgttctccttgggtatcatsacatcgcctgccttctgtgcatgtctgcatccacgtgtcccctttccaataaggatattagccctttaggctgggtcccgtcctagtagtctcatcttaa

SEQ ID NO: 237770 - DNA, 201 bp, Homo sapiens
ctttgttttcagtggcctgctgtgttcctaccacttcctgagtctttctgagaatgagtgggggagatctctggggacacttgggcttgagtgtctctgcsgaatcacttccatgtctctgccttctttccctctctcctaaaacatattactccttccactttctttgtttttgtgggtgtaagcctccatattactttg

SEQ ID NO: 237771 - DNA, 201 bp, Homo sapiens
cacaaactggggcttaaacaacagaaactgacatcccacagcgctggaggctggagtccgagatcaaggtgtcagcatgcttggtcccttctgagggtcgygagggaaagatctcttcaggcccctttccttggcttataggggcgtgttctccttgggtatcatgacatcgcctgccttctgtgcatgtctgcatccacg

SEQ ID NO: 237772 - DNA, 201 bp, Homo sapiens
tcctgagcagctgggactacaggtgtgcgccatcacacctagctaattttttaatttgtagaaatgagatctcactatgctgctcaggctggtggtcttaracccctaggctcaagcaatcctccctccttggcctcccatagtgctgagatgacaggcgtgagccactgtacctgaccccttttaccttgtttagcctga

SEQ ID NO: 237773 - DNA, 201 bp, Homo sapiens
aaaacatgaacttacagggctttgggttccacgtgcaagcacgtgagtcagacgtgggaggctcctggacccacctgccctctaagtgggtccgttgcatrctataaacagtgaaaagcaaaacaaagccgttcaaatacagatgctcttcttacttgatgtgcagtgtggagggagagaagatagggaagggttgggggg

SEQ ID NO: 237774 - DNA, 201 bp, Homo sapiens
ccgagatgctgtttatccttgatagtcaccttttaagccttctacaggtctatcaagttgagtcaccattaccacttggtgtgtgctgtgccttgtgtaayactgcagttccgggagtcctccaacctggaatgcatgctttgcggggatctatgatgccctcgaattgtatgttacatgtgaacctgtgagcattttcta

SEQ ID NO: 237775 - DNA, 201 bp, Homo sapiens
gatgcttatggaggaaggtctgagcttccccgcctctcacaccttaggctgcgaaatatgtattcataaaacctccaggcatcttctgaggacgcctcackcaggagaaagctgctagttccctttggctctcttgccctttggttatatctgcccctgctgggggcagggatgtggggcttgggggcatctcctgtggtg

SEQ ID NO: 237776 - DNA, 201 bp, Homo sapiens
ccaacctggaatgcatgctttgcggggatctatgatgccctcgaattgtatgttacatgtgaacctgtgagcattttctaggggctctgcacctttgtgtyctcagctctgagccccatgcttgctgcaaccagcaggtgttcagagtgaatgaatttgcttatcttggcataaatcatgtaactgttgatgataccccag

SEQ ID NO: 237777 - DNA, 201 bp, Homo sapiens
catagggaatccgttttactagcttatcctttcagtctttctttttcccctaaataagcaaaaacgtgtcttcatttttccctttcctgttttatttacayagaaggcatcttagtcagttgtctgaccatcgctcctctagtgggctgcgtggttctctgttggacagatgtagggagcttatccaaccagtaccctctg

SEQ ID NO: 237778 - DNA, 201 bp, Homo sapiens
agcctgctctctgggaaaggatttgtagcttgtgacccagtttgagaggcaccgggcagcaaggcttccactggggtgggcggggcgagtcgccatcaggrcaccaccacttaatgtccgttggcttcttctcaggaagcgtttgaaggccaagaacctgatgtacctgaagcagatcctgtatttgctggagaaattcgt

SEQ ID NO: 237779 - DNA, 201 bp, Homo sapiens
ttccaggcagcctcagtgagagcaccctgaagtttttgctcctgaatccagctgtgcactttgcccaagtggtgaaggaatgccgggcagtggtcattgcsgggggtaccatgcagccggtaaggacacctttcccagcccctcgtgccccaggtgttgggatgagatggggacttgggagagatgcattatcagtcctgt

SEQ ID NO: 237780 - DNA, 201 bp, Homo sapiens
ccgggcagcaaggcttccactggggtgggcggggcgagtcgccatcagggcaccaccacttaatgtccgttggcttcttctcaggaagcgtttgaaggccragaacctgatgtacctgaagcagatcctgtatttgctggagaaattcgtggctgtgctagggggtgagagcctcgccccccggctaacccccggcctgca

SEQ ID NO: 237781 - DNA, 201 bp, Homo sapiens
gtctgttgggcttgcactcacctcccaccgatctgtttttccaggcagcctcagtgagagcaccctgaagtttttgctcctgaatccagctgtgcactttscccaagtggtgaaggaatgccgggcagtggtcattgcggggggtaccatgcagccggtaaggacacctttcccagcccctcgtgccccaggtgttgggat

SEQ ID NO: 237782 - DNA, 201 bp, Homo sapiens
ggtggagctgcatgccattcatgtcctaggcacatcatggtgtgtgctgcacacagacctggaaggctggggactgaccgctggctctgaggcctggggcygtggccagcctgctctctgggaaaggatttgtagcttgtgacccagtttgagaggcaccgggcagcaaggcttccactggggtgggcggggcgagtcgcc

SEQ ID NO: 237783 - DNA, 201 bp, Homo sapiens
gccggtaaggacacctttcccagcccctcgtgccccaggtgttgggatgagatggggacttgggagagatgcattatcagtcctgttctctcctggggccscaagccagaaagggtcagctcgagcaggcccagtggtgtccactgggtgacactgctattctctcactgctgtgccttttaggctgcaggagcagtgcag

SEQ ID NO: 237784 - DNA, 201 bp, Homo sapiens; identical to SEQ ID NO: 46090

SEQ ID NO: 237785 - DNA, 201 bp, Homo sapiens
acaggatccctggtgacagccccgttcccattcacactggaacctcaccaccatccctgagtgtctgctctgagtatggcactgtccagatgctgtggacrtagaagggaagaagacatggaggggacagttaatagacatgaaaacaaatagcacctatgtgaagtcagcatgtttgcctacaaggaaaacaaaatggtg

SEQ ID NO: 237786 - DNA, 201 bp, Homo sapiens
gtggatcctgtaggtcagcttccggggcttcccatgccctcacgtttcaggagataacgtgagcctcagaggacctgagttctgaatagaaaatttttgckcttcatttcttcacacacccagcctctcagtgagctcctgctggctttgtccagcatgcgacataagattgaatccaagccttttaagatagagccgcct

SEQ ID NO: 237787 - DNA, 201 bp, Homo sapiens
accagtccataggtgagcctggctgcctccagctgggtggacagatgggggctggagaaggggagaacaggaaagaggggttgcctgccctgtttcctatrtaagtctgaggaaggggagggggtcgccatgggaatgtgctgtagggggaggcaggtgttgctcggagccccagcctctgttcctatgcaggcagggcca

SEQ ID NO: 237788 - DNA, 201 bp, Homo sapiens
cgtgggtgtcatccaagttttggctcagcaactcagcgtctgggtttctcctacaggcctgtggccaggagagaggccaggtgacagaggccctgctcctytctgtggttggaggaaagatgagtgaagggatcaacttctctgacaacctaggccggtaagtagtggttctgctcatctcctgggtcgtgatacatggcc

SEQ ID NO: 237789 - DNA, 201 bp, Homo sapiens
cctgagccacagagctgcaggtaggggaggcagctggaaccctggcgcctggctgtggagtttgaggctctgactcctgcgccgcgctgctgccccaaccstagtcatacgaggtgtttcaccccgccctggatactctgagatcccctctgggttcagcaggctcagagagctgactgcctggagcagaaggcatggggt

SEQ ID NO: 237790 - DNA, 201 bp, Homo sapiens
catccaggtgcgggcgtcatgctgagcttgggtctgagaccatgtgggggtggcagctggaaacgtgggtgtcatccaagttttggctcagcaactcagcrtctgggtttctcctacaggcctgtggccaggagagaggccaggtgacagaggccctgctcctctctgtggttggaggaaagatgagtgaagggatcaact

SEQ ID NO: 237791 - DNA, 201 bp, Homo sapiens
ggccctggcagaggtgaaggacatggagcagctgctggcccttgggaaggaggcccgggcctgtccctattacaggagccgccttgccatccctgcagccmaggtgagggccctgcagggccagaaagccgctcttggctctcactgtggtctaggccatgaggggcgtcctcatcacactgtagtttgggggatgccccc

SEQ ID NO: 237792 - DNA, 201 bp, Homo sapiens
tctgcactcgtggaaacaagcgtagtgaggccagcctgagccacagagctgcaggtaggggaggcagctggaaccctggcgcctggctgtggagtttgagrctctgactcctgcgccgcgctgctgccccaaccctagtcatacgaggtgtttcaccccgccctggatactctgagatcccctctgggttcagcaggctca

SEQ ID NO: 237793 - DNA, 201 bp, Homo sapiens
gcacaggcagatggaagcccccaccccagctgcgtggcctgaagccagcctcccgctccccgaaggtggtctccacacagaactgggacagttccatcccygccccttcctccagggcagcagggctgaggatcccattctggctgtgtccacgtccgggccatggctggagtctgggtttaggggaggaaggcatggcgg

SEQ ID NO: 237794 - DNA, 201 bp, Homo sapiens
ctgctgttgtcatttccatttctgcactcgtggaaacaagcgtagtgaggccagcctgagccacagagctgcaggtaggggaggcagctggaaccctggcrcctggctgtggagtttgaggctctgactcctgcgccgcgctgctgccccaaccctagtcatacgaggtgtttcaccccgccctggatactctgagatccc

SEQ ID NO: 237795 - DNA, 201 bp, Homo sapiens; identical to SEQ ID NO: 46107

SEQ ID NO: 237796 - DNA, 201 bp, Homo sapiens
cagtggtcattgcggggggtaccatgcagccggtaaggacacctttcccagcccctcgtgccccaggtgttgggatgagatggggacttgggagagatgcrttatcagtcctgttctctcctggggccccaagccagaaagggtcagctcgagcaggcccagtggtgtccactgggtgacactgctattctctcactgctg

SEQ ID NO: 237797 - DNA, 201 bp, Homo sapiens
gacaagagggaggcctcctccccattctgctctgtgcagctcttgcagcccctgcagacgagagtcaggccagcgtcccgcaaccagcttccccactgatkcacatcgaaggcttcctggcagctctcactacggccaaccaggacggcagggtcatcctgagccgccaaggtaatcaggtggttcttggccaggttcagt

SEQ ID NO: 237798 - DNA, 201 bp, Homo sapiens
gggaggcctcctccccattctgctctgtgcagctcttgcagcccctgcagacgagagtcaggccagcgtcccgcaaccagcttccccactgatgcacatcsaaggcttcctggcagctctcactacggccaaccaggacggcagggtcatcctgagccgccaaggtaatcaggtggttcttggccaggttcagttcccagg

SEQ ID NO: 237799 - DNA, 201 bp, Homo sapiens
tcctttcagtctttctttttcccctaaataagcaaaaacgtgtcttcatttttccctttcctgttttatttacacagaaggcatcttagtcagttgtctgrccatcgctcctctagtgggctgcgtggttctctgttggacagatgtagggagcttatccaaccagtaccctctggataggcaggcgcatgattacaggga

SEQ ID NO: 237800 - DNA, 201 bp, Homo sapiens
atagggaatccgttttactagcttatcctttcagtctttctttttcccctaaataagcaaaaacgtgtcttcatttttccctttcctgttttatttacacrgaaggcatcttagtcagttgtctgaccatcgctcctctagtgggctgcgtggttctctgttggacagatgtagggagcttatccaaccagtaccctctgg

SEQ ID NO: 237801 - DNA, 201 bp, Homo sapiens
ctctcatccctttccagcccattccccacccccatagggaatccgttttactagcttatcctttcagtctttctttttcccctaaataagcaaaaacgtgycttcatttttccctttcctgttttatttacacagaaggcatcttagtcagttgtctgaccatcgctcctctagtgggctgcgtggttctctgttggacag

SEQ ID NO: 237802 - DNA, 201 bp, Homo sapiens; identical to SEQ ID NO: 46203

SEQ ID NO: 237803 - DNA, 201 bp, Homo sapiens
tcattgggtataacaacatatgtaatatataattactgtttcttaattcattcaacatctagaatataaattcagttaatttattttattctctaagaaartgatctctctctgatgaacattcttatttaattttatcctgagtgatagaaaatattttatcaacagtgatgcatcatcctatttgctttccaaagggga

SEQ ID NO: 237804 - DNA, 201 bp, Homo sapiens; identical to SEQ ID NO: 46068

SEQ ID NO: 237805 - DNA, 201 bp, Homo sapiens; identical to SEQ ID NO: 46070

SEQ ID NO: 237806 - DNA, 201 bp, Homo sapiens; identical to SEQ ID NO: 46072

SEQ ID NO: 237807 - DNA, 201 bp, Homo sapiens; identical to SEQ ID NO: 46073

SEQ ID NO: 237808 - DNA, 201 bp, Homo sapiens; identical to SEQ ID NO: 46074

SEQ ID NO: 237809 - DNA, 201 bp, Homo sapiens; identical to SEQ ID NO: 46076

SEQ ID NO: 237810 - DNA, 201 bp, Homo sapiens
gatgctgctgcatgcggccactcggcaggctgcgggcatccggctgcaggaccaggtggtgatcatcgacgaggcgcacaacctgatcgacaccatcacgrgcatgcacagcgtggaggtcagcggctcccaggtgcgtgggcctcccctccccgggccagggcctgccgtgaggtaaagggacttggatggttcctccag

SEQ ID NO: 237811 - DNA, 201 bp, Homo sapiens; identical to SEQ ID NO: 46079

SEQ ID NO: 237812 - DNA, 201 bp, Homo sapiens
ttccaggaacctaagagcgcacaccaggtggagcaggtgctgctggcgtattccaggtgcatccaggtgcgggcgtcatgctgagcttgggtctgagaccrtgtgggggtggcagctggaaacgtgggtgtcatccaagttttggctcagcaactcagcgtctgggtttctcctacaggcctgtggccaggagagaggcca

SEQ ID NO: 237813 - DNA, 201 bp, Homo sapiens; identical to SEQ ID NO: 46082

SEQ ID NO: 237814 - DNA, 201 bp, Homo sapiens
tctgtctttctcagatattccaggaacctaagagcgcacaccaggtggagcaggtgctgctggcgtattccaggtgcatccaggtgcgggcgtcatgctgrgcttgggtctgagaccatgtgggggtggcagctggaaacgtgggtgtcatccaagttttggctcagcaactcagcgtctgggtttctcctacaggcctgt

SEQ ID NO: 237815 - DNA, 201 bp, Homo sapiens
gtcacctggacccctgctgctggcattggccacaaagcctcctggtctggctccaaagcctggcagggtcttttccccgggggagctgcaggcagggaacrgtcctgatgggtcatccccttcactcccagcccagagcccccggccaggcacccccagggaaggctctggtggagaacctgtgcatgaaggccgtcaacc

SEQ ID NO: 237816 - DNA, 201 bp, Homo sapiens
ggtccatgcccactgggagaagggtggcctgctgggccgtctggctgccaggaagaaggtgagtggcctgtcggcagccttgccacttgtgaggacagtgycactgagtcctcctgggagctcttgtgctcatcgggtcaggacaggcttctggctcctcatccccaccgctcccagtccctgactacagaggatttcccc

SEQ ID NO: 237817 - DNA, 201 bp, Homo sapiens
ctgccccctccggaagcttggatgcccctccacaccctcttgatcttccctgtgatgtcacctggacccctgctgctggcattggccacaaagcctcctgktctggctccaaagcctggcagggtcttttccccgggggagctgcaggcagggaacagtcctgatgggtcatccccttcactcccagcccagagcccccgg

SEQ ID NO: 237818 - DNA, 201 bp, Homo sapiens
gccctctctgcagtgtcttacagcacacctgcatctccagttttcggcccctccctgatcttaccaggtcacgtgatccctccagacaacatctgcccctygtcatctgcagcgggatctccaaccagccgctggaattcacgttccagaaaagagacctgcctcagatggtcagtcccagccagctcgctgcaccacagc

SEQ ID NO: 237819 - DNA, 201 bp, Homo sapiens
tgacggaagtgtcataaaagtggacttaaatgttgataagcagctggttgggttccacacagggtgcgagctcaggatgcacgttggaggggacacagggycagagcaaggtgggaatgcgggtattatgggccaggccatcctccagctggtggagcaccgcagcactgcagtgtgtggccctggcttaacagcagtgcg

SEQ ID NO: 237820 - DNA, 201 bp, Homo sapiens
acctggactcacctgggggaccccctttgctgggacgatagaagtgtctgttgggcttgcactcacctcccaccgatctgtttttccaggcagcctcagtsagagcaccctgaagtttttgctcctgaatccagctgtgcactttgcccaagtggtgaaggaatgccgggcagtggtcattgcggggggtaccatgcagcc

SEQ ID NO: 237821 - DNA, 201 bp, Homo sapiens
taatcaggtggttcttggccaggttcagttcccaggaaggagccaagctgagcccgggagccgcagcatgaaaggattctttccttccatcctgggaactycctgggttaggaggaagcagtgcagtgggcactggcctgctgtgacctgggcaagcagtggaggtggacgggaggagatcgaggggctgggatggaggtc

SEQ ID NO: 237822 - DNA, 201 bp, Homo sapiens
cctgacaagagggaggcctcctccccattctgctctgtgcagctcttgcagcccctgcagacgagagtcaggccagcgtcccgcaaccagcttccccactratgcacatcgaaggcttcctggcagctctcactacggccaaccaggacggcagggtcatcctgagccgccaaggtaatcaggtggttcttggccaggttc

SEQ ID NO: 237823 - DNA, 201 bp, Homo sapiens
ataccttggtctggctgctgtgtcccggcctcctggagaaggggtgaaaaacatgaacttacagggctttgggttccacgtgcaagcacgtgagtcagacrtgggaggctcctggacccacctgccctctaagtgggtccgttgcatgctataaacagtgaaaagcaaaacaaagccgttcaaatacagatgctcttctta

SEQ ID NO: 237824 - DNA, 201 bp, Homo sapiens
cagcttcaggccatgggatgcagggctggcttccctgccaacgcctggcgctgatggattcttcccgcattgctggaaagggcagactgaggcgctgacamaagaagagttgtagctggtcataagtgacagcatcctctgttcactcgattggtcagttgtagcttcatccaggagatggtcatggggttcctgctgcat

SEQ ID NO: 237825 - DNA, 201 bp, Homo sapiens
gagcatagactagtagagctagctcagcttcaggccatgggatgcagggctggcttccctgccaacgcctggcgctgatggattcttcccgcattgctggraagggcagactgaggcgctgacaaaagaagagttgtagctggtcataagtgacagcatcctctgttcactcgattggtcagttgtagcttcatccaggag

SEQ ID NO: 237826 - DNA, 201 bp, Homo sapiens
gctttttcctgcttcttgggcccagtttccatttcttccttttttctgtttttcctggctattctagtgctaatttccttcctttcctttcctaggctggycttagagcatcctctcctatgtacagccagaccttctttcaagcttttattaaaatggggaaaggtcatttgggaggctttgttgttttcctgtttctaa

SEQ ID NO: 237827 - DNA, 201 bp, Homo sapiens
ttcctgtggtgagaagctgtgcccagggtggggcaggctagaggtcaggttctggcccccgttttctgtgggtaatacctcataccgtgaccaggcacagrggcggaggagaccccgggatgggagcctcacccttcgtgcgctcgcccaggctctcctgctttgctccctgctgcctgctgcccagtgtgactggcgatg

SEQ ID NO: 237828 - DNA, 201 bp, Homo sapiens
ttggcctagacgggatctctcagccttacaagccctctccaggtggtaggtacagagtggagagaggctgagttttgatcacagtcggagagggctgacgraaggggtagaacggagcagctggtgacatgggtgatgacccgggagttcctgacgtccacccactgggctcttgtctcctccccacgtgtgtggtgatgg

SEQ ID NO: 237829 - DNA, 201 bp, Homo sapiens
caggcctgtggccaggagagaggccaggtgacagaggccctgctcctctctgtggttggaggaaagatgagtgaagggatcaacttctctgacaacctaggccggtaagtagtggttctgctcatctcctgggtcgtgatacatggccggccctcactcccagcagctgggcccctgcctgctgtctgctgccattagagc

SEQ ID NO: 237830 - DNA, 201 bp, Homo sapiens
ctccggggttcaagcgattctcatgcctcaacctcctgagtagctgtgattacaggcatgtgccaccacacccagctaatttttgtattttagtagagatrgggttttaccatgttggccaggctggtcttgaattcagttgatccgccagccttggcatcccaaagagctgggattacaggcatgagccaccacgcctgg

SEQ ID NO: 237831 - DNA, 201 bp, Homo sapiens
gtgctagggtgtttgtcgtgctcctggggcattttggtagacagatctaggaaatgttttcagagtgaatccatactggtatttctttctttctttctttytttttttttttttgagacacagtctcgctctgtctcccaggctggagcgcagtgacccgatcacggctctctgcaacctctgcctccggggttcaagcga

SEQ ID NO: 237832 - DNA, 201 bp, Homo sapiens
tacacaaggaggctgcagccccacaaggagagactccttggctgaggccacaagcctcggcagtggagagctgggctagaactcagccggcctggctctasatctcaggctctgaggcagctgactgcactgggtaacctttgaggtgccaaccgtcaaggcgtccttagcctgagctttccttctcccataaagcctctg

SEQ ID NO: 237833 - DNA, 201 bp, Homo sapiens
gcttgaacccaggaggcggaggttgcagggagccgagattgagccactgcactccagcctgggcaacagatcgagactccatctcaaaaaaaaaaaaaaaragagatggagaggacagtatggtccacctctgtgggctggttgtcctagagattaaatggtgtttaatttaaagagaaagcactagcacttgtgcctcag

SEQ ID NO: 237834 - DNA, 201 bp, Homo sapiens; identical to SEQ ID NO: 46100

SEQ ID NO: 237835 - DNA, 201 bp, Homo sapiens
caggcaggcaagcctcctgcaggggagccccgccctgctcaggtggcctcatctcccctcccagctggtggtgctgccctatcagatgctgctgcatgcgrccactcggcaggctgcgggcatccggctgcaggaccaggtggtgatcatcgacgaggcgcacaacctgatcgacaccatcacgggcatgcacagcgtgga

SEQ ID NO: 237836 - DNA, 201 bp, Homo sapiens
tttgtctgcacccagccccctctcctccctttggtggcttcctgtgtgtccagggctagcgtcttctaggtgaatctaagatgtcagtaccttagccctcrgctgcttgctcagagcctggtttgtgttctttccccagctctgccaggcccattcccagctgctgcagtacatggagcgatacgggtgagatgtgactct

SEQ ID NO: 237837 - DNA, 201 bp, Homo sapiens
atgcggccactcggcaggctgcgggcatccggctgcaggaccaggtggtgatcatcgacgaggcgcacaacctgatcgacaccatcacgggcatgcacagmgtggaggtcagcggctcccaggtgcgtgggcctcccctccccgggccagggcctgccgtgaggtaaagggacttggatggttcctccagacacctgggcc

SEQ ID NO: 237838 - DNA, 201 bp, Homo sapiens
ctagatggagtgcgtgattctggtatggcctcatgtggacctgcgaaggatggagagaacatggtctctgcttcccagaaaaaaaggagaaatttggtaayaagtgtggagactgctcttaaataatgctccagatttcaagccacttcttcctggaccatgagagagctccctaatgttgtatttatttttcctaggtcc

SEQ ID NO: 237839 - DNA, 201 bp, Homo sapiens
aagctgttttttgaatgtctctacacagtccaggcaggaaatagaagcactcacatcaggagctcagtgtcaggcaggcaagcctcctgcaggggagcccygccctgctcaggtggcctcatctcccctcccagctggtggtgctgccctatcagatgctgctgcatgcggccactcggcaggctgcgggcatccggctgc

SEQ ID NO: 237840 - DNA, 201 bp, Homo sapiens
tgtgatggtgaccttgaaccatcactctttgtagactctaggtcttttcccaacccggtggaaactagcagggagattccatacttgaggaattcagcctyttgctttttctctgacccacagtggacactggaggaaaccttcccttccttcccttttctcttagctcccaccagcctaagggctgtggaaaccagtacc

SEQ ID NO: 237841 - DNA, 201 bp, Homo sapiens
ctgtgcctgggctgaattgaggctgggatgtgatggtgaccttgaaccatcactctttgtagactctaggtcttttcccaacccggtggaaactagcaggsagattccatacttgaggaattcagcctcttgctttttctctgacccacagtggacactggaggaaaccttcccttccttcccttttctcttagctcccac

SEQ ID NO: 237842 - DNA, 201 bp, Homo sapiens; identical to SEQ ID NO: 46110

SEQ ID NO: 237843 - DNA, 201 bp, Homo sapiens
tggggtgtgcccactggtttctgactgtgaaacccccacgacatcccaccagctctactgacctgtgcctgggctgaattgaggctgggatgtgatggtgrccttgaaccatcactctttgtagactctaggtcttttcccaacccggtggaaactagcagggagattccatacttgaggaattcagcctcttgctttttc

SEQ ID NO: 237844 - DNA, 201 bp, Homo sapiens; identical to SEQ ID NO: 46086

SEQ ID NO: 237845 - DNA, 201 bp, Homo sapiens
gcagaagaaagaagagagggacctggtgaaccgactgaaggtgagacctggggtatccggaagtgggagtgctggaggaaacagggcttcagcgattgttstggggcgattccgagactcaggcagtgcatgctcccctgccgttgctgtgcctctcagctcttccctcagctccttgggtcgatggtgctgccgctgtgc

SEQ ID NO: 237846 - DNA, 201 bp, Homo sapiens
gggacagacggccgcacccacaccacgtcagggtatatgtccgtttggaggctttcctcaaacgtctggcagccctggactgcctgtgtatgctgaagaasagggcacagaaaggctgagtctgcagggcaggctggctgtggctgccaggctgggctcctttgttgggggcctccagttgccagcacatctgtgggattt

SEQ ID NO: 237847 - DNA, 201 bp, Homo sapiens
ccgtgtcatttgaattagttgctcctcagactgacttgacagatttcagcatgagtgttagtggggacagacggccgcacccacaccacgtcagggtataygtccgtttggaggctttcctcaaacgtctggcagccctggactgcctgtgtatgctgaagaagagggcacagaaaggctgagtctgcagggcaggctggc

SEQ ID NO: 237848 - DNA, 201 bp, Homo sapiens
gcgcgtggtggagttttcctgtggtgagaagctgtgcccagggtggggcaggctagaggtcaggttctggcccccgttttctgtgggtaatacctcatacygtgaccaggcacaggggcggaggagaccccgggatgggagcctcacccttcgtgcgctcgcccaggctctcctgctttgctccctgctgcctgctgccca

SEQ ID NO: 237849 - DNA, 201 bp, Homo sapiens
catttttaccttggagccctcctggaatcctccatcctttccgtgtcatttgaattagttgctcctcagactgacttgacagatttcagcatgagtgttartggggacagacggccgcacccacaccacgtcagggtatatgtccgtttggaggctttcctcaaacgtctggcagccctggactgcctgtgtatgctgaag

SEQ ID NO: 237850 - DNA, 201 bp, Homo sapiens
tatgacctcctttacccttgaaggccagatctgtagtacagtcacatggcagggttaggatttcaacatatgtttgtttgttaagatgggcagtctcactrtgtggcccaggctggtctcaaactcaagcgatcctcccctctcagcctcccaagtacctggtggctggcaagatccaagattactggtgcacaccaccat

SEQ ID NO: 237851 - DNA, 201 bp, Homo sapiens; identical to SEQ ID NO: 46097

SEQ ID NO: 237852 - DNA, 201 bp, Homo sapiens; identical to SEQ ID NO: 46095

SEQ ID NO: 237853 - DNA, 201 bp, Homo sapiens
  misc_feature (1)...(201): n = A,T,C or G
cctgccatgagtcccgaggcttccaactcaagacttgggtttggggtgctgagctcatgtctcctttttacatttccctacccacagacctgagcggccangggaggttggggttggcatttgcctgggggagtttctgagcaagcagcacctgctaccttggtggaacccattgctgggaatggccagggctcagcacca

SEQ ID NO: 237854 - DNA, 201 bp, Homo sapiens
tctggctgccaggaagaaggtgagtggcctgtcggcagccttgccacttgtgaggacagtgccactgagtcctcctgggagctcttgtgctcatcgggtcrggacaggcttctggctcctcatccccaccgctcccagtccctgactacagaggatttccccaaagtccctggctgtgaggttctccagtccgctggccag

SEQ ID NO: 237855 - DNA, 201 bp, Homo sapiens
agagatggtcaagctctgtcctgaggtcatgcagctcatgagtgtggagctggggtgtgcccactggtttctgactgtgaaacccccacgacatcccaccrgctctactgacctgtgcctgggctgaattgaggctgggatgtgatggtgaccttgaaccatcactctttgtagactctaggtcttttcccaacccggtgg

SEQ ID NO: 237856 - DNA, 201 bp, Homo sapiens
atttattactcacctgggaaaggacctgatcgttgccattggcagcatggttcaatggctgcaaatggatctgatggagagcgtgtggctttgggaggagygtgccgccttccacagtgagcagcgaggctgggacctgcagggatgaggtcccgggaggggatgcggcagcccttgagtgctggttggggaaggagagct

SEQ ID NO: 237857 - DNA, 201 bp, Homo sapiens
cctatcatgcgccatgcatggcaccaggtgtctctggtcttcacgctgactctgccatgggggtggtgttcctgttttacattggaaacgtggagattcaragatggtcaagctctgtcctgaggtcatgcagctcatgagtgtggagctggggtgtgcccactggtttctgactgtgaaacccccacgacatcccaccag

SEQ ID NO: 237858 - DNA, 201 bp, Homo sapiens
gaaatgcaggggagattgggtttaggggctttcctggtctgcattctgctacagccgttaaatgccgctagatggagtgcgtgattctggtatggcctcaygtggacctgcgaaggatggagagaacatggtctctgcttcccagaaaaaaaggagaaatttggtaacaagtgtggagactgctcttaaataatgctccag

SEQ ID NO: 237859 - DNA, 201 bp, Homo sapiens
ggatgcacgttggaggggacacagggccagagcaaggtgggaatgcgggtattatgggccaggccatcctccagctggtggagcaccgcagcactgcagtrtgtggccctggcttaacagcagtgcggaaaagcttttctcttggggctgtggtgctttccaggtgtgtgaagttaaaacattttagggccatacggtagg

SEQ ID NO: 237860 - DNA, 201 bp, Homo sapiens
ggaagaaggtgagtggcctgtcggcagccttgccacttgtgaggacagtgccactgagtcctcctgggagctcttgtgctcatcgggtcaggacaggcttytggctcctcatccccaccgctcccagtccctgactacagaggatttccccaaagtccctggctgtgaggttctccagtccgctggccagaaaacacaagg

SEQ ID NO: 237861 - DNA, 201 bp, Homo sapiens
agggagatggcatgtgtgaggcagaagtcccctcaggattggattttgtcattactgaagttgtctggaggggactgaattgaggaatgctcaagatcagygcaggctcctcctgctgccctatcatgcgccatgcatggcaccaggtgtctctggtcttcacgctgactctgccatgggggtggtgttcctgttttacat

SEQ ID NO: 237862 - DNA, 201 bp, Homo sapiens; identical to SEQ ID NO: 46102

SEQ ID NO: 237863 - DNA, 201 bp, Homo sapiens
cactgagtcctcctgggagctcttgtgctcatcgggtcaggacaggcttctggctcctcatccccaccgctcccagtccctgactacagaggatttccccmaagtccctggctgtgaggttctccagtccgctggccagaaaacacaaggccacgagcagacccgagacctggcaccctaaacctgtctctgggaaatgtc

SEQ ID NO: 237864 - DNA, 201 bp, Homo sapiens
gggcctgccgtgaggtaaagggacttggatggttcctccagacacctgggccaagaattcctccggaggtggggcttgctacagggtgcacgagtcaaggyggtgacctcatcggaggctgaccatggctttccagtgcatcccagaactctggggaccccgctatgacagagtgcctcatttccctgcacctcacctgcc

SEQ ID NO: 237865 - DNA, 201 bp, Homo sapiens
cacagcgtggaggtcagcggctcccaggtgcgtgggcctcccctccccgggccagggcctgccgtgaggtaaagggacttggatggttcctccagacaccygggccaagaattcctccggaggtggggcttgctacagggtgcacgagtcaaggtggtgacctcatcggaggctgaccatggctttccagtgcatcccaga

SEQ ID NO: 237866 - DNA, 201 bp, Homo sapiens
ggtggtgatcatcgacgaggcgcacaacctgatcgacaccatcacgggcatgcacagcgtggaggtcagcggctcccaggtgcgtgggcctcccctccccrggccagggcctgccgtgaggtaaagggacttggatggttcctccagacacctgggccaagaattcctccggaggtggggcttgctacagggtgcacgagt

SEQ ID NO: 237867 - DNA, 201 bp, Homo sapiens
ctcaggagtcagaccagccctagtttcctgtgtttcatgtattggcttttcatgtgaaactcgaggagagcttgtccgttgctacaagctgttttttgaaygtctctacacagtccaggcaggaaatagaagcactcacatcaggagctcagtgtcaggcaggcaagcctcctgcaggggagccccgccctgctcaggtgg

SEQ ID NO: 237868 - DNA, 201 bp, Homo sapiens
ttccgtgcatggggacgctggagcccagaaaagttaagtgactcatattttctcaccaagcgtgggtgatggagccattcagttttccgatattttatttyttatatgagtattcctttaactggaaactttcctaacaacaaacacctaaagacctgcagagttgcttttatttttgttaccccagctccacgccttaac

SEQ ID NO: 237869 - DNA, 201 bp, Homo sapiens
tccagtgaaattccgtgcatggggacgctggagcccagaaaagttaagtgactcatattttctcaccaagcgtgggtgatggagccattcagttttccgayattttattttttatatgagtattcctttaactggaaactttcctaacaacaaacacctaaagacctgcagagttgcttttatttttgttaccccagctcc

SEQ ID NO: 237870 - DNA, 201 bp, Homo sapiens
gagggccctgcagggccagaaagccgctcttggctctcactgtggtctaggccatgaggggcgtcctcatcacactgtagtttgggggatgccccccaccrtggtcaggttgatggcaccttaacccattctctcctgaggcgtgagttggaggaggcgcgtgggatcccttggggtctccaggcagcagggccagttggc

SEQ ID NO: 237871 - DNA, 201 bp, Homo sapiens
  misc_feature (1)...(201): n = A,T,C or G
ggggtgctgagctcatgtctcctttttacatttccctacccacagacctgagcggccacgggaggttggggttggcatttgcctgggggagtttctgagcnagcagcacctgctaccttggtggaacccattgctgggaatggccagggctcagcaccagcgctcagcagatgctcagtgcgttttgctgagtttgctgag

SEQ ID NO: 237872 - DNA, 201 bp, Homo sapiens
aggcaggtgttgctcggagccccagcctctgttcctatgcaggcagggccatcaggcaccagaaggattttgccagcatagtgctcctggaccagcgataygcccggccccctgtcctggccaagctgccggcctggatccgagcccgcgtggaggtcaaagctacctttggccccgccattgctgctgtgcagaaggtca

SEQ ID NO: 237873 - DNA, 201 bp, Homo sapiens; identical to SEQ ID NO: 46432

SEQ ID NO: 237874 - DNA, 201 bp, Homo sapiens
ggaggaaaaaaaagatgacgtcaacatggagcagagtttttcttagaccttagcctagcaaggaaagagaaatgcctggtctcagtgctgggaagctgttycagccagagccccgtggctgtgaagagagctctcctgtctggagccaaacagaaagctcataggtcttgaggccagaaaagttagtaggtggcggctctg

SEQ ID NO: 237875 - DNA, 201 bp, Homo sapiens; identical to SEQ ID NO: 46035

SEQ ID NO: 237876 - DNA, 201 bp, Homo sapiens; identical to SEQ ID NO: 46037

SEQ ID NO: 237877 - DNA, 201 bp, Homo sapiens
gcccctgcccagggcagagaccaccgtgttgctttatgcctcgctggtgagagggggtcataaacagtttgtgctccatgaaccgttcctgcccacctccraggtcgtgtttctgctccctctcttctcccttagagcccatggggacaaggcagagaacttgagtggagatgaaggtggtgaatattagaggaacaaagt

SEQ ID NO: 237878 - DNA, 201 bp, Homo sapiens; identical to SEQ ID NO: 46040

SEQ ID NO: 237879 - DNA, 201 bp, Homo sapiens; identical to SEQ ID NO: 46089

SEQ ID NO: 237880 - DNA, 201 bp, Homo sapiens
ttcggcccctccctgatcttaccaggtcacgtgatccctccagacaacatctgccccttgtcatctgcagcgggatctccaaccagccgctggaattcacsttccagaaaagagacctgcctcagatggtcagtcccagccagctcgctgcaccacagcctggcctcaggcagcaaagggttttctggggcagggacgctc

SEQ ID NO: 237881 - DNA, 201 bp, Homo sapiens
gctttggaacacagatgagtgcatgttcattctgccttgtttaattttagagacagggtgtcgctctgttgcccagggccgagtgcagtgttaagatcatrgttcactgcagcctcgaccttctggcatcaagtgatcttcccacgtcagcctcctgagcagctgggactacaggtgtgcgccatcacacctagctaattt

SEQ ID NO: 237882 - DNA, 201 bp, Homo sapiens
ctgccccttctacaaccacgagcagatgggccttctccgggatgaggccctggcagaggtgaaggacatggagcagctgctggcccttgggaaggaggccmgggcctgtccctattacaggagccgccttgccatccctgcagcccaggtgagggccctgcagggccagaaagccgctcttggctctcactgtggtctagg

SEQ ID NO: 237883 - DNA, 201 bp, Homo sapiens; identical to SEQ ID NO: 46045

SEQ ID NO: 237884 - DNA, 201 bp, Homo sapiens
gcctgcagcagctgcagcacagggtgcagctcaagtatgcagccaagcgcctggtgagcctcatttcttggggggcaggattatgtccaggcagggtcgcyctgcttggaggctcatgggtgcgtggccagggtcttggtctcccctccatgaccctcactggctatgtgctcccgtacagaagctgggctgtgagtggtt

SEQ ID NO: 237885 - DNA, 201 bp, Homo sapiens
cgagcagatgggccttctccgggatgaggccctggcagaggtgaaggacatggagcagctgctggcccttgggaaggaggcccgggcctgtccctattacrggagccgccttgccatccctgcagcccaggtgagggccctgcagggccagaaagccgctcttggctctcactgtggtctaggccatgaggggcgtcctca

SEQ ID NO: 237886 - DNA, 201 bp, Homo sapiens
acattccggaagtggagggccgggccagcgtgattgacaagcgggaacccctgtgtggggacggggcaggcctaggaaggttgtgcctgcggtggaacggsgcggtgcgcaggagtgggcattaacagcagccgcgtgtctgggtcttagatttggcctagctgtgttgagcttttcatggattatgttacgtagataaga

SEQ ID NO: 237887 - DNA, 201 bp, Homo sapiens; identical to SEQ ID NO: 46103

SEQ ID NO: 237888 - DNA, 201 bp, Homo sapiens
tgcaaaggtgggtggcccgtccggagcggaaaaacattccggaagtggagggccgggccagcgtgattgacaagcgggaacccctgtgtggggacggggcmggcctaggaaggttgtgcctgcggtggaacggcgcggtgcgcaggagtgggcattaacagcagccgcgtgtctgggtcttagatttggcctagctgtgtt

SEQ ID NO: 237889 - DNA, 201 bp, Homo sapiens; identical to SEQ ID NO: 46104

SEQ ID NO: 237890 - DNA, 201 bp, Homo sapiens
gtccctggctgtgaggttctccagtccgctggccagaaaacacaaggccacgagcagacccgagacctggcaccctaaacctgtctctgggaaatgtcctstgtctttctcagatattccaggaacctaagagcgcacaccaggtggagcaggtgctgctggcgtattccaggtgcatccaggtgcgggcgtcatgctgag

SEQ ID NO: 237891 - DNA, 201 bp, Homo sapiens; identical to SEQ ID NO: 46106

SEQ ID NO: 237892 - DNA, 201 bp, Homo sapiens; identical to SEQ ID NO: 46105

SEQ ID NO: 237893 - DNA, 201 bp, Homo sapiens
ggctgtagtcctgccaagggtctctcctcagttttgagtctcaaggtgaagacgcggtttgtgggtggctgaggggttgctccatgggggctccctccctyccttccttccttagatggacgaggtgggtcgcatcctctgtaacctgtgcggtgtggtttctggaggggtggtctgtttcttcccctcctacgagtacct

SEQ ID NO: 237894 - DNA, 201 bp, Homo sapiens; identical to SEQ ID NO: 46108

SEQ ID NO: 237895 - DNA, 201 bp, Homo sapiens
acctcataccgtgaccaggcacaggggcggaggagaccccgggatgggagcctcacccttcgtgcgctcgcccaggctctcctgctttgctccctgctgcstgctgcccagtgtgactggcgatggtgggtgggtgagcgctgtcagtcgctgttcctgtgctggatgatggggcaggtaaatgccctctctgcagtgtct

SEQ ID NO: 237896 - DNA, 201 bp, Homo sapiens; identical to SEQ ID NO: 46111

SEQ ID NO: 237897 - DNA, 201 bp, Homo sapiens
  misc_feature (1)...(201): n = A,T,C or G
ggctttgggaggagcgtgccgccttccacagtgagcagcgaggctgggacctgcagggatgaggtcccgggaggggatgcggcagcccttgagtgctggtnggggaaggagagctgcccccagtgaggaggcgccgagctgagtggcccagactccttaggagaggcctggttttgggcttcctggtgattttccttcatg

SEQ ID NO: 237898 - DNA, 201 bp, Homo sapiens; identical to SEQ ID NO: 46083

SEQ ID NO: 237899 - DNA, 201 bp, Homo sapiens; identical to SEQ ID NO: 46084

SEQ ID NO: 237900 - DNA, 201 bp, Homo sapiens; identical to SEQ ID NO: 46085

SEQ ID NO: 237901 - DNA, 201 bp, Homo sapiens
gcactcacatcaggagctcagtgtcaggcaggcaagcctcctgcaggggagccccgccctgctcaggtggcctcatctcccctcccagctggtggtgctgycctatcagatgctgctgcatgcggccactcggcaggctgcgggcatccggctgcaggaccaggtggtgatcatcgacgaggcgcacaacctgatcgacac

SEQ ID NO: 237902 - DNA, 201 bp, Homo sapiens
tttccctttcctgttttatttacacagaaggcatcttagtcagttgtctgaccatcgctcctctagtgggctgcgtggttctctgttggacagatgtaggragcttatccaaccagtaccctctggataggcaggcgcatgattacagggaaaggtccgggggcacatgctgtttggtatttgtgggctgtatcttctcac

SEQ ID NO: 237903 - DNA, 201 bp, Homo sapiens
atccctttccagcccattccccacccccatagggaatccgttttactagcttatcctttcagtctttctttttcccctaaataagcaaaaacgtgtcttcwtttttccctttcctgttttatttacacagaaggcatcttagtcagttgtctgaccatcgctcctctagtgggctgcgtggttctctgttggacagatgta

SEQ ID NO: 237904 - DNA, 201 bp, Homo sapiens; identical to SEQ ID NO: 46067

SEQ ID NO: 237905 - DNA, 201 bp, Homo sapiens; identical to SEQ ID NO: 46471

SEQ ID NO: 237906 - DNA, 201 bp, Homo sapiens
gaaagaggggttgcctgccctgtttcctatataagtctgaggaaggggagggggtcgccatgggaatgtgctgtagggggaggcaggtgttgctcggagcsccagcctctgttcctatgcaggcagggccatcaggcaccagaaggattttgccagcatagtgctcctggaccagcgatacgcccggccccctgtcctggc

SEQ ID NO: 237907 - DNA, 201 bp, Homo sapiens
tatcagatgctgctgcatgcggccactcggcaggctgcgggcatccggctgcaggaccaggtggtgatcatcgacgaggcgcacaacctgatcgacaccaycacgggcatgcacagcgtggaggtcagcggctcccaggtgcgtgggcctcccctccccgggccagggcctgccgtgaggtaaagggacttggatggttcc

SEQ ID NO: 237908 - DNA, 201 bp, Homo sapiens; identical to SEQ ID NO: 46101

SEQ ID NO: 237909 - DNA, 201 bp, Homo sapiens
cttggtggaacccattgctgggaatggccagggctcagcaccagcgctcagcagatgctcagtgcgttttgctgagtttgctgagggaagactgttttctrttctctctcacacacacagagtggatgaggatgaggatgacctggaggaagaacacataactaaggtaacacgagtgtcctcagctggtgctgtgctggg

SEQ ID NO: 237910 - DNA, 201 bp, Homo sapiens
ggaggcccgggcctgtccctattacaggagccgccttgccatccctgcagcccaggtgagggccctgcagggccagaaagccgctcttggctctcactgtrgtctaggccatgaggggcgtcctcatcacactgtagtttgggggatgccccccaccgtggtcaggttgatggcaccttaacccattctctcctgaggcgt

SEQ ID NO: 237911 - DNA, 201 bp, Homo sapiens
atgatgaagagcaaatatcccccctggggcctcagaggggtccagcttgctggagggagggcagagaggagagcagcctgccatgagtcccgaggcttccractcaagacttgggtttggggtgctgagctcatgtctcctttttacatttccctacccacagacctgagcggccacgggaggttggggttggcatttgcc

SEQ ID NO: 237912 - DNA, 201 bp, Homo sapiens
tttatatccaaattggtcttttcaagtcctacccactcagaggtaccagtcatcattagaagtgttattcttaaatgcaaaattctattggctatatggtaaaaaaaaatatattagaaatatcctctaattagagtttttatttggaaatgtacgcaattatttttttcaacagccgtgccattacaaattacatatatc

SEQ ID NO: 237913 - DNA, 201 bp, Homo sapiens
agttttccctctaggttaaataaccaaggattggctgattgcaaggttttaagggaagattaggataaaattcccattattgcgtagcatcatgtatgacttctttctttaaagaaaactgcaaaaattctccaagttagttaacttctgtaaagtgaaaagctcctttatcctctaataaattaagaaggcataaaaatg

SEQ ID NO: 237914 - DNA, 201 bp, Homo sapiens
agtgggggctggggaggcaagcccccttgatcttgtgaggtcaagatcagaggggaacttgagcaaaggcatgacagcaaatggtgaacaatgggatgttraattggtcattttggaagtggagcagctttaaggaatggtcggtccagggactaaacatggcagtgggctgggtggccaagaaaggggaagaggagttta

SEQ ID NO: 237915 - DNA, 201 bp, Homo sapiens; identical to SEQ ID NO: 46488

SEQ ID NO: 237916 - DNA, 201 bp, Homo sapiens
cttgtttagtgcaccagactcaaactgggtgccactaattcctctgaccaaggaggacactctcttttgtgccatcccattgctgccatcttgtgctcttkgtccctttctttctccctgaagtgtttggtcctgtactactgttcatagcctatctcataacctgggagagggtaatgattgtcctcttcagggctcttg

SEQ ID NO: 237917 - DNA, 201 bp, Homo sapiens
ttggattttggaatatttgcatatagtgagatatcttggggataggacccaattctaactgaaattcatttatatttcatatatatctcatacataagaartatatataagatggccttgaaatcgccttgaaaaccagatgggtttagactcacatagcctgaaggtaattttatacaatattattaatacttttgtata

SEQ ID NO: 237918 - DNA, 201 bp, Homo sapiens
atgcatcccaaatgtgactgtttccctcctctccactgtgacctccccagcctaagcctcccatgcaggaaagtctccttgcatctgctgcagcctctccwcagtgcttctctgtcctgcactcagtgtctacacagcagccagtgtggcctgttgaaaacctaaatcacttcatgtcatgtctgtgctcaaccaacgggg

SEQ ID NO: 237919 - DNA, 201 bp, Homo sapiens
catgaacttctgaaatacgccatttaatgggcctcttgtgctatttggcctgtaaaaggaacttaatcaatagtgggggtgggggtggttcctgttattaygaattcctatgagattttgattcagttgcatgcatgcaaatatacaattatttttacaattatttgaagggccgtgaaagggaagagttagttcctaatc

SEQ ID NO: 237920 - DNA, 201 bp, Homo sapiens; identical to SEQ ID NO: 46493

SEQ ID NO: 237921 - DNA, 201 bp, Homo sapiens
aaataagaaaatattacaatttaggcatatttggtcgtaaattcacctaatttagtaaatttattctacctgaagataggtacatttttaaggcttttgaygcatgttgcagattgctttccagaagggctgtaaaatttgtactctgggagcatatgagagcaaccatatcttcatgctggttatactaagggaatttga

SEQ ID NO: 237922 - DNA, 201 bp, Homo sapiens
ctgatagtagtatggaaatactcacgattgttagtgagatatcaccttgaaggctgtggttcccaggggaaggaagccccctggtagaaagcctgaccccygtgatatgaaggaatgcacccctccttcccattaggcaggtgccagatgcctctaggctaagatggtggtctgtgctcttaattatgaggaatagggaag

SEQ ID NO: 237923 - DNA, 201 bp, Homo sapiens
aagatgaaaggctggtgtctctgtcctgtcaagtatatgttaaagttgcttacagccacaagagatcagcttgccttggtctagatgcttcagagcttatrttcaatttgtaaagaaagggatgatattttaaaatgtcatttcatcttctaggatttgtctttgatccctttcttactctttctgatctcaagggaagta

SEQ ID NO: 237924 - DNA, 201 bp, Homo sapiens
tcgtctgtaaaatggaaatgacattagcccttggcacacagcctggttgtgagaattaaatgagattatgagttttaatgatgtcatttataaagtgctaygcataatacttgtttatagtaattacacaaagatgttaataattttgtaggggctgtttttattgatgctacccatgttcttgtgataaatccttacatt

SEQ ID NO: 237925 - DNA, 201 bp, Homo sapiens
atttgcggtagtcaaaactcatttgagtatattttataatcacaaatttcaaacagtataaaatactacagcatatatgtcttatttttattgtctttgtstttttccaatatgaataaatatggatatttaagatacatactgagacacacagaatctatgtcttttgtctgaggactggtggaactcatattgtcctag

SEQ ID NO: 237926 - DNA, 201 bp, Homo sapiens
atttgttccatgttatgtggcatgttattgcttagtatttattgaattgaattacatggtaatggaaatggatttattgcatatttatgcaatgtttgtarctttcttttttatggaaagaattatgatttccatttattcaatctcaggagttgcataaaaaatattctttcacattgtgtctagttctaaaaggctgga

SEQ ID NO: 237927 - DNA, 201 bp, Homo sapiens
  misc_feature (1)...(201): n = A,T,C or G
tactttcttgcatgtctaaacagtctggagagcacataaaatttagtgtggaaacttgggacagaattacttgttcccaaagcacatgaggttcctaggangacacctaccaccttatattatagttatttcagttccttcagagcagtgaacatgcctctttttttttttttttttttttttgcattctactgcctgaat

SEQ ID NO: 237928 - DNA, 201 bp, Homo sapiens
aaatatgcagaagaatgcaaaggcatgattgttaccaaccctgggacggtatgttctggtgtctgtatattcagaggctggaggaccttcttttccagatstgaatgtttcatgaaaacagtaacagcacattttaaaagttttaggtagtcactgctcttgtccttggataatttttcctttaaatatttagtaaataag

SEQ ID NO: 237929 - DNA, 201 bp, Homo sapiens
gttaccaaccctgggacggtatgttctggtgtctgtatattcagaggctggaggaccttcttttccagatctgaatgtttcatgaaaacagtaacagcacwttttaaaagttttaggtagtcactgctcttgtccttggataatttttcctttaaatatttagtaaataagaaaatattacaatttaggcatatttggtcg

SEQ ID NO: 237930 - DNA, 201 bp, Homo sapiens
tttgatttctaaatgtttattgcccattcatgttttcttttgttaattgcttgttaatatcctttgatcttttttgtagccttcttttttattgatcctcygccataattattataaatattttacatttctttgggtgctacttaagttttttgttttaaaattagcttttaatattcaattttagaagtaaaaaatgca

SEQ ID NO: 237931 - DNA, 201 bp, Homo sapiens
attcatgttttcttttgttaattgcttgttaatatcctttgatcttttttgtagccttcttttttattgatcctccgccataattattataaatattttamatttctttgggtgctacttaagttttttgttttaaaattagcttttaatattcaattttagaagtaaaaaatgcaaacattaaaaggatataattaaaag

SEQ ID NO: 237932 - DNA, 201 bp, Homo sapiens
ctattctacatttttaatgatactggtagtatcagtactggtggtttcataagctttcacatgtaactagtttatgcagtttgtagtgtgtatgtgtatakgtgtgtgtgtgtgtgtgtgtgtgtgtgttttctccaaaatgaaaaataaggaagaatttgagtttgtctcttcgaagtgtatccttgaccaaaagagcac

SEQ ID NO: 237933 - DNA, 201 bp, Homo sapiens
tcttaaacaaagatggcataataaatgttatagggtgtagccaaagtctagaatatatttcatttcctgctccctcaacccctgccataaatttagagatactatagatattttaaatcactgtttcctgtgttggtaccatggcatggtgtttaaaatcacagaaacatgaataattcaatagcattctattccacagtt

SEQ ID NO: 237934 - DNA, 201 bp, Homo sapiens
gcttggggcatttgctctggagctgcctagtggcatagctacattataattggctccctttgggatattaattaggtggaatgtcagtcatctgtcttatrtggcatgcttctgtgaaacaaacatggagcacatgaagtcctaatataacttctagaagtatatttggaaaactgaaacttcataaatttgcattgtgtt

SEQ ID NO: 237935 - DNA, 201 bp, Homo sapiens
ttgtggtatgtgtttgtgtgtgtgtgagagagagtgtgtgcatgtttatgtcctcgtgtttaaggcatgagagtgtgtgtgtgtgtgtgtgcgtgtgtgtragagagagagaggggatatataggatatttcttattgctcgatggattgatataggagaagataggttatcagtgattttcagtaggaagtgtacattcc

SEQ ID NO: 237936 - DNA, 201 bp, Homo sapiens
atttttagtctgtatgagatacttgattttttaattggagcgtagtgctgcttgtgaagaaaggaaagatttgtttaaaggctaactgacctgagagagattttttttttttttttttttttaagacatgggagtcttgctgtgttgcccaggctggaatccagtggctatttgcaggtgcaataatagtgcactctggcc

SEQ ID NO: 237937 - DNA, 201 bp, Homo sapiens
aattttgcttctgggaaaacattttgcagcaaacattctagatagtgttgtatttccgcctctgttttgatatgctataattagaggagttgtcagggctytgctgtaaatcctaaatttttccatcaaggcttcaacttggagttatgtatttgtttgaagaaactcagatgtcctgtgaattgcggatctcagtaaaat

SEQ ID NO: 237938 - DNA, 201 bp, Homo sapiens
tttttagtctgtatgagatacttgattttttaattggagcgtagtgctgcttgtgaagaaaggaaagatttgtttaaaggctaactgacctgagagagattttttttttttttttttttttaagacatgggagtcttgctgtgttgcccaggctggaatccagtggctatttgcaggtgcaataatagtgcactctggcct

SEQ ID NO: 237939 - DNA, 201 bp, Homo sapiens
gagatgtgggttggtgtcagagagatttaagaaagcccctgtagttagtgaggccagcttctgctcatgcccaagcctgtcctttgctgtctttgctcagsccccatgggctctgcgtgtcctccttccctcctcagtgcatccctttggtttttctccccttgtacatccccaaactcatattttctctttcagcagcca

SEQ ID NO: 237940 - DNA, 201 bp, Homo sapiens
ttcaaaggcttttctcctttttatatctggttttgttttattgagatgccgtttcttctcttctggtgaatgaatcttttgattttagaatggagcttcarcagtaaacttattagaaaatggtgttagagtgaatttgctgaaaagccttttcctttctatatctactttcctgtaggcgttttatgaccaaacagatgt

SEQ ID NO: 237941 - DNA, 201 bp, Homo sapiens
tccacagctgggcacagcttctcacagggactgacccaagtaagacagagctacttacctgggttgtcaaacataccctgtcccttccccgtgtgctgatygtcattgtaaaacttcctctgtcgtgcccatgtaaccttgtaatatcctgctcaaatcctgctggtatttgttttatggaacgtattcttgttcttatgt

SEQ ID NO: 237942 - DNA, 201 bp, Homo sapiens
tgtgtgtgtgtgtgtgtgtgtgtgtgtgtttctctccagaagtgttttaggatccttaatttgaaagtacgggtaggacgctaggcgcggtggctcacgcmtggaatcccagcactttgggaggccaaggcgggtggatcacctgaggtcaggagttcaagaccagcctggccaacatggcgaaaccacatctctactaaa

SEQ ID NO: 237943 - DNA, 201 bp, Homo sapiens
atgttaatctcttataggattaatttattttaaaaattaattatttttctttttgtggagatggaatctcactatgtaggattaatctaacttctaggtctgtttttttttttttttcaaattgtggtaaaatataagtaatacaaaatttaccatcttaactatttttaagcgtacagttcaatagggttcaacatgacc

SEQ ID NO: 237944 - DNA, 201 bp, Homo sapiens
tgggttttgcctaaagtaatttgtatcttttcttcattttgatatgaaagtttgattttgatagaaagagtagataaagcccatcctagctttatgactgktttcttaatttgatcttgccaaggcattaattatattcaaaatgtggttaattttagcttatgtgttagcaataacacattgttttattttatgtgataa

SEQ ID NO: 237945 - DNA, 201 bp, Homo sapiens
agttattgtgttattttacaagtaaaaggaagatggtcataggattctagatctagaaagatccttaaatcttgtagtctgaaccccctctggagtatacwgtaagtggcatattgtggctgtaagattaagggtagccataacttcattcaggtgtctcacagggctgatactccatgtcagcagtgttgtccgtgtcag

SEQ ID NO: 237946 - DNA, 201 bp, Homo sapiens
gttaatctcttataggattaatttattttaaaaattaattatttttctttttgtggagatggaatctcactatgtaggattaatctaacttctaggtctgtttttttttttttttcaaattgtggtaaaatataagtaatacaaaatttaccatcttaactatttttaagcgtacagttcaatagggttcaacatgacctt

SEQ ID NO: 237947 - DNA, 201 bp, Homo sapiens
tgccacgtaccccagtcacatgggctcagctcagagtcgcatcacttggcctggctgatccgtaggccttcaagctgtggaatgatgatcccgagtgcackgggttaccattggttgcactacaggcattaccagtcaccacctgggtcatggttaggacagtggctgtcacctccacaacctgctcagatgaggaggcat

SEQ ID NO: 237948 - DNA, 201 bp, Homo sapiens
ctgcttccctggagatccgtgagcactaagttaattttttatgtttttcatcacaacaagtcatgactggcattaagagtgtgttataactttttttttgkcttttttttttttgagacggagtctcaaaaaaactcctgctctgttgcccaggctggagttggagtgcagtggtgtaatctcagctcactgcaacttcca

SEQ ID NO: 237949 - DNA, 201 bp, Homo sapiens
gacagaattacttgttcccaaagcacatgaggttcctaggacgacacctaccaccttatattatagttatttcagttccttcagagcagtgaacatgcctytttttttttttttttttttttttgcattctactgcctgaattggtgtctggtgtctgatgtcatgtagatggttagtatttaatgaattgaaatgaggtg

SEQ ID NO: 237950 - DNA, 201 bp, Homo sapiens
accccagtcacatgggctcagctcagagtcgcatcacttggcctggctgatccgtaggccttcaagctgtggaatgatgatcccgagtgcacggggttacsattggttgcactacaggcattaccagtcaccacctgggtcatggttaggacagtggctgtcacctccacaacctgctcagatgaggaggcatgccccaga

SEQ ID NO: 237951 - DNA, 201 bp, Homo sapiens
gcttccctggagatccgtgagcactaagttaattttttatgtttttcatcacaacaagtcatgactggcattaagagtgtgttataactttttttttgtcttttttttttttgagacggagtctcaaaaaaactcctgctctgttgcccaggctggagttggagtgcagtggtgtaatctcagctcactgcaacttccacc

SEQ ID NO: 237952 - DNA, 201 bp, Homo sapiens
ctttcaaagggctttgttcttaccatttttgccctcttcctttgaaaatgaatataaaagcttcccattgtagtttcatgctgatgatagtgggaagagartgtttaataattatccacagtcttttcacagctatgtctgtttttcacaaatatgtctattttcaaagaatttgtcacatggaattactttgctctgtac

SEQ ID NO: 237953 - DNA, 201 bp, Homo sapiens
caaaggaaattgctatgctcccttctcataaatcccccaaatgaaagtacaagatgagtttgctcattttatcaagatcatggggttgttttacatggttytttttaagattactatgttcattccattatctttgttggctacttttaatttcccttttccatgaagttattagttttactgcatttgaaatctgcacca

SEQ ID NO: 237954 - DNA, 201 bp, Homo sapiens
ctgtgggcatagagcaggcagccataagctgtccctgtcctctgctgcagtggctgtttatggcttggagaatagcacacctcagcatgaacgtccccatyaagggctgaaagtagctggtgtaaagttcaggaaggaacatttaagcatgtttcagtgggtttatgcagctgccacctccatgggactggggcaccgctg

SEQ ID NO: 237955 - DNA, 201 bp, Homo sapiens
aaagcagagtgtgaacattatcttacaaacagggtggttgagattcagaatttgttttagtgtgtcttttgtgaaactgcataaggctcacaatgtatggrttttcctctttagcattttgaagtacacaaacttggacactgactcatttgacatctccatattggtttccacctattagttgtagcatgtgagagatgt

SEQ ID NO: 237956 - DNA, 201 bp, Homo sapiens
aacagcagggctgtttttttctttttcaccctcaactgagttttactctttcagccccagttttgctggttttgtattttggtctttgtgtaacccttcawgtttgacccagtacattcagatccattgtttcattttgattatgttaatggcccgcttagaaagctagagtggtgttaatgtgatttttcctatgcccct

SEQ ID NO: 237957 - DNA, 201 bp, Homo sapiens
ctaagcctgccgtcttctgtaacagatgctctagtttaaggagaaaggtgaaaagttatcatttgatcatgttccatatggagtaataggtgcccatgtgmtatttagagttatggactgggagcttaggtaagaggtcagtgctgcagcagaagtgaatgagtaatccaaactgaagtagtaaagcactggaaatagtgg

SEQ ID NO: 237958 - DNA, 201 bp, Homo sapiens
ctgggactgcagaacgaaaaggcatggcataaaaaaaatgagaagactgagaggcagtagggacttagtttggttagaccatggcagagttgaaagggagytacagagacaggtttgatttataaacaaagtgaaatggtccctatgcctcttattttggtttcattttataaaacttttgtgagcttttttatttgttgc

SEQ ID NO: 237959 - DNA, 201 bp, Homo sapiens
accacactcggctgattttttttttttttttttttttttttgagatgaagtcttgctttgttgcctaggctggagtgcagtggcgcagtctcggctcactrcaacctctgcctctgggttcaagtgattctcctgcctcagcctcctgagtagctgggattacaggcgtgcaccaccacgcccagctactttttgtatttt

SEQ ID NO: 237960 - DNA, 201 bp, Homo sapiens
cattattgtctatttcatttccgtctgaaactagcgatcagtggccaaactcttcaggaaactatatggtcttagtatagttttaacagacacttttaaaracacttgacaagaacaagttgaaccttcagttaatgtatattttgccaaactacagtaatttaattttggtttatttttcagaatttttgtgtgaaaggg

SEQ ID NO: 237961 - DNA, 201 bp, Homo sapiens
cagttccttcagagcagtgaacatgcctctttttttttttttttttttttttgcattctactgcctgaattggtgtctggtgtctgatgtcatgtagatgsttagtatttaatgaattgaaatgaggtgagttaatatggagatggattactttccagatttgattcaggatcacatacataaacaaacagattaggttgc

SEQ ID NO: 237962 - DNA, 201 bp, Homo sapiens
taagatggtggtctgtgctcttaattatgaggaatagggaaggtggtttgattactaaaggagctaaccctcatgtgttcttttcttgcgggggtgggtgrgtgggggggagtgttaatatgctgtattaagtaacctttttaattcctattgtaggattaaccacaatgaacggttggaattcctgggtgatgctgttgt

SEQ ID NO: 237963 - DNA, 201 bp, Homo sapiens
aaatatagaacacttccacatttcttgaaaattagtgaatggtggccgggcgcggtggctcacgcctgtaataccagcactttgggaggccgaggtgggcrgatcacaaggtcaggagatcgagaccgtcctggctaacacggtgaaaccccgtctctactaaaaatacaaaaaattagccgggcatggtggcgggcacct

SEQ ID NO: 237964 - DNA, 201 bp, Homo sapiens
aaaggctgaaacactatgatgaccacaggcaccgagatcacagtcatgggcgaggtgagaggcatcggtccctggatcggcgggagcgaggccgcagtccygacaggagaagacaagacagccggtacagatctgattatgaccgagggagaacaccatctcgccaccgcagctacgaacggagcaggtaaaccgcttgtg

SEQ ID NO: 237965 - DNA, 201 bp, Homo sapiens
gttgatttgttttctgtgagtagtttttggcttgcgtttttgctttattatagagatatgtcattttctttgactgttgatggagactctcttttggcatkctctgtttttcatctaggagctgtttacttggagggaagcctggaggaagccaagcagttatttggacgcttgctctttaatgatccggtatttctatgg

SEQ ID NO: 237966 - DNA, 201 bp, Homo sapiens
gctggaagctccttgctgtctgtgccctccacagccaggcagcaagtccctccttgaacgtgggtctgcgtggcacagccccatgtctatcacaggtgcacccaatgatgccatcacaactgatgctgtcacagcacacttcttgtgctggctttgtttgccttttctcgtcttttttttttttgatacagagttttgtct

SEQ ID NO: 237967 - DNA, 201 bp, Homo sapiens
gttcatatctgagaatttgatttttgtatttgtttttctagagatatgtgatgatttttatggatgaatttcctccttatgggaagattatctacagatgytctgtgtcccccatttttgtcctgcacatataaacacatgtgcatcttgatttgcatctgtatcagatggtgtgtgttttaagaccttttctcaaatctt

SEQ ID NO: 237968 - DNA, 201 bp, Homo sapiens
ggacaatggtaagaaaaaaatatgattaaaagagcagcttagtgcagtgtattaagttaaccaaatatgtaacttagttttaaaaggtgtctgacttctgsgactagaggaggctcttttcccccgtagcttaataggctaattagagtcactacaggcggtttgagtggtgaatacacttaaaaaaaaaattagtttgcc

SEQ ID NO: 237969 - DNA, 201 bp, Homo sapiens
gacattaattcagagtactttaaaaatattttattaatacatgagtgcccaaagttgttgcaaatgttcattttaatcacacttttcatatttgctctctrccagttgttaaaggctcattgttggagcaccacctgtctagtggtataataatctccaatgtacattgaactctgttttaatgatgctcattgccaaaat

SEQ ID NO: 237970 - DNA, 201 bp, Homo sapiens
tatatttccaggaaagtcacattgtgagatgggtgagcagacagacctcagtgtggacctggggttatgctccaatccaatgttgttggttccattgtcakgcatcttggtttctctgttaagttttaggagaagtgtgaaggaagtataaactttttcccagcaggacagatactaaatattttaggttttgtgggccat

SEQ ID NO: 237971 - DNA, 201 bp, Homo sapiens
cccccagctgtggtttttcccttcagattcaagagtgaaattgggaacttgaaggaagattgtcaatatgtatgttttatttaaacgaataaatctttttmttatgaaagtttaaagtaatgatgaaagactgctatgctggcataatagaaaacatcctggattctcaataccagagtttgagatctgggatatttacat

SEQ ID NO: 237972 - DNA, 201 bp, Homo sapiens
agtattttttttaaagttgttgatgacaggttagcacctggtaaaatggggaattttgaggacagtgagtggacaggacgggtatccaaaacattttacaytgaaaacaaattcagaggaattcttagaattttctagaaccttttcccataactgaagagcaaacatattttgtcgaattatgatgatgctgttgtgaat

SEQ ID NO: 237973 - DNA, 201 bp, Homo sapiens
ctccagaagtgttttaggatccttaatttgaaagtacgggtaggacgctaggcgcggtggctcacgcctggaatcccagcactttgggaggccaaggcggrtggatcacctgaggtcaggagttcaagaccagcctggccaacatggcgaaaccacatctctactaaaaattcaaaaattagccaggtgtgatggtgcatg

SEQ ID NO: 237974 - DNA, 201 bp, Homo sapiens
aaagctgaggtctagaggagcacctgcatgtatctgcagtctctgtgctggcactgcagccaccacagtgcattgcaacagccggtctgcacgtggcttcygaggagggtgtcagttcctgagggcagcagcagcacgttgctcctctcaggatcttcagctgtcagcacggggcctggcatgtaattggtctgcacccac

SEQ ID NO: 237975 - DNA, 201 bp, Homo sapiens
tgttgcttgacacttaggacagaaggaaaagagccagacattcctctgtacaagtaagtacttgttgcctgcaggccattggttggatccagcatgcctaraattgactttccatgtgccttgaagaatgagtcattgtggggtgatcatgacaggagcccaggattgagacttcttggctgttagtgtgactttgggccc

SEQ ID NO: 237976 - DNA, 201 bp, Homo sapiens
tcataatgtgactttgttaaagatcttttagaaaatggtgaattaaaaaaaaacattttgatatatattttcatttttttctgtgcagaagggttttttttacgtagttgtcatctactagtatatgatttgcatctattttttaataattcattgagcagatggatatttttaaagattgtgatatatagtgccaaattt

SEQ ID NO: 237977 - DNA, 201 bp, Homo sapiens
aggcgttttatgaccaaacagatgtctgagagaaagtgggcagttttaaaatcaccttaaagaaaaatctgctgttggatatttactttgtgagatttcarctctcacgtaactatgtggggataacatttaggttgtcataaagaaaaaggtctattgatttgtttttaaacagggtttaccttttcattagactcccct

SEQ ID NO: 237978 - DNA, 201 bp, Homo sapiens
tgggacttctgggtctgttattttccccagctagccagccaattctctgcagtaatctccctccctttttcattctttaattcattcaaaaatatatttayggaaaacctgttatgtgtaggcagtaggcaattgtctgatgatacattggtaaagtaagatagatgtggatttattttatgctgagccttccttcatttt

SEQ ID NO: 237979 - DNA, 201 bp, Homo sapiens
ggcttgtatttttattctaatgattacctttatactgacaactttatagtataattacatttctcccttacttctcttcctctctctgtgtgtgtgtgtckgtgtgtgtgtgtgtgtgtgtgtgtgtgtgtgtatcttgttgtcttttagtaaaaatagcttctctctgcttcttcccataatcctctctctcacctggca

SEQ ID NO: 237980 - DNA, 201 bp, Homo sapiens
accgcagttgttggtatgtaaattgtcttttgataatgtcatttgaaccccatgatttatgttttcttttgctctgttacaaagtagtggctttcttaccrtggcagaagggatgatacctgagaaactgtgtgatgtttgaatttaccattttgaaaatgatattattgacagagaataaacaaataatctctcttgtcc

SEQ ID NO: 237981 - DNA, 201 bp, Homo sapiens
tgtgtagattctgaccacttttatggttatcacccggtctgagccactgcagtccagattattagctataacctcccaagtgattcataccccgcgccccmgtcaattttcagcacatctagagggatcatttttaaagagaagccggattacattcctcttctgcacaaaacctcccaaaccttcccatctcaagagtaa

SEQ ID NO: 237982 - DNA, 201 bp, Homo sapiens
cacagccaagttttgcttcagtgccagaccctctctaactgtccctagcccactgcagctgccgatgccagaggcagcctcctacagaccaagtgcagagsatgtgcctcagtgttagtctcttccctgctctggtgcctgggtgctccttactttcctcctgtctctttgactcctcttgtgtggctttagtttcttgtc

SEQ ID NO: 237983 - DNA, 201 bp, Homo sapiens
ctgtttcatatgctgaagtttttagtttttaggttggtgtatgcagtagggtcaaggtataaattgtgagaacacctcaaattaagtgtttacacaggccrggatgcctgtaatgtaacccttggaaatcttaagccataggagttttctcctctgtatcattcttctttcttagcctttactctttgctaaaaatagttg

SEQ ID NO: 237984 - DNA, 201 bp, Homo sapiens
agtgagcctgtcggagtctggcttcctccagtgcccttgtccattcacagccaagttttgcttcagtgccagaccctctctaactgtccctagcccactgyagctgccgatgccagaggcagcctcctacagaccaagtgcagaggatgtgcctcagtgttagtctcttccctgctctggtgcctgggtgctccttacttt

SEQ ID NO: 237985 - DNA, 201 bp, Homo sapiens
ggtggatcacttgagctctggagttcgagaccagcctaggcaacatggtgaaaccctgtctctacaaaaaatacaaaaattagctgggcatgttggcaggygcctatagtcacagctactcgggaggctgaggtgggaggatagcttgagtccagaaggtggaggttgcagtgagccaagatggtgcaccactgcactcca

SEQ ID NO: 237986 - DNA, 201 bp, Homo sapiens
ctcattattattatgttctggctaaagaaaccttgtttgctattttaattttttatgctttttaccaaagcttttctgaaggaaaataatttgaaactaasacatgtgaataatgaatttttatgttcaatctatgttcagtggtacccccaacacatacccctccatcctaacactcagctaccacatccctttgtgtga

SEQ ID NO: 237987 - DNA, 201 bp, Homo sapiens
ttttctgaaggaaaataatttgaaactaagacatgtgaataatgaatttttatgttcaatctatgttcagtggtacccccaacacatacccctccatcctracactcagctaccacatccctttgtgtgaaacagtaatagaatatgaagatcagttgttgtaaatcagagcctttttgccacccagcagccttcatatag

SEQ ID NO: 237988 - DNA, 201 bp, Homo sapiens
agtttccgatatggtctggcagcattgtaaataatcctattatagttaacgaaaggattatacacatagttgtattgtttgtattacttcaaaataagtgrgccattcactgagccttagaactttttttttaatgttacggtatttttgacaatgggaattatattcaagtatcaaagtctaccatgcaaaactagctta

SEQ ID NO: 237989 - DNA, 201 bp, Homo sapiens
ttctgctgggctgtgcatccagatgagaagatcatgtatgattatttgtagcgatatttgggtacctctctgcactttccctgaacccctattggcttcavcttggaacttttcttctcagaatgtgtgtcaaaagccatcatgtactttgaatatctttatcctttgagtggtagccaaaagtcattaaaaaggaatgta

SEQ ID NO: 237990 - DNA, 201 bp, Homo sapiens
tatttgtagcgatatttgggtacctctctgcactttccctgaacccctattggcttcaacttggaacttttcttctcagaatgtgtgtcaaaagccatcaygtactttgaatatctttatcctttgagtggtagccaaaagtcattaaaaaggaatgtaggtgagtaatgggtcactacaccacttaatacccgttttgat

SEQ ID NO: 237991 - DNA, 201 bp, Homo sapiens
atacccgttttgatgaaaacaggaggttcagctctgaagtagagtaattatcttgagacacacataggttgattaagaagatgctttcaaagtggaattayaaaatgaaaggattattgaaataggtgggttgcatctcaaggtattgtctgggtacatgattttaaggatgtttaaagattgtttcaaaactgtttcacc

SEQ ID NO: 237992 - DNA, 201 bp, Homo sapiens
gcacagccccatgtctatcacaggtgcacccaatgatgccatcacaactgatgctgtcacagcacacttcttgtgctggctttgtttgccttttctcgtcttttttttttttgatacagagttttgtcttgttgcccgggctggagtgaaatggtgtgatttcggctcaccgcaatctccacctcccgggttcaagtgatt

SEQ ID NO: 237993 - DNA, 201 bp, Homo sapiens
gctaaaccatatttcctttatttattgggggaaaaaagccccaaatgtttagaaatagcactttattatgtgcctaataagcataatgaatatccaaactrtattctatgaaaggctcatagcatttcctcatcagagtgataattaaggttcaataaataaaatgaggatgctaaactttccatagcaaaggcatgatta

SEQ ID NO: 237994 - DNA, 201 bp, Homo sapiens
ggtagtccaaattagatgaacaatggaagaacagatttataaattttagaaatctacttgacaaaatatcatgcgggtgtgttaatgtggagaaatgattytggcttaaaaaatgcatatggctaattggaaaacaataaaaaaatttaaatgcaatatgattataactgctgaaaaaattactgtaataatagttacatt

SEQ ID NO: 237995 - DNA, 201 bp, Homo sapiens
cccaaatgtttagaaatagcactttattatgtgcctaataagcataatgaatatccaaactgtattctatgaaaggctcatagcatttcctcatcagagtkataattaaggttcaataaataaaatgaggatgctaaactttccatagcaaaggcatgattactgtaatagtactaccttcaagaagccactcgtgcacat

SEQ ID NO: 237996 - DNA, 201 bp, Homo sapiens
gctctcgatatttgtcggattagcaaatcaaaaacttaactctttttacctttctgccattttcacatttcctgttattttacttaactctgtctaggcastaagtacatggttttcctcatagttacatagtaaccatgacaaataacactttaccataataaatgttctttcctttccctttcaggactctgcagacag

SEQ ID NO: 237997 - DNA, 201 bp, Homo sapiens
ccttcaccttttgtgggtcatttcagcaacctctttgctctctttccttcctgcagtcttgtctgtgtgtcccccagcaccctttagactccttcccccayccccacctcctccctgtcctcttctcccatcttacctgcatcccccaatccactgtgttctgttgttctgttttgctgcagttttctacttgtcttcttt

SEQ ID NO: 237998 - DNA, 201 bp, Homo sapiens
ggaggaaagaaagcagagacaggcaaagaatcatagcctgaaattcaacagcaagcatggcttatgaagatcaagttatatttttgcttcatgaatcattrtcagacaaattaagaacatattgtttcttatttatctattgtcaaggattcactatcagacactaagaataaatcttgattttcataagctctgttgaca

SEQ ID NO: 237999 - DNA, 201 bp, Homo sapiens
gaacaataatatactataatgaaagttgtgtgaatgtactcttgattgtatgctgtgccttctctctctgtctttcagaatgttattgtacattactcgcmtatttttggcccatggttgatcatgtgtaaatgaaaccatggagagcgagatcactgatgaggggcctgctgtatatgtagatccacttcactacgcatt

SEQ ID NO: 238000 - DNA, 201 bp, Homo sapiens; identical to SEQ ID NO: 46487

SEQ ID NO: 238001 - DNA, 201 bp, Homo sapiens
ctcaagcactcttcctgcctcagcctcctgagtagctggggactataggcgtgtgctaccatgcctggctaatttatatacacacacacacacacggctamtttttatatatatatattttttttttttttttttttttttgtagagatggggtttcttcatgttgccaggctggtctcaaactcctgggctcaagtgatc

SEQ ID NO: 238002 - DNA, 201 bp, Homo sapiens
tactgtatagcactgagtgaggggccctgacactggaaggtggcaggtggggcctggccgccagtgaggtatcatcatttgtgtgtgctcatgtgtgcgtygggcttgttgtatctgaggcatgaacattccatatacacggcttaaagagttttcttcccataccgaaagcatatattcggagaggacccaacttattca

SEQ ID NO: 238003 - DNA, 201 bp, Homo sapiens
tttatgctttttaccaaagcttttctgaaggaaaataatttgaaactaagacatgtgaataatgaatttttatgttcaatctatgttcagtggtacccccracacatacccctccatcctaacactcagctaccacatccctttgtgtgaaacagtaatagaatatgaagatcagttgttgtaaatcagagcctttttgcc

SEQ ID NO: 238004 - DNA, 201 bp, Homo sapiens
agggctcaagcactcttcctgcctcagcctcctgagtagctggggactataggcgtgtgctaccatgcctggctaatttatatacacacacacacacacgsctaatttttatatatatatattttttttttttttttttttttttgtagagatggggtttcttcatgttgccaggctggtctcaaactcctgggctcaagt

SEQ ID NO: 238005 - DNA, 201 bp, Homo sapiens
ttttgtatagacaaagttatgattgcaagctgtcacataaggtcaggtgtggaactttccacttgtgccatcatattgacactgaagagtttcaaattttrgaacactttggattttgggttatggttgcttaacctgtaattgctttccagagtgatgttttcacataaattaaaggccataaattgaaaggagggttca

SEQ ID NO: 238006 - DNA, 201 bp, Homo sapiens
ttattattttttcttgctgatttgttttagttccttgtagattctggatattagtcctttgttggatatatagtatgcaagtattttctgccattctgaargttgtctgtttacagatacttggggagataagatggaaagatcagggcttagaattcaactggatagacagctccctttcctgcttaatttgggatgata

SEQ ID NO: 238007 - DNA, 201 bp, Homo sapiens
tggctatgaatggccctggagcgacgctcttagtaaagtgctttgaagtgcatgtcttctctctctgttagtctgtcctttccaccaaactgaatatataytgactattttacctgcgtctctgcccttggtttatcagggaccctctaataagtttaactgaataggtagaacacttttacattgcagagtcatatataa

SEQ ID NO: 238008 - DNA, 201 bp, Homo sapiens
tggatctttagatttcccaagaggctaaagaaaggtatagctttttactttaatactttttttttcaaaaagtcttattgacttttatattttaattggayataatgagttataaatctccataactttaaagaaatatgtgtgtgtatatatgtatacgtatattttttcttttaaggctagtcaagtgaagaagcagtg

SEQ ID NO: 238009 - DNA, 201 bp, Homo sapiens
atatccaaactgtattctatgaaaggctcatagcatttcctcatcagagtgataattaaggttcaataaataaaatgaggatgctaaactttccatagcamaggcatgattactgtaatagtactaccttcaagaagccactcgtgcacattcatcccatggagcgtacgaacacaaaggaaattgctatgctcccttctc

SEQ ID NO: 238010 - DNA, 201 bp, Homo sapiens
cctcaggtgatccgtccgcctcagcatcccaaagtgctgggattacaggcgtgtgccactgcgcacagctgtgttacaacttttgatgaaatcctgttacrtctcttatttgccagctgttactttagataatatcttaacataatatttctttttggtagcgatattattcctctgctgtaccacctggatctttagatt

SEQ ID NO: 238011 - DNA, 201 bp, Homo sapiens
ccctcagcctcccaaagtgctgggattttaggtatgagttcactgtgtccagctctgttagacattcgatttactactactcacctgagctgtatggaaaygctagcatctttaggtgaaaagaattatgtatattatcacctttctttgaactctccagtctgtatcttaaactgagaaatgatttgaaacctgtctgta

SEQ ID NO: 238012 - DNA, 201 bp, Homo sapiens
attaaagtgtggagtgaataacttaagtaggctttgtgcaaatcaatgacatttctgcatgctcttgtgtatattcctatctgtgcaattcagtgtgtgayactgtaagtaatcagaggagattttatgcactgaacgtgaaaatcagcctgaaagatttgtagccataccttgcattttttgaaaaaaaaaaaaaaaaaa

SEQ ID NO: 238013 - DNA, 201 bp, Homo sapiens
ggaacacagctcacacagaaatgttgatattttctctcttttctctcagacatgcagtcttgtttaagttcttagcccacagcaattcacattaaacttgyttagtgcaccagactcaaactgggtgccactaattcctctgaccaaggaggacactctcttttgtgccatcccattgctgccatcttgtgctctttgtcc

SEQ ID NO: 238014 - DNA, 201 bp, Homo sapiens
gctcacacagaaatgttgatattttctctcttttctctcagacatgcagtcttgtttaagttcttagcccacagcaattcacattaaacttgtttagtgcmccagactcaaactgggtgccactaattcctctgaccaaggaggacactctcttttgtgccatcccattgctgccatcttgtgctctttgtccctttcttt

SEQ ID NO: 238015 - DNA, 201 bp, Homo sapiens
ttacagtaatggttttaaaaactaatgatatgggaaaatgcttatactagaataagtgaaaaaaagtatacccatgaatacatacctatattgtactttcycaatgagtaatgattttaaatgttcaagtgtctaggtgtatgtgtgtgtgtgtatatatatgtatatatgtatgtatatacacatttacattgcatatat

SEQ ID NO: 238016 - DNA, 201 bp, Homo sapiens
tgactccattttactgtatcctttcatctctcccagaaagtcacctgttgctaggagagtgatgctaaagcacctgcttggtaacattcccaagccacacrtctgtgttttggcatttctgtatgttcggtgcctgctatacccaagttcacatcagatactgaaatttacaatcaggggcactcatccagacttccatta

SEQ ID NO: 238017 - DNA, 201 bp, Homo sapiens
ttaaaatttggagaggattacttattgcagttgcattggttgggggatggcaaatgattcattattgtgattaaagagcacacagctacagtaattcacaytgggaggcattaattagctttgagccattcccttgcacacttaaagggaataaggacaattgagcaaatgtaatatggctttcaagttttgaatgctgat

SEQ ID NO: 238018 - DNA, 201 bp, Homo sapiens; identical to SEQ ID NO: 46490

SEQ ID NO: 238019 - DNA, 201 bp, Homo sapiens
taggaccggtaccatctcccctatatccttcagatccttaagggtggcactgacctcttccatccccacagtgcaatattggttttgatgcctgggttgaygggggtggtggtaatttcgtttctgcttggctttcccattaggatagctcttattccacatgtcaaggacccagtgttgagtagcacgttgggtctgcca

SEQ ID NO: 238020 - DNA, 201 bp, Homo sapiens
attctccttacctctgagtctacttcctccgatccctgcctaaagataattttacggggaagatttgcttgtgtctctccaggtgatgatcaggtgcctaygtgcgtgcccaccaaatatctgaagatctattgtgagccaccgcatctagtggacccacctgtacggtgcaaattgaaggtttaaggattgcttttaagc

SEQ ID NO: 238021 - DNA, 201 bp, Homo sapiens
caaactaagtagtactcttactggttacccacttattttgtaccgaaggacaccatgttctattaactatttccatgactctttgtgggtcagaccccttyggctgctactttggcctggcttccagcacttagtcctatcacctggcatctcttgtttcaggattctgtcatccctattactgctggtgagctctgctct

SEQ ID NO: 238022 - DNA, 201 bp, Homo sapiens
gtgcttagcactcatccgttccagaggttttgaagaattgcttgcctatggagccttgtgggcggagttcgtggcactaaaacaaattcagggaaagagaygtaatctaacctgagcagtgtgggaagttcttctggctttagtagcattttcttctctctgctagtgaggtaccttacagtttctctttttgaaacattg

SEQ ID NO: 238023 - DNA, 201 bp, Homo sapiens
cagtcatccttcaggtcttcaggggccagacaggtgaattaattggagataggaccggtaccatctcccctatatccttcagatccttaagggtggcactkacctcttccatccccacagtgcaatattggttttgatgcctgggttgacgggggtggtggtaatttcgtttctgcttggctttcccattaggatagctct

SEQ ID NO: 238024 - DNA, 201 bp, Homo sapiens
agtggcattattgtctatttcatttccgtctgaaactagcgatcagtggccaaactcttcaggaaactatatggtcttagtatagttttaacagacacttytaaagacacttgacaagaacaagttgaaccttcagttaatgtatattttgccaaactacagtaatttaattttggtttatttttcagaatttttgtgtga

SEQ ID NO: 238025 - DNA, 201 bp, Homo sapiens
ttctactatatatggaaactatagggatactttaaatatggaaattaaactggcacacatgaaacagaataatacagatatgatctaattttgttgtaaaygaagtgataagtgttgaagttttatggaaatgagggtgggatggtgggagttagcccgcacccctggcagctccagtacttagggtcggcctcccagttg

SEQ ID NO: 238026 - DNA, 201 bp, Homo sapiens; identical to SEQ ID NO: 46491

SEQ ID NO: 238027 - DNA, 201 bp, Homo sapiens
gttgctaggattacaggcgtgagccagcacgcctggcctgttctaatgtttctgaatgttggcaaggcacatttacctgaagactgtgtcagcgataagtrtgtgtttgattcagagtatgattgccagtacttgagcattttgtttttaaatgtttgttaaatttagggttgaaaaatagcatcttgctgttaaaaatgc

SEQ ID NO: 238028 - DNA, 201 bp, Homo sapiens
gaagggctgaatatgtaggatcccagaccttggtaaaaggcaagcatgtaggatgtctctgcttccctggagatccgtgagcactaagttaattttttatrtttttcatcacaacaagtcatgactggcattaagagtgtgttataactttttttttgtcttttttttttttgagacggagtctcaaaaaaactcctgctc

SEQ ID NO: 238029 - DNA, 201 bp, Homo sapiens
ctatcagaaattcaacagtgctttgtaaacagtctttctaatgctgtttagtgttattggttttgtgtcctctgtatagttgagccttgtgaagggctgartatgtaggatcccagaccttggtaaaaggcaagcatgtaggatgtctctgcttccctggagatccgtgagcactaagttaattttttatgtttttcatca

SEQ ID NO: 238030 - DNA, 201 bp, Homo sapiens
ctgttgccgtccgctcacctcctgatgatcctccaccacccacactgggagcttggggtaacgccggagaccagcgcgccctcccgcggagtcactcatgyttttgcgcccgtcagttttgcagtaaagcggtggcagctggagaagacccgggaaagccggcgcctcaacccggccagctctctccgggcggaagcgctc

SEQ ID NO: 238031 - DNA, 201 bp, Homo sapiens
ttctatcagaaattcaacagtgctttgtaaacagtctttctaatgctgtttagtgttattggttttgtgtcctctgtatagttgagccttgtgaagggctraatatgtaggatcccagaccttggtaaaaggcaagcatgtaggatgtctctgcttccctggagatccgtgagcactaagttaattttttatgtttttcat

SEQ ID NO: 238032 - DNA, 201 bp, Homo sapiens
agttcgagaccagcctggtcaacatggcaaaatcctgtctctactaaaaacacaaaaaatagctgggtgtggtggcaggcgcctgtaatcccagctaatckggaggctaaggcaggagaatcacttgaactcgggaggtggagtttgcagtgagctgagatcgcgcactgcactccagcctgggtgacagagcgagactcc

SEQ ID NO: 238033 - DNA, 201 bp, Homo sapiens
ggtttctccatgttgatcaggctggtctcgaactcccgacctcaggtgatccacctggctcagccttccaaagtgctgggattacaggtgtgagccactgygcctggcctgcctaggtagttttaaaaaattatttgtagagatgaggtctcgctatgttgcccaggctggtctcaaactcctaggctcaagcagtcctcc

SEQ ID NO: 238034 - DNA, 201 bp, Homo sapiens
ttgcctaggcttgagtgcaatggcgtgatcttggctcactgcaacctctgcctcctgggttcaagtgattctcctgcctcagcctcctgagtagctgggartataggcatgcgcctccacgcctggccaattttgtatttttagtagagatagggtttctccatgttgatcaggctggtctcgaactcccgacctcaggtg

SEQ ID NO: 238035 - DNA, 201 bp, Homo sapiens
acagctatccatcttttttttatagaacgtctggcagaaatgtattttgtgtgttccttttactctttggaattgagcagaaatgtttgcagaactgccartgcattttaaaacttggttttctttttaaacagctttgttgagttataatttacatatgatacaattgtacttcaaatttataatccagcattttttagt

SEQ ID NO: 238036 - DNA, 201 bp, Homo sapiens
aggcaggagaatcacttgaactcgggaggtggagtttgcagtgagctgagatcgcgcactgcactccagcctgggtgacagagcgagactccaactcaggraaaaaaaaaaaaccagtttgttaattccatcaatttctgtatttttctcccaacccctgttagagagttccagtgaatccgagtgtgagtctgatgagga

SEQ ID NO: 238037 - DNA, 201 bp, Homo sapiens
cttacctttagaggtttaggtcatttggaagcctccacaaaaaccagtttgtcagccgggtgcggtggctcatgcctataatcccagcactttaggaggcygagacgggtgtttcacctgaggtcaggagttcgagaccagcctggtcaacatggcaaaatcctgtctctactaaaaacacaaaaaatagctgggtgtggt

SEQ ID NO: 238038 - DNA, 201 bp, Homo sapiens
agtcttaccattgtaagttggggactgtctgtgttcatttttgtctttgattatctatagctgtatctcactggggatttacactcaattttctgtatccygtggttatgccacaaactggatacacagaattcatttgtttcattttacttttgattttaagagttccattgactgactgacagattgattgagtcaggg

SEQ ID NO: 238039 - DNA, 201 bp, Homo sapiens
ttaccaaggattgttaggagattagaaaattctacctggtgccccagccaatgttaagaggattgaaaacctaggggtgggtgctataacttgtaattatrtgtgaaccgaatgtggacctgtcactatgtttgtagataaattgttgaagaattttttctgtgttgctgcttgttagagtgaattctgggtaatatggaa

SEQ ID NO: 238040 - DNA, 201 bp, Homo sapiens
ataaatggaatcttttttttttttttttttttgagacagagtctcgctctgtcgcccaggctggagtgcagtggtacgatctcggctcactgcaaactctrcctcccgggttcacgccattctcccgcctcagcctaccgagtagctgggactacaggcgcccgccaccacacccggctaatttttttgtatttttagtag

SEQ ID NO: 238041 - DNA, 201 bp, Homo sapiens
aaagaaggtctcttctaatcttagtttgctgagtgtttttatcatgaaatggtgttgaattttgtcacatgctttttctgtagctattaacataatcatgtcattttattcttttattctaattgatttggggtgataagccaacctggctttcctgggatgcctcccacttgattgtggtgtctcattcttctcatgtgc

SEQ ID NO: 238042 - DNA, 201 bp, Homo sapiens
tttaaaattccaaaggaagattaatgtgaatctcagaatgattcatagtctgatcttgaatttagtggtgtcaacaaatcatactaagaaataacaactagacagcaaacaagcttgtgcacttaacattgtgttggagtcagggtcaatttccggagcccctggctctgcttgcaaaccttgtttaatgggacagctctg

SEQ ID NO: 238043 - DNA, 201 bp, Homo sapiens
ggaacatttaagcatgtttcagtgggtttatgcagctgccacctccatgggactggggcaccgctgggagagccctgtataggccaccttgcagccagatktttatggttttctttttgtttttgttttgagacaaggtctccctctgtcacccaggctggagtgcagttgtgcaatcttggctcactggaacttctgcct

SEQ ID NO: 238044 - DNA, 201 bp, Homo sapiens
ccatgcatatactgttccaccacctctcatgctttcttcatttctgaccttttcgatttttactcagcatatttattccttctagctttttaaatttcctrttaacactcactgctgttagttctcagattaatttccccactttttttttcagtttattcataagtataaccaaaggtcagttattgtgttattttacaa

SEQ ID NO: 238045 - DNA, 201 bp, Homo sapiens
tcattcctttcttcttttctcctccttatcatgcttctcccatcctgttgcagtgcctgggtcacatgtgctccttctttgaaattatcaccagcctttcyggatcccagtgaaactgcccttttatggatcattacatagcttaagtgttaaactacgtactactactatggtttttcattttatctgacattgctcatc

SEQ ID NO: 238046 - DNA, 201 bp, Homo sapiens
atatatgtggaatcatgtagtatttgtctttttgtgactggcatatttcagttagcataagtctgtgtctgtttttattcagtcactttaaggactaacaycttctcttgctgttattgagggaaaagaaatgtcaagtctttggtcttgcattcccagccttcgctgtggcattcccagcactcccagcccctaacctcc

SEQ ID NO: 238047 - DNA, 201 bp, Homo sapiens
gagcaggagcccatgccccctgcctctcatgaggacaggtgtccttccttggccctctcctttgccaggtgcgcctggtttgatgagggaaacagcgactrtagcccagctctgtttgaaggtttctctccacttgtgtagacagtttgcatagctttttcataaggtggtctattttttcatgtgtatgttctgaggttc

SEQ ID NO: 238048 - DNA, 201 bp, Homo sapiens
agaaaaggccaaagctgctcggcctccgtgggaacctccaaagacgaagctcgatgaagatttaggtgagtcagagtcactaactagcctgagacccttgmgattatagcttcattcctaaattttggggaaatacccttgagagtcccacattgagatttcttctttttcattttatttttcttaattacagtcagtaag

SEQ ID NO: 238049 - DNA, 201 bp, Homo sapiens
ttacctgacagtattttaacagccttttaagtaaaaaggactacctggttagaaaatgtaatgcaaagacaaattaaaattcactatggaaagttattaayaaataatttaagcatcttgtaatgcataggaccaatgggaagaaaactataaaatgtagctgatgacaaagaaggtgatgtaataaaaggaaggtatgtc

SEQ ID NO: 238050 - DNA, 201 bp, Homo sapiens
aatccaaaccaaaaaagatatatcactttcagctcaattattccataattacaagatattaggctagtgggctctttattggttgggtcttatattaatgktatatgctagccttgtaattttgagctcctctatggatgttaattttagtgaaactctatattgaagaaaagatgggactaagggggagacaggaggagg

SEQ ID NO: 238051 - DNA, 201 bp, Homo sapiens
tgcttagcagggtgccagcctcagagtaagcaccaaaacaaaccaaaaagagtccctaggagctaagagttgccgttattacctgacagtattttaacagscttttaagtaaaaaggactacctggttagaaaatgtaatgcaaagacaaattaaaattcactatggaaagttattaacaaataatttaagcatcttgtaa

SEQ ID NO: 238052 - DNA, 201 bp, Homo sapiens
aataacttgaaaaatggaaaaagcttactttgcaccacctctaaaaaaagctttaaagtggtcttgaacactaaaaaaagatggaaggaaagctcagctcwttctgtagtagcaggaaaaaccagatggcaaaacctaaccaagggaaaaaaaatgacacaaaaacgacacagcaatctctcttacaaatatggatataaa

SEQ ID NO: 238053 - DNA, 201 bp, Homo sapiens
aaaaccgtttaaaaaattaacttgaatgtgatgggttgatttctaagaaaacaaaaataatttcacacaagaagcagaaaactttaataggtcaataactygaaaaatggaaaaagcttactttgcaccacctctaaaaaaagctttaaagtggtcttgaacactaaaaaaagatggaaggaaagctcagctcattctgta

SEQ ID NO: 238054 - DNA, 201 bp, Homo sapiens
ggcacctgtttcattctgagcaagtgttgtttattgtaccttcctttcaaaaagaattaaagaaaaagaaccaccccttcattctcctgctttagaagggktttttttttttttttttttaacttccttttggtttttaaggtcatatgccttcatttgctattgtaaaagtttatgacttctggcgtgatctcacgcagg

SEQ ID NO: 238055 - DNA, 201 bp, Homo sapiens
gatgttgaattggtcattttggaagtggagcagctttaaggaatggtcggtccagggactaaacatggcagtgggctgggtggccaagaaaggggaagagragtttattgagcatgagggtttcagatgttagcaggaacccagtattaaatgggtggcctattccagtggcttgactagggggtctttgagttgctcatc

SEQ ID NO: 238056 - DNA, 201 bp, Homo sapiens
agcaagtgttgtttattgtaccttcctttcaaaaagaattaaagaaaaagaaccaccccttcattctcctgctttagaagggttttttttttttttttttttaacttccttttggtttttaaggtcatatgccttcatttgctattgtaaaagtttatgacttctggcgtgatctcacgcagggtgatttatgaactccga

SEQ ID NO: 238057 - DNA, 201 bp, Homo sapiens
aagaaggtctcttctaatcttagtttgctgagtgtttttatcatgaaatggtgttgaattttgtcacatgctttttctgtagctattaacataatcatgtcattttattcttttattctaattgatttggggtgataagccaacctggctttcctgggatgcctcccacttgattgtggtgtctcattcttctcatgtgct

SEQ ID NO: 238058 - DNA, 201 bp, Homo sapiens
agaaggtctcttctaatcttagtttgctgagtgtttttatcatgaaatggtgttgaattttgtcacatgctttttctgtagctattaacataatcatgtcattttattcttttattctaattgatttggggtgataagccaacctggctttcctgggatgcctcccacttgattgtggtgtctcattcttctcatgtgctg

SEQ ID NO: 238059 - DNA, 201 bp, Homo sapiens
gaaggtctcttctaatcttagtttgctgagtgtttttatcatgaaatggtgttgaattttgtcacatgctttttctgtagctattaacataatcatgtcattttattcttttattctaattgatttggggtgataagccaacctggctttcctgggatgcctcccacttgattgtggtgtctcattcttctcatgtgctgc

SEQ ID NO: 238060 - DNA, 201 bp, Homo sapiens
aaggtctcttctaatcttagtttgctgagtgtttttatcatgaaatggtgttgaattttgtcacatgctttttctgtagctattaacataatcatgtcattttattcttttattctaattgatttggggtgataagccaacctggctttcctgggatgcctcccacttgattgtggtgtctcattcttctcatgtgctgct

SEQ ID NO: 238061 - DNA, 201 bp, Homo sapiens
atacttattacattgctttctttgtaattagccaaataaggcattgatacaccgtgtattttatctcttttgtagagcttagaagccacatgtctgtggcycttgccctgataactggcactcactgatgctgtaatgagtgagattacaagatgaaaggctggtgtctctgtcctgtcaagtatatgttaaagttgctta

SEQ ID NO: 238062 - DNA, 201 bp, Homo sapiens
tgaggcaggagaatcacttgaacctgggaggtggaggttgcattgagctgagattatgccacaacactttagcctgggtgacagagtgagactctgtctcaaaaaaaaaaaaaaaaaggaataggggcaggaaagtgttttgcttttctatactgacacaatttctcttttaaagggagacaatacatgcttctcttggaa

SEQ ID NO: 238063 - DNA, 201 bp, Homo sapiens
gaggcctcaggatgcttttaatcatggtagaaggtggatggggagcaggcacgtcatatgacagaagagggaggaagagagggaggagggaggtcccagactctctttaacaagcagatctcacatgaactcattactgtggggaaggcaccaagctattcttgagggatccacccatgacgcaaaaacctcccaccaggc

SEQ ID NO: 238064 - DNA, 201 bp, Homo sapiens
ccctggaggcagagcttgcagtgagcctagattgtgccactgcactccagcctgggcaacagagcaagactccttctcaaagaaaaaaaaaagaagttgtrctaatgcgtgcatggaaaaataagaatatagagtagagactagaagaagtcaggaaattcacatcacagcactccagaatacagtagatgtttataagat

SEQ ID NO: 238065 - DNA, 201 bp, Homo sapiens
aggcctcaggatgcttttaatcatggtagaaggtggatggggagcaggcacgtcatatgacagaagagggaggaagagagggaggagggaggtcccagactctctttaacaagcagatctcacatgaactcattactgtggggaaggcaccaagctattcttgagggatccacccatgacgcaaaaacctcccaccaggcc

SEQ ID NO: 238066 - DNA, 201 bp, Homo sapiens
tgggccaggcgtggtggctcacacctgtaatcccagcactttgggaggctgaggtggctggatcacctaaggtcaggagtttgagaccagcctggccaacmtggtgaaaccccatctctactaaaaatacagaaattagctgggtgtggtggcaggtgcctgtagtcccatctactcgggtgggtgaggcaggagaatcgc

SEQ ID NO: 238067 - DNA, 201 bp, Homo sapiens
ggacagaattacttgttcccaaagcacatgaggttcctaggacgacacctaccaccttatattatagttatttcagttccttcagagcagtgaacatgcctctttttttttttttttttttttttgcattctactgcctgaattggtgtctggtgtctgatgtcatgtagatggttagtatttaatgaattgaaatgaggt

SEQ ID NO: 238068 - DNA, 201 bp, Homo sapiens
ggctcaagcactcttcctgcctcagcctcctgagtagctggggactataggcgtgtgctaccatgcctggctaatttatatacacacacacacacacggcyaatttttatatatatatattttttttttttttttttttttttgtagagatggggtttcttcatgttgccaggctggtctcaaactcctgggctcaagtga

SEQ ID NO: 238069 - DNA, 201 bp, Homo sapiens
gggctcaagcactcttcctgcctcagcctcctgagtagctggggactataggcgtgtgctaccatgcctggctaatttatatacacacacacacacacggmtaatttttatatatatatattttttttttttttttttttttttgtagagatggggtttcttcatgttgccaggctggtctcaaactcctgggctcaagtg

SEQ ID NO: 238070 - DNA, 201 bp, Homo sapiens
ggagctgtggttgcaccactgcactccaggctgggcaacagagcaagactctcctctctctgtctctctctctctctgtgtctctctctctctgtctcccyctctctctctctctctgtgacacacacacacacacacacaccacacacacatagagttacagtgtgattgatagagacccagttgaaagaagtgatgttt

SEQ ID NO: 238071 - DNA, 201 bp, Homo sapiens
ttggtagactttaaaaatcttttcagcatgaactactgtttctggtcaatattctgtgatggactagttggcaaaggcataggcatgtgatagtttttttkttgttgttttttttttttttttttggagacaaagttttgcttttgttccccaggctggagtgtgatggcgcgatctcggctcactgcaacctctgcctcc

SEQ ID NO: 238072 - DNA, 201 bp, Homo sapiens
gcctctgcctcccaaagttgctaggattacaggcgtgagccagcacgcctggcctgttctaatgtttctgaatgttggcaaggcacatttacctgaagacygtgtcagcgataagtgtgtgtttgattcagagtatgattgccagtacttgagcattttgtttttaaatgtttgttaaatttagggttgaaaaatagcatc

SEQ ID NO: 238073 - DNA, 201 bp, Homo sapiens
tgtacttaccttcgttgtcttgtggaacttttgtgctaaaagtgtttgagctccccagaccaagtcacttcactctgggtttgcagagagctggtcttggytcttgttgctctgcagctgatttaggaaccagttcacatctgtttccacatttttctcatggctctatcaatttggttctgactgaacattttgccagta

SEQ ID NO: 238074 - DNA, 201 bp, Homo sapiens
attctttagaataaaaaggaaaagcccccaagaactaaactttgtatctgagaaaaggatttccagtagatggcattataagactatttttctgtttttcktaccatccctttcactgatagaattaaaatttgtttctttctgattgctgtggtttatgaaaatgattacatctgtataaaatcatcttatggacagatt

SEQ ID NO: 238075 - DNA, 201 bp, Homo sapiens
ttctttccccagtagtgtacttaccttcgttgtcttgtggaacttttgtgctaaaagtgtttgagctccccagaccaagtcacttcactctgggtttgcasagagctggtcttggttcttgttgctctgcagctgatttaggaaccagttcacatctgtttccacatttttctcatggctctatcaatttggttctgactg

SEQ ID NO: 238076 - DNA, 201 bp, Homo sapiens
gattaaactatttgtaagatttctgttttaaacatcttgagaacaccacatcttttaagccccacccagggtttgagtctgtataactgttattgattcayttgaagcaagactgatgttgacatttcactcctcactcaggcactttacttccttggcttctttttgactgtaaccagaatacaattagccattggtaca

SEQ ID NO: 238077 - DNA, 201 bp, Homo sapiens
tatgcctcagtgaacccttacactgatgaagatttgagatcttctgttgtcaagctaattacggtgcttctctttctttccccagtagtgtacttaccttygttgtcttgtggaacttttgtgctaaaagtgtttgagctccccagaccaagtcacttcactctgggtttgcagagagctggtcttggttcttgttgctct

SEQ ID NO: 238078 - DNA, 201 bp, Homo sapiens
ggcattaattatattcaaaatgtggttaattttagcttatgtgttagcaataacacattgttttattttatgtgataacatcatcattgtagctacagtgrtaggctttgaactggttttagtggcatttgagaaagtaaatattgatgtcttaatgaaaacctgtaagcaaccaggtaagccaacttggttttagcaggc

SEQ ID NO: 238079 - DNA, 201 bp, Homo sapiens
atagaatatgaagatcagttgttgtaaatcagagcctttttgccacccagcagccttcatataggggcacagaagaaagaagggtaatttattcactaaayactgaaactattattcattgttttgaatgagtgcaaagctctgcggacaaatgtcgtcttttgcagtttccgatatggtctggcagcattgtaaataatc

SEQ ID NO: 238080 - DNA, 201 bp, Homo sapiens
tctcagctcactgcaacctccacctcctgggttcaagcaattctctcacctcagcctcccaagtagctgggattacaggtgcacgtgaccacactcggctrattttttttttttttttttttttttttgagatgaagtcttgctttgttgcctaggctggagtgcagtggcgcagtctcggctcactacaacctctgcctc

SEQ ID NO: 238081 - DNA, 201 bp, Homo sapiens
gactccagtgttgcttttgattaaactatttgtaagatttctgttttaaacatcttgagaacaccacatcttttaagccccacccagggtttgagtctgtrtaactgttattgattcacttgaagcaagactgatgttgacatttcactcctcactcaggcactttacttccttggcttctttttgactgtaaccagaata

SEQ ID NO: 238082 - DNA, 201 bp, Homo sapiens
catagactacacgattcatttcattgaagagatgatgccggaggtaagggaaaagattgtgtgtggtttgatgtagtttgctcttttgcttgttccatacyactattttaaagcattgaacttggccagatctggcttttgccaggaatatctctaaagtatcatattcactgttgaaagagtcagtgaaatgtagctcta

SEQ ID NO: 238083 - DNA, 201 bp, Homo sapiens
cctcctgccttgcaggtggctgccttcttgttgtagtctcacctggtaaggggtgggtggcagggatttcttttctctttctctcttcataagggtactamtcccatcataattacctctcagagtccccacttccatatagcatcacatcagcgttatgatttcatcagcaggaattttgggatggacacaaacattcgg

SEQ ID NO: 238084 - DNA, 201 bp, Homo sapiens
ctgagatcagggtaccagcacagccaggtttctgatgcatgccctcctcctgccttgcaggtggctgccttcttgttgtagtctcacctggtaaggggtgkgtggcagggatttcttttctctttctctcttcataagggtactactcccatcataattacctctcagagtccccacttccatatagcatcacatcagcgt

SEQ ID NO: 238085 - DNA, 201 bp, Homo sapiens
catgtcttaaggactattaatggtgtcatttattgagataggaaatactaggaaaagagcaaatgtttgtcttggagggcaaggtcattaattccttttarcatatgttatgttgaatttgttggtccaggtcagtgagacactcaaggagagagatggggttggtaattggcagtgtgggtctggagctcagaagttgtg

SEQ ID NO: 238086 - DNA, 201 bp, Homo sapiens
ggaggagggaggtcccagactctctttaacaagcagatctcacatgaactcattactgtggggaaggcaccaagctattcttgagggatccacccatgacscaaaaacctcccaccaggccccatctctcacattgggtatcatatttcaatgtgaaatttggaggggccaaaacatcctaactgtatcaatccctaaaat

SEQ ID NO: 238087 - DNA, 201 bp, Homo sapiens
ccactgggaatcaaacatatcttttatagatattaaagcttaaatttgttgaatcagccttttatctttaatttggttgcacattatacaacattgggccktactcagatttcttggtcttaaagttggaaaagattgtcttccattggtctgccagtttagtatggtaaacttattttgtaaggtttcatatcccaaatt

SEQ ID NO: 238088 - DNA, 201 bp, Homo sapiens
gcctgtttataaaggagggaactaaggttgagaggctgactgaagtgttcctccgttggtgcactcaaggaaaaaggtagttccatgaacttctgaaataygccatttaatgggcctcttgtgctatttggcctgtaaaaggaacttaatcaatagtgggggtgggggtggttcctgttattatgaattcctatgagattt

SEQ ID NO: 238089 - DNA, 201 bp, Homo sapiens
gtttggtagttcattgatatagaacctactgttttttagtaataattgctagtaggttgctagtgaaagccttgagatgctatctggtttctgcaggagaygaaaccattgtgttaaatctgagatggagtgacctcagtaccagcatctccctctggaagtacattttccccaaccagagaagttaccaaggattgttag

SEQ ID NO: 238090 - DNA, 201 bp, Homo sapiens
agaagatttaggatgtgtgggaatggagatagtaccattagattcttcgggactgtttggatttcctaccttgctaaacacacaaacagcttcctgacttwtttttttttttttaaaaaggattcatagtgggagaaaagggcatgggagattttcaattcataaatacagttctggctgacatatattagaagaggctaa

SEQ ID NO: 238091 - DNA, 201 bp, Homo sapiens
cattgatatagaacctactgttttttagtaataattgctagtaggttgctagtgaaagccttgagatgctatctggtttctgcaggagacgaaaccattgygttaaatctgagatggagtgacctcagtaccagcatctccctctggaagtacattttccccaaccagagaagttaccaaggattgttaggagattagaaa

SEQ ID NO: 238092 - DNA, 201 bp, Homo sapiens
gctcatataaagtttgaattagtggtctgctttatgtttggtgattccagaacccattactaaatagttttgggggacttccacaggagttcattttgaaycaggattggaatgaccccaaatcccagcttcagcagtgttgcttgacacttaggacagaaggaaaagagccagacattcctctgtacaagtaagtacttg

SEQ ID NO: 238093 - DNA, 201 bp, Homo sapiens
ttattcaatagaatatttttggcaaacttggtcaacataagtccttgtatgtttttaaactttaaggaactttttctttattcatccttataataataatwattattttttattttttcagtgccctctagaggaaagtagcacatattggttcctagcactgccgaatttatgcagagttctctttttgggggcatctta

SEQ ID NO: 238094 - DNA, 201 bp, Homo sapiens
ttcttaaacaaagatggcataataaatgttatagggtgtagccaaagtctagaatatatttcatttcctgctccctcaacccctgccataaatttagagahactatagatattttaaatcactgtttcctgtgttggtaccatggcatggtgtttaaaatcacagaaacatgaataattcaatagcattctattccacagt

SEQ ID NO: 238095 - DNA, 201 bp, Homo sapiens
tggtttctgcaggagacgaaaccattgtgttaaatctgagatggagtgacctcagtaccagcatctccctctggaagtacattttccccaaccagagaagytaccaaggattgttaggagattagaaaattctacctggtgccccagccaatgttaagaggattgaaaacctaggggtgggtgctataacttgtaattata

SEQ ID NO: 238096 - DNA, 201 bp, Homo sapiens
gagtactcaggctatggttaggtaatgcagtttgctgtgttcagccttttggaagaatacttccaggcttccatttatctgtttcgatggtagcatgtgtygcagtaagttcaagcagcttactcttagctcttcttagtgttcatttcatcataatgaattttttaaaaaatcagtgttggcttttaattattatattga

SEQ ID NO: 238097 - DNA, 201 bp, Homo sapiens
aaggcattctgactaaggaacttaaaagaacttctttttcaatgaaagaaaagtaatttaaagatgaaaatcacataaaaattaaacagagagatcattcttttttttttttttagctcaatgaaagctatttttattccttcttttgaaaatgcaccatttgtttgctttgtcaaggtacctttaaatgaagtcatccta

SEQ ID NO: 238098 - DNA, 201 bp, Homo sapiens
ctcagtgataagtcagagttgattgtctaagagatcataaaactgttgagcattaagaactagaaggcgccttccagaccttctagttagtagttttgaayttgtgtttttggttaacttcaaagtatttttttttcatacaaaacccttctagagccattatttgtaaaaagataaagaataactgcctgattgactagt

SEQ ID NO: 238099 - DNA, 201 bp, Homo sapiens
tgcaattcagtgtgtgacactgtaagtaatcagaggagattttatgcactgaacgtgaaaatcagcctgaaagatttgtagccataccttgcattttttgaaaaaaaaaaaaaaaaaaaaaaaagaatcttgaaattaaagtatgtcttactttattttatttaatagtattcagcaagcggaaatgggagcagcaatgga

SEQ ID NO: 238100 - DNA, 201 bp, Homo sapiens
cagataggctcataatttttacaagaaaggatttatttaaaatccttggtagtttttcctctgtgtttggtagttcattgatatagaacctactgtttttyagtaataattgctagtaggttgctagtgaaagccttgagatgctatctggtttctgcaggagacgaaaccattgtgttaaatctgagatggagtgacctc

SEQ ID NO: 238101 - DNA, 201 bp, Homo sapiens
taccttacacaccaaaatcaaattatcctggatgcattatttagctgtcaaggttagatgaacagatgaagtatctgtttattttgacatattaaatattwtttcaccatcagtgaatattcttggggttgtgaaagtaaattgttaaccttcattgaacttaaaacatcaacatatggaaatttggaggtgttcatcaac

SEQ ID NO: 238102 - DNA, 201 bp, Homo sapiens
accacacccagctaaatttttgtatttttagtagagatggggtttcaccatattggcccggctggtctggaactcctaacctcagatgatccacccacctsggcctccaaaagtgctgggattacaggcatgagccactgcacccggcctgtgttttctttcatacatttctctattctctaaaatcttgtaacagaaaag

SEQ ID NO: 238103 - DNA, 201 bp, Homo sapiens
aaactcctgcaaaggtgaatgctttatgatctaataaccgttcctccctctgtagaactctcactcttccagagagaactgccatctgtttagaagccatkcttccattctctggtcctctgaatggaagtctttttaagattttgataaaattactcatatgtaaatgacttgataaagcatgtaaattgttgcctatga

SEQ ID NO: 238104 - DNA, 201 bp, Homo sapiens
ggcagatcactttaggtcaggagttcgagaccagcctggccagcatggtggaaccccatctctactaaaagtacaaaaattacccaggcatggtggcgggygcctgtaatcccagctactctgggggctgaggcatgagaatcgcttgaacctgggaggcagaggttgcagtgagccaagatcgcgccactgcactccagc

SEQ ID NO: 238105 - DNA, 201 bp, Homo sapiens
caccacattatgcaggtttcttggcgaggccaggccagctgggttcttgtcattaaaatccagcagttgtggtcaagcttcatgtgcagtgttgttagccrctgagatgaaggtgaagccttctcatttggttcatggccttttgggtcaggtaacaaacgtgtataatatgagcctgcagggagacgttggggaactgaa

SEQ ID NO: 238106 - DNA, 201 bp, Homo sapiens
cacaagcaggtggattggaatgtgtttttattattttattttattttttgagacagggtcttactttgttctccaggttggagtgaagtggcacagttacrgctcactgcagcctcaaccttcagggctcaggtgatcctcccacctcagcctcctgagcagctgggaccaccagtgtgtaccaccatgcctggctaattt

SEQ ID NO: 238107 - DNA, 201 bp, Homo sapiens
aaaagtgtttaccatggtgtttggcacataataaatactggcacctctctctttggaaaggatttcagacagagctgggtttgaatctttctttgaatccttttttttttttttttttaaccttggacaagtgaattctttgaacttcattaatgatagcaatgcttggggttttagtgagaatcggacataattttttta

SEQ ID NO: 238108 - DNA, 201 bp, Homo sapiens
tcctccatttttctagaagctaaacacctgctctgcctcaactttttctagatgacctggaaaattcctccccatcttttttttttttttttttttttggkgatagagttttgctcttttgcccaggctggagtgaagtggcatgatcttggttcactgcaacctccaactcccgggttcaagtgattcttctgcctcagc

SEQ ID NO: 238109 - DNA, 201 bp, Homo sapiens
ttctaggaagccctccaaaaaatacggcagaagaatacaatgagacgagaagtaacggtggagctaagtagccaaggattctggaaaactggcatccgttytgatgtctgtcaggtggggagacttctgaggacacagttatgcccatacttttcttcctttaaaacaaatctggtactgagggtttcttaattgagaatg

SEQ ID NO: 238110 - DNA, 201 bp, Homo sapiens
ttacagataaaaagctcaagaaccagtgatctaatcctgccctgatgcttccacacagcactgagcataaatcattcagacaaacaggtattttatctaamagatctcgttgagaagatagattacacagcctcctgtatgaggatttctgtcactgacataatttggctctttgtatctgacctgtatttgcctgctagc

SEQ ID NO: 238111 - DNA, 201 bp, Homo sapiens
attacagataaaaagctcaagaaccagtgatctaatcctgccctgatgcttccacacagcactgagcataaatcattcagacaaacaggtattttatctawaagatctcgttgagaagatagattacacagcctcctgtatgaggatttctgtcactgacataatttggctctttgtatctgacctgtatttgcctgctag

SEQ ID NO: 238112 - DNA, 201 bp, Homo sapiens
ggtagtccaaattagatgaacaatggaagaacagatttataaattttagaaatctacttgacaaaatatcatgcgggtgtgttaatgtggagaaatgattrtggcttaaaaaatgcatatggctaattggaaaacaataaaaaaatttaaatgcaatatgattataactgctgaaaaaattactgtaataatagttacatt

SEQ ID NO: 238113 - DNA, 201 bp, Homo sapiens
tcaagcactcttcctgcctcagcctcctgagtagctggggactataggcgtgtgctaccatgcctggctaatttatatacacacacacacacacggctaawttttatatatatatattttttttttttttttttttttttgtagagatggggtttcttcatgttgccaggctggtctcaaactcctgggctcaagtgatcc

SEQ ID NO: 238114 - DNA, 201 bp, Homo sapiens
ttactttattttatttaatagtattcagcaagcggaaatgggagcagcaatggatgcgcttgaaaaatgtaagcctgtttttttttctataattatgttcrtaatgtaatgagtgttttatggaaaggaaatgaggaaggagaaaaatggtaagtattgataaaatgtgatcttgttttcttcagaattattctttacaca

SEQ ID NO: 238115 - DNA, 201 bp, Homo sapiens
ctaagggaggcattgaggaagcatacctttctgtcacctgaatctatttgaaggccaactaatcttaaaggataagtttatcactcagtcagctgcagacrttagaaaaaacttcaaaagtccgccttaggcccagagtaaaacttagaaaccctactgaacttggcaacctaggttttttataatagagatcaggaggag

SEQ ID NO: 238116 - DNA, 201 bp, Homo sapiens
acagagtgttgtgagagcaaggaacctaacaaagccctagggtcagtgacagtggttgtagaaaggccagcaaggatattattataatagccatgtaagargtgatgatgtgaagtagatgaattcaggaaatatttatgaagcagaaacaattggattttttgtttattttttattaagggatagttgccatataagtga

SEQ ID NO: 238117 - DNA, 201 bp, Homo sapiens
caaggccctgcggtgggctgaagagttttccctcccttggcccagctttctcaggtttgctttttaattccctcggtttcctgttccggaggcgcgggcgktgccactgtcttggtacctgcggtagtagcctggctttgctctgacggcgatctcgcggcccgagagccttttataggtaaaaggggtaccttgcaagtg

SEQ ID NO: 238118 - DNA, 201 bp, Homo sapiens
aagatggtggtctgtgctcttaattatgaggaatagggaaggtggtttgattactaaaggagctaaccctcatgtgttcttttcttgcgggggtgggtggrtgggggggagtgttaatatgctgtattaagtaacctttttaattcctattgtaggattaaccacaatgaacggttggaattcctgggtgatgctgttgtt

SEQ ID NO: 238119 - DNA, 201 bp, Homo sapiens
aatacagtatcttttttttttttttctgaagcattgagccttttttttttctttttgtgaagcaaacaagagtgctgaattatctgttccagtacagtttygtattcttcagctatatcacaaatgtccttcctctaccctcagctagttgagaagcagctggaggagtaagtgatcttgtctcttgctgtgtgatatgct

SEQ ID NO: 238120 - DNA, 201 bp, Homo sapiens
tgcacttacaaccaaaaatgaaaaaatgatttttatttatttctattttcctgtagctacaagagccaaatactgatcgacaacttattgaaacttctccrgttctacaaaaacttactgagtttgaagaagcaattggagtaatttttactcatgttcgacttctggcaagggcattcacattgagaactgtgggattta

SEQ ID NO: 238121 - DNA, 201 bp, Homo sapiens
aggagttcgagaccagcctggtcaacatggcaaaatcctgtctctactaaaaacacaaaaaatagctgggtgtggtggcaggcgcctgtaatcccagctamtcgggaggctaaggcaggagaatcacttgaactcgggaggtggagtttgcagtgagctgagatcgcgcactgcactccagcctgggtgacagagcgagac

SEQ ID NO: 238122 - DNA, 201 bp, Homo sapiens
ggagtcactggtttaacaaaagtacacacggtgatttggcatggtattcatattttaggtgaaaaatgcaccaaataggtgaaatagaatagtttttacartggaagagtatttttaataattaacctcctttgccctcttttgaagtcgctccccaagtagggagaagaagagagctcgttgggaggaagaaaaagaccg

SEQ ID NO: 238123 - DNA, 201 bp, Homo sapiens
ttttttttttttttaagacatgggagtcttgctgtgttgcccaggctggaatccagtggctatttgcaggtgcaataatagtgcactctggcctttttgcmttggactcctgggcttaagcaaccctcctgcttcagcctcctatagctggaactacaggtgcatgtcacctcatctggctagtattatattttattagga

SEQ ID NO: 238124 - DNA, 201 bp, Homo sapiens
accatgcctggctaatttttcaattttttgtagagatggggtctagttttgttgcccaggctcgtctcaaactcctaggttcaagtgatcctcttgcctcrgccacccagagtgctgggattacagacatgagccactgtgcctggcctaggttccttttaaaaatgaaagattgttttataattatgtaaaatgtttaca

SEQ ID NO: 238125 - DNA, 201 bp, Homo sapiens
gagtgctgggattacagacatgagccactgtgcctggcctaggttccttttaaaaatgaaagattgttttataattatgtaaaatgtttacatgactctgyaatcagatttacagggtcaagtgtactttttttaagtctaacttctatctctgttgcttgtatccttttcttgccacccaccccggacaggtaactatct

SEQ ID NO: 238126 - DNA, 201 bp, Homo sapiens
taaatgtctggaaaactattagactttggttgtgcatgttgtttccatattgttgtgtttatcagcacagcacttataaaagcaaagtggataaagtgccrataattcaaatcctaatggcatatttctagctttaatggcaaaaacaatgtctttaccttttctgtcttccacacatattgtaaggccttacacgtggag

SEQ ID NO: 238127 - DNA, 201 bp, Homo sapiens
tgttgtaaagaaatcagataaaatgttttatcatgtagcattaatgaccaaacatctatgaatatattttggaagctgttttggtcgtatttttaggatarggtagtctttttacgtccttaataaatgtttagtccagtgcaggtttgtctagtcacaagtcgtatatgctaacattttttattgtttatttggccttta

SEQ ID NO: 238128 - DNA, 201 bp, Homo sapiens
acaagtcgtatatgctaacattttttattgtttatttggcctttactttgttcttaacataaagattttaatgaatgtttaataaaacctgtaattttttkagaaagggaccaacagtgtttttgttgttgttttttgccagtagaattggctgtggcttacaatgatatttaatttcttatattagaataaatgttttct

SEQ ID NO: 238129 - DNA, 201 bp, Homo sapiens
gtttttcatggttctggagctcctcctcctgttatttttgcagtgataaaagaaataatatggcttcacactaaaatctgccccctctgcttttgtctggrcctcctctcttttgcctttcgtttccctctcttgcgaaatgtggctttcactcccaacactttctcctggttgtagggcttctaccttgcagggagcttc

SEQ ID NO: 238130 - DNA, 201 bp, Homo sapiens
tgaagtattatctcattatggttttgatttgcctttccctcagggctcatgaaattgagcatcttttcatgtgcttattgactatttgttcatcttcttcrgagaaatatctattcagatccttttcccatttttaattgggttattctaaattattgagttatagtagtttttaaatatattctcagatacaaattcctt

SEQ ID NO: 238131 - DNA, 201 bp, Homo sapiens
agttagaaatttaaagtcttgtaggtaacattgagacttgatgtctgggattcaagatggacacgggtcatctatacccttccaaggtactcacgaaaggkttatttggaaggagaaacaggctttgtttggagcaggtttagaggaagtggttaagggattcaaagctgttttacatgagaaaaggttaaaggaagcaag

SEQ ID NO: 238132 - DNA, 201 bp, Homo sapiens
aagagggttttattttcctgacaggcagcgattcatctctcataggaaatattaaaaaagtaaacaattcaccaggttgagttcatgctttagaaaggcakttgcactgaatagtcttcatgtcctaacccatgtcctatccaccttgagtttttagcatcaactcttgagcttcctgcagtttaaatgtctggaaaacta

SEQ ID NO: 238133 - DNA, 201 bp, Homo sapiens
aaaaaatttcagtggtgagttccatgaggctgaagagtaaacatttgtctgtcttgttgtatcactagtgctaacatacttcatggcacatagcagggackcagtaaatgcttgtttactgattttatttaattggtcataataatgccttatctaagtattcatgtttttggttactagtgagtgtgcttttcaaatagt

SEQ ID NO: 238134 - DNA, 201 bp, Homo sapiens
gacgtcctttgcagtactaaacttttgatgaagttttagctattctgagtttattgcatttccacacgaatttttggattagcttgtcaatttctgcaaakaagtcagtggggattttgataggcattatgttgattctgtagatcaatttgggaatcattaccatctttttaaaaaatgtttatttaaagtgcagtttgt

SEQ ID NO: 238135 - DNA, 201 bp, Homo sapiens
cacagcacttataaaagcaaagtggataaagtgccgataattcaaatcctaatggcatatttctagctttaatggcaaaaacaatgtctttaccttttctrtcttccacacatattgtaaggccttacacgtggaggtgctcaattatatacttactgaattgaactggcaagaaagatttttttgttgattagagatcct

SEQ ID NO: 238136 - DNA, 201 bp, Homo sapiens
tttttttcattaaatattgttggcatcacttaatagccaaattcataatagccaacaatgttggagctatggagtgggaagaaaatatagaacacttccayatttcttgaaaattagtgaatggtggccgggcgcggtggctcacgcctgtaataccagcactttgggaggccgaggtgggcggatcacaaggtcaggaga

SEQ ID NO: 238137 - DNA, 201 bp, Homo sapiens
tccttatcctctccctccttttgttctccaccttccgaaaggccctagtgtgtgttgttctcctctatgtgtccatgtaacctgtggtatttggttttctsttcctgtgttagtttgctaaggataatggcctccagctctatccatgtccctgcaaaggacatgatctcattcgcttttatggctgcatagtattccatg

SEQ ID NO: 238138 - DNA, 201 bp, Homo sapiens
ctgaaataatataaagcatatgtcaatcattctgtgggctgggtccatcctccaggttctgatgaataagaatgactccttacattctcttgtgttcttgsgaaatagtattaaggaaaagaaaaagatatgacttccatgaaattatctcccaataaggaatttatagccaaatgaaaagggattgaaggaaaaatttaa

SEQ ID NO: 238139 - DNA, 201 bp, Homo sapiens
acagaacaggtactcagtaaataagtattaaaggaaggaatgccattcgtcacactacttttatcccaggctatttacttattgactagaaatagggcagyggggggatcaagaagggttacggtcagcagtttaaatggctgggtagtatctttcttaatctcagttgggatgggctagggtttacaaaaaaggcatgaa

SEQ ID NO: 238140 - DNA, 201 bp, Homo sapiens
gtaatccttttaatttcattttcttaacttagttcccctagctagagcctccagtacaatactgaatagaagtattgagagcagatctttgtcttcctaayctcagtaggaagcattcagtctttcactattgaggatgatgttagctgttgggtttttatagatgctttttatcagagtaaagaaggtctcttctaatct

SEQ ID NO: 238141 - DNA, 201 bp, Homo sapiens
ctagctagagcctccagtacaatactgaatagaagtattgagagcagatctttgtcttcctaatctcagtaggaagcattcagtctttcactattgaggawgatgttagctgttgggtttttatagatgctttttatcagagtaaagaaggtctcttctaatcttagtttgctgagtgtttttatcatgaaatggtgttga

SEQ ID NO: 238142 - DNA, 201 bp, Homo sapiens
aatttaccattttgaaaatgatattattgacagagaataaacaaataatctctcttgtcctttgacatttggcctttgctgcttgtgttgagagcctcttkccttgaatatgatctttttgctgatgcagagttgaccccaagtgtctgttcagaaagagcctcttggccttgactgccaggatctgctgctagttgactg

SEQ ID NO: 238143 - DNA, 201 bp, Homo sapiens
tgattgactagtgggagatgggagtggagacagtatcctgttttacttgatttctcccccacctcctgtagcagtccctaaggccactgaatacagtatcttttttttttttttctgaagcattgagccttttttttttctttttgtgaagcaaacaagagtgctgaattatctgttccagtacagttttgtattcttcag

SEQ ID NO: 238144 - DNA, 201 bp, Homo sapiens
acagtatcctgttttacttgatttctcccccacctcctgtagcagtccctaaggccactgaatacagtatcttttttttttttttctgaagcattgagccttttttttttctttttgtgaagcaaacaagagtgctgaattatctgttccagtacagttttgtattcttcagctatatcacaaatgtccttcctctaccct

SEQ ID NO: 238145 - DNA, 201 bp, Homo sapiens
tcttagccaatttcaccttctactaacagccaaattagcagagaaataccctttagtggatgtttcctttttaaaaattaagacctgaaatgagccatacttccaatttagattacccaaatgaaacaattgtggtagctcctgaagaattattttctgtacatatttgagtgcaagaaactattattcaatagaatattt

SEQ ID NO: 238146 - DNA, 201 bp, Homo sapiens
ctccacaaaaaccagtttgtcagccgggtgcggtggctcatgcctataatcccagcactttaggaggccgagacgggtgtttcacctgaggtcaggagttygagaccagcctggtcaacatggcaaaatcctgtctctactaaaaacacaaaaaatagctgggtgtggtggcaggcgcctgtaatcccagctaatcgggag

SEQ ID NO: 238147 - DNA, 201 bp, Homo sapiens
atttagcaaagaaaagtcttggacctgtttgctttctttcaagattgttgtttgtattatgcttgatttttcaatttatgctcttcagcttctgaccaggsagtgtttaccagtctttattttggcaatcgtttaatccttagataatattcactttattcttctttaaaactcagcctatattaactcagatctcttctc

SEQ ID NO: 238148 - DNA, 201 bp, Homo sapiens
tgttaatctcttataggattaatttattttaaaaattaattatttttctttttgtggagatggaatctcactatgtaggattaatctaacttctaggtctbtttttttttttttttcaaattgtggtaaaatataagtaatacaaaatttaccatcttaactatttttaagcgtacagttcaatagggttcaacatgacct

SEQ ID NO: 238149 - DNA, 201 bp, Homo sapiens
tatcagtactggtggtttcataagctttcacatgtaactagtttatgcagtttgtagtgtgtatgtgtatatgtgtgtgtgtgtgtgtgtgtgtgtgtgtkttctccaaaatgaaaaataaggaagaatttgagtttgtctcttcgaagtgtatccttgaccaaaagagcaccaaccctacgaagttgcccatgcatattg

SEQ ID NO: 238150 - DNA, 201 bp, Homo sapiens
agatgtgggttggtgtcagagagatttaagaaagcccctgtagttagtgaggccagcttctgctcatgcccaagcctgtcctttgctgtctttgctcaggscccatgggctctgcgtgtcctccttccctcctcagtgcatccctttggtttttctccccttgtacatccccaaactcatattttctctttcagcagccag

SEQ ID NO: 238151 - DNA, 201 bp, Homo sapiens
gtaaattgttaaccttcattgaacttaaaacatcaacatatggaaatttggaggtgttcatcaactcattcatgacacgggagcaacctagttcaaacttaaaaaaaaaaaaaaccttacagtaaggtttaggggaatatgatttaggggaaaacggcaaaagtaaactagtgtagttgactttgggctcaaaataagtat

SEQ ID NO: 238152 - DNA, 201 bp, Homo sapiens
gggattacctaagggaatcaggaagggcttcatagaggaggtggcatttaagattgatagatggatagaaaatcactgggcagattcatacgttgggagattttttttttttttttttttttgagctagagtttcgctcttgttgcccaggctggagtgcaatggcgcgatctgaactcactgcaacctctgcctagggtg

SEQ ID NO: 238153 - DNA, 201 bp, Homo sapiens
tcagctcactgcaacctccacctcctgggttcaagcaattctctcacctcagcctcccaagtagctgggattacaggtgcacgtgaccacactcggctgattttttttttttttttttttttttttgagatgaagtcttgctttgttgcctaggctggagtgcagtggcgcagtctcggctcactacaacctctgcctctg

SEQ ID NO: 238154 - DNA, 201 bp, Homo sapiens
ttttaaggatccagtcttattagttctgttacctttgtgagtttcaccagcagctaatgaactccacagtgaggtaacttgagaacagatgaagaaaaatktgacagatgtgcatgaacagagttaaacatttggggaaaaggaacatgggaacaaagcaaaagaaatgaaatatactgtcttttccctttgtgtagtatt

SEQ ID NO: 238155 - DNA, 201 bp, Homo sapiens
tgcttttcttgttgtgtcctggattctgataaaattaaagaaattgcttcctcaaaaaaaaaaaaaaaaaaaaatatatatatatatatatatatatatgyccaggtgcagtggctcacgcctgtaatcccagcactttgggaggccgaggtgggtggatcacctgaagtcaggagttcgagaccatcctgaacaacatgg

SEQ ID NO: 238156 - DNA, 201 bp, Homo sapiens; identical to SEQ ID NO: 46535

SEQ ID NO: 238157 - DNA, 201 bp, Homo sapiens; identical to SEQ ID NO: 46534

SEQ ID NO: 238158 - DNA, 201 bp, Homo sapiens
tttgtgcatgtgtgacagagtcttgcactgtcgcccaggctggaatacagtggcacgatttcggctcactgcaagctctgcctcctgggttcacgccattctcagccatactcaggccatactcagcctcccgagtagctgggactacaggcgcccaccaccacgcccgtttaattttttgtatttttagtagagacaagg

SEQ ID NO: 238159 - DNA, 201 bp, Homo sapiens
aggtctgaggagggcagggtgggtgggagagcaggcggggcaggggtctgagccagctacttcacaccctcctcccctccctcccttccttccagaaaccrgtggccgcagggttgtgtcccacgaggtggtgttggggggcaggttggccgccaagaccagcttctcgctcagccgtccaagcagcccccgggtggagga

SEQ ID NO: 238160 - DNA, 201 bp, Homo sapiens
gagggacatcgcaaggaaagtcgtggagggagggttatcgagtgtgatgtcattcagactcccctgttacctctgtcccttgatagtggctctctgcttcmcccagcccctgacttccttcgtcccagatttcctcattgggcgtgagtttcaagcactgtttttactttaaccatgaaacagtctcagctcagaaccttt

SEQ ID NO: 238161 - DNA, 201 bp, Homo sapiens
tgagccgcgtccaggaaggaatggactctaggggagaacccccgcagccagcagtattgtcttttggttccccaggcctgaccagggcgtatgaggacccrggggtgattttaccagcgggtggcaggtgggcaatcgggccaccggggccgcctgcctgcctggcctggagtggcagctatggagcttgctggagggacg

SEQ ID NO: 238162 - DNA, 201 bp, Homo sapiens
aatcgggccaccggggccgcctgcctgcctggcctggagtggcagctatggagcttgctggagggacggttggtgctagggacactgggggccagattgtygtctggtgggctgtcctttgcgttgtaggatgttgagcagcgtccctgggcttccctgaccccagtggtgacaaccagcggtggtgctgaggccgtttct

SEQ ID NO: 238163 - DNA, 201 bp, Homo sapiens
ctcaggtgatccacccgcctcggcctctgaaattgctgggatggcaggcatagccaccgcacccggccggcttccttctttaacaccactgggacacagamtcatagacaggcagcggctcttcctctagcatttcctcccgggctgagcaaggaggcttttgtgggccctggcctcgtccatctgccccagcattctcac

SEQ ID NO: 238164 - DNA, 201 bp, Homo sapiens
cggttgtccagctctgagctccagtgtcctctgtagcccggagacagtagcgcttgtcaggcccctgtgcagacgtggcgaggtagtgcaggacaagcagmgagcctggctccggggtcagcagccaggagagtcccagttgctccagtcccagagcctccccagaggaggggctttgaggaagattaggcgtagtgggat

SEQ ID NO: 238165 - DNA, 201 bp, Homo sapiens
gtccagggtggtccccagacatcccccggcctctcagccgcagctgtgacccggagctgcctgggagagatgcaagtccccgaccccatggcgaccccacygctggggctccccggcaccaggcaggcatggcctcagctgggcaccgcctgtcccccaggcactgaacgaggagaaggtggcctatgaccgcagccccag

SEQ ID NO: 238166 - DNA, 201 bp, Homo sapiens
gcaggtacaggcagcgggcagctgttttccactgcactttcatcacccggtgaggctgcattcgtccccgtgggccttaaagcagcacactctctctcagygctgggctgggaagtccaaagtcagcctcgctgggctcaagtcaagctgtgggcaggactgggcctcccgaaggcttccggggagagtcagtgcccgcct

SEQ ID NO: 238167 - DNA, 201 bp, Homo sapiens
gcaggcgtgtatgcgctctgtttctgtgcattcccatgtgatgtctgcctcccccttcccagaacgcacctggtgcctcaggacatagcccacggggggtyccaaggctggccagccctggcttcagcccccagggactcccttcagcttgtgaagccacctgttgccactggaggcttcagggcctttgcacaagtgccc

SEQ ID NO: 238168 - DNA, 201 bp, Homo sapiens
tgtcttagagccctggggtccaggacaaggaggtggaagcccctgagtggagtcccttatccttagccccttagagatgcctcagtcccctccacccccgyctgccctcctggggcccagtctcactgctgcccacccctgcctggggaggagagccttcccgttaggcgggctcttcctcctctctgcatccccgttagc

SEQ ID NO: 238169 - DNA, 201 bp, Homo sapiens
taactcacttaaactcaaagagccacacacagagagtggccaccctactggcctgcccgaggagatcctgatctctgttgggtgtcccccgccccccaccmaatcccaagagcttctgcttgccccaaggacgtgagcgcagagcagagcctggagaagccggagctgtacgtggtggggcagaaggacgagctcttcaac

SEQ ID NO: 238170 - DNA, 201 bp, Homo sapiens; identical to SEQ ID NO: 46554

SEQ ID NO: 238171 - DNA, 201 bp, Homo sapiens
gtcagccaattcaccatgtttcccagaaacagactgacctgggccacatccaggaaggagcccacctgctcctatccaaagtaattcccagccgtgggacrgggcctggacgggcccctcctacttccagagtcggcattcatttatgtatgtgtgtgtgtatgtatgtatgtatgtgtgtatgcatgtatagctctgtcg

SEQ ID NO: 238172 - DNA, 201 bp, Homo sapiens
cctgggctgagccctggctggagaggctggggaagatagccagccaggcgttgtggcctctcaggaccactggggctgggtggtacctcccagtcctggcsttggggtgaagcagggaggaaggggcagctcccaggcctctggaggtaggcttttcctgtcagccaattcaccatgtttcccagaaacagactgacctgg

SEQ ID NO: 238173 - DNA, 201 bp, Homo sapiens
gatagtgctggtcccaggccccacacctagaaccctgggaagaaatatcatctttgtcatccagcccgtcccggggctgcagggcactggtctcaggagakgcggtcaggatgggtggtgtagggagtgggctctctcctaggccgggacaaggctgggctgcgttgccctgggctgagccctggctggagaggctgggga

SEQ ID NO: 238174 - DNA, 201 bp, Homo sapiens
ccccacgtccgggatccctgagcagacgcaacgtggcgtggggccagcggacagggaccccgtgttgcgggcgggcactgctgggctgcagtgcggcagcrgcctgggcgggggcaggagaggctggacggtctctctgatcctttccctcctggcccaggggagacacaagagtgacagagccatcaacaacagaccctg

SEQ ID NO: 238175 - DNA, 201 bp, Homo sapiens
cctggttctcgctcagtacccctatggtctgcctcctcttcatccgtgccacccgggacctggtggacgacatggtgagtgctgttggatgcagctgcctrggggagggagcggggccggtcgggggggtctcttgatccctgggcgagagtgggaggagggctgggcttcctggagcattaggggaacgtgggcctggga

SEQ ID NO: 238176 - DNA, 201 bp, Homo sapiens
gccaggagatggccttgggcagatagtgctggtcccaggccccacacctagaaccctgggaagaaatatcatctttgtcatccagcccgtcccggggctgsagggcactggtctcaggagatgcggtcaggatgggtggtgtagggagtgggctctctcctaggccgggacaaggctgggctgcgttgccctgggctgagc

SEQ ID NO: 238177 - DNA, 201 bp, Homo sapiens
tttagtagagatgggttttcgccatgtgggccaggctggtcttgaactcctgacctcaggtgatctgcccccttggcctcccaaagtgctgggattacagrcatgagccatcgcgcccagcctgccttttcttttttgagagggagtcttgcactgttgcccaggctggagtgcaatggtgcaatcttgagtcactgcaac

SEQ ID NO: 238178 - DNA, 201 bp, Homo sapiens
gggccccgggcgcccgcatgtccagggatggggctggaggacatcccactgtgagggttggaggggaggccccaggagcagggacccccagagtggacgtrtggccatttgtggggaccttatggttactctgccgtccgcaggaggtggacttcaggggtgctgtcctccagacccctcttcccagagggtctgttatgg

SEQ ID NO: 238179 - DNA, 201 bp, Homo sapiens
ggggtctgggggggcgggcgggactgggggcgtgcggggggctgaccagctgcttgtgccctgcagccgcggacgtgggcgtggggctggcgggccaggarggcatgcaggcagttcagaacagcgacttcgtgctcggccagttctgcttcctgcagcgcctcctgctggtgcacggccgctggtcctacgtgcggatct

SEQ ID NO: 238180 - DNA, 201 bp, Homo sapiens
gctcggaggcacggggtggaggcagctcctcagtgctggtccctgagcccgttgaaatctcaggagctcaggagcacccgggcagccctgttgctcctgtbcctcacccacccagaggtcactggcccgtggccaccagccaggcttctgtggccacgtgcacacggtctgttcccactgactggcagggggatattggcc

SEQ ID NO: 238181 - DNA, 201 bp, Homo sapiens
gagtcttgcactgttgcccaggctggagtgcaatggtgcaatcttgagtcactgcaacctctgcctcccaggcttaagctatcctcctgcctcagcctccygagtagctgagactacaggcgcccgccaccacgcccggccaattttgtatttttagtagagatggggtttcaccatgttgccaggctggtctccaactcg

SEQ ID NO: 238182 - DNA, 201 bp, Homo sapiens
cgcggggattagagccgtgagctactgcgcccagcctgtttctacattgttttgaaaggcagtgacctctgtcctggttaccgtccctgtcccctagcctygagctgtaagccttgggacagcagcgcgtccagtcatggcatgtggggacggccgccccatgaggtgaataaatgcccaggacgccccagagagcagagc

SEQ ID NO: 238183 - DNA, 201 bp, Homo sapiens
cttgaggtcaggggttcgagagcctgggcaacatggagaaaccccgtttctactaaaagtacgaagattagctgggcgtggtggcgtatgcctgtaattcyagctacttgggaggctgagacaggagaatcacttgaacccaggagacccaggaggtggaggttgcagtgagctgcgattgtgctactgcactccagcctg

SEQ ID NO: 238184 - DNA, 201 bp, Homo sapiens
gggcaggcactgcacatggacctcctcttctggggagagttgagtgaacaagaccttgaaccccagagaagatccgattgtgggagctggggctctggtcmagactctgagcggtatcctgacaaggactagaggagccccagggcagtgctattccctgcgtgtagggaaactgctgggaagcaggtgccttggagaagg

SEQ ID NO: 238185 - DNA, 201 bp, Homo sapiens
ccaggacaatggtgagtgccggtgcctgccctggggccgtccctgcgcaggggccgggtgctcaccgcatctgccccgcagtggatgggcacagctccagygaggacgccggcgcctgcatgcacctggtgatctggaaggttcgagaagacgccaagaccaagcgatgacgcctgcccgcctcccacccgcctctcctgc

SEQ ID NO: 238186 - DNA, 201 bp, Homo sapiens
ccagcatctgcacacaggtcaccaagtaacaaaaacagcttgtgcttgcagtcaccctggtgtgtgggttcctccttaggcgccacggcacccatcctagraacagcctgtgaacccctggctgaggggcagcgccccgtggaggtgcccactccagcttctctgtgagcccctggaagaggctgcagggctcctggatgc

SEQ ID NO: 238187 - DNA, 201 bp, Homo sapiens
taaaaataaataaatgtttttcggctgggtgcagtggctcacacctgtaatcccagcaccttgggaggctgaggcaggtggatcacgaggtcaggagatcragaccatcctggctaacacagtgaaaccccgtctctactaaaaatacaaaaaattagccgggcgtggtggcgggcgcctgtagtcccagctactcgggag

SEQ ID NO: 238188 - DNA, 201 bp, Homo sapiens
caagtgatccgcctgcctcggcctcccaaagtgctgggattacaggtgtgagccaccacgcccagccctcttccccgctttctttctattgttttttctatttttttttttttttttgagatggagtctcactttgtcgcccaggctggagtgcagtggtgtgatctcagctcgctgcaacctccgcctcccaagttcaag

SEQ ID NO: 238189 - DNA, 201 bp, Homo sapiens
tcttcctgttcccacagagactcatgtctggagagtcggtgtgctgcaggtgtggaggggcccgtgcctctgggtcagtgtttccttccccttcccacttyccttccttcctcagatctctgcagacacctgccctgggccagctccgtcgacgctggggtgctcagaagagcctggcagggggcagggccaggaaggtgg

SEQ ID NO: 238190 - DNA, 201 bp, Homo sapiens
ccatgttggccaggctggtctcgaactcctgacctcgtgatctgcccatctcagcctcccaaagtgctgggattacaggcatgagcaatcgcacccagcgtttttttttttttttagacagagtttcacacttgttgcccaggctggagtgcaatagtgtgatctcggctcactgcaacctccgtctcctgggttcaagcg

SEQ ID NO: 238191 - DNA, 201 bp, Homo sapiens
ctccctctctgggcctcagccatctgactggcagctggcgaactagtaggtgctcagtgaaaatgtttgagtgactccagaaggggtctgggggctcctcraagcatccatcaactccactttcacctccctcctctcctcgtcaccagggagaccaacttgaagttcagacaggccctgatggtcacccacaaagaactg

SEQ ID NO: 238192 - DNA, 201 bp, Homo sapiens
aggctgtcgtgcagtggcatgatcttggctcactgcaacctctgcctcccgggttcaagtgatcctcctgcctcagcccctctagtggctgagattacagrcacctgccaccatgcctggctaatttttatatttttagtagagacagggttttgccatgttggccaggctggtctcgaactcctgacctcgtgatctgcc

SEQ ID NO: 238193 - DNA, 201 bp, Homo sapiens; identical to SEQ ID NO: 46555

SEQ ID NO: 238194 - DNA, 201 bp, Homo sapiens
ccagctctgagctccagtgtcctctgtagcccggagacagtagcgcttgtcaggcccctgtgcagacgtggcgaggtagtgcaggacaagcagagagcctkgctccggggtcagcagccaggagagtcccagttgctccagtcccagagcctccccagaggaggggctttgaggaagattaggcgtagtgggattggattg

SEQ ID NO: 238195 - DNA, 201 bp, Homo sapiens; identical to SEQ ID NO: 46556

SEQ ID NO: 238196 - DNA, 201 bp, Homo sapiens
ctctgagctccagtgtcctctgtagcccggagacagtagcgcttgtcaggcccctgtgcagacgtggcgaggtagtgcaggacaagcagagagcctggctscggggtcagcagccaggagagtcccagttgctccagtcccagagcctccccagaggaggggctttgaggaagattaggcgtagtgggattggattggagt

SEQ ID NO: 238197 - DNA, 201 bp, Homo sapiens; identical to SEQ ID NO: 46557

SEQ ID NO: 238198 - DNA, 201 bp, Homo sapiens
atggcacccctctgccaggcagcccgcggctctcgttccagaccaatgtcatccgcacggccaagtacaacttctactcgttcctgccgctgaacctgtaygagcagttccaccgcgtgtccaacctgttcttcctcatcatcatcatcctgcaggtgaggcgtgttgcctcctccaggaagtcccccctagccacctggc

SEQ ID NO: 238199 - DNA, 201 bp, Homo sapiens
acttgtgccggcgccaactatgggcagggtctggtaggtccccaggtggtgcctgctgcccgactgtctgtttacgggctctgacatctcgggcctccccrgtgcctgggtcccacgggccccatgagccctcctccgggcggtcattaggggtgtttgtcctgggcctcgagctccagcgacgcccggctctctcgctgc

SEQ ID NO: 238200 - DNA, 201 bp, Homo sapiens
cctgcccagggtggcttggagggatggtccagcagcccttacggcgggcaccgtgtagccctgggacgcagggatgtgcatccccggcctagaggggcackttctatcccagccttgtgagttgggaatgagcgttactatccccccagtggccgctctctgctgcctgggccttggctgcagcctggtggtaggtgaggg

SEQ ID NO: 238201 - DNA, 201 bp, Homo sapiens
gaccctccgggcggggggttgaagctttgcccagctgtggctctgggccctggggagctgggaccctccgggcggggggttgaagctttgcccagctgcgrctctgggcccggggagctgggaccctccgggctgggggttgaagcttcgcccagctgcggctctgggcccggggagctgggaccctccgggcggggggtt

SEQ ID NO: 238202 - DNA, 201 bp, Homo sapiens
ttggctttctgtggggcagagctcgctaggaaggccccggcctcctcctgctgggcgttacccccttgagcctgttgcctcctgaacctccctcggcctcygcgagctcttctgcacgatggggtcgtggcatctgagtgtgacgggaagcgtcgtgcgggctgtgctgtagcaggcctcactttgacgagaaaactctgt

SEQ ID NO: 238203 - DNA, 201 bp, Homo sapiens
ttttttgcaacggaatctggctctgtcgtctaggctgttggagtgcagtggctccatcttagcttcctgtaacctccgcctcctggattcaagtgattctyctgcctcagtgtcccaggtagctgggattacaggcacctgctaccacgcctggctaatttttgtatttttagtagagatggggtttcaccatgttggcca

SEQ ID NO: 238204 - DNA, 201 bp, Homo sapiens
cttgcagatgctggcaggattgtgctggcagctctcccccaggtggatggcgatgggaaaagcgctgggttcccagggcctgggggcctgtccgtgttgcyacgggtctctgggtgctttacttttgaaggtactattttctggcctggggaaatgtttgttttagaaacatcagagaatacggaagagccagaggagaag

SEQ ID NO: 238205 - DNA, 201 bp, Homo sapiens
ggaaaggggcctggggtttccagagcagccgccttcttgcagatgctggcaggattgtgctggcagctctcccccaggtggatggcgatgggaaaagcgcygggttcccagggcctgggggcctgtccgtgttgccacgggtctctgggtgctttacttttgaaggtactattttctggcctggggaaatgtttgttttag

SEQ ID NO: 238206 - DNA, 201 bp, Homo sapiens
cctgccctcggggatcccgcagtcgggttcaggatctggcagcccggtgccagtggttctgggtggggctgttggcggcgtcccagctggggctccaggcsactctccagaactgcatctgtagagggcaggagtcctggggtagaggcgctcagggagcagccccaggtacatggggagccctgaagcccacccactgtg

SEQ ID NO: 238207 - DNA, 201 bp, Homo sapiens
atgggcacggcctcatcgcgtctgcgttccccgctggaggccttgtggaggccctcacccatggcagcttttgccttccctctagagtttaaagaaacccrttatccccaaagagtttgggggcaaagtccccaccgtcatccgccagcgctatctcaacctgttcatcgaggagtgtctcaagttctgtacctccaacca

SEQ ID NO: 238208 - DNA, 201 bp, Homo sapiens
cagggaagtgtgagtccccgtggaaggaacagcctgcccaaagtccctgaggccaggtggggacaggaaggctttggaggcagcccagtgctggggcaccrtagggcaagtttggggcacagaggggctcgtgagggtggccggaatgttctcacctgcacccggtgcagggaacctggggaggagggcctgagcccactg

SEQ ID NO: 238209 - DNA, 201 bp, Homo sapiens
ccggcaggaacgtgctcccagatgatgcttctcctgagggaggcagaggctgagggcaccacgttgaggggatgctagtgctgcgccacaggctgactcargccccagcaggacagtcccaggcctggggaaggggccatcctatactgcaaagtgagcggcagacgtgtgtgcggggcgcacagctcctgccctcgggga

SEQ ID NO: 238210 - DNA, 201 bp, Homo sapiens
tacaacgggcagttcaaggagaaggtgatcctgtgctggcaaaggaagaaatacaaggtgggcggcccctcccgcgcctccctgctccagaggagctgccrtggtaccctcggggaatctattttttgctcctcctgagtcctgcctctgcttgtatttgctcgatagttttctttttttggttttcgttttctttttctt

SEQ ID NO: 238211 - DNA, 201 bp, Homo sapiens
gattctcatttggtttctagtagtctccaaccctagtactgactgggtttgggggatttggctcaggatttgggggctgcatgcccagaaagatctgggcygccagctggatgtatggccttggacacccaagagcccatcaccaagcctcagtttacccccctctgtaaaatgtacaggcctgaacggtctcccagggcc

SEQ ID NO: 238212 - DNA, 201 bp, Homo sapiens
tgcccagcgtcgggttcaggattggggaggacctggcctggtgcggccgccccatctggccccatctggccccatctgggcctggctcaccggccagcgckcagggtttctctcgcagcaccggtgcctgtggctcctgccctggaccaacaccccatacttcccagcagagccaagcacaccgggcactgggccccggct

SEQ ID NO: 238213 - DNA, 201 bp, Homo sapiens
gcctgggcgtcctggctgccacaggactgccggggcctggtctgcttccagctccaccaagaggctgaggcctcctgtcctcagtcctcactccctagtarggctcggtagatgcaggtggtcagtgccccgggggctgtggagtgggcctggccgggccctgactgtgtgtctgtgtcccctgcagtggccggaggctgg

SEQ ID NO: 238214 - DNA, 201 bp, Homo sapiens
ggagtgcagtggcacaatctcggctcactgcagcctcgaccttccgggctcaaaggatcctcccacctcagctttccaagtagctgagaccacgggcatgyaccaccacgcccagctaattttgtagttattttctagagatggagactcattatggtgcccaggctggttcaaactcctgggctcacgcaatcctcctgc

SEQ ID NO: 238215 - DNA, 201 bp, Homo sapiens
ctcctctgggtgcagagtgctggtccctttgcctctgagcagcgggttcctatctgtccagtgggctgtgcatggagggccccgggcgcccgcatgtccarggatggggctggaggacatcccactgtgagggttggaggggaggccccaggagcagggacccccagagtggacgtgtggccatttgtggggaccttatgg

SEQ ID NO: 238216 - DNA, 201 bp, Homo sapiens
cccggggcccttctctcccacagccccaccagcatgggcagcctcggccagagagaagatctccaagatgaggacaggaactcaggtgctgatcctgggcrgagggggcggtgcaggtgggagggattatgaagttcagggctggccaggcgtggtggctctcccctgtaatcccggcactttgggaggctgaggcgggtg

SEQ ID NO: 238217 - DNA, 201 bp, Homo sapiens
gccgtccaagcagcccccgggtggaggacctgaaaggtaaggccctgcccctgctctgccacacggtgcttcgtgggcctctgccggcccagcccctgctstgccacacggtgcttcgtgggcccctgccggcccagccgcctttcccggtggtgtctaccgccccgtgggccatcccaggcaggggctgaccactgtgcc

SEQ ID NO: 238218 - DNA, 201 bp, Homo sapiens
gggatacctggagggtgctgcccggggcagcgctgccaagaggcctctgcagagggcactggtctccctggatccaggcctgggcgtcctggctgccacasgactgccggggcctggtctgcttccagctccaccaagaggctgaggcctcctgtcctcagtcctcactccctagtaaggctcggtagatgcaggtggtca

SEQ ID NO: 238219 - DNA, 201 bp, Homo sapiens
ccttcccccatctctgtctcttctcttccagctcctctgtctcctctccttgcctcctcctcatcccctccggctcctttctcctcccctccctcctccckactcccagcgtggcgagctcttgctctcctgggccagccctggacccctgggtctcctggccccgtgtccccaaattggccaccagggggagctcactcc

SEQ ID NO: 238220 - DNA, 201 bp, Homo sapiens
gccacagtctcagacaaaaggaaagcgcggtgctgtgggggggctgcctgctgcctggttcccaggcttctgtgtaggacggacctggccctggtgtcctygctgtcagccgccttcctccgctgagtggggtctccaagccgagccgaggggccgcctgctaatggagctgcggcagcttcttcaaagcaggaggcccag

SEQ ID NO: 238221 - DNA, 201 bp, Homo sapiens
tacctcgtgtcctcttcaggccgctgcatccgggacgaggagtgttattaccactggggacggctgcgccggaaccggggtaaggccttacccgggtcctyccccttcccacccatggcccccggaacctgggccctcccttgaggcccccagaaccggggtaaggctttacccaggccctccatcccactcagggtccct

SEQ ID NO: 238222 - DNA, 201 bp, Homo sapiens
atcccacggccctccttagggagagctctccaggctactctgacctcccctccccagagccccctcacggctgagaccttagccccagggaggggaaatcrttgagttgggcctatcccaggaccccacacgcttcccgtctgtgtctccgcgctcgggttgtcctgttgctgatctgtggtgggtgctgagctgtcgcag

SEQ ID NO: 238223 - DNA, 201 bp, Homo sapiens
ctctgcgcctgctgggcacatggggtgacgtttcctggaaatgccttggctgtagcctggcacaggcaaagaagaacctgtggcttctgtgtgatgttccmctgcctgcccgtacctcgtggccctccacacagtcccgcggagttccgagtggtccaaaacagacacacggatccttcctcttgtctaaatgctacttaa

SEQ ID NO: 238224 - DNA, 201 bp, Homo sapiens
cccccccagcagggtcttgtagaaagtcgggccaggcctcagtggtgggtggacaggacccttcacggggggttgtcctgtctcctgcgtcttcacatcastggtgtctgtagagcgagaaagtatccctggaggcaggtcacagatgagggtcccccagaaagctcctaaaaaatgcaggttctggtctggaggctggga

SEQ ID NO: 238225 - DNA, 201 bp, Homo sapiens; identical to SEQ ID NO: 46550

SEQ ID NO: 238226 - DNA, 201 bp, Homo sapiens
acctccaaccaggaggccatagagaaggtgaggtcctggagttcctatctggccggtcgggtggggactaggggtccagggtggtccccagacatcccccrgcctctcagccgcagctgtgacccggagctgcctgggagagatgcaagtccccgaccccatggcgaccccaccgctggggctccccggcaccaggcaggc

SEQ ID NO: 238227 - DNA, 201 bp, Homo sapiens
gggggggtctcttgatccctgggcgagagtgggaggagggctgggcttcctggagcattaggggaacgtgggcctgggagcctcagctgctggggctacaytgtccttatctgctagcacccacattgggcaggtgccgcaggtggcgttggctctgtcggtgcgtggttttggggccattgagctttggtggggggtggt

SEQ ID NO: 238228 - DNA, 201 bp, Homo sapiens
gggacggctgcgccggaaccggggtaaggccttacccgggtcctcccccttcccacccatggcccccggaacctgggccctcccttgaggcccccagaacyggggtaaggctttacccaggccctccatcccactcagggtccctgggctgcaccgtctttggcagagccggggctagcccttggcctcattttctctcca

SEQ ID NO: 238229 - DNA, 201 bp, Homo sapiens
cacacacaccacaggacttcagtgttctctgtaaagccaggagctggtcctggtgccctccaaggccctgtctgggtccatctagactcagtgtctgtggygccaggctgaggggactcgggaagcagaagcggagggggtgatgtggggtgggcccgggtccaggagacagggcagctgtcacttggagttgcagggagt

SEQ ID NO: 238230 - DNA, 201 bp, Homo sapiens; identical to SEQ ID NO: 46545

SEQ ID NO: 238231 - DNA, 201 bp, Homo sapiens
agaccagctgttgtaccaggcggcctcccccgacgagggggcgctggtcaccgcagcccggaacttcggctacgtgttcctgtcccgcacccaggacaccrtcacgatcatggagctgggggaggaacgggtctaccaggtcctggccataatggacttcaacagcacgcgcaaacggatgtcggtgctgggtgagccccg

SEQ ID NO: 238232 - DNA, 201 bp, Homo sapiens; identical to SEQ ID NO: 46541

SEQ ID NO: 238233 - DNA, 201 bp, Homo sapiens
aaagagaaacatcttctctaggatttaagaataggtttattttcctgttttgccagaaaaggtagcatttttttctgatttccctgataagtgtgcttggsacacctgcacctgtgggcggttgtttgcaggtggacagatgcaagcaatcacttgtcagctccccacagcccagcgtcttcgctgtgtttgaggcggggg

SEQ ID NO: 238234 - DNA, 201 bp, Homo sapiens
cccttgtttatttccatgacgtttcctccggccgcgcctctggcagcggccacctcagtctccagtcgttgagttaggatggtccgaggatcgtctcttgkgtttgtcgagccctgtgtccagcatgactggcagggaggaagtcaaagcttactcgagtgggctccgaggaattccatgcttttggtcgggcagaggacg

SEQ ID NO: 238235 - DNA, 201 bp, Homo sapiens
ctgattggcgcccgccgcttcccggaccccatgtgcttgtggccgcccttgtttatttccatgacgtttcctccggccgcgcctctggcagcggccacctyagtctccagtcgttgagttaggatggtccgaggatcgtctcttgtgtttgtcgagccctgtgtccagcatgactggcagggaggaagtcaaagcttactc

SEQ ID NO: 238236 - DNA, 201 bp, Homo sapiens
gggagtcttgcactgttgcccaggctggagtgcaatggtgcaatcttgagtcactgcaacctctgcctcccaggcttaagctatcctcctgcctcagcctcctgagtagctgagactacaggcgcccgccaccacgcccggccaattttgtatttttagtagagatggggtttcaccatgttgccaggctggtctccaact

SEQ ID NO: 238237 - DNA, 201 bp, Homo sapiens
  misc_feature (1)...(201): n = A,T,C or G
tgctcagcccgcagcagctggttcggcccaaggtggcctcgctttcccagtgtgctttcattctgcagccctggggtctccaagctggggccctgggtgcncaggagaggtagccttgggcatctgcagaacgtgtgacacctgcccacccccccgactgcacccacacaaagcccagggactgttggccctgagccctca

SEQ ID NO: 238238 - DNA, 201 bp, Homo sapiens
gcatcctgtcatttatttataattgtggtaaaatcacatgcacataacataaaatttgtcatcttaaccattgtattgttatttgagacggactgtcactstgtcacccaggctggagtgcagtggtgcaatcttggctcactgcaacctccgcttcccaggttcaagtgattctcctgcttcagcctcccaagtagttgg

SEQ ID NO: 238239 - DNA, 201 bp, Homo sapiens
accccatggcgaccccaccgctggggctccccggcaccaggcaggcatggcctcagctgggcaccgcctgtcccccaggcactgaacgaggagaaggtggyctatgaccgcagccccagcaagaacatctacctgaatgtggccgtgaacaccctcaagaagctcaggggcctggcccccagcgctgtgcccggcctcagc

SEQ ID NO: 238240 - DNA, 201 bp, Homo sapiens
gcagcccggaacttcggctacgtgttcctgtcccgcacccaggacaccgtcacgatcatggagctgggggaggaacgggtctaccaggtcctggccataakggacttcaacagcacgcgcaaacggatgtcggtgctgggtgagccccgccacccaagccctgggccccccaaggtggggcgggcagacggggagcctctg

SEQ ID NO: 238241 - DNA, 201 bp, Homo sapiens
tccccggtgcctgggtcccacgggccccatgagccctcctccgggcggtcattaggggtgtttgtcctgggcctcgagctccagcgacgcccggctctctygctgcagcattcacctggaaggtccaggccaacaaccgtgcctacaacgggcagttcaaggagaaggtgatcctgtgctggcaaaggaagaaatacaagg

SEQ ID NO: 238242 - DNA, 201 bp, Homo sapiens
cagttttctgaatcccttctggctgctgttggctggggaggcaacaggcttttggttgggggacccaggctccggagcccggcagggggttggggagggckgagcctcggatgtcggcttcagcatggtgacagcttccacctgcccggcccccaggcctttgcccaggagaccctgcggacactgtgcctggcctacagg

SEQ ID NO: 238243 - DNA, 201 bp, Homo sapiens
tggctcacgcctgtaatcccagcactttgggaggccaaggcgggtggatcacctgaggccaggagttcgagaccagcctggccagcatggcaaaaccccayctgtactaaaaatacaaaaattagctgggcatggtgatgggtgcctgtaataccagctactagagaggctgaggcaggagaatcgcttgaactcaggagg

SEQ ID NO: 238244 - DNA, 201 bp, Homo sapiens
cggggcagcgctgccaagaggcctctgcagagggcactggtctccctggatccaggcctgggcgtcctggctgccacaggactgccggggcctggtctgcttccagctccaccaagaggctgaggcctcctgtcctcagtcctcactccctagtaaggctcggtagatgcaggtggtcagtgccccgggggctgtggagtg

SEQ ID NO: 238245 - DNA, 201 bp, Homo sapiens
  misc_feature (1)...(201): n = A,T,C or G
tgctttcattctgcagccctggggtctccaagctggggccctgggtgcacaggagaggtagccttgggcatctgcagaacgtgtgacacctgcccaccccnccgactgcacccacacaaagcccagggactgttggccctgagccctcagctgctgtgcctgggggctggactgttccattccccacttgccgggggcagt

SEQ ID NO: 238246 - DNA, 201 bp, Homo sapiens
aagctggtctcaaactcctggcctcaagtgatccgcctgcctcggcctcccaaagtgctgggattacaggtgtgagccaccacgcccagccctcttccccrctttctttctattgttttttctatttttttttttttttttgagatggagtctcactttgtcgcccaggctggagtgcagtggtgtgatctcagctcgctg

SEQ ID NO: 238247 - DNA, 201 bp, Homo sapiens
ccacgtggtgatgggcagccactcgccctgtgcccacaccccctgtgccccgccagcccccacaggtgccaagaggacccttgcggccagcggcagccagycctccaacggccctgagccaggtggccagcagctgaaaacacgcacattgtcggggatggcgtccaagactaccaccaccatcatccctaagcgaatcgc

SEQ ID NO: 238248 - DNA, 201 bp, Homo sapiens
ttcagaagctttcggtgtcctcatgactcagccacaagctccccacacatggggcctttcctgccccaccccctgccaacatggggctgtcatcaccccaggctgcctccccctggtccagccctgaccctacagggccagaggattctgcgtccagcctgggggctcctcacaggttctgctggggccccagcagcatgg

SEQ ID NO: 238249 - DNA, 201 bp, Homo sapiens; identical to SEQ ID NO: 46544

SEQ ID NO: 238250 - DNA, 201 bp, Homo sapiens
ctgagaacccagctggcccctcgttagccccagggtctgccgtctagagggagcccaccggcctccggacactgtcttcccgctagagccccgtcctcctytgcggggctctccggacccccttccccctcacctccaggcagggacagaataaatgtttgtatggattttagattttgtggtggtcttggtcttggtgcc

SEQ ID NO: 238251 - DNA, 201 bp, Homo sapiens
caggcgtgtgccaccgtgcctggccttactttattttaactcacttaaactcaaagagccacacacagagagtggccaccctactggcctgcccgaggagrtcctgatctctgttgggtgtcccccgccccccacccaatcccaagagcttctgcttgccccaaggacgtgagcgcagagcagagcctggagaagccggag

SEQ ID NO: 238252 - DNA, 201 bp, Homo sapiens
aggctgtggttgtcggcccagcccagtcctgcctcagcccggcaccctgaatgctgggagctccacacccgcctgccccggggagttccagcctgtcgagkgtccaccccaccatggtcattgtgcgcatttcatgagccgtgtgagggagcctccagtacccagggagctgtgtgtcacgcagcccaggcccatccagcg

SEQ ID NO: 238253 - DNA, 201 bp, Homo sapiens
gcagcttgggctatagtcccagctatcttggaggctgaggtgggaggattgcttgagtctacgagttcaaagccagcctggccaatatggtgagactccayctctacaaatttttttttgttgagacggggtttcactcttgtcgcgcaggctggagtgcaatggtgtgatctcggctcaccgaaacctctgcctcccagg

SEQ ID NO: 238254 - DNA, 201 bp, Homo sapiens
catttcagccgtgtgctttaagccaggcacagcagcttgggctatagtcccagctatcttggaggctgaggtgggaggattgcttgagtctacgagttcaragccagcctggccaatatggtgagactccatctctacaaatttttttttgttgagacggggtttcactcttgtcgcgcaggctggagtgcaatggtgtga

SEQ ID NO: 238255 - DNA, 201 bp, Homo sapiens
gctggtccctttgcctctgagcagcgggttcctatctgtccagtgggctgtgcatggagggccccgggcgcccgcatgtccagggatggggctggaggacrtcccactgtgagggttggaggggaggccccaggagcagggacccccagagtggacgtgtggccatttgtggggaccttatggttactctgccgtccgcag

SEQ ID NO: 238256 - DNA, 201 bp, Homo sapiens
cgctggcactgggtgtcctcatctttgaaatgggctgactgagagaagacaggagtttggacgggtctcactagagaacgttctggaagttcaggttgggrtcttcgtgctccatgatcttgtcatttttgctgcctttcagtctccgtgtggggttggagctcatgccaggttctccccattgctggggacaggacagct

SEQ ID NO: 238257 - DNA, 201 bp, Homo sapiens
agtcttgcactgttgcccaggctggagtgcaatggtgcaatcttgagtcactgcaacctctgcctcccaggcttaagctatcctcctgcctcagcctcctsagtagctgagactacaggcgcccgccaccacgcccggccaattttgtatttttagtagagatggggtttcaccatgttgccaggctggtctccaactcgt

SEQ ID NO: 238258 - DNA, 201 bp, Homo sapiens
accgggcacaggccctgcaacaggtgtacaacgagatggagcaggacctcagggtgggtgggcagcgggggcacccaagggggccctgggactctcctgcycccgccagggagctggacggctgctcagcatcttccccgccctgccctcctcccccaccagctgctgggagccacagccatcgaggacagactccaggac

SEQ ID NO: 238259 - DNA, 201 bp, Homo sapiens
tgtacagccgcctcagggagtacctgctcacccaggaccagctcaaggagaacggctaccccttcccgcacccagagcggcccgggggcgcaatcatcttyacagctgaggagaagaggcccaaggactgtgagtcgctggcctgcgacggcctaggtgggcaggtgcgggatgtgggcaaggccgggcatgcgggcccca

SEQ ID NO: 238260 - DNA, 201 bp, Homo sapiens
gcggcctgggcctgggccggttgtccagctctgagctccagtgtcctctgtagcccggagacagtagcgcttgtcaggcccctgtgcagacgtggcgaggyagtgcaggacaagcagagagcctggctccggggtcagcagccaggagagtcccagttgctccagtcccagagcctccccagaggaggggctttgaggaag

SEQ ID NO: 238261 - DNA, 201 bp, Homo sapiens
caccagtcctttgcggtcgtggtggccctgtcttgcctgctgtccatcaccatggaggtgggcaaggtcctcacctccccggggccttggacatggcctayggaggcctcctcccctggggacccctgctttgggggcattgccaggtgcccttcctggaccccaggggctggtgtcctggtgcaagccccgctaggcccc

SEQ ID NO: 238262 - DNA, 201 bp, Homo sapiens
caagacaatggggaaaatgtcttcaggacacatcaaagatctttgcagcagtccctcccattacagacctggaggtctaggaggaaaaaatggtttcatgsgcagggcccagggtccccatgctgcttgcagcctggggacttggtgccttgtgtcctagtcactccagctttggctgaaaggggcaaacgtagagcttga

SEQ ID NO: 238263 - DNA, 201 bp, Homo sapiens
cttgcttgacctctggcctctctctcatctttccagacagacagcccccattggtttttggctggtatcaccttctgactctgaccccttgctttcccacrgcaggcccccacatctttgcttgccacagcttgcttgctctcttttcttctccttctcattgtacttctcagggctgaaggacaggctggtcttcacatc

SEQ ID NO: 238264 - DNA, 201 bp, Homo sapiens
tcgagacacacaaaataagcttttgtagttgtttcagaagagaaatgaaaaacaatatttgattactaaattaagtgtatttaaaatactattattcaaasaacatttatcaagtatgtttcctcactttacagaaaaagaaagattagaagcttatttttttctttgaatttaagtgatttaatgtgatggaactgaatc

SEQ ID NO: 238265 - DNA, 201 bp, Homo sapiens
tttaaatatgaggtgacagataatatgaaaaagggtcatatggttgttcatttttaagacctgcagtgatatttgagtatatttttgctgagaaaatttaracagaagtaataagagtttcaggggaaggttaatttctccagcactttagagtctttctaaatattcagaatttaaaatgtagcagaatttatggaaatt

SEQ ID NO: 238266 - DNA, 201 bp, Homo sapiens
aggatgtgcccctgttctcgctttcaaatatttcggatgggtagattctatagtggtggaatgtctactgacagtcaccagtgtgacattgcatgtagtayaaaatagctgggcatttgtttctgatgagaattatggtattcaggataggattgattatgctgcagtgacaaacagccttcaaagttcagtggactaaaa

SEQ ID NO: 238267 - DNA, 201 bp, Homo sapiens
gtgaaggtgcaaaactgagctgggttcaaaaaaggagcaggccatgtgagatttctaaatcctagcacctgctttaatcgtgaagtgcagtgagaaaatgycatttcagcctaggaggcaaccagaatttcatcatttaaaaaaaaattcctgcttgaatgcattttttttacacttgctacaagtgtaaagggagccaaa

SEQ ID NO: 238268 - DNA, 201 bp, Homo sapiens
tcgttttatgctttcggttcctaactgggtggattagcagattcaagtacactgtccagagaggcacaacagtgtgtgtgaaagagatgtctgttttgacraatgtatcaactaccctttttccttttttgacttgttttctgattcattctttctttttctttctgtgtcaggcataaaacctctgccaccctgaccagg

SEQ ID NO: 238269 - DNA, 201 bp, Homo sapiens
atgaccaaaaaatgtgacatggacactcctggttgaatgactttgcacaaatcactcaagacatctgtgcctcagtctatttatcagtaaaatagaagtakcaataataattagatctttctcatggtggtattatgaggattaaataagctaaagcttggtttcttgcctggttcttagtaagaaagcaataaagcagct

SEQ ID NO: 238270 - DNA, 201 bp, Homo sapiens
aaaaaaactttataccttgaactgcacttttttcctgctttttaaaaaggggccttgcatttttattttgcactgtaacctgtacattctataactgaccwtgtatgtagccattctttgtgagaaactacttctgcttattctcaaataaagatacgatagctagcacacaggatataagcatccccagcaattccactc

SEQ ID NO: 238271 - DNA, 201 bp, Homo sapiens
tgctgacctatgctggcacagttggaggccagtatttgattttggcaaagagaaatggaaagtgtgtctttttcagacagattctatgtttatcctgtttrtttatggtagttaaaaaattaagttgttcacccacagaggcttccctttttctcagtgacctccattttgtaatcttcagtatattgaaatacttctcct

SEQ ID NO: 238272 - DNA, 201 bp, Homo sapiens
ctatgctggcacagttggaggccagtatttgattttggcaaagagaaatggaaagtgtgtctttttcagacagattctatgtttatcctgtttatttatgrtagttaaaaaattaagttgttcacccacagaggcttccctttttctcagtgacctccattttgtaatcttcagtatattgaaatacttctcctggcatcc

SEQ ID NO: 238273 - DNA, 201 bp, Homo sapiens
attaatcattcctcggttcttgagagattttgccttctctattatttccttaacaatgagcaagaaaattactcatttttattttatttattttaagaatytttgcttaaaaaccaactaacaaaatattttagtatgagagaatgtagtattttttctaaagtgttgtatagtaaaaaagatataaactaacaggttgag

SEQ ID NO: 238274 - DNA, 201 bp, Homo sapiens
tcttaaagatctgtgattatagctaagtagtaggtcccaaataaatgacaaaaatgctggctggttttacatcagcatagtatgggtgagtttaagtgcamtagtcttctcaaatctctaggagggtaattgacttaaatgtgtcacttcatttgtggatagcattacaaatcctttttccccaaaactacgtgttgcttc

SEQ ID NO: 238275 - DNA, 201 bp, Homo sapiens
tatccactccatagtccaattataaaacataattatagttgcatttattcttcatatgcagtttgtacatgtattcacacacaaacatatgtgaacgcatrtatgtgcatatacatattgtatattcaccttatcctgcataggagtctaagggacagagaaagtgtcttattattctggagccctgaacctctcttcagt

SEQ ID NO: 238276 - DNA, 201 bp, Homo sapiens
acgtatccaaactctccattttacaaatgagaattctgagacctagaagatccgtttgatttatccatgattctacaactagcctggcataaccaggcatyatgactctaaaggagaggtaagagaaattctctacaatatatccatttgatctgttaaaacattcatcatcattaaattatttttaatacccagatttcg

SEQ ID NO: 238277 - DNA, 201 bp, Homo sapiens
tctgaatagttatgtttaaaagatgaagtaataatcgtgatttgggggatattaagaaatatcttccatgtttgtctgtggataactaaattcagcagacktgaagtcagtaaatatttgtgtctactggacaaaaattattgctttaaactgcatcaaacatattttaaggttaatattttatggagtaatttagatagt

SEQ ID NO: 238278 - DNA, 201 bp, Homo sapiens
atttgcttattttgaaactcttctgacaattttataaatctacaaactgcatatacttcattttaacgtttaccttggccttgtcataattcaacaatccycataaattgttctttaatgaaagttgcattttacagtataatctcagccatctatgcccaaactacgcagcaggagcttgctttatcaggattattctga

SEQ ID NO: 238279 - DNA, 201 bp, Homo sapiens
tatttaaaaaaagttttgtttttctttttgcctaaagaaaatctttactgtgagaaatgacaaatcagattttgtttagaaggtctgtgaatttaatagcagttgagctagagttgattatgtggaaatgagcttttttatttgtatatattcatgggtacaagtgcaattttgctacattgatgtactacactgtcatga

SEQ ID NO: 238280 - DNA, 201 bp, Homo sapiens
cttggccttgtcataattcaacaatcctcataaattgttctttaatgaaagttgcattttacagtataatctcagccatctatgcccaaactacgcagcargagcttgctttatcaggattattctgaggcatatttacatctctagaataaagtaggatattgaatatatgattatcattccctttgccctaagtaaatt

SEQ ID NO: 238281 - DNA, 201 bp, Homo sapiens
aataaaaaatttaaaaaaaaaaaattaataaaatttttaaaaagcttatgtatgagtctggatactaaaggtaggatttaatgttaaagaagttcttctcmggctctaaatgtatttatttaaaaaaagttttgtttttctttttgcctaaagaaaatctttactgtgagaaatgacaaatcagattttgtttagaaggtc

SEQ ID NO: 238282 - DNA, 201 bp, Homo sapiens
gcaggttttggaaccactgtcatagatggaagtagaatatttaatttcctctgaaagagggaccagcccttgccttttaactcccaattgttcaagatttrgaagtgcagtaggctccagcagatagaacaggacttgtagaactcaggccatttttatgtgagcattttaacacaaagaattgaattgagtcacttttca

SEQ ID NO: 238283 - DNA, 201 bp, Homo sapiens
tgttgtatcttctttcatgaggcaaaatgtgtcatgtataatgcataacatttccctgtttactttggctgccaggaagctcagagtttttttttttttttatgaaaaccttagccatgtaaaaaattgaaaccttcttatataattgttgcttcctagtcacttttattattggtcttttattctttcatttttatgtta

SEQ ID NO: 238284 - DNA, 201 bp, Homo sapiens
tatactggtttgagctgcttctttttgagatgagtttcatctctgcctgcagttactctttcagctctactccatgttgacatgcagctgtcctttgtcayggcaagaatgtgagtcaggctccatggctcctgcaataaaatcccaccttttcttcctacacacctggaatctagagaatgaagatcccccagtcctcca

SEQ ID NO: 238285 - DNA, 201 bp, Homo sapiens
gaatataatacctaataattccttacataataaagactggtcttaattatatcaaaaaaaaatctgaaaataatgctatttgttgacctagaaatagctaygttaaaaatcttaactgagtgtatttaatactgtactattttccatatagttacaataaattccttgctctttctctctttggctacttttttgaaatag

SEQ ID NO: 238286 - DNA, 201 bp, Homo sapiens
gggatgccctctctacctaaatgcagtaaggaaatgattcacacaaatatctgagtacaagattctaagtagagtgaatagcaagtacacaggccctgagrcaaaagcaagcttggcagctttgcatccagcaaggctagtgtcactggagcaaaatgaataaaggggaactggttaaaaggtgaggttggagacttagct

SEQ ID NO: 238287 - DNA, 201 bp, Homo sapiens
ttgtcatcatccctactattttggcctcatgggtgtagaaagaaatatattccttatctccccttacactcttgtcttccaaatatacccctgctctactraggacacattctccacccatggtctgttgaaaattgacttttttagttctcagtcaagtaacatacagataattcccatttgtaacatcattataaaaga

SEQ ID NO: 238288 - DNA, 201 bp, Homo sapiens
cagagcccattttttccctaattatttactcccttttttaaggccaagtgattcaggggacaccaacatcagccccaggctcaggatggatgactcctaaytgatattaaccagttattgttctccagttcactaatcagtgagtttaggcttggacatgtgatatgattctggccaatgagaattgcataaatggcagaa

SEQ ID NO: 238289 - DNA, 201 bp, Homo sapiens
ccactgcactccagcctgggtgacagagcaagactctgtctcaaaaaaaaaaaaaaaagaaaagaaagaaagaaaagaaaaagtgtagatgaacttggagytaactagtgcacagccaagggtcttcaagtaagcaaaacatgagtagcattgtaaaatccgaaagactcactggtatttcattttaaactcagctgctta

SEQ ID NO: 238290 - DNA, 201 bp, Homo sapiens
taaagcaccttgtcctactgaggctggacattgtcctcaatgcagtgctccaggaattcactgccaatccaagagaatgatagagcactatttttttttttctgcatagcaggaataaccagctcagtatttgactcagaaatacctaatggatgttttatcataaatgtattgaacaagatggttgaaaatttataaaat

SEQ ID NO: 238291 - DNA, 201 bp, Homo sapiens
gttatagctttgtactatagtttgaagctgggtagtgtgctgcctctggctttgttcttcttgcttaggattgctttgactgttcatgctcttttttgatycaatataaattttaaaatagtgttttctaattctgtgaaaaatttcattggtagtttgataggaataacattgaatctgtaaattgctttgggcagtatg

SEQ ID NO: 238292 - DNA, 201 bp, Homo sapiens
agcccaggtaagatactgttcatctattaaagcaccttgtcctactgaggctggacattgtcctcaatgcagtgctccaggaattcactgccaatccaagrgaatgatagagcactatttttttttttctgcatagcaggaataaccagctcagtatttgactcagaaatacctaatggatgttttatcataaatgtattg

SEQ ID NO: 238293 - DNA, 201 bp, Homo sapiens
tccatctgatgttgaatccactctaataatttttttatatctccctttctacactgaaactgctgttgttaaaagtcattgatggcctccatattgccaartcaaatgttcgcttctccatctttatctctcttggcccattagcaacatttagcttaaagtttctttttggaacactttctttactgcttccagaataac

SEQ ID NO: 238294 - DNA, 201 bp, Homo sapiens
tccttaaaggttgactactcatggttttcacttgctctgcttccatctgatgttgaatccactctaataatttttttatatctccctttctacactgaaaytgctgttgttaaaagtcattgatggcctccatattgccaagtcaaatgttcgcttctccatctttatctctcttggcccattagcaacatttagcttaaa

SEQ ID NO: 238295 - DNA, 201 bp, Homo sapiens
acagtaaaactccttaaaggttgactactcatggttttcacttgctctgcttccatctgatgttgaatccactctaataatttttttatatctccctttcyacactgaaactgctgttgttaaaagtcattgatggcctccatattgccaagtcaaatgttcgcttctccatctttatctctcttggcccattagcaacat

SEQ ID NO: 238296 - DNA, 201 bp, Homo sapiens
tcctgagtagctgggattacaggcacgggccaccacacctagctaatttttgtatttttagtagagacggggttttgctatgttggccaggctgctcttayctattgagaaggttctaccaactctctttggcaattctgtaagtgcaattttatgaatgcaattctatgagtgcaattttagaggtgatctcacacatcg

SEQ ID NO: 238297 - DNA, 201 bp, Homo sapiens
tgatcaattaaactacattgaaattaaaaacttctgtgcatcaaataatacaatcaatagagaaagcaactcatggaattggaaaaaatatttgcaaatcrtatatctgatatggttaatattcagaatatataaataacctttataatgcaaggacaaagagcaaacaaccaaataaaaatgggcaaaaacttgaagaga

SEQ ID NO: 238298 - DNA, 201 bp, Homo sapiens
aatgaatactaacatattctacaacaaggatgaatcttgagaacattttgctaagtgaaacaagcagtcataaaaagacaaatatggtgccattctacttrtaagaggtacctacagtagtcaaattcatagagacgtaaagtagaagggtggttactaggtgcttagggaaaagaggaatggagacttttggattcatgg

SEQ ID NO: 238299 - DNA, 201 bp, Homo sapiens
tttgctttttatttccccccaaaagatttgactattaacgtgactaattgttggtgctatccgcctttgtgggctagtttcctttagaaagattttctctygaaaaataaaatgtgcctacctcagctaacaacttgttgaaagacgaatgattttttgtacttgcacatgttattaaagtaaggtaacttctggagaagt

SEQ ID NO: 238300 - DNA, 201 bp, Homo sapiens
gaggacaaaatatatgttttacatgtggcataatcttatacaagtattcagatattttcatgtcttagataaatgtataggaaaattctttataataattmtctgcccgtgaaaaagtacaggatgacaatgactagtccatattacattatagtttttgttcctgcactgtctagcgtggtcagatgaaacttgaggagc

SEQ ID NO: 238301 - DNA, 201 bp, Homo sapiens
tggtgtgagttgtggggaggggtggctgtttggagtgttgtgtttgtaggctgttctcaccctgtaggtggagtgtgaaaatcacttagaaaaagttgcartactttttggttggttttcctattttctgtccatctgtggtgtgttactttctacaaactttcaaaaacagcctcactcctgaaaagggggaaaaaaacc

SEQ ID NO: 238302 - DNA, 201 bp, Homo sapiens
gagaaaaagctaccagccagaagatgatactatgaggaattaatgtggaatggcttcgtgaagaaattagtatagactatttttccagaatttgctcgagyacaaaaaacagagatagaccaatctactgatttggacatatacttgaggaatcctttttgtatgtttttgttcacattgtttttaggatgaaaggttggt

SEQ ID NO: 238303 - DNA, 201 bp, Homo sapiens
agttcgagaccaacctggccaatatggtgaaaccctgtctctactaaaaatacaaaaattagctgggcatggtggcaggtgcctgtagtcccatctactcsggaggctgaggcaggagaatcgcttgaacccaggaggcggaggttgcagtgagccgataccatgctactgcactccagcctgggcgacagagtgagactc

SEQ ID NO: 238304 - DNA, 201 bp, Homo sapiens
aactgtgaaactcttaacatgtaggatattttctttctttccacttaatgttctgctttattttgtatgtatttctttcctttgaaagtcacaatctttcmatctttttctgttcaaatcctttccctacctttgaggttgtgcacttcacactgtacatataaggcaaagtgtatacattaaactccagataaggaaaat

SEQ ID NO: 238305 - DNA, 201 bp, Homo sapiens
agaggtacaaaggcaattcagtggagaaataatagctttttcaacaaatggtgctctcaataattggatgtctatgtatagaaataaaataaactgctagsagtatctcacatcatatgtaaaatattaactcaaaatgaattataggtctaaatgtaaagcctaaaactataaaacatctaggagaaattataagagaag

SEQ ID NO: 238306 - DNA, 201 bp, Homo sapiens
gatagtagagaaatgtaataaagtggagtccacaaattaacccacatatatatggacaatctattttttacacagaggtacaaaggcaattcagtggagarataatagctttttcaacaaatggtgctctcaataattggatgtctatgtatagaaataaaataaactgctagcagtatctcacatcatatgtaaaatatt

SEQ ID NO: 238307 - DNA, 201 bp, Homo sapiens
tagggaactgcatgaaatgcgagtattactatcctcctcctcaatcaaaaggcccacttccttttcctcaccacttgtccctcaagcaaagtattagtaartcagccaaagatagagcaaataataatagttgaaaagtagtgtaaaaaataccttttaataattaaagatagtgtatactctatctcgctatgatattta

SEQ ID NO: 238308 - DNA, 201 bp, Homo sapiens
gctgttgtaatgattaggatgatgtaagcacagagtagatgttttatgcaataaaagaagtgtggttgaaaagcctgctggtccctgccctttttttttttgccaccataattgtacatgtgggcattacactgacactgattctaagcctggaaactgtgtagttccccacacgttttagtatgtgcatagcaaaggaag

SEQ ID NO: 238309 - DNA, 201 bp, Homo sapiens
gaggagacatggaatgaaatggtaaaggctgaacagatatgggcaaggcactgatagcatcttttataagtgacatctaacgtcttagtgtatgtgaagtmgaatggaaacaagagcacaggctttttgacttttttggtaatcctacgttagactgttactttcacatttgtccttagggaacgttgtctagttttcact

SEQ ID NO: 238310 - DNA, 201 bp, Homo sapiens
tttccagctccatccatgttcctacaaaggacatgaactcatccttttttatggctgcatagtattcggtcgtgtatatgtgccacattttcttaatccartctataattgacagacatttgggatggttccaaatctttgctattgtgaataatgccgcaataaacatacttgtgcatgtgtctttatagcagcatgatt

SEQ ID NO: 238311 - DNA, 201 bp, Homo sapiens
aattatatgaaagtgccaatatttgcctgttttagacgtatgaaaatgtcaatttgttaactgaatacaatgtctgttttagacatacaaaaatgtcattstattaactgaatacaatgtctaccaacacctgggagtctattttatgtttattgtgttgtaaaaacacgttccatgtttgaaaagtaacatgctattttt

SEQ ID NO: 238312 - DNA, 201 bp, Homo sapiens
cattgggtgtggagagtatgatcaattatattaagtaacagaaggtataaatctttctgtgtagtccatagtctgtttctttttcttttctttttttttttgtagaatccaaatgatcttgtaagcttactacacatttagatgagagaacaaaattgacagttctaaggcttttggatatgtagatgataaaaggttacc

SEQ ID NO: 238313 - DNA, 201 bp, Homo sapiens
ggaagaaaaccataaaagacacaatgctgacatcagtatgtttcttaaacagttactcatgtctgcaagccaaaactgtgggctcgccatttgtattatctgggctaagggatggtggttgggcagaggggctgagcattgggtgtggagagtatgatcaattatattaagtaacagaaggtataaatctttctgtgtagt

SEQ ID NO: 238314 - DNA, 201 bp, Homo sapiens
caaatatgaattgcccaattaacagaaagcagggttactgaaaagggtaaatcaaatgccacagggtgaaccactggatgagttgggagattcctaatgcyctgaagtagagtttcagcaaagagaaaaagctaccagccagaagatgatactatgaggaattaatgtggaatggcttcgtgaagaaattagtatagacta

SEQ ID NO: 238315 - DNA, 201 bp, Homo sapiens
tggaattctgattattacattggtcgttgggcattttgacttctgagatgagaaccatcttgtgactaaaaggagccagaatgtctgtgggaggtggatttcatccaggggtggagacaaagaaatccagagagtgtgaagggacaatgggaagaaaaccataaaagacacaatgctgacatcagtatgtttcttaaacag

SEQ ID NO: 238316 - DNA, 201 bp, Homo sapiens
ggccatattgagagctttgttgcacaagcgattctttctttgtctgcagagtgaaactcctctactaaagcatagcttggagaaattatttgaggaaaagraaacaggctgggcacagtggctaacacctataatcctagcattttgggaggctgaagtgggcggatcacttttgagcccaggagttcacaaccagcctgt

SEQ ID NO: 238317 - DNA, 201 bp, Homo sapiens
gtgtgtgtgtgtgtgtgtgtgtgtgtgtgtctcctgtccactgtatttgcatggacaacaaaagtaagaaggaaggtagagggagcatgcctgcattcccrtagagattattagctggcttggtgatgataaaatgttttcccaagaggggcaggactaggacaagaaaggatctgggttggtaggaagatgagttatcag

SEQ ID NO: 238318 - DNA, 201 bp, Homo sapiens
gaagaggccatattgagagctttgttgcacaagcgattctttctttgtctgcagagtgaaactcctctactaaagcatagcttggagaaattatttgaggraaagaaaacaggctgggcacagtggctaacacctataatcctagcattttgggaggctgaagtgggcggatcacttttgagcccaggagttcacaaccag

SEQ ID NO: 238319 - DNA, 201 bp, Homo sapiens
aagatacataaccacattacaatttgttttccaaatggaatgattatctaaaatacaataacaatgtgatcaacatgttttccttttaaggctttttttcctagcagtctttggtagtatttaaatgctggacaatattttgtagcctagtacaatattttgtagcctagtttaatattatctcttaagtaatatctctgc

SEQ ID NO: 238320 - DNA, 201 bp, Homo sapiens
taaattttagagaaactgcattatttctcatcttctgatatctctaggcattaccgttaatcaatattacaaacttgaatttttttctgctaaagggacartggaaaacacatttgaatttctaaaagtgtaaatgagaatgcatggcaacaaatataaagcttaaagatggttaaatacactgtgcaatttaaagaagat

SEQ ID NO: 238321 - DNA, 201 bp, Homo sapiens
gcatctgtgaatgacttttataaattgcaaagcctaattcaaatagcatgtactatacttaagatacacacaagattattaagtatatgacaactattatrgattcaatcccccttttttcttcccactccagttacttcctttaatagcagacatctgtttatgaattcacttccctatctttccttagttttattcatt

SEQ ID NO: 238322 - DNA, 201 bp, Homo sapiens
tcagcctcccacatagctgggaccacaccccactaatttttgtattttctgtggagatggggtttctccatgttgcccaggctggttttgaactcctgagytccagtgatccgcctgcttcgggctcccaaagtgctgagaaccacttttcataaaaattattagatcataagacagcaatgagaaatctctattttaata

SEQ ID NO: 238323 - DNA, 201 bp, Homo sapiens
taagtattaatcagtattaacattcaactctaaatattttttatcgttatatgtatacacgtatctttgtgactccagaacttatgtttattttttataasgtatttcataaatacattcatgcttatttaataccatggaaaataaatattggcaaatgacttttctgcaggtttataggaaacagcagcatatgtgaga

SEQ ID NO: 238324 - DNA, 201 bp, Homo sapiens
agcttgagtactcagtcggtcagtagtacagtagcaggctcacatgtacggattgttcttgtgaggtcagagcatctgtttatactgctgtctgcttaggkgggtggtgaggtggtgagcagtggatatatgcctgtcaaagtcaatagcaaatctgtcagagtcttccctcagctttgtacatcagcactgttttgatag

SEQ ID NO: 238325 - DNA, 201 bp, Homo sapiens
gggaactgccctttataaaaccatcagatctcttgagacatattcattatcatgagaagagtacaggaaaaacccacttccatgattcaattacctcccamtgggtccctcccacaacacgtggggattatgggagctacaattcgagatgagatttgggtagggacaaagccaaaccatatcagcttctaatagtctgga

SEQ ID NO: 238326 - DNA, 201 bp, Homo sapiens
gggaagagtgacaggatttaacctcgttctctctggcttgccctcaggagtcatttataaaatttatgaatttaagcacctgttttctgagttagaattcyttctgataccagcacaaaatgaatcagcagctaaggaactaacaatcagtccagaattctacttttgctaatgcaaagtagatgtgtttttaaattaagt

SEQ ID NO: 238327 - DNA, 201 bp, Homo sapiens
cgcccccttcacccagaaacaatcttgttcaaatttgtattacagtagcctagttttacctgctctagaacttcataaaaatgaaatgactcattatgcamacttttgtgttgggcttctttagctcaatataatatttttgagataattcatgttgttttgttatcagtatttgattctttttaaaaaatgtctgggccg

SEQ ID NO: 238328 - DNA, 201 bp, Homo sapiens
ttccttgtaataccaagtggaggagagtgggttaaataagaatgctactcttaggttggtacaaaagtcattgcagtttttgccattaaaagcaataacaraaactacaattacttttgcaccaacctaataaaatgataacattctctctcattgaaaacctgatattttctaatttgtagttatagttattcagcagaa

SEQ ID NO: 238329 - DNA, 201 bp, Homo sapiens
atacaaaaattaattcaagatggataaagacttaaacattagacctaaaaccataaaaaccctagaagaaaacctaggcattaccattcaggacataggcwtgggcaaggacttcatgtctaaaacaccaaaagcaatggcaacaaaagccaaaattgacaaatgggatctaattaaactaaagagcttctgcacagcaaa

SEQ ID NO: 238330 - DNA, 201 bp, Homo sapiens
aaagaacaaagctggaggcatcatgctgcctgacttcaaactatactaccagactacagtaaccaaaacagcatggtactggtaccaaaacagagatatasatcaatggaacagaacagagccctcagaaataacacctcatatctacaactatctgatctttgacaaacctgagaaaaacaagcaatggggaaaggattc

SEQ ID NO: 238331 - DNA, 201 bp, Homo sapiens
gagagccaaatcatgagtgaactcccattcacaattgcttcaaagagaataaaatacctaggaaaccaacttacaagggatgtgaaggacctcttcaaggrgaactacaaaccactgctcaaggaaataaaagaggatacaaacaaatggaagaacattccatgctcatgggtaggaagaatcaatatcgtgaaaatggcc

SEQ ID NO: 238332 - DNA, 201 bp, Homo sapiens
tgcaaaaatcctcaataaaatactggcaaaccgaatccagcaacacatcaaaaagcttatccaccatgatcaagtgggcttcatccctgggatgcaaggcwggttcaatatacgcaaatcaataaatgtaatccagcatataaacagaaccaaagacaaaaaccacatgattatctcaatagatgcagaaaaggcctttga

SEQ ID NO: 238333 - DNA, 201 bp, Homo sapiens
aagtggtaccattccttctgaaactattccaatcaatagaaaaagagggaatcctcgctaactcattttataaggccagcatcatcctgataccaaagccrggcagagacacaaccaaaaaagagaattttagaccaatatccttgatgaacattgatgcaaaaatcctcaataaaatactggcaaaccgaatccagcaac

SEQ ID NO: 238334 - DNA, 201 bp, Homo sapiens
gtgtccaagggcaaaggataaaaaggtgtctactcaggaagagagagacagagaggccaaaagaaaaagctgagcaagacgaatgtctcccttttcctgcmtgcattgctttacctacatccctaactgactggatggtgcctgcccacattgagggtggcccagttcactaactcatgggtcaatctcttctggacatac

SEQ ID NO: 238335 - DNA, 201 bp, Homo sapiens
gtacaggagacttaatggtagattttgtagtccttactgctgcaattaatcctaaaactataattaataatcatcatgcccctcctctatcactcattctrgattcctctcatccttggccagtagttctgtaggtgtaggtttgtcctatgggtaacaaagactttcatcctgaggggcttgagcccctggttactatga

SEQ ID NO: 238336 - DNA, 201 bp, Homo sapiens
tacaacctgcacatcatgatggcactcactcatgtgtgctcctttggcatttagagtcagaataagagagaggaaaaagagaaatagattgggctaatgawcggcttttattaatatttcaattgtaagtgataggaaacccaaccaagccagtttaaacaaacaaatgattaacttattggctttcatggccaaaatatt

SEQ ID NO: 238337 - DNA, 201 bp, Homo sapiens
gacggggaggccagttagcaggctgcacaggaggccaggcaagagatgatggcagcttggcctctggctcattcgttacaggtgggaatacaaaatggtayagcaagaaagtttagcagtttttgcaaaactaaacacttatgataccatccagccattgtgttccttggcatttactcaaatgagttgaaaaaagctgta

SEQ ID NO: 238338 - DNA, 201 bp, Homo sapiens
gaactccctgaccccttgcgcttcccaagtgaggcaatgcctcgccctgcttcggcttgcgcacggtgcgcgcacccactgacctgtgcccactgtctggmactccctactgagatgaacccggtacctcagatggaaatgcagaaatcaccgtcttctgcgtcgctcacgctgggagctgtagaccggagctgttcctat

SEQ ID NO: 238339 - DNA, 201 bp, Homo sapiens
catattgttgtttgctgttgcagtaatggcccaatttattcatgatttcctgtatccattctcttgactaatctctctcatacttactcttggccatacascttgttttagccagtgggcccttaccaaatgtgacacaatcaaaggcttagaaagggcttatgcactggagtttaagctctctggaaccctcaaactggc

SEQ ID NO: 238340 - DNA, 201 bp, Homo sapiens
aaaggtgtatcttctggaccctcccagtgtgggggagtaggttttatgtgacaagtccactgtatcattccaatttccttaagccttttaattccctcctmtaaatgaaaccaaggtagatcaggcatccccagctcactcctggggtggtctattttttgatccatgtttcagccagtcagccaaataaacttatagtgc

SEQ ID NO: 238341 - DNA, 201 bp, Homo sapiens
ttcactacctcactcactgggttgatttcctcagccagcagctctaaacccatgagagctccaccccgtggtcacctgaaatgcgctttaaacataatctrtttgatatcatgtgttttcattttttttttcacttttaaaatctgtgacattgatagaatggatatcgttgggagcacttaagtggttattttcctaaaa

SEQ ID NO: 238342 - DNA, 201 bp, Homo sapiens
atctgatgttcaaagtgtattacagtgtcatcttcaaaacataaccaaggcccattctttagcaagacaactgggtagtgagtggtcttggaagccatgcrctaattttgattcgtgtcaggaaatttttgtagagttagcaatagaagttcagtcaagttaatatcaactcaaagatattaactcatcactctggacatg

SEQ ID NO: 238343 - DNA, 201 bp, Homo sapiens
tctttaatggcagctgttattactcagcagtccagtcaattttatctacctggagcttatacagagcgtggtcattgtttcagttcctattcactacctcrctcactgggttgatttcctcagccagcagctctaaacccatgagagctccaccccgtggtcacctgaaatgcgctttaaacataatctatttgatatcat

SEQ ID NO: 238344 - DNA, 201 bp, Homo sapiens
ggagattagctgacaaaactaggctgcagtggaatgcttggagcatggtgacatcacaagattacaccacaatgattcctattccacttgttctacctacmctgtatctgatcactgcataagagatagtagaaatggcattatctttaaagtagtgatattttcaagccatgaagtttagtgacttgctgaaatgggcta

SEQ ID NO: 238345 - DNA, 201 bp, Homo sapiens
caaaaattatttcttaaatccctgaagctctacctgatatacatgatcaagggctgtagacttgaacattgggtctgttatagaccatggatgaaaggtaygcaggagataaattaagaaagcatttcttctgccctgatgaagtacagaaaagagaacccccaaaagaaggtgttttgtgcaaatggtcaaagtattttg

SEQ ID NO: 238346 - DNA, 201 bp, Homo sapiens
tatcatattgttgtttgctgttgcagtaatggcccaatttattcatgatttcctgtatccattctcttgactaatctctctcatacttactcttggccatrcaccttgttttagccagtgggcccttaccaaatgtgacacaatcaaaggcttagaaagggcttatgcactggagtttaagctctctggaaccctcaaact

SEQ ID NO: 238347 - DNA, 201 bp, Homo sapiens
gtggagctttatgaataaggcattgtggtctgacttaaactttaaaagaggcattctggctgtagagggaagaagagactgacaggggtcaggagcaagasggggaggccagttagcaggctgcacaggaggccaggcaagagatgatggcagcttggcctctggctcattcgttacaggtgggaatacaaaatggtatag

SEQ ID NO: 238348 - DNA, 201 bp, Homo sapiens
aagttgaatctctgaatagaccaataacaggctctgaaattgtggcaataatcaatagcttaccaaccaaaaagagtccaggaccagatggattcacagcygaattctaccagaggtacaaggaggaagtggtaccattccttctgaaactattccaatcaatagaaaaagagggaatcctcgctaactcattttataagg

SEQ ID NO: 238349 - DNA, 201 bp, Homo sapiens
agagaagatattaataagttattaactataaaggaaaggaaaccacaggatttcttagaacacttctttggattcctgctatgttatagctaagcatatartggtaccatctgtgctaataaaaataacaataatgtgtgcaatgttgaagtgaatgatagactcttatttcaaagatgaaattaagccctggttttgtct

SEQ ID NO: 238350 - DNA, 201 bp, Homo sapiens
caatgatatgcttttctgtcctttattctattaatgtgatgtattgtattaattaatttttatattttaaacttgtctcgcattcctgggataaatctcayttggatgtgttgtatcattcttttatatgttgttagatttggtttgctaccgttttgttttctgcatctttcacaaaaagtggtatattttactgcttta

SEQ ID NO: 238351 - DNA, 201 bp, Homo sapiens
ggtggcttaacagaggaatgttatatttcttgcccacatggcagttcacttcaatattcaggaggcattcttcccacggatgaggcaggatctcaaacctrgagagtgtaggtcttggcatcctccactgtgtcttctgtatctggcctggagacaggggaagaaagatatggaagcagagcgcttatgtggcagatcgag

SEQ ID NO: 238352 - DNA, 201 bp, Homo sapiens
caaactatctctcagaccacagtgcaatcaaactagaactcaggattaagaaactcactcaaaaccacttaactacatggaaactgaacaacctgctcctraatgactactgggtacataatgaaatgaaggcagaaataaagatgttccttgaaaccaacgagaacaaaggtacaacataccagactctctgggacacat

SEQ ID NO: 238353 - DNA, 201 bp, Homo sapiens
tctacagaactctccaccccaaatcaacagaatatacatttttttcagcactgcaccacacctattccaaaattgaccacatagttggaaggaaagctctyctcagcaaatggaaaagaacagaaatgataacaaactatctctcagaccacagtgcaatcaaactagaactcaggattaagaaactcactcaaaaccact

SEQ ID NO: 238354 - DNA, 201 bp, Homo sapiens
gtaaatgtttgagttcatttcttggttctttcttctattccattggcaaatgtgtctatttttatgccagtcccatgctgttttaattactatagatttayattatagtttggaatcaggtagtatggtgtcttcagatttgttctttttgctcaatattgccttggttttgtgtgtgtgtgtgtgtgtgtgtggttccat

SEQ ID NO: 238355 - DNA, 201 bp, Homo sapiens
gacaagcaaatgctgagagattttgtcaccaccagacctgccctaaaagagctcctgaaggaagcactaaacatggaaaggaacaaccagtaccagccacygcaaaatcatgccaaattgtaaagaccatcgaggctaggaagaaactgcatcaactaacgagcaaaataaccagctaacatcaaaatgacaggatcaaat

SEQ ID NO: 238356 - DNA, 201 bp, Homo sapiens
tgattcccagcgaagcatttttttttggtagagatgggatcttgctatgttgcccaagctgtttccatgtttttatagtagccattctgacaggcttgtgrcgatatctcattttggttttaactttcattttcctaatgatccagtgattgtcttactctgttttgtgctgctataacagaatatcacagactgagtaat

SEQ ID NO: 238357 - DNA, 201 bp, Homo sapiens
tggtgtacctgaaagtgacggggagaatggaaccaagttggaaaacactctgcagtatattatccaggagaacttccccaatctagcaaggcaggccaacrttcagattcaggaaatacagagaacgccacaaagatactcctcaagaagagcaactccaagacataattgtcagagtcaccaaagttgaaatgaaggaaa

SEQ ID NO: 238358 - DNA, 201 bp, Homo sapiens
aattgcttgaacccgggaggcagaggttgcagtgagtcaaaatcatgccactgcacaccagtcctggcaacagtgcaagactccatctcaaaaaaaaaaaagaaaaaagaaaaaaagaaaaaaaaagtaaacattaaaatgatttatacgttatataaaagatattaaaaactcattatcagggaaattagattttatttc

SEQ ID NO: 238359 - DNA, 201 bp, Homo sapiens
tttctttgctcctcagcttgcagacagcctatcgtggggccttgtaagttaacacttaataaactccgtatatatatatgtttgtgtgtgtgtgtgtgtgkataaaaaaatatataaatatatataatatataaatatacatatgtatatattaatatatataatatataaatatacatatgtatatatattaatatatat

SEQ ID NO: 238360 - DNA, 201 bp, Homo sapiens
actaattcttccttgctctttcccctccctccctccgtcccttccttccttccttccttccttccttccttccttccttccttccttccttccttccttccgttttctttctttcgacaaagtcttgctctgtcgcccagactggagtgcagtggtgagatctaggctcactgcaacctctgcctcccaggttcaagcgat

SEQ ID NO: 238361 - DNA, 201 bp, Homo sapiens
aactaattcttccttgctctttcccctccctccctccgtcccttccttccttccttccttccttccttccttccttccttccttccttccttccttccttccgttttctttctttcgacaaagtcttgctctgtcgcccagactggagtgcagtggtgagatctaggctcactgcaacctctgcctcccaggttcaagcga

SEQ ID NO: 238362 - DNA, 201 bp, Homo sapiens
taactaattcttccttgctctttcccctccctccctccgtcccttccttccttccttccttccttccttccttccttccttccttccttccttccttccttccgttttctttctttcgacaaagtcttgctctgtcgcccagactggagtgcagtggtgagatctaggctcactgcaacctctgcctcccaggttcaagcg

SEQ ID NO: 238363 - DNA, 201 bp, Homo sapiens
agatatgatttatttattttccagaaattctatcatattgttgtttgctgttgcagtaatggcccaatttattcatgatttcctgtatccattctcttgamtaatctctctcatacttactcttggccatacaccttgttttagccagtgggcccttaccaaatgtgacacaatcaaaggcttagaaagggcttatgcact

SEQ ID NO: 238364 - DNA, 201 bp, Homo sapiens
cagtgtttacagcaaataaacaaagtcagtaatgtcattcctaaatatccacgtagagaacttttgcttagaaaacataaatgaattactccacatgccartttttccgacctaactcacctttcatttgtaaaccacttttaccttttttttttgtttttcacatgaatatcttttatttctttttcttatctggttagt

SEQ ID NO: 238365 - DNA, 201 bp, Homo sapiens
ctccctaaaattatatgcactttcttctcagtagatgacctcatgcatcacgactaaggatttccagcctcctaagtaccactctactatgtggaatatcmcttccatatgctggttttgtcatgtttggtgagctctcttggatcatttatgagtataggacatatagccttaaagccatcaacatgaaatttactgtgg

SEQ ID NO: 238366 - DNA, 201 bp, Homo sapiens
cacataaaattaaacctcacggaggtagttgttgccttttcaagattcccttttcaagttacacaatagcatattccatgctcttcccttaacacactgtygtcctttatttgtgtgtccctaattaatccgtatcattatttctccctaaaattatatgcactttcttctcagtagatgacctcatgcatcacgactaag

SEQ ID NO: 238367 - DNA, 201 bp, Homo sapiens
actggcaggctggaaaccctggcaggagccattgttgcagtcttgatttcaaaggcgttctggaagctgaattcctttctctttgggggaccttaatcttytttcttaaggttttcaactgattagatgaggcttacccataatttagagggtaatctgctttattcaaagtctactgatttaaatgttaatcacatctaa

SEQ ID NO: 238368 - DNA, 201 bp, Homo sapiens
aaatatatgttttacatgtggcataatcttatacaagtattcagatattttcatgtcttagataaatgtataggaaaattctttataataattctctgccsgtgaaaaagtacaggatgacaatgactagtccatattacattatagtttttgttcctgcactgtctagcgtggtcagatgaaacttgaggagctgctcat

SEQ ID NO: 238369 - DNA, 201 bp, Homo sapiens
tcttaaaaagttaaacttatacctaatatgcaatccaacccttccattcgtaggtatttatccaagagaaatgaaatcatacaagatatgtagacttacaygtgaatgtccatcagctggggaatgaataaacaaattgtggctcatccattcaaaaaaaaatagtactcagcaataaaaaggaacaaacttctgatagag

SEQ ID NO: 238370 - DNA, 201 bp, Homo sapiens
ttaactaattcttccttgctctttcccctccctccctccgtcccttccttccttccttccttccttccttccttccttccttccttccttccttccttccttccgttttctttctttcgacaaagtcttgctctgtcgcccagactggagtgcagtggtgagatctaggctcactgcaacctctgcctcccaggttcaagc

SEQ ID NO: 238371 - DNA, 201 bp, Homo sapiens
attttccccactttgtgatcggaagtcaaccatggtggcccagtcacaaataggtaattctgatgatttgtggtggtggaaagtgagtgtgtgcttgtcasttttcaaatgggtaaacgatgttgttcaaaggggtaacttgcatgaaaacctcactccatattcatgatatatttgatttttaaatggatctatgtggtg

SEQ ID NO: 238372 - DNA, 201 bp, Homo sapiens
ttattacctaatgattaccttttgttgaatatctttaaaaatttaaatactgtgaggaaaaaagaattcagttctaaccttctttaataggttttataatyttaattagacattcagatatgaccacttagaaaggatgagatactttttaaatatgaggtgacagataatatgaaaaagggtcatatggttgttcatttt

SEQ ID NO: 238373 - DNA, 201 bp, Homo sapiens
atccgccatcatgcctggctaatttttgtatttttgtaaagatggggtttcaccatgttggccaagctggccttgaactcctgaccttgggtgatccgccygcctcggcctcccaaagtgctgggattacaggcgtgagccatagcgcccggctaaaaattattatttaaaattattacctaatgattaccttttgttgaa

SEQ ID NO: 238374 - DNA, 201 bp, Homo sapiens
gtaatgttcactcttaaccttagacacctatgcagtcatgttggtagcgggttacaatgttacctcagcaccacagtttgtttctgtacttgagttcttamgtacagaagatagaactgatttaaatagcatagtatatatcattttctggacttttaaaatttattcgagacctcttgatgaaatggacatattatatat

SEQ ID NO: 238375 - DNA, 201 bp, Homo sapiens
aggaattctacaactcttaattgaatgtatcaatataattgattgaatgtatcagatttaaaaaaaaaattaaaatttttttgagacactgctctgaactsttttttgaatcaaagtaagcagaggttctcaaattccaattcttttgtatgcatgtttggaaaggaaaattgtaaaaattcttaggcatagacatttaca

SEQ ID NO: 238376 - DNA, 201 bp, Homo sapiens
ccagttcactggcaacaacattctgatggggagaaaggtgctggaaaaaggactttattgaggttgtagcagtggggtttgcatgtgcacatgtgcgataktggcggtagggtagtggtgaggtggtgggctctgtgtgcacattcaccagtgacaatgggatggtggtgtgaggaggtttgcacacatgcactggcagca

SEQ ID NO: 238377 - DNA, 201 bp, Homo sapiens
agcgagatatgtattttaaggaatgggctcatgtgattattggtgctggcaagtctgaaatttgcaaagcaaactggcaggctggaaaccctggcaggagycattgttgcagtcttgatttcaaaggcgttctggaagctgaattcctttctctttgggggaccttaatcttttttcttaaggttttcaactgattagatg

SEQ ID NO: 238378 - DNA, 201 bp, Homo sapiens
gctattgtgaatgggattgcgtccctgatttggctctcagcttggatgttactggtgtatagaaatgctgtggggtgttgcagtcttacactattattgtrtggttatctaagtctttttgtaggtctctaagcacttgttttatgaatctggatgctccagtgttgggtgcatatatttagaaaagttaagtcttcttac

SEQ ID NO: 238379 - DNA, 201 bp, Homo sapiens
tcccccagactttcctataactaatacttcctcattgttcaggtcttaactatctgatcatcttatctaacatagtgtttcctcacataattaaccttatrtcataattcttattttatttttagtctttcttttaaaatataagttctacctgataagggatcattctcattttttcaatttttaatcacttcatttagt

SEQ ID NO: 238380 - DNA, 201 bp, Homo sapiens
aacttcttgctctgccttttcatgagattgcataaagctctagattcaacaacagagagtgagttgcagccctaagtttattatttactgatgcaacaacrgatgaatcatttaatctctctcagccccattgtagtcttctgtttaaaaaaaaaaaaggtgatgagaagtataaggagaaaatcagtgaaacctgaaatg

SEQ ID NO: 238381 - DNA, 201 bp, Homo sapiens
atagatagaacagacttcccccagactttcctataactaatacttcctcattgttcaggtcttaactatctgatcatcttatctaacatagtgtttcctcwcataattaaccttatgtcataattcttattttatttttagtctttcttttaaaatataagttctacctgataagggatcattctcattttttcaattttt

SEQ ID NO: 238382 - DNA, 201 bp, Homo sapiens
tcttcaccatgtgttttttcctgacttttaaatgatcaccattctaactggcgtgagatagtatctcattgtggttttgatttgcatttctctaatgaccrgtgatgatgagctttttttcatatgtttgttggccagataaatgtctacttttgataagtgtctgttcatatcctttgcccactttttgatggggttgtt

SEQ ID NO: 238383 - DNA, 201 bp, Homo sapiens
ccgtagatgaaaatcaaaatatcagctttattgcagattaaacttgcatggaagaacatggtttgggtgtgtggctaaataaaccagaattcctgtgaatycaacttaaccttcaaaactgcagaactatagaacaaaataaactttctgttgattctgttgatagtttcttttgctgtgcagaagctctttagtttaatt

SEQ ID NO: 238384 - DNA, 201 bp, Homo sapiens
gatcatgcctcgggcctttgtacttgcccttctttctatctggaatagatagaacagacttcccccagactttcctataactaatacttcctcattgttcrggtcttaactatctgatcatcttatctaacatagtgtttcctcacataattaaccttatgtcataattcttattttatttttagtctttcttttaaaata

SEQ ID NO: 238385 - DNA, 201 bp, Homo sapiens
atttttggaaagttattttaacaagttttctctacattaaaaagtagtgataggtgactattaaatttcatgtatatgaatgtgttggttctttgaaacaraaaagctttatagaaattttcattaggaaaaaatctttagttctttctcacccctcagatttgatataaagaagactgggccatctactttagtgtttta

SEQ ID NO: 238386 - DNA, 201 bp, Homo sapiens
atcttttcatctggcatcccattaccttcactgtggtttaaaatttctctcaaagttgctaatctggggcaactatacagtttattctgtttgtttctcayaaggatactgtctcttgttgcctgatggctaatggcttgaaaacaatatattttgtctgctttctggctaatttagatggtcctcattactcaatcttgt

SEQ ID NO: 238387 - DNA, 201 bp, Homo sapiens
attcatcctgagtctctaggtgtatgtctcttgccaaatttggaaggcttttatttattatttctttgagttttcccacccccctgcttttcatctggcatcttttcatctggcatcccattaccttcactgtggtttaaaatttctctcaaagttgctaatctggggcaactatacagtttattctgtttgtttctcata

SEQ ID NO: 238388 - DNA, 201 bp, Homo sapiens
ataatataccattaagactttgagccatatgtttataggacaaaatgatacccaactcaataccaattacggtctttgaaaagtagtgaacttccaaaatraaagaccatttttgcaattgtgctcagttaactaaactaactaaactcaaaacaccattcttacaactttgtctattcctctcacagcatgcacattggt

SEQ ID NO: 238389 - DNA, 201 bp, Homo sapiens
attgatgacaaaaggcttgcataaagaaaagattaaaaatttagggggattttatattatgtccttattattaaaaaattaccacccatctatattttctrttgacttaggtaaatgggagaaatctgattattttcttctgaatcattttagccaacatgccccctttaagcaagataaatttgttgtgtatctgataat

SEQ ID NO: 238390 - DNA, 201 bp, Homo sapiens
tccctctaaacactgctttacctgtgtcccagagatcctggtacattgtgtctttgttctcattggtttcaaagagcttatttatttctgccttaatttcrttatttacccaatagtcattcaggagtaggttgttcagtttccatgtaattgtgcggttttgggtgaattttttaatcctgagttctaatttgattgcac

SEQ ID NO: 238391 - DNA, 201 bp, Homo sapiens
gagttcaagtcccgaatgtccttgttaattttctgtctcgttgatctgtctaatattgacagtggagtgttaaagtctcccactattattgtgtgggagtytacatctctttgtatgtctctaagaacttgctttatgaatttggatgctcctgtattgggtgcatatatatttaggatagttagctcttcttgttgcatt

SEQ ID NO: 238392 - DNA, 201 bp, Homo sapiens
ttagacaggccaggcctggtggctcacgcctgtaatcccagcactttgggaggctgaggccagtggatcacctgatgtcaagagttcaagaccagcctgaycaacatggtgaaaccccctttctactaaaaatacaaaaaattagctcgggctgctggcgggtgcctgtaatcccagctactcgggaggctgaggcaggag

SEQ ID NO: 238393 - DNA, 201 bp, Homo sapiens
aaccacctgctcccgtggtcatcctctagacctaataaccgtaccccttccacaatctcaggttctagcatctcagtctccagccttcaagttgcatctcrtccttcaagttccctccctctcgtattccaactccaaaaattcttgatcatagtagaacttaaaatctgttcatctcaccacttttttttactatgtccc

SEQ ID NO: 238394 - DNA, 201 bp, Homo sapiens
tgtgggtagatatgggtccaccattttatattctcaccagtaatgcacaagtgttccaatttctctgcatctttgctaacacttattttctgttctttttaaaaaatatatatatacttgtcatcctaattggtgtgaactgatatctcattgtggttttgatttgcattttcctagtgattagtgatgctaagtgtcttc

SEQ ID NO: 238395 - DNA, 201 bp, Homo sapiens
ccattcatcctgagtctctaggtgtatgtctcttgccaaatttggaaggcttttatttattatttctttgagttttcccacccccctgcttttcatctggyatcttttcatctggcatcccattaccttcactgtggtttaaaatttctctcaaagttgctaatctggggcaactatacagtttattctgtttgtttctca

SEQ ID NO: 238396 - DNA, 201 bp, Homo sapiens
tccattcatcctgagtctctaggtgtatgtctcttgccaaatttggaaggcttttatttattatttctttgagttttcccacccccctgcttttcatctgkcatcttttcatctggcatcccattaccttcactgtggtttaaaatttctctcaaagttgctaatctggggcaactatacagtttattctgtttgtttctc

SEQ ID NO: 238397 - DNA, 201 bp, Homo sapiens
atccattcatcctgagtctctaggtgtatgtctcttgccaaatttggaaggcttttatttattatttctttgagttttcccacccccctgcttttcatctggcatcttttcatctggcatcccattaccttcactgtggtttaaaatttctctcaaagttgctaatctggggcaactatacagtttattctgtttgtttct

SEQ ID NO: 238398 - DNA, 201 bp, Homo sapiens
tgagatccattcatcctgagtctctaggtgtatgtctcttgccaaatttggaaggcttttatttattatttctttgagttttcccacccccctgcttttcatctggcatcttttcatctggcatcccattaccttcactgtggtttaaaatttctctcaaagttgctaatctggggcaactatacagtttattctgtttgt

SEQ ID NO: 238399 - DNA, 201 bp, Homo sapiens
ctgccctctatggtttctgatgacaaatccattgtcactgtaaatgttttttctctataggtaagaatttttctctcactgctttcaagattttttcctcrtctttagttttcagaatcttcactacaatatgtcttgatgtggatttctttgggtttaccctatttgagatccattcatcctgagtctctaggtgtatgt

SEQ ID NO: 238400 - DNA, 201 bp, Homo sapiens
gcaatacattattgttgattatagtcatcctacagcgttatagaacactagaatttatttcttccaagtatacatttgtatcctttaaaaaaattttttttaccaaaatggtgttaagatttatacatgttgtagtacacatcagtattcaatacctttttactgcagccacaaaaaagaatgagttcatgtcctttgcag

SEQ ID NO: 238401 - DNA, 201 bp, Homo sapiens
aaagatgactggaggtgagtttcagagaaaacctagaggaaatttaatttcaggaaaggaataaattatgcgatttaaagtcaagaaaaaagatgaaagtygatgcattccccaaattacaaacttaattactgtcgactggatgactctgagaaggattagtacttagggactttgttcagagccagactgtgttaaagg

SEQ ID NO: 238402 - DNA, 201 bp, Homo sapiens
ggagtgcagtggcgtgatcttgactcattccaagctccgcctcccggggttcacgccattctgcctcagcctcccgagtagctgggactacaggcgcccamcaccgcgcccgtataattttttgtatttttggtagagacggggtctcaccgtcctgtcgatctcctgacctcgtgtcgatccgcccgcctcggcctccca

SEQ ID NO: 238403 - DNA, 201 bp, Homo sapiens
tgcctaaatttgtatacatcgattatcttgtatgcaagttcccaaaatggaaattttagtggattaaatgttgaagtcaagattcttgtgagggaattatrgttgaatagattctcctccctgttctctaatcactgagatatagaaccgttagtattatcccctcctcaacgaaactgaaataatacttcttttcctatc

SEQ ID NO: 238404 - DNA, 201 bp, Homo sapiens
ttttcatatttaacagaattagaattttaaaatatgcctaaatttgtatacatcgattatcttgtatgcaagttcccaaaatggaaattttagtggattaratgttgaagtcaagattcttgtgagggaattatagttgaatagattctcctccctgttctctaatcactgagatatagaaccgttagtattatcccctcc

SEQ ID NO: 238405 - DNA, 201 bp, Homo sapiens
gttggtgcttttctgtaccttcccccacatattcatttttcttgcattccaggacaccctcagtcactagctatttccacaatctgggatttttgtactgkgctttaaatcaggtccttcctccacaagaacagaaacttccaacctataaattccttcatgtttctctatgatgatcaaatcagtcattaccattttgag

SEQ ID NO: 238406 - DNA, 201 bp, Homo sapiens
gatgttggaagtagaggagacatggaatgaaatggtaaaggctgaacagatatgggcaaggcactgatagcatcttttataagtgacatctaacgtcttaktgtatgtgaagtagaatggaaacaagagcacaggctttttgacttttttggtaatcctacgttagactgttactttcacatttgtccttagggaacgttg

SEQ ID NO: 238407 - DNA, 201 bp, Homo sapiens
tccattgttttgtttcattacccatgtttttggtgtcatatccaataattgttgccaaatctggtatcatagagcttttcccttatgtttccttctatgattttttatagttttagcttttatgttagatctttgattcatttttactttttgtatatgttgtatggtaaagccacatatgctttttagtcacatttagtg

SEQ ID NO: 238408 - DNA, 201 bp, Homo sapiens
ccactgagaaaatctatgctgtgcctgaaaaggctgcacagccctactgcaatgtcaggccctacagttgtgccttggatggtgtggcaacacactgacaygctggtctgctctaccagggtgtggggcttctggtggaaatcccttggaagctggtacagtctcacacctctggcagaaacagggtgcctcagagttcgt

SEQ ID NO: 238409 - DNA, 201 bp, Homo sapiens
ttggtgaatcacataactttttaattgtctaacagagtctgcctcatgagaagtgaattcagcttctgtgttagtttattttcatactgctatgaagaaayttctgagactgggtaatttataaagaaaaagaggtttaatggactcacagttccacatggcttggcagaggtaaaagaggagcaaaggcacatcttacat

SEQ ID NO: 238410 - DNA, 201 bp, Homo sapiens
actgctaatcagcacaggagttttgacctgccctgtttctgacctggtccagttcacccctccttagacaacctggtggtctcgcactcccaggaggtcaccctattggcatagtgcatcccagaattcctggattcaagcaatccccctgcctcagccttcaagtagctgggactacaggaattgactttactaggcttc

SEQ ID NO: 238411 - DNA, 201 bp, Homo sapiens
gagatatactatgtttatggtcaagactcaagatgtcagttcacactaaattgttctataggttcaatttcaatataaccccagtcataatcccagcaggtttttttttttggtaaaacataaaaagtttattctaaaatccatatgaaaatgccaagaacctgtaatagccaaaataaatttgtaaaagaagaacgaagt

SEQ ID NO: 238412 - DNA, 201 bp, Homo sapiens
agctcgattaggatgaacccaggcacttagccgtgcaggaacaatggcaagcctttagcccagatcaggagtggcaatgggcccctcgctggatcaggagyacagcggacaccctgctggatctggagggatgggagtcagcagcgggtctgcgagggcggcaaacagctgtggtggatggcgagcgaaagctcagctcga

SEQ ID NO: 238413 - DNA, 201 bp, Homo sapiens
gtagaggaaaaacttacttaacaacgggggaagttgaggtacctggagattagttgctatcttattttgaagttccccaaaaatagactctgaaaaaaagwtttgaatttagtttgtttattgtggaagtaatccgaacaaacattaatagaagattggagaagagagacaaggaaggaagaaagccaataatgtgttatt

SEQ ID NO: 238414 - DNA, 201 bp, Homo sapiens
caaatgggatctaattaaactaaagagcttctgcacagcaaaagaaactaccatcagagtgaacaggcaacctacaaaatgggagaaaattttcgcaaccwactcatctgaccaagggctaatatccagaatctacaatgaactcaaacaaatttacaagaaaaaacaaccccatcaaaaagtgggtgaaggacatgaaca

SEQ ID NO: 238415 - DNA, 201 bp, Homo sapiens
gtagaaatagtaagagaactagaattagaagtagagcctgaagatgtagctgaattgctgcaatctcatgttaaaacttaagtggatgaagagttgcttcktatgcgtgagcaaagaaagtggttccttgaaatggaatctactcctggtgaagatgctgtgaacattgttgaaataacaacaaagtatttagaatattac

SEQ ID NO: 238416 - DNA, 201 bp, Homo sapiens
gcagggtttgagaggactgacttcaattttgaaagaagtactgtgggtcaaatgctatcaaacaaggttgcatgctacagataaatcttttatgaaagacrtagtcagtcagtgtgacaaacttgattgttgccttatttttaagaaactggcacagctacctcaaccttcagcaactacctccctgatcagtcagcagac

SEQ ID NO: 238417 - DNA, 201 bp, Homo sapiens
cctgttagagacacaacaccatatagtagccactggcatttaaaggataatatccaaatctcacagagtaacagtgccatccacagactggtttgtttacytgtgcctttaagaaacaaatccaacattctgtcaggccagcagatttggggtaatgcaatatattgtaaaatgagtgatatttcagtcatttacattttg

SEQ ID NO: 238418 - DNA, 201 bp, Homo sapiens
taatatcaaaatcccggagccctatattgttttgtcattttctcaaatctaataatttgtgttatatagcatttaatgaaggctgccaccaagtcttaaaktgtgtgtgtgtgtgtgtatgtgtgtgtgtgtgtaactcaggtaccctttataccaaaaccatgttctcatattgataaggtggactattcaaagatatat

SEQ ID NO: 238419 - DNA, 201 bp, Homo sapiens
cttctgacttcctgctgctgctgctgctgctttttttttttttttttttttttctttgagacagggtgtctctctgttgcccaggctggagtgcagtggtrtgtctcagctcattgcaccctctgcctcctgggctcaagcaattctcctgcctcaggctcccgagtagctgggattacaggggcccaccaccatgcccag

SEQ ID NO: 238420 - DNA, 201 bp, Homo sapiens
ctcacaggcatcttgtaagaatttaaaaaggtaatatgtaataggtactgagaacattgtctgaaacatcagaaatattcaacaaatattggatgttattwccaatctttgaatgtctctaccttaaaactcatagtaacaggcaagttttcttgcaagaagaaataaaactacatctgggttttcaaacaaacaagaaga

SEQ ID NO: 238421 - DNA, 201 bp, Homo sapiens
tgatattagcgatgatcaaagaatatgtttcctggcaaggaggagaaaaaacgttcctcaacagccttttggagtcactgagattgaataaatgttgacaytgattcaagcccacattctgatctgcagacatttctttcccaaacagagctaggaggaagagtacattttcttttatggaagactgcatgatttgagtac

SEQ ID NO: 238422 - DNA, 201 bp, Homo sapiens
tataatctagccactgcttattcctgatttcactttatatcagtctcccttgttctctggattccagatctgcagcctttacttcttttcaaagttaactktggagattttgcattaggtttttgtcttaccttttcacttattcagcctttaattttaatgttataatggttttttaaaaaactgatcactgggcaaata

SEQ ID NO: 238423 - DNA, 201 bp, Homo sapiens
ggtcatgattccctatttttataattaaaattagttttttgtccattcagcctggaagttttctgcatgtacaaattatgtaagaatacagcaggcctcckatcaatttcacttccaggaatactgtgattaattagccaatgccagagctctacatgaatcagactattctgattgcttctttgcctctgctgttcatta

SEQ ID NO: 238424 - DNA, 201 bp, Homo sapiens
gctgaagttctaacctgcagcacttcagattgtgactatatttggaagtcaagtctttaaagagataaaatgaagtgagcaggtgggcactaatctaataygactagtatctctataagaagagaaaatttggacacagacgggcacagcaggcagaccgtgtaaagactcagggagaagacagctacccataagcgaatg

SEQ ID NO: 238425 - DNA, 201 bp, Homo sapiens
ctctttgatcattcatgagaaagttggctcatttattagataaaaagaggttctggtttgtttgtgccacatgggctgcagatctgtgtgtcagtgggtgstggcaaactggatactgaaagatgagataatgaaatggtgacaaaactttgtggtaccatataaactcctgtgctttcgtagaggtgctttccagcctgg

SEQ ID NO: 238426 - DNA, 201 bp, Homo sapiens
taggtattcagggttgatattcttccaagaatattgactgtggaaagaaaaagaaagcaggattttaaaaatctggtccatgaatatatattctacaaggaaggttgctcttaccagtaaccaaagccattctgttttgatggtcattggcttcccagggaacaagtcctaaagaagactgataagatttctctatttttt

SEQ ID NO: 238427 - DNA, 201 bp, Homo sapiens
tattctttccattttccctaagtgttggctgatctgagaaatgaagagaaagagtacaaagagaggaattttacagctgggactccaggggtgacatcacrtatcagtaggaccatgatgcccaactgagccacaaaaccagcaagttttattaaggatttcaaagggggatggtatgtacgaagagggattaggtcacaa

SEQ ID NO: 238428 - DNA, 201 bp, Homo sapiens
gctctctgcaagaagaaaaatatggctgtattgtggccaaccccacaggcagtcagaccttatggttgtcttcccttgttccctaaaattgctgttattcwttttcaaggtgcactgatttcatattgttcaaacacacatgttttacaatcaatttgtacaatagtggtcctgaggtgacaaatatcctcagattacgaa

SEQ ID NO: 238429 - DNA, 201 bp, Homo sapiens
ccagcatggcacatgtatacatatgtaactaacttgcacattgtgcacatgtaccctaaaacttaaagtataataacaataaaataaaaaatttaaaaaaraaaaattaataaaatttttaaaaagcttatgtatgagtctggatactaaaggtaggatttaatgttaaagaagttcttctccggctctaaatgtatttat

SEQ ID NO: 238430 - DNA, 201 bp, Homo sapiens
aagttcatgataggaagttcaggtctcatggtgacttgatgaccactagtcaaaagttcagtttctaccaaagcctaataacaggccaagagctgtctctyaaaaggagagtagttatctggagaagatggcagggccttgctcccaaatcctagaggcctctgctgtgattcacctatgggggccttccaaaggctccaa

SEQ ID NO: 238431 - DNA, 201 bp, Homo sapiens
attagtgttaatttccaaaagccctttcatcaccatttattccatttaaaaagtagcatgtttttgcatcatgtatcaatctcttttctcaaagttttttktttcttaatagttcttttcagtctctgtttcagtttattaagtcatattaatgtttcagtggtgagcaccaataaagaaattttttaatctaccaggagt

SEQ ID NO: 238432 - DNA, 201 bp, Homo sapiens
tatgtttaaggtagaccaacatgatgttttatatacatatacagtgaaatgattagtacactcaagcaaattaacatatccatcatttcacataggtagcttttttttttttttttggtggtaaaggtacctaaaagtctactctcttagcaaatttccagtgtacaatgcaatattattaagtgtagtcctcatgctgtg

SEQ ID NO: 238433 - DNA, 201 bp, Homo sapiens
aaaatttagtgcaagaagcaaaggagaaaaaacgagtcctagtaaccccccaatatacatttctatccagtcttttggggttggcatagtgaatataggcktgtgtgtgtgtgtgtgtgtgtgcatgtgtgcatgaggggatatggttttactgagttataactatatgcgattacattttctaattgggtggtaaaacct

SEQ ID NO: 238434 - DNA, 201 bp, Homo sapiens
taacttagaataatggcctccagccccatccaagttgctgcaaaagacactattttattcctttttatggctgagtagtattccatggtgtatatatatayatatatatatatatgtatatatataccacattttctttatccactcattggtcaatgggcacttaggttggttccatatttttgcaactgtgaattaaga

SEQ ID NO: 238435 - DNA, 201 bp, Homo sapiens; identical to SEQ ID NO: 46563

SEQ ID NO: 238436 - DNA, 201 bp, Homo sapiens
agaagaaagaaagaaagagagaaagaaaaagaaagaaagaaggaaagagaaaaaaagaaaaaggaaagaaagggaaagaaagaagagaaagaaagaaaggaaaagagaaagaaagaaaggagaaagaaagaaattattttcttggtgaatgttcactgaatgtgtatgaatgtacatgattcttctaagtaaacagaatcc

SEQ ID NO: 238437 - DNA, 201 bp, Homo sapiens
gaaagaaagaaagagagaaagaaaaagaaagaaagaaggaaagagaaaaaaagaaaaaggaaagaaagggaaagaaagaagagaaagaaagaaaggaaaagagaaagaaagaaaggagaaagaaagaaattattttcttggtgaatgttcactgaatgtgtatgaatgtacatgattcttctaagtaaacagaatccaaag

SEQ ID NO: 238438 - DNA, 201 bp, Homo sapiens
agaaagaaagagagaaagaaaaagaaagaaagaaggaaagagaaaaaaagaaaaaggaaagaaagggaaagaaagaagagaaagaaagaaaggaaaagagaaagaaagaaaggagaaagaaagaaattattttcttggtgaatgttcactgaatgtgtatgaatgtacatgattcttctaagtaaacagaatccaaagtgc

SEQ ID NO: 238439 - DNA, 201 bp, Homo sapiens
tgtaaagatggggtttcaccatgttggccaagctggccttgaactcctgaccttgggtgatccgcccgcctcggcctcccaaagtgctgggattacaggcrtgagccatagcgcccggctaaaaattattatttaaaattattacctaatgattaccttttgttgaatatctttaaaaatttaaatactgtgaggaaaaaa

SEQ ID NO: 238440 - DNA, 201 bp, Homo sapiens
ttatccaaagatgactggaggtgagtttcagagaaaacctagaggaaatttaatttcaggaaaggaataaattatgcgatttaaagtcaagaaaaaagatkaaagtcgatgcattccccaaattacaaacttaattactgtcgactggatgactctgagaaggattagtacttagggactttgttcagagccagactgtgt

SEQ ID NO: 238441 - DNA, 201 bp, Homo sapiens
tttaaaatagatgttgccaggtcacattattcaaaactttactaatttaaaccttaataatatagactttctttttgaaatcataaaatattgcctttttratgttagaagctttaggtctctattttgtttcctatgtttggaataaaatttgtaagaaactcagatgataagcttaatagatacataaggtataaaaga

SEQ ID NO: 238442 - DNA, 201 bp, Homo sapiens
tcagtatctcaaaccagataacaaaaccattctgcctcccccaggtgatacagaaggggggttaatatggaagctgccctcgagtggattgagatcagctyacgttctggttgagtctctagtgagctctccagttgctagccctgttatttcactgccctaggcttctgtttcttcagctgtttctgtccagataaaata

SEQ ID NO: 238443 - DNA, 201 bp, Homo sapiens
ttaaagtagttttttccaattctgtgaagaaaggcattggtagcttgatggggataccattgaatctataaattaccttgggcagtgtggccattttcacratattgattcttcctacccatgagcatggaatgttcttccatttgtttgtatcctcttttatttccttgagcagtggtttgtagttctccttgaagaggt

SEQ ID NO: 238444 - DNA, 201 bp, Homo sapiens
ggatgatgatgattgcattttggacggatggcttccagctccttgagaaaggcattttgctcttacgtctgcagttgaagaaagaaaagccagatgtttcrgataaatagtgaaacagatttctactatatctttataataattttaagtggtcagtttgcatatattattctgataatttcctcaattattgaattttct

SEQ ID NO: 238445 - DNA, 201 bp, Homo sapiens
atttatcttgcatccaatacagaaaagatgacagtctcagaagacaccagaaaaggatctacaatggttctccttaaaactcaattcccaggcttggggtrggcagacttatcaccctccagaaatgtccacgtcttaatcccctgaaccaaaggatatgttacttcatttgaaagggagaattaaaggagcagatggagt

SEQ ID NO: 238446 - DNA, 201 bp, Homo sapiens
ttgacttggcgatgcgggctcttttttggttccatatgaactttaaagtagttttttccaattctgtgaagaaaggcattggtagcttgatggggataccmttgaatctataaattaccttgggcagtgtggccattttcacgatattgattcttcctacccatgagcatggaatgttcttccatttgtttgtatcctctt

SEQ ID NO: 238447 - DNA, 201 bp, Homo sapiens
ggattgacttggcgatgcgggctcttttttggttccatatgaactttaaagtagttttttccaattctgtgaagaaaggcattggtagcttgatggggatrccattgaatctataaattaccttgggcagtgtggccattttcacgatattgattcttcctacccatgagcatggaatgttcttccatttgtttgtatcct

SEQ ID NO: 238448 - DNA, 201 bp, Homo sapiens
tgggttgcgaaaattttctcccattttgtaggttgcctgttcactctgatggtagtttcttttgctgtgcagaagctctttagttgaattagatcccattkgtcaattttggcttttgttgccgttgcttttggtgttttagacatgaagtccttgcccatgcctgtgtcctgaatggtaatgcctaggttttcttctagg

SEQ ID NO: 238449 - DNA, 201 bp, Homo sapiens
ccttgttgtatagtttgaagtcaggtagcatgacgcctccggctttgttcttttggcttaggattgacttggcgatgcgggctcttttttggttccatatkaactttaaagtagttttttccaattctgtgaagaaaggcattggtagcttgatggggataccattgaatctataaattaccttgggcagtgtggccattt

SEQ ID NO: 238450 - DNA, 201 bp, Homo sapiens
gaaagaaagagagaaagaaaaagaaagaaagaaggaaagagaaaaaaagaaaaaggaaagaaagggaaagaaagaagagaaagaaagaaaggaaaagagaaagaaagaaaggagaaagaaagaaattattttcttggtgaatgttcactgaatgtgtatgaatgtacatgattcttctaagtaaacagaatccaaagtgca

SEQ ID NO: 238451 - DNA, 201 bp, Homo sapiens
tatttattcatttttctggtgcatttcctttccctgagaagtatgactccatggatatttgctaacttagttccctatgatccctaactcatttaaatgtrtattatacctaaagtatagccctttttcatttgaaaattgctcttttgcggggaaaagaggttgagcacaacgctgccctgcttcgtggtagaaattcat

SEQ ID NO: 238452 - DNA, 201 bp, Homo sapiens
aaacatgtagcctaaaaaaatatgttcgattgtccttatttggattgggatattgccaagcaaagtagcatttttggcctcatgcatagcagggcaggcakctgcctgagagatatactttcaagatcggtattgtgcttactaatacctcctaaaaacacaatttataactttctttgtttaacatgaaccaatctgtct

SEQ ID NO: 238453 - DNA, 201 bp, Homo sapiens
gtgatgcagctgtgctcatggtgaagacaagcttgagcattactttctggagatgtttagcctcttggaatcccattgtctcagtcttctaaatgccaaaggagagcccttactttttttagtgtaactaaaagacctattcaaagtattttttataaaacaaaagaattagtctgcactgaaggtaaaataaagcctatc

SEQ ID NO: 238454 - DNA, 201 bp, Homo sapiens
tccagtctatcattgttggacatttgggttggttccaagtctttgctattgtgaataatgccacaataaacatacgtgtgcatgtgtctttatagcagcawgatttatagtcctttggatatatacccagtaatgggatggctgggtcaaatggtatttctagttctagatccctgaggaatcgccacactgacttatact

SEQ ID NO: 238455 - DNA, 201 bp, Homo sapiens
tcccaaattggtgcttacttaaaaaatggaaaatactttccgactccagtctaaggagctgaacagttgtaccaaatgaccactgagctaaacattatgtraaatttcttttcaattattctgtaccagtttttagacaaattgatgtagaatttgagctgctaaagttgaaaaattttgatccgtgtgtttaatctggat

SEQ ID NO: 238456 - DNA, 201 bp, Homo sapiens
attgaacaaatctatcaggaaacttttttttaaaaaaaagctattgagataaattggtaagcttgccattttaaatactttttggaacaaaacagggaataaataaacatgcttcagtggtggcctgaaagaaataattcaaatgtatttagcacttagtaagtaggttactgacaagtagatatggcatttcaaatgtat

SEQ ID NO: 238457 - DNA, 201 bp, Homo sapiens
aaactggagtttaggtgtgtgaggtactctaatcatacacaaggctagctttaattttggtgaatggtagagaaggaagagtaaaagaagcagtgttgtgttttttttttttttttttttaatgtttttttttttattatactctaagttttagggtacatgtgcacattgtgcaggttagttacatatgtatacatgtgc

SEQ ID NO: 238458 - DNA, 201 bp, Homo sapiens
aactggagtttaggtgtgtgaggtactctaatcatacacaaggctagctttaattttggtgaatggtagagaaggaagagtaaaagaagcagtgttgtgttttttttttttttttttttaatgtttttttttttattatactctaagttttagggtacatgtgcacattgtgcaggttagttacatatgtatacatgtgcc

SEQ ID NO: 238459 - DNA, 201 bp, Homo sapiens
gctaggtaggttgatggagactgtacttgggggctgaggtttccacctgtggtgcagagtggagctgcaggttgctggcccagcgctgtcacacaaggagmtgagaactttcagttcacccaacttgtctgtcttttatgaaacttattaaaaggtagaaggatagaacatatagcagtttagtcacctgatatataactt

SEQ ID NO: 238460 - DNA, 201 bp, Homo sapiens
cagtttagtcacctgatatataactttaaaatacttagttaaatggtatttggatgaaatatgctcctaccctgagcccatgaaatgttaggggaaagaamtgaatgagttcgttgctgcgtgaaacatgtcctttataagaatagtaaagcaggaaaggaacatttcaaacttgagaaaccagtatctcctaactgcacc

SEQ ID NO: 238461 - DNA, 201 bp, Homo sapiens
tgaatatttcagaaaaatgcagagaaattttgtgatgtgttaacttctaaatcattttcttattagtttgtctaccgaactcattttatttaacaaatggwctcagacactaagaattttttaaatgctgtatatttctggaagacaagctatttgtattattcttaaaaatcccatcaacgttatcccattctttagtgc

SEQ ID NO: 238462 - DNA, 201 bp, Homo sapiens
agtataaatcacaatttcaaatggaaatagtgttattattatccagaggaattaggggagttactggcagaggtcacagaaattcttattccttgttttcyctgagttatgacatagtgaaatgttcctgtttgtaactattttcctacttctttgatggccatatctagattttcctcaacaattctgattctagacttt

SEQ ID NO: 238463 - DNA, 201 bp, Homo sapiens
agaaccaaagtttaataaaccttgtgatattagaggtttgaccagaacagcaacctttgttttagaagatgaaaatttaattacttctcatgaagtaaaamcccaatataaatggaattctttaacatatgtgctcaattaatctattttagatgagatcaaataataaaaaaattgatatttcaattttctctgagaaga

SEQ ID NO: 238464 - DNA, 201 bp, Homo sapiens
ttgatttttaaatggatctatgtggtgctgaataagacttattgaagcattttcacaaaatgaattcaataaagcaacattagtaaatgtaattgttatcrtggttgtaatccttttacaaaatataaaattttcttgtgtgggagaccattttatgttgttttgttgctgattattgttttctgtaatttaattctttag

SEQ ID NO: 238465 - DNA, 201 bp, Homo sapiens
tatacccttcattatttctctgtgaccaaacatagtttctagctatgtcctcatgctacctgtttgaagaaaatataagcttatcatttaagtgttttgastgaatcagagtaagcctggtcaatccagggtttctgacctctctttcctccttctttagatggcattgcagtccctggggactaatgttgtggtattaat

SEQ ID NO: 238466 - DNA, 201 bp, Homo sapiens
tctgttctgttccattggtctatatctctgttttggtaccagtaccatgctgttttggttactgtagccttgttgtatagtttgaagtcaggtagcatgaygcctccggctttgttcttttggcttaggattgacttggcgatgcgggctcttttttggttccatatgaactttaaagtagttttttccaattctgtgaag

SEQ ID NO: 238467 - DNA, 201 bp, Homo sapiens
gggaatcctttccccattgcttgtttttgtcaggtttgtcaaagatcagatggttgtagatatgcggcattatttctgagggctctgttctgttccattgrtctatatctctgttttggtaccagtaccatgctgttttggttactgtagccttgttgtatagtttgaagtcaggtagcatgacgcctccggctttgttct

SEQ ID NO: 238468 - DNA, 201 bp, Homo sapiens
tcattcaaggacatcactcttaaaattgtgcctgctttagcttgcattattttccctctctagtgtataattctgatcagcctataagtgtaccataatawtttcaggttaaaaaaataaaaatcttggctgggcgtggtggctcacgcctgtaatcccagcactttgggaggcccaggtgggtggatcatgagttcagga

SEQ ID NO: 238469 - DNA, 201 bp, Homo sapiens
gcctaggttttcttctgggtttttatggttttaggtctaacatgtaagtctttcatccatcttgaattaatttttgtataaggtgtaaggaagggatccaktttcagctttctacatatggctagccagttttcccagcaccatttattaaatagggaatcctttccccattgcttgtttttgtcaggtttgtcaaagatc

SEQ ID NO: 238470 - DNA, 201 bp, Homo sapiens
ttaggggaaagaactgaatgagttcgttgctgcgtgaaacatgtcctttataagaatagtaaagcaggaaaggaacatttcaaacttgagaaaccagtatmtcctaactgcacctagcacttgaattttagcacttagaaggtgtaattgcgggtaccaattgcccagaaataaccacatcagtacatgaatgtaatcatt

SEQ ID NO: 238471 - DNA, 201 bp, Homo sapiens
cattaaaagtaatggcgaaaactgcaattacgttcccatcaacctaaatataaccatgaatgattattttaagccttttcctgcctcctcaaacctcagaygcttccttcccccctgcttcctactttgttgagcaagtgaattactaaaaagagcccttccctactatgtctacagccccacatatctcttcctacacct

SEQ ID NO: 238472 - DNA, 201 bp, Homo sapiens
tataaatagctccgaaggattagttgagtcacagattggatgcagggtcagctttcacagttcaccggctgccatctgcacccaggtcgtgtttagaaacycttgactttatgctttattgactccactgggacaaaaactaaagtcgtatcaaacaccagtgggagcatttttcagaggtaaacagtggtaacattttac

SEQ ID NO: 238473 - DNA, 201 bp, Homo sapiens
tctattttatttataacctacactggtagttatcacgcagcattcataaatgatggaaagatgatttcttatccaaaccaacagctacacaacacacaaamacacacacacacacacacacacacacacacacacacgagagagagagagagagagagagagagagagaggagagagagagggaggagaggagagaggaga

SEQ ID NO: 238474 - DNA, 201 bp, Homo sapiens
gcattcataaatgatggaaagatgatttcttatccaaaccaacagctacacaacacacaaacacacacacacacacacacacacacacacacacacacgasagagagagagagagagagagagagagagaggagagagagagggaggagaggagagaggagagagagagcgagatatgtattttaaggaatgggctcatgt

SEQ ID NO: 238475 - DNA, 201 bp, Homo sapiens
tcccgagtagctgggactacaggcacccgcaaccctgcctggctaatttttttgcatttttagtagagacggggtttcagcgtgttagccagaatggtctygatctcctgacctcgtgatccacccacctaggcctcccgaagtgctgggattacaggcgtgagccaccgtgcccagcctagttcctgtcattcttaagct

SEQ ID NO: 238476 - DNA, 201 bp, Homo sapiens
tatgtaagcagttacaccaaagcttagttgcttaaaacagcaataactattatttctcacagtttctgtgaggtcaggaatttgaaaatggttcaactaastggttctggctctgggtgttttatgatattgcattcatgcagcggctatggctgggatcatctcttagccttcacttacatgtttggcacctggtctggg

SEQ ID NO: 238477 - DNA, 201 bp, Homo sapiens
tttttgtttgtgtgtttgttttgtttttctttgagacggagtctggctctgtcacccaggctggagtgcagtggcttgatctccgtttactgcaacctccrcctcccgagttcaagagattctcctgctgggattacaggcgcatgccaccacgcacggctaattgttttttgtatttttagtagagacagggtttcccat

SEQ ID NO: 238478 - DNA, 201 bp, Homo sapiens
gtgttttatgatattgcattcatgcagcggctatggctgggatcatctcttagccttcacttacatgtttggcacctggtctgggaagactaaagaagctrgggactagaacacgtgggtctccttagtcatttttctctgtagggactctccagcatggtggctttagggtaatcagaattcttccgtggtggctcaagg

SEQ ID NO: 238479 - DNA, 201 bp, Homo sapiens
ctaagtgcaacattatctaggaataatgaggaacatgaaaatttataaagggaaatataataaacagtgatatttaaaatatgaatagagtatgtgtgtttgtgtgtgtgtgtgtgtgtgtgtgtaagtgaaaaaaaagttctcaaagtaaacattttcccagtggccgtccttttgaacttaaccaacttgtaagtgtaa

SEQ ID NO: 238480 - DNA, 201 bp, Homo sapiens
cgaggttaggagtttgagaccagcctgaccaacatggtgaaaccctgtctctactgaaaatacaaaaattagttgggcatggtggcgcatgcctgtaatcycagctactcaggaggctgaggcaggagaatcacttgaacccgggaggcggagcttgcattgagcacagatcacaccactgcactccagcttgggcaacag

SEQ ID NO: 238481 - DNA, 201 bp, Homo sapiens
taaactttatatgatgtctctataccctgaaagaccagaaatttgtggtcctctcctcctaatttttaagttgaattattttttgatattccattgtaatkattctaatcaattatacttacacttttatatctattgataatgattctaatctattaaacttctttatctggatttttcaacttcaagtctctatatctt

SEQ ID NO: 238482 - DNA, 201 bp, Homo sapiens
tcaggctctcctgtcctgacattctacacagccacccctcctctattccttgcatgctgagaacacccaccttgttcagaatgctggataagggaacatgrcaaagatcttctctaacccctggatccctgactttttctcagaattctttcttgtttttccctcggaaataactcaaaatgcacagggatggccaaattc

SEQ ID NO: 238483 - DNA, 201 bp, Homo sapiens
acactattctaaggcccaattgcagcgctacatatgttagaaataatcagagttgaaactctgaagtgagtaaagttattggctcacatacttgcctcattgtgtgtgtgtgtgtgtgtgtgtgtgtgtgtgtggtgttcatgtgccttgtttctaaatgttatttctacagaggcattttgtaggctcatccttctaaac

SEQ ID NO: 238484 - DNA, 201 bp, Homo sapiens
ctaaataggcatgagcctgttataacaaacaagtagaaacaaaaccagatcagctaatgattcactgtatcagctcatcgagacacacaaaataagctttygtagttgtttcagaagagaaatgaaaaacaatatttgattactaaattaagtgtatttaaaatactattattcaaagaacatttatcaagtatgtttcct

SEQ ID NO: 238485 - DNA, 201 bp, Homo sapiens
cactattctaaggcccaattgcagcgctacatatgttagaaataatcagagttgaaactctgaagtgagtaaagttattggctcacatacttgcctcattgtgtgtgtgtgtgtgtgtgtgtgtgtgtgtgtggtgttcatgtgccttgtttctaaatgttatttctacagaggcattttgtaggctcatccttctaaact

SEQ ID NO: 238486 - DNA, 201 bp, Homo sapiens
tgagaaatgcatttgcaggaggcctacccaaattagagttctagtaagagtggaggtggagaggacatttaactacacatgccttatcgaggttctggcaytctgctttgggtgtgtgcatcatttctctatgcaatgagaaccactgtgtattatgagatatgattggagtatgttacaaatgtaaaaactatggatttt

SEQ ID NO: 238487 - DNA, 201 bp, Homo sapiens
gataagctatcattttgtgatgccttttattcacaggtttattacaaggtttgacaagactatcctaagaagatttagaaggatttcctgggttttgtttktgtgtgtgtgtgtgtgtgtgtgtgtgtgtgtgtgtatgtgtatgatgtgatcctgtagtggtacaattctgttaatctccaatacttattattttaaatt

SEQ ID NO: 238488 - DNA, 201 bp, Homo sapiens
gttatcacgcagcattcataaatgatggaaagatgatttcttatccaaaccaacagctacacaacacacaaacacacacacacacacacacacacacacayacacacacgagagagagagagagagagagagagagagagaggagagagagagggaggagaggagagaggagagagagagcgagatatgtattttaaggaa

SEQ ID NO: 238489 - DNA, 201 bp, Homo sapiens
acaatagtggagggaaggtcagcagataaacaagtgaacaaaggtctctggctttcctaggcagaggaccctgcagccttccgcagtgtttgtgtccctgsgtacttgagattagggagtggtgatgactcttaacgagtatgctgccttcaagcatctgcttaacaaagcacatcttgcactgcccttaatccatttaac

SEQ ID NO: 238490 - DNA, 201 bp, Homo sapiens
agtctcccatgtctacttctttccacacagacacagcaataatccgatctctctatcttttccccacctttcccccttttctatttcacaaaaccgccgtygtcatcatggcccattctcagtgagctgttgggtgcgcctcccagaccgggtggtggccgggcagaggggctcctcacctcccagaaggggcggccgggc

SEQ ID NO: 238491 - DNA, 201 bp, Homo sapiens
gacagggcgccggggcagaggtgctccccacatctcagacgatgggcagccgggcagagacactcctcacttcttagatgggatggcggccaggaagaggygctcctcacttcccagactgggcagccgggcagaggggatcctcacatcccagatgatgggcggccaagcagagacgctcctcacttcccagacggggtg

SEQ ID NO: 238492 - DNA, 201 bp, Homo sapiens
taagtgcaacattatctaggaataatgaggaacatgaaaatttataaagggaaatataataaacagtgatatttaaaatatgaatagagtatgtgtgtttgtgtgtgtgtgtgtgtgtgtgtgtaagtgaaaaaaaagttctcaaagtaaacattttcccagtggccgtccttttgaacttaaccaacttgtaagtgtaat

SEQ ID NO: 238493 - DNA, 201 bp, Homo sapiens
tttcatccatctccctgcaaaggaaatgaactcttcattttttatggctgcatagtgttccatggtgtatatgtgcctcattttcttaatccagtctatcrttgttggacatttgggttggttccaagtctttgctattgtgaatagtgccgcaataaacatacatgtgcatgtgtctgtatagcagcatgatttataatc

SEQ ID NO: 238494 - DNA, 201 bp, Homo sapiens
attataaagaataattgtttggatttttgaagcttaatgtgttataatacacatttttcaaaaaatactttaagtcagtgcaaaaaagataaccagaggcaaaaaaaaaaaaagtttcccaaaatttggactaccaaacatttttgtttgtaaattcctttattctgcaggagtcaaccaaaaaaagtgacctagagaaaa

SEQ ID NO: 238495 - DNA, 201 bp, Homo sapiens
ccgaaagaagtgcaaaacccttcaatatattaccatcatgtgcttcttctgtcccactcttttccttagagacattttgtttttgttgtttttaattggtrttgtattgtttttcaaatctttgtcccccagctccaactgggactcgctaaagctggagacacagccatcccctgggactgccctttgctttcattctgg

SEQ ID NO: 238496 - DNA, 201 bp, Homo sapiens
ttataaagaataattgtttggatttttgaagcttaatgtgttataatacacatttttcaaaaaatactttaagtcagtgcaaaaaagataaccagaggcaaaaaaaaaaaaagtttcccaaaatttggactaccaaacatttttgtttgtaaattcctttattctgcaggagtcaaccaaaaaaagtgacctagagaaaaa

SEQ ID NO: 238497 - DNA, 201 bp, Homo sapiens
taaacagtcacatgtggttaccatattgggtagtacagtataagggttttacaaaatatgagtgatgaaaaaactattgaattatttctaaatgaactaawaatagcagggaacttttgttaaagcatctagttagtaactgaaagatgaatgtatgtaaagcggatagtcatggatttttacatgaaagcatttattctt

SEQ ID NO: 238498 - DNA, 201 bp, Homo sapiens
taaaatgccagatttctttagtttttgttttctctgttgttattaaatagtttttattgtgtacatttatggtatataacatgataagatacagatagtaraatgattattatacagaagcaaattaatatatccatcatctcacatagctatccatgtgtggtggtggtggtgttgttttagtgggaacttttcattttt

SEQ ID NO: 238499 - DNA, 201 bp, Homo sapiens
ttttgagcctatgtgtgtctctgcatgtgagatgggtttcctgaatacctcacactgatgggtcttgactctttatccaatttgccagtctgtgtcttttmattggagcatttagtccatttacatttaaagttaatattgttatgtgtgaatttgatcctgtcattatgatgttggctggttattttgctcgttagttga

SEQ ID NO: 238500 - DNA, 201 bp, Homo sapiens
tgaagaaaggctatgatatttacctgcatttttgcttactgtgctttttgttttttcctgatgtttcaagtttcattttattattttctttctgtttggasaatttcctttagctattgttttaaagaaggtattttggtgacacattcttttagtttttctttatctgttattgtcttagttttaccttcatttctgaag

SEQ ID NO: 238501 - DNA, 201 bp, Homo sapiens
gagagatccgctgttagtctgatgggcttccctttgagggtaacccgacctttctctctggctgcccttaacatttttttcttcatttcaactttggtgamtctgacaattatgtgtcttggagttgctcttctcgaggagtatctttgtggcgttctctgtatttcctgaatgtgaacgttggcctgccttgctagattg

SEQ ID NO: 238502 - DNA, 201 bp, Homo sapiens
ggcgtccagtgcctgtggcttttccatgtgcacagtgcaagctgtcggtagatttaccattctggagtctgaaagacagtggctgatatggtttggctccrtgtccccaccaaatctcatctcagattgtaatccccatgttttgagggagggacctgttgggaggtaactggatcatagggacagcttctcccatgctgt

SEQ ID NO: 238503 - DNA, 201 bp, Homo sapiens
caccacactgtttgtatgctttatcttaattgtcataatttaaaaatcagatttaacatttggataaaaatgagaaatatgaatatgaattttacaggccrttgtaattgcttagtatatttgcagatctcaaatgaaaatattaatatatttgcttttctataataacagctgaaagaatcctacactatgcaaaataga

SEQ ID NO: 238504 - DNA, 201 bp, Homo sapiens
acatttcccctccacactgccctactagaggttctccatgaggcctctgcccctgcagcagacttcttcctggatattcaggcatttccatacatcctccraaatctaggcaaaggctcccaagcctcaattactactgtctgcatacctacaggcctaataccatgtagaagccaccaaggcttggggctttcaccctct

SEQ ID NO: 238505 - DNA, 201 bp, Homo sapiens
catagtactagaatctatcacaatttcagttagaagctaactttatatctgatcgctaattttacacgtctcgacacatacctccttatctcccccatccygacgaatgtccagatattaattttaagacttggaattgtgaatgcaatgcttgaaagacattaagttaagcttcgttgtcttttttttctctgtgattgg

SEQ ID NO: 238506 - DNA, 201 bp, Homo sapiens
tggttttatctacagacatgtcaggtcacttccagcaaattaaaaatataagaaacagtttgcagcagcctgaagggtaggttttgtgttttttttgttgttttttttttttttgtcatgttaaagttccaggggcttggcctcagaaaagactgtaattgtttcctttgttttgaataatataagcatgtccttggtttg

SEQ ID NO: 238507 - DNA, 201 bp, Homo sapiens
ataaatggaattctttaacatatgtgctcaattaatctattttagatgagatcaaataataaaaaaattgatatttcaattttctctgagaagaaaacattaaaataagtttatgcacactgaatgtaagaatgttgaagaaattcctcattatatgttgtggaagatttaataaaacttggttaatggatagaaaggtgt

SEQ ID NO: 238508 - DNA, 201 bp, Homo sapiens
gtaagcttactacacatttagatgagagaacaaaattgacagttctaaggcttttggatatgtagatgataaaaggttacctttgctcaagagacatcccrgtaaagaccattcaaccttcttcaaattataataaatgactcagttgaagactcagttaatgattttgaatgctcctttaaagcctacctcgattgtttt

SEQ ID NO: 238509 - DNA, 201 bp, Homo sapiens
gttccctggtaaagtggatgctactgatccagggaccacactctgaaagaactagtataatatgttagagaacccgattagagctaggtaaccctgatgaytagttgggcagcattttacatccacattgagttcacatctatgtggtttcaaagatatgaattagatctgaattttcttgagttaatttgaataaatgca

SEQ ID NO: 238510 - DNA, 201 bp, Homo sapiens
tagtgggtgcagtgcaccagcatggcacatgtatacgtatgtaactaacctgcacaatgtgcacatgtaccctaaaacttaaagtataattaaaaaaaaaataaaaaataaaataaaataaaataaaataaaaataatcaacaagctttaaaaaataaaaataaaaaaaaaataaaaaaaaaaagaaatttacaaatggct

SEQ ID NO: 238511 - DNA, 201 bp, Homo sapiens
gcaaaaacgctgaaaattccaaaagccagaatgcctcttctcctccaaatgattgtaacacttctccagcaaggacacaggactggacagagaatgagatrgattaattgacagaagtaggcttcagaaggtgggtaataacaaactctgctgagctaaaggagcatgttctaacccaatgcaaagaagctaagaacattg

SEQ ID NO: 238512 - DNA, 201 bp, Homo sapiens
ttttcctggctacatctagttgaccatcttgactctttccctcttgattgatttttcaattcctcaattttcttatctgtaaatggaaataatatcatcaygtatctcatcggtgttgagagaattaattaagttgacacacaaattatttagaaaagtatccagaattcaagaattcctagcttttgtcagtcattatta

SEQ ID NO: 238513 - DNA, 201 bp, Homo sapiens
ttattattattattattattattattattttctctttattaaattttgctttttggtaatttattatttttctcattttgttgaatcatttttcatatatyctgaagttcactaagcctacttaaatggttattttgaattttttttgtcaggtggtttatatatttcattttttagggtcaatcactggaacctcatttt

SEQ ID NO: 238514 - DNA, 201 bp, Homo sapiens
ctttttgatggtctggtctcttggtgagagaaggttttcctggctacatctagttgaccatcttgactctttccctcttgattgatttttcaattcctcawttttcttatctgtaaatggaaataatatcatcacgtatctcatcggtgttgagagaattaattaagttgacacacaaattatttagaaaagtatccagaa

SEQ ID NO: 238515 - DNA, 201 bp, Homo sapiens
tgctggaaaaaggactttattgaggttgtagcagtggggtttgcatgtgcacatgtgcgatagtggcggtagggtagtggtgaggtggtgggctctgtgtgcacattcaccagtgacaatgggatggtggtgtgaggaggtttgcacacatgcactggcagcagcagtggtgggatctgcctgtgcactggtggtggtggg

SEQ ID NO: 238516 - DNA, 201 bp, Homo sapiens
gtgctggaaaaaggactttattgaggttgtagcagtggggtttgcatgtgcacatgtgcgatagtggcggtagggtagtggtgaggtggtgggctctgtgtgcacattcaccagtgacaatgggatggtggtgtgaggaggtttgcacacatgcactggcagcagcagtggtgggatctgcctgtgcactggtggtggtgg

SEQ ID NO: 238517 - DNA, 201 bp, Homo sapiens
ggtgctggaaaaaggactttattgaggttgtagcagtggggtttgcatgtgcacatgtgcgatagtggcggtagggtagtggtgaggtggtgggctctgtgtgcacattcaccagtgacaatgggatggtggtgtgaggaggtttgcacacatgcactggcagcagcagtggtgggatctgcctgtgcactggtggtggtg

SEQ ID NO: 238518 - DNA, 201 bp, Homo sapiens
aggtgctggaaaaaggactttattgaggttgtagcagtggggtttgcatgtgcacatgtgcgatagtggcggtagggtagtggtgaggtggtgggctctgtgtgcacattcaccagtgacaatgggatggtggtgtgaggaggtttgcacacatgcactggcagcagcagtggtgggatctgcctgtgcactggtggtggt

SEQ ID NO: 238519 - DNA, 201 bp, Homo sapiens
cctataggagagtataaaagtagaaaaaaatagatgttaagtgaatagtagtgtgtttctggaatattttgctccaaaagaaaatatcctcaaaatttagtttttttttttctaaacagtaaactaagctgtgtgtctcttgatttcagatgctatattagttttctttggttaagtaacaagttattataaacagtagct

SEQ ID NO: 238520 - DNA, 201 bp, Homo sapiens
tttgactgtggtataagttgggttgagttgactggctttgtttttggattatttcagggggccaagtctcagctcagcactcctgggctgcatgctctaayactggggcctgggaccaggcccatgactttgttttatggccccttgaggttaagcacctgctgcactggaggggctgaggtgtttccagttcactggcaa

SEQ ID NO: 238521 - DNA, 201 bp, Homo sapiens
ccaagttgcttgctctctctccctctctttcagggatgccattgagttatgggtttggtttctaaataatctcatatttctcagagattttgttcattttraaattgttttttcattatttttgtctcactgagttgattcaaggaatcggactttgagctgtgagattctttcctcagcttggtctattctgctattaat

SEQ ID NO: 238522 - DNA, 201 bp, Homo sapiens
taaatggaattctttaacatatgtgctcaattaatctattttagatgagatcaaataataaaaaaattgatatttcaattttctctgagaagaaaacattaaaataagtttatgcacactgaatgtaagaatgttgaagaaattcctcattatatgttgtggaagatttaataaaacttggttaatggatagaaaggtgtt

SEQ ID NO: 238523 - DNA, 201 bp, Homo sapiens
gctggaagcagtttatatcgatgaaacaaggtaagttttaaccttcttctcttttatcttctttgattctctcccgtttttcttcctctttcttgaccctyctttatctcaaacaggaatttagcatatcttcctgtgaaaccaaaatcaaatcttattaaaatttgaaatgttcttcttcatgtagctaattaactggac

SEQ ID NO: 238524 - DNA, 201 bp, Homo sapiens
aaatggaattctttaacatatgtgctcaattaatctattttagatgagatcaaataataaaaaaattgatatttcaattttctctgagaagaaaacattaaaataagtttatgcacactgaatgtaagaatgttgaagaaattcctcattatatgttgtggaagatttaataaaacttggttaatggatagaaaggtgttt

SEQ ID NO: 238525 - DNA, 201 bp, Homo sapiens
aaagaaaacaatagccttaaaaggaacaagcctgatttgatcttaaccagtctttatttaatcaaactgcagggaattttcattgccctagtaatgttggtttttttttttatgaaaacatttttgaggactagcttgatgtcattggtatattgtttcctactgtgagccaataaattcagtttcatgggcaaatgctta

SEQ ID NO: 238526 - DNA, 201 bp, Homo sapiens
ctcctcgagttttcatgcagatcaacacacctactgacagtaatgggtagatttggaggatgctgctttattttaactatgactgataggagagagagatyaatatcagccaaaaaagtaatcattggtaaaagaagacaggtttttgctttttattctcctcttgaacacacatgtcaggttggcaagataagaagtcaa

SEQ ID NO: 238527 - DNA, 201 bp, Homo sapiens
aatggaattctttaacatatgtgctcaattaatctattttagatgagatcaaataataaaaaaattgatatttcaattttctctgagaagaaaacattaaaataagtttatgcacactgaatgtaagaatgttgaagaaattcctcattatatgttgtggaagatttaataaaacttggttaatggatagaaaggtgtttc

SEQ ID NO: 238528 - DNA, 201 bp, Homo sapiens
gcactttacaatggtaggaaggcatttaaaaacaattactagttctcttacagactttcagagaagaaacctgaaggatctccagggaattgtaaagacasgtataagctgtggggcctgagaacctcaggctgccttgagtttccatttctatgggactagtttttctacttactcctcatttttaaaagtgtattttgg

SEQ ID NO: 238529 - DNA, 201 bp, Homo sapiens
atggaattctttaacatatgtgctcaattaatctattttagatgagatcaaataataaaaaaattgatatttcaattttctctgagaagaaaacattaaaataagtttatgcacactgaatgtaagaatgttgaagaaattcctcattatatgttgtggaagatttaataaaacttggttaatggatagaaaggtgtttca

SEQ ID NO: 238530 - DNA, 201 bp, Homo sapiens
ttgtcctttgtatagcctctttgatagaatatctattcaattcttttgccaatttttaagatgaattaaatccatattttgagttttaagagtcctttatsaattctggtcacaagtgctttgtccaatagatgatttacaaatattttttctcagtttattacttgtccttcattttcttaatggcatcttttgaagaat

SEQ ID NO: 238531 - DNA, 201 bp, Homo sapiens
ctgcacagcaaaagaaactaccatcagagtgaacaggcaacctacaaaatgggagaaaattttcgcaacctactcatctgacaaagggctaatatccagamtctacaatgaactcaaacaaatttacaagaaaaaaacaaacaaccccatcaaaaagtgggcaaaggacatgaacagacacttctcaaaagaagacattta

SEQ ID NO: 238532 - DNA, 201 bp, Homo sapiens
gccattaaaaaggatgagttcatgtccttggcagggacatggatgaagctggaaaccatcattctcagcaaactaacacaggaacagaaaaccaaatacarcatgttcttacttataagtgggacttgaataatgagaacacatggacacagggaagggaacatcatacaccagggcctgtcagagggtggggagctaggg

SEQ ID NO: 238533 - DNA, 201 bp, Homo sapiens
cttatcacaaaaaatagtaaatgtttgaggtgatggatatgttaattagcttgatttaatcattccactttgtatacctatatcataatatcacttttacmtcataaatatatacaattataatttgtcaaattacaatataataaaaataattatctacttttaagataataaaaacaacaacagtaataaatacatcac

SEQ ID NO: 238534 - DNA, 201 bp, Homo sapiens
aacttccctccagagcaaaaagtgtgctcaaaatctactgatggaaggattctgacagcagcataacttaaggatattttaagtaatattgtgtgtgtgaktgtgtgtgtgtgtgtgtgtgtatgaaagagaaagagagagagggagagtgtgtgtgtgtgtgtgcgtgtgtgtgtgtgtgtgtgtgtgtgtgtgtctcct

SEQ ID NO: 238535 - DNA, 201 bp, Homo sapiens
ttatgaaagacgtagtcagtcagtgtgacaaacttgattgttgccttatttttaagaaactggcacagctacctcaaccttcagcaactacctccctgatyagtcagcagacatcaacacagaggcagaaccctttaccagcaaaaagattacaacttgctgaaaggctcagatgattgttagcattttttagcaatgaag

SEQ ID NO: 238536 - DNA, 201 bp, Homo sapiens
ccatggtgtttcaggatggagagtcacaattcatcaaaataggctggtcacagtggctcacacctgtaatcccagcacttcggaaggacaaggcaggtggwtcacctgaggtcaggagtttgagaccagcctggccaacatggtgaaatcctgtctctactaaaaatacaaaaattatccagacgtggtggcgtgtgcctg

SEQ ID NO: 238537 - DNA, 201 bp, Homo sapiens
tattcagggtctcttggtatccaacacaccttaaaatatgtatttttccccagtgtacagagaccctggtatttcggcgaaaatattggggaattgatacyctacacatttgctatggtgttgcaggattcttctacaaggggacctagctttcctagttaataggttttgaatctactactgtttctgcttggaacactg

SEQ ID NO: 238538 - DNA, 201 bp, Homo sapiens
tcgattgaacccaggagctggaggttgcagtgagccgagattgcaccattgcactccagcctgggtgacagagcaagactctgtctcaaaaaaaaaaaaawaaaataaaataaaataaaataataataataataaaaaaataaaaaattcaacgaaacaaaaatgataacagggtttgtgctcctctacatcttttgattt

SEQ ID NO: 238539 - DNA, 201 bp, Homo sapiens
gattgaacccaggagctggaggttgcagtgagccgagattgcaccattgcactccagcctgggtgacagagcaagactctgtctcaaaaaaaaaaaaatawaataaaataaaataaaataataataataataaaaaaataaaaaattcaacgaaacaaaaatgataacagggtttgtgctcctctacatcttttgattttt

SEQ ID NO: 238540 - DNA, 201 bp, Homo sapiens
tatatgtcaatttatgctagtaccaactgtcttgattactgtagctttatagtaagtttgtaacttcaaagtgtaaatcctccaactttgttcttttaaaraattgttctggctattctagatcctttataattccctctcaagtttagaagcatatttccaacttctacaaaaaaagcctggtggggttttgatagaaat

SEQ ID NO: 238541 - DNA, 201 bp, Homo sapiens
gaatttgtccatttcatctaagttgtccaattttttggcatagagttgttcaaaatattctcttatagttcttttaatttctgaagaattcatagtgatgyctactctttcattcttgagtgtaacaattgtgtcttttcttggttaacatagctacaggtaaaatagttttgttgatcttttcaataagctaacttttgg

SEQ ID NO: 238542 - DNA, 201 bp, Homo sapiens
tcactgtttccatcctcacctctccaggtgagatggtttactattttgccaacatacttcgtggacttatgttactataccttcacatttgtaggaccatsccactcctcaatttccccaatttctagtttctctacattttctaggagaactaaagcccagagaggtggcagaagttatcaatgacaaacattttattta

SEQ ID NO: 238543 - DNA, 201 bp, Homo sapiens
taatcccctgaaccaaaggatatgttacttcatttgaaagggagaattaaaggagcagatggagttaaaattgctaatcagctgactttaaaatagggagmgtatcctgtattacccaggtgagcctaatgtaatcacaaagattcatcttcctccctccctccctccctccctccctccctcccttccttccttcccttc

SEQ ID NO: 238544 - DNA, 201 bp, Homo sapiens
attcaaggaacaactaagatgccactatggctggagtgaaatttgagagcacagggaataggaggttggcaatttaaattttacagccatatataatcatytactatgcctactggtaaagacagccataggaatgtatcacatgtgaattacagtttttatttttgttgtgtataatttttttacccctgctggtagttg

SEQ ID NO: 238545 - DNA, 201 bp, Homo sapiens
aactcatgcttaatattctgtgtttaaattcaccatcaacctcaaataatcccttaatgtttcctggcaatcattccatgttttcctactgctacaggctkaaatactctcttagaatctatttcacaccttcttggtctctgccctgtcactcttagatatagtctttgtgactttgcttcttatttcactgacagaata

SEQ ID NO: 238546 - DNA, 201 bp, Homo sapiens
ctcagtctgtttataaaaactgttagcagatttagaggtgatgaaatactccctcctttttgaaataatttcttcacttggttctaccctcacctcactcrttggccactccatctcaatgacttctgttgatttttcctcatctccttaccattaaaatttaaagtattttcaaaaacctctgctccagccatgctgacc

SEQ ID NO: 238547 - DNA, 201 bp, Homo sapiens
ttgatcatcatctaacattacatatttactcatttgcctcttttctgtcttgttcaaagaaatgtcagctctactaaaacaggaactttgttttatatacsatagtgtccccaggacctagaagaattcctagtcagctagatattcaataattatttgttgaatgaatgagagatagtgaaccaatttagcatcacaggt

SEQ ID NO: 238548 - DNA, 201 bp, Homo sapiens
tcactgaactggaaattttagcaatggtctttgctgctgccattcatgattatgagcatacagggacaacaaacaactttcacattcagacaaggtaagtytgaaaaagtattaactttcattagttaaaatttgaaatttatttttctgcatatcacttaagaggatttttaaaaaataataaagattctaataagaaca

SEQ ID NO: 238549 - DNA, 201 bp, Homo sapiens
gtggtaaatttgttacagtagcaataaaaatctaatacatgccttctataccagaagaacacatcaacatgaccattcctgtcctcacccaacacacacayacacacacacacacacacacacacacacacacacacacagaaacacacacacacgcacaatccctagtggtgaagccctgcctcactctatggcacattg

SEQ ID NO: 238550 - DNA, 201 bp, Homo sapiens
agataattcatttatttcaagccactgagtttgtggtaaatttgttacagtagcaataaaaatctaatacatgccttctataccagaagaacacatcaacrtgaccattcctgtcctcacccaacacacacacacacacacacacacacacacacacacacacacacacacagaaacacacacacacgcacaatccctagt

SEQ ID NO: 238551 - DNA, 201 bp, Homo sapiens
gatttttatctaatttttttgtttacacacagattttattgtttacaggcagatggctgaagaaatcttgcttatttacagttttctacctgtttaactaagtgcttaatataaacatatatgataattgagaaaaatggcctactatatcatatgcaggtaatttcatgacaaggtcaataaaataagaggccaccagct

SEQ ID NO: 238552 - DNA, 201 bp, Homo sapiens
gttcactttacattataacttctaagttcccaggactgaatcctaagcaattctgagagaatatacatgtacattttagatttcaaaagggacaaataatmagaggaaaacaaagtctttcagaaataaaaactagagcttgctatcattctctctctaattatggttcaaaatgtaattagaagtttaaatgagatcatg

SEQ ID NO: 238553 - DNA, 201 bp, Homo sapiens
agatttttatctaatttttttgtttacacacagattttattgtttacaggcagatggctgaagaaatcttgcttatttacagttttctacctgtttaactaagtgcttaatataaacatatatgataattgagaaaaatggcctactatatcatatgcaggtaatttcatgacaaggtcaataaaataagaggccaccagc

SEQ ID NO: 238554 - DNA, 201 bp, Homo sapiens
cacacacacacacacacacacacacacacgagagagagagagagagagagagagagagagaggagagagagagggaggagaggagagaggagagagagagygagatatgtattttaaggaatgggctcatgtgattattggtgctggcaagtctgaaatttgcaaagcaaactggcaggctggaaaccctggcaggagcca

SEQ ID NO: 238555 - DNA, 201 bp, Homo sapiens
aaagtagcctggcgtggtggcaggagcctgtagtcgcagctactcgggaggctgaggcaggagaatggtgtgaacccaggaggcggagcttgcagtgagcygagagcgtgccactgcactccagcctgggcgacagagcaagactctgtctcaaaaaaaaaaaaaaaaaaaaaagaggagctgggtcttctaagatgactt

SEQ ID NO: 238556 - DNA, 201 bp, Homo sapiens
gagatttttatctaatttttttgtttacacacagattttattgtttacaggcagatggctgaagaaatcttgcttatttacagttttctacctgtttaactaagtgcttaatataaacatatatgataattgagaaaaatggcctactatatcatatgcaggtaatttcatgacaaggtcaataaaataagaggccaccag

SEQ ID NO: 238557 - DNA, 201 bp, Homo sapiens
tttagagggtaatctgctttattcaaagtctactgatttaaatgttaatcacatctaaaaaatactttcacagcgacatttaaattggtgtttgaccaaaygactggccaccataacctacctatggtgacacataaaattaaacctcacggaggtagttgttgccttttcaagattcccttttcaagttacacaatagca

SEQ ID NO: 238558 - DNA, 201 bp, Homo sapiens
tgagatttttatctaatttttttgtttacacacagattttattgtttacaggcagatggctgaagaaatcttgcttatttacagttttctacctgtttaactaagtgcttaatataaacatatatgataattgagaaaaatggcctactatatcatatgcaggtaatttcatgacaaggtcaataaaataagaggccacca

SEQ ID NO: 238559 - DNA, 201 bp, Homo sapiens
tagaactgtagactttcagagttggaagttgacttgaagaatctagaatgcttaattaccatctacaaacttaattcttttcctgagatttttatctaatktttttgtttacacacagattttattgtttacaggcagatggctgaagaaatcttgcttatttacagttttctacctgtttaactaagtgcttaatataaa

SEQ ID NO: 238560 - DNA, 201 bp, Homo sapiens
gtctactgatttaaatgttaatcacatctaaaaaatactttcacagcgacatttaaattggtgtttgaccaaacgactggccaccataacctacctatggygacacataaaattaaacctcacggaggtagttgttgccttttcaagattcccttttcaagttacacaatagcatattccatgctcttcccttaacacact

SEQ ID NO: 238561 - DNA, 201 bp, Homo sapiens
tacaggcacacactaccatgcctggcttttttgtgtatatatatgtgtgtatatatatatgtgtatatatatatatatatatatatatatatatatatatatatatatatttttttttttttttttttttttttatagagaaagggtttcaccatattgtccaggctaatcttgaactgctgagctgaagtgatctgcctg

SEQ ID NO: 238562 - DNA, 201 bp, Homo sapiens
ggctcttagtaatacatttaaattaaaaacctacgttattcctggtacttacagtggcactaagtacattgaaaatggattgactgaaagccagtcttccrtttaagttatagtaaaatctttctcaaccttgctatggactgaactgtttcccctggctctccacccccaaattcagtgctgaagttctaacctgcagca

SEQ ID NO: 238563 - DNA, 201 bp, Homo sapiens
actacaggcacacactaccatgcctggcttttttgtgtatatatatgtgtgtatatatatatgtgtatatatatatatatatatatatatatatatatatatatatatatatttttttttttttttttttttttttatagagaaagggtttcaccatattgtccaggctaatcttgaactgctgagctgaagtgatctgcc

SEQ ID NO: 238564 - DNA, 201 bp, Homo sapiens
gtcagtttctaattgattattgttgtggttgtggacaatacctgaatgatttcaataattttaaatttattgagatgtattctttggtttagcatatattrtgtgtgcatttgaaaataatgtgtatttcgctttgttgggtggagtgctctctgaatgtcaggtctagttgattgtgttgttcaagtcttctatacccct

SEQ ID NO: 238565 - DNA, 201 bp, Homo sapiens
agtagagacggggtttctccttgttggtcaggctgatctcaaactcccggcctcaggtgatccaccaggctctgcctcccaaagttctgggattacaggcrtgagccactgcacctggctgacatgtggggcttattatagttcaaggtgagatataggtggggacacagccaaaccatatcaatttcctagagccattca

SEQ ID NO: 238566 - DNA, 201 bp, Homo sapiens
ggactacaggcacacactaccatgcctggcttttttgtgtatatatatgtgtgtatatatatatgtgtatatatatatatatatatatatatatatatatatatatatatatatttttttttttttttttttttttttatagagaaagggtttcaccatattgtccaggctaatcttgaactgctgagctgaagtgatctg

SEQ ID NO: 238567 - DNA, 201 bp, Homo sapiens
gcatttgaagatgaagctgttatggctgtgcataggacttaatggtctttagggagcctgataaactgagaaacagattgcagtaattttgcattggtgamccagtaggctgacttagtcgcttaaatttcacatttctttaacatgctgaaacaaggaaattttaaagtgttctaaaagaacagaaaagtttcatgggag

SEQ ID NO: 238568 - DNA, 201 bp, Homo sapiens
acatattttcatttctcttgagtaaataccaaggagtggaactgctgggtcataaagagattgtgtaattagctttatgaaaaactgccaaactaacttcyaaaattgtaatacaatttttcacttccactagcaatttaggagagttctacttgcttcattttcttgtcaacacttgacaatgtctgtattaatctgttc

SEQ ID NO: 238569 - DNA, 201 bp, Homo sapiens
ttatggattatgcttttagtgtcttaatctttgcctaatctaaggtcacaaaaattctctcctgttttctactagaagtctttgtaatattagctcttacmtctaggtctataatcctatttgagttaatctttgtgtatggtttgaggtaagggccgaaagtcatatttttgcatatggatatctaattgacctggaaac

SEQ ID NO: 238570 - DNA, 201 bp, Homo sapiens
ggagaatcgcttgaacccaggaagcggaggttgcaatgggctgagattgcaccattgcactccagcctggacaacaagagcaaaactttgtctcaaaaaawaataataataagtttgctgtgaggattcagggaagtgaggtgagtgaagcacttagaatagtgtctgccacctagttggtgttcacaaagtattgattat

SEQ ID NO: 238571 - DNA, 201 bp, Homo sapiens
atacctgtgtatgactaagtgatgaccttcagtttctatgttttcttttctttttatttatttatttttaaattcacaaataaaaatggtgtgcaacatgtttttttttgaaattgtggaatggctaaatcaagctgattaacatattcattacttcacatgctcatctctttttgtggggagaacatttaaaatctctct

SEQ ID NO: 238572 - DNA, 201 bp, Homo sapiens
ttgttgatttattttttttaatgattttcaagttctcagtttagaagcatgattggctgatagtttctatgactcaagatgaaatgtattcactgcttaaytgaatgcaacagttgtgttttgtttacaaaatcttatctaaaatgaatgctttctgccacacatcaagtcagctactgtaggcaactcttttagtccagc

SEQ ID NO: 238573 - DNA, 201 bp, Homo sapiens
tcagcctatttgaagcatagaatttcttcatggcttatttcatatttaccaggaccatttccaaagcatatttttcctcttgtaggatatgactttttttaaaaaaaaaatttgttcctattgacataagttataccccaaattaaactgaccttttattttattttattttttattatactttaagttctggggtacatg

SEQ ID NO: 238574 - DNA, 201 bp, Homo sapiens
cttgtcctcaagtcccacaggggcaatgtgacatagactcaggtggacactgctcatgcagtggctttgcatcacagttgaggaacactgggcttgggaayccattttacaccgtgaacagtaggcaagcctgctctttgtcccaatgggaaacattacctcatccctcaaggtggcttgaagcaaacataatgtgagaag

SEQ ID NO: 238575 - DNA, 201 bp, Homo sapiens
tcccacaggggcaatgtgacatagactcaggtggacactgctcatgcagtggctttgcatcacagttgaggaacactgggcttgggaacccattttacacygtgaacagtaggcaagcctgctctttgtcccaatgggaaacattacctcatccctcaaggtggcttgaagcaaacataatgtgagaagtagcctgggtaa

SEQ ID NO: 238576 - DNA, 201 bp, Homo sapiens
atcttcttccatttgtattttatcccaattcttcacagatgagttaacaattgtggtgctgtagtacaccagggattatcaccactgcaattacagccagmaatggaattcttgttgccatatgtctaacaagttacccaattctgctaacataccctgagtatctgctacttaatataagacaataatgtctttgcatat

SEQ ID NO: 238577 - DNA, 201 bp, Homo sapiens
atccaattattatttctaacagcacagtggcattttatctgcacctcttctgctgtgcatctctctcattctattatacttaagtaattaattagtattaattatattatacttctattataattattataattctattataattaattaagtaagggtatcagctcccctacgaaactataagatccctgaggctagaat

SEQ ID NO: 238578 - DNA, 201 bp, Homo sapiens
agtgaatggagattgaggtggctaagaagtggattatttgaccttaagggtttaaagtggaataatatgataaaagcaacttagtatttattgagctcctrtttgtgctaggtatggtgctaagcacaatggggaagattactattctctagaatctcagcgttttgagaaaaaaatactgaaatactgtgcatgctacag

SEQ ID NO: 238579 - DNA, 201 bp, Homo sapiens
caggtgagaggaaaaaaatatagatcattaatactgaagtaactaaaatgttcagagtaataatgttgctgcagaattgctgttctctgaagatttttttwaaaatcaaagcgctactgtttttcctaatttattttcttgaatgtaagttttaatgatacaagggttgttgcgttatttgttgtctggaaattccatcct

SEQ ID NO: 238580 - DNA, 201 bp, Homo sapiens
tccaattattatttctaacagcacagtggcattttatctgcacctcttctgctgtgcatctctctcattctattatacttaagtaattaattagtattaattatattatacttctattataattattataattctattataattaattaagtaagggtatcagctcccctacgaaactataagatccctgaggctagaatc

SEQ ID NO: 238581 - DNA, 201 bp, Homo sapiens
tgaagttactgatgggaaggcattgagtagttagagatcatttgtggattaagagtgcaaccacccagtatccttttagtaaattccttttctgaccaagyttcacctgacagatataaacacaggcgttaatgaattcaaggcagaacataaaacttgatttaggagaataagaaagggagaactttaaagcttgctgtt

SEQ ID NO: 238582 - DNA, 201 bp, Homo sapiens
aaaaaatatagatcattaatactgaagtaactaaaatgttcagagtaataatgttgctgcagaattgctgttctctgaagatttttttaaaaatcaaagcrctactgtttttcctaatttattttcttgaatgtaagttttaatgatacaagggttgttgcgttatttgttgtctggaaattccatccttttactttcaaa

SEQ ID NO: 238583 - DNA, 201 bp, Homo sapiens
ctcaaactgtgcattacataatgcttcatacaggtatcatggtaagacagtctttgtaactgaggtttgttagtttggaagcattccaaacttccattcckataagtttctattgtctctttaatgcccatagaggtattctaagtaataagtattataaagaataattgtttggatttttgaagcttaatgtgttataat

SEQ ID NO: 238584 - DNA, 201 bp, Homo sapiens
gagcactatgaaatagttgttatttaaaagatctttgtgtcaatacagtgactttgaaactagtgtgcattggagtctctagaaggtcttgttaagatccrtattgctgcccctagcaccaccacccccaacagtttctacttcagtaggcttgggaaggggggccgattgtttgcatggctgataagttccctggtaaag

SEQ ID NO: 238585 - DNA, 201 bp, Homo sapiens
caattattatttctaacagcacagtggcattttatctgcacctcttctgctgtgcatctctctcattctattatacttaagtaattaattagtattaattatattatacttctattataattattataattctattataattaattaagtaagggtatcagctcccctacgaaactataagatccctgaggctagaatcaa

SEQ ID NO: 238586 - DNA, 201 bp, Homo sapiens
tccaggactgagaaaaaaaatggcctgcatcaagtggtatcccaaaaagctttttgagctctttcatcaccgtatcagcttcataatgaatgactaataaygatagtgccgaaacaaaggaattaccctaatgaggagtcttgctaccaccatgctttgctgaggtggacaatgaaaacttgagcagaaactataatttat

SEQ ID NO: 238587 - DNA, 201 bp, Homo sapiens
ctcatatacaggtaattatgacaactaagtaactatgttttggaatcccctaaacttagacattaagatgattttatgcacatcattttcatatttaacaraattagaattttaaaatatgcctaaatttgtatacatcgattatcttgtatgcaagttcccaaaatggaaattttagtggattaaatgttgaagtcaaga

SEQ ID NO: 238588 - DNA, 201 bp, Homo sapiens
attttttcagcgctcctccgacaggcacttaaatcttccaaagaatttcccctgcctccaagaagttgaaagaaacttttggctcttaactggtaaacatyagggcaggggtagagatgtttcttaaaaattcatttttttcctgtctgtctccagcctatgttcaacttcctaatagtctctctcttccctcttagagaa

SEQ ID NO: 238589 - DNA, 201 bp, Homo sapiens
tgatcctcccacctcagccccccaagtagcagggactacaggcacacactaccatgcctggcttttttgtgtatatatatgtgtgtatatatatatgtgtrtatatatatatatatatatatatatatatatatatatatatatatttttttttttttttttttttttttatagagaaagggtttcaccatattgtccagg

SEQ ID NO: 238590 - DNA, 201 bp, Homo sapiens
agtatccaagtggggactctgtgtggaggcttcaaccccacatttcccttccatactgcccaagcagaggttctccatgagggccccaccccagcagcaarcttctgtttggacatccagatatttccatacatcctctgaaatctaggtgaaggttcccaaacctcaattcttgatttctgtgcacttgtaggctcaaca

SEQ ID NO: 238591 - DNA, 201 bp, Homo sapiens
ctcccagctgctttcatgcactggcattgagagtctgtggtacctatccacgtgcacggtgcaagctgtttgtagatctgctattctggggtctggaggayggtggccctcttctcacagctccactaggtagtatccaagtggggactctgtgtggaggcttcaaccccacatttcccttccatactgcccaagcagagg

SEQ ID NO: 238592 - DNA, 201 bp, Homo sapiens
tttgagatccattcatcctgagtctctaggtgtatgtctcttgccaaatttggaaggcttttatttattatttctttgagttttcccacccccctgcttttcatctggcatcttttcatctggcatcccattaccttcactgtggtttaaaatttctctcaaagttgctaatctggggcaactatacagtttattctgttt

SEQ ID NO: 238593 - DNA, 201 bp, Homo sapiens
atttgagatccattcatcctgagtctctaggtgtatgtctcttgccaaatttggaaggcttttatttattatttctttgagttttcccacccccctgcttttcatctggcatcttttcatctggcatcccattaccttcactgtggtttaaaatttctctcaaagttgctaatctggggcaactatacagtttattctgtt

SEQ ID NO: 238594 - DNA, 201 bp, Homo sapiens
tatttgagatccattcatcctgagtctctaggtgtatgtctcttgccaaatttggaaggcttttatttattatttctttgagttttcccacccccctgcttttcatctggcatcttttcatctggcatcccattaccttcactgtggtttaaaatttctctcaaagttgctaatctggggcaactatacagtttattctgt

SEQ ID NO: 238595 - DNA, 201 bp, Homo sapiens
aaggataaaggagtatatacttttatatgcctctacatcataatctaatttgtagttgttatttcctctcaggggttatgagtgactttcatttttttackttgcattttttgatactggttcaaattctctacaataatatgtattttatatttagaaaaaaatataaaatgttgccattgatatcatattaaatgagtt

SEQ ID NO: 238596 - DNA, 201 bp, Homo sapiens
attggtctataaatctgttttggtaccagtacaaggctgttttggttactgtagccttgtagtatagtttgaagtcaggtagcataatgcctccagctttkttctttttgcttagtattgtctttgctatgcgggctgttttttgggtccatatgaaatttaaagtattttttttctaactctctgaagaaagtcagtggt

SEQ ID NO: 238597 - DNA, 201 bp, Homo sapiens
tttttgaacggtggtttgtagctctccttgagaggtccttctcatcccttgtaagttgtatttctaggtattttattttctttgtagtaattgtgaatggmagttcactcatgatttggctctctgtttgtctgttattggtgtataggaatgcttgtgatttttgtacattgattttgtattctgagactgctgaagttg

SEQ ID NO: 238598 - DNA, 201 bp, Homo sapiens
aattattatttctaacagcacagtggcattttatctgcacctcttctgctgtgcatctctctcattctattatacttaagtaattaattagtattaattatattatacttctattataattattataattctattataattaattaagtaagggtatcagctcccctacgaaactataagatccctgaggctagaatcaat

SEQ ID NO: 238599 - DNA, 201 bp, Homo sapiens
taaggcaggagaattgcttgaatccaggaggtgggggttgcagtgagccaagatcgtgccactgcactccagcctgggcgacagagtgagactctatctcaaaaaaaaaaaaaaaaagaaaagaaaaaaagaatgagaaaatcaatatactctacagcataactgtactgataacttgtatataattttgtagcattaaaa

SEQ ID NO: 238600 - DNA, 201 bp, Homo sapiens
ttattttcccttcattgaagatgaggaaatttaaccttaactattttaaaaaattttctggggatcacataccttgttagatgaggagctgggattctaaycaaagcaggccattccagagttcatgctctttattctctaccagagaaggctgcttaatcattgaagggcacataaacttaatatttaatcatttgaact

SEQ ID NO: 238601 - DNA, 201 bp, Homo sapiens
actttcctttgcccatactggcttattaaagactattaacataaagcaaatccttaatttaagagatacattatttttcttaaagatctgtgattatagcyaagtagtaggtcccaaataaatgacaaaaatgctggctggttttacatcagcatagtatgggtgagtttaagtgcactagtcttctcaaatctctaggag

SEQ ID NO: 238602 - DNA, 201 bp, Homo sapiens
agtgtcaggaaattcattgcctataggcatttcaaatttgaacttaacttgttagaaaatactttcttaaaatgaaatctgtcttcctatcagtacaatgtttttttttttttctcttttagtggaactggaacaggaaggatttaaactttctcttgcatagtttagctctttaaacattgaagacaattgtatcagcga

SEQ ID NO: 238603 - DNA, 201 bp, Homo sapiens
tcagtttttatgctcctccttcatgaagctatttctgatcctctctgttaaaatgaatactcaaaactttgtgctcacatagtgctttgtttatatctctyctatggctttgcactataattatttatatacattcttgtcttttctagcagttggcaatttctttgaaaatggagcattcaccgtattcattcttactgc

SEQ ID NO: 238604 - DNA, 201 bp, Homo sapiens
cccctcttaaggggattaaggccctttcaggaaaaaaaaagggcttcattttcagttagctttcctttctgccttctgcctatctgaagatgtagtaaaamggccctcactaaaccagaggctgacaccttgatattggacttcccagcttctgtaactgtgaggaaatgagtttctgttctttataaattacctagtctc

SEQ ID NO: 238605 - DNA, 201 bp, Homo sapiens
aaaactcagctttttggtaacttgtctttctttctgacatagatgaggacttaaccatttgaccatcgggtctgtcttatagacctttatctcagctttgrtttcaaaataattttctgaaaaagaatacagtgtcttaatagtctacttctttaccagctgccaaatgaaagaaaagtgcttctatgaaggacaagtaaa

SEQ ID NO: 238606 - DNA, 201 bp, Homo sapiens
tgtctggaaattccatccttttactttcaaatttctgaggaagaatttgatgcaactttctttctagaggatccagggttctcagcttgtaattcttaaakaattcttacagagggtaactgatgactgtcaattctgtggtatacctttaaaatatcagctaatgaatggaaaggttctaaatcttgaaaagagtacctg

SEQ ID NO: 238607 - DNA, 201 bp, Homo sapiens
aaataaaaatagcaaattttgtactattattcagaaatacataattttgatgagaatagattctgagtgtactacaagaatataccttgaatattgaataktctcactattgtggaatacatattttaaaaagaaataattatcaaattctgtgtgacagataacctaagcagaaattagggctaaaacatgttaaagtgt

SEQ ID NO: 238608 - DNA, 201 bp, Homo sapiens
agtaacagtcatgcttcctgagcatctgtttcacctcccaatgatgcaaaacgatatttaggggaggggaaacacaatgaatatatttattctccaaattkcatacaaatattattaaacaaaattttaaaaattttctttgaatgtcagaatttaaatcctatgaataggcaaatagttttctccaaaattcagcaatgc

SEQ ID NO: 238609 - DNA, 201 bp, Homo sapiens
agagaagcacacataaagtacagtgacagaagaagggaaaacacttgcaggtgaacactgaagggtgaataggattctgacaggcaactggaagaaggaargaacattagcaaagtggtataacatcagctaaggcgtgggaatctaaaagtgcataaagtgtttgggaaagtctcaggaatagggagaattcttcattgg

SEQ ID NO: 238610 - DNA, 201 bp, Homo sapiens
cactgacattaagaacaggcagattaagtgtggcttgccattacagatttagtttttatgacaaatatgttaggagaacttagtgtgcatgccaggccagscatatggttcttctttgaggtataacccattctcagtagccaaggaagtgatttgaatgtccttaaacattgtttttagctacttagagttatttaatac

SEQ ID NO: 238611 - DNA, 201 bp, Homo sapiens
tgttttttctgttccagataatattgtttcttatttttacttggatttatactacagtttttaaattttgtaaatttagaaaatattatttcttgagcctrtgtgaagctgtatttttctctcaagtcttctttggcaaatttcctcttcatcagtgcggcctacacaaagacagagccctcataccccagcaccttagga

SEQ ID NO: 238612 - DNA, 201 bp, Homo sapiens
tttcatgtttgtgaaagtagagaaaggttttaaatgtttgagaatctggtgtatttaaaagaaaatatgtattatagccagagaattctgtatttgaataycagcctggcttgttgtatgctggggcacctgacttatacttcctaagtcttattttattgatctgtaaattgggaataatcaaattttcagagttagata

SEQ ID NO: 238613 - DNA, 201 bp, Homo sapiens
agctctgtctttatccaggactttgtcattcttctgtgtttgtactgcagcagcttatttcctacttgtttccttgtccctattttccactcattcttccrctttatgctctaaactgttgctggattatgttccaaattaaacaaatcctattagtctctcatgttcccagagggaattggtatattttttctgcagaaa

SEQ ID NO: 238614 - DNA, 201 bp, Homo sapiens
caaagtttgaccacataaattacctcatttttatgttaaagtcccctgttaccctactgatcacatggatgagttagaataatctgatgtgcatcttgctyatttagaacctgtgcagtacatcttcaactcctggatgcatctgcttagcaaggtcctccaaccagatttagagacttattcaattactgctcagagaca

SEQ ID NO: 238615 - DNA, 201 bp, Homo sapiens
ttagtgtaagtgtgaagtcagaacacatgaaaaccacatttctagcttgcaggactgggcgaatgttggtgccatttatataaaattcagtgtaggtgggwaagagcagatttgggggaaagttcatgagctccagctggggttatggaaggtgaagttattggttaaaattctaaatagagaactcaagtaggaggtgct

SEQ ID NO: 238616 - DNA, 201 bp, Homo sapiens
cagctaattgctaattttgtcatttctacaataaagcttggtccacctgttttcaccttagattgtcccttttctaaacgtcaaaaatgtagtgcaaattaaaaaaaaaaattatcttttacattaattctaccatttgtcctaagggatagatatctttgaaaacatgtttatattatagtgagagtgaatggcagggat

SEQ ID NO: 238617 - DNA, 201 bp, Homo sapiens
gttcagaaaatttgcagcctaacaatgcaataggaaggaaaatcccattttctgaggagaaatccaaaccagctgcagatatttgcataagtaacaaggarccaaatgttaaaccccaagacaatggggaaaatgtcttcaggacacatcaaagatctttgcagcagtccctcccattacagacctggaggtctaggagga

SEQ ID NO: 238618 - DNA, 201 bp, Homo sapiens
tatctaaatggttactctttgggaacaaaattaaactcagttaatataattattattattattattattattttgagacagagtctcgctctgtcacccasgctggagtgcagaggtgtcatctcggctcactgcaacctctgcctcctgggttcaagcgattctcccgcctcagcctcctgagtagctgagattataggc

SEQ ID NO: 238619 - DNA, 201 bp, Homo sapiens
agctgtgagagtgaagtctccatttacttgctggttgttagtcaggggctaccttttagcttctaaagactgctcttcttccttgttcttgagcccttccmtcttcaaaccatttgtcaaaacgttctctagctttatatctttcttatttgctcttctgccttcttatatcactgttcaaggaaaactctgcttttaaag

SEQ ID NO: 238620 - DNA, 201 bp, Homo sapiens
ctatttattagtgaaaagttctgtgggtcagaaattcaagcatgctaggctgggatgtatgtatggaatatcacaagaatgaaatcaaggtgttagctagkctgggctcttatctggaagctttgggaaaatctctggctccaagtgcaatatattttggcagaattcatttcttttcatagctgtgagagtgaagtctcc

SEQ ID NO: 238621 - DNA, 201 bp, Homo sapiens
tttctttggttaagtaacaagttattataaacagtagcttatgacacctatttattagtgaaaagttctgtgggtcagaaattcaagcatgctaggctggkatgtatgtatggaatatcacaagaatgaaatcaaggtgttagctagtctgggctcttatctggaagctttgggaaaatctctggctccaagtgcaatata

SEQ ID NO: 238622 - DNA, 201 bp, Homo sapiens
aggccaactctttgctctccaggtctttgcagcccaggctgctagactgtaagcataaaatgaacaaaccaaccagtggacatatggtatggcatctagtrgtggtcagtgctaagaagattataacagggtaaggctgggcatggtggctcacacctgtatacaatcccagcattttgggaggctgaggcaggcagatca

SEQ ID NO: 238623 - DNA, 201 bp, Homo sapiens
cctgaactaacaatccattaattacctgacattcacaaaccctactttaactggaggaccaatattgatgttttgggtcccctggaatcaatgtcagctcagagccagtgtccagcagcccctcaaaggtctggtcattcccctttccccagtgcagttaccctgtggtctggtttggctgtgtccccttccaaatctcat

SEQ ID NO: 238624 - DNA, 201 bp, Homo sapiens
taccgtattttttcttaatctatccttgtgttccattaaaggaagttttgagttttccttttgcaattgtttttaaccatagaataagctaaaatttaagwttaatttccacaattgctgagttttttgttatttatttatttattttgcctcttgttggtggggataatataccttaaaaactaaatgtttacactagta

SEQ ID NO: 238625 - DNA, 201 bp, Homo sapiens
tgagggaaggaaggaaggttgaatagatgaagtatagggattttttttagggcagtggaactaccctgtatgatactgtaatggtagacatatgtcattayacatttatcaaaacccatagaatgtacaacagaaagtgtgagtcctcatagaaactatggatgttaattaataattatgtattaacattggctcatcaac

SEQ ID NO: 238626 - DNA, 201 bp, Homo sapiens
ttattgagttacttgcagatgttcattctattcattctaaaataatttcctcttatctactccatctagttacaattcagtctcttccttccattcatttrtcttcaaaatgtagaccaggaatcgtcctctgcttccatgtcttcccattaacttcttctgtcctttgtgaatacacctcttctcttaatctcaactgtc

SEQ ID NO: 238627 - DNA, 201 bp, Homo sapiens
gagagtgctggcagagtcttcagctttaactatggtggtcagagtggccttgatgagaaagagatggagcaaagacttgaagtggatgagggaacaagccwcacagaacctgggggaagagtattcctggcagaggaaacaaccattacaaagactgtttaagcaggagcatgctggtatgttcaatgaatagcaggggag

SEQ ID NO: 238628 - DNA, 201 bp, Homo sapiens
aaacttccacaaataatccactacatttccagttagactttcaccacctttaggagcccaggaaattcactatcatttttcagaaacttgtaatatatcasctgtttactaaagtgtgagacaactgggttaagatatctccgatgctcattctaattcaaggatgagtcaccttaattttccatcttagtgttctatttc

SEQ ID NO: 238629 - DNA, 201 bp, Homo sapiens
attcagtgttagatgtctattaattatctaagtggagatggtgatgggatagagagctttaggctaaagatataaatgtggaagccatttataaataaagsctaaataaataaataaccaaataaagcctaaataaagacttgaaaatagtcatcccattttagcccccaaaacaagccagggtatcctggttgattctaa

SEQ ID NO: 238630 - DNA, 201 bp, Homo sapiens
agcagtgagtggctaacatgtgattcaaagcatgtgttctctttgcctttctgtgccatgaagtcaagtcgagctaacgttaattaacattttaaaatttyttaatcctgaatgatttttatattgacgcttttgcctgttcatcatccttccatttcccctgcacctccatttttttagtattaatagtaatgactagaa

SEQ ID NO: 238631 - DNA, 201 bp, Homo sapiens
taatagaatcaaaagagaagatgagaattttagaattaagtacatacatttgccattagtaggcaaaaggcaataataagtttcaggcttagaaatccaayaaggaaattgaacgaactgctacatttgagaaaataactgtagaaaatgtccttcctgttaaaagctaaaagggcccctcttgaaatctgctttttcttg

SEQ ID NO: 238632 - DNA, 201 bp, Homo sapiens
aatgaaaccaaggtagatcaggcatccccagctcactcctggggtggtctattttttgatccatgtttcagccagtcagccaaataaacttatagtgcctkttttcactccttgagcttcaatattaaatgcagaatatatgcttagtgggctcatatcaataaatttgaccttattctttgtttcttccaccataatccc

SEQ ID NO: 238633 - DNA, 201 bp, Homo sapiens
tagaaagttgttgcatatgcaaagtgtagtgcatcttttaatatgatcaagttcagggaaggatatctttacatggaaactaaagtcacattaattttgcrgggtgattgtgaatagagaatatattacattgtcacattgtagatgtttagtaaaaaggtgactatagttatcattattgacacaaagggagtctgtaac

SEQ ID NO: 238634 - DNA, 201 bp, Homo sapiens
catgagctgattgctgcactttttccctgtgaagtgaattcctgggtcagaaacaatgctgtgtggaataggatggcagtgaataagtcattacataagtytacagatggtagttttggcaatagcattgtatgcagggaagacaaatccatatccatactaagtgtctatgccagtaaggacaaaatgctgccccttctg

SEQ ID NO: 238635 - DNA, 201 bp, Homo sapiens
accttgtcccttgtaacactagtgcaccatgagatttaatagatttatcacacacacatatgtgcaccctaacataaacacacagacacacacagacacakgattacaagaggatttcccagaactttataacgtttatgttaagtgtaaatatttaaggcaaagatatgatatttagtgtttcctaaattgacagtggaa

SEQ ID NO: 238636 - DNA, 201 bp, Homo sapiens
caagttcagggaaggatatctttacatggaaactaaagtcacattaattttgcagggtgattgtgaatagagaatatattacattgtcacattgtagatgyttagtaaaaaggtgactatagttatcattattgacacaaagggagtctgtaactaatgataagaggtgaacatgtcaaaagtaatcttttccctgatatt

SEQ ID NO: 238637 - DNA, 201 bp, Homo sapiens
attatgcacctctttaaaccacacctaatctccagatgaagactataaaaaggtcataattctgtccaacatggtgaaactatcctgtttacaagccaacrtgtactaatcccatcctcagaagaaaggataaagttcatgagtgtggtttactcttctgatctcctgcaactcaaatctgatataaaattaacagtattc

SEQ ID NO: 238638 - DNA, 201 bp, Homo sapiens
ttgaaaaccacatctgtcaaactgcaaaatccatgggtagtccaggtatgtcatttccaaatagcttggagtaatagtgtgggaaaataaaaggtgggagrgatttaggtagccactgcttttttttttttttttttggcagatacttttaaaaaataattttgcataaattgattgactaaactccagtgacttacacca

SEQ ID NO: 238639 - DNA, 201 bp, Homo sapiens
ttcgattgcctaatttaatttaacattgtctcctaaaacatctgcatattggtttttctacattaaccaagaatttaaaggatattggcagcagcagatcytgggttgatttatttctgacttattgtactcctttttaattttaaatttgtgtttttaaaaaatttaagcatcttctttgcaattgttttttccctgctg

SEQ ID NO: 238640 - DNA, 201 bp, Homo sapiens
gtctcagggtccaaaggttgagaacctggagctgaatgtccaagggaaggaggataaacagccccttctgtgatggaagtttcctactcagaaagggaaasagagaaagccagagcaagctgagtgtctccctttttctacctgctttgtcccagctgctcccccagctgattggatggtgcccgcccatattcagggtag

SEQ ID NO: 238641 - DNA, 201 bp, Homo sapiens
cctttttattatcatcacatgccagcaattctaaacaacatcagcaataaaatactcctcaaaagttctgtgtttgtctaactcctaaagaattgctgtgratgctgttgagtttaaattatctacttatctatattcatatagaatatgtatggatatatagtatacacacacatatataacatatacatacatgtacat

SEQ ID NO: 238642 - DNA, 201 bp, Homo sapiens
tatagaatttaacttttaattatatgcattttgcttttatttactaatatttgtcttctagctttctagaagtaagttctgagagagaaactctgtgtcartagcttcagtacttggcacatagtagatggtaaaaaaataattcttgaagaatgaatggataaatgaatgcttgaaaaatatgctcaaagtaataatagt

SEQ ID NO: 238643 - DNA, 201 bp, Homo sapiens
tctaaacgtcaaaaatgtagtgcaaattaaaaaaaaaaattatcttttacattaattctaccatttgtcctaagggatagatatctttgaaaacatgtttrtattatagtgagagtgaatggcagggatgaaatgtatcatccaaaaacccaccaggttgtccaaatagtagaaaggtgagttttactggcaatatcagtt

SEQ ID NO: 238644 - DNA, 201 bp, Homo sapiens
taatacattgcatgcgtaaagtatacattttgataagctttgatatatattcatcaaattactactccaatcaagatcacaaaaatagacattaccccaaraagtttccatatgctccttgaaaatttctccctttgttttttctctggcctcctggtcccaggcagccacttatctgcttttgatcactatcaattcatt

SEQ ID NO: 238645 - DNA, 201 bp, Homo sapiens
gtgggaggaagataccagctatgtgaagattatggaagagtgttctagaaggaaagaagagctggtataaagatcataggggaagagtttgtttcagaagrtcaaggaacagaaagaaaatcaatgtgagtaaaccatagtgcatgatgaagagattggaatgagacaagttcagcaaggtaaagcaggggcaagattatg

SEQ ID NO: 238646 - DNA, 201 bp, Homo sapiens
aattttctttgagcagctaattgctaattttgtcatttctacaataaagcttggtccacctgttttcaccttagattgtcccttttctaaacgtcaaaaakgtagtgcaaattaaaaaaaaaaattatcttttacattaattctaccatttgtcctaagggatagatatctttgaaaacatgtttatattatagtgagagt

SEQ ID NO: 238647 - DNA, 201 bp, Homo sapiens
ccacttatctgcttttgatcactatcaattcatttccattttctagaattttacataaatgacattctttttgtcgggtggctgtggtgtcttcttcttcygctgctgcttttttctttaagaagcagggtctcactacgtttcccaggctggagtgcaatggctattcacagatgcaatcctactgctaatcagcacagg

SEQ ID NO: 238648 - DNA, 201 bp, Homo sapiens
aagctatgagcaccacttccaactcttaaccataaagccttccacatacaaccatccatgttctttccctctccaccggcttaatgtgaatacagcgactrtggaagaagccatgtattgaaaatagtgacatcatgtgatggaaagagcttaggtccgaaatcactcactaatcaggaactcacaactaagatttcttat

SEQ ID NO: 238649 - DNA, 201 bp, Homo sapiens
tattgtctgggttgatcatggtttgtctgttattttcaatttcattagaattcctataaaaacttaatttcctcattaccctcaggacatttttcaaaatsttaatcactgtacctatgacctacatttgtaattagaaaatatcacgagttactgagttagatggttgcttatatttttaacattttacggtttatttaa

SEQ ID NO: 238650 - DNA, 201 bp, Homo sapiens
tggctattaagaataaagctcttatgaatgttagtgtacaaatctgtgtattaacatattgtgttcattacttttgggtaactatctagaaatggcattgytggactgtataagaaatgcatatttaccgttagtagaacatgctaggttttccacagtgactgcttcattttgtattcctacaatacgtatgtttcaagt

SEQ ID NO: 238651 - DNA, 201 bp, Homo sapiens
catttgctccacaggcttgttttaagcagtttctttgagaggcaaggttcttttaaacatcactaagacaaagcactcattataacgttctttagcatttytttccactggacattttaaaagcaaattgcagtagaaaaccagcatccgtgttatagaacttgacagaatatcacaccttcaaaggaaaatgaagtaact

SEQ ID NO: 238652 - DNA, 201 bp, Homo sapiens
tggtgaatcacataactttttaattgtctaacagagtctgcctcatgagaagtgaattcagcttctgtgttagtttattttcatactgctatgaagaaacwtctgagactgggtaatttataaagaaaaagaggtttaatggactcacagttccacatggcttggcagaggtaaaagaggagcaaaggcacatcttacatg

SEQ ID NO: 238653 - DNA, 201 bp, Homo sapiens
ttttactgtagtaggccgtgtggtggaatccaaggcaaagtcctgtgctcacttctgtctcttccctccaagcaaatggcatctctctccatgctgaaatrcctggggttggggaagaatgatgcgagtaatgtaaaattgtccttcccatcctccgtattatatcttttctcactgttttgctacagttagatactgtga

SEQ ID NO: 238654 - DNA, 201 bp, Homo sapiens
agtcatccctgaaaagcctgattattttcctttccctgatacaaggccagaggtccctttggggaagtataagagaaagattaacagtataaattttatgyagtgcaccagagtctttcctcaacaggacctggtctccccttcacttaaagggctctgggtctgtaaactggctcaagtctagaaattgattgaggggca

SEQ ID NO: 238655 - DNA, 201 bp, Homo sapiens
ccttctaaggagggcccatatcaatataactcccagagctgcaacgttaaatgcggatatgggccctccttagatggcccatatctttcaggccatatcarcctgaaccaactttatattctttccaccattatctcacacccttaatatccattttcagagccgttctccagatttctgcttatattagaaaactcaagc

SEQ ID NO: 238656 - DNA, 201 bp, Homo sapiens
agtggagctgtgagaagaaggctactgttctccagaccccagaatggtagatccacaaacagcttacactgtgtatctggaaaagccacagacacaacacyagctcaggaaagcagccaggagggaggctgtaccctgcaaagccacaggggcagagatgcccaagaccatgggaacccaccccttgcatcagcgtgagct

SEQ ID NO: 238657 - DNA, 201 bp, Homo sapiens
gaagtgaggcctatatttgacattgtaatgagtatttcctatgagataaatgacctcaattatctatttcttgcacaaccataaccaagtcttgaagaagmcttaaaagggaaatacccacaggtagataaatttgtgctatgttgtttcttagatgcatgaaaaaaacactgcttttcacttcccagtcaatacaaccag

SEQ ID NO: 238658 - DNA, 201 bp, Homo sapiens
gagccaaatgttaatcaccaaggcagtggggaaaatgtttccaggcatgtcagagaccttcacagcagtgcccccatcacaggcctagaggcctagtaggaaaaaaaaaaaaaggttctgtgggtagggtccagatcttgctgctgtgtgcagtctagggacttggtgccctgcatcccagctgtggctaaaaggggccaa

SEQ ID NO: 238659 - DNA, 201 bp, Homo sapiens
gatttcaaacttgcatggggcctgtggccccttcattttggccaatttctcccatttggtataggtgtatttacccaatgcctgtgccctcattatatctrggaagtaactaccttgcctttgatttcacagtctcataggcagaagggacttgccttgttacagatgagactttggactgtggacttttgcgttaatgct

SEQ ID NO: 238660 - DNA, 201 bp, Homo sapiens
aacattttggaatagataatcttttttttttttttttcgagatggagtctcactccattgcccaggctggagtgcaatggtgcggtgttggctcactgcartctctgcctcccaggttcaagcaattctcctgcctcagcctcccgagtagctgggattacaggcacatgccaccacacctggctaatttttgtattttta

SEQ ID NO: 238661 - DNA, 201 bp, Homo sapiens
taactaccttgcctttgatttcacagtctcataggcagaagggacttgccttgttacagatgagactttggactgtggacttttgcgttaatgctgaaatragttaaaaccttgggggactgttgggaaggcatgattggtttggaaatgtgaggacatgagatttgggaggagtcaggggcagaatgatgtgatttggct

SEQ ID NO: 238662 - DNA, 201 bp, Homo sapiens
cactattactttaaagatgcaagcagttttccatcttgcaaaggtaaagatagaaatacacttttggtactgaatatttctttgtccagaaaataaccatragtattgacataatggtaaagcagaggccatgactacaagtggaggtgttaaaaaaagccaagatgagtcgaatgctctgctctgagtgattgtgtataa

SEQ ID NO: 238663 - DNA, 201 bp, Homo sapiens
ttcaagtattattttatagagcagttaaaccatctctaaagactgttattagattaaaacaatacaaagggtaagcagaaccaatattttagttgattctygctatcccaggattgtcagaagctcttcattatttctgatttcagaattcaggaaattgtaacacttgaatttatctctctctcttctcattttggcttt

SEQ ID NO: 238664 - DNA, 201 bp, Homo sapiens
aaaaaaagccaagatgagtcgaatgctctgctctgagtgattgtgtataaaatagtatggagtctggagacaatcaaattatgttataattaagtacaatwgctaggaagattgaagccaatttgcagccattagtaagagcaaatcaacatacaatgtatttgtgtatacttataatcctgagttttcattttaaaatat

SEQ ID NO: 238665 - DNA, 201 bp, Homo sapiens
taaccaagaatttaaaggatattggcagcagcagatcttgggttgatttatttctgacttattgtactcctttttaattttaaatttgtgtttttaaaaawtttaagcatcttctttgcaattgttttttccctgctgcatattagattttaatctcattaatgttaaaagatagctcatttttctttggtgcttttttta

SEQ ID NO: 238666 - DNA, 201 bp, Homo sapiens
cagatcttgggttgatttatttctgacttattgtactcctttttaattttaaatttgtgtttttaaaaaatttaagcatcttctttgcaattgttttttcyctgctgcatattagattttaatctcattaatgttaaaagatagctcatttttctttggtgctttttttatatttatgtttctctgcctcctgtcagatca

SEQ ID NO: 238667 - DNA, 201 bp, Homo sapiens
tttccctttggatttaggcttaggctttgatattagcgatgatcaaagaatatgtttcctggcaaggaggagaaaaaacgttcctcaacagccttttggartcactgagattgaataaatgttgacattgattcaagcccacattctgatctgcagacatttctttcccaaacagagctaggaggaagagtacattttctt

SEQ ID NO: 238668 - DNA, 201 bp, Homo sapiens
ctttttttcagggaaagcgttaattgaaaaataccatttttaaattctgatttacacatttttttccacattgtaatgtctctgaaatcatgtgtcatatraatggtgttttacaatcacttttggggatatggcaatcatgacatacaggattaaacaatatgaaattgccaatattgaactgttttcgacctacaagaa

SEQ ID NO: 238669 - DNA, 201 bp, Homo sapiens
ttgcgttctcaaaataagaagtgagaaatgcatttgcaggaggcctacccaaattagagttctagtaagagtggaggtggagaggacatttaactacacawgccttatcgaggttctggcattctgctttgggtgtgtgcatcatttctctatgcaatgagaaccactgtgtattatgagatatgattggagtatgttaca

SEQ ID NO: 238670 - DNA, 201 bp, Homo sapiens
agcaatagatttgatacagactactgagcagattgtagcttattactttcatcatttcctgtagaatcatcacatttttagagctataaagtactgagagwtaatctattttaacctctttgtattaagatagaaaaactagactccactaattgtaactggaaatatttacccttctacgaattagccttcctactctcc

SEQ ID NO: 238671 - DNA, 201 bp, Homo sapiens
acttgaatttttattttcttaatggtatttttaaaactgtctcttttaaatagcagaagtttaattgtgatgaagtaaactttatcaattttcttttatgrttagtatttttgtgtctcaagaaatttttgcttgtgctggggttacaaagattttcctgtattttcttttataagctttataattttatcatttatgtgt

SEQ ID NO: 238672 - DNA, 201 bp, Homo sapiens
cacctagttaggtctgctgcttatggcatctgaaaaccttcagaattatttcctatttaaattatgtatatgtactgtgaagtggttagttggtatagtgytgtatatctattaaatgttagccagggaataaggtgataactattaactctaatttatagtgaataagcaggaattagacctgcctgcttaatgttaaat

SEQ ID NO: 238673 - DNA, 201 bp, Homo sapiens
gggctcatactatgccattgtgctaagcacttcacatatattacttcatttaattttctctacaaatcaagtaaaagtaaagcaaactattcattttccarctttacggatgaaaacactaagacttacagaggataaataacttgcctatattaaagtttcatgataagtagtggagttgaatctgtacctttccattga

SEQ ID NO: 238674 - DNA, 201 bp, Homo sapiens
ttgtaactggaaatatttacccttctacgaattagccttcctactctccggaagatactaaaatttcaagcctatagtacaagtaaggctattatttaatytgtcctagtcaaatacttgggggttacaatctttctttttgggaatgaaagttaacatgttcatgaagtggtttttcagaacaatcaacatttgacataa

SEQ ID NO: 238675 - DNA, 201 bp, Homo sapiens
tgccagcaatgcctattagtactcaccagtgggcctcactcttccatatctgttgcttagagaaagtaaaaattgattttttgaaagtaacgaaaacatgycaatgttactttgtattgaattactttaaaaagttgtatttataaggtatgtgttcttaaaatatttgctattcctttccactatctttttaattcaatc

SEQ ID NO: 238676 - DNA, 201 bp, Homo sapiens
taacccctggatccctgactttttctcagaattctttcttgtttttccctcggaaataactcaaaatgcacagggatggccaaattcagagagcaggtccygtctcagactataactgtctaagtctcttgaatcttccaactcttttctcccttacaccttacttttggtttcatagggggtgaaaaatatgtcactgga

SEQ ID NO: 238677 - DNA, 201 bp, Homo sapiens
tgatctgcctgcctcggcctcccaaagtgctgggattacaggcgtgagccactgcacctggccataatttactttttaaaactcctagaactaataagtamgtttagcaagataataggatatctaatatttacaatagcaacagatattctgaaaatttttagagtaaatctgataaatgatatgcaagatctatgtatt

SEQ ID NO: 238678 - DNA, 201 bp, Homo sapiens
caaactagaatttaaaatcatggacaatgcagcctcaggttatatccttctgttctttcatatatgccatttcctttccttactgcctcttgttctcccaractgattcttgcaataggccaggtaagggctgccaggtcactagccgcttgaaagctgggacctgatacagttgtatcccagagaaaaagaaggtatgta

SEQ ID NO: 238679 - DNA, 201 bp, Homo sapiens
tgttttaaggaccattcctgaaagggattgcaattaagccattgtccttctgtttgttaatgtcataagggacgccctcaagtctggatgtagacaatgcygaggagagttgatgctcatacacctgcttgtccccctatctctctccttttgtcacttgatacatttgtagtcctgtgccatggtgacagtgatgcacag

SEQ ID NO: 238680 - DNA, 201 bp, Homo sapiens
ctatgcatactacattttaatgggcagcttcctcattcaaatgagaggaaggaggagggattgggaaggtgagtggaaaagaatatttcaaacaaattctmtctccacgacatcactttcctttaggctgaccttgatttcttgtcaccagagcaggtgccacatgtttagctctctaagctgatggtatgtcgcaaatcc

SEQ ID NO: 238681 - DNA, 201 bp, Homo sapiens
gtggtatttatctgtagttttatctcacgggtctctgtaagctttctgagcacatgtttttatttgccagcaatgcctattagtactcaccagtgggcctcactcttccatatctgttgcttagagaaagtaaaaattgattttttgaaagtaacgaaaacatgtcaatgttactttgtattgaattactttaaaaagttg

SEQ ID NO: 238682 - DNA, 201 bp, Homo sapiens
tttgggaagctgaagtgggagagtcactagaggctaggagttccagatcagcctgggcaacatagcgaggcctggtctctacaataaataacacttttttwaaaaaagtagctgggtgtggtggcgtgtgtctgtagtcttagctactggagaggctgagatgggaggattgtttaagcccagaggtttgaggttgcagtg

SEQ ID NO: 238683 - DNA, 201 bp, Homo sapiens
tgtaaagcctaaaactataaaacatctaggagaaattataagagaagagccttgtgatcttgagttaggcaaatattgtttagatataacacaaaacatawaatctacaaaattaaaaaaacatgatggacttcattaactatttaaaaaccacaaaggtttgctccttgaaagacattgtacagagaatgaaaagatgcc

SEQ ID NO: 238684 - DNA, 201 bp, Homo sapiens
taggcttcatgtgtcatcaaagttttccactatctgtaaaaaaagatgttaaaatgaggtttgataatggataatcttttacaagccatgacgcttttcayagagtcctagctaaccactaatttaatgaaaagcctcctcctttgtactttcacttcataatctttacaactttgtcgaaatgtgtcaagttgtagtgat

SEQ ID NO: 238685 - DNA, 201 bp, Homo sapiens
gttttataaagtgctgtcaagtcaccttcaaatgtctctttgaacatggaattatacaagggccttggccagaaaacatttgcattagagggctcctggcmctgcgttctctctaatactaagagtagaaggaggagagatgactgtaaatctagttcctttggaatttttagtgcactgactacacagaaacagtcttcc

SEQ ID NO: 238686 - DNA, 201 bp, Homo sapiens
tatgcatactacattttaatgggcagcttcctcattcaaatgagaggaaggaggagggattgggaaggtgagtggaaaagaatatttcaaacaaattctayctccacgacatcactttcctttaggctgaccttgatttcttgtcaccagagcaggtgccacatgtttagctctctaagctgatggtatgtcgcaaatccc

SEQ ID NO: 238687 - DNA, 201 bp, Homo sapiens
atagggaaaggattccctatttaataaatggtgttggagaatactacaaacacctctatgcaaataagctagaaaatctagaagaaatggataaattcctygacacatacactctcccaagactaaaccaggaagaagttgaatctctgaatagaccaataacaggatctgaaattgtggcaataatcaatagcttaccaa

SEQ ID NO: 238688 - DNA, 201 bp, Homo sapiens
taaagtgtgtgtgtgtgtgtgtatgtgtgtgtgtgtgtaactcaggtaccctttataccaaaaccatgttctcatattgataaggtggactattcaaagakatataccagtttaagcaacttgttttattatttttggaaagatttggtggtcaaaacattacatcagaatcactttatcataacatataggtgaccattt

SEQ ID NO: 238689 - DNA, 201 bp, Homo sapiens
ttctgtgttatcatagtagataatgaatgctgccttttttaaaaccacagctatatttataaatacataatttgaacccactcaaaaatttaaataagtgrtttttttccattttctttaataaaacaatgggtttctagggtacaaaactagtttaacttcaattgctattcatttcatggtgtttagttccatagtttc

SEQ ID NO: 238690 - DNA, 201 bp, Homo sapiens
actcattactactgtaggcttaattcatataatgttgatgtttgtttttactgaatgagtactttttaccacttaaaatcaaaatgagttttacaaaatcygacaccatatgtatttgattcacccaattttaacaaatgtcatggaatatagtagaggagtactaggcctaaaatatttccaaagatatttagatttaaa

SEQ ID NO: 238691 - DNA, 201 bp, Homo sapiens
aagagattatcttctgtttgtgaaaaacatctctataatttttccaataccaaatgggtaatgtccatttgcaccagccctgtaacttatctgtttcgtcrttgttagtttgtgcagttatttaggtacatcattaaaaagaagtttttaccttgctgccaccttattactatcattttgccaatttagtcaggcagcaaa

SEQ ID NO: 238692 - DNA, 201 bp, Homo sapiens
aatcaaataccagagtagaagtatgttagtctgttagggctgccataacaaaataccacagaatgggtggcttaaacaacatgaatttattttttcacaaytatggatgctaggagtacaggatcacagtgtcagctggtttggtttcctctgaggttgctcttcttgacttacagacaacaccctttttgctgtgtcttc

SEQ ID NO: 238693 - DNA, 201 bp, Homo sapiens
taagatatgtggttgtactgacattaatagattgtcgaagaagtaatttacactgttggtttctctgccctctctcctcctcctttccttagcagtccctkgtcatttggctttgccttccaccattttattgaagttgaaagttgttctcctgacagtaccacatgcagcccaggtcacccctgaggccattccaaaaga

SEQ ID NO: 238694 - DNA, 201 bp, Homo sapiens
ttcacatcagagtcactggggttgactgaatactgcaggcgctctctcaggctctcctgtcctgacattctacacagccacccctcctctattccttgcaygctgagaacacccaccttgttcagaatgctggataagggaacatgacaaagatcttctctaacccctggatccctgactttttctcagaattctttcttg

SEQ ID NO: 238695 - DNA, 201 bp, Homo sapiens
cagacagcccccattggtttttggctggtatcaccttctgactctgaccccttgctttcccacggcaggcccccacatctttgcttgccacagcttgcttkctctcttttcttctccttctcattgtacttctcagggctgaaggacaggctggtcttcacatcagagtcactggggttgactgaatactgcaggcgctct

SEQ ID NO: 238696 - DNA, 201 bp, Homo sapiens
gctgcagactgctagctggtgccccttgaaatgaatgaatgaatgatagaatgaaaagtttgttttgttaggtccacacagtcgtcttctctctattgttrgggtgaacaaatggccagtagagcttagctgaaaattctggcagttacatccaagaggtatactaggaggatgagtacttggttcttgtttctaatcctt

SEQ ID NO: 238697 - DNA, 201 bp, Homo sapiens
cacagcattcagatcacgctgtttcttctctttacgtcttctcagaagctttattttcgcaagtatctgttagcagaggagttctgagtgtgtatttggcrggcatattttcttcatttaataatggagaaagcagtgggatgaaataggaaagcctagaaaaagaaaagcacatcctaattttgtttgtggacctaatgg

SEQ ID NO: 238698 - DNA, 201 bp, Homo sapiens
aaaaaaacatgatggacttcattaactatttaaaaaccacaaaggtttgctccttgaaagacattgtacagagaatgaaaagatgccatggacagggaaawatatttgcaaaccatatatctgaaaaaggacttacatcaagaatatataaagaactctcaaaattctataaaaggaaaaaggataataaaaataattcaa

SEQ ID NO: 238699 - DNA, 201 bp, Homo sapiens
gtatatttctggaagacaagctatttgtattattcttaaaaatcccatcaacgttatcccattctttagtgctactactttagtttcaccctctaaagccrtgagaaactagccagagatcagaattgtatccagaatttgcagtcttgagaaacgctgatttctgactcttgaataagctgctaatggtaaaaggcagta

SEQ ID NO: 238700 - DNA, 201 bp, Homo sapiens
tgactcattctaaacacctaagtgacctgaaagatatgagagcaagagctttttttccaatttaattttcaagatttaattaaaatcagtttttcatcagyacagtcatcctaagtttcagaaagtaaaagtcatccatcaagtggaaaaagttactgagaggttttggagtagatggtgaacgttgaaattttgtagctg

SEQ ID NO: 238701 - DNA, 201 bp, Homo sapiens
gctaatggtaaaaggcagtagagcgagttctcatttccaaggcattttcgcaacaagcctgtgatatttattaatacaattaatgtctcctcgagttttcrtgcagatcaacacacctactgacagtaatgggtagatttggaggatgctgctttattttaactatgactgataggagagagagatcaatatcagccaaaa

SEQ ID NO: 238702 - DNA, 201 bp, Homo sapiens
ataaccaaaaatctaaaatgacccccaaaatatattcacctaccatatttcctaaaaagttcttccaattgtatgtagtatctatattctcccaagtgcaygtgcgacttcaaaaaggtatgatagttgcccagatgattctaaactcaacaccagtgaggcacaactcacagagggcacccacagcagtttggaaaggca

SEQ ID NO: 238703 - DNA, 201 bp, Homo sapiens
aagaaaatggtctcagacaggtcaagaaatttgcccacagtggcccggcatatttgcaatagaactaggactagaacccatttattttatttttagttcartgctctcataatgattacatttcctagtttggattagaacggctcgataaaatccatgattcccttataactctcttctccttccttatctctcctcagg

SEQ ID NO: 238704 - DNA, 201 bp, Homo sapiens
tagtaatttaattaataatcatgaaatctttgtcttattgaatactacattaaagttgaataaggtgataaagccaacttttttccaatgttaaatttaartgttctttgagaaaaagctaataaaaacatttaagaaatatatatttttctttgtgcccagtgaatatttaatttactggtatcatctgaatgctttata

SEQ ID NO: 238705 - DNA, 201 bp, Homo sapiens
attacttgcttaagatgattttgatatatataagattatgcttaactcatgacaaaacatgcaatggcgctgtccatcaatcagtcgagtgaactgctgtrtgatgaattatcttgataggtgatttctatcacctttccattcttaattaacctatcaagatagtctataaagtttatccccaaatatctcccaaatcca

SEQ ID NO: 238706 - DNA, 201 bp, Homo sapiens
gtctgctctttccaccttcttttgcctgccttattctgtctgcactgacagctgataagatggtgctcacccagattgagggtgagtctacctctcccaawccaccgactggaatgttaatctcctttggcaacaccctcacagacacacccaggaacaatactttggatccttcaatccaatgaagttgacactattaac

SEQ ID NO: 238707 - DNA, 201 bp, Homo sapiens
tattttaatgctatgctgtcctgaaatgtcagagctatgtactagcttttcctgcaaggggtaagattcctagcaaataattcagaataaggtttttttttttttttttttttttttttttttttaccaaagtgttctaatatagtctgagaatgctgtgaaagcaatattaaattaaactaaaattgatagagtttaaga

SEQ ID NO: 238708 - DNA, 201 bp, Homo sapiens
atgcaagaagaagaaatgaatatcttgataaatttatccaaagatgactggaggtgagtttcagagaaaacctagaggaaatttaatttcaggaaaggaawaaattatgcgatttaaagtcaagaaaaaagatgaaagtcgatgcattccccaaattacaaacttaattactgtcgactggatgactctgagaaggattag

SEQ ID NO: 238709 - DNA, 201 bp, Homo sapiens
ataatgcagtgtttgatactaaaccccaagattcaggatgcctgactcaagtaaatcattgaagcccctgtgatgtatttttcattctaatcttcttcacrgacaaccacaggtaagaactggcattatgtgaggtcgtgaaactgctcagcctcaacaatttctccttgtcactacatagggtcccagtgcacagggctt

SEQ ID NO: 238710 - DNA, 201 bp, Homo sapiens
gacgtcatcaggaaataaggctgaatggcttcaggctccattcccaagctctgattctgtggacacttagagaggctttttcagtgaatattttcaaatcrcctttaggactgctagataacaagctgctcagggagaatgaatagcagtgttagccttggcaccccaccccaactagttacagagcagtgactctcaaag

SEQ ID NO: 238711 - DNA, 201 bp, Homo sapiens
taggaattatgactgcagaagagttgtgggagtgagaagggaaagcactagctcttcagggaggtgtgaacatcgttgccattctcgctgctggcaacttyttagatccatgacagttaaaaggtaaaataatatcaaacttgtgtgtggactttcacatttaaaaagtagcatcttttgtgttcatatccattaagaact

SEQ ID NO: 238712 - DNA, 201 bp, Homo sapiens
tattttataactacttttttcgtagtctttttttagaactgttgttctaatatttttcaaagattttagaatcaaatgacattaagttgtgattccatccwgctgctgctttggatgggctaagattttctgcctagcctatacctctgggaaaactttttctttgtatttctcagatatgttaattgattgcgtttgagt

SEQ ID NO: 238713 - DNA, 201 bp, Homo sapiens
agactttcagagaagaaacctgaaggatctccagggaattgtaaagacaggtataagctgtggggcctgagaacctcaggctgccttgagtttccatttckatgggactagtttttctacttactcctcatttttaaaagtgtattttggccccctgaaggcagcatcctcaaatgacagcgaaacctctaagaaaaatat

SEQ ID NO: 238714 - DNA, 201 bp, Homo sapiens
cttagtttaatgccacatgagaaaggaggtgtcggaacccaaaatagcctttagaagctttattcttcagtattcatttcacttggaggctctttgaaagwtttgacagcaaactagtcttcagtgatgagagcaggcattacccatgcagaagttatggtggtgaattttattagacatactttctgaagaataacattt

SEQ ID NO: 238715 - DNA, 201 bp, Homo sapiens
agctgcctgctctgaccttttccccttcccatccaagtttcaacagctgtttttctagagaccataacacaggtgcctatccttgcttagtaagtgtaaaygtggcaggctaaggacctgatgtggcaagctaagaatggaagtttctgaggcttgttgctgtaatgcaaattgctgccatgttagtagaggtgatgcccc

SEQ ID NO: 238716 - DNA, 201 bp, Homo sapiens
gtatgtctgatcataaaaatgtaaaccttgattattaatgttacaagtattataaaacagtatttttggtaacttagggtaaggtaaaatggagcagatayataaaaaacacctaagtccttattcaccataacaggaggccaataggtggtatccagtatcaataaaccaagagatagcagaataagcataccattttaa

SEQ ID NO: 238717 - DNA, 201 bp, Homo sapiens
tgtctaagtctcttgaatcttccaactcttttctcccttacaccttacttttggtttcatagggggtgaaaaatatgtcactggaagggtaaggagttaarcttttccctcctccaatttgaatggcaccttcatacccctttttgcttctcttagggaaaacctagatccatgtccagggagtgagaaacctggatctcc

SEQ ID NO: 238718 - DNA, 201 bp, Homo sapiens
ctctggcctctctctcatctttccagacagacagcccccattggtttttggctggtatcaccttctgactctgaccccttgctttcccacggcaggccccyacatctttgcttgccacagcttgcttgctctcttttcttctccttctcattgtacttctcagggctgaaggacaggctggtcttcacatcagagtcactg

SEQ ID NO: 238719 - DNA, 201 bp, Homo sapiens
gattattaatgttacaagtattataaaacagtatttttggtaacttagggtaaggtaaaatggagcagatatataaaaaacacctaagtccttattcaccrtaacaggaggccaataggtggtatccagtatcaataaaccaagagatagcagaataagcataccattttaaaatgtagagtaaaatcccagaaaaaaaca

SEQ ID NO: 238720 - DNA, 201 bp, Homo sapiens
ctttttgcttctcttagggaaaacctagatccatgtccagggagtgagaaacctggatctcctctggaagtatgggtgggaaggtagaacttgattaagtrttttccaaaaaccttttagccatgcatggatgtggcttttgaatttgaagacaaaggatagatgcctttgtttttggggtagcttagtaacaacccctgt

SEQ ID NO: 238721 - DNA, 201 bp, Homo sapiens
gagactgttgacctattatgcttcatttttattatctacttcaccctcttaaaaataaggttcattaaaataaagatgtttgtttccattgctgatgtatyccaagctctttgaacagagactggcacaaagtagaaattcaaatgattatctgcagtaggcagggaagaaagagagagacagagcgcaagagggaggacg

SEQ ID NO: 238722 - DNA, 201 bp, Homo sapiens
aaactatatgtatttgtaaattaaatatgccatttaattttgtccataatttactccaataaagatgttttaaaagtgaagttcaaagaatgagaaagacmaaagaaaaccttaatatttagatttacaaagatattttcctgaagatatgtagaccctataccattgaagctgtaaaggatacatgataggtattcaggg

SEQ ID NO: 238723 - DNA, 201 bp, Homo sapiens
tttcgcagtttttctgaactttttctttttttctgggtctttgctggaaggtttctgaagtctctagaaagattgtaacttcagcatgttcaatgataatkcattcaacgaactcctaatctcctgcaatcccataacttttctgtttcaacagcacactcacatggtcctgtctttgagatcttgaactttaaaagtcca

SEQ ID NO: 238724 - DNA, 201 bp, Homo sapiens
ctccttctgaaaagtatcacagtttgaatcaagccaagtcttcctttcggtttcagagcatgtgaaaaagttgttattggaacaataaataagtaatctawctgagtaccacctttatattcctcctttgcttctctgtgaaaaacctaggtctgcgtccatggacgtcatcaggaaataaggctgaatggcttcaggctc

SEQ ID NO: 238725 - DNA, 201 bp, Homo sapiens
cagtataaaactgttaaaatttaactaatcaccacaggaatgaaggacacagtgttgcacaaaataagcaaactgctgggctttagtaggcggttttcccytgacagtgtgaaggagactgagaggtttggactaagcaaaattcaccacaacacagcaaagcggctgtgtccagactgcttctctagattcctcctcact

SEQ ID NO: 238726 - DNA, 201 bp, Homo sapiens
gacttcattaactatttaaaaaccacaaaggtttgctccttgaaagacattgtacagagaatgaaaagatgccatggacagggaaaaatatttgcaaaccrtatatctgaaaaaggacttacatcaagaatatataaagaactctcaaaattctataaaaggaaaaaggataataaaaataattcaactaaaaatgggaaa

SEQ ID NO: 238727 - DNA, 201 bp, Homo sapiens
caggttggaactcattttaaatctaacagcagtctcaccagcaacagcagtcttgccacattctctgggttctgggttcttgtcaaatctcagatcaatcrtctgccccctctgagctgctccttgcctgggtggtgcttaagaaaaattgcctgacattgttcccagtcatccttaaataaaagttcaggcacagtcagc

SEQ ID NO: 238728 - DNA, 201 bp, Homo sapiens
taaactggtaaggaaagccttcactgaggaagaaataatttaaataaatacacaatggaggttagaaagagaatgatggagaggtctgggagggtgggtgktaacaaatttttaaaacggattggctaccacattatctaggaggccaagcttgcctgacatgccagaaacaacaagaagggcagtgaagcaggaagaaat

SEQ ID NO: 238729 - DNA, 201 bp, Homo sapiens
gatacatgaatagcaagtaagcacatgaaaagataactcatagcatcagaagcattcatcactagggaaatgcaaattaaaactgcagtgagataccactrcacatctattaggatgactaaatttttattttactctgaccatattaagcattggtgataatgtggaggtactagaacttatataatgctgttgggcata

SEQ ID NO: 238730 - DNA, 201 bp, Homo sapiens
tagacattctataggacaagtgagatggttccttcaacagataaatggaatgaataaaaaagagtgggaaggggaaaatgttatgtattgaaggagacttyataaacttatcaatcaaatgcaatgtctggcctttgggtggggggggctggggtgttctggacttaagaaactgagaaaatatgtatgagaaaataataa

SEQ ID NO: 238731 - DNA, 201 bp, Homo sapiens
tccaatacatttttcatggaatttaagaaattgatcctaaaatctatatggtattgcaaatacctaagaatactcaagacactcctgaaggataataaagygggagcacttgccatatatcaaaatttactcttatactgaagtaataaatttagtgtggctgtgatatagagataataagatgggccttgggaatagacc

SEQ ID NO: 238732 - DNA, 201 bp, Homo sapiens
gcaatttatgttcctctgccgcggctccagctgcttcctccgtttggggtccctgacttcctgcagcagttgctatttggagcatagcttctaagaccaayttttgttcattttttgtctacattctaggaactcatgagagccatgtctttattagttttcttgaaagaaaccagaaacaaagaaacagagaaaagagag

SEQ ID NO: 238733 - DNA, 201 bp, Homo sapiens
gctttatattatattgcatctgcctttgacaactgaagtttaatacacaaaatatgaaatactaagtaaggtgtgtactaaggagaatccagtgtggggasggagagaaaggagatgagcagctgccacgtgctcagaactgggactgagcatctactatcctgcttttctagtcggttttgtaaagtttttcaggttttc

SEQ ID NO: 238734 - DNA, 201 bp, Homo sapiens
atctcttagattcctccttcctttctagagttaggagtattatttattatcctatatgttgaaggtgttgaaattaattgtaccaaaatttgtaatgcctygttaatatataattttccaaaggtaaaagtattagtcatgtgcaaatataaattgagcatatgccaatgtttctatttaaatcattaataatgagggaat

SEQ ID NO: 238735 - DNA, 201 bp, Homo sapiens
caagcttaaattgtgtcacttccatggcttcaagtattattttatagagcagttaaaccatctctaaagactgttattagattaaaacaatacaaagggtragcagaaccaatattttagttgattcttgctatcccaggattgtcagaagctcttcattatttctgatttcagaattcaggaaattgtaacacttgaatt

SEQ ID NO: 238736 - DNA, 201 bp, Homo sapiens
agtaatccagttacttgaaatgtgaattacttttatccaagcatctgatggacaatctttaaatgtgcatatttacaggacattatcacttaaaaagcctmcctccagctattctcctatattcaggtggtagtccattgctctcagaagtgtttccaacaacaattcttgacttgaggcacccacagcagtcctgggatc

SEQ ID NO: 238737 - DNA, 201 bp, Homo sapiens
actcaaagagaattttatattaaggagacttctttttgcaatgttcctttaactacctactatacaaaagccatttcctttaatagtagatttgtatgttygttgattacacactaagcaacggatgtttggctatgagaatctgttttaaattatttctattgttgttgttgttgatgatgttttcatataatgttacac

SEQ ID NO: 238738 - DNA, 201 bp, Homo sapiens
agttgacagtctacacatctcaggcatttaagaacatagaactggctgggtgcagtggcttatgcctgtaatcccagcactttgggaggccgaggcaggtrgatctcgggtcaggagatcaagaccatcttggctaacacggtgaaacccgtctctactaaaaaatacaaaaaattagccgggcgtggtggcatgcacctg

SEQ ID NO: 238739 - DNA, 201 bp, Homo sapiens
aactcttagctttacaagtctatgaatggagcctatctagccttttcagtgaaggtgaaacatcttatgaagtgatttagagaaaaggtagagagttttarttaatcaattaattatttttacggtttgggtggttgcaaataggatttcaaagagaaaattaccttacagacacacctttgtgttggagacccattctgt

SEQ ID NO: 238740 - DNA, 201 bp, Homo sapiens
attgtaattggaaaaatatcatgttgacttttctttctgtggtttttttccgtatgcatgtttgtgtaaaaatctatttttaaaagattttcttctctgcyagtgcatttttgaagtgtgtcggtacatggtactgcattaattaagaataaatatcccaagccatttgatatatttgtgtcaccccaaaattcataggtt

SEQ ID NO: 238741 - DNA, 201 bp, Homo sapiens
gggattacaggcgtgagccaccgcgcccagctgatagatgctttcaaaaatctacaacttaagccctttcatagaggtcccttatcaagcatcttggtgcrtcctctaatgcctgatgcccatgtcacagagaccttccactacagaagtccttttgacatgtcttgctgtcctgagttcaggacctcaagttctgtgact

SEQ ID NO: 238742 - DNA, 201 bp, Homo sapiens
cctcccagataacaaatcagaaatctaattattatcttagaatcctttttctttttcattcagtacaccttattatgcactataacctatgtactatcccrgttaatatctcttgaatacactcttttttgcaattaatgcctttgccttacttcaagttacagtcatctttcacctagactactctaacatgctttttac

SEQ ID NO: 238743 - DNA, 201 bp, Homo sapiens
aagttagtctggtagaaagaaattgagcgtcatttagggtacattagaggctaagatccttgaaattactgagtagagggactttccaaggaatcttcacycatttaacaaatacctgttgagtacctgaaatgaataccagacacactggtaatcagaatcaggagcaaaattgtgcaggcagctggtggctagaactgg

SEQ ID NO: 238744 - DNA, 201 bp, Homo sapiens
acattctgcacatgtatcccagaacttaaagtataataaaaataaaataaaataaaataaataaaaaacaaatgagataacctgttctgttttatgcaacrtgtaggacaatcttaaggtgttaattgaattatttacactatttcttcccagaaaatacttaaaggattatacaagccagcttaaaaacttgaggactgt

SEQ ID NO: 238745 - DNA, 201 bp, Homo sapiens
ggcttccatgctgccaactttactggaaatgtttagtggaaatgttccactagtctttctgactgctctgcagctttggtaccagtgacatctttcttccrcttgacgccctctccacttctgttgtaggacaaacttctcctcctgactcccaattctctctgacatctttgctgaatactcgtccctgtccatctcctc

SEQ ID NO: 238746 - DNA, 201 bp, Homo sapiens
attatcttaaaaataaaaaaaattgtacagatatatacaataaagccttaacactttggaacccaccagtacagaacatacaatcatttgaaaattattcwtgaagatgtttgaccttgtattatctaggaagaaagtaaaataatagccgaaataagattgttgaggattgttgtatatataatttgattacaaaagcat

SEQ ID NO: 238747 - DNA, 201 bp, Homo sapiens
gttttcaaggaagaccctttttcagtgctacgaaactcttatcttgagtttatcatagtttttaattgttgctaatcacatgtacagaattattattgggyataatatgtgtatcatttggggatttgttattttttataattgctgccttgttgccatttgattactttctttttcttttactcttttattactgctgat

SEQ ID NO: 238748 - DNA, 201 bp, Homo sapiens
caaccttaaaggttttcttggtttcagaactttttgtcttactgaatatgggattgttccagcacagaaactgccttaattaaggccaccagtggcttccrtgctgccaactttactggaaatgtttagtggaaatgttccactagtctttctgactgctctgcagctttggtaccagtgacatctttcttccacttgacg

SEQ ID NO: 238749 - DNA, 201 bp, Homo sapiens
ttgaagaaggtattgttgtgcacacacacaggtacccatgcattatatatgtatatatgtatatataagtgtggttttgtgtgtatccttgtatatataarctaatgtatacatatgtattcttatatatgtactaatatctatatatagatatttattcttttacacagccctaggtgcagtaatagatacccaataatc

SEQ ID NO: 238750 - DNA, 201 bp, Homo sapiens
aatagacagctatgtggtatgatttaaaggcatgcctataactaagtagcatcccattggtctgccacagttactttctgttagagtttttgataattgcrtcccagaatgtaataagaggaatttgtcatctcctaatatattagcagattccctttcttcctcgggtcagctggctcagagtaccattttgagccaatg

SEQ ID NO: 238751 - DNA, 201 bp, Homo sapiens
cagttggggaactatcatatcaaaaagttgaaattatatgaaagtcagagaaatgtgaacgttgtcaatgagaaacaaataaaatgtggcttagtttctaygtagggagtgatcacaatgaacaggcatcttcaaaggacttacgagataggtagcatctcagatacgcctggtaaccaaacataatttaagacagtaaca

SEQ ID NO: 238752 - DNA, 201 bp, Homo sapiens
actgatatggtttggctttgtccccacccaaatctcaccttgaattgtgataatccccatgtgtcaaggatggggccaggtggagataattgaatcatggkggtggtttcacccatacagttcttgggtagtgaataagtcccatgagagctgatggttttataaatgggagttctcctgcacaagccgtcttgcctgctg

SEQ ID NO: 238753 - DNA, 201 bp, Homo sapiens
acggagtttctccatgttggccaggctggtctcaaactcccaacctcaggtgatccacccgcttcggcctcccaaaatttaccagagaagtcttctaggcsaggagttttcttatgcaaagggtttttagctacaaatttcatttatttgtttcttcttgatatttgttagtttgtgtcttttaagaaaataattcatttt

SEQ ID NO: 238754 - DNA, 201 bp, Homo sapiens
attatatttataaaacctatagtttataccagtacctctaacttctagccaatgccatggtacctattttagttcttcccctttccatatgtgaaattccrtctccaatcatgagcaatctggctcctattatcctcaatattcttttgctcaaataaataggagatttatacatataaaatgattatatataaaaataaa

SEQ ID NO: 238755 - DNA, 201 bp, Homo sapiens
aatattcccatttttaatttttgaattaattagaaatttatagaatgatatattgaggatgtataaatatcctgcttctttctcaccaaattttcacccartggttttactattcactgattttctagctctatcattcctttggtatttatcagttgatgttttccagtaggaggacctttattcctaatgtattcattc

SEQ ID NO: 238756 - DNA, 201 bp, Homo sapiens
atagtcttttatatctatgtcattcctaatgtagaaggaaatctaagatgatacattgcatttagttgtcagttctcttgggtcttttaatttggagtggytcttcaacctttccttgtgttttttgaccttgacatttttagagtacaggccaattatttatagacttcccctcactttggttatgtttggtatttccaa

SEQ ID NO: 238757 - DNA, 201 bp, Homo sapiens
cattcccatagagattattagctggcttggtgatgataaaatgttttcccaagaggggcaggactaggacaagaaaggatctgggttggtaggaagatgarttatcagatgatgtactctttactaaatttgaaagtaggggtggtctgtgaagctcatctgtcttggagtaactcttagatgtttactcatagttagata

SEQ ID NO: 238758 - DNA, 201 bp, Homo sapiens
acacatacacttacacacacatgcacacaagacttaataatttccttgatgccatttcaggagattaaggaatgatagagcacaattccacctgaaaatcrtgttataacctatgtgacagcattagcccttccggtctgtaattcaatcagaaattttgttgttgttgttagcatatttcaacattttttaataagagaa

SEQ ID NO: 238759 - DNA, 201 bp, Homo sapiens
ctccctctgaaacaaagttcactgcagaactaggccagaagaacataatgttgcagaaacagtgagaaaaaattttgctagtgggtcactagaggtgatgrtaagtagttccacttccatttctacctattgattcctggacctatgactcctggctatgggagaaacagtaccatatattggatgctgattcagaacata

SEQ ID NO: 238760 - DNA, 201 bp, Homo sapiens
tattgccttcagtaagcacctcagctggtcatggttctttgcctggcaaggtgacccaaaccttcattcctgaagagtctgggcaattcatagtcagcctrtattgagtggttgtagtttcccattgaccttcatcacaggacagggtaatactaatagttgctctaaggaaccttctgtattccagaaatactattcttt

SEQ ID NO: 238761 - DNA, 201 bp, Homo sapiens
aatatatcacttataagtcttctttgagaaatgtatattcatgccctttgtccattttttaattgggttatttgtattcttgctatggtttgtatacctcrtatattttgaatatatacacaacctcatatattcaaaacacccttttcagatatatagtttgcaagtattttctctcattctataggttgtctgttcact

SEQ ID NO: 238762 - DNA, 201 bp, Homo sapiens
tttttcaaatttaaaaacaataggttattaaattaatgaggatggggatatgattattttatagagaggtggttagtttagggtgtttaaggttatgtgaygaactttaagagatccaacggcaaatcataattgatagatcaatgtgatttttgatccagctctaacagaaatgtcacctcacccataaaggtagttggg

SEQ ID NO: 238763 - DNA, 201 bp, Homo sapiens
gtaaataatactttgaaatatttataaataaattaaataattaatgtactttagcattcaatgtgctttgacagtgaaaatttaatattctaaattaattktgaggtacaggaagcaaatagaatataaaatctcttgctccatctgtaggaaggtcatccctgcatatatctgtcaaatgcctaagccctataggaaata

SEQ ID NO: 238764 - DNA, 201 bp, Homo sapiens
gagcagcttgcatagcagcctggacttgttgcagtcttttcctgttctgtgccccactcataactagcagttttttgtgtcacccagtaaatgggctaggktaacacacccaaatatgtcgcctttataatccaaataggtccactaggaattgtgcttctttctcagttataggaggggccagatgcaacaactctttac

SEQ ID NO: 238765 - DNA, 201 bp, Homo sapiens
tgcagtgtctgtctcatttactcaaccctttcccaagttgttggaggactaaatgaggtaatgctaataatgtatctagaagaatgccagacaaataagcytttattattattattcctgtttacagataaataaattgaggctcagggaggttaagtgatttgtccaatagacataacttgtaacttgaggacccaggac

SEQ ID NO: 238766 - DNA, 201 bp, Homo sapiens
ttcatctcggacagtgaaaacagcacttttacaaagcaatttgcaaatatatgtcttcattcctttggaaggtactaagaagctaaatactgtgtcttaawttccactggctgtgctagagattttgaggtaaatcaaaagaggtctgtccagagctcatcatggtgctcagctacagtttaaatgtaaacatcttgtgtt

SEQ ID NO: 238767 - DNA, 201 bp, Homo sapiens
tgcacatgtcttgccaataaatccacagtggttgttacttcttgctcactaggtccaattaacataatatcatcaatgaagtgaacagggtgatagcttgwggaagggaaaagcaatcaggatccctgcaaaatagattatgacatagggctgaagggttggtatacccctgaggtaggagggcaaaggtatattgctggc

SEQ ID NO: 238768 - DNA, 201 bp, Homo sapiens
agacccagaaactgatttaaaactgaaaaagtcatttacgtaaatcattgatgtgtcagctaagagcttgtaaatttgtcctctctaaaagcagttttacrttataaagtcgctcaataaaacctatcaagaatcggatggagggatttattactgttatttattacaagttttaacatggtcattttgagtttgcttttt

SEQ ID NO: 238769 - DNA, 201 bp, Homo sapiens
tcaaatattttggtcctaaaaatagtattgaaaaatattttaataatttgctttgtgctaaaaaaatacactaaatgtaaaaacctaccaaattctaaagrtcaactgcttattatggtcaattaaaaattataatgatatactcaatcaatcaaccagagatctttctgtatagccctgtgacattagagatgcaaaaac

SEQ ID NO: 238770 - DNA, 201 bp, Homo sapiens
tctccagggggacagaaccaatagaatatacatgaaagggaatttattggggaaaattggctcacactgtcacaaaggcaaagtctcaccacgataggccrtctgcaagatgaagaagcagtttgtagcgtggctttgagagaagccggtagtgtgaccatctcagtctgaaagcctcaaaaccaaggaggccaagaatgc

SEQ ID NO: 238771 - DNA, 201 bp, Homo sapiens
gaaatgagtttgatgagcacataacaatgtctctgccacaggtatggcaacgtgaaagtgagatgtgcagccatggagcagtgaggagttcagtttggctktaggaagctggtaaaatttgtaagagaatgtggcagaaattaaaggaggacattaaatgccaattatattgtctttgggggaataaatttgcgttaaata

SEQ ID NO: 238772 - DNA, 201 bp, Homo sapiens
tattgcaatttatattcctagagaaagttactgagtagcatcttactaaattcaaatattttggtcctaaaaatagtattgaaaaatattttaataatttrctttgtgctaaaaaaatacactaaatgtaaaaacctaccaaattctaaaggtcaactgcttattatggtcaattaaaaattataatgatatactcaatca

SEQ ID NO: 238773 - DNA, 201 bp, Homo sapiens
tggcttaaagttccaactttctaatcatgtggttggtttctggtgaccaggccctatgctgaaactatctaggggataggcccagagttgcctcattagcmtagagtctcctatcactcatgaaattccacaggtttttgaagctctgctaggaactgggaatgaatatcagataattttgttttattatatcacagtccc

SEQ ID NO: 238774 - DNA, 201 bp, Homo sapiens
ctcctcctcctcaatgattgcatctagttttgttataaaaataatttggtcacctagaatgagttcagaagtatttacagttgatcaattttctggaaaastatgtataaaatattattacatccttaatttttttattttttatttttatttatttattttttttgagacagatttttcactcttgttgcccaggctgga

SEQ ID NO: 238775 - DNA, 201 bp, Homo sapiens
gcattaatccattcatgaaggcagagctctcctggtttaatcaccttttaaaggtcccaccctctaatgctgttataatgataattaaatttcaaaatgastttgggaggagacagacattcaaaccatagcagtaatgttgagcattttttcatatatctgttggtaatttgtatgtcttcttttgagaaatatctattc

SEQ ID NO: 238776 - DNA, 201 bp, Homo sapiens
cttaaattgctgagattataggcatgagccaccatgcctaactacgtttatacacatttcagtctcctctgccaggttgtgagctatatcaaggtgggtaygctacgtctccactacttactaaagaatctagcacacagagggagttatgtatgatggaagaacatccagaaaggacacctataacttgtctttatggtt

SEQ ID NO: 238777 - DNA, 201 bp, Homo sapiens
gtcaatgttttcaccatccaggaagctctactgagctttcctgtccagagtatttatcaaggtttcattacataggcatggttgattaaaccattggacaygcgattgaactcagtctccagcctcacttccttcccagatatcccctggctggcttaaagttccaactttctaatcatgtggttggtttctggtgaccag

SEQ ID NO: 238778 - DNA, 201 bp, Homo sapiens
tatgtatatataagtgtggttttgtgtgtatccttgtatatataaactaatgtatacatatgtattcttatatatgtactaatatctatatatagatattyattcttttacacagccctaggtgcagtaatagatacccaataatcatttatctaactgaactgggttttttaacacctttttagcaaagttgtctatact

SEQ ID NO: 238779 - DNA, 201 bp, Homo sapiens
atcctaaaatttaaaaagacatgcatagacacacaggatttttccatatgagaacattgttacttatgtaggtggtcattctgcaagattgggttatgtarcggtagcttagaaggtattcagagtacttggttataaaaactgcatcatttgacattgagtaacttttcatttggaatgtagcagttctgtatttgaatt

SEQ ID NO: 238780 - DNA, 201 bp, Homo sapiens
tgttgagcattttttcatatatctgttggtaatttgtatgtcttcttttgagaaatatctattcaggccccttgcccatgttttaatcaggttatttgttytcttgctattgagttgtttaatttccttttatattatacatattaaccacttaacagataatatgcttgtaaatatttctcccagttggtaggttctctc

SEQ ID NO: 238781 - DNA, 201 bp, Homo sapiens
tattttattatcggtattatatgaagacatttaatccttacagttcagtgccttgctgaataaatactgaatgaatagcactggttttattaatagtagtmgttttgattaaaaatgcaaaatgaagaagaatcagatagggtcttgaaatctcatgctcttcttatctctgtctcttctctgagacatcaaaccttttag

SEQ ID NO: 238782 - DNA, 201 bp, Homo sapiens
cttttcacttttgtatttcaatcagatcacaagtgggaacgttgatagttatataataattataaattattttaataaattttatttattgaattattacrttttattcatgctctgtcacatgagggatatcctgggtattttgtatcctaaaatttaaaaagacatgcatagacacacaggatttttccatatgagaac

SEQ ID NO: 238783 - DNA, 201 bp, Homo sapiens
catataaagatttagaaagtatgcagatgtaagggcatcagaaaaggcatggggacataaaacacaaggtaaatttaagaagtagtgattggttaagtgarccttgagggagagtggctgagtagagggagataaatatggaaaggaagattagaatcaggctatccatggctttccagaaccctaacatacgaacactat

SEQ ID NO: 238784 - DNA, 201 bp, Homo sapiens
aaaaattattttttttcacaccagacaaaaatctgcaagttaactaaacagccttgctaaaccttggccctttaatcaacatcaaagagtaagatgaactraataccttattctagataccttttggttggctttgcctttatgtgacagaaacaacatgccacctacctttctgccttatttgcaaatctcaagaaaaac

SEQ ID NO: 238785 - DNA, 201 bp, Homo sapiens
tgtatggaatacaaagatgagttattctctcaatactgtacaaaatgagacaggaaagttacagttaatgattaatgaaaagaagtataagtgctattgtratcatgctactgatgatttgaaactggaagtaaaaatacacagccacaaagaagggacatctatctcagatgtgattctcaaggaagacttctagaagca

SEQ ID NO: 238786 - DNA, 201 bp, Homo sapiens
ttcattttacagttgacccttgaacaatacaggggttggggcacccccattcaactgaaaacccatgtataccttttgacacttcaaaaacttaactactratagcccactctggataggaagccttaccaataatataaaagttgataaatacataatttgtatgttatttgtattacatacaatattactacaataaag

SEQ ID NO: 238787 - DNA, 201 bp, Homo sapiens
ttaaagaaatgtatggaatacaaagatgagttattctctcaatactgtacaaaatgagacaggaaagttacagttaatgattaatgaaaagaagtataagygctattgtaatcatgctactgatgatttgaaactggaagtaaaaatacacagccacaaagaagggacatctatctcagatgtgattctcaaggaagactt

SEQ ID NO: 238788 - DNA, 201 bp, Homo sapiens
ggctgcaactattttaaacttttatgctctgcttctcttttaaatataagttccagtttcaggtaatttctttctttatgcaaatgagcataggcttttasaaacagccaaaccacatcttgaacactttgctgcttagacattgctttcaccggataccctaaatcatctctctcaagttcaaaattccacagatttcta

SEQ ID NO: 238789 - DNA, 201 bp, Homo sapiens
attgccctaggcagaaacttttccaaataataatattaaaagctctatggtatttcagctcttaacattgcctaaatcattgaattatagtcctgtgttaygtattttcctcttttgtatagctttcacgttgaagctaatttaatttttattggcataaaatattttcctttcaactcccagatcagctctctaaaacaa

SEQ ID NO: 238790 - DNA, 201 bp, Homo sapiens
gcagcctaacaatgcaataggaaggaaaatcccattttctgaggagaaatccaaaccagctgcagatatttgcataagtaacaaggagccaaatgttaaamcccaagacaatggggaaaatgtcttcaggacacatcaaagatctttgcagcagtccctcccattacagacctggaggtctaggaggaaaaaatggtttca

SEQ ID NO: 238791 - DNA, 201 bp, Homo sapiens
gcattcttctattcactgctactcgcctactgttaccctccagaggcttaggctatcttttcttttaatctctgtttgcgtgtgtctttatgtttgtgtgsttttgtttttgtttttgttttgagatggagtctcactctgctgccaggctggagtgcagtggtgcaatctcggctcactgcaacctccgcctcccggatt

SEQ ID NO: 238792 - DNA, 201 bp, Homo sapiens
atggtgaaaacacaatgccatccctatgatttaagtttaaatgaatccaaaaaagtgtacttggcatttttatcttgcatattagcattttaagtagtgayaaatactgaatattcatggctcagcatgttacctcatttctatcataactaattgcctaatgagaattggtgaaattctcttctgatgccaaagtacctt

SEQ ID NO: 238793 - DNA, 201 bp, Homo sapiens
aatgcctttgaagttttttctttcagttctaaatatctgagattcttcacaattttcacagcagaatggtccataacccaacatttctgttgggttctaamacatcgcatatactttacaattttggagtttcgggatatgtgtaaatcagacttcaacaagggaaacataagttaaaagaataattcaaaggtaattcta

SEQ ID NO: 238794 - DNA, 201 bp, Homo sapiens
ttgcttttggtgttttagacatgaagtccttgcccatgcctgtgtcctgaatggtaatgcctaggttttcttctagggtttttatggttttaggtctaagrtttaagtctttaatccatcttgtggggttgaggggggagggatagcattaggagatatacctaatgctaaatgctaaataatgctaaatgggtgcagcac

SEQ ID NO: 238795 - DNA, 201 bp, Homo sapiens
cgattgtttgcatggctgataagttccctggtaaagtggatgctactgatccagggaccacactctgaaagaactagtataatatgttagagaacccgatwagagctaggtaaccctgatgactagttgggcagcattttacatccacattgagttcacatctatgtggtttcaaagatatgaattagatctgaattttct

SEQ ID NO: 238796 - DNA, 201 bp, Homo sapiens
gcagggcagaaaattccttatattgtctgaatcagtaagtttctcctctactaagaaagtggaattgtttcttgagatggagcacacctcgcctggaaacrtgtatgcatcctaacaagaaagggaacgtgtaccaacttaatcagtccagactgtctggttttcagtgttctcaaaggcattcatacttactgttaggaa

SEQ ID NO: 238797 - DNA, 201 bp, Homo sapiens
tgctggtagtgtgatccaagtgcagcctgccaggccgagtgggtggaacaagctgggcctgagcaaaaggtgggcaaacacaccaccagccagaggtttcyggccagaaaagtgacaccccaaagatcctgtaacaactggaccatattcttttattatttagcagactagccttggcttttaacatgatagcagccacaa

SEQ ID NO: 238798 - DNA, 201 bp, Homo sapiens
cgcccggctaaaaattattatttaaaattattacctaatgattaccttttgttgaatatctttaaaaatttaaatactgtgaggaaaaaagaattcagttytaaccttctttaataggttttataatcttaattagacattcagatatgaccacttagaaaggatgagatactttttaaatatgaggtgacagataatatg

SEQ ID NO: 238799 - DNA, 201 bp, Homo sapiens
gcaaagtgaaaaggaaaggaaaagtgatctaaaagatctcttaaggtaggattcagtatgtcttcatgggaagatggtgaaaacctacaagaatctgatgytcaaagtgtattacagtgtcatcttcaaaacataaccaaggcccattctttagcaagacaactgggtagtgagtggtcttggaagccatgcgctaatttt

SEQ ID NO: 238800 - DNA, 201 bp, Homo sapiens
tttattaaatgtccacctttaaatatttttctgtgtttaaaagctacattaatttttcccctttatccatcaaaaacctgagcacatttatttgttcacarataggtcttttctcaagcacttgttgccatagatgtttttcactgtggattttctcttaaagtgaagacagtgcccttatctgccaagttgttctgacac

SEQ ID NO: 238801 - DNA, 201 bp, Homo sapiens
atactcttcagaatttacgagctcaatgccccccatcaggatcatcccacacatctccatccccatttagataattccattttttttttccccaaccaacrtcctcactttaacactagataccagtaaaggctgagagttcacctttctttgtaactcagccgatggatgctgaaggcttgtgtttgattttcagcagtt

SEQ ID NO: 238802 - DNA, 201 bp, Homo sapiens
agtgatatattttcaaaggtatacagtacatagatttactgataaaattatagccactcaagaagagtttctgaaatgcaggtttctatatactacttctyggaatcaccatataattagatttattaaaattagattaagtttaataagtgaaaattagatccattatttaaccagagaatttaggtactcagaaattcc

SEQ ID NO: 238803 - DNA, 201 bp, Homo sapiens
aaagtcatggcttacatggtggcaggcaagagagcttgtgcaggggagttcccatttataaaaccattggatctcatgagacttattcactaccatgagarcagcatgggagaaactgcaaccatgattcaattatcttcacctggccccgcccttgagctgtggggattattattattattgagacggagtttctctctt

SEQ ID NO: 238804 - DNA, 201 bp, Homo sapiens
gagtgcagtggtgtgatcttggctcactgtaacctctggttctgggttcaagtgattctcctgtctcagcctccccagtagctgagattgcaagcatgcamcaccacacccagctaaatttttgtatctgtagtagagaaaaggtttcaccatgttggccaggctggtcttgacacattttaagaattcctaaggaaaatg

SEQ ID NO: 238805 - DNA, 201 bp, Homo sapiens
ccagaaaatgggtttttcttttctacctcatggtcaggctgcaactattttaaacttttatgctctgcttctcttttaaatataagttccagtttcaggtmatttctttctttatgcaaatgagcataggcttttacaaacagccaaaccacatcttgaacactttgctgcttagacattgctttcaccggataccctaaa

SEQ ID NO: 238806 - DNA, 201 bp, Homo sapiens
agcctcttgattttcacaagtcttatcagttatagttgcagatgggatgaatcccctaggaacaaccacaggctgttgtgagttaggaaatgcacttgtcsatggtctcctagggtactcatcatctcatttgataatgaagatttctccattcttgacaaccttattttgcttcattctctattcatttatcagtgtgtt

SEQ ID NO: 238807 - DNA, 201 bp, Homo sapiens
agccgatggatgctgaaggcttgtgtttgattttcagcagtttaagtcccatggctaaagaagaggagattctccttctccttcaggacacacttagaaayttttagggtatgtatatgcatctggagctgggagttggaatccctgagctcatctttttctttcctcactttgtccagtgatattaagagcacccaacta

SEQ ID NO: 238808 - DNA, 201 bp, Homo sapiens
cccagaaaatgggtttttcttttctacctcatggtcaggctgcaactattttaaacttttatgctctgcttctcttttaaatataagttccagtttcaggyaatttctttctttatgcaaatgagcataggcttttacaaacagccaaaccacatcttgaacactttgctgcttagacattgctttcaccggataccctaa

SEQ ID NO: 238809 - DNA, 201 bp, Homo sapiens
tctttgtttttttgtttattttatgaagtcttcttttaattttatttcttaattttttatttatttagtagtttttttggggggtacaggtggtttctggytacgtggataagttctttagtggtgatttctgggatttttgtgcacccatcacccgagcagtgtacactgtacccaatatatagtgttttatcccacacc

SEQ ID NO: 238810 - DNA, 201 bp, Homo sapiens
ggccataggcctggcccatgaatccatttttccctgctaggccttcaggcttgtgataggaggggctgccatgaaggtctctgaaatgccctggagacatyttccccattgtctgggctattaacattaggtttctctttacgtatgcaaatttttgcagccttgaattcctccccagaaaatgggtttttcttttctacc

SEQ ID NO: 238811 - DNA, 201 bp, Homo sapiens
caaataattctggatttagcaaaagcaataaagctgctgccattgataagtgctgatggtccaaataatcaattagcagattaatttttagaagacagacraaacagaacataatttcacttactgggcctgtctactttgccatgagcaagtgtctgttttttagcttgcagctgtaaaatccatacgtgacttttccat

SEQ ID NO: 238812 - DNA, 201 bp, Homo sapiens
tgtgtattacatcattttaaggttattgcataaagagccagaatttcccagctggacatggtggctcatgcccgtaatcccaacactactggaggccgagrtgagcagattgcttgagtccaggaattcaagaccagcctgggcaacatgacgaaaccccatctctacagaaaatataaaaaagtacctgggcatggtggt

SEQ ID NO: 238813 - DNA, 201 bp, Homo sapiens
acttagaaaggatgagatactttttaaatatgaggtgacagataatatgaaaaagggtcatatggttgttcatttttaagacctgcagtgatatttgagtrtatttttgctgagaaaatttagacagaagtaataagagtttcaggggaaggttaatttctccagcactttagagtctttctaaatattcagaatttaaaa

SEQ ID NO: 238814 - DNA, 201 bp, Homo sapiens
taaatgctcctattccgaaagggagaaattggcccaaacaaagggactgtaggccccatgcaagtctgaaccccagcagggcagttatttaatcttaaagmccccaaataatctttttgactccatgtctcatattcagggtatgctgatgcagggggtgtgctcctacggccttgggcactccacctctgttgctctgca

SEQ ID NO: 238815 - DNA, 201 bp, Homo sapiens
gcctgtctactttgccatgagcaagtgtctgttttttagcttgcagctgtaaaatccatacgtgacttttccatatgtaattgtgatagtagttgtcaagstacatttttgcttatccagatgtttatatttaactagctctgctttatagttatctcattgaactcttaggcccagcccaaatgaaatgagatgttaaag

SEQ ID NO: 238816 - DNA, 201 bp, Homo sapiens
aggctgcagtgagccatgatggcaccattgcactccagcctgggtaaccagagtgggaccctctcttaaaaaaaaaaaaaaaaaaagcagaattaaaattkgacatttttttatattcatgtttgggcccattaaaaaaaaaagagaacaatgaaaaattataggtgagagatttcagataagtggtaaaattacataata

SEQ ID NO: 238817 - DNA, 201 bp, Homo sapiens
cttgtgactcagatgttattcaaagtcacatcaagttgttttctctctcatgctaaatgtcttctttagttgtgtggtatattaaacaaacattggctgcrtatttagtgtttttaattcacacaaagactaaatccattgcttatgtaatgaacgtattagacatttaattttttaaaaattgagttattgtggctcaga

SEQ ID NO: 238818 - DNA, 201 bp, Homo sapiens
taaatataatatcaaaggcacaatatatgaaataataaattgataagttggatttcattaaaattaaaaatttatgctctaccaaagacactatcaagagrctaaaaagacaagccacagactggaagaaaatatttgcaaagaacatctgataaagcactgttatccaaaatatacaaagaatgcttaaaactcaacaat

SEQ ID NO: 238819 - DNA, 201 bp, Homo sapiens
gagagttccagcattactctaggaaccagggatataacaataaacagtccagatacgatccctaccttcctgaagtgtatattttgatggtggggttacayaatcaggcaaaagaatataatgtaattttaataaaacggtacagcaacaaactcttgggagtttcaaaagtctgtattttagaccagagtggtcaggaaa

SEQ ID NO: 238820 - DNA, 201 bp, Homo sapiens
agtattgaatttttatgtatgtctcacatatttgagatacactgggtcaaattgttgatttattttttttaatgattttcaagttctcagtttagaagcaygattggctgatagtttctatgactcaagatgaaatgtattcactgcttaattgaatgcaacagttgtgttttgtttacaaaatcttatctaaaatgaatg

SEQ ID NO: 238821 - DNA, 201 bp, Homo sapiens
actgtgataaataaatttcttttttttttttgataaattacccagcctcaggtattctgtcacatcagcataaaacacactaagacacaggccttataccmtttacaaaattaactcaaaatggatcacagacctaaatttaaaacaaaaatctataaaattcctagaagattacatagaagaaaaatctagatgacctta

SEQ ID NO: 238822 - DNA, 201 bp, Homo sapiens
ctatgttaaaaatcttaactgagtgtatttaatactgtactattttccatatagttacaataaattccttgctctttctctctttggctacttttttgaartagactaagatgcttggtgaagcagctggaaagaggtgatgttaacgtcgtcgacttaaagaagaatattgaatatgcggcatctgtgctggaagcagtt

SEQ ID NO: 238823 - DNA, 201 bp, Homo sapiens
atggagagttccagcattactctaggaaccagggatataacaataaacagtccagatacgatccctaccttcctgaagtgtatattttgatggtggggttrcataatcaggcaaaagaatataatgtaattttaataaaacggtacagcaacaaactcttgggagtttcaaaagtctgtattttagaccagagtggtcagg

SEQ ID NO: 238824 - DNA, 201 bp, Homo sapiens
aagcaatacagtgaagcaaaaataatcttttcaataaatggtgctaacacgactgaacatccacatgcaaaagcaaaaagcaaagaagaatctagacacaractgctatggtttgaatgtgtttcccagaattcatgtgttgcaaacataactcccaatgtgacagggttggaaggtattgaggtcaggagtgttctatcc

SEQ ID NO: 238825 - DNA, 201 bp, Homo sapiens
ttagccactggttagaactatcttaagaatgagtgtcattcagaaaaaaagttatagccaaattcatccagactatactgatacttttaaaaacattgagwtactttggaaagtagggttaatattcttttattaactcaactctgttgacttattaatacaacttaattatttgttcattctacaaatattcattcactg

SEQ ID NO: 238826 - DNA, 201 bp, Homo sapiens
atctttatgatagtgctagaaaaaaaaagaaagtaatagtgcctggtaggtcatttatcatatgttggatgaataataaagcttggtttatctggcagackatcagacacagatcttaaacaggctgcttgtataaaatgccagatttctttagtttttgttttctctgttgttattaaatagtttttattgtgtacattt

SEQ ID NO: 238827 - DNA, 201 bp, Homo sapiens
tttacagttttctacctgtttaactaagtgcttaatataaacatatatgataattgagaaaaatggcctactatatcatatgcaggtaatttcatgacaargtcaataaaataagaggccaccagctaatatttaggaatattttagagtataaaaattttgcaaaaagaatccagcagggcagaaaattccttatattgt

SEQ ID NO: 238828 - DNA, 201 bp, Homo sapiens
cttgtgggtatagcagtaaacactaatgtatacagcgtgagtcacactatggtaatcttagccactggttagaactatcttaagaatgagtgtcattcagraaaaaagttatagccaaattcatccagactatactgatacttttaaaaacattgagatactttggaaagtagggttaatattcttttattaactcaactc

SEQ ID NO: 238829 - DNA, 201 bp, Homo sapiens
cacggccagagatggacacatgataattccaagctgttaaagcctgaaatggggtgggcttacacattgtagccccttgatggagacagaggaagagttgmaattcaaacagtgaagtgttggggagggcattctgtctgtccctggaatggaggaaaccccagggtcccagagattgatacagtttggagggaaaaggaa

SEQ ID NO: 238830 - DNA, 201 bp, Homo sapiens
tgtttacaggcagatggctgaagaaatcttgcttatttacagttttctacctgtttaactaagtgcttaatataaacatatatgataattgagaaaaatgrcctactatatcatatgcaggtaatttcatgacaaggtcaataaaataagaggccaccagctaatatttaggaatattttagagtataaaaattttgcaaa

SEQ ID NO: 238831 - DNA, 201 bp, Homo sapiens
aaagcaaagaatgaaaagaaaaggctgtccttgatgaattcagattgttttgttaagtgtatgtcttgtgggtatagcagtaaacactaatgtatacagcrtgagtcacactatggtaatcttagccactggttagaactatcttaagaatgagtgtcattcagaaaaaaagttatagccaaattcatccagactatactg

SEQ ID NO: 238832 - DNA, 201 bp, Homo sapiens
tgtttatgtaaagttaacttagatttattaaacttttaaagagtttgcttgggaagaagctgtgcctacctttcccaaagacttacacatgttcaaacaaygttaacttgttcaagaaacatccacagctacatgttaggaattatagtaagtattgtaaagtcagaaaggaaagaaagaataaaaggaagaaatgaagaa

SEQ ID NO: 238833 - DNA, 201 bp, Homo sapiens
ccagcctcgcatgactcctagaaagttaaagttgttagcaaagatcacatagtcactttctgagacagctatgacttaccaaatataaatgtaactttctrattttattcatcctttagcaaaaatgtgtcactggcctctttactcatccattaatttaaccattacaaaaatagtctggtggtagacctttagtgtttt

SEQ ID NO: 238834 - DNA, 201 bp, Homo sapiens
cacagtaaaagcaaagaatgaaaagaaaaggctgtccttgatgaattcagattgttttgttaagtgtatgtcttgtgggtatagcagtaaacactaatgtrtacagcgtgagtcacactatggtaatcttagccactggttagaactatcttaagaatgagtgtcattcagaaaaaaagttatagccaaattcatccagac

SEQ ID NO: 238835 - DNA, 201 bp, Homo sapiens
aaggaccttttcatagaactgtagactttcagagttggaagttgacttgaagaatctagaatgcttaattaccatctacaaacttaattcttttcctgagwtttttatctaatttttttgtttacacacagattttattgtttacaggcagatggctgaagaaatcttgcttatttacagttttctacctgtttaactaag

SEQ ID NO: 238836 - DNA, 201 bp, Homo sapiens
agctttagttttctcgattacactcaaatgaaccctctttatttgctttagggcattattgggaagatttaattaacaccagctataaaatatcactctgrtcactctatatccccctcacatagcctgttaattcctacagttcttattgtacctgacctattactgattttttcccatcctgagttagaatggaagctc

SEQ ID NO: 238837 - DNA, 201 bp, Homo sapiens
acaagagaagatattgataagcttaaggagtaatctttagaatatgatagatgaaaagctggaccacaaatggctagaagagtggattggcacagttatckgtgtaattatcagggcacttagcaacattttaattagtgggaatttatgatggcttaagttgtttttgctgtccagtgtttttaaaagtggttgcctaca

SEQ ID NO: 238838 - DNA, 201 bp, Homo sapiens
aaaatcataaaatacttcatgagttatggcaacagattgctattgtgtttattatgttaatgtgaagtgcttttactatattgtgtaagaataaaaaagarcaagagaagatattgataagcttaaggagtaatctttagaatatgatagatgaaaagctggaccacaaatggctagaagagtggattggcacagttatcg

SEQ ID NO: 238839 - DNA, 201 bp, Homo sapiens
cacatctgtagttagtctcagatacttgggaggctgaagcaggaggattctttgagcccaggagttagaggcaagcctgggaaacatagtgacaccccatstcttaaaaatgtgttacatatgggtttcaatattccatgggatcagagggcttttactgtttttgaatgaaaggtcgaactggtgatgggaagtaacact

SEQ ID NO: 238840 - DNA, 201 bp, Homo sapiens
aaggacacagtgttgcacaaaataagcaaactgctgggctttagtaggcggttttcccctgacagtgtgaaggagactgagaggtttggactaagcaaaaytcaccacaacacagcaaagcggctgtgtccagactgcttctctagattcctcctcactgggcagggcatctctgcaggaaatccagcagctccagtcagg

SEQ ID NO: 238841 - DNA, 201 bp, Homo sapiens
atggggtgaatgatttgggtgatcaataataaacatacaaaatggtatcaataatatatttgtttcttttctttatcattttagtctcaggtttatttttmtaaaatttcttaactatatttaatattaaactctaagacatttagtgttagaagcaaaattgacaatttgcttattcacagcattaaaaaatattttccc

SEQ ID NO: 238842 - DNA, 201 bp, Homo sapiens
tcatctttagtcgagcaaaggaaacaaggcaaatgcaatattaaagttacatacaggttgcaatcagggtgcggtggtgcacatctgtagttagtctcagrtacttgggaggctgaagcaggaggattctttgagcccaggagttagaggcaagcctgggaaacatagtgacaccccatctcttaaaaatgtgttacatat

SEQ ID NO: 238843 - DNA, 201 bp, Homo sapiens
agattccatggccaaataagtctgtgaaatgctgcatatgaggtcaccttctgaccactcatagggtactttagtatattaaaaactttggcaaatagtaragaagcttatttatttttccttagttcatttgaccatgaattctcttccctcttagccctccaccttttgttttccttgtaataccaagtggaggagagt

SEQ ID NO: 238844 - DNA, 201 bp, Homo sapiens
tcagtttattacttgtccttcattttcttaatggcatcttttgaagaataaaggtttttaattttaatgaagtcaaatttatcattttcccttatggattrtgcttttagtgtcttaatctttgcctaatctaaggtcacaaaaattctctcctgttttctactagaagtctttgtaatattagctcttacatctaggtct

SEQ ID NO: 238845 - DNA, 201 bp, Homo sapiens; identical to SEQ ID NO: 46576

SEQ ID NO: 238846 - DNA, 201 bp, Homo sapiens; identical to SEQ ID NO: 46566

SEQ ID NO: 238847 - DNA, 201 bp, Homo sapiens
ccttaaaactatcagtaaaacagagattatgtaaaaggagtcaggtccaagaagcatttagttgcttttaaactttaaaaaccttttgacttctgaaatgytttttgatagaaaattcgatgccgtgagtattccagagaggtattgtttgaatgttgagctggactgaaagaaaaaagtcagcacaaaataaagcaatgt

SEQ ID NO: 238848 - DNA, 201 bp, Homo sapiens; identical to SEQ ID NO: 46562

SEQ ID NO: 238849 - DNA, 201 bp, Homo sapiens
taataggttaagtttccaaggtaaccctcaaaacactgatcccatcataaagtcgaacaacataggtgtttcttgagcaagtatcaagtactagaaatgakggacttacatttttctacatacaaagatgtttgtacattctttactatatttatatagcctacttcccaatatatttttcttctgtctactctccatctc

SEQ ID NO: 238850 - DNA, 201 bp, Homo sapiens; identical to SEQ ID NO: 46564

SEQ ID NO: 238851 - DNA, 201 bp, Homo sapiens
gagggacttacatttttctacatacaaagatgtttgtacattctttactatatttatatagcctacttcccaatatatttttcttctgtctactctccatytcttttatctcatttccatccccatcagtctagctggagtcaccattatctgtgaggctgtctcaggcctatctgtgtagacacacattagtcagttcca

SEQ ID NO: 238852 - DNA, 201 bp, Homo sapiens
ctatcctcctcctcaatcaaaaggcccacttccttttcctcaccacttgtccctcaagcaaagtattagtaagtcagccaaagatagagcaaataataatrgttgaaaagtagtgtaaaaaataccttttaataattaaagatagtgtatactctatctcgctatgatatttacatatttttctatctttctttctttctt

SEQ ID NO: 238853 - DNA, 201 bp, Homo sapiens
tggtgttacctttagagttttggtttgttttctgttttttggtggggggttggggggtaagggtgaagaagggtacaagcagctcagaacgcagacatagrttaatcaaagaaataatactaatggactctcctaggaggaaaccacttactccaacaagagtattcctactatggaaagatgaaccacccttaattcctc

SEQ ID NO: 238854 - DNA, 201 bp, Homo sapiens
ctcccaaagttctgggattacaggcgtgagtcactgcgcccgtccttaaaatagtatttttaaagagtttttgaattatatcttgtaactattatggaaayttccacaaataatccactacatttccagttagactttcaccacctttaggagcccaggaaattcactatcatttttcagaaacttgtaatatatcacctg

SEQ ID NO: 238855 - DNA, 201 bp, Homo sapiens
gatctccgtttactgcaacctccacctcccgagttcaagagattctcctgctgggattacaggcgcatgccaccacgcacggctaattgttttttgtattkttagtagagacagggtttcccatgttggccaggctagtctcgaactcctgatctcaggtgattcacccgcctcggcctcccaaagttctgggattacagg

SEQ ID NO: 238856 - DNA, 201 bp, Homo sapiens
attggctctgtctcatggggaaaatagccctgttctgtctagatttgagtcaacacaagccaaagcctgttagcatagcatggcaggccttgggagatggkcatccctggctgtgctccactatagctgttcccacactaaacccttcaggctctgtgcaggcttaagtcccacccctatcaactctgtaagaagctctcc

SEQ ID NO: 238857 - DNA, 201 bp, Homo sapiens
cttgatctccgtttactgcaacctccacctcccgagttcaagagattctcctgctgggattacaggcgcatgccaccacgcacggctaattgttttttgtwtttttagtagagacagggtttcccatgttggccaggctagtctcgaactcctgatctcaggtgattcacccgcctcggcctcccaaagttctgggattac

SEQ ID NO: 238858 - DNA, 201 bp, Homo sapiens
aggctggcaaacaggggggctcccagatcagattggctctgtctcatggggaaaatagccctgttctgtctagatttgagtcaacacaagccaaagcctgytagcatagcatggcaggccttgggagatgggcatccctggctgtgctccactatagctgttcccacactaaacccttcaggctctgtgcaggcttaagtc

SEQ ID NO: 238859 - DNA, 201 bp, Homo sapiens
ttgtgtgtttgttttgtttttctttgagacggagtctggctctgtcacccaggctggagtgcagtggcttgatctccgtttactgcaacctccacctcccragttcaagagattctcctgctgggattacaggcgcatgccaccacgcacggctaattgttttttgtatttttagtagagacagggtttcccatgttggcc

SEQ ID NO: 238860 - DNA, 201 bp, Homo sapiens
ggatttgtgagtgtgaagaggtgagaataacctttttgctgccaatgagatacaccatgaggatgaggcttactgacaggggaaaggacagctgagatatrcagaggaaacaaatcttgatgagattatttgaaactctgaatcaaaccatagctgaagaaagcaccagcactggaatcttcatttataggtcctacgtat

SEQ ID NO: 238861 - DNA, 201 bp, Homo sapiens
gatggtcagacagggtctgttggtgaaggagctgtggtagtgtccactgggaagcaccccagttcagtatctgtgcttgcactgcaaatgggtgtgtccargcaaggactctggggagaggctggcaaacaggggggctcccagatcagattggctctgtctcatggggaaaatagccctgttctgtctagatttgagtca

SEQ ID NO: 238862 - DNA, 201 bp, Homo sapiens
gtaacatttcatgaaatacattctacactgggtagcaatctacatgtcaagatcacttaggcttcctctgccctaaagacagaagaccatttgcttccctyctttccataatggaggaaatctctctcatgctcacttttgataggttattttttttttcaacatttctgtcactgaagcaagggatatttgatggcccct

SEQ ID NO: 238863 - DNA, 201 bp, Homo sapiens
tagagttttggtttgttttctgttttttggtggggggttggggggtaagggtgaagaagggtacaagcagctcagaacgcagacataggttaatcaaagarataatactaatggactctcctaggaggaaaccacttactccaacaagagtattcctactatggaaagatgaaccacccttaattcctccagctgtcctgg

SEQ ID NO: 238864 - DNA, 201 bp, Homo sapiens
tggatttgtgagtgtgaagaggtgagaataacctttttgctgccaatgagatacaccatgaggatgaggcttactgacaggggaaaggacagctgagataygcagaggaaacaaatcttgatgagattatttgaaactctgaatcaaaccatagctgaagaaagcaccagcactggaatcttcatttataggtcctacgta

SEQ ID NO: 238865 - DNA, 201 bp, Homo sapiens
ctgtgcactggtggtggtggggcagtgtggtccacgcatgtatgttgggcagctgcaggacacatttgtgaacatgtgttggcaaggtggtaggggaagcrgcagatgggtgtgcactggcaggggcccatctgcagaagctctctgatggtcagacagggtctgttggtgaaggagctgtggtagtgtccactgggaagc

SEQ ID NO: 238866 - DNA, 201 bp, Homo sapiens
atatcatgtgttttcattttttttttcacttttaaaatctgtgacattgatagaatggatatcgttgggagcacttaagtggttattttcctaaaatttasaggtacttatccaatgaagtagcatctgtgaatgacttttataaattgcaaagcctaattcaaatagcatgtactatacttaagatacacacaagattat

SEQ ID NO: 238867 - DNA, 201 bp, Homo sapiens
gtttatatctttcttctactggatttgtgagtgtgaagaggtgagaataacctttttgctgccaatgagatacaccatgaggatgaggcttactgacaggkgaaaggacagctgagatatgcagaggaaacaaatcttgatgagattatttgaaactctgaatcaaaccatagctgaagaaagcaccagcactggaatctt

SEQ ID NO: 238868 - DNA, 201 bp, Homo sapiens
tggcagcagcagtggtgggatctgcctgtgcactggtggtggtggggcagtgtggtccacgcatgtatgttgggcagctgcaggacacatttgtgaacatgtgttggcaaggtggtaggggaagcagcagatgggtgtgcactggcaggggcccatctgcagaagctctctgatggtcagacagggtctgttggtgaagga

SEQ ID NO: 238869 - DNA, 201 bp, Homo sapiens
cgctggattaacagataagcatgcaacccaatcaaagctataagacacaagagaaatttttctggggcttctgggaaaaactagtttatatctttcttctrctggatttgtgagtgtgaagaggtgagaataacctttttgctgccaatgagatacaccatgaggatgaggcttactgacaggggaaaggacagctgagat

SEQ ID NO: 238870 - DNA, 201 bp, Homo sapiens
caggagtttgagaccaacctgggcaacataatgagactttgaatctacaaaaaatattaaaaattagccaggcatggtggcgtgtgcctgtagtcccagtwacttgggaagctgagataggaggatcacctgagcccagggaggttgaggctgcactgagctgtgattgtgccactgcactccagcctgagtgagagtaag

SEQ ID NO: 238871 - DNA, 201 bp, Homo sapiens
tcctgtgtccaagtgctctcattgttcaattcccacctatgaggtgtttggttttttattcttgcgatagtttgctgagaatactttttaaagagaatgarcccccttggtttaatccagcaagcattgtctatctcgctggattaacagataagcatgcaacccaatcaaagctataagacacaagagaaatttttctgg

SEQ ID NO: 238872 - DNA, 201 bp, Homo sapiens
gagttcttgcattgtttctttcttatctgtgtaagctgatgtttctttaatctttgaagttgctgtcctttggatggggctttttgcttttatattctttyatgcacttgagggtttgactgtggtataagttgggttgagttgactggctttgtttttggattatttcagggggccaagtctcagctcagcactcctggg

SEQ ID NO: 238873 - DNA, 201 bp, Homo sapiens
ctatgattttgaaaattaactctgaatttgtaataagtggtacatattttgcatattattttaaccttacagggacttggacaccaattatcttttatagwtttgttaatcaatattaacaaaacataaaatttttgccttgcaaaatgtacttgttcttcctctcgtagagccatatgtgagtggaaagatcttgaattg

SEQ ID NO: 238874 - DNA, 201 bp, Homo sapiens
aatcggactttgagctgtgagattctttcctcagcttggtctattctgctattaatacttgtgatcgtattatgatattcttgtagtgagtttttcagctytatcagaacagtttgtttctttcttaaaattgctattttgtctctcagctcttgaatcattttaatagatttcttagattccttgaattgggtttcaagt

SEQ ID NO: 238875 - DNA, 201 bp, Homo sapiens
ccaccaaaatgcccaaacaaaacaaccttgaactgtgactatacctgaattgaccgtgtccttgcaggtggtgacattgtaaattgaattatgcacactcttaagtggatgaactgattcatgcagaacattcaggtgtcaaccaatgagtattatgggcctatttgtatataagacaatgtatccactccatagtccaat

SEQ ID NO: 238876 - DNA, 201 bp, Homo sapiens
aagtaaagtctttcttaccatgctttaacacgtgtcattgaataattttttcattaacactactcagaatttcgggtgaacaattgtagaatctccatgayatcagtagcctaaagaaaacatagaaaattttgggagttctagattcttggcatggcttggtataggtgaccaggtcaggatgggggagagagctttcat

SEQ ID NO: 238877 - DNA, 201 bp, Homo sapiens
ttttaacatacagttaatattttttaatagtctttaagtctcactcttcaattaaatattcattcaaaaacattgattgagtgttcatcatgtatcagtarttctgcttagcgtgaggcatacagcgatgaaaaaagctaaagggtctgtgcacaatggtgctttcgttctggtggtctcagcaccctggtctgacttgag

SEQ ID NO: 238878 - DNA, 201 bp, Homo sapiens
taatattgttgtattttaacatacagttaatattttttaatagtctttaagtctcactcttcaattaaatattcattcaaaaacattgattgagtgttcaycatgtatcagtaattctgcttagcgtgaggcatacagcgatgaaaaaagctaaagggtctgtgcacaatggtgctttcgttctggtggtctcagcaccct

SEQ ID NO: 238879 - DNA, 201 bp, Homo sapiens
tactctcttggtgttagcaagttgtctctgaaggacccacaaatggtccccaggagaaaaaaaataggcagcatttgggcatttgtcacatagatgacagmaaaaccaccagtctagccagaccctttggtcctataatttcctgcctctcgcaccgcattgctaaacaaccagaagcagcagtgagtgggaatatggagg

SEQ ID NO: 238880 - DNA, 201 bp, Homo sapiens
cctccatgcacatcatctgtggcaagaatttactcatgtgaccatacctagcttcaagagagcttagaaaatgtagtgtttttagtgggaaaatcgctaayaaataaaagtagaatgcagtttttcagggaaaaggaaggcaaccctttgaagtactattgtttttaagccaccttatattaccaagctgaactcaagtaa

SEQ ID NO: 238881 - DNA, 201 bp, Homo sapiens
caagtggtatagattgaaaaaatgctgtaggagttttgcatgaggtctgggacagttggaaaacacttaagaagaactagaaactacactggccattgaakaaaggctagaacttcagtaagagtagtatcgaaagaaggtttttaagaaaggaaaatgtattgaaccaagatgttaatgggaatctagcttattcaaata

SEQ ID NO: 238882 - DNA, 201 bp, Homo sapiens
aatcaaagaaataatactaatggactctcctaggaggaaaccacttactccaacaagagtattcctactatggaaagatgaaccacccttaattcctccakctgtcctggaagatattcgcaacatatgagttcagtaccacctttagccccaggccagtgaagctgcttcccagggcacgattccccacttcagggggcc

SEQ ID NO: 238883 - DNA, 201 bp, Homo sapiens
tcataattgtcaaaccttggagcaatcaagatgtccttcaatagtagaatgcatagactatctatgcacacaatagaatattatttagcaatataaagaawttagctatcaagccatgaaaagacatggagaaaaatgcatattaccaagtggaataagccaatattaaaaagtctagccttttactatatgatactaagt

SEQ ID NO: 238884 - DNA, 201 bp, Homo sapiens
gaaccacccttaattcctccagctgtcctggaagatattcgcaacatatgagttcagtaccacctttagccccaggccagtgaagctgcttcccagggcaygattccccacttcagggggcctgacaagggctctctttggtgttcctctccccatggtgtgccccgcaagaccaagaagaacctgaagctcatggccctc

SEQ ID NO: 238885 - DNA, 201 bp, Homo sapiens
ttgcaagcatgcaccaccacacccagctaaatttttgtatctgtagtagagaaaaggtttcaccatgttggccaggctggtcttgacacattttaagaatwcctaaggaaaatgtaccagtcatcattttttcacgttgtatgtttcttaaaaacaaagtcttcatttttaaaaagcatttacaatgtaaatgattatgca

SEQ ID NO: 238886 - DNA, 201 bp, Homo sapiens
agactttttaagatcaattctttttaaccataagtttcaaggcagagaggagatagagaaaatgattactggcattagcattgaccgaatgtgaaggcagyctgggtactcagtatgaaaaaaatgcgtttaaagtggaggataacttatcaatcagtaactcagaccctgaaaccagacatacatgaccaaaaaatgtga

SEQ ID NO: 238887 - DNA, 201 bp, Homo sapiens
acttcagggggcctgacaagggctctctttggtgttcctctccccatggtgtgccccgcaagaccaagaagaacctgaagctcatggccctcttccccctycagatactgtaggaccctggaattccctgctcttcccagtatgttcctttaccttattttgggcagaagaccccagcattctctacccaaaggtccccaa

SEQ ID NO: 238888 - DNA, 201 bp, Homo sapiens
agagtcaaaatcccatgacctctccttccgtggccgcctccttctttacttcccttccctgcaaactttttagttcaaaatataagccctttgggagttaygtcatctgatttcaagagaaaattatgattataaatagctccgaaggattagttgagtcacagattggatgcagggtcagctttcacagttcaccggctg

SEQ ID NO: 238889 - DNA, 201 bp, Homo sapiens
tacaatggtcatcttctcacagttaaaaaaaaaagttgggtcgaggagaggctaacaataccagaggaacattgaacaaatctatcaggaaactttttttwaaaaaaaagctattgagataaattggtaagcttgccattttaaatactttttggaacaaaacagggaataaataaacatgcttcagtggtggcctgaaag

SEQ ID NO: 238890 - DNA, 201 bp, Homo sapiens
gtgtacttttgtggtggctggtaacagttttttgttgctatgtttagcactcccttaaggacctcttgtaaagcaggtatggtggtaacaaattcccttarcatttgcttgtctgaaaatgattttatttttccttgttttatgaagcttagtttggctggatatgaaattcttggttggaatgtttttcctgtaaggatg

SEQ ID NO: 238891 - DNA, 201 bp, Homo sapiens
tgagacttcataaatcaatgtgcaacactacacttaggacaagaaagaaacccttcaaatctacttttcacattgttgtataatttcgccatcatttctargagattttagaccacgaaagtgttttgttttgcttacatttttcttttgtgtttttgtttattaaaggaaataaaatggaatggttggatatataatccc

SEQ ID NO: 238892 - DNA, 201 bp, Homo sapiens
tatctatgcacacaatagaatattatttagcaatataaagaaattagctatcaagccatgaaaagacatggagaaaaatgcatattaccaagtggaataarccaatattaaaaagtctagccttttactatatgatactaagtatctgatggtctggaaaaggccaaactaaggagacagcaaaaagatagtggttgtcag

SEQ ID NO: 238893 - DNA, 201 bp, Homo sapiens
ttcctagattggatatggaggaggcaccaagcactccgtaggtcttaccttggagaaagccacatctaacttcaacattatccttacttgacctcatttaygccaagatttgccttttgggaattgagctaaggtcggcataactgacttctccacccaaaagttcagtcttcatagtcactcatgtacaatggtcatctt

SEQ ID NO: 238894 - DNA, 201 bp, Homo sapiens
tggttgttgtatagacttgattgtgtacaagctttatagtgtcaatggtctatgtacttaagtgtacttttgtggtggctggtaacagttttttgttgctrtgtttagcactcccttaaggacctcttgtaaagcaggtatggtggtaacaaattcccttagcatttgcttgtctgaaaatgattttatttttccttgttt

SEQ ID NO: 238895 - DNA, 201 bp, Homo sapiens
tcctgagtagctaggactacaggcacgtgttaccacgccagtctaattttttgtatttttagtagagatgaggtttcaccgtgttagccaggatggtctcsatctcctgacctcgtgatcctccctcctttgcctcccaaggtgctgggattacaggcgtgagccaccgtgcctggcctatgtttaggtgatgttttttgc

SEQ ID NO: 238896 - DNA, 201 bp, Homo sapiens
gtgaggcaatttcccagaaaatattgagctctaattaaatctgtgccgtgttgagacttcataaatcaatgtgcaacactacacttaggacaagaaagaarcccttcaaatctacttttcacattgttgtataatttcgccatcatttctaggagattttagaccacgaaagtgttttgttttgcttacatttttcttttg

SEQ ID NO: 238897 - DNA, 201 bp, Homo sapiens
taaaaatgactttattcttcatctgggctaatacctaactagtgcaaatacttgaatattttaaaaatccctaaaaccagagaccctatgcctatgttttytatacttttattcatttattcaacaaatatttgtgaaggacacactatatacactgatacttattttgctattctgtttggctaccgttacctcccagtt

SEQ ID NO: 238898 - DNA, 201 bp, Homo sapiens
gatatgtgaagatttgatcctgacatgttgttagctggttgttgtatagacttgattgtgtacaagctttatagtgtcaatggtctatgtacttaagtgtrcttttgtggtggctggtaacagttttttgttgctatgtttagcactcccttaaggacctcttgtaaagcaggtatggtggtaacaaattcccttagcatt

SEQ ID NO: 238899 - DNA, 201 bp, Homo sapiens
ttataacaaagttaattgggcaaagtttaattgttagaatatctttactcaaacttcagacagaaagaaactttcattgtatatgactatttcctgaactmtcaagatatttcaagtaattgactcaaaaattaatttctgtttattttgtttactttgttgcttatgtaataagactctttcatctaaacattctgcttt

SEQ ID NO: 238900 - DNA, 201 bp, Homo sapiens
tgtgactaaaaacattgacatatacaacatatgcatcaaaataagcaaataaaaatgactttattcttcatctgggctaatacctaactagtgcaaatacytgaatattttaaaaatccctaaaaccagagaccctatgcctatgttttctatacttttattcatttattcaacaaatatttgtgaaggacacactatata

SEQ ID NO: 238901 - DNA, 201 bp, Homo sapiens
ttctgaatagttatgtttaaaagatgaagtaataatcgtgatttgggggatattaagaaatatcttccatgtttgtctgtggataactaaattcagcagaygtgaagtcagtaaatatttgtgtctactggacaaaaattattgctttaaactgcatcaaacatattttaaggttaatattttatggagtaatttagatag

SEQ ID NO: 238902 - DNA, 201 bp, Homo sapiens
ggggcgtttagcctgtttacgtccaaggttaacatcgatatgtgaagatttgatcctgacatgttgttagctggttgttgtatagacttgattgtgtacawgctttatagtgtcaatggtctatgtacttaagtgtacttttgtggtggctggtaacagttttttgttgctatgtttagcactcccttaaggacctcttgt

SEQ ID NO: 238903 - DNA, 201 bp, Homo sapiens
caaccatacacaccccacccccctccacacacacaggcaacatttctgggttctgtaacaaacaaggtgggaaaggagtcttatctttgtttgacgatgtktattacatgagaccagaccttctattgtctgatttgagattttggcaacttaatgtgatcacaggatgtttttagttctctaagaatgatcaggaaagta

SEQ ID NO: 238904 - DNA, 201 bp, Homo sapiens
caactattaaggtttaaaaaacgcttggaattccatatcaaaatgggctaccatgttatcccactaatttaaatcaagggaggggataaaattggaggtgwggaacaggagggtagttaaagacaggcaggtagttaaggaaaacttgagtatttaaggcaaggcatggagctaccaaagaggagactagaaagaatagac

SEQ ID NO: 238905 - DNA, 201 bp, Homo sapiens
ggacaaacatctctttggtaatgatatataatcctttttacataatgctcaatttgatttgctaatttatttttacagttttagtctctgttttcaagtgrtattggtctgcagttctcttgtgttatctttgtttggatttggaatcaggataattctggcttaataaaataaattgggaagttttttctaatactctac

SEQ ID NO: 238906 - DNA, 201 bp, Homo sapiens
gcatacaggttgggccttgcttctttatccaacttgccacttcgtgctttttaagtggggcgtttagcctgtttacgtccaaggttaacatcgatatgtgmagatttgatcctgacatgttgttagctggttgttgtatagacttgattgtgtacaagctttatagtgtcaatggtctatgtacttaagtgtacttttgtg

SEQ ID NO: 238907 - DNA, 201 bp, Homo sapiens
ttcaaagaaagtgtcacatgtgaacacaataaagcaccagagtaagaatagctttctccctatcaattgctcactcagtgaagttacaaagaaaatttcayaagtaagagcttatgctttatgggggtgatggataagataaaactgcatgtcacacctgtttatcaaaatatatgaccaggccaggctggagtttctggg

SEQ ID NO: 238908 - DNA, 201 bp, Homo sapiens
gtctgcactgaaggtaaaataaagcctatctatgtagactaaaccaattttttgacttttcaaatgtcaaagttttttcactttcaactattaaggtttaraaaacgcttggaattccatatcaaaatgggctaccatgttatcccactaatttaaatcaagggaggggataaaattggaggtgtggaacaggagggtagt

SEQ ID NO: 238909 - DNA, 201 bp, Homo sapiens
tctttgttcaagtaatatggctaattacattgattaattttcagatgttaaataaatcttacattcctaggacaaacatctctttggtaatgatatataawcctttttacataatgctcaatttgatttgctaatttatttttacagttttagtctctgttttcaagtggtattggtctgcagttctcttgtgttatcttt

SEQ ID NO: 238910 - DNA, 201 bp, Homo sapiens
gagtgcaatggtgcaatctcggctcactgcaacctctgcctccctggttcaagcaattctcctgcctcagcctccccagtagctgggattacaggcatgcrtcacaacacccagctaattttctgtatttttagtagagacggggtttctccttgttggtcaggctgatctcaaactcccggcctcaggtgatccaccagg

SEQ ID NO: 238911 - DNA, 201 bp, Homo sapiens
aataaattactgtagagtgtaaacataacttttatacatagtgcaaaaccagaaaatctgtgtaactcattttattatgttagctttattgtggtagactrgaactgaacctgcaatgtttctgaggtatgcctatctatggttttctctctttgttcaagtaatatggctaattacattgattaattttcagatgttaaa

SEQ ID NO: 238912 - DNA, 201 bp, Homo sapiens
atggatattttagcaatgttgattcttcctacccatgagcatggaatgtttttccatttatttgtgtcatctctgatttctttaagcagtgttttgtaatkcttgttgtagaaatcttttacttccctggttagtagtatttctaggtattttattctttctgtggctattgtgaatgggattgcgtccctgatttggctc

SEQ ID NO: 238913 - DNA, 201 bp, Homo sapiens
acatcaataattatactgtgtataaaaggttcttcagaacatctaatgattgtgggactaggtgaggtcaattctgtggtaggcatagggaaagcttcttrttcatatttttcatctgcctgacatataatacctttgtgatatattatccattttattaaataaacagttattgaaatgtatctcttctttataacttct

SEQ ID NO: 238914 - DNA, 201 bp, Homo sapiens
atataaattttaaaatagtgttttctaattctgtgaaaaatttcattggtagtttgataggaataacattgaatctgtaaattgctttgggcagtatggayattttagcaatgttgattcttcctacccatgagcatggaatgtttttccatttatttgtgtcatctctgatttctttaagcagtgttttgtaattcttgt

SEQ ID NO: 238915 - DNA, 201 bp, Homo sapiens
ccctctgcctggaacacacttttcccagacatccacatggctcattcttttacctccttcacatctaaattcaaatttcaccttcttagaaaggtcttctytggctatcgtacttaaagttgctaccctggatcaactctatgtctctcttctattttttttcaataacacttggaatcttctaatatatcatatacttca

SEQ ID NO: 238916 - DNA, 201 bp, Homo sapiens
tataactttattttggggttctctattctgttccatgggtctatgtgtccgtttttgtaccagtgccatgctgttttggttatagctttgtactatagttkgaagctgggtagtgtgctgcctctggctttgttcttcttgcttaggattgctttgactgttcatgctcttttttgattcaatataaattttaaaatagtg

SEQ ID NO: 238917 - DNA, 201 bp, Homo sapiens
catcaaataaccccccatcatagccagccaaagttaggtattgacatgtacatagcagagaaagaaataacgtggaaagacttttgtaagaagccaagagmctttctcaccccaggttaaagcatagctgaatatgtggaattgatttctatcttggctgattcttaggcccaatcaacatagctactaccaactctctaa

SEQ ID NO: 238918 - DNA, 201 bp, Homo sapiens
ccagtcccatgctgttttaattactatagatttacattatagtttggaatcaggtagtatggtgtcttcagatttgttctttttgctcaatattgccttgsttttgtgtgtgtgtgtgtgtgtgtgtggttccatatgaatttttggattttttcctatttctgtgaaaaatgacatggggataacaaaaaactatatgga

SEQ ID NO: 238919 - DNA, 201 bp, Homo sapiens
ttcacttgcaaaggaaattcttcctgaccttccagactagattagttttttattttcagctcataaataacctgtatttctcttctcgtaacaaaatccaycttccctattcaaccacagcttttgagtgcaagagctatgctcacttcattggatttgctcttggattccagcacatagcacagtacttagcacatagga

SEQ ID NO: 238920 - DNA, 201 bp, Homo sapiens
tatagacaagtccttgagatgagagaaaaagctatctaaagagaaacacagagagctacctctaaaagtgctgtgacaagggataccccagaatgatgtcragccacactgactcttttctctcagacatgatccatttcccatttagagagagactgtggcagtgtttatcttctcttttgtgaggagttttaatttctg

SEQ ID NO: 238921 - DNA, 201 bp, Homo sapiens
tgccttattttgttttaaaattactagtgtttatagtaatatgactttgtatatattattcaactgtcaatcagatagtaaactatgactgtttcctatctcatacaacttctttcttcctcctagattcataattattgtattttttcatacatatatttcacaattttgtaaatgcttgatctgtcaaaacgaatttcc

SEQ ID NO: 238922 - DNA, 201 bp, Homo sapiens
tgttctttccctctccaccggcttaatgtgaatacagcgactatggaagaagccatgtattgaaaatagtgacatcatgtgatggaaagagcttaggtccraaatcactcactaatcaggaactcacaactaagatttcttatgagtgagaagcaaactgattatgtaatgactggattgaggattttacctcttacagtg

SEQ ID NO: 238923 - DNA, 201 bp, Homo sapiens
gcagctggctctttcacgaagcagttgattattggagtttggattgagttttctggtctaggtggttagcattcagatgggtttcttgagattacttagcyattttactggcagcattttaaagttgcatgaccatttgctccacaggcttgttttaagcagtttctttgagaggcaaggttcttttaaacatcactaaga

SEQ ID NO: 238924 - DNA, 201 bp, Homo sapiens
ggtcaaggaacagaaagaaaatcaatgtgagtaaaccatagtgcatgatgaagagattggaatgagacaagttcagcaaggtaaagcaggggcaagattaygaagtcaaggtaaggagtttgggttttagtcaatgccctactgaaagacattggaaattttaaacataagagtgagatgatccaatttatgtttaacaaa

SEQ ID NO: 238925 - DNA, 201 bp, Homo sapiens
cttgagagagatgatgtagggaatctggcagaagaaatttctaagcagcaaagcattcaagaggtgacttgggtgctgttaaaggcattcaattttaaaartgaagaagagtatgaaagttcagaaaatttgcagcctaacaatgcaataggaaggaaaatcccattttctgaggagaaatccaaaccagctgcagatatt

SEQ ID NO: 238926 - DNA, 201 bp, Homo sapiens
tgatgactgtcaattctgtggtatacctttaaaatatcagctaatgaatggaaaggttctaaatcttgaaaagagtacctgcttacactcatctatacatytgttgaaattcattgaactgtacactcaagatgtatccctttcactgtaggtaaattatacctcaattttaaaaattaaaggagttactttttatgtatg

SEQ ID NO: 238927 - DNA, 201 bp, Homo sapiens
ttttaccaaatgcatccacccgcattgtccccatcccacatatcatggtcatattctttcttctcagggccttacttcaccatataggacttactggttckgttttagcctttctcacaataaggcaacatattactccagctggagaagacaggtgtgtttaaatacagccacagagactttttggtctttgcaccttgc

SEQ ID NO: 238928 - DNA, 201 bp, Homo sapiens
actggtcaccaaggaatgaaagcataaaattatggaaaagagtgcctttcccttaatacagagtcacattatctctgtaaaaacatcagttgacttttgcrtcttgctaaatctagggatccttaatttggggttagatactgcattgatgtcaatcagtactttgagaagttagtctggtagaaagaaattgagcgtcat

SEQ ID NO: 238929 - DNA, 201 bp, Homo sapiens
taaggggcatcccaaatgtgtgtttttgatcatccaaacctagcctcataattagcagttgtaaggagattaggaaagggggacttatttgaagagggttrccagcttagtgctgtgaccctcaaagaggctgttcaccccctggaggatatttggcaaatccaggagatgtgaccagtgtctcttggtgttcaaagatat

SEQ ID NO: 238930 - DNA, 201 bp, Homo sapiens
aaatgtgcaaagattgctgcttaaatttcacttgcaaaggaaattcttcctgaccttccagactagattagttttttattttcagctcataaataacctgwatttctcttctcgtaacaaaatccaccttccctattcaaccacagcttttgagtgcaagagctatgctcacttcattggatttgctcttggattccagca

SEQ ID NO: 238931 - DNA, 201 bp, Homo sapiens
gtggacccatagcatgatatccaggccacttccattttttcttttctaccatgcttagtgtgtggctttcttttgccaggtcatttatgatcccagatggytgctggcctttagagagttccgctgcattccagacagcaagagaactccttccggtacagttagctctctccaaagaactgttctgaaagtttcaccaac

SEQ ID NO: 238932 - DNA, 201 bp, Homo sapiens
aagcttttggagttgcgtagggaagtttctggtggttgcagtgatggcaaggtgtttctgcatttagtgggcagcagggtccgggtaggctaaatgtcctrcagagctcagggcatttccttatcaggaggagttgtcccactcaaaattctgatagatatcctgttaaaaatgtgcaaagattgctgcttaaatttcact

SEQ ID NO: 238933 - DNA, 201 bp, Homo sapiens
gtataccagcttgatctttggattctcctctaatgcctctccttctgtgacatgcctcctattcagacctagggtcacccaaaagaaacattgcttaccaycccttttcctgtgctcattttgttctctcttctggaggcaactgttcctccgttttcctttcagccaggtttgctcttgttctatacgaagcttttggag

SEQ ID NO: 238934 - DNA, 201 bp, Homo sapiens
cttcacttttcttaacctgtcttgcctccattagtggggctatcaacactgtatcacctgatggccttagtctgcacctgttgctgctgtcccagatggcrctcatcttggtcttttttcctgaggtctcatcttgacagtgctgatgtggaagacatcccattcctgaagtccattgttgccatgcttgttgaagtagtg

SEQ ID NO: 238935 - DNA, 201 bp, Homo sapiens
aaagctttgcatccttcacagggtcactgtataccagcttgatctttggattctcctctaatgcctctccttctgtgacatgcctcctattcagacctagsgtcacccaaaagaaacattgcttaccaccccttttcctgtgctcattttgttctctcttctggaggcaactgttcctccgttttcctttcagccaggttt

SEQ ID NO: 238936 - DNA, 201 bp, Homo sapiens
aatgaacaggcatcttcaaaggacttacgagataggtagcatctcagatacgcctggtaaccaaacataatttaagacagtaacaaatggtaggaacatgkgagaaagagagttcagcaagagagaagcactgggatctaagatgatgtgagggtttttgaggaagagtgactacaccagtttgcttagaaattagggtgt

SEQ ID NO: 238937 - DNA, 201 bp, Homo sapiens
ctaagagataatttcagtcacaaaaactataaccctagctctcccagaatatattggtaataacaaactattaaagtaataatgagaatggtaaagcatakagtctggctgtggattccagccctttggagctgcttggaatataaatcacttctcagtttgcaaatttattcccctcagtgagatactgtatataaaaca

SEQ ID NO: 238938 - DNA, 201 bp, Homo sapiens
gttccttcagtttttataaacatagtactagaatctatcacaatttcagttagaagctaactttatatctgatcgctaattttacacgtctcgacacatamctccttatctcccccatcctgacgaatgtccagatattaattttaagacttggaattgtgaatgcaatgcttgaaagacattaagttaagcttcgttgtc

SEQ ID NO: 238939 - DNA, 201 bp, Homo sapiens
aagggtggaatcagtgatagctgatattgtgatgagtaaagtggttttgattacataggtacttatgcaagttaaaattctaagtgcagaaccaacaagaaaagaactctcatgttagatcaagaaagtgaactaacatttattaaaagcattttacacgctcatttcatgaagtccctgtgaagtgagtgatattatacc

SEQ ID NO: 238940 - DNA, 201 bp, Homo sapiens
aaatctggtatgtttgagaagtgttttgtggtccttaatgttggaagaaagaatgaatagcccgtgcttgtttcctaagagataatttcagtcacaaaaamtataaccctagctctcccagaatatattggtaataacaaactattaaagtaataatgagaatggtaaagcatatagtctggctgtggattccagcccttt

SEQ ID NO: 238941 - DNA, 201 bp, Homo sapiens
gacaaaaatgtaatactcaccacttcatagtacttactgccccagttccttcagtttttataaacatagtactagaatctatcacaatttcagttagaagytaactttatatctgatcgctaattttacacgtctcgacacatacctccttatctcccccatcctgacgaatgtccagatattaattttaagacttggaat

SEQ ID NO: 238942 - DNA, 201 bp, Homo sapiens
ggtggaatcagtgatagctgatattgtgatgagtaaagtggttttgattacataggtacttatgcaagttaaaattctaagtgcagaaccaacaagaaaagaactctcatgttagatcaagaaagtgaactaacatttattaaaagcattttacacgctcatttcatgaagtccctgtgaagtgagtgatattatacctat

SEQ ID NO: 238943 - DNA, 201 bp, Homo sapiens
ctatcaaacaattgtgcaatagttttcttatttttgctaaaatagactaaagacctttagatatttgtttagaaagtgatttttaaaatcttgtactttayaaatatattgacttattttggcataatatactgtttttaattgagcttccagtatgtaaattttaaggttaaataaaaatagagacaaaggtgaaagtaa

SEQ ID NO: 238944 - DNA, 201 bp, Homo sapiens
cattgaggatgaaaattgacaaaggtagttttggtttagtgtctaatattttgacatagacattactaataacagaggggtatcacactttcttttttttwaaaatcctatatttacctttagtgcactgaaaaggatcattttgctttttgtcaaaaaggtaacaacattcattaagtccaatttgacataactctatcc

SEQ ID NO: 238945 - DNA, 201 bp, Homo sapiens
atgaaagttataatccaagacatgctaaccagactacatttttctcttttaccctcaacatgagtcagataattggaaggctacatatatgaattattttrcattaccccgcagtacacttactgctataggttctcaatataggatatattggcttcttattgatgttcttttgaagtgatggaaatccatgaatgcctt

SEQ ID NO: 238946 - DNA, 201 bp, Homo sapiens
tgttgcatttattgttagatgatgatacatttttaagtgttagtttcagatcaatttagagaaaaaaaccttggcatttaaacaggcacttttttttctcrtggtggtgctgctgatactggctcctaccatctgtttccttattacatcctgcccttgttctgttggtagagaggaattcagcttcttctggagcgcgaa

SEQ ID NO: 238947 - DNA, 201 bp, Homo sapiens
agaatatttttgattccttatatattcttccttcatcttcacatttcatgtatttacaattttcaaaaactgttaattttgcagaaggcttcagtagataracaggtatttatcattgttttagtaatagtatagtgttaacatgtgaatcaacactacagtacaatatctaaatggaaataaggcataacaaaacacttt

SEQ ID NO: 238948 - DNA, 201 bp, Homo sapiens
  misc_feature (1)...(201): n = A,T,C or G
ttataatttgcaaatcagaagccattttctataacattttgcaaaggtcctttttacgtacacattataactgactactagatagcatcagtgtcatttgnatagacatagtaattttacattggaagactaattgttaataatagttcccatttttaagaattagctttaaatctggagaatgtctctgtttctcagttt

SEQ ID NO: 238949 - DNA, 201 bp, Homo sapiens
taatgtggaggtactagaacttatataatgctgttgggcatacgaaatagtacagtcactttgggaaaaagtttggaagcttcttaaaaagttaaacttayacctaatatgcaatccaacccttccattcgtaggtatttatccaagagaaatgaaatcatacaagatatgtagacttacacgtgaatgtccatcagctgg

SEQ ID NO: 238950 - DNA, 201 bp, Homo sapiens
acctcccaccaggccccacctctagaactggggcttatattttaacatgagatttgagtgggcacagatccaaactacatcagccaatataaccttaataygaaaaccaataaacctagtgacacaaatacttagaacaattttgcttataaataaggatgtagtttctaaacaaaaggaacaccagcaatgcataaaaac

SEQ ID NO: 238951 - DNA, 201 bp, Homo sapiens
cacttcatttgcatggattaagtgtagtactccacaggtggaaaattaaaattttattatttggaaccctgtggaaatttttcccaaatattttccatccrcagttggttgaatccacagaggtggaacccagagatacagtaggccgactgtatttctggttctgttaactgaccatttttcagaaagcctttcaaggag

SEQ ID NO: 238952 - DNA, 201 bp, Homo sapiens
agtcaaatgttagagctattcaaaaaaatggattagacttcatcagtatgctagtgagctctatatgaatggaggtattcaagcacaggttccatgacagrgaggttcacttgttgaagactatgataaatgctattgtattttaacaataatggatatgtaagtggtttcttgaggcctaaacataaaactgctttttta

SEQ ID NO: 238953 - DNA, 201 bp, Homo sapiens
ttttgctttttgtcaaaaaggtaacaacattcattaagtccaatttgacataactctatcctgtgatacttagaataggcgacctttttagatcagctgtygaaggttattgaccatggatggggaaaggaaatgaagcagctttctaatgatagcttctgtttcttcccaagtgctctggcatctgaaagtacaaaaggc

SEQ ID NO: 238954 - DNA, 201 bp, Homo sapiens
ccctataacagtcaggccttgatggtattcagggtctcttggtatccaacacaccttaaaatatgtatttttccccagtgtacagagaccctggtatttcrgcgaaaatattggggaattgatactctacacatttgctatggtgttgcaggattcttctacaaggggacctagctttcctagttaataggttttgaatct

SEQ ID NO: 238955 - DNA, 201 bp, Homo sapiens
gtgcccctctgggacgaagcttccagaggaaggagcaggctgcaatctttgctgttctgcagcctctgctggtgatactcaggcaaacagggtctggagtrgctccccagcaaactccagcagacctgcagcgggaaaatgaacaaatgaaaaggaatagcatcaacatcaacaaaaaggacatccacacaaaaaccccag

SEQ ID NO: 238956 - DNA, 201 bp, Homo sapiens
tgctttttccaaagccacttactaaacattcaagtcatttgtaactgctcagtagtccatatatatccttctcttaaatatatgttctgcccctgcacaaytgatggctagatacactgctcaaaactctgcccaatgggaaggcttgtccatactattgtctttcagggatatcacagagtgaggatctagtacagagct

SEQ ID NO: 238957 - DNA, 201 bp, Homo sapiens
aaagagatgcaagaactgcagttgaaagttgggctggcatgtatggaaatgttaagggctgagttattatgggtgtttgctaaaatccagcctaccactaktaatatccactgttgcctccattaacttcaccccattcctgctacatattcttctaggtggcaagagattacaatttcttttaaaaacccaacaacttag

SEQ ID NO: 238958 - DNA, 201 bp, Homo sapiens
ggcaaattacaatagaatatttttgattccttatatattcttccttcatcttcacatttcatgtatttacaattttcaaaaactgttaattttgcagaagscttcagtagatagacaggtatttatcattgttttagtaatagtatagtgttaacatgtgaatcaacactacagtacaatatctaaatggaaataaggcat

SEQ ID NO: 238959 - DNA, 201 bp, Homo sapiens
atcttaccatgtgcaagggcagaagaggcttcaatagccagagaaaaaagtcagataaagagatgcaagaactgcagttgaaagttgggctggcatgtatkgaaatgttaagggctgagttattatgggtgtttgctaaaatccagcctaccactattaatatccactgttgcctccattaacttcaccccattcctgcta

SEQ ID NO: 238960 - DNA, 201 bp, Homo sapiens
ccctgatcagtcagcagacatcaacacagaggcagaaccctttaccagcaaaaagattacaacttgctgaaaggctcagatgattgttagcattttttagyaatgaagtattttaaattaagttatatacatttttatgcataatgttgttgcacacttaagagattacagtgtagtacaaacataacttttatatgtact

SEQ ID NO: 238961 - DNA, 201 bp, Homo sapiens
tcaaccttcagcaactacctccctgatcagtcagcagacatcaacacagaggcagaaccctttaccagcaaaaagattacaacttgctgaaaggctcagawgattgttagcattttttagcaatgaagtattttaaattaagttatatacatttttatgcataatgttgttgcacacttaagagattacagtgtagtacaa

SEQ ID NO: 238962 - DNA, 201 bp, Homo sapiens
ttttatattatacatattaaccacttaacagataatatgcttgtaaatatttctcccagttggtaggttctctcttcactctgctaattgtagctttgctrtgcagaaactttttagtttgatgtaatcccgtttatctacttttgcttttgttgcatgagcttttggggtcatatctaaaaaatcaatacccagacccat

SEQ ID NO: 238963 - DNA, 201 bp, Homo sapiens
tagagttcagtggcataatcatagctcactgtctcaagccatccccccacctcagtttcccaggtagctaggactataagtgtaagccatgattcccagcraagcatttttttttggtagagatgggatcttgctatgttgcccaagctgtttccatgtttttatagtagccattctgacaggcttgtggcgatatctcat

SEQ ID NO: 238964 - DNA, 201 bp, Homo sapiens
tagttttccataatgattgtactaatttacagtcctaccagcagtgtacaagggttctcttttctccacaccctcaccaacaacttgtcatctttcatctmttttgtaattttagtttttgtttttgtctttagacagtctgtatctgttgttcatgctagagttcagtggcataatcatagctcactgtctcaagccatc

SEQ ID NO: 238965 - DNA, 201 bp, Homo sapiens
gggcaccaccatgcctggctaacttttaaattttttgcagagatgggggtctcactttgttcttcaggctagtcttgaactcctgggctcaagcagtcccytctgcctcagcctcttaaattgctgagattataggcatgagccaccatgcctaactacgtttatacacatttcagtctcctctgccaggttgtgagctat

SEQ ID NO: 238966 - DNA, 201 bp, Homo sapiens
aatgctgttgggcatacgaaatagtacagtcactttgggaaaaagtttggaagcttcttaaaaagttaaacttatacctaatatgcaatccaacccttccmttcgtaggtatttatccaagagaaatgaaatcatacaagatatgtagacttacacgtgaatgtccatcagctggggaatgaataaacaaattgtggctca

SEQ ID NO: 238967 - DNA, 201 bp, Homo sapiens
tcccacgggtctgactcatcaggagggattattctgtccttatgttaagtggaaccacattatcctatctactagtctagatttcctgagtacttaattcraacagtagtggattgatggggcttctatatgatctctgccaatctcttcccaattttctggttcaactgcagtgctcttctgttagtattcttgacaata

SEQ ID NO: 238968 - DNA, 201 bp, Homo sapiens
cagagacaaaagaatgcagatgacacagtccctgtcctgtaagacatggtcccagtggtagagacaaacaggtaaacagaagactttatttcatgtaacawgtaaggggtctgcaaaagtaaattagtcactctacataattatatatctttttagtataagatgctgcttggcagaaactccaaaggagttttttcaaat

SEQ ID NO: 238969 - DNA, 201 bp, Homo sapiens
acatctattaggatgactaaatttttattttactctgaccatattaagcattggtgataatgtggaggtactagaacttatataatgctgttgggcatacraaatagtacagtcactttgggaaaaagtttggaagcttcttaaaaagttaaacttatacctaatatgcaatccaacccttccattcgtaggtatttatcc

SEQ ID NO: 238970 - DNA, 201 bp, Homo sapiens
aaacaacttttaaaaaatcctgctgttacatattataggtcagaagactaagtgtcgagttaaatacctttatacaagaagtggtcctataaaaatgccartatcttttataaattatttttggaaattcattttgtgttcatttaatatctgacttgtatatgacaaagaaaagttatgtcatgttgaaactagatctta

SEQ ID NO: 238971 - DNA, 201 bp, Homo sapiens
tagatagtagagaaatgtaataaagtggagtccacaaattaacccacatatatatggacaatctattttttacacagaggtacaaaggcaattcagtggakaaataatagctttttcaacaaatggtgctctcaataattggatgtctatgtatagaaataaaataaactgctagcagtatctcacatcatatgtaaaata

SEQ ID NO: 238972 - DNA, 201 bp, Homo sapiens
cagttccattgttaaaatctatcaaagaatgcttttattttgtttttcctctcctagagactaagctgagagagaacattttttcaggtatctcttggccwcacttaacgctttcttgtccacaaattgactacatgggtagccttttatggtttctatctttctgggaggaccttggtttcaagtcttcatactgtacag

SEQ ID NO: 238973 - DNA, 201 bp, Homo sapiens
ttacactcggtgggggcaggataagtactgaaagaggaataaatggaacttttagtgtcctgataatattttctttcttaatctgggagccagtgttaatytagaaaagctcatcaggttgtaacttaagatttgtgcattttctgtatgtatgttatatgtcaataaaaagttaaaaaaaatacagtagtaaaaaaatct

SEQ ID NO: 238974 - DNA, 201 bp, Homo sapiens
gaagcagctggaaagaggtgatgttaacgtcgtcgacttaaagaagaatattgaatatgcggcatctgtgctggaagcagtttatatcgatgaaacaaggkaagttttaaccttcttctcttttatcttctttgattctctcccgtttttcttcctctttcttgaccctcctttatctcaaacaggaatttagcatatctt

SEQ ID NO: 238975 - DNA, 201 bp, Homo sapiens
atgacttgattaactatgtgttttataattttgaattgtaagctcatatttgactagatttatctgtaagaattttaagaggtgtgtttcaggattcattsctccaaagaaatttgctttccttattctaggtaaccttggatgccactaacccaagatcattttaagttttgctgtttctcagacaaagctggtagttta

SEQ ID NO: 238976 - DNA, 201 bp, Homo sapiens
ggtcatgttttgaccaataattttttctatttatttaaaatttaaacattgttataacttattaggtaattacaatacctgaaaaaagaaaaaaaagtaaytaatgagaaaaatcagaaacatagcaacagatattcataaacaaatgagggtgtggttctattagtttttgtctagtgactcttactagtgatgacttga

SEQ ID NO: 238977 - DNA, 201 bp, Homo sapiens
agctgcatccgtgttcctgcaaaagacatgatctcattctttttatggctgcatagtatgccatggtgtatatgtaccacattttctttatccaatctgtyactgataggcatttaggttaattccatatctttgctattatgaatagtgctacagtgaacatttgcttgccagtgtctttatagtagaatgatttatatt

SEQ ID NO: 238978 - DNA, 201 bp, Homo sapiens
agcatagtctgaagtttatgatttatgaactgtttaccagatatgatcttatcaaccgtttcaaggtcagaaacatggaacaaaagtgaaatgctcttagmattggttatttgagtaagaatgaaaatgcagaacatttgagtaattaagcaattcattttaggatgttttagttagcaggtcacagaattaaggtgatga

SEQ ID NO: 238979 - DNA, 201 bp, Homo sapiens
gggctgccacaaaggtctctgacatactgtggaggcatttcccccattgtcttggtgattatcatttggctcctcattacttatgcaaatttctgtagccrgcttgagtttcttctcagaaaatgtgcttttcctttctatcacatcctcaggctgcaaatattccaaacttttatgctctgtttcccttttaaaactgaa

SEQ ID NO: 238980 - DNA, 201 bp, Homo sapiens
agttcaggagatcgagaccatcctggctaacacagtgaaactccgtcttcactaaaaatacaaaaacaaaattagctgggcgtggtggtgggcgcttgcartctcagctattcgggaggctgaggcaggagaatggcgtgaacccaggaggcagtttgcagtgagccgaggtccagccattgcactccagcctgggcgaaa

SEQ ID NO: 238981 - DNA, 201 bp, Homo sapiens
gatcatgagttcaggagatcgagaccatcctggctaacacagtgaaactccgtcttcactaaaaatacaaaaacaaaattagctgggcgtggtggtgggcrcttgcaatctcagctattcgggaggctgaggcaggagaatggcgtgaacccaggaggcagtttgcagtgagccgaggtccagccattgcactccagcctg

SEQ ID NO: 238982 - DNA, 201 bp, Homo sapiens
acgcttccttcccccctgcttcctactttgttgagcaagtgaattactaaaaagagcccttccctactatgtctacagccccacatatctcttcctacacyttgcattattttctgctatagtcaatgaactgtcagtgcgcctgtctaagaccatcccctacttgtatactaaagtatattgtcattcaaggacatcact

SEQ ID NO: 238983 - DNA, 201 bp, Homo sapiens
ttttaagccttttcctgcctcctcaaacctcagacgcttccttcccccctgcttcctactttgttgagcaagtgaattactaaaaagagcccttccctacyatgtctacagccccacatatctcttcctacaccttgcattattttctgctatagtcaatgaactgtcagtgcgcctgtctaagaccatcccctacttgta

SEQ ID NO: 238984 - DNA, 201 bp, Homo sapiens
attaaaagtaatggcgaaaactgcaattacgttcccatcaacctaaatataaccatgaatgattattttaagccttttcctgcctcctcaaacctcagacrcttccttcccccctgcttcctactttgttgagcaagtgaattactaaaaagagcccttccctactatgtctacagccccacatatctcttcctacacctt

SEQ ID NO: 238985 - DNA, 201 bp, Homo sapiens
gctgattgcggttggagaaaaacacactattatactgactgctgttaccctaaacgtatgaccacaaactgcaagtgcaccctatttgttgtccaccaatytctgcacttcctattaggttggtgccaacatagttgctgttttaaaagtaattaaaatcattaaaagtaatggcgaaaactgcaattacgttcccatcaa

SEQ ID NO: 238986 - DNA, 201 bp, Homo sapiens
ggcctgccatattaaaaagagtaatttctccagtggacattatttttcaaattcaattttcatttaactgtcagtgtcttaatgctaactgttaaaaaacrattatatttagttttcttgaggaagctctatatagttttccataatgattgtactaatttacagtcctaccagcagtgtacaagggttctcttttctcca

SEQ ID NO: 238987 - DNA, 201 bp, Homo sapiens
ccttagggctgtctgccaactagtcacttctaaaaccaatttgatgttttttattgcattggcattctctcctctctctttttaaattaccttcttggtgyctttgattcctattttaactattttattgagttccaaggcaacttttccaccatacttgagctattcacatcaatcacatgcagttttttcacttctcca

SEQ ID NO: 238988 - DNA, 201 bp, Homo sapiens
tgaattactaaaaagagcccttccctactatgtctacagccccacatatctcttcctacaccttgcattattttctgctatagtcaatgaactgtcagtgygcctgtctaagaccatcccctacttgtatactaaagtatattgtcattcaaggacatcactcttaaaattgtgcctgctttagcttgcattattttccct

SEQ ID NO: 238989 - DNA, 201 bp, Homo sapiens
agccactgcacctggccataatttactttttaaaactcctagaactaataagtaagtttagcaagataataggatatctaatatttacaatagcaacagayattctgaaaatttttagagtaaatctgataaatgatatgcaagatctatgtattaaaattttaaagcattgcagaaagaaattaaagaagtcacaaataa

SEQ ID NO: 238990 - DNA, 201 bp, Homo sapiens
cagcttttgcccattctgtatgatattggctgtgtgtttttcataaatagctcttaatgttttgagatacttcccatcagtacctagtttattgagagttkttagaatgaagggctactgaattttattgaaggccttttctgcatctattgagataatcatatgttttttgtcattggttctgtttatgtgatggattac

SEQ ID NO: 238991 - DNA, 201 bp, Homo sapiens
ctcccgggttcaagcgattctcctgcttcagcctcctgagtagctgggattacgggtgcccaccaccacacctggctaatttttatgttttttatagagaygaggtttcaccatgttggccaggctgctgtcgaacttctgatcttacgtgatctgcctgcctcggcctcccaaagtgctgggattacaggcgtgagccac

SEQ ID NO: 238992 - DNA, 201 bp, Homo sapiens
ctagactggagtgcagtggcacgatctcagctcactgcagcccctgcctcccgggttcaagcgattctcctgcttcagcctcctgagtagctgggattacrggtgcccaccaccacacctggctaatttttatgttttttatagagacgaggtttcaccatgttggccaggctgctgtcgaacttctgatcttacgtgatc

SEQ ID NO: 238993 - DNA, 201 bp, Homo sapiens
gtctggaaattctaggaaatgcaacaataccagaaaaagaaagaaaaatctggattagaaaggattaaaactgttatttgctgaacatctgattgcctatstagaaagccggaaataatttacttttttttttgagacggagtctttctctgtcacctagactggagtgcagtggcacgatctcagctcactgcagcccct

SEQ ID NO: 238994 - DNA, 201 bp, Homo sapiens
taaagatgtctgctcttactgctattcaatgtggtctggaaattctaggaaatgcaacaataccagaaaaagaaagaaaaatctggattagaaaggattaraactgttatttgctgaacatctgattgcctatgtagaaagccggaaataatttacttttttttttgagacggagtctttctctgtcacctagactggagt

SEQ ID NO: 238995 - DNA, 201 bp, Homo sapiens
agacaagttaatctaactgaataaatataattttccccaaggtttctttttctaaaaacggttttattgaggcataattaacatataatacattgcatgcrtaaagtatacattttgataagctttgatatatattcatcaaattactactccaatcaagatcacaaaaatagacattaccccaaaaagtttccatatgct

SEQ ID NO: 238996 - DNA, 201 bp, Homo sapiens
ctaagccaacacatatccaaatgagacaaatgtccatgtttttaccttcaattttcaaaaattagtaatatccaatttatacaatttttaaaatgttttcrtatattcagagtctgcagtctgcataacagttactgaaagtaaagtacaatatacaatatttattgtcatgcagttttaaaaagagaataaaaattaaaa

SEQ ID NO: 238997 - DNA, 201 bp, Homo sapiens
gaatttcccctgcctccaagaagttgaaagaaacttttggctcttaactggtaaacatcagggcaggggtagagatgtttcttaaaaattcatttttttcytgtctgtctccagcctatgttcaacttcctaatagtctctctcttccctcttagagaaaacattccttattatagttattacttctctaatgaagaactt

SEQ ID NO: 238998 - DNA, 201 bp, Homo sapiens
actaatctatggtgttagttactgtggtgttagaagtcacagtaatggttacactcggtgggggcaggataagtactgaaagaggaataaatggaactttyagtgtcctgataatattttctttcttaatctgggagccagtgttaatttagaaaagctcatcaggttgtaacttaagatttgtgcattttctgtatgtat

SEQ ID NO: 238999 - DNA, 201 bp, Homo sapiens
tgagcactttttttttagaattttattttgattcatctatatctgtatttttaagtgtatttgtttaaatagctatttttgatagttccttttgatatcaytatctatgcatagcttataaaaatctactgatatgtcattattttatcagtttgagagaagtatagaactctcacctcatttatgtccctttactctctc

SEQ ID NO: 239000 - DNA, 201 bp, Homo sapiens
gtagcacctcaactacagtagtttttcttccctactgggacctccaattctttgtaccttcacactgcctctctcattcctttctgctcctcccatgtgcycatgtccccccaagaagcttaaatgccacagtccattattatatccctcacttgcatactcactaaactcccttgtccctctcatgtatagacttcccga

SEQ ID NO: 239001 - DNA, 201 bp, Homo sapiens
ttgtcttcctatcggttacttgagcactttttttttagaattttattttgattcatctatatctgtatttttaagtgtatttgtttaaatagctatttttratagttccttttgatatcactatctatgcatagcttataaaaatctactgatatgtcattattttatcagtttgagagaagtatagaactctcacctcat

SEQ ID NO: 239002 - DNA, 201 bp, Homo sapiens
ggaaatgatcagactagcctctaaaagcaatgatcaagcagtggggcatcaggtcatggcaataataataaaggtcatgagtgcatggagtttaatgggcygaacatatgccaactcttaagcaaggaatcttaatgttactgttagacatctgaatgcacaatgtagaatgagataaaaagcctgagtggtcctctgcaa

SEQ ID NO: 239003 - DNA, 201 bp, Homo sapiens
ttttttcttctgttttttgtttctgttttctttcttttgtcttcctatcggttacttgagcactttttttttagaattttattttgattcatctatatctrtatttttaagtgtatttgtttaaatagctatttttgatagttccttttgatatcactatctatgcatagcttataaaaatctactgatatgtcattattt

SEQ ID NO: 239004 - DNA, 201 bp, Homo sapiens
agggatttggtcatggggcaactgtattgatattggcaaggcaaagcaagatgataggaaatgatcagactagcctctaaaagcaatgatcaagcagtggrgcatcaggtcatggcaataataataaaggtcatgagtgcatggagtttaatgggccgaacatatgccaactcttaagcaaggaatcttaatgttactgtt

SEQ ID NO: 239005 - DNA, 201 bp, Homo sapiens
cacaaataatcacataaataattagatattggtataaataattatagtgtagtccaatttagtatgaaataggtagaggagaggaagcctgaagttttgtrgtcaagactggaaattatcccactggacaaaaaaattcacaaatctaaagggatttggtcatggggcaactgtattgatattggcaaggcaaagcaagat

SEQ ID NO: 239006 - DNA, 201 bp, Homo sapiens
agctccgcctcccggggttcacgccattctgcctcagcctcccgagtagctgggactacaggcgcccaccaccgcgcccgtataattttttgtatttttgrtagagacggggtctcaccgtcctgtcgatctcctgacctcgtgtcgatccgcccgcctcggcctcccaaagtgctgggattacaggcgtgagccactgtg

SEQ ID NO: 239007 - DNA, 201 bp, Homo sapiens
gaagtcgagcacttaaaagctagtatgagagttagactttgacacaaataatcacataaataattagatattggtataaataattatagtgtagtccaatktagtatgaaataggtagaggagaggaagcctgaagttttgtggtcaagactggaaattatcccactggacaaaaaaattcacaaatctaaagggatttgg

SEQ ID NO: 239008 - DNA, 201 bp, Homo sapiens
ttgttttaaggtcagataggcaaaagtgataatttataatatgattctataaccgtaaataattttcatcaataggttggagctaagctcagaatttcagraagtttgatagaatcttgctattactaaaaattttatgtgatgtttagatttgaaagccaaaagtataaagagatccatttatcatccatcagttcactc

SEQ ID NO: 239009 - DNA, 201 bp, Homo sapiens
atccattggaaaaaatgtaattctttcttctttgcttttttctgagacagggtctcgctctgtcacccaggctggagtgcagtggtgtgatcttggctcastgcgctctccaccccacgggttcaggtgatcctcccacctcagcctgccaaatagctggaattacaggcatgcgccactacacccagctaatttttgtat

SEQ ID NO: 239010 - DNA, 201 bp, Homo sapiens
gaatctttctgagaatcagactttataaaaacatgtttcactgcatcaaaaaaatttagttagccttgttttaaaaatataacaataaacaaaagtttatkgttcacaaaagctcatgacagaaaagttgattcttctctaaagctcatgacagaaaagttgattcttctctaagtgaaactaattcacaaggtgaatatt

SEQ ID NO: 239011 - DNA, 201 bp, Homo sapiens
agcctggaaactgtgtagttccccacacgttttagtatgtgcatagcaaaggaagtgccaatgactttttagtatgtggatatctcttgtcacagaatctytctgagaatcagactttataaaaacatgtttcactgcatcaaaaaaatttagttagccttgttttaaaaatataacaataaacaaaagtttattgttcac

SEQ ID NO: 239012 - DNA, 201 bp, Homo sapiens
ctaggtatagcaaggcatgctttgactaattgttaaagtttttgttttgtaagtttctggtagtgttttgttgtttggggtcttacagctgttgtaatgaytaggatgatgtaagcacagagtagatgttttatgcaataaaagaagtgtggttgaaaagcctgctggtccctgccctttttttttttgccaccataattg

SEQ ID NO: 239013 - DNA, 201 bp, Homo sapiens
acctcccaaagtgctggaattacaggtgtcagctaccgcgcccggccttagggtaattttgatactgggaaattgactggtcctttcagtctggaaatacrtgcctttcagtctggaaatacatgcctttcagtatggagaatatttcatttttttaatttgataactttttttcttatttttttttctttctgggatttt

SEQ ID NO: 239014 - DNA, 201 bp, Homo sapiens
tggaggcaatcaggctaaatactttagaattggcttccaggctacaacatgttgtttgctactgagttgaagactcttcgcatgggtccttaaaaagaaayttacaaagcaaggtaatcttgaagttttccaatgtaattgaacaattttaacatttctcaagtttcatttttaccagacattcaagtccaaggtgtgtga

SEQ ID NO: 239015 - DNA, 201 bp, Homo sapiens
agcatctgctttcttaaaaaattaagcaaaaatatttgaaacaactctggagctacatatcactccacgtgtcataaagtataaatgcatgtgagtgctarcatctggtttgtatgagaatatacttaagtgtgtgcattaagatgcactgcataagtaaacttgtctaaactccaaaccagaaatgtattatttggaagc

SEQ ID NO: 239016 - DNA, 201 bp, Homo sapiens
ctgaagtttcccaattgcagtgagtcagacagggagataagctgactgaatttggaggcaatcaggctaaatactttagaattggcttccaggctacaacrtgttgtttgctactgagttgaagactcttcgcatgggtccttaaaaagaaatttacaaagcaaggtaatcttgaagttttccaatgtaattgaacaattt

SEQ ID NO: 239017 - DNA, 201 bp, Homo sapiens
tagaaatataggagtaaataaagatacacttacagctaaatatgaatagatttaagatagaaaattaaggccagaccacaatgagcattgtttagttttcmgttaacttaagcccagaaaacaaaaggttaaacagggatttagattttaaaaaaaatttaaaaatctcttttgttccctataaatttcatcatccatgtc

SEQ ID NO: 239018 - DNA, 201 bp, Homo sapiens
gcctttaaatccaccagagaatgcagaccactgacatagtctatgctactctaaacaagaatgaaatgtgaaaatggaaaactgcttcttgatttatcatrgtcttagaatcctggagagactgaataaatattcagaatattacagtctaactctaaagaaaataatcccattacatgccaattaaataatgtgtatcat

SEQ ID NO: 239019 - DNA, 201 bp, Homo sapiens
agctcattaaaatatataacttgtaacactgtgtttaattaaatgttgtttaacaaaaagaacacacatgtggtctcacgtcctatttgactagacttacrtgcttaaactgagaacctgcagacccatgcattttccagtgcttgggatggcataatatcaaatgacctttttgccattgcatgctttggcacttgtgta

SEQ ID NO: 239020 - DNA, 201 bp, Homo sapiens
tcttccctcttagagaaaacattccttattatagttattacttctctaatgaagaacttctctttagaactcttgtgactgagtcccattgatagaaatarctaatctcttatttggagagaagaaatgggagttttttgtttgtctgttttcatttccataaatttacaaaatatatcgaacagcattgacaataagcca

SEQ ID NO: 239021 - DNA, 201 bp, Homo sapiens
gggattacagacgtgaggcagcacgcccagctgggtttttattttggtgttgttaagttgcaggagttctttatgtattctggatcttaatctcttattaracatgtgatttacaaatattttctccaattctttgagttgcttttttattctgttgatagtctcctttgatgtacaagtttttaattataatgaactcaa

SEQ ID NO: 239022 - DNA, 201 bp, Homo sapiens
gtttgttttgagatggagtcttgctctgtcacccaggttggagtgcagtggcgtgatctcaactcactgcaatctctgcctcctgggttcaagcaattctyctgcttcagcctcctgagtagctgagaatacagatgcacaccaccatgccaggctaatttttttgtattttagtagagacggggtttcaccatgttgccc

SEQ ID NO: 239023 - DNA, 201 bp, Homo sapiens
ttctattttctgtttctgtgaatttgactattctaggaacctcatgtataattctaagaatcatacagtgttcatcttttttgcatctaacttattttacrtagcataatattttctaggtttatctatgttgtaacatataccagaatttatttgctttttaagggtgaataatatttcattgtatgcatatgtcatact

SEQ ID NO: 239024 - DNA, 201 bp, Homo sapiens
tgtctatatgcacttggtcaggtgatggcagtggcagaattgaggagtgagaaaagggacactcactgtcaatccagttcttatataagtctgctcccacrgccagagatggacacatgataattccaagctgttaaagcctgaaatggggtgggcttacacattgtagccccttgatggagacagaggaagagttgcaat

SEQ ID NO: 239025 - DNA, 201 bp, Homo sapiens
gatgtgggagttattgtttgatgtggggaatatagaaacagtttattaaaatattagacactttagaacttaaaggaccctaagatgagtgagatccacastatagatcatctggtctgatatccgtcatctaaaaatagaaaatgaagacctcgagaggtagagtgacctgtctatatgcacttggtcaggtgatggcag

SEQ ID NO: 239026 - DNA, 201 bp, Homo sapiens
aaaaaaaacagggattggctaaatcatgatacaaccaaatgatggtatactatgcagccattagatgtacaattttgaagagaagttaagggaatgggaarctgtgcataatacaattttaaaaggataaaggagtatatacttttatatgcctctacatcataatctaatttgtagttgttatttcctctcaggggttat

SEQ ID NO: 239027 - DNA, 201 bp, Homo sapiens
taaaaattaaattcaataagttaattggatagaaaataatataaaaataccactagttttcttataaacagcaatgattagaaggcagaatggaaaaatamgaaagcataatagccatacaatataaaatacttaggactgatgacaagatataaaggaataagtaaaagacaaagtatttaagagtacaggctttggaat

SEQ ID NO: 239028 - DNA, 201 bp, Homo sapiens
atttcatccaggggtggagacaaagaaatccagagagtgtgaagggacaatgggaagaaaaccataaaagacacaatgctgacatcagtatgtttcttaarcagttactcatgtctgcaagccaaaactgtgggctcgccatttgtattatctgggctaagggatggtggttgggcagaggggctgagcattgggtgtgga

SEQ ID NO: 239029 - DNA, 201 bp, Homo sapiens
attacaaaagttaacccagcttcaagggaggaggggaatgtgacattttaagaacatgtgtaatggtatatataaatatattatccatgtttggaaaatayaatcttccacattcctttttctttctccagtgcagactttgctctatttattttctgttttcatcactagaatataagccctataaaggcaaagctttta

SEQ ID NO: 239030 - DNA, 201 bp, Homo sapiens
cctgatgtggcctgatattttaggctggataaacagaccaaggaatgtttggttcagcatccatttgaggatatgaggaggcaggtgctggcagagggaamagtagtctcaaagacctaactccggaaagagttttgtatgttgaaggcatagaaaaaaggccagtgtggctggaccaaatcagtgggaaagagagtgcag

SEQ ID NO: 239031 - DNA, 201 bp, Homo sapiens
gaatgagatactgaaagggaggatttcaggatttatttgaagtgagctctgtcagtatgcaggtacccttaccaccccaaggaaaaggctaaagccaagasactgtgactggagctgcctttgtcagcaaggagaaagaagatccaatgggcttgtactaatgtcaggggcacgtgtccctctgccggccacgtgcacctt

SEQ ID NO: 239032 - DNA, 201 bp, Homo sapiens
gcccaggctggagtgcagtggtgtgtctcagctcattgcaccctctgcctcctgggctcaagcaattctcctgcctcaggctcccgagtagctgggattamaggggcccaccaccatgcccagctaatttttgtatttttagtagagacggtgtttcaccatgttggccaggctgggttcgaactcctgacctcaaatgat

SEQ ID NO: 239033 - DNA, 201 bp, Homo sapiens
ccctgactgctgtgatacctggtgccttcaattcctgcatcttttcagggatctttagggtgaaacccttgtttctgctgtcatcctttgctaaggtttcyacccctccacctagtttccacactcccgaaaacgaattgattctcttggattttgttacttctttcctattcacactgtccttttgagggatttataaca

SEQ ID NO: 239034 - DNA, 201 bp, Homo sapiens
ggctgattttttttgtattttttcagtagagacggggtttcaaggtgttagccaggatggactcaatttcctgacctcgtgatccgccgacctcggcctcycaaagtgctgggattacaggcgtgagccaccgcgcccggccgggtgctctgtcttttaattgggtggttaccaaatgccggtacctgtgtccacaggtct

SEQ ID NO: 239035 - DNA, 201 bp, Homo sapiens
ggggtgcagtggcgcgatctcggctcattgcaagctctgcctcctgggttcacgccattctcctgtctcagcctcccgagtagctgggactacaggtgccygccaccacgcccggctgattttttttgtattttttcagtagagacggggtttcaaggtgttagccaggatggactcaatttcctgacctcgtgatccgcc

SEQ ID NO: 239036 - DNA, 201 bp, Homo sapiens
cgatccctaccttcctgaagtgtatattttgatggtggggttacataatcaggcaaaagaatataatgtaattttaataaaacggtacagcaacaaactcytgggagtttcaaaagtctgtattttagaccagagtggtcaggaaagagcttctcgtgatggtgacttgtgaagaaagaccttaatgaagtgaatagtgag

SEQ ID NO: 239037 - DNA, 201 bp, Homo sapiens
gaatgagagatagtgaaccaatttagcatcacaggtatctctgttgagataatgtttactcaaaatagtctgtgagctttttaagcacagagataatatcktgtttacattacaaataaatgagagccttaacatatgcttttaaatgttgaataattgaaagactgaatcaccaatattcagaaaaaggtaatgtgtgtg

SEQ ID NO: 239038 - DNA, 201 bp, Homo sapiens
tcgttggccactccatctcaatgacttctgttgatttttcctcatctccttaccattaaaatttaaagtattttcaaaaacctctgctccagccatgctgwcctctttacttttccctgaacactcaagcatattcctatttgagggatttaattgacttctgaaaataaatttttctctgcctggaatgctcttcctgca

SEQ ID NO: 239039 - DNA, 201 bp, Homo sapiens
ctcacctcactcgttggccactccatctcaatgacttctgttgatttttcctcatctccttaccattaaaatttaaagtattttcaaaaacctctgctccrgccatgctgacctctttacttttccctgaacactcaagcatattcctatttgagggatttaattgacttctgaaaataaatttttctctgcctggaatgc

SEQ ID NO: 239040 - DNA, 201 bp, Homo sapiens
aacaaactcatgcttaatattctgtgtttaaattcaccatcaacctcaaataatcccttaatgtttcctggcaatcattccatgttttcctactgctacargcttaaatactctcttagaatctatttcacaccttcttggtctctgccctgtcactcttagatatagtctttgtgactttgcttcttatttcactgacag

SEQ ID NO: 239041 - DNA, 201 bp, Homo sapiens
tataggaaacagcagcatatgtgagaggtcatttaaaggaacatgaagagttcctctcctgcatattaccttttgagcctctctttagtcagattgagttstttgtggagacctcctgttttttgtcctttgttttgtccctgctttttgagatggcccctgccttgtttctgaggcattagcatgtacaaccatctctgg

SEQ ID NO: 239042 - DNA, 201 bp, Homo sapiens
aacccatgccagaggaatgtacaaatctgtgagctcatcctatgaactcaagaacttaatgaaatcatcaattctgtagaaaaaaataatacaattaaaayaaagaaaaaggtttcaagaggtaaataatatgataatacaaggaggtgaaacatgggtacacataactcagtcagcaaatggaggaggaaaatgaggcta

SEQ ID NO: 239043 - DNA, 201 bp, Homo sapiens
cagctgaagagaaagttaagtcagttcttgcacacagagacatacaactgaactcatacccagactcacttcttttctgctgtacacattctcctggtccytctcttcaaccttctgatttggaaagaagttctctcatacaagaatgaacaattttcaaaaagaaaccaacatggaatccatataaaaaaataccacaag

SEQ ID NO: 239044 - DNA, 201 bp, Homo sapiens
tggtgggattacagacgttgagccacgatgcccaaccgagaaataacagatggtaatttgaggttcattcaacaactaatgtttattaaatagtcacagawggtaatttgaggttcattcaacaactaatgtttattaaatagtcattatatatcagacaccattttaagtgtggggaatataacgagcaaaaacaaaaca

SEQ ID NO: 239045 - DNA, 201 bp, Homo sapiens
gaatgtagtattttttctaaagtgttgtatagtaaaaaagatataaactaacaggttgagagagggaatatcaccaagtaaagaatgttttagttaaatarttcttattttctgagaagcctccttgtcctgtttgttctcaatctgatgacataaaagccaagcatctgcagtagtttagaaatgtaaatcatcagggtt

SEQ ID NO: 239046 - DNA, 201 bp, Homo sapiens
atctttgagaaacagacctgcagctactatttctgtcagctgaagagaaagttaagtcagttcttgcacacagagacatacaactgaactcatacccagaytcacttcttttctgctgtacacattctcctggtccttctcttcaaccttctgatttggaaagaagttctctcatacaagaatgaacaattttcaaaaaga

SEQ ID NO: 239047 - DNA, 201 bp, Homo sapiens
caaaggattacaactccttgccagcaagggaacaaaactggacagagaatgagtttgatgaattgacagaagtaggcttcagaaagagggtaataacaaamtcctccgagctaaaggagcatgttctaacccaatgcaagaaagctaagaaccttgaaaaaaggttagaggaattgctaagtagaataactagtttagaga

SEQ ID NO: 239048 - DNA, 201 bp, Homo sapiens
cttgaggagaataaaaaggtcaagttaagttggctggctttggaggcttcccccatttcacacactggagtagcagagatgcatgcataggcagatgaagmtctcaaaggccattgttgtaactgggctgtagagcagagaaaaatctttgagaaacagacctgcagctactatttctgtcagctgaagagaaagttaagt

SEQ ID NO: 239049 - DNA, 201 bp, Homo sapiens
gaactgtgaaggtgggggtggagatgagatgaatgggaattctctgtactatacactcgatttttctgtaagcctaaaaaataaagtctaaatgaagaagstgcctgagattgtggctttcaggcagggatagcatagtacagagttctctaggtaatcatgcttattcaaaaaggaaaaattaaaaacttcttgaggaga

SEQ ID NO: 239050 - DNA, 201 bp, Homo sapiens
tggtgccaaaatattgaggaccattgcattaaaggatattaatcattcctcggttcttgagagattttgccttctctattatttccttaacaatgagcaaraaaattactcatttttattttatttattttaagaatctttgcttaaaaaccaactaacaaaatattttagtatgagagaatgtagtattttttctaaagt

SEQ ID NO: 239051 - DNA, 201 bp, Homo sapiens
tttttttcttgtaaatttgtttaagttccttgtagattctggatattagcccattgtcaggtggataaattgcaaaaattttctcccattctataggttgmctgttcatgctgatgatagtttcttttgctatgcagcagctctttaatttaattatatcccacttgtcaattttggcttttgtcgccattgcttttgatg

SEQ ID NO: 239052 - DNA, 201 bp, Homo sapiens
tcctttctcggatctttccctccttccaagataattgctgcaattatattgggggttttagctaatggtaatagggaaagcagttgagttttcttgcatgraataagcataaatatacaattaggtaatgaatatttagtattttatggagcctttcagttgggggaggtcctatgcatgtatattaacatacggtaatac

SEQ ID NO: 239053 - DNA, 201 bp, Homo sapiens
tataaaaaatttaaaaactggaaatacaaataaaataattcaagacattcaacacttggaatatattagatactatatgtaatttaatatattcattaaayttacacaaatgtttaattcatacagaatgcaagatattttcatacatcttcagtgatgtttttacctaaatttatttggaacatctactggttagcagtt

SEQ ID NO: 239054 - DNA, 201 bp, Homo sapiens
gtctttgattaaaataaggttaaagtttgattttaatgttcaaaataaaataacccaaaatgtaaaaaacaaaatccaccaaaacactgttacccataatktaggcatcccctgttccttttatagtttgatgtacaaagctgagtcctaattttaaaccctgggttggactacccaaacaaatctcagtccctgtcctta

SEQ ID NO: 239055 - DNA, 201 bp, Homo sapiens
ttttgtgagtgatcgatgcttcgttatccacgtggctttcaaatgctatcacccttccccagttgttgcttcctcacagggccttataggggccttttgaygcacagccctctgatagggggtatccatcttagtctcagctttatctttaccttctttcctcccacagcagatggaccaccaagaatgccttgctcttgg

SEQ ID NO: 239056 - DNA, 201 bp, Homo sapiens
cttcaaggtagtttataaatattaatttcttttatgatgtagacatactaatatacatttaccttcactgcatactctaagctttattagttggacttaaygtcttaaacacatctctgcttcctgttagtcttacaaattgtgattatcaaaaatacttaattgattatccacatggaacattctttaggactggtctgc

SEQ ID NO: 239057 - DNA, 201 bp, Homo sapiens
tttgcctttacttatagtgaatgatttgtaacaaaatataatctagacagaaaaaggcatttgtttcctatttaagtacacaatttgttcaaatttggagrtattttccagagatctgcaagtcatatttcctaattcactctttccttcttcagtatgctatacattgtatgcataatacaatactatattgctgataat

SEQ ID NO: 239058 - DNA, 201 bp, Homo sapiens
aagagttgtatgtgatggctggctggtagtgatcattggaagtcaaaaagtggccacattctagatcaagaccacacacccctgtgactttatctgttcayccagagtaatctctagcttctctgagtatagaaatagacactgtgtttggcataaactcccccttcttgaaagaggtccagattgaagtcaagaactgag

SEQ ID NO: 239059 - DNA, 201 bp, Homo sapiens
tggaatgtcccagtgctgaattctcagattaattgtctttatctgtgctactgccccgtgtgataacatccagcatcatggtgctatattccatcaatctrtcatgctctaccgattagtgccacatttatatctgcagcctggacctctccagacttaactacagtttatccaacacctcttgttgctcagactgaacat

SEQ ID NO: 239060 - DNA, 201 bp, Homo sapiens
ttattggttctccatctatttcattggctactccttctcagttttctttgatgatttctccttatttttacacattggaattttggaatgtcccagtgctsaattctcagattaattgtctttatctgtgctactgccccgtgtgataacatccagcatcatggtgctatattccatcaatctatcatgctctaccgatta

SEQ ID NO: 239061 - DNA, 201 bp, Homo sapiens
tatctcacattagtgtcaccacaatcctatgtgattggcaggatgattattactttctgcattttactaatgagataattaaagctcttagaagggaaacrgtttgacacaggtcatggatggaagtgttggcaaaactgggactaaaacctaacccatgacttcttatttagtactccttcctctatacctgactcttct

SEQ ID NO: 239062 - DNA, 201 bp, Homo sapiens
tgctgcataagcagcaataaatttgattatatcaatcaaattgcacaggagtatacattaaaacttctaccatttccatccttactccactcatgaaggtratcagttacaattagtctaatgtaaatatttctagacactttatagccattcagtggatatatattgaccccctgctctgtgtcacacatgattttagaa

SEQ ID NO: 239063 - DNA, 201 bp, Homo sapiens
ataagccctttgggagttatgtcatctgatttcaagagaaaattatgattataaatagctccgaaggattagttgagtcacagattggatgcagggtcagytttcacagttcaccggctgccatctgcacccaggtcgtgtttagaaacccttgactttatgctttattgactccactgggacaaaaactaaagtcgtatc

SEQ ID NO: 239064 - DNA, 201 bp, Homo sapiens
agcctgtctcctacatcttactgggctttcttattaggtctttcctctcaagggacccaggacgctattggtgtttgtaccctttcaaaccaaggagtggycaagaagcagctcctttcaaagctaggtaggttgatggagactgtacttgggggctgaggtttccacctgtggtgcagagtggagctgcaggttgctggc

SEQ ID NO: 239065 - DNA, 201 bp, Homo sapiens
ccaattattatttctaacagcacagtggcattttatctgcacctcttctgctgtgcatctctctcattctattatacttaagtaattaattagtattaattatattatacttctattataattattataattctattataattaattaagtaagggtatcagctcccctacgaaactataagatccctgaggctagaatca

SEQ ID NO: 239066 - DNA, 201 bp, Homo sapiens
ccacctttagccccaggccagtgaagctgcttcccagggcacgattccccacttcagggggcctgacaagggctctctttggtgttcctctccccatggtktgccccgcaagaccaagaagaacctgaagctcatggccctcttccccctccagatactgtaggaccctggaattccctgctcttcccagtatgttccttt

SEQ ID NO: 239067 - DNA, 201 bp, Homo sapiens
tagataagctatcattttgtgatgccttttattcacaggtttattacaaggtttgacaagactatcctaagaagatttagaaggatttcctgggttttgtktgtgtgtgtgtgtgtgtgtgtgtgtgtgtgtgtgtgtatgtgtatgatgtgatcctgtagtggtacaattctgttaatctccaatacttattattttaaa

SEQ ID NO: 239068 - DNA, 201 bp, Homo sapiens
aagcagctggcattatcatctatatcgatcctcaaacagttctgaagcctgagtgaaggattggtgttacctttagagttttggtttgttttctgtttttkggtggggggttggggggtaagggtgaagaagggtacaagcagctcagaacgcagacataggttaatcaaagaaataatactaatggactctcctaggagg

SEQ ID NO: 239069 - DNA, 201 bp, Homo sapiens
aatatcattttcataatttttttacccaatcacgtgggttaaaagttgatatggtttggctctatgtccccacccaaatctcatcttgaattgtactcccrtaattctcatgtgttgtgactgggaccctgtggaagataatttgaatcatgggggcagtttcccctatactattctcatggcagtgaataagtctcacga

SEQ ID NO: 239070 - DNA, 201 bp, Homo sapiens
caaactctttatgtttaatcactacaacctgcacatcatgatggcactcactcatgtgtgctcctttggcatttagagtcagaataagagagaggaaaaakagaaatagattgggctaatgaacggcttttattaatatttcaattgtaagtgataggaaacccaaccaagccagtttaaacaaacaaatgattaacttat

SEQ ID NO: 239071 - DNA, 201 bp, Homo sapiens
acaggctcaaagttggaagggacctgcttgtctcagaaaagactttggactgtggacttttgggttaatgctaaaatgagttaggactttggggtactgcwgggaaggcatgattggttttgaaatgtgaagacataagatttggaagagccaggggcagaatgatgtggtttggctctatgtccccacccaaatctcatc

SEQ ID NO: 239072 - DNA, 201 bp, Homo sapiens
aatgctaaaatgagttaggactttggggtactgctgggaaggcatgattggttttgaaatgtgaagacataagatttggaagagccaggggcagaatgatrtggtttggctctatgtccccacccaaatctcatctcaaattgtactcccataattcccatgtgttgagtcagggacctggtggaagataatttgagtaat

SEQ ID NO: 239073 - DNA, 201 bp, Homo sapiens
tgagctattatactgaaagctccgaagattttaatattaatttctgagtttacccctttaaattagactcatagttgaaattaggaaaatcgctttcttcrtagcagattctgtgcatattcctttctccttgagttattagcatggtaggtcaatgtacttatcaaagagagatctggagctttaaacaaaattaaaaat

SEQ ID NO: 239074 - DNA, 201 bp, Homo sapiens
agtttattctttctatatgaatattcaagtgttcatgatgatatttatcgtagaagtacctatcagtctttgagagttatctattttgatttgacccatgratgtacatataaattttaaatgtcacatatgaaaaaataataagtatatgttataaagaaattttgactaatcatatatgtggattgactaaatttttaa

SEQ ID NO: 239075 - DNA, 201 bp, Homo sapiens
agtatatgttataaagaaattttgactaatcatatatgtggattgactaaatttttaattttttgaacattagtactttatctaatatttctcctccaccrttcaccaaatacttggtaaaaatttattgattaaataattgaatgactgctgtggcaaagccattaatatttattgttttttgtccttttctatttactg

SEQ ID NO: 239076 - DNA, 201 bp, Homo sapiens
gccgttgcttttggtgttttagacatgaagtccttgcccatgcctgtgtcctgaatggtaatgcctaggttttcttctagggtttttatggttttaggtcwaaggtttaagtctttaatccatcttgtggggttgaggggggagggatagcattaggagatatacctaatgctaaatgctaaataatgctaaatgggtgca

SEQ ID NO: 239077 - DNA, 201 bp, Homo sapiens
gttgcttttggtgttttagacatgaagtccttgcccatgcctgtgtcctgaatggtaatgcctaggttttcttctagggtttttatggttttaggtctaasgtttaagtctttaatccatcttgtggggttgaggggggagggatagcattaggagatatacctaatgctaaatgctaaataatgctaaatgggtgcagca

SEQ ID NO: 239078 - DNA, 201 bp, Homo sapiens
ttcagagggaaagagcagagagcaccagtgaaaataaggttgaaaatatagcctttgagatgggctttacagggtaggcatgtgtgccttatagaagggaycccttagtctccaggcctacaatagcatcatccttactgggaagtgtgaggacctttacttgttggtggtctacagcctgtttcttctattcctctttac

SEQ ID NO: 239079 - DNA, 201 bp, Homo sapiens
gggagagaaggcagggtggcaagagtggagaccatgggcatttgagccacttcctcacgtaacttacttgtgccttcaggacctgctcaagcctgatcgcrtatataccacttccatttgatgactgaatgctgctgtgcatgacccactttatggctagatgggtaagaaagcaccaagttcatgataggaagttcaggt

SEQ ID NO: 239080 - DNA, 201 bp, Homo sapiens
caaattcactctcactaggatcagcttcctagctttatagaagtttggactcaaatataaacttgagaactttaaggacgtattatcagataaataactawcactgaagccttttccagttacatgcatgaaactacatcttgagaaactagaaagaaatatttaaaatctaatataatttacttatttcctgtttcatag

SEQ ID NO: 239081 - DNA, 201 bp, Homo sapiens
tccaggcaacaattcaagtagagtaaaaaataagttgagttataaagaaaaatgaatcatcttaagatcaccactgatgaatacaagaatcacaaaagttycaatagcaaaagcaaagtatattaaaaattaaggaaaatatgccaattatgtttctcttcataattttacgacagtaattttttacaatcatggctgatt

SEQ ID NO: 239082 - DNA, 201 bp, Homo sapiens
taaattattaaaataagtacgcttttttttttttcagaagcaagaaccagttcacagaagtgtgagtttattcatcagtaaacacctttaagtaaaacctygtgcatggtggcagctctaatttgaccaaaagacttggagattttgattatgcttgctggaaatctaccctgtcctgtgtgagacaggaaatctattttt

SEQ ID NO: 239083 - DNA, 201 bp, Homo sapiens
agtgggagcatttttcagaggtaaacagtggtaacattttacacatatattccttatcgtttctttttctgtatagcacgttttaagaattgcttttttcytttttttttttttttgacagtcttgctcttgtggcccaggctggagtgcagtggtgtgatcttggctcactgtaacctctggttctgggttcaagtgatt

SEQ ID NO: 239084 - DNA, 201 bp, Homo sapiens
aggggccatacttgaaggagcgggggtggctgctgactgtagcagctcagagactacttgttgcctcttggggcaggaggctaaggggcctttactttctyttttagaggaaagttaaaggtccatattttaaaatatataatcctttgatttaaaaatgttagcaaacaaatcacagcgttaaaaatcactgattgggtc

SEQ ID NO: 239085 - DNA, 201 bp, Homo sapiens
tctttacttcccttccctgcaaactttttagttcaaaatataagccctttgggagttatgtcatctgatttcaagagaaaattatgattataaatagctcygaaggattagttgagtcacagattggatgcagggtcagctttcacagttcaccggctgccatctgcacccaggtcgtgtttagaaacccttgactttatg

SEQ ID NO: 239086 - DNA, 201 bp, Homo sapiens
cttttctgtatcccttgtctccttcatgcactaaagtgctcatgacctcttctgacttcctgctgctgctgctgctgcttttttttttttttttttttttyctttgagacagggtgtctctctgttgcccaggctggagtgcagtggtgtgtctcagctcattgcaccctctgcctcctgggctcaagcaattctcctgcc

SEQ ID NO: 239087 - DNA, 201 bp, Homo sapiens
agtaaatggcataaaaaaagtaattgtttacagcttcctgagtaagacgttttcatttaggtgtgtcttttttttcccatagagaaatgaactattgcttmtgggtggagaaatgtcaaatacctttgctgaaattcttaacttgcctttgtatcttcacccttggcattgaaaattatccaaaataaattgctaggaaat

SEQ ID NO: 239088 - DNA, 201 bp, Homo sapiens
ggcttgggcctttgtcttagtcccttttcctaagtcatgagtggatccctggcctgcacattgttcctttatcactgtccttatgacatttctgttttctktgctgccttgttccagcctgtccctctgtacaggaaatggaattttgtcttatgagtcatcttggtgtttgagccttttctcctacgggaacacttccca

SEQ ID NO: 239089 - DNA, 201 bp, Homo sapiens
gaagttgacttagtttaatctgattctccttgctttgtaatatgtatttaacatatttatactagctaagttaagtgtatagggttcaaaattatgccagyagaggaatcatctaaaaaatggagctgtgtttaatttcatgaaaacaggagaaaacagcaatagtagaaataatgagttattttaatggttagcttgcaa

SEQ ID NO: 239090 - DNA, 201 bp, Homo sapiens
acaggagaaaacagcaatagtagaaataatgagttattttaatggttagcttgcaaaagaggaatcacctatattcaccgtgacttatgtgcaagatgatygcaactgcacatttgccaggcatcatcttagcttacacctgctgtccctgtgtaattactaagagcatcctatttcattcttaaagagttctggtttgca

SEQ ID NO: 239091 - DNA, 201 bp, Homo sapiens
cagccttttttctttttactctgtccccagctgcaataaattttcactcttcctcaaacaaatagagcttcatcaccacttagaattttggcgtgtgttaytccctctgcctggaacacacttttcccagacatccacatggctcattcttttacctccttcacatctaaattcaaatttcaccttcttagaaaggtcttc

SEQ ID NO: 239092 - DNA, 201 bp, Homo sapiens
cgagatcacgccaccaccctccagcctgggtgacagagcgacactctgtttcaaaaaaaaaaaaaaaaaaaaaaactttgtgtagcttttgttttacaaayaattgcctactgcagttcccagtacaatagctgctcacaattccctgttggatgactagctgaatgctgtgtcaaggaagagcatgtgaaggaagagctg

SEQ ID NO: 239093 - DNA, 201 bp, Homo sapiens
agttaactaaacagccttgctaaaccttggccctttaatcaacatcaaagagtaagatgaactaaataccttattctagataccttttggttggctttgcstttatgtgacagaaacaacatgccacctacctttctgccttatttgcaaatctcaagaaaaactttctgacaccttctgggtactgtgtattgcggttct

SEQ ID NO: 239094 - DNA, 201 bp, Homo sapiens
tttatggctgcatagtattccatggtgtatatgtatcacattttctttatccagtctatcattgatgggcatttaggttgattctatgtctttgctattgkgaatagtgctgcaatgaatagtgcatgtatgtgtctttatgatacaacaatttatattcctttgggtatatacccagtaatgggattgctgggttgaatg

SEQ ID NO: 239095 - DNA, 201 bp, Homo sapiens
agaaaagttggtaccccacttagttataaccacgtggaataacttcagaatttagttatttgtgcaatagtgaaaaatggcaaatcattttagtttaaatkgtagagataatttctcattcttttatggttagacctggaagattgatggtctctgtattggacctgttaaaagagtggataaagcttgaaaagagtgctg

SEQ ID NO: 239096 - DNA, 201 bp, Homo sapiens
ggtaaattgacaatttaaagagaaacaatatattaggcattttgtgccagtttgcatgggagtttcttggttttaacatgaaagtcctttgtcctgggaaycctctcagccctgtgcaggccaggacagttggtcactttttattcttataattgtctattattgtttaaattttgtaatcacctgttcctgtcttagtgt

SEQ ID NO: 239097 - DNA, 201 bp, Homo sapiens
tttttaagacctgcagtgatatttgagtatatttttgctgagaaaatttagacagaagtaataagagtttcaggggaaggttaatttctccagcactttaragtctttctaaatattcagaatttaaaatgtagcagaatttatggaaatttaaaactacaggaactttttgttcacctgtgagagaaagatcaatggaca

SEQ ID NO: 239098 - DNA, 201 bp, Homo sapiens
aaagcaagtgttaaaatcagattggattcagatctttacactatcactcactaattgtaagtacttgggggaatcagatcagacctctgatccttagtttyggccggtgtgtaatggtgattgcagtgtctgtctcatttactcaaccctttcccaagttgttggaggactaaatgaggtaatgctaataatgtatctaga

SEQ ID NO: 239099 - DNA, 201 bp, Homo sapiens; identical to SEQ ID NO: 46577

SEQ ID NO: 239100 - DNA, 201 bp, Homo sapiens
tgtatctgataattaatgacattatataaaatttcaacttatactcatttccctccaaaatatatttatatgcattttagcaaagatagtgaaaataacarattagccaatgcttctccaaatttgtgagtttgctcaatttaattttatgttccaattttatattttaattatcagtcatcttattaaaatcttagtgat

SEQ ID NO: 239101 - DNA, 201 bp, Homo sapiens
acaagaaacaaaactttcaggaaattacttaacttgcctctccttcagtttcctcatctgtaacacggggataataatagtctaaccttctaggactgttrtgagaatcaaatggatttatgtatgtaaattgcttaggatcctgcctgtcgcttagtaagccttcaaaaaatgttagctattagctgaatattgttgcta

SEQ ID NO: 239102 - DNA, 201 bp, Homo sapiens
atcctcacatagccatctgtaaaactgtcactttgtcagacccacagtactgataccattctgctctgcatttagccaaggtgactgggtttttcatctcrgacagtgaaaacagcacttttacaaagcaatttgcaaatatatgtcttcattcctttggaaggtactaagaagctaaatactgtgtcttaaattccactg

SEQ ID NO: 239103 - DNA, 201 bp, Homo sapiens
atatatttattctccaaattgcatacaaatattattaaacaaaattttaaaaattttctttgaatgtcagaatttaaatcctatgaataggcaaatagttytctccaaaattcagcaatgccctttcggcagacccccagctctgtctttatccaggactttgtcattcttctgtgtttgtactgcagcagcttatttcct

SEQ ID NO: 239104 - DNA, 201 bp, Homo sapiens
tgtaaaataaatactccattaagtgaagtgcattaacacttcaaatacatgctggctataatagtcatcactaattatggatcaaaagttctctaggaacsttattaaaaatactttggttcactttattatgttggacagggtccaggaacctattattaaaaagtacccttaccccaaagtcatactgataaagctgat

SEQ ID NO: 239105 - DNA, 201 bp, Homo sapiens
tttctgttagtgtcacaagcaggggacctggatcggggtttgtgtgggatgtggtggaaagcccttgattggcagttcagcaactcctttcttggctttgmtcctactaatgattagtctctaatcattgtttttttcacgtggaagataaagtctccagtccctttttgttctggaattgtgtgattttatccatggttc

SEQ ID NO: 239106 - DNA, 201 bp, Homo sapiens
gggaaagttctcaggtagagatttagctgctggatgttggaagtagaggagacatggaatgaaatggtaaaggctgaacagatatgggcaaggcactgatrgcatcttttataagtgacatctaacgtcttagtgtatgtgaagtagaatggaaacaagagcacaggctttttgacttttttggtaatcctacgttagact

SEQ ID NO: 239107 - DNA, 201 bp, Homo sapiens
tcagtaaagcctgatttggaatgcaaccttaaggcagaaaacgtgattttcctgtgaataaaactggcttgttatcttcctaatttaaggggaaactacakgattgataggatgtgcccctgttctcgctttcaaatatttcggatgggtagattctatagtggtggaatgtctactgacagtcaccagtgtgacattgca

SEQ ID NO: 239108 - DNA, 201 bp, Homo sapiens
ttattctcctactgaagttaaaacattactgtgctcctctatttaggtgttaaaagcttttgctttataacgtttttcaaaaaatcaagaagttgaagaamcctcttactttttttacgtccaggtttattgtttgattttgttttgtgtatttttgtttttgtagaaccagctcaaaaacaaagcttttctcatatcacc

SEQ ID NO: 239109 - DNA, 201 bp, Homo sapiens
cacctgataacgccccacatcctggcctcgagtgacagggaattgttttccaccgacgtcagcatagagagccatgttctgggtgagggaacaaaggcagrgtcaccttctgccccctctgggtgtgggcagaggagccctgtgcgctgctcacacggcctgcaggtgggcaggctaggcccagttgggggctgcagtgtc

SEQ ID NO: 239110 - DNA, 201 bp, Homo sapiens
gcgttgcccaggtctgcgatcttgatcttgatcttatctgcattttggggctccagggggttcaccaggaggttcgaggcaccgaatggtgctggggaagrcagagcagggagactgaagtggtccgactactgccagccctgcctgcccaccacttgccacccaacttactgctaggcgacaggaggcccccggtctctc

SEQ ID NO: 239111 - DNA, 201 bp, Homo sapiens
gtgccttgccctgagactgaccgtcctgggtgtgagaacccttacagaggaaccccaggtcttgaatcccactgatttggacgccataggaaaacatgcakccaccattgacacatggtccaacagaaatatgccaaagacagaagcctcagcaggcataagatgtggggtgtggatgttctttctttccatggaaccatg

SEQ ID NO: 239112 - DNA, 201 bp, Homo sapiens
ccggccctggggactgaggctttggagctaattatctattgtgcccctggcagtgggccatgctgcacagacaggggacctgcctgggcacagtggggacrgtccgtttttccttccaacttggctttctgggttagacatcaaaccaaccgctggcatttggtctctgccaggttctaggcgcccacgaggtcccctcga

SEQ ID NO: 239113 - DNA, 201 bp, Homo sapiens
gagcggtggggtagccgcacccgaagcagtctggagtccgattggctaggggccccaccaggggcggggaaagggcttcgcgccggggttgattggccgcytccgctgtcactgaggggattggccgaagttggccctggaccggctcccccagggggtctgcatcgggtggcggggggccctccggacgggccgggagag

SEQ ID NO: 239114 - DNA, 201 bp, Homo sapiens
gcagtgccttgccctgagactgaccgtcctgggtgtgagaacccttacagaggaaccccaggtcttgaatcccactgatttggacgccataggaaaacatrcagccaccattgacacatggtccaacagaaatatgccaaagacagaagcctcagcaggcataagatgtggggtgtggatgttctttctttccatggaacc

SEQ ID NO: 239115 - DNA, 201 bp, Homo sapiens
  misc_feature (1)...(201): n = A,T,C or G
cttaggggaggtggggtgggattctgtccattttgctggtgagggacaggttagaattcagaccccagcctcctggggccctctgcacgccccgtccctcnggctgactgttgcgatggccaagctggtgtcctattcctaaccccccaccaggaaactgggcgatgggcttttcctccagtgctgcagggaggtggcagc

SEQ ID NO: 239116 - DNA, 201 bp, Homo sapiens
gaaaacatgcagccaccattgacacatggtccaacagaaatatgccaaagacagaagcctcagcaggcataagatgtggggtgtggatgttctttctttcyatggaaccatgaaagggtgatgggagagcgggaggcgtgtacatattgcatcctgcctcacacttggctcctttgattggtggcttcacagggaagtcag

SEQ ID NO: 239117 - DNA, 201 bp, Homo sapiens
gagagcgggaggcgtgtacatattgcatcctgcctcacacttggctcctttgattggtggcttcacagggaagtcagggcacaaggcagagcctttgcgayctcctgaaggaaggtgcctgcatctgtacagtaaggtcagggaagtccatctggagcgctctctgggtcttttgccaaagcccaaaggaacacctggcac

SEQ ID NO: 239118 - DNA, 201 bp, Homo sapiens
cgggggaaggcacaataacgcaagccagcagccccaggtcctgtgcagtcccaggtcctgtgatgtttattgaaggaagcaagggcagggctggggtgccsccctcaggcctggatgtggctcttcgcactgaaggccaagtagtagatcacaaggccgatcgccgcagccagcacctcagtggacacccagggcccgttc

SEQ ID NO: 239119 - DNA, 201 bp, Homo sapiens
agtcccaggtcctgtgatgtttattgaaggaagcaagggcagggctggggtgccgccctcaggcctggatgtggctcttcgcactgaaggccaagtagtaratcacaaggccgatcgccgcagccagcacctcagtggacacccagggcccgttccaagtgccctgaaaaaaaggagatcacaagccagctcaggggagta

SEQ ID NO: 239120 - DNA, 201 bp, Homo sapiens
tccccttttgttgttgttgttgttgttgtttgagacagagtttcgctcttgttgcccaggctggagtgcaatggtacgatctgggctcaccaaaacctccrcctccagggttcaagcgattctcctgcctcagcctcccgagtagctgggattacaggcatgcgccaccatgcctggctaattttgtatttttagtagaga

SEQ ID NO: 239121 - DNA, 201 bp, Homo sapiens
ctgaggcaggagaattgcttgaacccgggaggtggaggttgtggtgagctgagatcacgccattgcactccagcttgggctcgaaactccatctcaaaaawatatatatatatatatattagctgggcatcacgcacctgtagtcccagctactcgggaggctgaggcaggagaactgcttgaactcagcaggtggaggtt

SEQ ID NO: 239122 - DNA, 201 bp, Homo sapiens
agccggagaagcctgaggtctgtgagcccgcgctgaggctacggccgccccctggggcgggggaggaagaggctggggagggacctgctctggcgcccccrgggtgacagcctgaagaggatgtggagccgctgcccccgtctagtctcaagccagagtctggggagacggggtggaggcagctgctgagcagatgtcttg

SEQ ID NO: 239123 - DNA, 201 bp, Homo sapiens
gaggcaggagaattgcttgaacccgggaggtggaggttgtggtgagctgagatcacgccattgcactccagcttgggctcgaaactccatctcaaaaatawatatatatatatatattagctgggcatcacgcacctgtagtcccagctactcgggaggctgaggcaggagaactgcttgaactcagcaggtggaggttgc

SEQ ID NO: 239124 - DNA, 201 bp, Homo sapiens
gtctctacaaaaataaaaaattgctcaggcgtagtggcatgcgcctctagtcccagcttctggggaggctgagtgggaggattgcttgaacccaggagttrgaggcttctgtgagccgtgattgtaccactgcactctagcctgggcaatggagccagactgtgtctggaaaaaaaagaaagaaagacagagagaaagaga

SEQ ID NO: 239125 - DNA, 201 bp, Homo sapiens
cctgaatctcaccgcgggaatgaatcaggcaaattcagactctggcgcattctataaggactggtctcttccaagaagtcattcccattaaagtaaaaaawatatatatttttttctagattagagaggagacataataactagagacctaacaaccgaatgtaatatgtgtgcttcttgattgaatcctagattttttgt

SEQ ID NO: 239126 - DNA, 201 bp, Homo sapiens
tcccagaactttgggaggccgagatggatggatcacctgaggtcaggagttcgagaccagcctggccaacatagtgaaaccccgtctctaccaacaatacraaacattagccgggtgtggtggcaggtgcctgtaatcccagctactcgggaggctgaggcaggagaattgtttgaacctgggaggtggaggttgcagtga

SEQ ID NO: 239127 - DNA, 201 bp, Homo sapiens
gtaagcgtcccccacacacagcaagatgttctcgggcttgatgtccgtgtggatgatcttgcacttggtgtggaggtagtccaggccgtgcagcacctgcrgagagtcgcacctgacctcctccaactcccgcccaggccaggctgggcagcccagtgggtggcactcacctgcctcacgatgctcttcacgcagggcacg

SEQ ID NO: 239128 - DNA, 201 bp, Homo sapiens
tccctgccatgtgcagctaactgacccccttccctgtcaccggcacccctaccggtatacatgtctctcatggacgcccagacacccctcccccgactaastgctcaaaggcctttgagatgaagccctcccatgtttctgtctctcctgcccccaggcagaaagggtgggcacagagttatggaagcgggtggtgtggct

SEQ ID NO: 239129 - DNA, 201 bp, Homo sapiens
gcagccaccaatgcagtaattaattcaggcaaaaatcatcactggatgccaaaaccattagatgtaaggtcgttggggacagaatattcacaaagtctccmaatattaccccaaattacctgtgaatcaggaagggaaactgcgtctttacagaggagagatctggcagctgccacctggaccatgtgatcaaacagcctc

SEQ ID NO: 239130 - DNA, 201 bp, Homo sapiens
gaagtactgaggagcccctacctcccaggcaagttttgggccttccctccttttcagccttggctgagcgcggtggctcatgcctataatcccagaacttygggaggccgagatggatggatcacctgaggtcaggagttcgagaccagcctggccaacatagtgaaaccccgtctctaccaacaatacaaaacattagcc

SEQ ID NO: 239131 - DNA, 201 bp, Homo sapiens
ctggacagcaggagcagcgccagggcgccgagagatgccatcgccgccatcgcctcttctctgcctagaggaaaagaaaacgagctcccatgaacacgagrggcaaacgaggaagagcgacgcgtaagtggcagcggcagccaatcgcgcaccgaacggctgggccggcattgtgacgtctctggcagcactgacgtggcc

SEQ ID NO: 239132 - DNA, 201 bp, Homo sapiens
ccgggtgtgcgggctgggggcttggtggggctaaggtggggtgagccagtggagtctggctccagtcagccacctgtcaggcctagcagcctctttctccrtcccctcccagcaccagcctggacctctatgccaacgtcatccactgtaagagccttccaggcgtggtgacccggcacaaggacatagacatcctcattg

SEQ ID NO: 239133 - DNA, 201 bp, Homo sapiens
cgggactcaaatttctccacggtttcctctctcgtggaccgctttgccacctatcccggtggcaaagaaccggactttgccagtcatcccccatagtcccscagtcttagagccccagatgccttcccctcgaggcgcctggaatgggaaggagctagggtttctgaggctgcgggggttttgcttctgctcttctccgtg

SEQ ID NO: 239134 - DNA, 201 bp, Homo sapiens
ggaggtgtgcaggaagagcgaactggggacaggtgggggctggattcactggacaatacatgccaacacttggacctatgacacggaggcccgggggccasgccagcctcaattcagagccacaaacggcctggacgagttactgaaggcatcctcagcagagacatcgggggtgggggctgcaggcaggcaatgcactgg

SEQ ID NO: 239135 - DNA, 201 bp, Homo sapiens
ggagagatgcctgggtaaggccagctcgagtatcccggtctgagggcaggatggcccggccctgcctcatagcacggatcagctggggacccatgcgctcytcctgccccttccaggtgggatatgcgagacagatccaagtgctcggtcacaaatgcaatggcaacgtaggcgggatggctgtgaaggaaggctggggag

SEQ ID NO: 239136 - DNA, 201 bp, Homo sapiens
cgtcccttctctacttgcctcccttccccaaggaggacttgaaggtcgcagcatactgtcccagggtgctgcggaagcagccttcgaccttgtgggcactscttgccccaccacctgcgctgtgcgtaatgggcttccttctgctacccttcattgtccttccttcacccctacagcatcccgcagagctgcttaggtcct

SEQ ID NO: 239137 - DNA, 201 bp, Homo sapiens
acactcaccaatcccgtgactggccctctgcattggtcttccctacgggggcacaaggccagatccccatggccgggcctaactggacgcataggaacccygttgactgtgagcaggggcgggatgatcaaaagggctgagtgatttcctgagtctacaagggaggtgctggggtcaggggtgcccagtgggctgcccaag

SEQ ID NO: 239138 - DNA, 201 bp, Homo sapiens
tttttgtaagggggagaccatcgccaacatgtaggcaactgcgggggagagaaagtactgcttgagtgcgggagcgtggctggcagccagtgtcccctctycagcgacgtcttcctccaaactgctctcccacccaccaagccaggtggcttctctggctccctcctgcttgcatgggggcttcctgtgagcagggatttg

SEQ ID NO: 239139 - DNA, 201 bp, Homo sapiens
ctttgctcttcctgcaaaggatacggactccattgactcctgagatcctgaagtcatcaatgagctggacaatggtctctcttttggggtcactggggtcrctgtcccggacctggagcaaaagccaaggggccacagatggttccaccctgccctgaagcccacagctcccttcagtgtacccttctcctgctccagctg

SEQ ID NO: 239140 - DNA, 201 bp, Homo sapiens
atgtcggagaggtatgcagacgggtatgccccagccccgaggcccatccacatggcctgcctgtggctcagaggctgcccttaaggtcccagctaccagaracagggcatcacagctagggtgctgcgtggtgaggcgatgatggtcgacggcttcagccactgtccagtgaggtagtcatctgcagaaagaggcctgtgc

SEQ ID NO: 239141 - DNA, 201 bp, Homo sapiens
tttcaaggttcatccatgtatcaatagtcaatttctttttattgccaaataatatttcattttgtgatatacaacatatttatccattcgtcagttgatgrgcatttggggtgcttccacccttgggctgttgtgaatagcgctgctgtgaacactggtctacttgtatctgtttgagtccttgcttttaattctttggag

SEQ ID NO: 239142 - DNA, 201 bp, Homo sapiens; identical to SEQ ID NO: 46598

SEQ ID NO: 239143 - DNA, 201 bp, Homo sapiens
gttggctcagatgggagaggaggcatgggagagaggggccccccaacttaccaagacctcctggggggcagtgctgactgggagtgcaggtggggagcggkggggggggacagggaggaacagagactcaggcaggggttcaggcccagaggccccgacccagccccatgtgggcccttggtacctatggagcgggagggg

SEQ ID NO: 239144 - DNA, 201 bp, Homo sapiens
gtccctagctctctcccactaagagctaaccctgaggcccagcagcctgccgtgtcctaaacccgggctgagtctcatctctctcctgcccactcaccccrgtggctcccgtgtgcctatgggatctgctggcatccagggcccctgctgctctgaaacctcctggcccctctccctctgccccactccatgctctcctga

SEQ ID NO: 239145 - DNA, 201 bp, Homo sapiens
gattggacgagccggagaggatggagcaggaggcaggagagaagagggagccggagaagcctgaggtctgtgagcccgcgctgaggctacggccgcccccyggggcgggggaggaagaggctggggagggacctgctctggcgcccccggggtgacagcctgaagaggatgtggagccgctgcccccgtctagtctcaagc

SEQ ID NO: 239146 - DNA, 201 bp, Homo sapiens
ggccgccctctccctggtaccttccacttagttacatcctcccagagctcaagccccagcctagcccagccgagcccagagtgcttgggctccctgcaccygcccagggtccgccccagggccagccctagcatgcttgttgattgtatcctgcctgcctcagattaacggtgtagacgtccagaaccgggaagaggcggt

SEQ ID NO: 239147 - DNA, 201 bp, Homo sapiens
tgaggctgtgcagggtctcccaatgcttggcagggaaatgaaccaggcctgaagccccttccgatcctcctgtgacatcccgtgacatccctgtccgtggkacctaactgagcggtacttacctttctgctctagcccggaaacgaagaggagaagggggctcccgatgccggcccaggcctgagcaacagccaggagctg

SEQ ID NO: 239148 - DNA, 201 bp, Homo sapiens
ccctagcatgcttgttgattgtatcctgcctgcctcagattaacggtgtagacgtccagaaccgggaagaggcggtggccatcctgagccaggaagagaayaccaacatctccctgctggtggcccgacctgagagtcaggtgtgtatgcctggcagggcgacccggggccacgacatcaggctttctgtcttggaagctg

SEQ ID NO: 239149 - DNA, 201 bp, Homo sapiens
acaaacatcgctgagcgggaataactggccaaaaaaataatcagaagcaaaaaagaggagggagggcagggacacgccttttaagaaattttctgaagagyggaaggaggcaggaggctggagcgccttctactttccaggtgctccagcgggccggccctggggactgaggctttggagctaattatctattgtgcccct

SEQ ID NO: 239150 - DNA, 201 bp, Homo sapiens
aacaaaggcagggtcaccttctgccccctctgggtgtgggcagaggagccctgtgcgctgctcacacggcctgcaggtgggcaggctaggcccagttgggrgctgcagtgtccctggcaggaggtaccaggtaacactcaccaatcccgtgactggccctctgcattggtcttccctacgggggcacaaggccagatcccc

SEQ ID NO: 239151 - DNA, 201 bp, Homo sapiens
tcttttcagtaagtacctgcccgtgcccacgcatgtgtctttctccatgtggccgcaattgtgcgcgtgtgtgcacggcctgtgtcctgtcctctgagacrtggtctccaggggctacccacccctcttctgggagttgtactagccagcatccccctgggaaaaggtcccactttcctggtcacggccttgctcttggaa

SEQ ID NO: 239152 - DNA, 201 bp, Homo sapiens
atgatcccaggggatggcatcgggccagagctcatgctgcatgtcaagtccgtcttcaggtatggagctcctgggtccccgccttgtcctcagccaggggrccctgaggactttgtgccaagaggggcattgcgcccagaagcactcggtgaggccatggcaagacgacctgtaagcccaggccttgcgtcccatggcctg

SEQ ID NO: 239153 - DNA, 201 bp, Homo sapiens
gtcaagatcatgccactgccctccagcctcggcgacagagtgagacccccgtctcaaaaaaaattttttttcgtttaaacttctcttaagtgccgagatckgggcagcaagtcagtgacggattagacgctaagaaggctgtggggggaaaaagtcccagtgcctgttcccagaagcctggagtcccgctgcagggaaggc

SEQ ID NO: 239154 - DNA, 201 bp, Homo sapiens
  misc_feature (1)...(201): n = A,T,C or G
ggggtgggattctgtccattttgctggtgagggacaggttagaattcagaccccagcctcctggggccctctgcacgccccgtccctctggctgactgttncgatggccaagctggtgtcctattcctaaccccccaccaggaaactgggcgatgggcttttcctccagtgctgcagggaggtggcagcccgctaccctca

SEQ ID NO: 239155 - DNA, 201 bp, Homo sapiens
gaggctgaggcaggagaatcacttgaacccgggaggtggaggttgcagtgagtcaagatcatgccactgccctccagcctcggcgacagagtgagaccccygtctcaaaaaaaattttttttcgtttaaacttctcttaagtgccgagatctgggcagcaagtcagtgacggattagacgctaagaaggctgtggggggaa

SEQ ID NO: 239156 - DNA, 201 bp, Homo sapiens
gagttgggatggaagtagaactcagggtgaagccctcttggggtttgttgtctaatgaaagggaggtaattagacaatcacacataaaaggctgagctccrgcctgggtatcttgaggcctcctggacttgctgtagcatctggagaagtatggggcatcatctcgcatcacttagcaccagcactgccacccagccttga

SEQ ID NO: 239157 - DNA, 201 bp, Homo sapiens
ggcagtgccacagagacagcacctgccgtttggggataatagcaacgtccatggacaatcaacgctagcttgttactgcctccacgtaaacacagttaccygggggcggggtcgtgccagaggctcccgttactgggagggatgcaagcccattgtgcgggtctgcagacaggctctagcagcgagggcccccccatttgc

SEQ ID NO: 239158 - DNA, 201 bp, Homo sapiens
  misc_feature (1)...(201): n = A,T,C or G
tttgtccctgtggagtggcttcttctggacgtgtcacaggagcagagtcactgcccggcatccttctgccctccacccactctccttcgtcttgcctcccnaggctacgaggaacaccggcaagagtatcgccaataagaacatcgccaaccccacggccaccctgctggccagctgcatgatgctggaccacctcaagtg

SEQ ID NO: 239159 - DNA, 201 bp, Homo sapiens
cgctaccctcagatcaccttcgagaacatgattgtggataacaccaccatgcaggtattagcctgcccagtgctgtccccctgccctgagtgccctgggcktctctcacccatgcttccgaatctgctcctcagccagccccctccttgtcccgcagctggtgtcccggccccagcagtttgatgtcatggtgatgcccaa

SEQ ID NO: 239160 - DNA, 201 bp, Homo sapiens
tggggtcttcctgttcctcgtcgtcggagcccagaaggccctgcagcatctgaggcaccggtgtggccagggctagttcggagcccgaggactcgggcccrcaggaggcctgtgagctgcgggtggggtgagtggcagtgggcatgagagacgccaggggctccgggtgccccagccgagccctacctgctgctactgccg

SEQ ID NO: 239161 - DNA, 201 bp, Homo sapiens
ctgggtctcctcgccctgccctctctgtgctgactgggggctttgcttccaactgcaaaccagcctccctgggtcttttcttggccctgttccctttgccygatggaggccaggtgtcccctgctccagaagccttccccgcctcccaccgaggcgtgcatggccagccgtgtgctcccttagctgtgggtaaggtctgtc

SEQ ID NO: 239162 - DNA, 201 bp, Homo sapiens
atttttctattttttctgtagagacagggtctcaccatgttgcccaggttggtctcagactcctgacttcaggtgatcctctaacctcggcctcccaaagygtggggattacaggtgtgtgccaccacacctggccatgggtgtgtattttctcaatatcccatgaaggcacagcacacgggaagccaggtggcatggtca

SEQ ID NO: 239163 - DNA, 201 bp, Homo sapiens
ccccagctccggagccttttctgcagcccatgtccctccactgccaccaggcccccttgtcatatatctcatcgtggtccacactctgctgaacttgtctyggccttggcaccccctctctgacaccatgatgtgcttgctagcatccgagcacgccggagatggtcaggggataaacccctggtacttaggactggtctc

SEQ ID NO: 239164 - DNA, 201 bp, Homo sapiens
acgccggagatggtcaggggataaacccctggtacttaggactggtctcccgcccatcctactcaggctttacagggggagtgggtcaggaccgcctgtcrtctcccctctgtccacatcgagggaggccaaaggacagctggccagcccttctggtgatctcccaggcattcttgcctaaagcacctgcatgtgagcccc

SEQ ID NO: 239165 - DNA, 201 bp, Homo sapiens
ctgcgtccgcccaccccgcccatggtcatcctggagccgtacgtcctctctgagctgtgagtcgccctcaggagggccccgggccctgcctccagagaggrcaggccacctggagcggccatccgcacgccaccctctcgggcaggaagcaggcccctcggcctccagaactgaccgtggtacccaagggctccaaaacct

SEQ ID NO: 239166 - DNA, 201 bp, Homo sapiens; identical to SEQ ID NO: 46596

SEQ ID NO: 239167 - DNA, 201 bp, Homo sapiens
ttggggtgggagtaggggacagtgaacggtgggtagctgggcagtgccttgccctgagactgaccgtcctgggtgtgagaacccttacagaggaaccccasgtcttgaatcccactgatttggacgccataggaaaacatgcagccaccattgacacatggtccaacagaaatatgccaaagacagaagcctcagcaggca

SEQ ID NO: 239168 - DNA, 201 bp, Homo sapiens
gactttgtgccaagaggggcattgcgcccagaagcactcggtgaggccatggcaagacgacctgtaagcccaggccttgcgtcccatggcctgtgatcccrccagactggcctgggctcggggaaggtggcaccagtcctgccacagtgtgcattgtggagttcaagcgtgtccccatcagtcagtgaaggtgggcccagt

SEQ ID NO: 239169 - DNA, 201 bp, Homo sapiens
taattcaggcaaaaatcatcactggatgccaaaaccattagatgtaaggtcgttggggacagaatattcacaaagtctccaaatattaccccaaattacckgtgaatcaggaagggaaactgcgtctttacagaggagagatctggcagctgccacctggaccatgtgatcaaacagcctccccaacagtggggcagcctg

SEQ ID NO: 239170 - DNA, 201 bp, Homo sapiens
tagtctcaagccagagtctggggagacggggtggaggcagctgctgagcagatgtcttgcagcctttgctgcgctccacggcccatcaccctctgtggccyctcaccctcagcctgggtggcagcctccatggcctccagcctctgcaggtcccgcagccgctcctccagcagccgcttctgctgtttccgtttgcgcctc

SEQ ID NO: 239171 - DNA, 201 bp, Homo sapiens
cggctcactgcaacctcctccgccacccgggttcaagtgattctcctgcctcagcctccctagtagctggaactacaggtgcaagccaccacgcccggctratttttgtatttttagtagagacggggtttcaccatattggccatgctggtctcgaactcctgaccttgtgatctgcccgcctcagcctcccaaagtgct

SEQ ID NO: 239172 - DNA, 201 bp, Homo sapiens
gagaagtgggttccagccccatccctcccagcagggcctgatgccgtccactctggaaggcggaagctgccctccccatttggtgatcccacagtgcctakcaaggtgctcagtttgcagaaggcacctagtggatgtcttggccagatagatgaataaccgcgtcgttgccagggcccttccatcctgggagctctcagc

SEQ ID NO: 239173 - DNA, 201 bp, Homo sapiens
actgtgtgaggagcgtgtgagcaaagatgaacccagggggagccccaggccctggcagtcaagtagaggggcctttgtgccagccacaggggacccccgcsctgtgagtggagcagtctgggtggggtaccgctcaccagcaggcggcctctgcttggcgccctctgactgctgtctccagcggccactggcctctgcttc

SEQ ID NO: 239174 - DNA, 201 bp, Homo sapiens
tagctgtgggtaaggtctgtccccacgctcacctgcggggcatagccatttgggcataatgctagtgtgtagcctccccaggcccagaacagcccttccayaagccgctgagcccatgaggagaccctgcacgcctgcctcgagctgcctcctcctagaagtgcttcctgctgacccttgctggccccatggcacgtgccc

SEQ ID NO: 239175 - DNA, 201 bp, Homo sapiens
tgcacagacaggggacctgcctgggcacagtggggacggtccgtttttccttccaacttggctttctgggttagacatcaaaccaaccgctggcatttggyctctgccaggttctaggcgcccacgaggtcccctcgaggaacatcttttcagtaagtacctgcccgtgcccacgcatgtgtctttctccatgtggccgca

SEQ ID NO: 239176 - DNA, 201 bp, Homo sapiens
tactccagacggcagagctgagagccagcaggcaggtcagagctcggccccgggcagaggataacttcctgtctctgtccttccccagcttgtttcctacwctacagcagtggggtaaggggagtccgaaggtggcagcccccccacctccgtggcagccacgggggcccctggaagtgatgtggcttcacctcccatccc

SEQ ID NO: 239177 - DNA, 201 bp, Homo sapiens
gggaattggccggagttgactggagatggaggtcaaactgtccccttggcctccctctagctgctggggggctcacttggatggtcctaaaggcacccccyttcttccaatggtggggtgccctccagtgttcacgggatgtgggctcatatgggcctggagcctggagtcccttggctggctcagggagaggtggcgcca

SEQ ID NO: 239178 - DNA, 201 bp, Homo sapiens
cgagttactgaaggcatcctcagcagagacatcgggggtgggggctgcaggcaggcaatgcactggggctttcaagatgagagaaagggtctctgcccccsgccagttgacagaaggtgaagactggccccagcgtttcctgaagaagtaaacgggagagactctggttccagaagcacaacttgttagctgtgagagaaa

SEQ ID NO: 239179 - DNA, 201 bp, Homo sapiens
ctggaggtagggtgggcccccctctgctctgcagaagtcctccagggcctggataactcctgggggcgttgcatgagtggggccagtgctgggcgggcggrtgggcacccggagattggagaagttggtccctgccagctggcgtggttggaggagttctggtctgggggacgggaacgctagaggcatgcgcaggtcctc

SEQ ID NO: 239180 - DNA, 201 bp, Homo sapiens
cttcagcttctttctttggcccgaccggaagaagggcctttcatccaggcctggtggctcatgaccgcgtgagcgctgcctcattctgctaatcttagccygggctgcggggaggtaggccacagggccatgagcagccaaccttagttttggggccaggagggcagcccctggaggtagggtgggcccccctctgctctg

SEQ ID NO: 239181 - DNA, 201 bp, Homo sapiens
tgggcaaaggctctcgacctgaaagaacgcgcgttcgggcgcagaactaaggggggcttgaatggaagagatggggtgggggagtgggacttcctgcctgktgctcgaaggcgggcacccatctgggtttttcccaaccgtgcaatccacgctggggcagagggagcaccttgagagcggcgcggggcagcgggtttgggg

SEQ ID NO: 239182 - DNA, 201 bp, Homo sapiens
ccacgggcacgtccaggtagtggtccaggaagttggcattctgctctgggtccagcagctccagcagtgccgacgacgggtccccctggtagcctcggccratcttgtccacctggggcagcagacagcaggtggtgcccctcgccgtgcccctggccagcccgcccagtggggagaccccagggtcagggctggggagac

SEQ ID NO: 239183 - DNA, 201 bp, Homo sapiens
gggtgaggacgaactcatgggataaagcctgtgaccccagggaagaactaagccacattcgtggagctgcaggacccggccgcctggatggaggggagggkccagaaagcagctgctcactggcctcgtccagtccttcccctctaacagtgacggtaacaggtgtgaggctgcagaggcctcctggagcggacggacgcc

SEQ ID NO: 239184 - DNA, 201 bp, Homo sapiens
agcccagggactgggcgggagcaggtgggagcggatggcgcggtcacctcgggcacatgcaggtggatgtgtgaggtcaccaggtagtcattggcgggggygtgctgcatgaggaaggctctggcgaaggtgtaggctatgcgggcgctctccttcatcacctcccccagctggcctgtcacctccaggctgccatccttg

SEQ ID NO: 239185 - DNA, 201 bp, Homo sapiens
aagatctcccggtagtgttccacgaagtgcacctccaggccctcggtgatgaaggctgccaggtcgtagaagtccttcttgttctcggctggcaggacgaygcacgtcacccctgcgcgcttggcctgggggcagagtcagggtcagccctgcctgggcctgtgggagggcagcaggtgtgctaacctccaggaacgaaag

SEQ ID NO: 239186 - DNA, 201 bp, Homo sapiens
tcgaagatctcccggtagtgttccacgaagtgcacctccaggccctcggtgatgaaggctgccaggtcgtagaagtccttcttgttctcggctggcaggaygatgcacgtcacccctgcgcgcttggcctgggggcagagtcagggtcagccctgcctgggcctgtgggagggcagcaggtgtgctaacctccaggaacga

SEQ ID NO: 239187 - DNA, 201 bp, Homo sapiens
tggcgagcgaggctgaaggagccgggacgcggggctctgggcctcgggaactgagccggtactcacctccgccccttctccccgtcgctgtccgcagccakggccctacgctaccctatggccgtgggcctcaacaagggccacaaagtgaccaagaacgtgagcaagcccaggcacagccgacgccgcggggtgagtgcg

SEQ ID NO: 239188 - DNA, 201 bp, Homo sapiens
ccagccgccagggggagcgcgtgccgttcttgcctctctggcctgcgcctcctgagccgagtagatatcccggagttccgcgcggcgccagcccttccgcsacggccgtctctggagagcagcaggtaagtggtttcccgcactgccggtatccgccgccatccggactcccgggtcctctgtgcaggttggaggatggtt

SEQ ID NO: 239189 - DNA, 201 bp, Homo sapiens
cgctgacaatcttgtaggccgatttccgtaacacctgggcggtcagggcaacacaatgggcacgggaaggtggggtgacaggtgcggggtggtggggtgaygggcacagaaaggtgtgacgggcgcggggtggtggggtgatgggcgcaggaaagtgggatgatgggcatggaaaggtggggtgatcagcgtgggatggtg

SEQ ID NO: 239190 - DNA, 201 bp, Homo sapiens
ggggaggggctgggcttacctccgcaatggccagcttctcctgggccacgtagcccgacacgttgatcatctccatacggtctcgcagcggctcggggatrgtgtccgtgacgttggccgtgcagatgaacagcacctgggggcggcggcaaggtgctgggggactggccgcttaccctccccagcaagcccaggccccag

SEQ ID NO: 239191 - DNA, 201 bp, Homo sapiens
tggcccgcgggcctccactttgcgcccctcaagcagtggtaaatttttgggaatgatgttgaatgggtcccgaggctcagagtaggggggggttttcaggygggggcctccctatggccagcaggtgcggtggagggggaagcgctgctgtagaggagaggcccacgggcagctctggccccccccaggtggtagggaact

SEQ ID NO: 239192 - DNA, 201 bp, Homo sapiens
gcaggctctggggggcgccccctgctctgggaaggggacagcagtggggaggggctgggcttacctccgcaatggccagcttctcctgggccacgtagccygacacgttgatcatctccatacggtctcgcagcggctcggggatggtgtccgtgacgttggccgtgcagatgaacagcacctgggggcggcggcaaggtg

SEQ ID NO: 239193 - DNA, 201 bp, Homo sapiens; identical to SEQ ID NO: 46626

SEQ ID NO: 239194 - DNA, 201 bp, Homo sapiens
ggccagcattctggcccgcgggcctccactttgcgcccctcaagcagtggtaaatttttgggaatgatgttgaatgggtcccgaggctcagagtagggggkggttttcaggcgggggcctccctatggccagcaggtgcggtggagggggaagcgctgctgtagaggagaggcccacgggcagctctggccccccccaggt

SEQ ID NO: 239195 - DNA, 201 bp, Homo sapiens
gtgcggggtggtggggtgacgggcacagaaaggtgtgacgggcgcggggtggtggggtgatgggcgcaggaaagtgggatgatgggcatggaaaggtgggrtgatcagcgtgggatggtgaggtgggcggcaggtgccaggagggcgggctggccgctcaccttctccacttgcttctgcaggttgcggacaccgctctcg

SEQ ID NO: 239196 - DNA, 201 bp, Homo sapiens
ggacaaacgggccctcaaatttatcaagaaaagggtaggtgggcgctgccggccgaggggcggggtgggatgggagtcagggccgggctgacggcggcctygtccctggcaggtggggacgcacatccgcgccaagaggaagcgggaggagctgagcaacgtactggccgccatgaggaaagctgctgccaagaaagactg

SEQ ID NO: 239197 - DNA, 201 bp, Homo sapiens
cggccgtctctggagagcagcaggtaagtggtttcccgcactgccggtatccgccgccatccggactcccgggtcctctgtgcaggttggaggatggttgrttgtggcgagcgaggctgaaggagccgggacgcggggctctgggcctcgggaactgagccggtactcacctccgccccttctccccgtcgctgtccgcag

SEQ ID NO: 239198 - DNA, 201 bp, Homo sapiens
aacgggccctcaaatttatcaagaaaagggtaggtgggcgctgccggccgaggggcggggtgggatgggagtcagggccgggctgacggcggcctcgtccytggcaggtggggacgcacatccgcgccaagaggaagcgggaggagctgagcaacgtactggccgccatgaggaaagctgctgccaagaaagactgagccc

SEQ ID NO: 239199 - DNA, 201 bp, Homo sapiens
ggggaagactccagccgccagggggagcgcgtgccgttcttgcctctctggcctgcgcctcctgagccgagtagatatcccggagttccgcgcggcgccarcccttccgccacggccgtctctggagagcagcaggtaagtggtttcccgcactgccggtatccgccgccatccggactcccgggtcctctgtgcaggttg

SEQ ID NO: 239200 - DNA, 201 bp, Homo sapiens; identical to SEQ ID NO: 46628

SEQ ID NO: 239201 - DNA, 201 bp, Homo sapiens
gcacgggaaggtggggtgacaggtgcggggtggtggggtgacgggcacagaaaggtgtgacgggcgcggggtggtggggtgatgggcgcaggaaagtgggrtgatgggcatggaaaggtggggtgatcagcgtgggatggtgaggtgggcggcaggtgccaggagggcgggctggccgctcaccttctccacttgcttctg

SEQ ID NO: 239202 - DNA, 201 bp, Homo sapiens
agcgctcagttctggcccagacagggcctgacatccgccgcctgcagtcccggggtggccgtcaccgttccacggccagcgcctctgcctgctcgtccggkaaggcgatgtcgaagatctcccggtagtgttccacgaagtgcacctccaggccctcggtgatgaaggctgccaggtcgtagaagtccttcttgttctcgg

SEQ ID NO: 239203 - DNA, 201 bp, Homo sapiens
tcatggagccaccgtggtggcctggacaggtggtggctgtggaggtggataggaaggcgtggatccaaggcggtggcatcaccaaacacccaccaaacacrggtggctgtgggccaggcctgtgccggccacctctgtcccctgtccctctgcaggcccacacaggaccatgaaggtgcttctcctcacagggctgggggc

SEQ ID NO: 239204 - DNA, 201 bp, Homo sapiens
gccagcattctggcccgcgggcctccactttgcgcccctcaagcagtggtaaatttttgggaatgatgttgaatgggtcccgaggctcagagtaggggggkgttttcaggcgggggcctccctatggccagcaggtgcggtggagggggaagcgctgctgtagaggagaggcccacgggcagctctggccccccccaggtg

SEQ ID NO: 239205 - DNA, 201 bp, Homo sapiens
gtgtctccagtttggactcttgcttactctcttgtccctagagcggcactgcagaggtggagctgaagaagggagccactctcaaaatcacgctggataaygcctacatggaaaagtgtgacgagaacatcctgtggctggactacaagaacatctgcaaggtggtggaagtgggcagcaagatctacgtggatgatgggc

SEQ ID NO: 239206 - DNA, 201 bp, Homo sapiens
atgtcgagtgcctggccactgctcagggttggaggctcagtccctttgccctgtctgttccagctctggagctaactcagggatccctgatcagggttacrtaggtttggtaaaatgagtgctggaaattaactttctcccagtagtcttaggtcatgctcagtgaacttaaactttatccagatatggttttccttcagc

SEQ ID NO: 239207 - DNA, 201 bp, Homo sapiens
tgttccagctctggagctaactcagggatccctgatcagggttacataggtttggtaaaatgagtgctggaaattaactttctcccagtagtcttaggtcwtgctcagtgaacttaaactttatccagatatggttttccttcagcctttctattccctttctagccagtgaaagacccgctgccctttgacctcagcccc

SEQ ID NO: 239208 - DNA, 201 bp, Homo sapiens
gtatggatgttggtctcctgtctagcacaactgctttcattttaagcattgcattagaaataatgttgtattcatattttagcaaagagcatcattagctstttaagaaccgtacccccagtgacttagcaaatttggtggcggtgactctaaacagctagcactttatgggagttgcttctgtgccttgaatgttgtgac

SEQ ID NO: 239209 - DNA, 201 bp, Homo sapiens
gttccagctctggagctaactcagggatccctgatcagggttacataggtttggtaaaatgagtgctggaaattaactttctcccagtagtcttaggtcawgctcagtgaacttaaactttatccagatatggttttccttcagcctttctattccctttctagccagtgaaagacccgctgccctttgacctcagcccct

SEQ ID NO: 239210 - DNA, 201 bp, Homo sapiens
atgttggtacgtggctggagcaggggctagagcctagaggagcttggggatgcttgagcattggcttctgtgggaccccgaaagtttggggaatagaaagrggaacacacagaccttagtggggcaaaaggcccagcgactgttcctctcccttattgggaatgttcattctgaatctctcattctccgaagtcctaagct

SEQ ID NO: 239211 - DNA, 201 bp, Homo sapiens
ttcttataagtgtttagcagcagctttgatagttctgacggagtctggcaggtagggccctaagggcaggtaacactgttaggataaccagcctcttgctscacctgctctaggagaagacagccaggcccaacctggcatctgggcacagagcctcttctcgtctgtaggaacaccgccagggaggtcatggcagggcag

SEQ ID NO: 239212 - DNA, 201 bp, Homo sapiens
ccacacatctgcttctactgtgaaattgatgagggggtattaccgattcttccctcacccatcatttactgagatgctggtgattgcattataatcctctwaagcttacattgtctttctgattcttggtcttatctgagcaagtgatctataaataactcagtggctttctcatgactgttttaattattagattttaat

SEQ ID NO: 239213 - DNA, 201 bp, Homo sapiens
tcatgctgtctggagaaacagccaaaggggactatcctctggaggctgtgcgcatgcagcacctggtgagttctggggcctgccccatcccccagggcttyggactgggcctgggatggatgcaagctctggtgcagagctttttaggtttctccatcctcttatgcacagcctttcattatcctccaagttacagcagca

SEQ ID NO: 239214 - DNA, 201 bp, Homo sapiens
cctgcttcaaactcagttgagctgccttgctttggctttgatcccagctttccagcgctgctcaatctgttgccatggcaggccattggaaaggctcagtkcatccccgtgcctgaagccaagtgagcgctcactccatgcatgcatggaggctgggcaggagcctgcctaatcaaccagccatgtgaggagggagggcct

SEQ ID NO: 239215 - DNA, 201 bp, Homo sapiens
ggcaggtagggccctaagggcaggtaacactgttaggataaccagcctcttgctccacctgctctaggagaagacagccaggcccaacctggcatctgggmacagagcctcttctcgtctgtaggaacaccgccagggaggtcatggcagggcaggaccaaagggtcctgtggctcagtaggcacagtagatgtcacaggc

SEQ ID NO: 239216 - DNA, 201 bp, Homo sapiens
agctgcagctacaagtgtgcagtgtcagtgttcaagaaagtgcctggcagaggggctttagaagggtcccctgccttccaaaggagctttggcaggcagasctgctcctgcagcaacactcccatttcctgttcttgcctgctgagtagcacctagatttctaagcctcatctagatactcagatttgattctgggccttt

SEQ ID NO: 239217 - DNA, 201 bp, Homo sapiens
gctgcagctacaagtgtgcagtgtcagtgttcaagaaagtgcctggcagaggggctttagaagggtcccctgccttccaaaggagctttggcaggcagagstgctcctgcagcaacactcccatttcctgttcttgcctgctgagtagcacctagatttctaagcctcatctagatactcagatttgattctgggccttta

SEQ ID NO: 239218 - DNA, 201 bp, Homo sapiens
tgggtcaaggtgatcctgagcccttggcctgtggaatgggggtagagggcaaatggtaacctagcatgctgtgggggatataggatgaggggctgcccgascctcgggaggggtcctagggagcagatgttgaagaggccagagccctcagtgagctggatgagagggtgagctgtttgaacgccctgagggtacttcctg

SEQ ID NO: 239219 - DNA, 201 bp, Homo sapiens
ttacccttctttctgaatcactccaaaagtccacagtcaaatctcaattagctggtataacacaagaatgcgttgaccctgtgagcagagttttattgcawcttcaagggtcttcgtgagattggtttatttggtatgaggtcttaaggattttaagttgtccctttaagcatcagttctgatacagatgggaatagagct

SEQ ID NO: 239220 - DNA, 201 bp, Homo sapiens
gatagggtggtgagaaagctgtctaggtagatgtcagtcagcccagtgtaagagagacctgcttactgtgggtgcttgggactatgtggagtgggtgggasgttttaacttgttcagtaaggtcctttccattgttcacaatctggtgaaccctttttctaacatgaggagcacccacataaccagatcatgtctggcttc

SEQ ID NO: 239221 - DNA, 201 bp, Homo sapiens
ggatgaggggctgcccgagcctcgggaggggtcctagggagcagatgttgaagaggccagagccctcagtgagctggatgagagggtgagctgtttgaackccctgagggtacttcctggggcctcgtgtaatggtctcttctgtatgtcccccatcccatctcaggtctgctcaccaggtggccagataccgcccacgtg

SEQ ID NO: 239222 - DNA, 201 bp, Homo sapiens
cccaaaggttggatttccctgcgtcccctggagggccagactgtttcctctcgccgccgaatccgtattgtagcggcccgcggctgcggggaggcagctcrgagctgtctcagcacgacgcggcctcccccgggcgccaggcccatcccggtcgggcgggctggggccggtctcccggcctcgagacctggtccaaagtcg

SEQ ID NO: 239223 - DNA, 201 bp, Homo sapiens
ggcggccaggacctccaaccacgcacaagtctgcagctctccccaactttccgttcagctcagtctccgagggtgcgccagagcagacacccggaggagtsgggagtggcagggcggggccgggagaatgctgccccggaacccataaatctgggccctgcccaggtaggccgggacagctggggtggcctgggccgagag

SEQ ID NO: 239224 - DNA, 201 bp, Homo sapiens
atttcttaatattgaggcaatggaagaaatgaggaaacggccgtgggcaggaaggtagaagaaaatgcagcacttacattacaaactcactttacttgggktttagtttattttgcttcagttttttgttttttttttttttttttttttttttttttgagatagttttgctcttgttgcccagtctggagtgcaatggtg

SEQ ID NO: 239225 - DNA, 201 bp, Homo sapiens
ctgggcaacctggtgaaaccctgtctctactaaaaattcaagttagctagctgggcatggtgatgcacttctgtagtcccagctacttggagagggggtgrtgctggggcagcaggatcgcttgaacccaggaggttgaggttgcagtgagccaagatggtaccagcctaggtgacaaagtgacaccctgtctcaaaaaag

SEQ ID NO: 239226 - DNA, 201 bp, Homo sapiens
gtaagcaaggagtaataaagggcagttcatttagagaaaggcatatgaccacctttccccctccaatcagaatctagaaagtgattgaggccgggcgcagyggctcacgcctgtaatcccagcactttgggaggccgaggtgggcggatcacgagatcaggagatcgagaccatcctggctaacatggtgaaaccccgtct

SEQ ID NO: 239227 - DNA, 201 bp, Homo sapiens
tcaagttagctagctgggcatggtgatgcacttctgtagtcccagctacttggagagggggtggtgctggggcagcaggatcgcttgaacccaggaggttraggttgcagtgagccaagatggtaccagcctaggtgacaaagtgacaccctgtctcaaaaaagaaaccaaacaaacataaaaaaaaaaacaaaaaaatcg

SEQ ID NO: 239228 - DNA, 201 bp, Homo sapiens
agctgggcatggtgatgcacttctgtagtcccagctacttggagagggggtggtgctggggcagcaggatcgcttgaacccaggaggttgaggttgcagtsagccaagatggtaccagcctaggtgacaaagtgacaccctgtctcaaaaaagaaaccaaacaaacataaaaaaaaaaacaaaaaaatcggtagagagtga

SEQ ID NO: 239229 - DNA, 201 bp, Homo sapiens
agtgtttagcagcagctttgatagttctgacggagtctggcaggtagggccctaagggcaggtaacactgttaggataaccagcctcttgctccacctgcyctaggagaagacagccaggcccaacctggcatctgggcacagagcctcttctcgtctgtaggaacaccgccagggaggtcatggcagggcaggaccaaag

SEQ ID NO: 239230 - DNA, 201 bp, Homo sapiens
aggatgaggggctgcccgagcctcgggaggggtcctagggagcagatgttgaagaggccagagccctcagtgagctggatgagagggtgagctgtttgaaygccctgagggtacttcctggggcctcgtgtaatggtctcttctgtatgtcccccatcccatctcaggtctgctcaccaggtggccagataccgcccacgt

SEQ ID NO: 239231 - DNA, 201 bp, Homo sapiens
tgtttagcagcagctttgatagttctgacggagtctggcaggtagggccctaagggcaggtaacactgttaggataaccagcctcttgctccacctgctcyaggagaagacagccaggcccaacctggcatctgggcacagagcctcttctcgtctgtaggaacaccgccagggaggtcatggcagggcaggaccaaaggg

SEQ ID NO: 239232 - DNA, 201 bp, Homo sapiens
gcattgttcccgggaggaaagagcttttccattccttctgaggtgatgctgctactggtgtctccagtttggactcttgcttactctcttgtccctagagyggcactgcagaggtggagctgaagaagggagccactctcaaaatcacgctggataacgcctacatggaaaagtgtgacgagaacatcctgtggctggact

SEQ ID NO: 239233 - DNA, 201 bp, Homo sapiens
tcagaagatgatgattggacggtgcaaccgagctgggaagcctgtcatctgtgctactcaggcatgtgcccacccttccccacattctcatgtgcacactygcatgtttgtatgggaaagctctggaggctgtctgatctcttcccatggaattgtcgcacgtaacacacagataatccccttcccccatgtacctacaca

SEQ ID NO: 239234 - DNA, 201 bp, Homo sapiens
aggaagatatggaaaggttctactggaaaaccctctaagccttaggtgtcctggccacagcgcttgactctcctgtcccagggtttctgcttcaccttgtrttgccatggtaaaccatctagcagattgattctagcttagaaccaaaataactgggcaggtccatgagaacggtttccactattctaagttttgagggac

SEQ ID NO: 239235 - DNA, 201 bp, Homo sapiens
gcagtccattgaacaatgctcaggtggcactgagccaaggtaagacccctctgcctgccaccttgggcctgcagggaaggattgagcagagccccttcccwgggcccaaaggactctaggtagcactcataaggaatgtcagaacatttggatcaaaagcaaatttatgctggagatttattacataacagtgcacaggct

SEQ ID NO: 239236 - DNA, 201 bp, Homo sapiens; identical to SEQ ID NO: 46647

SEQ ID NO: 239237 - DNA, 201 bp, Homo sapiens
ggggatataggatgaggggctgcccgagcctcgggaggggtcctagggagcagatgttgaagaggccagagccctcagtgagctggatgagagggtgagcygtttgaacgccctgagggtacttcctggggcctcgtgtaatggtctcttctgtatgtcccccatcccatctcaggtctgctcaccaggtggccagatacc

SEQ ID NO: 239238 - DNA, 201 bp, Homo sapiens
catgctgtgggggatataggatgaggggctgcccgagcctcgggaggggtcctagggagcagatgttgaagaggccagagccctcagtgagctggatgagrgggtgagctgtttgaacgccctgagggtacttcctggggcctcgtgtaatggtctcttctgtatgtcccccatcccatctcaggtctgctcaccaggtgg

SEQ ID NO: 239239 - DNA, 201 bp, Homo sapiens
tgacattgggccagggctgcctctctgtgtcagagttcagggtgtaggaggggttctgccaaccatgggctgtgtggggtaagtgggtgaggctgatcttkctgggtcaaggtgatcctgagcccttggcctgtggaatgggggtagagggcaaatggtaacctagcatgctgtgggggatataggatgaggggctgcccg

SEQ ID NO: 239240 - DNA, 201 bp, Homo sapiens
ctctcttgtccctagagcggcactgcagaggtggagctgaagaagggagccactctcaaaatcacgctggataacgcctacatggaaaagtgtgacgagarcatcctgtggctggactacaagaacatctgcaaggtggtggaagtgggcagcaagatctacgtggatgatgggcttatttctctccaggtgaagcagaaa

SEQ ID NO: 239241 - DNA, 201 bp, Homo sapiens
cccaggaggttgaggttgcagtgagccaagatggtaccagcctaggtgacaaagtgacaccctgtctcaaaaaagaaaccaaacaaacataaaaaaaaaamcaaaaaaatcggtagagagtgatttctctcccaggcccacttaatgtagactgggcctggctgacacctcaccattcgtgtgatgtgattgctgttctga

SEQ ID NO: 239242 - DNA, 201 bp, Homo sapiens
gatcagcttgctgtcatttgtctctgaagacagctcaagctacatctcactaatgctctgtcccctcccagatgctggagagcatgatcaagaagccccgscccactcgggctgaaggcagtgatgtggccaatgcagtcctggatggagccgactgcatcatgctgtctggagaaacagccaaaggggactatcctctgg

SEQ ID NO: 239243 - DNA, 201 bp, Homo sapiens
tctgtcctggtacaaggacatctaagttagggaatcccagggaaacttcttgtctactgccatacttgtggcctctgttctatataacctctctccccccmactttgtccatcaggtttgatgaaatcctggaggccagtgatgggatcatggtggctcgtggtgatctaggcattgagattcctgcagagaaggtcttcc

SEQ ID NO: 239244 - DNA, 201 bp, Homo sapiens
tcccagcccctagcccatcagaatgtagactcccaagccagttccaaacctgctgaatcagaatatcttaggagagtagaaggcattatgtttttttgttyttgtttttttgttttttttaaaaaaaagcttcccaggtaattgagatgctggcagcttgacattgttccctgggcctggggaccaacatttgagagaaca

SEQ ID NO: 239245 - DNA, 201 bp, Homo sapiens
gacgaggtttcgccatgttgcccaggctcatctcaaactcctggcccaaactgtcctcccaccttagcctcccaaagtgtttggtttataggcatgagccrctgtgcttagcctgagtccctcttttaaacaaacaaaatggtaaatggaaaggaggaaaggcttaagaaaaaagattgaagccaggatttgttgtaagca

SEQ ID NO: 239246 - DNA, 201 bp, Homo sapiens
gttattcaagggcagtgaggttgccagtcctagcatttcacactgtggaccagcacagctgctggctgaatactgcagtcaagattctctgaagggagtcmtatcccttccaaacatcttcagtttacttgcagataatgtttcttcattttttattttattttattttattttatttttttgagacggagtctcgcacca

SEQ ID NO: 239247 - DNA, 201 bp, Homo sapiens
aagagcagtaccaggtatggctctgtttcctgttcatgtcccctgtcctctgggctgcatgcattccgttcttacagaaagaatacctttaacctagtacmtcctgccacacatctgcttctactgtgaaattgatgagggggtattaccgattcttccctcacccatcatttactgagatgctggtgattgcattataat

SEQ ID NO: 239248 - DNA, 201 bp, Homo sapiens
tttttttcttgagatagggtgttgctttgttatccaggccggagtgcagtggtgtgatcatggctcactgtagccttgacctcctagacataacccacctyagcctcacaagtagctgggaccccaggcacgcaccatcatgcacagttaatttttgtgttttttgtagagacgaggtttcgccatgttgcccaggctcat

SEQ ID NO: 239249 - DNA, 201 bp, Homo sapiens
tacttcatgtattcttttactcctcacgtcaactctgaaggaaaggcaccacctatccccttaaaagaaaacaactattactattctttttttttttttttcttttagagacggaatctcactctgtctgtcgcccaggctggagtgcagtggcacgatctcggctcactgcaacttctgcctcctaggttcaagtggttc

SEQ ID NO: 239250 - DNA, 201 bp, Homo sapiens
gcaacatcatgctctgtctagcaggagatgagaacaggtctccatttggagcctgtcagtggggtcagagactaagattcaggctcagggtctaaattccrtatcctttcttccataccctggtgtttcctatgaacagatagatactttagggctgcaaggtttggattgcatggcactgctcagaagataagttacagg

SEQ ID NO: 239251 - DNA, 201 bp, Homo sapiens
ggaagttggtattaagtttggactaaaaataaagcctcaggaaatgcaatccaagagtgaattcctccttttgggaaacacaagactcttcatcatagatwccctaacctgtgttcataaacagcctatggcctggctagtggctggcccttaaatgtcatggggacctgaccaagtccagcagacataccatgtaggtta

SEQ ID NO: 239252 - DNA, 201 bp, Homo sapiens
gatgcaggaggatcacttgaggccaggaggtcgagaccagcctgggcaacatcgcaagattcccatctctatttaaataaataaaatagaaaaaaaagtttaagatggaggtggaaagggttggaggagcttggggatggagaaaaaatgaactgtataaaattaaaattcttgtttttgtttttagaaagtaaagagggc

SEQ ID NO: 239253 - DNA, 201 bp, Homo sapiens
cttgacctcccaggttcaagtgatcctcttgcctcagcctcccgagtagctgggaatacaggcatgcaccaccacacctggctaatttaaaaatttttttkggggaaatgaggtctcactatattgccttggctggtctcaaactcctgggctcaagtgattctctcaaatgttgggattacaggaatgagctaccatgct

SEQ ID NO: 239254 - DNA, 201 bp, Homo sapiens
gtgctaaatggtatattaaccacttctcagtcttaccactctctttcaatttgtctcgacccaggacctcagcagccatgtcgaagccccatagtgaagcygggactgccttcattcagacccagcagctgcacgcagccatggctgacacattcctggagcacatgtgccgcctggacattgattcaccacccatcacag

SEQ ID NO: 239255 - DNA, 201 bp, Homo sapiens
cagctcaggagttgggtgctttagggcccctaccatgcagtgcggtgaagccccgcccctgcagtggtttgtgcttgtctgcacgtaggagggaacaagcyggctgcagtaccttcggtggcctctgagactcacctcccccacttctgtccatagacaaagctcctggggagccctaagcctctttcctcatgccagcaa

SEQ ID NO: 239256 - DNA, 201 bp, Homo sapiens
gcttcctgttgacctgtgccctcgtgctctgcctcccctacttaccctttttcatacaggtgccgacttcctggtgacggaggtggaaaatggtggctccytgggcagcaagaagggtgtgaaccttcctggggctgctgtggacttgcctgctgtgtcggagaaggacatccaggatctgaagtttggggtcgagcagga

SEQ ID NO: 239257 - DNA, 201 bp, Homo sapiens
gctggccaagtcttaacctaggcttttctgatacagtgggagcctgcagaacttgaaggaaatggtcgaagtgtcccagtagatcaagaaagtaagctggyacggtagtagccttccatgcactttttaaagacttttgagctatttgggagaggaaaagttttcagggaaaaaaattctttaaacttaagcaaacttaaa

SEQ ID NO: 239258 - DNA, 201 bp, Homo sapiens
tgggcctccaacttgggatcccttccttggcccaggacattgagttaatgtccttcactctcctagttagggagtatgctccttgtccctgtccacagggsagcaagggtttcctggaagaggggagcaaacaggcagtgcccatgcactgaggagcagcagatgggcgtgggcagcccagagaaccaggacacaagctct

SEQ ID NO: 239259 - DNA, 201 bp, Homo sapiens
gcatataaatatttccaaaagaggtacacataatttcttactataaaagtatttttatatttatatcagtaaatttgttaataaagaggatttttttttttctgtaatcctaccaccccaatgacgtcctattaaaatttcagtatatatcctcccaggtcttttaggtatgtttaatttggtgtcccttccccgctccca

SEQ ID NO: 239260 - DNA, 201 bp, Homo sapiens
ttactgtaaagcttgagaacaaactagtttgctggatttgggcatgtaactaacaggtttgaggcatgggattatcctgtggactttttttttttttttttgctttgaggttctgaatgtattaaggttgaccttcttaagccgttgaaactgttctgcagtacatttgtgatgtagggcctaagacttgtatcgtttttt

SEQ ID NO: 239261 - DNA, 201 bp, Homo sapiens
caagaaaactgaagtgtgcttactttagaaagcaaagatctcaaggtagatgaaataaatatttaactcagaacactaggggaggaaaaccctaaaaaggrtgaagaaaataattttgtaagattatagctcaatgaaatgaaaataaatttgacagattaagctaagagctgattctttgtggggaaaaaatagtaaaat

SEQ ID NO: 239262 - DNA, 201 bp, Homo sapiens
gggaggccaacgtgggaggattgcctgagcctcgaaatttgagaccagcctgagcaacttagaccctgtctctccaaaaagtgaaaaaaaaaaaaaaaaaattagctgggcatggtggcatgcacctgtagttctggctacatgggaggctgagacaaagatcacttgagtccaggagattgaagttgcagtgagccatga

SEQ ID NO: 239263 - DNA, 201 bp, Homo sapiens
ccattggtcatcaggtttcttaaaatgtgactctgaatctgtgtccttccgccgcagaatttagtcccaccgaaagggcaacctgcccgcgcgttccgccrccgccgccgcgcttcctcctgaaggtgactgcgcccgcggggacgcagggggcggggcccgggtcgcccggagccgggattgggcagagggcggggcggc

SEQ ID NO: 239264 - DNA, 201 bp, Homo sapiens
tccccttcccccatgtacctacacaaagccatactctgtgtacctactcactatccagaggatcagcttgctgtcatttgtctctgaagacagctcaagcyacatctcactaatgctctgtcccctcccagatgctggagagcatgatcaagaagccccgccccactcgggctgaaggcagtgatgtggccaatgcagtcc

SEQ ID NO: 239265 - DNA, 201 bp, Homo sapiens
ccttgacctcccaggttcaagtgatcctcttgcctcagcctcccgagtagctgggaatacaggcatgcaccaccacacctggctaatttaaaaattttttkgggggaaatgaggtctcactatattgccttggctggtctcaaactcctgggctcaagtgattctctcaaatgttgggattacaggaatgagctaccatgc

SEQ ID NO: 239266 - DNA, 201 bp, Homo sapiens
tgcagggacttctctgctgtgatgtggcttaagtttccctgacacctgttgagtgtcctcataacttcccttctggtgcccctccccagctcctgagacayagctgcagctacaagtgtgcagtgtcagtgttcaagaaagtgcctggcagaggggctttagaagggtcccctgccttccaaaggagctttggcaggcaga

SEQ ID NO: 239267 - DNA, 201 bp, Homo sapiens
tgcatttgccatgttgaaccgttagccggtatcttatttccccattttaaaagttttagaatctgtggttgaggacttgtggccatcagttttccatagcyaacagactgttcactactgccttcagagctccttggacctcagcgggccttctttggagatggcagagatggatttagatgtatactctactcgagccac

SEQ ID NO: 239268 - DNA, 201 bp, Homo sapiens
agctgggagctctgaaggtatgcgagccctccctcaaccatgagtgtagggaaagggaccaggggccccaggctttcctgtcagtaatgcagaagttcctmagatttagggaagggggagcagaggcataactttgattctgacaaagaggcattcagagagactgaaaggtcatttaacaaacactggaatgcttccaca

SEQ ID NO: 239269 - DNA, 201 bp, Homo sapiens
atctcgtggacttggaggcagcccttctgtaccagaacattgtcaaaagcttttactgtaaagcttgagaacaaactagtttgctggatttgggcatgtarctaacaggtttgaggcatgggattatcctgtggactttttttttttttttttgctttgaggttctgaatgtattaaggttgaccttcttaagccgttgaa

SEQ ID NO: 239270 - DNA, 201 bp, Homo sapiens
atggctcagtgttaatggtcagttctgggtggtagagaggcagatgttaaaacttttttttctttaattcgtaacatagaagcaaacctataaaggctgcygtaggaagaccagtcatagtaactagttcagtgctcttggagagttggcactgcctttcctcctttatccccccgactagaatgcagggcagcccttcca

SEQ ID NO: 239271 - DNA, 201 bp, Homo sapiens
atttttagtagagatggggtttcaccatgttggccaggctggtcttgaactcctgacttaggtgatccaccggcctcggcctcccaaagtgccgggattaygggcgtgagccactgcacctggcctgcttcagcttttatgaaggcaagtcaggatgtgttatcttggccaagagctaagactgagaccggagtagaggaa

SEQ ID NO: 239272 - DNA, 201 bp, Homo sapiens
ctcagcactgtattctcagcctgtgccttcccaggggttctggtacattaaaataacaccagttagcactcttccccaggagcctagtaggactgtatttrtgctgggctctttattagctggctttacctatggacagaggccttgcccaggagccaggtagcagctgttgggatggctccattcctgcctccattgcca

SEQ ID NO: 239273 - DNA, 201 bp, Homo sapiens
acttgcaccacgcccagctaatatttttgtatttttagtagagatggggtttcaccatgttggccaggctggtcttgaactcctgacttaggtgatccacyggcctcggcctcccaaagtgccgggattacgggcgtgagccactgcacctggcctgcttcagcttttatgaaggcaagtcaggatgtgttatcttggcca

SEQ ID NO: 239274 - DNA, 201 bp, Homo sapiens
tggtctcctgtctagcacaactgctttcattttaagcattgcattagaaataatgttgtattcatattttagcaaagagcatcattagctctttaagaacygtacccccagtgacttagcaaatttggtggcggtgactctaaacagctagcactttatgggagttgcttctgtgccttgaatgttgtgacactgatgtgg

SEQ ID NO: 239275 - DNA, 201 bp, Homo sapiens
ccggaggagtggggagtggcagggcggggccgggagaatgctgccccggaacccataaatctgggccctgcccaggtaggccgggacagctggggtggccygggccgagagccaagaaaagagaccccatctggcagcccaacttggcggcaacaggtggcccggcgcccgggggtctgggaggaaagtcgctccgggggc

SEQ ID NO: 239276 - DNA, 201 bp, Homo sapiens; identical to SEQ ID NO: 46649

SEQ ID NO: 239277 - DNA, 201 bp, Homo sapiens
ggacccagtccaggaggcctgggctgaggacgtggacctccgggtgaactttgccatgaatgttggtacgtggctggagcaggggctagagcctagaggakcttggggatgcttgagcattggcttctgtgggaccccgaaagtttggggaatagaaaggggaacacacagaccttagtggggcaaaaggcccagcgactg

SEQ ID NO: 239278 - DNA, 201 bp, Homo sapiens
cctcatgccagcaagcagtcttggaagcaggctggggctgcagtgggagagatgccaagaccagttattcaagggcagtgaggttgccagtcctagcattwcacactgtggaccagcacagctgctggctgaatactgcagtcaagattctctgaagggagtcctatcccttccaaacatcttcagtttacttgcagataa

SEQ ID NO: 239279 - DNA, 201 bp, Homo sapiens; identical to SEQ ID NO: 46654

SEQ ID NO: 239280 - DNA, 201 bp, Homo sapiens
ggatcagcttgctgtcatttgtctctgaagacagctcaagctacatctcactaatgctctgtcccctcccagatgctggagagcatgatcaagaagccccsccccactcgggctgaaggcagtgatgtggccaatgcagtcctggatggagccgactgcatcatgctgtctggagaaacagccaaaggggactatcctctg

SEQ ID NO: 239281 - DNA, 201 bp, Homo sapiens
ggtttctgaagaatggccaaaaaattgtgtctgacacaaaggaaactaatataaaaagccaggagctgtctgagatgagaaaggaaagggagaatagggcmcttggagctgagctgtgattgtgcctgttccaacctgtcactccagactaaggcctcttagagatggtgtctcctttctcacagaggagacatggctctg

SEQ ID NO: 239282 - DNA, 201 bp, Homo sapiens
tctctactaaaaattcaagttagctagctgggcatggtgatgcacttctgtagtcccagctacttggagagggggtggtgctggggcagcaggatcgcttraacccaggaggttgaggttgcagtgagccaagatggtaccagcctaggtgacaaagtgacaccctgtctcaaaaaagaaaccaaacaaacataaaaaaaa

SEQ ID NO: 239283 - DNA, 201 bp, Homo sapiens
attccgttcttacagaaagaatacctttaacctagtacatcctgccacacatctgcttctactgtgaaattgatgagggggtattaccgattcttccctcwcccatcatttactgagatgctggtgattgcattataatcctctaaagcttacattgtctttctgattcttggtcttatctgagcaagtgatctataaata

SEQ ID NO: 239284 - DNA, 201 bp, Homo sapiens
catctgcaaggtggtggaagtgggcagcaagatctacgtggatgatgggcttatttctctccaggtgaagcagaaaggtacgtatgggagctggagtccarttgtctaaaacagtcttttgtctctaaacttccttgacacaaggaagatgggaaggttggttgcctggcagtgagattgagtctgtgtgttctcaggaat

SEQ ID NO: 239285 - DNA, 201 bp, Homo sapiens
gggagtggggctctgtggggaagatgactcaacctttcaattattctgcttttgagagaattatcttcgctgggtgagtggggaaactacattgtggttcktgcaggcttaaaaagtcccttctcccctttcagtgagtcagataatgaagcatgcatttcccctaattaaaaatgcctcaactacggagcttgcagtgag

SEQ ID NO: 239286 - DNA, 201 bp, Homo sapiens
ttccacactctagttggaaataggaccttaggttcctgttgacaagtcatttactttcagccccgaagaaataaaagagccaagattttttttttttttttaaagccagggaattttactagaacctacaagtgggctcattttgttctgtgtagcctggtaacaccatactgctttctgctgtggggcctcctggggtta

SEQ ID NO: 239287 - DNA, 201 bp, Homo sapiens
gctccagtgccagagcccctccgaaggcggccaggacctccaaccacgcacaagtctgcagctctccccaactttccgttcagctcagtctccgagggtgmgccagagcagacacccggaggagtggggagtggcagggcggggccgggagaatgctgccccggaacccataaatctgggccctgcccaggtaggccggga

SEQ ID NO: 239288 - DNA, 201 bp, Homo sapiens
gcaggagaggcgggtgggaggcgggcaggcgtcatcgcttggtcttggcgtcttctcgaaccttccagatcaccaggtgcatgcaggcgccggcgtcctcrctggagctgtgcccatccactgcggggcagatgcggtgagcacccggcccctgcgcagggacggccccagggcaggcaccggcactcaccattgtcctgg

SEQ ID NO: 239289 - DNA, 201 bp, Homo sapiens; identical to SEQ ID NO: 46686

SEQ ID NO: 239290 - DNA, 201 bp, Homo sapiens
tggggcccgcatgcccggccttgcccacatcccgcacctgcccacctaggccgtcgcaggccagcgactcacagtccttgggcctcttctcctcagctgtraagatgattgcgcccccgggccgctctgggtgcgggaaggggtagccgttctccttgagctggtcctgggtgagcaggtactccctgaggcggctgtaca

SEQ ID NO: 239291 - DNA, 201 bp, Homo sapiens
gctgaggccgggcacagcgctgggggccaggcccctgagcttcttgagggtgttcacggccacattcaggtagatgttcttgctggggctgcggtcatagrccaccttctcctcgttcagtgcctgggggacaggcggtgcccagctgaggccatgcctgcctggtgccggggagccccagcggtggggtcgccatggggt

SEQ ID NO: 239292 - DNA, 201 bp, Homo sapiens
tggttggaggtacagaacttgagacactcctcgatgaacaggttgagatagcgctggcggatgacggtggggactttgcccccaaactctttggggataaygggtttctttaaactctagagggaaggcaaaagctgccatgggtgagggcctccacaaggcctccagcggggaacgcagacgcgatgaggccgtgcccat

SEQ ID NO: 239293 - DNA, 201 bp, Homo sapiens
ggcacagtggtcagcccctgcctgggatggcccacggggcggtagacaccaccgggaaaggcggctgggccggcaggggcccacgaagcaccgtgtggcasagcaggggctgggccggcagaggcccacgaagcaccgtgtggcagagcaggggcagggccttacctttcaggtcctccacccgggggctgcttggacggc

SEQ ID NO: 239294 - DNA, 201 bp, Homo sapiens
agggaccctgagtgggatggagggcctgggtaaagccttaccccggttctgggggcctcaagggagggcccaggttccgggggccatgggtgggaaggggraggacccgggtaaggccttaccccggttccggcgcagccgtccccagtggtaataacactcctcgtcccggatgcagcggcctgaagaggacacgaggta

SEQ ID NO: 239295 - DNA, 201 bp, Homo sapiens
gcgattcgcttagggatgatggtggtggtagtcttggacgccatccccgacaatgtgcgtgttttcagctgctggccacctggctcagggccgttggaggrctggctgccgctggccgcaagggtcctcttggcacctgtgggggctggcggggcacagggggtgtgggcacagggcgagtggctgcccatcaccacgtgg

SEQ ID NO: 239296 - DNA, 201 bp, Homo sapiens
atccatgcccagcagtgaacaaaacgaattgcttatcatgaagcactgttgtggatgggacaggtaattacctctggggaaggagtacatagacctttcaytgggtaaatacttaggagtggaattactgtgttatatggtaggtttgtgtttaacttgataagaaactgcttaaaccgtcttccaaagtgattgtatcat

SEQ ID NO: 239297 - DNA, 201 bp, Homo sapiens
attgaacaaaatatatcaagtactatttgtgtacattgaagttatggttctttcacattatagctatccagtcagttcgctgctattcccatgggtcacargagacagatgaggagtttgatgctcgctgggtaacatacttcaacaagccagatatagatgcctgggaattgcgtaaaggtaattggaacataaacatat

SEQ ID NO: 239298 - DNA, 201 bp, Homo sapiens
tttttttggtgatagtctcactgtgttgcctaggctggagtgcagtggcaccatcacagctcactgcagccttgacctcctgggactcaactgatcctccwgcctccaccttccaagtagctgggaccacaagggtgcgccaccagttttattttccgtagaaacaggctggtctggggactcctgggctcaggagtgcct

SEQ ID NO: 239299 - DNA, 201 bp, Homo sapiens
gcctcagcctcccgagtagctgggactacagccgcccgccaccacacctggctaattttttgtatttttagtagagacggggtttcaccgtgttagccagratggtcttgatctcctgacctcgtgatccgcctgcctcggcctcccaaagtgctgggattacaggcgtgagccactgcgcctggcctattcttagttttt

SEQ ID NO: 239300 - DNA, 201 bp, Homo sapiens; identical to SEQ ID NO: 239298

SEQ ID NO: 239301 - DNA, 201 bp, Homo sapiens
ccccgcccgctccggagcaacccgcgagcttacaccggcttctctctgtcctcagcccgcgcgccgccatcgccgtcatgctgggcgccgctctccgccgmtgcgctgtggccgcaaccacccgggccgaccctcgaggcctcctgcactccgcccggacccccggccccgccgtgggtaaggcccctgcttgccactgcc

SEQ ID NO: 239302 - DNA, 201 bp, Homo sapiens
tacagttcgtatcctagaggttgttaaggtcagtgaaataataatgctaaaattgttctgtaaatgagtgggctattgctgaggtatcagaatattctgtwtttttgaatttgttaaaatgcctaaaatgagtccttatataactagaaggaatgtacattgcagttaaaatctttctagaggctactttggcagcattta

SEQ ID NO: 239303 - DNA, 201 bp, Homo sapiens
tttaaaagtggtcactgagatagtcttgaggatgtgctatgcagtagccaagccctcttacggtgtgttcctctcttagtgcccctttcctttcctacctrttcttcccttgcagtggtgtattagccttggacattaaaacatttgctttgtaaatttggaggcattctgattaaacagctgagtaaaacaaatcctgct

SEQ ID NO: 239304 - DNA, 201 bp, Homo sapiens; identical to SEQ ID NO: 46690

SEQ ID NO: 239305 - DNA, 201 bp, Homo sapiens
atgatatggttccagagcccaaaatcattgatgctgctttgcgggcatgcagacggttaaatgattttgctagtacagttcgtatcctagaggttgttaakgtcagtgaaataataatgctaaaattgttctgtaaatgagtgggctattgctgaggtatcagaatattctgtatttttgaatttgttaaaatgcctaaaa

SEQ ID NO: 239306 - DNA, 201 bp, Homo sapiens
tcttcgaggttgacatggcccttctttttaattttgcagggataaacacacttgttacctatgatatggttccagagcccaaaatcattgatgctgctttkcgggcatgcagacggttaaatgattttgctagtacagttcgtatcctagaggttgttaaggtcagtgaaataataatgctaaaattgttctgtaaatgag

SEQ ID NO: 239307 - DNA, 201 bp, Homo sapiens
gccagttactgcattaaagatatataggatattactaatgtttaaatttcagtgttcttagaacaacaatgttgagaggtttctgggtgaagtttttaaawatatatatatatgtatgttaaggctgggcatggtggctcacacctgtaattctagtattttgggagtggtaggattgcttgaggctaggagtttaagacc

SEQ ID NO: 239308 - DNA, 201 bp, Homo sapiens
aaatgtgaatattctctttgccatcaggacaaagcaggacctcataaggaaatctacccctatgtcatccaggaacttagaccaactttaaatgaactggraatctccactccggaggaactgggccttgacaaagtgtaaaccgcatgggtaagcgacaaaccactgaagaaggcaggaaaacaatccagagaggtgtgg

SEQ ID NO: 239309 - DNA, 201 bp, Homo sapiens
gtattgaccattctccccatccattccctcttcggaatgtttcagctgttctgagaaaacactttgcattcctgccccgcccctgtgatttctctttgggyggcaggcagccgggagaggctggaggcctggggagatgggggcagggcacaaggctaagctcagcaccttcctccaccctcctcactgtactcaactcct

SEQ ID NO: 239310 - DNA, 201 bp, Homo sapiens
tgtgccaccacacccggctaattttttttttttttttgtagaaatgggatctcactatgttgccagggcttgtctcaaactcctgggctcaagcgatctayctgccttggcctcccaaagcattgggcaggcccattacgccatgagccaccacacctgctggtttttgttttttaaatggaattgaaaggaactagcctt

SEQ ID NO: 239311 - DNA, 201 bp, Homo sapiens
aatttctttcataattctctctacccaaaggcatcggtcagtccctctccagaccagaagcagttagttctgacaccaacaagtggtgataagaggttgayagcctagcaagggggaagaagccaccaccaaaccaaacacaaaaaatgacactgcacagcagtctggggacatgtccttgaaggacacagccccaaagat

SEQ ID NO: 239312 - DNA, 201 bp, Homo sapiens
ttttttcttattggaaaagtgaaatatgcttattacagaaacctcagaaaatataaagtagaaaaataccaaaatttctttcataattctctctacccaarggcatcggtcagtccctctccagaccagaagcagttagttctgacaccaacaagtggtgataagaggttgatagcctagcaagggggaagaagccaccac

SEQ ID NO: 239313 - DNA, 201 bp, Homo sapiens
aggagaggagctgccagtagcccaagaccctggagcaagccaggccccaagggccccgagagtggacaggaagccgccggagcaccgcggggttgggggcytggggcagagcatggggcccagctgcagctgtgacttgttctcatagaataaaaaacagaactgaacttagccttcccagggaaggaaccatgccccaca

SEQ ID NO: 239314 - DNA, 201 bp, Homo sapiens
acgcctggcagccaggagcccaaggagaggagctgccagtagcccaagaccctggagcaagccaggccccaagggccccgagagtggacaggaagccgccrgagcaccgcggggttgggggcttggggcagagcatggggcccagctgcagctgtgacttgttctcatagaataaaaaacagaactgaacttagccttccc

SEQ ID NO: 239315 - DNA, 201 bp, Homo sapiens
tccccatccattccctcttcggaatgtttcagctgttctgagaaaacactttgcattcctgccccgcccctgtgatttctctttgggtggcaggcagccgkgagaggctggaggcctggggagatgggggcagggcacaaggctaagctcagcaccttcctccaccctcctcactgtactcaactcctaggcgggcactaa

SEQ ID NO: 239316 - DNA, 201 bp, Homo sapiens
tggccacagtggcctggacagagtagctgggtcccaggcctgcccctgtggacgagggaccagggaccaagagcgcactccagccctgagcccagagcctscaaagcccaaagcaaggcccataaacggaggctacggtaagaggagctgtgtgtgcagtttggtgggtccgagggatgggggcaagggctgaggggcttg

SEQ ID NO: 239317 - DNA, 201 bp, Homo sapiens
cagggcacaaggctaagctcagcaccttcctccaccctcctcactgtactcaactcctaggcgggcactaagagcagctgccttcctggacccaccttaamctcttgtgactcaactcccctttccagggtgcagggaacattccctctgccctgccttccagctctggccacagtggcctggacagagtagctgggtccc

SEQ ID NO: 239318 - DNA, 201 bp, Homo sapiens
agccccctcccagggctgtgctccgggaactgactgagggctaactattatgggcccaccccattgttggaatgtcttcagccacatgggggaatgggtggaagaagaggccgggatgtgtcctgccagctagagcagcgaagaaatcccagcggggccccaggaagtccaagcccatggggttcaggtgctcctctctgg

SEQ ID NO: 239319 - DNA, 201 bp, Homo sapiens
agcagttacagcagcaggaagatgggtgggtcctttcccaggtactgccctcttccctgcattccactcagccagccttccagaagtctgtgccacagccrcgcaccgtggagctttccctgcttgccagccccggggccccttcgttttcaggggagggggtcagttccattacagaacacacaggctggatgctggagc

SEQ ID NO: 239320 - DNA, 201 bp, Homo sapiens
gcaggcagccgggagaggctggaggcctggggagatgggggcagggcacaaggctaagctcagcaccttcctccaccctcctcactgtactcaactcctargcgggcactaagagcagctgccttcctggacccaccttaacctcttgtgactcaactcccctttccagggtgcagggaacattccctctgccctgccttc

SEQ ID NO: 239321 - DNA, 201 bp, Homo sapiens
gccccctcccagggctgtgctccgggaactgactgagggctaactattatgggcccaccccattgttggaatgtcttcagccacatgggggaatgggtggaagaagaggccgggatgtgtcctgccagctagagcagcgaagaaatcccagcggggccccaggaagtccaagcccatggggttcaggtgctcctctctggc

SEQ ID NO: 239322 - DNA, 201 bp, Homo sapiens
ccccctcccagggctgtgctccgggaactgactgagggctaactattatgggcccaccccattgttggaatgtcttcagccacatgggggaatgggtggaagaagaggccgggatgtgtcctgccagctagagcagcgaagaaatcccagcggggccccaggaagtccaagcccatggggttcaggtgctcctctctggct

SEQ ID NO: 239323 - DNA, 201 bp, Homo sapiens
ctcactgcagcctcaacctccagggctcaaacgatcctcccacctcagccacctgagtagctgagactacaggcgtgtgccaccacacccggctaattttttttttttttttgtagaaatgggatctcactatgttgccagggcttgtctcaaactcctgggctcaagcgatctacctgccttggcctcccaaagcattgg

SEQ ID NO: 239324 - DNA, 201 bp, Homo sapiens
tcactgcagcctcaacctccagggctcaaacgatcctcccacctcagccacctgagtagctgagactacaggcgtgtgccaccacacccggctaattttttttttttttttgtagaaatgggatctcactatgttgccagggcttgtctcaaactcctgggctcaagcgatctacctgccttggcctcccaaagcattggg

SEQ ID NO: 239325 - DNA, 201 bp, Homo sapiens; identical to SEQ ID NO: 46696

SEQ ID NO: 239326 - DNA, 201 bp, Homo sapiens
aaagtagaaaaataccaaaatttctttcataattctctctacccaaaggcatcggtcagtccctctccagaccagaagcagttagttctgacaccaacaartggtgataagaggttgatagcctagcaagggggaagaagccaccaccaaaccaaacacaaaaaatgacactgcacagcagtctggggacatgtccttgaa

SEQ ID NO: 239327 - DNA, 201 bp, Homo sapiens
aagaggccgggatgtgtcctgccagctagagcagcgaagaaatcccagcggggccccaggaagtccaagcccatggggttcaggtgctcctctctggctaytccttcagacccgcagctgctggacacaggccacagagctggtgcctcccgcgccatcactgcagtgcagcctgggtggacggaggaagccaaggggaac

SEQ ID NO: 239328 - DNA, 201 bp, Homo sapiens
gtgtcctgccagctagagcagcgaagaaatcccagcggggccccaggaagtccaagcccatggggttcaggtgctcctctctggctattccttcagacccrcagctgctggacacaggccacagagctggtgcctcccgcgccatcactgcagtgcagcctgggtggacggaggaagccaaggggaacggcctgggctcag

SEQ ID NO: 239329 - DNA, 201 bp, Homo sapiens
atttgctcctaggaccccctcctcacctcccccccaacccctcccacctgaattcctcagtaccctctggctctgtcttcccagggtgatgggacagaagrggagggaggctagagcctagccatccacaagccgggttccagaatggttggatttgagaaatctggtgaaggggaaaagatttttcatttgcccagaact

SEQ ID NO: 239330 - DNA, 201 bp, Homo sapiens
tgtcttgcttactcagtgactagtgcacgggctctgagatctgcagaggagtcctgaggcacgtgtacacagttgtccacgtgcgtgcacatgttgtagaygtgtccctgtgttggaacatctggagtgtggttctccagttgtctagcccagagtctgcctccctggccccctcccagctccttcatcattagctgtgtg

SEQ ID NO: 239331 - DNA, 201 bp, Homo sapiens
ggccccagggattgggactggcctggctcagagcaggagccacccagggagcaggggaacagccttccagggcctccctggtccagctgcctgggcctgcrggctcttctgaggacagagccctgataagtgagggtcagtgcccaagaaaaaaggagcattgttagggggtgggggccgggggaacagccagggcattgt

SEQ ID NO: 239332 - DNA, 201 bp, Homo sapiens
cctgaggtatcttgctgagtcccttggctgcttccctctccccacaccacttccccagcggcctcccaggtcctgatcgcacagtgacctgcccactgccytggggttctcatgctggctactgacttgtcctgtgttctctctgttgtggacaagaacgtgattctgtcctctagaaagcggctcagaggtcatgaaaaa

SEQ ID NO: 239333 - DNA, 201 bp, Homo sapiens
ctccccgaccccaccatcctcctgaggggacaggaagtgagtagggctgggagctggtgggagggggtgatgtttggggccctccctgctagtccgccaarcgaggccaggcttcgccacagggatagacagctcccctcacccagcacaggcttagctgggcttgcaccacgtggtcacggagggttaactacagctttg

SEQ ID NO: 239334 - DNA, 201 bp, Homo sapiens
ttgcctaccgcatagggaaggtgcaggatggcacagaacaccttcagagctgttgcgtctgcctccaaaggactacccaaggccgcggttcacgtttgccmcaaatgtgatttcacagctgcattgaatcaaaccctgttggcccctgatgtttattgagcagtcgccagcacagggatggagaggaagtagaagaaacaa

SEQ ID NO: 239335 - DNA, 201 bp, Homo sapiens
taggcagtcaggcaccccagaggggcatggaggggccctgcctgcgggcaaggcacatggctttctaggatggaatgcctggagccctccagccaggccaygtggacaggaccttgtgctgtggtggtgagggtgcatccagcccctctcttctggctctaagtcccttcagattgggaccacctctgtctctctgtcgct

SEQ ID NO: 239336 - DNA, 201 bp, Homo sapiens; identical to SEQ ID NO: 46702

SEQ ID NO: 239337 - DNA, 201 bp, Homo sapiens
gcacattggtggcaggccagagactcccaggctcacgttgcctccaccaccctgaactgcagcgccgggcagaggcctggggaggagccctgggctatggrgtctgttccctgctgccagctgggccctaggaacccactggcattgagccaggctctgccatgtgcccctcagctctcagtgaggggccctatggggacc

SEQ ID NO: 239338 - DNA, 201 bp, Homo sapiens
cagatttatttttctttagataaagttcatacagaatatgttacagtcaggagttctcagctttcaccaaaaggtcagaagttattgcagttgtgcccagkggataggatggaggaagggaaacttctagaaagctgcctgtgttcagagaaggaatcgtcaatgtttaaagttgtggggctgccctgcaaaggatgttcc

SEQ ID NO: 239339 - DNA, 201 bp, Homo sapiens
gagtcggggagcagccaccgtgagatctgtgcttgtgaactgaaagggcagacccgtgcgacgatcgtgtttttctccattgcctctgggtgcagtggggrggaaaccatgggtttagctggagctgggatttcatggggttttgctggcaggtatgagggaaccagggcgcaagggacattcaggataatgcaagggacg

SEQ ID NO: 239340 - DNA, 201 bp, Homo sapiens
ctgacagaggcccggcccaggagtggagggaggtggctggcgtggggcctccagaggactccagcaagtccctctgcagagccagccctctcagtgggaargtggtttgaggagtggctgggagtggaaggcatggctgttctgggacagtagcaggagaggcgcagctgccggctccctcctgaaaccctctcatggtcc

SEQ ID NO: 239341 - DNA, 201 bp, Homo sapiens
cgcttgccctgtgtgagtctcttttggagcagtttgctgggagccagcagaatcctcccctgagatccgaaacctgcttggtggctcccgagggctctgcygatgttcgcaactgtgttaggaagcacttgccccaggcaggtaccatggtttctgttctgttcccctctgttaaggggagcatgtgatgctgcgccctgg

SEQ ID NO: 239342 - DNA, 201 bp, Homo sapiens; identical to SEQ ID NO: 46705

SEQ ID NO: 239343 - DNA, 201 bp, Homo sapiens; identical to SEQ ID NO: 46706

SEQ ID NO: 239344 - DNA, 201 bp, Homo sapiens; identical to SEQ ID NO: 46707

SEQ ID NO: 239345 - DNA, 201 bp, Homo sapiens
ttgtatatgtgtttttaccccttcctgcaccagactttcagggaaggaggttgggtgggtgaccatcaaaccaccaagaaaaggcaagtctgagaaagagwcactaagacccaagggaaggtccatgtgcctggggccgaggcagaactgggtgctgggcctctggaggcgaaggaactgtggggatgcccactggcaggg

SEQ ID NO: 239346 - DNA, 201 bp, Homo sapiens
cacgagcctgtgcggggatgacaccatgcggctgctggagaagaacggcttgactttcccattcagtgcgtaccatcccagctccacctgagggcaggcgytgtagaccgcaggccagcataggggaggggctgggtttatagtgccctctggatttaagctcacccgaggatggatgagcacatggccctgggtcccacc

SEQ ID NO: 239347 - DNA, 201 bp, Homo sapiens; identical to SEQ ID NO: 46708

SEQ ID NO: 239348 - DNA, 201 bp, Homo sapiens; identical to SEQ ID NO: 46711

SEQ ID NO: 239349 - DNA, 201 bp, Homo sapiens
tctgggtccaaggaagggacccacttagcaaaggttgttgtgtggtgctgtgcaggcacggcgcctggagttggccccgccagcatcggggtggcttgggsctctggttcctaagcttctgcttctgagttggtcagcacgttggctctgcgccctgcagtgcctgtcttgatggtggtccctggatgtgctgaagggctc

SEQ ID NO: 239350 - DNA, 201 bp, Homo sapiens
atggatgagcacatggccctgggtcccacctccacccacaccatagaaacgggtcctggtaggggacacaggtcaacgtgctctcctgcctggcctggggktgtctacccacacgtcaccctcagtgcagataccaggtgtccagagtctgtgtctcagctagagttcctttctagacgtgccaagtacctgccttgtggg

SEQ ID NO: 239351 - DNA, 201 bp, Homo sapiens
tttgggttgtttccagagctgctgtcaggctggaacttggttcacccggatgcacagaacatcttccctgtctagaattcaagagcatgtgactcccgccycctaactgcataaccacagagggaaggtgactttggatgagtccagggcctgaatgagtccagagcacttgaacttacagatgggccggccaggctcttt

SEQ ID NO: 239352 - DNA, 201 bp, Homo sapiens
agcattccttagtagtttcttattgtgaggtctaaaggatattttttttttctatataggggaaatcccttaacatctttcctggcaaacagtaagaaagaggagttaaagacaccagcagacaagagctgctgcgttccgggggtgcaacggagaggagtttagtaagggaccatcacagggtgtgggcaggcccgagag

SEQ ID NO: 239353 - DNA, 201 bp, Homo sapiens
gaaccagatgctgttctagtcctcattttacagcaaggaaactgaggcatagtgaggtaactgagacaaaacaaagcaaaatttcttggccagggtcatayggctgatataagatggagccaggattaaaacccagacagcccaggtcctctgtggatcctgcagagtgcccagtcgggtgggggaggtggatgcttcatt

SEQ ID NO: 239354 - DNA, 201 bp, Homo sapiens
gggactgcctgtggccatccacatctcctggctggtgtgccgcccggcatggaggggctgcagtgctgcggttgccctctcagcccttcttcccctagatrcctcttctctttccatggacacatgcagagcgtggatactttggaaacgtgcaggtgttcattttcctccgagggcaggtggccttcctagctgggcgtg

SEQ ID NO: 239355 - DNA, 201 bp, Homo sapiens
gtaatcccagcattttgggaggccaaggagggaggattacttgaggccaggagtttgagaccagcctgggaaagatagtgagaccctgtccctacaaaaaacaaataaaattagccaggcatggtggcacacgcctgtagtcccagctaccccagaggctgaggcccaggagttcaaggctgcagtgagccgtgattgcac

SEQ ID NO: 239356 - DNA, 201 bp, Homo sapiens
tttagataaagttcatacagaatatgttacagtcaggagttctcagctttcaccaaaaggtcagaagttattgcagttgtgcccagtggataggatggagraagggaaacttctagaaagctgcctgtgttcagagaaggaatcgtcaatgtttaaagttgtggggctgccctgcaaaggatgttccagggcaggtaggag

SEQ ID NO: 239357 - DNA, 201 bp, Homo sapiens
agtggttacttcagcctcctgtgcttgggtaagggccatttttcttggtgaccagggctctgtccccagccctgtcgatctgctttcacttttttttttttaattcaggtgcacctggcacagcggctcacacctgtaatcccagcattttgggaggccaaggagggaggattacttgaggccaggagtttgagaccagcc

SEQ ID NO: 239358 - DNA, 201 bp, Homo sapiens
tgccctcccgtgggcctaggtgtgggctgctgtggccatggggtccttggccaagctctccagcagggtagggtgggaaggacgtttgcctccatgccacrggccccaggaggttccagagccccctgttcctctgcttgcttcgagttttcatgctagcagccattgcagcccggcccagcacagggagaggtgaggggc

SEQ ID NO: 239359 - DNA, 201 bp, Homo sapiens
ccgtgggtcaagttctgcctgacagtgctttgattatatggtgatgtgattctgcaaacataaccccccaactgagtgccagctgctgggtgtccccaccycaagagccaaggggaggccaccctggaactggtgctttgcccttggtgtcatggaggtgtctgggtccacacgtggtgggtgggctgggcctgcagtcac

SEQ ID NO: 239360 - DNA, 201 bp, Homo sapiens
actaatgtccctggggtctgtatctgccctctcttctattccctagaaactctggccgggcatggcggctcacgcctgtcatcccagcacttagggaggcygaggcaggtggatcacaaggtcaagagatcgacaccatcctggccaacatggtgaaaccccatctctactaaaaatacaaaaattagctggacatggtgg

SEQ ID NO: 239361 - DNA, 201 bp, Homo sapiens
gcctggcctgggggtgtctacccacacgtcaccctcagtgcagataccaggtgtccagagtctgtgtctcagctagagttcctttctagacgtgccaagtwcctgccttgtgggtgaacggcctcactaatttctctctgcttttctctccccaacccatagtttgcaaaaccagagtggctcatggcaccaactctcacg

SEQ ID NO: 239362 - DNA, 201 bp, Homo sapiens
ggcagctggacaagatcgagggcgtgttcgagcggccgagcgacgaggtcatccgggagctctcccgggccctgcggcaggcactgggcgtgtcactcttyggcatcgacatcatcatcaacaaccagacagggcagcacgccgtcattgacatcaatgccttcccaggtgagtggcggccaggccacctccactgaccgg

SEQ ID NO: 239363 - DNA, 201 bp, Homo sapiens
cgtgtgccatttggtgggaatgggggcaccagttggacagcagcagaaatcatttctgttttctgttgatgactgtcttgcttactcagtgactagtgcaygggctctgagatctgcagaggagtcctgaggcacgtgtacacagttgtccacgtgcgtgcacatgttgtagacgtgtccctgtgttggaacatctggagt

SEQ ID NO: 239364 - DNA, 201 bp, Homo sapiens
ggtcagctctagtcacagagggaggtaatcgatggctggccctggctgtgtgctcatcgcgactataggaaggatatttctttaccctcactccacaggcraggaagcaggcttggggaggggagggatgtgcccttccccaggctgcacagctggaggctcagcccctgccctctaacccctgggcatccttctgcctgg

SEQ ID NO: 239365 - DNA, 201 bp, Homo sapiens
agagccagggccacagggtgccctggggccagccctgccagccggtgtctcagccccgccgtagtgcctgcagctggtgggccactttctccagctctgcytcaatggccgacaggctctccagctcctggtcctaggagagacattggggttcactcgggccagcctggccagtggcatggaaggcacagtaagccagaa

SEQ ID NO: 239366 - DNA, 201 bp, Homo sapiens
accagaggggagagagggctctggagaccttactcctgcagttacatgctctgcccaggaaacggcatgttctgttttcactcacagctcattggccagawcgagtcacatgatcacccatttaccagggaatcaggaagtgcagtcctgccttgtgtccagaaaaggggctgataggccgtgtgcggtggctcacacctg

SEQ ID NO: 239367 - DNA, 201 bp, Homo sapiens
ctggaggtatagtctggagaaatggctctgccactggcaagacatgggctcgtgggcaggtacttctgtgcggcgtcagtgtcctcgggtgtagcgtgggractgaaccagggcatggttgggccgtctccaccccctggctgtgtagacacggtttactgatgaggcatcgctgagttccagtgtggcctccacgtcctc

SEQ ID NO: 239368 - DNA, 201 bp, Homo sapiens
ctgccctcccgtgggcctaggtgtgggctgctgtggccatggggtccttggccaagctctccagcagggtagggtgggaaggacgtttgcctccatgccasaggccccaggaggttccagagccccctgttcctctgcttgcttcgagttttcatgctagcagccattgcagcccggcccagcacagggagaggtgagggg

SEQ ID NO: 239369 - DNA, 201 bp, Homo sapiens
tgggcctgtacgggccgggtgttgtgggaggcaggcgggagccagacgtgtggggtgagggtatttcagactctctgtgccagcttccgttgccaaagagraattgtgctgtgtgctttcttggacggatcctgtggaagcctacattctctgatttcctatttttttccctaagtcgctaagaaccaccagaaccctttg

SEQ ID NO: 239370 - DNA, 201 bp, Homo sapiens
tactcatggcaactggaagatgacttgggtcaccatctgtagcattaggacacattctccccatccccttcgcctcccaagagagagagaggagatgaagkaaataaggctaaaagcagtgtggcccagctcgtggctgtacggctgagttgctgggatgtttgggggctaatcttatcatttattcttcttttaaaccta

SEQ ID NO: 239371 - DNA, 201 bp, Homo sapiens
gatttccctctgcagagatgatactcatggcaactggaagatgacttgggtcaccatctgtagcattaggacacattctccccatccccttcgcctcccaagagagagagaggagatgaaggaaataaggctaaaagcagtgtggcccagctcgtggctgtacggctgagttgctgggatgtttgggggctaatcttatca

SEQ ID NO: 239372 - DNA, 201 bp, Homo sapiens
ctccagggccagtttctgcttagcctatgcggggagagagggaggccattgggaggctgctgtggcttctggaaaagatgctgagggtgtgatgagggtgktgactctggtcaggaagaaataggatggaggccagaaattgagggggaacattggcaggcatcagggcaggcattattatctgggatgagttaaggagaa

SEQ ID NO: 239373 - DNA, 201 bp, Homo sapiens
agctcatggccccaggctcagtgttgtgcccatcctcagccccaggtgcccctgcatgtggtcctgagcatcccctccctccgctgccatgaaggctggcstctgagcagcttgagccttgcccagcctacacaggacaaagttgcactcacctcctggctcctctcagtgtgtaatcatctaaagtggatctgggaagga

SEQ ID NO: 239374 - DNA, 201 bp, Homo sapiens
ggatttccctctgcagagatgatactcatggcaactggaagatgacttgggtcaccatctgtagcattaggacacattctccccatccccttcgcctcccaagagagagagaggagatgaaggaaataaggctaaaagcagtgtggcccagctcgtggctgtacggctgagttgctgggatgtttgggggctaatcttatc

SEQ ID NO: 239375 - DNA, 201 bp, Homo sapiens
ccctggaggctggagcctggttgctttgaatcccttattctatattcattctgttcaccagggaggggatgggttgttgttggcgtctgctccagggaagcttccccagcccttcccagggctccagcgtttcccctaccccttgttgggcctgggacaccgagtttgaccagcttgcacatggactgtgagtctgatgga

SEQ ID NO: 239376 - DNA, 201 bp, Homo sapiens
gcttgggcccaggagtttaaggttgcagtgagctgtggtcatgccactgcattccagcctgggtgacagtaagaccttgcctcttaaaaaaaaaaaaaaaagcagactaagcccaaatagtagagaaacacacagagctaaaaaggagaaatgtttattctgttcacgtgaactaagtaactgttagtgtgtctctccatc

SEQ ID NO: 239377 - DNA, 201 bp, Homo sapiens
gatctcctttcttatccactgtggttgggtttttctgttttctcctttttccttctggttgcaaaatgctgggccagtttccgtctcgacgctgggaaccattaacagcagagtgtgggctcctatcctgtatctgtgaggacgaggactccttgcctgtgtgtcttcttgtgtggctatttctaggttgccagtttgcca

SEQ ID NO: 239378 - DNA, 201 bp, Homo sapiens
acatggctccgtgtgtaggggcgcggctgggtgctgtgcagacccagttccatcccgggctcactcactgtccagcagtcactgaacctctcagcgcctcrtcgtcctcatctgtgaaaggttgtatgctcacctcagatgtgcattgtgagggagacactaggtaactggtgtacgtgctcagaacagggcccggcttgt

SEQ ID NO: 239379 - DNA, 201 bp, Homo sapiens
ggtgcctccagtcgcttcctttgcttgtttgttgtctgtctcccacactaggctgtgagtatgagcactgaggacagggacctggcggtcatcttcacgtygcatcttcagagcttgagcaatgctaggcacaaacttactctgttcacttaattactcaatgaatgagtgcatgaatgaatgaatgaatgaatgaaagaa

SEQ ID NO: 239380 - DNA, 201 bp, Homo sapiens
ataggagcaccagtcatcgtggactagggacctacctgctctggaatgacctcatcttaacaaaggtcatctgcaaagaccccatttcctaaccaggtcaygttctgaggtactaggggttaggacttcaacataccgttttttggggacacagtttagcctgtaccaggccttctctgacgagtgcccccctttcctatc

SEQ ID NO: 239381 - DNA, 201 bp, Homo sapiens
taaaaaggatgcatagaaaatttttttgacttggagaattctttgccacttgtggccggggctgccagttgccattctagggggaacatggagataaagcraacattgaaatatgttttttattgtcagcaaaaataaacatcccaggccggaagccagggtgtggaagggaggagtctggggacatgaagtcggaatccc

SEQ ID NO: 239382 - DNA, 201 bp, Homo sapiens
ccagagtgctacagggaggctcgagggtcctctggtgatatgccccagggtggacaagaggatgggggcagtggactcaggtgctgaagttgttgcttttktctgtgttccctgcctcacagctgaaccttagccggccgatcgaggagcagggccccctggacgtcatcatccacaagctgactgacgtcatccttgaag

SEQ ID NO: 239383 - DNA, 201 bp, Homo sapiens
catggttgggccgtctccaccccctggctgtgtagacacggtttactgatgaggcatcgctgagttccagtgtggcctccacgtcctcagcacaggcatgygcaaccctttcccctggctcaggtaggcacaagggatggaacccttctgctgcacttggtaaaggggacccccgagggcctttgaactgagtcctgcctt

SEQ ID NO: 239384 - DNA, 201 bp, Homo sapiens
cttcactgcggcagggattgtgtctgctcccagcagctggtgttcccattgccgcctgcagtgcctaagtgtttgggtggcggcgcatgcccagtgctggkcatgcgctggggcggcctttcatggggtgccctgatggccttgcggagggaggacgtggctctgctgggctgcttggagcggggagggaggaggccagga

SEQ ID NO: 239385 - DNA, 201 bp, Homo sapiens
tcatgccaggctgtgcagcttggactctatcctgcagggagggtggggcggggatggcggtgatatgatcagatataattggcaagagagaggccctgctwggaaggggagattgccagtgcaagatgaactctgagcagctgaggacactgtttactctttggagcccaggtgcgtccaagttgaagaaggagctcatgg

SEQ ID NO: 239386 - DNA, 201 bp, Homo sapiens
gttgctttagggtcaagtccaaactcctcagctggtccgtctcctgctctctaccttgtcctcacttttcatgttgagactgccgtccgccccagccctgycaggcccccagcaggcccgtgaatgtgctggactccctcaccccagacctctgcttttgctgtcccctctgcttggagtaccctttctcccctggcccat

SEQ ID NO: 239387 - DNA, 201 bp, Homo sapiens
tgatccaccctcagctcaagaactcccctgggaagcacagtggctcccgtctttgcctcaagttctctgatgttctgcacaaatggtaggcagagacagcyctttcagggacctgattgccctggtgtctagttctcctttcacaggcctgttttccagctcgactgtcaatctgagtctttctctttttgagctttatgc

SEQ ID NO: 239388 - DNA, 201 bp, Homo sapiens
ccctcagctgggcctggctgtgctctcaggaggagccaggggagtgaaattgtgctgagtgagcccagggtcgcttcctttcccatgaaagcccctgtgartacttttaacagccataaggaagtaatttcagttcttctgtcaagggtagaatcactggtgttagtggggtagctgagtgttaactgaacacacaggccc

SEQ ID NO: 239389 - DNA, 201 bp, Homo sapiens
ctgtcctcccgggaggatggcctccagcctcgtcgcagctgcggcccagggcccctgaagccgtaggcccgggcccggaaggagagcttcatggaactgtyccggttgtcctcctcctcctcctgcccctccagccgcttctcagccgtcagctccttggccagctggtccatcttgctccagcgtttggagtcctcccac

SEQ ID NO: 239390 - DNA, 201 bp, Homo sapiens
aaatacgggaaggtgctgcgagacctgccaggacttgccttgtgcgcagccgtccctgctggcttaggggtcagtccgggcccctgggcctctgccaggcrggtcacgcacaggctctcctcagagcacaggcctagggcagatgggggctggaactcacagaggtttccagtttccatgatgtccactttatctgtttct

SEQ ID NO: 239391 - DNA, 201 bp, Homo sapiens
agaatcaatgtcagaggcagaatctggactcaggactctgacagcattttccattagaaggagcaaatccctgtgtctcactccctgctcatttcctgccygtgaggatcgaggaggaaagagtatctctgacgttcatctcattctgctcagattctcagtggcagcttagcaaagggccagttgtctctgttggcatca

SEQ ID NO: 239392 - DNA, 201 bp, Homo sapiens
ggtggtggtgggcaccttccaccctccttggcttgtaggtgtgtcactgcagttgtctgtctccacacggcctcctccctgcgtctgtgttcagatttctytcctaagaaatccagccaggggattcaggcccacccatatggtgtggtccacccatatggagtcctaactctgttccatccacaaagaccctgtttcctt

SEQ ID NO: 239393 - DNA, 201 bp, Homo sapiens
tggccgccccgtgctcaccacagtaggtctgtctggcttcctggcctgaagcatgccagggcctcgtggcagctggtgtggggggtctgtctgtgtggtgyggcttcgcagctcctcggcccatggcctgacttccttgtgtatgttggcagctggacaagatcgagggcgtgttcgagcggccgagcgacgaggtcatcc

SEQ ID NO: 239394 - DNA, 201 bp, Homo sapiens
gttgggaagtatattcatttgcgtgggctgcatgacagtgctgcatttaaacaacagcaatgcactgcctcccagttctggaggcagaagtctcagatctkagtgttggcagagttagcttcttctgaggcctccctccttggcctgcggatggccctcatctccccacgtctgcacatggtcttcccctgtgtgtgtctg

SEQ ID NO: 239395 - DNA, 201 bp, Homo sapiens; identical to SEQ ID NO: 46701

SEQ ID NO: 239396 - DNA, 201 bp, Homo sapiens
agatgcaccttcatctagggaagaatgttcctgtctgttcactcagagcttaaccttgctgagcctttaagaccatggcagggacccgctccccagcaaaacaagaaggcccctccacccacagcccaccaacccctccagcgccctccagctcagtggcttctggacgagataccccacttggtccaggtgggcctgccc

SEQ ID NO: 239397 - DNA, 201 bp, Homo sapiens
cgccacgcggaccctcctcacagaggccctgtggactgtggccttcagttatgtcatgtatttactgtcctaaggggtgtgtgtcttcatttgctttcatytgtcttgctccagggctgggaagagatgcagagcctctggtccagctgtggctttgagagaacaaacaaccagtgaggaccatgggttgggaggaacagt

SEQ ID NO: 239398 - DNA, 201 bp, Homo sapiens
tgaatgtgctggactccctcaccccagacctctgcttttgctgtcccctctgcttggagtaccctttctcccctggcccatgcctgtggccctttgtggttgacatcaccaacctcagcaggctcctccccagcccccaaccctgtgccccccgcacccacactcctctgctcctttattgctggtcagccccacgcctct

SEQ ID NO: 239399 - DNA, 201 bp, Homo sapiens
tgtaagggtcagtcagccacgcttactgtgagtgcctggggtgtgatgatgcgtacgagccactcagtacaggcccggcgcctagtgaaccatcagtcacygtggcttatgtcaatattattattacagtgacagtaggactactctgtcagccttatctgtggccccagctgacttgagagctctcagtcctaattggag

SEQ ID NO: 239400 - DNA, 201 bp, Homo sapiens
gtctcaggagatattgggaagtgtctttcccttccccttcctcacccaagagccccagagatgggcagcttctcagctagcctggttttggttttattttrtgttgttttgtacacaggcctgtcaccatggggagggaacagcattccttagtagtttcttattgtgaggtctaaaggatattttttttttctatatagg

SEQ ID NO: 239401 - DNA, 201 bp, Homo sapiens
gaaagagtacagcttcagggcttaaataataatctatgcaggctttgtaggagtttgagtcagagtttccctccttattgttaaaaaggatgcatagaaartttttttgacttggagaattctttgccacttgtggccggggctgccagttgccattctagggggaacatggagataaagcaaacattgaaatatgttttt

SEQ ID NO: 239402 - DNA, 201 bp, Homo sapiens
cgttgcatcttcagagcttgagcaatgctaggcacaaacttactctgttcacttaattactcaatgaatgagtgcatgaatgaatgaatgaatgaatgaawgaaagaaaagaaaacaagtcctgttgtctttcccatgcatcactcacacaaactgaggctttgagaaaaccagaggagagtaaagaacaggcttttgtgt

SEQ ID NO: 239403 - DNA, 201 bp, Homo sapiens
tgatccgcccgccccagcctcctaaagtgctgggatgacaggcgtgagccactgcacccggctgctttgttactattatatcaaataccagtttggaaaaytgcctcaaggaatgctctcttcggattggaaagcaatgaatatagaaagagtacagcttcagggcttaaataataatctatgcaggctttgtaggagttt

SEQ ID NO: 239404 - DNA, 201 bp, Homo sapiens
ctgctcagagctgtggagtacgctgcagtctgcagagtgcgatggccccttcgtgagtcccagcaactcaccagggtcacagccagagctgggtggacatrtgccttctagatgaggctaatcggaagatattcaagggcatcaagctgccccgcccagcatggtgtgtatgtggtccctgggggacttcctcccattgag

SEQ ID NO: 239405 - DNA, 201 bp, Homo sapiens
agagtccttatcagtgcggggcatggggccgccactcccagaggagccagtgcctggagtggatctgcttccgggtgaggttttatctggagtcaggcggsctgccctgagcctggttgcagtttcctctctgtcttctgtgtggtgctctatttctgagtttggcctagtcaagcctctctctcagatctccaggtgact

SEQ ID NO: 239406 - DNA, 201 bp, Homo sapiens
ctccaagtatttggtgtatacagtgtctgcagggtgcctgggcaggggtgttgggccaagcggtgtggcaggggaccatgtgtgctctggccaggggcctkgacctcattctgttggtggtgagggcctctgcaggtggggagtggcaaagtggaccaagaccgcctctcctccactatctcccctccctacccctgctct

SEQ ID NO: 239407 - DNA, 201 bp, Homo sapiens
gtcttcctggatccatccagaatcccagatgggaagaaagagctgtatgttccctcctggggtcaccttcatctcagtctgccatgggtgaaggtttggtmaaatttgggaaagggaatcagcctctttccagaaggtgtgcttgttggacactgcctgtgtgaagagcaggaggctgtattagaacatgagaaggcccag

SEQ ID NO: 239408 - DNA, 201 bp, Homo sapiens
gagagggccccgtcctcaacaggtccagggagagctgttgaccaaaccctaacgcatgcttggttctagatcagcaggaagtgtagggtgggtgggccatraatgttgcacgctgggttttccttatcgtgcacgccgagcctgggcttgtattcttccaggagggcggtcagaggctgggacttcctggagccctttcct

SEQ ID NO: 239409 - DNA, 201 bp, Homo sapiens
ctagacattaggatggagaggaagatcaagaaaaaggaagcaaatgagaagaaggcctagttctcttttaaggaggggttctgaaagcaatccagtgacaygtttttgtgctgggagaagggactttggccagaattagtcacatcctaagctgcaagggagtcaggaaattgagtccttgttctgagcagccacatgccc

SEQ ID NO: 239410 - DNA, 201 bp, Homo sapiens
tgagtccttgttctgagcagccacatgcccagctacaattcgggttttatcaccatggaagaagggctagaacgagttttaggggagcattagcagtcttscaagacatgggtccctgcctgaggacccaactttcccatggcagaacaaccttggaatttctcctctggctgggggtttggcctcggcctgtgacctcag

SEQ ID NO: 239411 - DNA, 201 bp, Homo sapiens
ttgcatggctgacccaggaccactcagcacctttccgactctcagtccagtgctgtctccatgggacccacatctctgcaggggtcttttcagaagcagcrccatagtgaatctaaagtcagactgcctgggttcagatcctctcctaaacacccagctgtgtgcatttaggcaggttatttaactgcattgagccccagc

SEQ ID NO: 239412 - DNA, 201 bp, Homo sapiens
ggccacctccactgaccggcctccagagactgtcctcaggtgaccaggcaggtgaggcggggtgactgaggccagaaagccagctttctccctcaccacgrggtccggggaggtgcagccccgagaagcctcagcctcacctgcgcgatgggcttacggggtgtgcgaggagggagggagagctgcacgtccacctgggga

SEQ ID NO: 239413 - DNA, 201 bp, Homo sapiens
tcaattatgagacacatctcaatttcagagatggaaaatatgaaaaacatgccatagaatcagtgaagttctgcagaatttagccttttccatccagttawctatagagtcccctcctctctttgaggcttctcttgagagactgttgcactcaacacactcaggaattccctgactgggtgccttctggccgccctcact

SEQ ID NO: 239414 - DNA, 201 bp, Homo sapiens
tcggaggctgaggcaggagaattgcttgaacttgggaggctgaagcaggagaattgcttgaacctgggaggcggaggttatagtgaaccaagatcgcaccrctgcactctagcctgggcaacagagtgagactccatctcaaaacaaacaaataaacaaacaaactatgagagagggaccctttgtaggcccccaatagta

SEQ ID NO: 239415 - DNA, 201 bp, Homo sapiens
ctcaggtgaccaggcaggtgaggcggggtgactgaggccagaaagccagctttctccctcaccacgaggtccggggaggtgcagccccgagaagcctcagmctcacctgcgcgatgggcttacggggtgtgcgaggagggagggagagctgcacgtccacctggggagcgccaggcacagtggccacagcacgcatgtccc

SEQ ID NO: 239416 - DNA, 201 bp, Homo sapiens
tgacgcaaccgagtctttgcaaatgattttgagtactgaacttccccttttcatgtgatgtttaaaaggttgttaatgctttattattattattattattwtttgagatggagtctcgctctgtcgcccagcctggagtgcagtggcgtaatctcggctcactgcaacctccgcctcctgggttcaagtgattctcctgcc

SEQ ID NO: 239417 - DNA, 201 bp, Homo sapiens
gctctctggtgtacatgtgcagatatacacacccatgggagatgagggaggcattccactgtccttcaaggctcagcttacctgccatctcctttgagtcrgcttttgactgcccagcgtgaatacctgtgcctgcctttgtgtgctcactgcactcttttgggtcattctggaagagcctccattttattttgcctcact

SEQ ID NO: 239418 - DNA, 201 bp, Homo sapiens
ccacctcctggtacccaggagggtgaggcagctgttcacggtgctgtcgggcaccaggccctggacagccatggttgttcccattctgggcctcatgcagygcctggtagaccactgcctcccactcaccagtgtcacagcagccagacaggtttctgcggcctgagccccctccctccctccctcccgtcctgtttccta

SEQ ID NO: 239419 - DNA, 201 bp, Homo sapiens
gtctcctggctaggccctgggcccagctggtttctggtgggaggtgacaggcccagtaactgaagcaggaggctctggtccagaccgacctgggtgggttraaacctgcctctgccacctcctggtacccaggagggtgaggcagctgttcacggtgctgtcgggcaccaggccctggacagccatggttgttcccattct

SEQ ID NO: 239420 - DNA, 201 bp, Homo sapiens
gtaaagatacaaagtctccagcaggcacagggtggaagaggaggtttctgtttttaatttttttttgtagacaaggggtcttgctgtgttgcccaggctgrtcttgaactcctaggctcaagtgattctcctgccttggcctcccaaagtgctgagattacaggtgtgagtcaccatgcctagcaaaaaaagaggaggcgt

SEQ ID NO: 239421 - DNA, 201 bp, Homo sapiens
acttctgctctgagctcagtgcatagacatcctatcttgttgaatgtgcacgacacctcgagatgtaggcaggatccttccttttttacaggggagaagayggggccttggtgaggtgaagtagttcccagggccttccatccaggtgatggagccaggaccttgcttctagttctcctgcctcccaagcttggctgtttc

SEQ ID NO: 239422 - DNA, 201 bp, Homo sapiens
tgaccagcacccacccccgccttgtaacccgcaccgcttccaccccgcctcgtgactcacaccccctccaccccgcctcgtgacccgcaccccctccaccmtgcctcgtgacccgcaccccctccaccccgcctcgtgacccgcaccccctcaacccctgcctcgtgacccgcaccccctccacccctgtgttgcgaccta

SEQ ID NO: 239423 - DNA, 201 bp, Homo sapiens
ccgcaccccctccaccctgcctcgtgaccagcacccacccccgccttgtaacccgcaccgcttccaccccgcctcgtgactcacaccccctccaccccgcmtcgtgacccgcaccccctccaccctgcctcgtgacccgcaccccctccaccccgcctcgtgacccgcaccccctcaacccctgcctcgtgacccgcaccc

SEQ ID NO: 239424 - DNA, 201 bp, Homo sapiens
ccacccctgcctcgtgacttgcaccccctccactcctgcttcgggaccctcaccccctccacccctgcctcgggacccccaccccctccacccctgcctcrtgaccagcaccccctccacccctgcctcgtgacccgcaccccctccacccctgcctcgtgacccgcaccccctccacccctgcctcgtgacccgcacccc

SEQ ID NO: 239425 - DNA, 201 bp, Homo sapiens
gagattcactgtcctccatccacattccttgagaattcagacactatgaaacccagtctctggtgcggcggctgtttctcaagcaggcaaggaagtaagtwagttctcccggcttgcgaatgagtgaatggtgggcatacgtctttctgtccgtgttttctccagagctggtgctggctggcttgctggtgacctttgtat

SEQ ID NO: 239426 - DNA, 201 bp, Homo sapiens
gtggcatttcagtggggaaaatacagctacagatgaaactgggctgttgagaaagatacattgtttcagtgtggagaatatagtattttttttttttttttgcctcccctctgtatcacttttgggtttctaacaattgtggattccagcttactccttccttttttaaaagatagattttatggtttttttaaaaaattt

SEQ ID NO: 239427 - DNA, 201 bp, Homo sapiens
ggtcttgaactcctgacctcaagtgatctgcccgcctcggcttctaaaagtgttgggattacaggcgcgagccaccagccttgacatagttgtaaacaaarttgtggttctgttgtaatctgttcccacaaacacacttagcattctcttagagcttccccctttgttaaatgtctacttaggcttgctttttaaatgact

SEQ ID NO: 239428 - DNA, 201 bp, Homo sapiens
tccatttcaacaggcagagatgagaagggagggcattccagtggcagatacagcacagacaaaggccaggcaggtaagaaaggccaagttatcaccaggartagagatggtccctcttggtgagagcctttcttgttttggggcatggggtggtacaggccccctccacctggcttggagtggacttgttggccttgtcat

SEQ ID NO: 239429 - DNA, 201 bp, Homo sapiens
cctgtaaacccagcactttgagaggctgaggcgggtggatcgtttgacgtcaggagttccagaccagcctggccaacatgggaaaaccccgtctctactaraaatacaaaaattagccaggcgtggtgatgtgcgcctgtaatcacagctacttaggaggctgaggctgcagtgagctgagatcacacactgcataccagc

SEQ ID NO: 239430 - DNA, 201 bp, Homo sapiens
gtacacggagaacaatgttaaccaaatatgtgggaaccctgtggcccagtcaagctgacaagaattaagcgtcccaccatggcaggcctgctgtgttctargctctagggcaggtcccaggcacacagagatgagcaaggcaggcatagtccctgctcccaccgagcctcctgcctcatctgcctccatcagggaggaagg

SEQ ID NO: 239431 - DNA, 201 bp, Homo sapiens
ttctctcacacccccgctcctcctgtgaccacagtcctcatgtgacccttcctttcctcagtgaaccggacggctgggcagcacccagtcctgctggggargactcactccaggctgcctttcagtgacccaggccccatgggccttttgccattggccttgagtgccttcagctctgagttcctcagtgcctaagcagca

SEQ ID NO: 239432 - DNA, 201 bp, Homo sapiens
cactcgcggggcatggacgccttgctgggagctgtctcagtacaggtgagagctgtaggacggtggtttgtgggcagaggatcttgtgtgtggagatgatrattatggagtgaggggaccaacaaggggcttcctggattaacagacttcaggaacatcgattccaggagctgggaagaggtcgcggtgctgggccacagc

SEQ ID NO: 239433 - DNA, 201 bp, Homo sapiens
ccgcgtccccgtggttctttgggtagtggggcccttggtgcccacctctctgtctctccttctctcctccagcattgggcacggctttctctcttcttcaygtgcagcttgtttttagctcccctgtggatttgatgtggtttctgccctggcctgggcagactccgacaggggcttctcgggtttggagggttgctgtgg

SEQ ID NO: 239434 - DNA, 201 bp, Homo sapiens
ccgccccgctcacactcagcctttcctggcccctgtgccctgaagtacagggtggtcccacctttgtggtcttatcagggaagggggacaatgacaagaamcaataataacaaaccagtaatttcatcatcagcagagagattccaaatacattttgttatcccacaaaaaatcagtttacccctgctcggtgccaggcac

SEQ ID NO: 239435 - DNA, 201 bp, Homo sapiens
agctagttctttaatctctctgaccccagtttcctcctcatgggattattttgcaaactgtggaggtgatgccggcaaagccctcggtacagcgccagacrcatgctaagagctatattgtcactgcgattattattaagccagtgtatcacatggtgggaaagtctttattgaaccagaaaaaatggtcatggcttatga

SEQ ID NO: 239436 - DNA, 201 bp, Homo sapiens
gaaatcaggagccctcacgtagtcttcctgtgggtgttggccctcctgccgcagcctacctgggctctgtgcctggtgctggcagcaccctccaggatgtrccaggccagggagggagcaggaaggctcgagagcagcagcgttggtccccaggcccccctcagccccagtatctgcctgcccgccttccaccagcccctt

SEQ ID NO: 239437 - DNA, 201 bp, Homo sapiens
gccccagtatctgcctgcccgccttccaccagcccctttaaccacccagtggttcctctgtgtgtgagttgcttgggtgttcccagatggaagcacgagcrtagttattaacgtgagtagatccgcctaactcagaacctggcagcccgggaggagggagccacttctgcgagtcactcaaggcctgagggccggggctgt

SEQ ID NO: 239438 - DNA, 201 bp, Homo sapiens
ctggggcgagacctgatggggaggacatggggacctatgggggttgagctcggcagggacggcaggtggtgaggatggtggtgaacttggtggcaggggcyttgggacgacccaggctggagctcggctgacagaggcccggcccaggagtggagggaggtggctggcgtggggcctccagaggactccagcaagtccctc

SEQ ID NO: 239439 - DNA, 201 bp, Homo sapiens
actgaggtccccacccttgctggccagcagctcctacaggtcctgtgtttcttctcacggtgcccctctacttgcaaggcggccacagctggccagtctcyttgtgctttgaatctccagcttcctcttcagagaagaagctctgtgtgtgatgccctaagagttacccagaccatctccctgttttgagggcagcaatgc

SEQ ID NO: 239440 - DNA, 201 bp, Homo sapiens
caaggaaactgaggcatagtgaggtaactgagacaaaacaaagcaaaatttcttggccagggtcatacggctgatataagatggagccaggattaaaaccsagacagcccaggtcctctgtggatcctgcagagtgcccagtcgggtgggggaggtggatgcttcattagttggccaagatgagcagcgtggggcccttgg

SEQ ID NO: 239441 - DNA, 201 bp, Homo sapiens
tgtggtctgggtttcagacaccatgcggggtgctggagcaccgagttcctcctgcaccccgggagcccagttggtgcggagacagagacaggaggtgaagygttagatgaactctgctcgaggaacagagcaagtttctctatctgggaagatggaagaaagctttccacaggtggtgacccttgagaggtatgtttgagg

SEQ ID NO: 239442 - DNA, 201 bp, Homo sapiens
acccccacaagtctgagccccaggctggcctaccctgtgctgggcacctctgcttggggttccagaattctcggaggcagctgggtgggagtgctggtggraagctccggaagggaggctgctcggggcctccctgtggctgtggctgcatgggcagccccgaagcggcttcctggaccccaccttgtgcctcagttaaac

SEQ ID NO: 239443 - DNA, 201 bp, Homo sapiens
cactattgcagatgggataactaccctccaggatggctgaggggtctccatttgctagatgagggccctgagactcagggagaggccaggtgctgtgagcrgcacagcttggattcaccctcagggatgggtgactcctgaaaccatgctgtttccactccgccaggttgcctttgtcttcaacacagcatccagctgccg

SEQ ID NO: 239444 - DNA, 201 bp, Homo sapiens
tgtcctgtgttctctctgttgtggacaagaacgtgattctgtcctctagaaagcggctcagaggtcatgaaaaacaaagttgtattgtcagtgaaagtgcrgtcaagatggtagctgttttcaggtgtgcctagtgggatggggatgcctgagatggggtttctagcgtgtgacaggcgcagatttggtgccctgcttttc

SEQ ID NO: 239445 - DNA, 201 bp, Homo sapiens
caagaacgtgattctgtcctctagaaagcggctcagaggtcatgaaaaacaaagttgtattgtcagtgaaagtgcagtcaagatggtagctgttttcaggygtgcctagtgggatggggatgcctgagatggggtttctagcgtgtgacaggcgcagatttggtgccctgcttttcttcaccaggacaaagggaatcttac

SEQ ID NO: 239446 - DNA, 201 bp, Homo sapiens
gggctggggggtgatgagccatgtttcagatgcagaaggtgcagagtgtgtgtgcagggacagcagggagaccgcctggtggcctgcaccgcagagctgtrtgtctcagggagtgggaagccctgcctgtgctggcctcagttcttccgctcttctggaattctgcatccttcttttgacatttctctctaatgcccaggg

SEQ ID NO: 239447 - DNA, 201 bp, Homo sapiens
tttctagcgtgtgacaggcgcagatttggtgccctgcttttcttcaccaggacaaagggaatcttacccgcctcctagtcacccggtgctgccgtcctgcygacactgttctctccccgtgtgttcggggtcagccgccttggccccccttgcttccttggggctctcaccccgttccttggccaactccctgctgcacat

SEQ ID NO: 239448 - DNA, 201 bp, Homo sapiens
acccagggaggcggacacttgacctcagtcgtgccctttgttttcagatttttgttttaaattttattctctagacattaacaaggaggcatgagtgtggkttgaggactgggagggatagggatgctataggcagaggcaggggaagcagcacccagagctggggtcctcccattttgttgtgagcagggaaaccgaggc

SEQ ID NO: 239449 - DNA, 201 bp, Homo sapiens
tgcctggcaggtggggactcggggttgtttatcgtggaggtgaggcaggaccttggccccacacactggctgggcactttctgtgtgtgtcacctccgctygtctgagagcatgcgcaggcgcagtcagcagcaccggccacagcaaggaagccaaggctcagaggagtgtgctggctcctgtcattcagctggtgtttac

SEQ ID NO: 239450 - DNA, 201 bp, Homo sapiens
tggtgtgagtggtgcacgtgtgtgtaagggtcagtcagccacgcttactgtgagtgcctggggtgtgatgatgcgtacgagccactcagtacaggcccggygcctagtgaaccatcagtcaccgtggcttatgtcaatattattattacagtgacagtaggactactctgtcagccttatctgtggccccagctgacttga

SEQ ID NO: 239451 - DNA, 201 bp, Homo sapiens
agcccctgggcactggcactgcccactgcccactgcccgtgtgtgctggggccatgccagccttctccgctgctaaactggcttcttcaccctccctcagkgggcacagctgccgcttccatctcagtgtctgcttctcccttgcttggtgggtcattatgtgcccacttagccataggctttcactgagtccccaccttc

SEQ ID NO: 239452 - DNA, 201 bp, Homo sapiens
acgcccccagcacagacacacactttttgtttttcccatgtggcctggatttccacgtctgtcctgcccagctgagctccaggcacgtagggccggcgctycgtgacagctgacacaaggggtggcagctggggaggcagccagctctccggggcccattatccctgctcagcagccccagccgtctggtggctccttcct

SEQ ID NO: 239453 - DNA, 201 bp, Homo sapiens
gctggatcggctaggcctagggcccacccctctgtccttagagcagaccctgtgcagagcccgtgctggccggggctgagagggttttggcagctgccccmctgcactccctaccccagcccctaccagatcctcctgtcagggacctttttccccagaggagtcggggaccaggagcacaaaggcctgttgtttgcggag

SEQ ID NO: 239454 - DNA, 201 bp, Homo sapiens
gagcccgtgctggccggggctgagagggttttggcagctgcccccctgcactccctaccccagcccctaccagatcctcctgtcagggacctttttccccrgaggagtcggggaccaggagcacaaaggcctgttgtttgcggagtatcacatggctccgtgtgtaggggcgcggctgggtgctgtgcagacccagttcca

SEQ ID NO: 239455 - DNA, 201 bp, Homo sapiens
aggtgctctaaaggtggaaacagttgtgtacggtggataaagaggtcttggggaactagtaaaatgtccctattccctgggtcattgtagggggccccacycacctgaaccaccgtagactccaggatgcatccagaagtgttctgtccccagcatgcttctgggggacccacacaataatgatattcatggaggaatacg

SEQ ID NO: 239456 - DNA, 201 bp, Homo sapiens
cactcacctgaaccaccgtagactccaggatgcatccagaagtgttctgtccccagcatgcttctgggggacccacacaataatgatattcatggaggaayacgctgggacaggtgtggccagcatggcgtggattggccttccagggaagccagggcaggtgctgcctgctgtctcccgctgagccatctttaccttggg

SEQ ID NO: 239457 - DNA, 201 bp, Homo sapiens
attatttaatgctgccgttgtagtgcaaaagcagctgtagatatgtaaatgagtggcacggctgtgttcaaatgaaactttatttacaagtgcaggtggcsgggcttacagcctatagtctgctgagctcctctccagagcctcttaatagtcagtgatacagcatttatcaaacctaccatgtgcccagccctgcgtgag

SEQ ID NO: 239458 - DNA, 201 bp, Homo sapiens
agggcagccaggggcctctgtgccccgctagcgggagggacgccgggtacatctcagcgcctgcctgcttggcttccgcccgaatcactccctcatgcatrattgttgcggcgctgtgaagtcctggagctgatgggtcgttggcagccagatcaggtgccccattggcatggcccccagcacgcagcggccctcagccag

SEQ ID NO: 239459 - DNA, 201 bp, Homo sapiens
tgggaaaggaaatcgcaaactggatctactattttttttcttggatgctctacctcatgcagaccccaaatggaacacacccggcctccctggactgtcargctggtggcctcgccttggggtagtgaacatgagaaaggcttccctttttcctgaaatgccccagagcaaccctggccctagttagagttgagatgcttt

SEQ ID NO: 239460 - DNA, 201 bp, Homo sapiens
ccaccttcatgcaggatgtgggaggtcccaggggcccccaggcagctcaggctggcctgccctctagtggggagcagagcagacagatctcccagcccagkgggggccagctgtggtggagcccgcctccccattctattcttggagaggaaaagcacagaaatacaggagtgaaggcacagactgggcagaggggccgga

SEQ ID NO: 239461 - DNA, 201 bp, Homo sapiens
ggaaatccaaaatgataatggtgtttcttgtgctcatgaatctgcagcttggctgggctcagctgggtggttctcccatgcagtcttgcatggcagtttakcatgatggtgacagagtagccagactactgacttggcagctcagggacccaggggtgtgtcccgagaaagacagcctctctggccttgcttccagagtcc

SEQ ID NO: 239462 - DNA, 201 bp, Homo sapiens
cagtgtgtctgggtgcggctgccccctgctgctccgtggcctggcacagagctggctcccgccccataccaacctctggtctgcggtttgcgctgccctcytcctctttcttctcctcggggtagcctcggacctggaggggcaggcccgcctcaaggctgtcctcccgggaggatggcctccagcctcgtcgcagctgcg

SEQ ID NO: 239463 - DNA, 201 bp, Homo sapiens
ccaacctctggtctgcggtttgcgctgccctcctcctctttcttctcctcggggtagcctcggacctggaggggcaggcccgcctcaaggctgtcctcccrggaggatggcctccagcctcgtcgcagctgcggcccagggcccctgaagccgtaggcccgggcccggaaggagagcttcatggaactgtcccggttgtcc

SEQ ID NO: 239464 - DNA, 201 bp, Homo sapiens
tgggttgtttccagagctgctgtcaggctggaacttggttcacccggatgcacagaacatcttccctgtctagaattcaagagcatgtgactcccgccccytaactgcataaccacagagggaaggtgactttggatgagtccagggcctgaatgagtccagagcacttgaacttacagatgggccggccaggctctttcc

SEQ ID NO: 239465 - DNA, 201 bp, Homo sapiens; identical to SEQ ID NO: 46712

SEQ ID NO: 239466 - DNA, 201 bp, Homo sapiens
accccctctttgtggctttttttttttttttttgaggtggagtctcgctttgtcgcccagcctggagtgcagtggcgcaatctcggctcactgcaacctcygcctcccaggttcaagctattctcctgcctcagcctcctgagtagctgggattacaggtgcgcaccaccacgcctggctaatttttgtatttttagtgga

SEQ ID NO: 239467 - DNA, 201 bp, Homo sapiens
gtcccttccccttgggccctacatttgttcctttaaaatagggccatctccaaggtccttttctacagggatggcttagcattctggtctggaattctttygggagattctctgcagggaggaaggaggatcttttccaggattaagtgatgctggtctgtgggtgggtatttttttatttgttttaatgtctggatttgc

SEQ ID NO: 239468 - DNA, 201 bp, Homo sapiens
gatgggcaaggatgcctttgggactgagctaatggccaaggagtggggcttggagaagggtctggcgtgggagagagatgggagatgggggtggggtgggrgcgcacatttactgaacttgttaaatcttgacaaatgccaggcctggccctcccttaagccagggctttggggcctggtgagggcaggacttgatgagtt

SEQ ID NO: 239469 - DNA, 201 bp, Homo sapiens
acttaggttttctttgcagcagtgcacagggagtattcataacccagccttgcaaatgaacactttctaccagcctcctggggagcaaacagaacttcacrtaggaggaagcgtccgtgtgcacatggatctattgaagggactgcctcagtttcaggcctgactccacgactgactgcctatgtgccccatgaccctcga

SEQ ID NO: 239470 - DNA, 201 bp, Homo sapiens
gaaacgtcagccctgttcgcttctcattgctgagttccagttccctggggcagtctgtctctataggtgtttatgcacactcaggggcgcgtgcacgtgtrggtctctccatatgtattactgttgtgctcttgcacattgcatgggactgtgtgtcttggagaaactccacatcgctgcttcatttggagaaagttttgt

SEQ ID NO: 239471 - DNA, 201 bp, Homo sapiens
gccccatgagcacagttcctgaacagctggatgtaaatagggtttcagttcccactcattttgaattcagctggaaagctacatttgagagaatactatgrcacttcccttttaaaaagtagcattcattttaggaagcaaagcattcaagagctgtgcacctccttctttccctcgcaaagtcactgtcttaaacacctt

SEQ ID NO: 239472 - DNA, 201 bp, Homo sapiens
actttagcactctgtggtcagagaaggcctctctaaggaggcgacattcagcaagaggggcctagagctctctccaggagctaaaggacccacagggtggrcggtgtccactttgtagaggccacacaccctggcctctaccataagccttataagcctctgccataagccctgggttccatgtggattggagggcaggca

SEQ ID NO: 239473 - DNA, 201 bp, Homo sapiens
tggcagtgaagttggagcatgagacttgtcctgagcctctgccctcccaactgtaaggtgggtgcagtgcacccgccctagggccaaatgataggattccycctccacccaagaggccacctcacctgccctcctacccgcccaaggcagggcctggggcctctgacacatctctgctgggagctgccacccatctttttc

SEQ ID NO: 239474 - DNA, 201 bp, Homo sapiens
tgcttggtttgtggttccctttcttggacttcagggatgtgtgggagcaccactgtttttgttttcacatcggctgttgtctgccacccaggctgagaccygccctttcagtgcaggggaggctccgcagagcaggattgtgcttgtggctcccctgccctggggcggctaagcgccagctgcagaccaggccgggtaggt

SEQ ID NO: 239475 - DNA, 201 bp, Homo sapiens
gtggttcccaagccctgtccctcacccctgtgtgtaccccttccacacccccagttcccctgtggctgatggagagggaccgaggcaaagataggtagggwtggggctctgcgcctgcaggtgagtcctgcctaggctcacctggtgctggtggcatggccatcatccctgggggtgccctctggggtccaggaaatgata

SEQ ID NO: 239476 - DNA, 201 bp, Homo sapiens
gctggggatcaagggtgagcctgggctcagggtgggtgtgtgcacggtgtgttcaaggagcaggaacccggtgatgaggtggaccgtaggaagtcacatgstgagaggaaggcccaggaggtacctctgttgcccgctcgcctggcttggaattgggcctctcctggaggcagttaggaatcaggtcaggaattttaagca

SEQ ID NO: 239477 - DNA, 201 bp, Homo sapiens
gccaaaaagtggaaacaacccaaattccttccaatgatgaatggataaacaaaatacactacaccatgccgtgaagtactatttcatcttaaagaagaacraagcactgccgcacgctgcaacatggatgcattttaaaacacgatgtgagcaaaaggagcctgtcatgaaggaccacacatcacatggcttcgcttgaag

SEQ ID NO: 239478 - DNA, 201 bp, Homo sapiens
tacaagcacatgttgattttgtgtaacccttttttcccctccccatacatattctagcatggtatactcagtgatcggccccttcttggagatctttccaygtcaccacagaaagcactccccgttctcttctgtggcagcatggtcttccaccatatggatcttcataagtgattcagtcccttcttgttggacttttat

SEQ ID NO: 239479 - DNA, 201 bp, Homo sapiens
atgctggggccagagcctgcccaaaaggcctgtgcccagaactctgggcatcgtttagtaggaaaggggaagtcagtggtgggctcttgagtttggcagcrcccccgtgagagctgggcgtatgcaggcggacgctgtagccatggcagcaaggtcggcggtggtagcaaagggaacttaactcccaacttgggacatctt

SEQ ID NO: 239480 - DNA, 201 bp, Homo sapiens
gtccagccccacagtaccctgtttacagatgacgtcaaagcagctacacgtgggtgactggctcggttcacttgctagaagtggggactctacctctaagwggggtgaatcccaggctagcacttgacccactgacagggtggaggggatgtggggaaagaagatgttcagtcagggttggatgcatgaagtgctgggtgg

SEQ ID NO: 239481 - DNA, 201 bp, Homo sapiens
gaagaagctctgtgtgtgatgccctaagagttacccagaccatctccctgttttgagggcagcaatgcaacagaaccgagtcacagaggagaacccatccrtcatgcatgcagttctggcgatcatgcagggtgttgcccggccacagggatcttggggttgacttagattctgcctgccacactgagtaatacaatggtt

SEQ ID NO: 239482 - DNA, 201 bp, Homo sapiens
ggaaagtctttattgaaccagaaaaaatggtcatggcttatgaagttaggattcaggttacaaaatttgtacagctctctgcgtgtaaatgtacgcgtggstaaaagtccacagtggtggggtagtagttgtaatgtcttgtcaatatgtacattttttacttttctgtactcttcggattttacacagtgatcatacacg

SEQ ID NO: 239483 - DNA, 201 bp, Homo sapiens
tcacagctcgcggtcaccaggctgcgtgcctcgccctggggacaccaaggctcagtggcttgtttacctcccgcagcagctcagagacagagccgcgcttratgccttggtgcctgccattccccagatgggggtcccccgttcctttctccatcctgacccttgtaaagcatctgctgtggaggtgaagccagccttgct

SEQ ID NO: 239484 - DNA, 201 bp, Homo sapiens
gtttgtcctgcatccccagggcatgccagcttcaggatctggaacttttaatgtcttcacaaacaaaacacaacatgtcattccagttttatctcatccargactgttcatagacctttaacacacgatgatgtcactgccatccaattgtttccatcctttcggaagcgcccaaatcccctacaaatccagccctgctca

SEQ ID NO: 239485 - DNA, 201 bp, Homo sapiens
tcttattttttttttgagatggagacggagtcttgctctattgcccaggctggagtgcagtggtgcaatctcactgcaacctctgcctcccgggttcaagygattctcctgcctcagcctcctgagtagctgggattacaagcacgcgccaccacgcccggctaatttttgtatttttagtagagatggggtttcactgtg

SEQ ID NO: 239486 - DNA, 201 bp, Homo sapiens
ggtgccgctgaagggccttttggagccaaaagcacaggctctggcatgtgggttcctgtctgggctcttgttagccacgtggtctcggacaaatcagtcakttgagttctgctggtgttctggaagatatgggtgatacctggttcagccacggggtcaggggtcaggatacctgggatgatgtctgcagagcacttagca

SEQ ID NO: 239487 - DNA, 201 bp, Homo sapiens
ccaccacgcccggctaatttttgtatttttagtagagatggggtttcactgtgttggtcaggctggtcttgaactcgtgatctgcccgtctcagcctcccmaagtgctgggattacaggcgtaagccaccatgcccggccctatttttctttttttctttctttctttctttttttttttttttttttgagatggagtctt

SEQ ID NO: 239488 - DNA, 201 bp, Homo sapiens
tgttaactgaacacacaggccctgatgcagtggatcctagagtcggctgggaagtttcctctgggtgtggcacgctgggttcgccttggtgctgacacctrtctccttctggagccaggtggtgatcaggattctagaatcctgttgggttcagtacaggaggctgttgtcatccccagctgatgctgctgtggccatggg

SEQ ID NO: 239489 - DNA, 201 bp, Homo sapiens
gcttgatcgatcgcccgtctcagcctcccgaagtgttgggattataggcttgagccactgtgcctagccagcctattttctttttcttttttgttagtctygctctgtcatccaggttggagtgcagtggtgtgatcttggctcactgcaacctccacctcccaggtttaagtgattctcggacctcaggtgatccttcca

SEQ ID NO: 239490 - DNA, 201 bp, Homo sapiens
actgcaacctccacctcccaggtttaagtgattctcggacctcaggtgatccttccacctcagcctcccaaagagttgggattacaggtgtgagccaccaygcccagcccagcctattttctttaagattttaaagtcctaacattcgtcatgggatccttgaaaagaaaaggaattatggccttgccactagaggccttt

SEQ ID NO: 239491 - DNA, 201 bp, Homo sapiens
cgtatgtggagactgaggctcagagagggtaagtgactttcccggggtttcatagccgatcaccctgggggtggggttcaaacatcagtttgcacagtgcygcgatctcaggtcactgcaacctccacctcctggattcaagcgattctcctgcctcagccttccgagtagctggagtcacaagcgcacgcctccacgccc

SEQ ID NO: 239492 - DNA, 201 bp, Homo sapiens
tttttgcggggggttttgctatgttggccagtctggtttcaaactcctgacctcaggtgatccacctgcctcagcctcccaaagtgctgggattacaggckcaagccaccgcgagccacagtgatatgtcgagttcactaacgtttagctttcaggtgctccctagcctttctggagatgcacaacagttcagtcacagag

SEQ ID NO: 239493 - DNA, 201 bp, Homo sapiens
tagcatggtatactcagtgatcggccccttcttggagatctttccacgtcaccacagaaagcactccccgttctcttctgtggcagcatggtcttccaccrtatggatcttcataagtgattcagtcccttcttgttggacttttatttagttactaatttttggcgattacaaacagtgcagcaatgtgtgtgagtgcat

SEQ ID NO: 239494 - DNA, 201 bp, Homo sapiens
ccactggcattgagccaggctctgccatgtgcccctcagctctcagtgaggggccctatggggaccgcaggagcagagccccagcacagggcatgaggaasgatggtgtgacatcacagctcgcggtcaccaggctgcgtgcctcgccctggggacaccaaggctcagtggcttgtttacctcccgcagcagctcagagac

SEQ ID NO: 239495 - DNA, 201 bp, Homo sapiens
gtctctacagtttgttggccaaaacaagacccaaggccagctaacattcaaggggtaagaaaataaactttaccccttggcggaggtgtcaaagtcattgsaaagggcctggatacagggagggtcaagccctgggaacatgtctgcacacagagtgtgtgatccgggtctgcgcgttggccggcagcccatagacctttc

SEQ ID NO: 239496 - DNA, 201 bp, Homo sapiens
gaggggctcatggtctgatgctgagcatggagcaggcttcagtggaagccattattcctgcctcttgatgaggaaggcacttgagctgctcttggtgggtrggcaggagtttgccagctgaggaagggtgcctggcagggggatcagtttgtgcaaaggcagacttaggtcaagccttggcatttggagattggggtccct

SEQ ID NO: 239497 - DNA, 201 bp, Homo sapiens
agatttatttttctttagataaagttcatacagaatatgttacagtcaggagttctcagctttcaccaaaaggtcagaagttattgcagttgtgcccagtkgataggatggaggaagggaaacttctagaaagctgcctgtgttcagagaaggaatcgtcaatgtttaaagttgtggggctgccctgcaaaggatgttcca

SEQ ID NO: 239498 - DNA, 201 bp, Homo sapiens
tcaaatgatccacttggcttggcttcccaaagtgctggcattacaggcgtgaaccaccgtgcccggcctcggcttcttactaggtggatgactgtgggtgkgtttcagctcctctctgggccttaatttccttgtcagtaagaggtgaccttgtgctcatgcataggagggggtcagcacatgcaaacttcccttctgtgc

SEQ ID NO: 239499 - DNA, 201 bp, Homo sapiens
cttggcttggcttcccaaagtgctggcattacaggcgtgaaccaccgtgcccggcctcggcttcttactaggtggatgactgtgggtgtgtttcagctccwctctgggccttaatttccttgtcagtaagaggtgaccttgtgctcatgcataggagggggtcagcacatgcaaacttcccttctgtgcagggcagaggcc

SEQ ID NO: 239500 - DNA, 201 bp, Homo sapiens
ccggcctcggcttcttactaggtggatgactgtgggtgtgtttcagctcctctctgggccttaatttccttgtcagtaagaggtgaccttgtgctcatgcrtaggagggggtcagcacatgcaaacttcccttctgtgcagggcagaggccatctctggaaggaagaagggggaaagtggccccttactcacctgtgtcag

SEQ ID NO: 239501 - DNA, 201 bp, Homo sapiens
aggtggtatcagagtaaacctccacagagtccagaggtacagagattcacgatcttagaggagtaacttttgaaaacctttgagccagaagaggcctttgygtgtaagggtttgcagctcagagtggctggccttgcagggtcacacatgtagagctttgggctgacagcttcgcagcccagaagtacacctgtggcctcc

SEQ ID NO: 239502 - DNA, 201 bp, Homo sapiens
gggtagcctcggacctggaggggcaggcccgcctcaaggctgtcctcccgggaggatggcctccagcctcgtcgcagctgcggcccagggcccctgaagcygtaggcccgggcccggaaggagagcttcatggaactgtcccggttgtcctcctcctcctcctgcccctccagccgcttctcagccgtcagctccttggcc

SEQ ID NO: 239503 - DNA, 201 bp, Homo sapiens
tctctctctctctctctccctcctctctccccccggccccctccctgcttccctggtctcttttacattggcttcattctcaggcccatgtggtgcaaggygagtcctcaccctcaatccttattctcagccaggcactgtggcgttccttaggtgtgtgatctcatttgatccgcattaacagccctgggagggtggtgg

SEQ ID NO: 239504 - DNA, 201 bp, Homo sapiens
gggcctgagggttcgcacacagagtccagggctaggacgttgttcccaagaagggagtggagagtacctacccccacaagtctgagccccaggctggcctwccctgtgctgggcacctctgcttggggttccagaattctcggaggcagctgggtgggagtgctggtgggaagctccggaagggaggctgctcggggcctc

SEQ ID NO: 239505 - DNA, 201 bp, Homo sapiens
gccagctgggtgggtggacatactggagggctgatgtcctatttgtgggctggggtttttccgggccttgggaaatgctgcctgagttcctggagaaggaygacatctttcctgccccactgtcgctgtcgctgtgcagaaccttggtgttttgacactgatgtgttctggagctaaacaatctcgtgttatgtaaacaca

SEQ ID NO: 239506 - DNA, 201 bp, Homo sapiens
tggttagagtatgggtcccttatggttcctttctgaaacgagtggggcaggtgagggcaaggcctgctcagagccccttgccccgggcctgcttaactgcygtgggtgcctctgcttggtgttccagaattttcagaggcggctgcatgggagtgctggagggaagctcgggaagggaagccgttctgccctgccttggtt

SEQ ID NO: 239507 - DNA, 201 bp, Homo sapiens
cacataggcgcctgggtgccaggggtgtgcattgcatcctgggggtgggagccacaatgcctcaccctgcaaggactcaaggaggggctgctggggctggyggcccaggacggtcccgtgccagccttgggggaagtcgtgggatggtgacagacagccttttccagaactcggcctgaggctcatggttctgcaattctt

SEQ ID NO: 239508 - DNA, 201 bp, Homo sapiens
ttcagctctgagttcctcagtgcctaagcagcacgggaagtgccttctctcctcccttgtcccacgagggcacctgagagggccactgtgtccttacgccygatgcccatgagagatgctagctcctggggagctcctgagactgtgcaccttggattggaacctgggctcgtagctctgtgtcctacatgtatgcatcgc

SEQ ID NO: 239509 - DNA, 201 bp, Homo sapiens
tgctggtggcatggccatcatccctgggggtgccctctggggtccaggaaatgatacttgagggcagccacacatcatggcaggaaagaaggaccttgtcrctgataaggcttccaatcttagcccctcggggggctgggccagtcactctcccctgagttgttcactcatctgggaagtgggtcgccagtgcctcggacg

SEQ ID NO: 239510 - DNA, 201 bp, Homo sapiens
ctggcagcttcaaacccacccacttcgtatcaattagcattcaagttgctttaacagcagacctaaaatcatggtggcttaaatgcgacagaacttccttyctctctgatgtaaaagcccagaggaaggccatccagcacgggcacaggggctgggaccctggctccttctagctccttattcttctgtggtctgcccatc

SEQ ID NO: 239511 - DNA, 201 bp, Homo sapiens
tcgaggaggtgccgctgaagggccttttggagccaaaagcacaggctctggcatgtgggttcctgtctgggctcttgttagccacgtggtctcggacaaakcagtcatttgagttctgctggtgttctggaagatatgggtgatacctggttcagccacggggtcaggggtcaggatacctgggatgatgtctgcagagca

SEQ ID NO: 239512 - DNA, 201 bp, Homo sapiens
agtgtggcttgccctgcgcaccactgctcggctctcagcagtcctgaacgagctggcacatgcatttggaacaagtttgtgaacagagtccctctgctgcycagccagccgcttcccatcttggggggcagccatcagttccagtggcctggagcctttccagggggttctgtgggactgaacagagacagtcttcctcgc

SEQ ID NO: 239513 - DNA, 201 bp, Homo sapiens
gtcacttgcccagggtcaggtagaaagtggcaaggtcaggatcatagctcggaggggctttggtgacagctgatggcactgtgggtggtgtgagggttggygatttcagggccaccttggcaggaggtcatcgtctgggattgcctctgacacagctggtgccgtgtgacgatgagactgctggccagcagatgctacggg

SEQ ID NO: 239514 - DNA, 201 bp, Homo sapiens
gaggccctggaatggccgtgtgtgtatttagggcggtagcagctctctggaggtatagtctggagaaatggctctgccactggcaagacatgggctcgtgsgcaggtacttctgtgcggcgtcagtgtcctcgggtgtagcgtggggactgaaccagggcatggttgggccgtctccaccccctggctgtgtagacacggt

SEQ ID NO: 239515 - DNA, 201 bp, Homo sapiens
atgcggtgcgggttgttggtaacgatcccagagcccagagaataggggcagtgttcctgggggagagccctcacccggcccctggggtgctgagcctggtragtcatgaggggtgtgggccacagaacgccggggagagtggctgggggttagggggtgtggagaggctgccaccagcaaacagcaagagccgtgggggtc

SEQ ID NO: 239516 - DNA, 201 bp, Homo sapiens
ccttctctgctctgctctggggggatttttcttggcatttccaagttctgggggctgcatcctcccctgcggtattgagatgagtgggagagaatgcggtrcgggttgttggtaacgatcccagagcccagagaataggggcagtgttcctgggggagagccctcacccggcccctggggtgctgagcctggtgagtcatg

SEQ ID NO: 239517 - DNA, 201 bp, Homo sapiens
ctccactcttaagttgagaggcgaaaaaattcagaggaaagagcccagaacagatttatttttctttagataaagttcatacagaatatgttacagtcagkagttctcagctttcaccaaaaggtcagaagttattgcagttgtgcccagtggataggatggaggaagggaaacttctagaaagctgcctgtgttcagaga

SEQ ID NO: 239518 - DNA, 201 bp, Homo sapiens
tctgatcataacgcactgcagcatcaaactcacggcctcaagtgatcctctcgccttagcctcccaagtagctgggattataggcatgtgccactgctctyggcttacagatgtgaaggagtgaggcatcttgaaatagaaaatgttcctgcattacctgggtgggcctggtgtaattacaaggaggcaggagggccagag

SEQ ID NO: 239519 - DNA, 201 bp, Homo sapiens; identical to SEQ ID NO: 46713

SEQ ID NO: 239520 - DNA, 201 bp, Homo sapiens
aggattctcccattttacagataagaaaacagaggcacaaggtacaggggggtctggttccatgttctgctctcaggggctcacccacctcttccgctccygcctacgcccccgaattgtgttcatctaagcctctgaatgctgcgaagctcagtcctgggcttctaaccacttcctggcaccaccacggttgaaaagtgg

SEQ ID NO: 239521 - DNA, 201 bp, Homo sapiens; identical to SEQ ID NO: 46732

SEQ ID NO: 239522 - DNA, 201 bp, Homo sapiens
ccaagcagagcagcaggcctgttctcctgcaccccacaggaggcaccttgggccatgggtgtccagcagcacgtgggtgggagaggcctgggagagggccyctccagagaggggctggctctggagtaataaccgcaacagctgcaagcgctgatgacaccgtgagccaggcctgccccgacgcctcacttcgtcctcacg

SEQ ID NO: 239523 - DNA, 201 bp, Homo sapiens
cagtgtggggcactgtgagccagtgtggacagggagggttcttccagagaagccaagagaagggccacccagatggggtgggactatggctgagcctggcrgagactggtgagggagcctggtactgaggagaggcccagggctctggcagggcagagctggttccccgggagatagctcagtgtgtccgccttaccatag

SEQ ID NO: 239524 - DNA, 201 bp, Homo sapiens
tcaagtgatctgcctgccttggcctcccaaagtggtgggattatatgcatgagccacctggcccagcccacacttggctaattttcttttttttgagatgragttttgctcttgtcgcccaggctggagtgcattggcggcaatcttggctcactgcaacctctgcctcccaggttcaagtgattctcctgcctcagcctc

SEQ ID NO: 239525 - DNA, 201 bp, Homo sapiens
acacttggctaattttcttttttttgagatggagttttgctcttgtcgcccaggctggagtgcattggcggcaatcttggctcactgcaacctctgcctcycaggttcaagtgattctcctgcctcagcctcctgagtagttgggattacaggcacctgccaccatgcctggctaatttttgtacttgtagtagagacagg

SEQ ID NO: 239526 - DNA, 201 bp, Homo sapiens
cttttttttgagatggagttttgctcttgtcgcccaggctggagtgcattggcggcaatcttggctcactgcaacctctgcctcccaggttcaagtgattytcctgcctcagcctcctgagtagttgggattacaggcacctgccaccatgcctggctaatttttgtacttgtagtagagacagggtttcaccatgttggc

SEQ ID NO: 239527 - DNA, 201 bp, Homo sapiens
agtagagacagggtttcaccatgttggccaggctgttctctaacctctgacccaaagtgatccgcccaccttggccttccaaaatgctgggattacaggcrtgaatcactgtgcctggccgatttttcccattttcttgctgttgtaggtacagctgcattgggcatctttgtgaatataaatgtcttccttccctttctg

SEQ ID NO: 239528 - DNA, 201 bp, Homo sapiens
gcccaccttggccttccaaaatgctgggattacaggcatgaatcactgtgcctggccgatttttcccattttcttgctgttgtaggtacagctgcattggrcatctttgtgaatataaatgtcttccttccctttctgattccgttacgtgtaggtaaaagtttttatcagttattgatgcataacaacccatcctaaaaa

SEQ ID NO: 239529 - DNA, 201 bp, Homo sapiens
taaaaactactggctttaagcaataagcattttttcatcccacagttctgtgggctttgctgcgtagctctggtcttgctaggaatcccttgcgtgtgtgyggtcagcttgcagtctggtaaggggtctctgccctggggcttgacctttggctaaccgaaggcgctgggcatgacctggcctccttcttggctttcctca

SEQ ID NO: 239530 - DNA, 201 bp, Homo sapiens
gttctgtgggctttgctgcgtagctctggtcttgctaggaatcccttgcgtgtgtgtggtcagcttgcagtctggtaaggggtctctgccctggggcttgrcctttggctaaccgaaggcgctgggcatgacctggcctccttcttggctttcctcaggctgctgggcttgttcctgacactaacagtggatgtttccaag

SEQ ID NO: 239531 - DNA, 201 bp, Homo sapiens
catcacctcttgactgccttcctatggaagccagcaacctcttcctatggttgagctgaaatctacttcataggaagggttccttctgcctggaaggtttkatattggacaggactgtcaaccgtgtggagaggggaggaacagggtgctggctcccccggcttctgggctggattgacccagggcgtgtctaccccacag

SEQ ID NO: 239532 - DNA, 201 bp, Homo sapiens
gtacttgcccggtacttgctgaaggggatgggggttctggatccaggtgcacccctctcaggatgcccctgatgggcctcgggactctcagccctcaagtrtggggtcagcacgctcaggggaagctataaatcactcctcattctagccgcctggctccaggatgtttgtacaggtgcccctccctctactccccagccg

SEQ ID NO: 239533 - DNA, 201 bp, Homo sapiens
aggacttgatgagttttcctgtcgaccaaatattccgccggatcgctcaggaccctcggttatttttgctgtctgagccctcagtgccttcctttgtccakcagggacaaggacccctgcccacccagtatatcttcttggggagaagatgaaacgccttggtgtatggtaggccaggccctggccttgactgtgagcctg

SEQ ID NO: 239534 - DNA, 201 bp, Homo sapiens
tgctgttactaacagtcctgccctgggtgtctctggacctaaatctttggggacctaagtcacatctcaggctgtttcattgggttatggtctagaagtgrcttcaggattttgttgctaaagaagaaggggagaatgggggacaggttgggctgcagctagtcagctgtgtccagcacacttgggccctggacttagaac

SEQ ID NO: 239535 - DNA, 201 bp, Homo sapiens; identical to SEQ ID NO: 46700

SEQ ID NO: 239536 - DNA, 201 bp, Homo sapiens
agctgttttcaggtgtgcctagtgggatggggatgcctgagatggggtttctagcgtgtgacaggcgcagatttggtgccctgcttttcttcaccaggacraagggaatcttacccgcctcctagtcacccggtgctgccgtcctgccgacactgttctctccccgtgtgttcggggtcagccgccttggccccccttgct

SEQ ID NO: 239537 - DNA, 201 bp, Homo sapiens
ggaggcctttcttcccagcacaatgtgcacagtatgctgtcttgggtgcctcggtccctgcaggtcctggtggccctacaccagtgcttgtccctggctcrtagcaatcaataccccagaacaaagggccgagacagtggtagccttaagttcttccaggttaggaggcgtcctggagaggctatgctgagccgaatcctc

SEQ ID NO: 239538 - DNA, 201 bp, Homo sapiens
gtttccagattgcatccagacccaggatttcctgttgttgttcttcgtgtgtgtttcttcattagaacaactcctgcatcctctgcagagctgtttacagrcatctattggcctccctccgtgccaggcctcgtggtgcatgtggccaagtgatggccaagatggacaaggtcttgtcatttggagctttagtctgtgagg

SEQ ID NO: 239539 - DNA, 201 bp, Homo sapiens
ttacccgcctcctagtcacccggtgctgccgtcctgccgacactgttctctccccgtgtgttcggggtcagccgccttggccccccttgcttccttggggytctcaccccgttccttggccaactccctgctgcacattcctgcttcccaccaggaagtggccccggacacagaggcagcctgctcctggcatcccctgct

SEQ ID NO: 239540 - DNA, 201 bp, Homo sapiens
gctggtctgggggagacatcctaggctggcctgtggaggacgttccctctcagcctcctctgagccatgggcataggtgagttttcagaaaagcccatacygacggtgattcagctctgcttcttgcttccttctgtcttattcttaagtcacccacagggcagccacctgccagtgtctgtcctccaatcccctgctcca

SEQ ID NO: 239541 - DNA, 201 bp, Homo sapiens
tgggtcaaacttgcttctgctcctgtctagcaagttagcgagcttctctgagcctgtttctttgtctgtaggataaaaaaagcacttcttaacttctgtgrttggtgtgtcagttgaaataattattaatggtataaagttccatagttcactgcctgctagatttatttacaattactacaaataactcatcgtaggccc

SEQ ID NO: 239542 - DNA, 201 bp, Homo sapiens
actgagttaaagatttgctggcagtggagctgctcgaaaggatgttctagtggcttctgaaggcatctctaaggcacgttctggaaacctttggaacagtrgcagtgtcttgggataagtagctttccaggaggaccctttggagaacactcactgccccgctgtggcttgttcaaatcagctgcacatttctttcagcaa

SEQ ID NO: 239543 - DNA, 201 bp, Homo sapiens
gatgtgtcctcttggcatccctcctccggggactgcctgtggccatccacatctcctggctggtgtgccgcccggcatggaggggctgcagtgctgcggtygccctctcagcccttcttcccctagatgcctcttctctttccatggacacatgcagagcgtggatactttggaaacgtgcaggtgttcattttcctccga

SEQ ID NO: 239544 - DNA, 201 bp, Homo sapiens
tctaggaagcagtgggctggctgtgggaggaacacccctgcctctccctgtgcctgcagtgggtcccgtccccacgctgtgactgccaggtgtggacacaygctcgtcaagtggtgaagaacgtggagccggtgggctcaccggcttggggcctggctgcctcactgggaagcttggtggccctgggaggtcattgagtgt

SEQ ID NO: 239545 - DNA, 201 bp, Homo sapiens
tgcctcccctgtgtcctccctggggccgctctccttctcccacccctcccaggggcccacatcctcctgcctccaagttccggcttcggtgctctgcaccrtgtcttcccgggtccctgacacactctccatctccttcctccctgttaaaaggctttggttttagaggctaaaaaatatgggtccaaattctgccctgtg

SEQ ID NO: 239546 - DNA, 201 bp, Homo sapiens
ttgggctttgccctgaaggctgggggagccatagcagttgtgtgaggttggctgctgggtggaagccaggggcttgtgggattggagggggaggctgctgygattgtccaggcagtggtggtctagatcgtgcagtggtggtggatatcaactcttcagagtccatccaggtctgaggactcattagcaacctcggctatt

SEQ ID NO: 239547 - DNA, 201 bp, Homo sapiens
caccaggctgcgtgcctcgccctggggacaccaaggctcagtggcttgtttacctcccgcagcagctcagagacagagccgcgcttgatgccttggtgccygccattccccagatgggggtcccccgttcctttctccatcctgacccttgtaaagcatctgctgtggaggtgaagccagccttgctagctgctgaggtgc

SEQ ID NO: 239548 - DNA, 201 bp, Homo sapiens
gaggactcattagcaacctcggctattcctcgactactcaggatgttgtctgtatggggccggtggcctcagcactcctggttcctcagcatcgccacgcmctctgtatccacggactcagaatctgtgttttaacaagacccccaagaggtgccagtacacacggcacattcatgtttgcaaacactggtttagggaacc

SEQ ID NO: 239549 - DNA, 201 bp, Homo sapiens
gcgtcattgtgaagaccaagtgaagcagcagtcggatctgggacagaggttcctctagggaaagactattatggtctggggcaccctggaggcacgcgccstggctggagggtgggtgagtctgtggctggtgggttcggctgaggcaggggagtgcgctcttcagcccagccccctggcctgggccctgccgtgctggag

SEQ ID NO: 239550 - DNA, 201 bp, Homo sapiens
gaatgcagtggggctgggcagagggtgccctggctgtcgtggggtggaagcttggctgacccagtggacatcagccaggaccacattaggcccagctttgsctgggttccccacagctgtgcccaacggcatccctggcctccacctactggatgccagtactactctcgtcttccaagaatgtctgcaggtacttccaga

SEQ ID NO: 239551 - DNA, 201 bp, Homo sapiens
ggctgcactgccacctggcgagctctgtttccaggcagtgggtcaggcctgctttgggggctggcatgctgtcctccctcacccatgtcaaggcccgtgtrgccatgtgctgacatgtgcttgatgtgacctgggagtcagagcgcctggcttcctgctccaggcttccgtggtgccgtaaggacctcaggtctgggggtc

SEQ ID NO: 239552 - DNA, 201 bp, Homo sapiens
cgaatgccagtgtgcccaccctccccatgctgggcttagcgtgggtgcctggtgacagtgtgttaatctccccttgacttctctgtgacctcagataagtmcctctcagttctgggccttgcttataaaagggttcttgggctctcttctgtgtaaaaagtggggaatgaggtggagagcctgggggacaggggagtcatg

SEQ ID NO: 239553 - DNA, 201 bp, Homo sapiens
ggtgctttaaaatcaaggctcaaacccagggtcctgaagagggccgagcagcagctgaggtccgagtgcacccggcctgccagtgctgcccaggagtggcrcctcccgtcatccctcacgcccagcaaggacccagtgtgacaagagcatggagtctggacctggcagagctaggtttgcctccttgctcttctatgacta

SEQ ID NO: 239554 - DNA, 201 bp, Homo sapiens
tcccagctcaggaccctgttgctttagggtcaagtccaaactcctcagctggtccgtctcctgctctctaccttgtcctcacttttcatgttgagactgcygtccgccccagccctgccaggcccccagcaggcccgtgaatgtgctggactccctcaccccagacctctgcttttgctgtcccctctgcttggagtaccc

SEQ ID NO: 239555 - DNA, 201 bp, Homo sapiens
agatggctatcgtgttcaaccaggagggcctgaacgccatccagccaccctgcgtggtccagaatttcatcaaccacaacgccgtcctgtacaaggtgttygtggttggcgagtcctacaccgtggtccagaggccctcactcaagaacttctccgcaggcacatcaggtaactgctcttctcaccatcttgggctgagca

SEQ ID NO: 239556 - DNA, 201 bp, Homo sapiens
cgtgttggccagggtggtcttgaactcctgacctcaagtgatctgcccgcctcggcttctaaaagtgttgggattacaggcgcgagccaccagccttgacrtagttgtaaacaaagttgtggttctgttgtaatctgttcccacaaacacacttagcattctcttagagcttccccctttgttaaatgtctacttaggctt

SEQ ID NO: 239557 - DNA, 201 bp, Homo sapiens
tttctcccctggcccatgcctgtggccctttgtggttgacatcaccaacctcagcaggctcctccccagcccccaaccctgtgccccccgcacccacactyctctgctcctttattgctggtcagccccacgcctctcctttgctcagccacatggccgccacttaggagcctctgggagggtggggagaatgtggctgct

SEQ ID NO: 239558 - DNA, 201 bp, Homo sapiens
agggagctcgctcacggacaggtatggatggaaggtagtggagaaagcgggcaagcctgtgccaaggcgtgacgctgtggagccaggagtccttcaacacrgactctgggcatgtagggccggtgcagatgggtggctgtggggagcccctggaagcctgggctgagagcctctaggaagcagtgggctggctgtgggagg

SEQ ID NO: 239559 - DNA, 201 bp, Homo sapiens
cgaggaacagagcaagtttctctatctgggaagatggaagaaagctttccacaggtggtgacccttgagaggtatgtttgagggcgcagggagctcgctcrcggacaggtatggatggaaggtagtggagaaagcgggcaagcctgtgccaaggcgtgacgctgtggagccaggagtccttcaacacggactctgggcatg

SEQ ID NO: 239560 - DNA, 201 bp, Homo sapiens
aatattatctgattgtaactgaagttctttgattcccttggttgatgctgaccatggttctggtctgtcacctttataaatagtattgtgataaacatccrcttttgatactgtttgggcaagcctgtgatgattatttctttgggttacataagtaagttgtatatattgtttttgtagtctgtaggaggaatatgtact

SEQ ID NO: 239561 - DNA, 201 bp, Homo sapiens
gctcgaggaacagagcaagtttctctatctgggaagatggaagaaagctttccacaggtggtgacccttgagaggtatgtttgagggcgcagggagctcgytcacggacaggtatggatggaaggtagtggagaaagcgggcaagcctgtgccaaggcgtgacgctgtggagccaggagtccttcaacacggactctgggc

SEQ ID NO: 239562 - DNA, 201 bp, Homo sapiens
aaatgagggttgcttaagacccaagtgtctgctgatgggggagctcaactctcccaaggagccgttttagaaaagttaggaaagaaggagtgaggaaatgscctcaacacactaggactgaatccaggcaaaacagagaccgcagggaaccgcagcctcagaggacagctttgcttgggctggtggtcggtgcctgtcgcc

SEQ ID NO: 239563 - DNA, 201 bp, Homo sapiens
aatctcggaagcatcagtcctgctggccgggctctcagttgaggcagcagaggccagggatgttcagggcaggacagggcctcagggagcacgcccccacrttcacactgccccgtcccctttcctgcacccccacagccaaagccagctccacatcaggcccacaggcctactcgcagccctttctgtgccatctcctct

SEQ ID NO: 239564 - DNA, 201 bp, Homo sapiens
gtgtctaccccacagcatcctgacatgccagaggctggaccttaggaagtgccttccgggcccttcactgcaggcctgctcaggggctgctcctcaggtcytggggcccctggggcaatggcatccatccttttggcctcctggggtcaaggttctgagggaggattagggcagcaggtggttgggtggagaggcagctct

SEQ ID NO: 239565 - DNA, 201 bp, Homo sapiens
accaagatcgcaccactgcactctagcctgggcaacagagtgagactccatctcaaaacaaacaaataaacaaacaaactatgagagagggaccctttgtrggcccccaatagtaataagtccccagcctgggccaaatcccagggcttcagtgataaagattccatttcaacaggcagagatgagaagggagggcattcc

SEQ ID NO: 239566 - DNA, 201 bp, Homo sapiens
cagaggctggaccttaggaagtgccttccgggcccttcactgcaggcctgctcaggggctgctcctcaggtcttggggcccctggggcaatggcatccatycttttggcctcctggggtcaaggttctgagggaggattagggcagcaggtggttgggtggagaggcagctctgtccagaacaaccctgttccagaaatcc

SEQ ID NO: 239567 - DNA, 201 bp, Homo sapiens
cgagagagctcggggattactggtgttagcctctcatttatttgggtcgtgctcaggcccctggaatcctctctgaaactggagagtctctcgggtagccratgaagcgctgcctgttttagggtcaggtgcctgggcacctctgatggacctcaggatgagcccaagtgtcagtaattatcacccagctccccggtttgc

SEQ ID NO: 239568 - DNA, 201 bp, Homo sapiens
tatcacccagctccccggtttgcagccaaggcttccaggcctggagcctttggtctccagcacccagttcccccacatcccttccctgggcttctttcccrccattcccatcagggacccctgcggccatgctgggctgtacccagtgccccttgggaatctgcgggtaccgtgcaaagctgtgctgtgctcctccccatc

SEQ ID NO: 239569 - DNA, 201 bp, Homo sapiens
agccaaggcttccaggcctggagcctttggtctccagcacccagttcccccacatcccttccctgggcttctttcccgccattcccatcagggacccctgyggccatgctgggctgtacccagtgccccttgggaatctgcgggtaccgtgcaaagctgtgctgtgctcctccccatcaactcctcattgactgttgaagg

SEQ ID NO: 239570 - DNA, 201 bp, Homo sapiens
ggggacacacacacttatgctgctattttaggagtgtggggtaccttgaggataggtgctagaacaattcaggctttcctgagcaggcttctccctccccsagtgagtccaagggagggaaatgtcacgggaatttctgcctcccttcctgcagtagcctaccttgctcattaggctgatactaaatgactttgcattctt

SEQ ID NO: 239571 - DNA, 201 bp, Homo sapiens
aagggaacagtgtggccatcaacacacatgggtgacggggcttagtcatctgtttaggagccccaagtcctggggagacatcctgggcttctgtggggtayggtgtgggccctgccctctgcaggcagggaaaggggaccataacttggggctttttccccagtgcctggtacctggaggtgccaaagggtcttgttattt

SEQ ID NO: 239572 - DNA, 201 bp, Homo sapiens
tgtgctggctcctgtcattcagctggtgtttacccagggctgctgtcgcccagggctgctgtgtgtcccagctggtccagatgctgatgcagcttgagctycactgccatgccctgcctggggagagctcacccctgtctggaggaggcggaggacagagcgggcggtcagcgggctcctctgtgaggtggtgacactgga

SEQ ID NO: 239573 - DNA, 201 bp, Homo sapiens
gtctctgggcctgggaggcatctggctccgttcaggggcctaacagctctgtttttggtttgttcgtcacatcacagaatcaaataatctagaacttaagrggcagaaaggatgttataaatgaattattctagcccacacatcttacagatgggaaactgagatacagataacttaagtgactttcagaaacacacataa

SEQ ID NO: 239574 - DNA, 201 bp, Homo sapiens
cctctgtgccccgctagcgggagggacgccgggtacatctcagcgcctgcctgcttggcttccgcccgaatcactccctcatgcataattgttgcggcgcygtgaagtcctggagctgatgggtcgttggcagccagatcaggtgccccattggcatggcccccagcacgcagcggccctcagccagtgccctcctgtcct

SEQ ID NO: 239575 - DNA, 201 bp, Homo sapiens
cagaaacacacataaagtgaatggcagttctaggacttgtaacccaagtttcttgactctgcatttgtttcaacttgcacagtgccccaggacccacgcgytcgggttaagttagccaggtgtagctgggctgcaaaagattatctgacagtgatgggcaggcagaagccttggctgactgtcaggactgttacataggtt

SEQ ID NO: 239576 - DNA, 201 bp, Homo sapiens
ctgcccagaccacagggctgaggtgaggggacagcgtgccccatcgaagggtctggaatgagggaggacagggtgccagggaggtagggtctctcaggggmggtgcttggtttgtggttccctttcttggacttcagggatgtgtgggagcaccactgtttttgttttcacatcggctgttgtctgccacccaggctgaga

SEQ ID NO: 239577 - DNA, 201 bp, Homo sapiens
tgctccagggctgggaagagatgcagagcctctggtccagctgtggctttgagagaacaaacaaccagtgaggaccatgggttgggaggaacagtggaaakggagctgcagtctcagctctgccactctcccttgcgaccttggcctcgctaccactgcctttcccctttccaaaaagatgggggctggatgaagggtcca

SEQ ID NO: 239578 - DNA, 201 bp, Homo sapiens
acagtcattggttaaacagacccaattccaagagggagaaattagcccaaacaagaactacagggactgcagtccccatgcaagtccaaaacccagcaggkcagtcattaaatcttaaagctccaaaataatgtcctttgactccatgtctcacatccaggccacactgatgcaaaggatgggctcacaagacttgggcag

SEQ ID NO: 239579 - DNA, 201 bp, Homo sapiens
tggtcctgagcatcccctccctccgctgccatgaaggctggcctctgagcagcttgagccttgcccagcctacacaggacaaagttgcactcacctcctgkctcctctcagtgtgtaatcatctaaagtggatctgggaaggaagctcctgccccgaaggatgccggaagagaatgcacacttggccacactggttcttct

SEQ ID NO: 239580 - DNA, 201 bp, Homo sapiens
tttaaaattctgttcgtatgttgtctttatatcgggccatttcagtttctggcactgttaataggaggaaaatccaaattaccaaacaatcagcaagtaamccaagatgccgcagggcaggcgggcaggggtgacacggggctggagcctggcccaggaacccggcagcactcggggagtgtttgcagagagcctgccagg

SEQ ID NO: 239581 - DNA, 201 bp, Homo sapiens
acgcatacagcaactcatttctctctcatgtgccctccctcccctcctttctcactcctgccccagacccactctctctgcccatgaggctgggggctgtrgcctagccgcagctgtgcccatggacttttctccccttgcaattgttcctcaccccagggagaggaggaaggagtggtgggctctggaggaggtgggtgg

SEQ ID NO: 239582 - DNA, 201 bp, Homo sapiens
cctcatctgtgagggtaataatttagcttagggttgcgagcatcaaatgagggaatttgctaaagggtccaggatagtgcctggaattctgtcagtggcgrcggccgctgctgtcgtcgtccctgtggagtgagtgagtgggtctctgcccatggatgcctctctattcagggacctttggcctttgtagatttagtgttc

SEQ ID NO: 239583 - DNA, 201 bp, Homo sapiens
ccaaggtaggcagggacaccagacaggcacagaggagggccctcacgcagcctggtaaatcaggaaggctccctggaagacgagtctggttagtggcaatragcccatctacccaacagatcctaactgagaggcaaggcctgacagagctcaacccagttcctaggtccttgtgcttccttctaaaacacctagttgcta

SEQ ID NO: 239584 - DNA, 201 bp, Homo sapiens
ccaggtgcactgcagtggcctggcgtttgacactggaatggctgattttgaatcctggcaaagccccccagctggttgtgtttgaccttgagccagtcacrttgcctctcagaaacttggtttctttatttataaaatgggaataaaaacagagacgttttgctctgtaaaccatggggctgctctgagaatcaaatgcaa

SEQ ID NO: 239585 - DNA, 201 bp, Homo sapiens
cttgtgcttccttctaaaacacctagttgctaaaatgaccaagtgccaagcacggcactatgattacttcccccgtacacaggagccttggtcgtctgtgrtctggggagtggggctggggctctcctgtgggccaggcagaaggcctgcatcagccttgctaggtgctgtcacctgggggcaccttccactccgatccaa

SEQ ID NO: 239586 - DNA, 201 bp, Homo sapiens
agccaggctgcccttgttagctccaggatcccactcttggtgtcctttagctggcaggccctgcgagggaacatgtgcttacaatttgccatggagacggygctgcccttcttcctctgagtggtgataaaatggtacggaagctcacccacccagcagattggtaattctaagagacttgtgaaaaatacacgaggccct

SEQ ID NO: 239587 - DNA, 201 bp, Homo sapiens
gtgaggatggtggtgaacttggtggcaggggccttgggacgacccaggctggagctcggctgacagaggcccggcccaggagtggagggaggtggctggcrtggggcctccagaggactccagcaagtccctctgcagagccagccctctcagtgggaaggtggtttgaggagtggctgggagtggaaggcatggctgttc

SEQ ID NO: 239588 - DNA, 201 bp, Homo sapiens
aattccgtggcctcagtggagcgtgccaggtaagcattttacgtaaaagcaaagaaaagagatggaatgaagtacacaggggaaataggaagggatggaaygggggttttagaaagggccagaagcaagattctgctcttaaagtagctgactgtcctggcattctggggtgaaggtatccatagcattgctactcagagt

SEQ ID NO: 239589 - DNA, 201 bp, Homo sapiens
ttggcccacacaggaattttacattctttcctttgaatttgttgccagtgtttaagctggttgccccttaggccccaccattctctgttgtcccacaccaycagcctcatggtttacatttgccccatgggcgcttcagtttgtgaccctccatttgctcctaggaccccctcctcacctcccccccaacccctcccacct

SEQ ID NO: 239590 - DNA, 201 bp, Homo sapiens
ctcgagggtctgtgcttgctaaaaataactctagattattcttttgctcattaagtaatatgtacttgtggaaatcttgggaagtcaagataggctcacaratgaaaacccagagataattattgaagcaatttttacataaaatatgctcctttttctatatgatgtgcattcaggttaggcttttctgtgtccctagtt

SEQ ID NO: 239591 - DNA, 201 bp, Homo sapiens
gactttattcatgtcctttgagcataaaaatggcacacacactgatgcattaaaaaaacttttttttttaattaaactttttttagagatggggttttgcyctgtcactcaggctggagtgtagtggtgcgatcatagcttgctgcagctttgaactcctgggctcaagcaatcctcccacctcagccttcttagtagctg

SEQ ID NO: 239592 - DNA, 201 bp, Homo sapiens
gcctgtgctgcaggctggggccgcaggagactggggtccctgctggttctgcctctcctccctgcatggcctcggccgggctctgcttctttctctgtctkacagctgataggatctcatgggtcccgtttcactctcaccttctgtaaatccctgattcttcagaaaacggggctagaaaatctcccaggtgtactcgca

SEQ ID NO: 239593 - DNA, 201 bp, Homo sapiens
cagctgataggatctcatgggtcccgtttcactctcaccttctgtaaatccctgattcttcagaaaacggggctagaaaatctcccaggtgtactcgcacrtctgtttcctttcttagcctttcatcttgaagtcagcttggtgaggttgccctgttcatactgcagaatccagggatctgaggcctctcgccccctgggc

SEQ ID NO: 239594 - DNA, 201 bp, Homo sapiens
gaaagaaatggaaaaacaccagtctcctgtttctgccctgtgctttccagttgaccactcatttggagatgtttctgtttgcttgtgttccccccgccgcscccccccgcccccggctgctgggccatccctgcttacctagcctttttctgaaggtcttgaagcccagagcacttaggaaagtctgagcactaaattgcg

SEQ ID NO: 239595 - DNA, 201 bp, Homo sapiens
cagatagcctaggtgctgggctgcatgtgcggccttgtgggagttccaccgagcagagcttctgatgggggttcgcagcctgggtgggctagctagtgacygagctttgatggtaatgaaccatcgtttgctgcttttattcattcactagtttttcatctgctgtgggagaaggctgtgggagtgtgcagtccgaaagaa

SEQ ID NO: 239596 - DNA, 201 bp, Homo sapiens; identical to SEQ ID NO: 46704

SEQ ID NO: 239597 - DNA, 201 bp, Homo sapiens
gttgtggggtcttggagggtttgtcctgcttgtcctgtctgtattttccatgtcagccctcctcctgccccatctccagagtgctacagggaggctcgagkgtcctctggtgatatgccccagggtggacaagaggatgggggcagtggactcaggtgctgaagttgttgcttttgtctgtgttccctgcctcacagctga

SEQ ID NO: 239598 - DNA, 201 bp, Homo sapiens
tcctgttcttcttctcttagaagttcccatgtgtctgctctgggggtgacagatggcctgtttgggatcccaggcctccctggggatggggggtgcatacygcagattgaatgcttctgcctgtggttttacgggaatttaattagggctcatcttagaggccatttgaaacctgggttgaaattgagtagtctggataca

SEQ ID NO: 239599 - DNA, 201 bp, Homo sapiens
aaagaagagcttgattatgtaatttaaaaatggatgatggcgaatctctaatcgccgtggtatttagataccattggatccatttaaaagagaaacattamcagttttatttttaaatgttaatatttacagtatgttggaaattacatcctctacaagtatttagacttatgatgagaaatttttcatatcaacttaaaa

SEQ ID NO: 239600 - DNA, 201 bp, Homo sapiens
acccaggaggtcgaggctgcagtgaactgagatcgtgccactgcacttcagcctgggtgacaaagtaagacactgtctcaaaaaaaaaaaaaaaaagaatratatttgataagagatgactagattactgtaattcttggcaaataattataaaggaatccaaagaatttgctgtggtaaatctctttccattctattttt

SEQ ID NO: 239601 - DNA, 201 bp, Homo sapiens
cttgaacccaggaggtcgaggctgcagtgaactgagatcgtgccactgcacttcagcctgggtgacaaagtaagacactgtctcaaaaaaaaaaaaaaaaagaataatatttgataagagatgactagattactgtaattcttggcaaataattataaaggaatccaaagaatttgctgtggtaaatctctttccattcta

SEQ ID NO: 239602 - DNA, 201 bp, Homo sapiens
aattgcttgaacccaggaggcggaggttgcagtgagctgagatcatgccactgtactccagcctgggcgatagagccagactctgtctcaaaaaaaaaaaatgtaacttttattgttactttccctatagttttgagggtagcgtatatgttcattgtagaaaatctggaaaacacagggaagtatgaaggaaaaaccaca

SEQ ID NO: 239603 - DNA, 201 bp, Homo sapiens
gacagatttcgagagaacacagctagctctccacgttggacctcgcctgggtgcagtgtttctgtgtatagcaaatgcacacatggctgcctgtgtatgcrtggtggatttggagtctgggtgatgggtttgcacgctgcctctgaccttgaccagccttgtgaccctggggagtcactgtgctctgggcaagtcgcctgt

SEQ ID NO: 239604 - DNA, 201 bp, Homo sapiens
agctgagagcaaaactgccacatcccggtccttaaggagcttccagtttagtgggaagacagaatctgtcttggatggactttgagtctcttccagcaccrcaaggcgtgtttattaaagagctgggcattggactcgcctgcacaggtacctctgccagctctgcttgctgatgggccagtgacactcacttcctccccc

SEQ ID NO: 239605 - DNA, 201 bp, Homo sapiens
tgtctctacagtttgttggccaaaacaagacccaaggccagctaacattcaaggggtaagaaaataaactttaccccttggcggaggtgtcaaagtcattkcaaagggcctggatacagggagggtcaagccctgggaacatgtctgcacacagagtgtgtgatccgggtctgcgcgttggccggcagcccatagaccttt

SEQ ID NO: 239606 - DNA, 201 bp, Homo sapiens
gtgtgtccgccgggctttctttaaaatgcaccgagtgcaacccagtcctccttgtgtaaactttctccaactggccagatggtttgcttctatttaaggcrgtgagagtatttcctacggcctgctgccccctggcctttgttttgccccgggaaggccattcctcgaaagggaagctgagcaggagttgcacttcccagc

SEQ ID NO: 239607 - DNA, 201 bp, Homo sapiens
caactggccagatggtttgcttctatttaaggcagtgagagtatttcctacggcctgctgccccctggcctttgttttgccccgggaaggccattcctcgmaagggaagctgagcaggagttgcacttcccagcagcagggattgtcggcgcccacccccatggcaggcctagaacctttgccaagtgcctctgcctggag

SEQ ID NO: 239608 - DNA, 201 bp, Homo sapiens
tcactacaagctccgcctcccgggttcacgccattctcctgcctcaaccttccgagtagctgggactacaggtgcccgccaccatgcccggctactttttytgtagttttagtagagacggggtttcactgtgttagccaggatggtctcgatctcctgacctcgtgatctgcctgtcttggcctcccaaagtgctgggat

SEQ ID NO: 239609 - DNA, 201 bp, Homo sapiens
cagcggcccccttccctggaccacagtgcgacaagtggtgtcacgctctcagaagttgtgcagtgcacagccagctcgatctcacatggcaggcccggtgragggaggatctccaaccccgtggcagaagggatgcatccccaggtgttcttcacaagtcccactccactcaccctggctcaaggctcctctaggggagtc

SEQ ID NO: 239610 - DNA, 201 bp, Homo sapiens
tctcgaactcctgagcttaagcaatccacccaccttggcctcccaaagtgctgggattacaggcgtgagccaccgcgcccagctgggaaagagtgtttctyctctttcaaagggttggctatttcgccctggccccttcttccccgcttccagatattttgtgggagtatcaggagctttggcagctgtcttgtgagcgtg

SEQ ID NO: 239611 - DNA, 201 bp, Homo sapiens
tgagtcagatccttggggcattctggcttcaggtgtaggtagactcaggcgacagtccaatagggcctggtctgtctgtctgtctgtctctctctctctctgtctctctctctctctctctccctcctctctccccccggccccctccctgcttccctggtctcttttacattggcttcattctcaggcccatgtggtgca

SEQ ID NO: 239612 - DNA, 201 bp, Homo sapiens
gttggctatttcgccctggccccttcttccccgcttccagatattttgtgggagtatcaggagctttggcagctgtcttgtgagcgtgaggcgacaggcaygcggacaaaggtctaccatggcgagcatggcagaatagaaacttgaaaggagtatgggttcttgctgatgtcaacctgttgaaacaccctggagactcca

SEQ ID NO: 239613 - DNA, 201 bp, Homo sapiens
ctgagtcagatccttggggcattctggcttcaggtgtaggtagactcaggcgacagtccaatagggcctggtctgtctgtctgtctgtctctctctctctctgtctctctctctctctctctccctcctctctccccccggccccctccctgcttccctggtctcttttacattggcttcattctcaggcccatgtggtgc

SEQ ID NO: 239614 - DNA, 201 bp, Homo sapiens
tggctatttcgccctggccccttcttccccgcttccagatattttgtgggagtatcaggagctttggcagctgtcttgtgagcgtgaggcgacaggcacgyggacaaaggtctaccatggcgagcatggcagaatagaaacttgaaaggagtatgggttcttgctgatgtcaacctgttgaaacaccctggagactccact

SEQ ID NO: 239615 - DNA, 201 bp, Homo sapiens
agtagcactaatggttgagatttctctcagccaagtgtctgtgagtgggtttgtgcatgcctgggacctgagcaatggccacaagaaagtcctgtttggarcttgtggtcagcctgggcgatgaggtcaagatgccctgagagtcaggagggaggggtgcggcttgactgccccagaccacactgggaggtttgcagaaga

SEQ ID NO: 239616 - DNA, 201 bp, Homo sapiens
gatgtattggttcctgagtcagatccttggggcattctggcttcaggtgtaggtagactcaggcgacagtccaatagggcctggtctgtctgtctgtctgtctctctctctctctgtctctctctctctctctctccctcctctctccccccggccccctccctgcttccctggtctcttttacattggcttcattctcag

SEQ ID NO: 239617 - DNA, 201 bp, Homo sapiens
aaaaaaagcacttcttaacttctgtggttggtgtgtcagttgaaataattattaatggtataaagttccatagttcactgcctgctagatttatttacaawtactacaaataactcatcgtaggccccaatcagcggtagatggtattactgtggtggtggtggtggtatgtaggtggtgctgtggtctgggtttcagaca

SEQ ID NO: 239618 - DNA, 201 bp, Homo sapiens
ggatgtattggttcctgagtcagatccttggggcattctggcttcaggtgtaggtagactcaggcgacagtccaatagggcctggtctgtctgtctgtctgtctctctctctctctgtctctctctctctctctctccctcctctctccccccggccccctccctgcttccctggtctcttttacattggcttcattctca

SEQ ID NO: 239619 - DNA, 201 bp, Homo sapiens
cacaaattgctatagtacatctttatttgttgaatctgtcagagttgtttatggcactgaagcctgggctccccctgtttgtggactgttgccatggcaayaccaggctctggaggaggggcactgctctgaggtggtatagaaggttctggaatgggctggtggtgtgaagtagagctgtggctgctgcactgagaccca

SEQ ID NO: 239620 - DNA, 201 bp, Homo sapiens
agctgggactacaggcacgtgccatctaattggtttttaagtgctgtcagtacgtttcagggagactctccacccactttgcgctaatcttcccccatccwggtgatttgctgtagagtctttgttatggggcaggggcagcatagcctacttccagcctctcagtctgcggcagtgctcttcagggtcaccaggggagtt

SEQ ID NO: 239621 - DNA, 201 bp, Homo sapiens
agcctacttccagcctctcagtctgcggcagtgctcttcagggtcaccaggggagttgaattaaaaggccactctgacctggcctctgtggtttcctggcyggctgcatggaccagccctcaagcgctgcgggaggcagagctgctgactggcagggacaggggcctgaggtcttgcccagaggggtaactggcctctgct

SEQ ID NO: 239622 - DNA, 201 bp, Homo sapiens
gatgtgatgctgtgagatggtagcagaggtcagctcattacatcggttacttttatgtgggaggagaaggtgaaccggagccctgatggggcacacatccrtgcccagggctggtgcccagcttgctggagcccagggctctgcagagccgggggccacgtgttgtgtgcctggggtgatgctgccccctggtgtcaggtg

SEQ ID NO: 239623 - DNA, 201 bp, Homo sapiens
agagcgctttccaagtctttggggcatctgggagattgtgcccggcccctttcccagttctgagtgagggactgaaccctgggatgggagatgtagggctstttcctgtaccaccagccccttggggacctgggtttggagggagggtggtggtgcgggcaggtattatattgaatatagagtgagccagaaggccggtga

SEQ ID NO: 239624 - DNA, 201 bp, Homo sapiens
tagggtttctccaggatggtggctagcacaccagtcagggatacgggctggacatttagggttggcacgaagtggactctgtggattgtccttcacacggkaggcattcaggtcaggagaatataccatgtgctggcccttcaggtctcgatctgaccaccctttccaacaccctgggttcctctgtgtccttcctcttgg

SEQ ID NO: 239625 - DNA, 201 bp, Homo sapiens
gactgtctctcatatgtttgcccttctcttgtagcatccgtggatgggtgttgccattgttactgtggtatttaccgaacagtcatcatacagaattatargaactgtgtcccaaccaccccagttgccctagaagtgacaggatccccttgcagctttgcagacatccacagggcaccaggtggcaccttgtggagtgtc

SEQ ID NO: 239626 - DNA, 201 bp, Homo sapiens
ttagtagagacagggtttcaccgtgttagccaggatggtctcgatctcctgaccttgtgatccgcccacctcggcctcccaaagtgctgggatgacaggcrtgagccaccactcccagacttgtttctgtcttttttgccgttgttgtagagacagggtttcactgtgttggccaggtttggctgtaactcctgagcttga

SEQ ID NO: 239627 - DNA, 201 bp, Homo sapiens
acggggaccatcccagagatatagtggggacagtatatccacctggcacaagggtttggctgggaacgatcttgggttgtgcggtcagagaagagttgggygcggtggctcatgcctgtaatcccaacacttttggaggccgaggcgggcagatcacttgaggtccggagttcaagaccagcctggccaacatggcaaaac

SEQ ID NO: 239628 - DNA, 201 bp, Homo sapiens
ggactacaggcgcctgccaccatgcccggctaattttttgtatttttagtagagacagggtttcaccgtgttagccaggatggtctcgatctcctgacctygtgatccgcccacctcggcctcccaaagtgctgggatgacaggcgtgagccaccactcccagacttgtttctgtcttttttgccgttgttgtagagacag

SEQ ID NO: 239629 - DNA, 201 bp, Homo sapiens
tatatccacctggcacaagggtttggctgggaacgatcttgggttgtgcggtcagagaagagttgggcgcggtggctcatgcctgtaatcccaacactttkggaggccgaggcgggcagatcacttgaggtccggagttcaagaccagcctggccaacatggcaaaaccccgtctctactaaagacaaaaaaattagccag

SEQ ID NO: 239630 - DNA, 201 bp, Homo sapiens
gggattacaggcgtaagccaccatgcccggccctatttttctttttttctttctttctttctttttttttttttttttttgagatggagtcttgctttgtygcccaggctggagtgcagtggcgcgatcttggctcactgcaagctccgcctcccaggttcatgccattcttctgcctcagcctcccgagtagctgggact

SEQ ID NO: 239631 - DNA, 201 bp, Homo sapiens
ctgccggcaaggtgtgccaccacgtcccatgtactcagagaccccagcggactctctgtgcagacggggcatgttagcattgcagggacgtgccctctggkgtggacactgtccaccagatcggcagaggttgggggacaagcttctcacagattccaggggtacccggggaagccaagtacagcaggggcagaaaatagc

SEQ ID NO: 239632 - DNA, 201 bp, Homo sapiens
tattcatggtcccttccttgtgtctggatttcagctttcctatctctgcggagggggttggaccagattacacgtgggtgactcagatatacctgggcctscatgcaatctgtttggcccacacaggaattttacattctttcctttgaatttgttgccagtgtttaagctggttgccccttaggccccaccattctctgt

SEQ ID NO: 239633 - DNA, 201 bp, Homo sapiens
tgctgggattacaggcgtaagccaccatgcccggccctatttttctttttttctttctttctttctttttttttttttttttttgagatggagtcttgctytgtcgcccaggctggagtgcagtggcgcgatcttggctcactgcaagctccgcctcccaggttcatgccattcttctgcctcagcctcccgagtagctgg

SEQ ID NO: 239634 - DNA, 201 bp, Homo sapiens
caggaaggccccgggttgccctgtggttccgcccagccacttgggagggtccatgggggaactgctgtgggagccattttcagaggaagtgagttcaggcrctccccagcaaacacactgcctgagagggcaagacagccttcccccatgcctgatcctgtccatacgcgacctcaaactgtcacacagtgggtgtcaccc

SEQ ID NO: 239635 - DNA, 201 bp, Homo sapiens
acacctcgagatgtaggcaggatccttccttttttacaggggagaagacggggccttggtgaggtgaagtagttcccagggccttccatccaggtgatggrgccaggaccttgcttctagttctcctgcctcccaagcttggctgtttcctacagctgcatacggccccacccagagggaggcagtcaccagagaaagaga

SEQ ID NO: 239636 - DNA, 201 bp, Homo sapiens
agcctcccaaagtgctgggattacaggcgtaagccaccatgcccggccctatttttctttttttctttctttctttctttttttttttttttttttgagayggagtcttgctttgtcgcccaggctggagtgcagtggcgcgatcttggctcactgcaagctccgcctcccaggttcatgccattcttctgcctcagcctc

SEQ ID NO: 239637 - DNA, 201 bp, Homo sapiens
cacccagagggaggcagtcaccagagaaagagaatggcagtgacccagagggggcacagagctacttcctgctcagggagtgctgggcagcctcctgcggsggggagaggggggcattgaatgggcccttcagagaaggctgggagctcaccaggtcctgaggaagaggagggactgcgtgcaggaagcctcaaggcacga

SEQ ID NO: 239638 - DNA, 201 bp, Homo sapiens
gagagcttcagggcagttgtctcaccactgggagctcttgcccacagtgtgctgggtcacgtacctctcagggtcctgggctcgtgagtttcttcttcttmttattttttttttgagatggagacggagtcttgctctattgcccaggctggagtgcagtggtgcaatctcactgcaacctctgcctcccgggttcaagcg

SEQ ID NO: 239639 - DNA, 201 bp, Homo sapiens
gtctcctcttttcctatcaacactgccctgttgaccatgcaaggggcatggagatgccattgtcccggggtcagagggttggcagggagaattgctgtggytccggggcttcctgtgtaggccccagggattgggactggcctggctcagagcaggagccacccagggagcaggggaacagccttccagggcctccctggt

SEQ ID NO: 239640 - DNA, 201 bp, Homo sapiens
cctgggaccgatctggccagatagacacttgtggcgttttcctcagcagtttacgctgcaaacccatggactcctcagcaaccattcttattagcctggggtcactctgggcgctcttggagcccaagccagaaactgggactctgggtttgttcaggcggcctgctgtgctttggcagggctgtgttgcttcctctctgc

SEQ ID NO: 239641 - DNA, 201 bp, Homo sapiens
ctcagtgtctgcttctcccttgcttggtgggtcattatgtgcccacttagccataggctttcactgagtccccaccttcatgcaggatgtgggaggtcccrggggcccccaggcagctcaggctggcctgccctctagtggggagcagagcagacagatctcccagcccagtgggggccagctgtggtggagcccgcctcc

SEQ ID NO: 239642 - DNA, 201 bp, Homo sapiens
gaattgcttgagctcgggaggtggagattgcagtgagccaagattgcaccattgcactccagcctgggtgacagagctggactctgtctcaaaaaaaaaaagtatgttagtggatcaataactgcctggtggtttttggaagcctttttcatgtccctatggctcagccaaagccacttgtgactctggaatgctctgggc

SEQ ID NO: 239643 - DNA, 201 bp, Homo sapiens
gaacccgggaggcagaggttgcagtaagtcgagatggtgccactgcactctagcttgggtgacagagcgagactccatctcaaaaaaaaaaaaaaaaaaaatggccctgctcttaatgtttgggcaaagaatgacccgaatggtccggcccggggtgggttgtttagctgaatgtccggccttgtaaaaatctgatctcag

SEQ ID NO: 239644 - DNA, 201 bp, Homo sapiens
atccgcccgccccagcctcctaaagtgctgggatgacaggcgtgagccactgcacccggctgctttgttactattatatcaaataccagtttggaaaactscctcaaggaatgctctcttcggattggaaagcaatgaatatagaaagagtacagcttcagggcttaaataataatctatgcaggctttgtaggagtttga

SEQ ID NO: 239645 - DNA, 201 bp, Homo sapiens; identical to SEQ ID NO: 46721

SEQ ID NO: 239646 - DNA, 201 bp, Homo sapiens
cagatttcaacagagcctcagtgcctggctgagaatattatgagatgttctgtgcaagagacggctttcttctaagcttcagaatcctggggcttcttccrtgcatggctttgctctgggggcctcggcagcccatgcaatggaggggatttggcatttgcagactgagtgtcctctcaggggcaaggccagcagccgtga

SEQ ID NO: 239647 - DNA, 201 bp, Homo sapiens
cagactgagtgtcctctcaggggcaaggccagcagccgtgatggcagaaggacccatccagaagtcactgtcttggattatcacttgttgacctcagcctyaatctcctcatctgtaaaacgggaaggggtcagcctagagacactgcagggcccttcccttcacctctgaggtctgcagtcacctcctccttccctcagc

SEQ ID NO: 239648 - DNA, 201 bp, Homo sapiens
ttcttcctgccccagaaggattccggagtccagggagttcctgggtgagaagcacccaccgcagttgccaggtgtgcagtatgggcacggtctcggcagcygggtgccgaggcccactggggacccatgaacgccttcccagttcctctgtcacctccttgctttccagaacgtcatcagatcacttgctttgagggcccc

SEQ ID NO: 239649 - DNA, 201 bp, Homo sapiens
cccatgccagcactggcgctttccgataggtgtgctgagtgcaggcagcggaggcctgtgttggtagctgctctcggaattcagagccagaggggactcaygtggttgcgtggtgtgcatctctggaaggattataggtgctaaattctccatctcagcattaaaaatgtacttgttatttaggttatatttttacatggt

SEQ ID NO: 239650 - DNA, 201 bp, Homo sapiens
gctgagcttggaccccaggaggcaggcaggagcagcagagcagcctctctggggagcccgcattgtttagggtgtgagttcatttggaaacagcatttttkgggaaggaagactggcctgctgggccacagggccctcaccctcacctccttgggggtctctgtgatggcaggcaagtgggggtctgatcagaactcctca

SEQ ID NO: 239651 - DNA, 201 bp, Homo sapiens
acctccttgggggtctctgtgatggcaggcaagtgggggtctgatcagaactcctcacttgtgcccggctctgcgccccagctgctcctagccatgtcccrcagctgctggcctcagcacctttgcctcccctgtgtcctccctggggccgctctccttctcccacccctcccaggggcccacatcctcctgcctccaagt

SEQ ID NO: 239652 - DNA, 201 bp, Homo sapiens
  misc_feature (1)...(201): n = A,T,C or G
cagcacgccgtcattgacatcaatgccttcccaggtgagtggcggccaggccacctccactgaccggcctccagagactgtcctcaggtgaccaggcaggngaggcggggtgactgaggccagaaagccagctttctccctcaccacgaggtccggggaggtgcagccccgagaagcctcagcctcacctgcgcgatgggc

SEQ ID NO: 239653 - DNA, 201 bp, Homo sapiens
tatgggcccctaggaaccgggagtggcccaggaagcaggactgagcgcagctctaagagccggtgtcggaggcacacatagctggggtctcccacgtgcasgggcgccctgggatgtggaccagtaaccactgtttgacacctgcctcctcccctgagggcatcccccgctgggtgcctgtcgtgtgccaggcctcccagc

SEQ ID NO: 239654 - DNA, 201 bp, Homo sapiens
gccgggcagaggcctggggaggagccctgggctatggagtctgttccctgctgccagctgggccctaggaacccactggcattgagccaggctctgccatgtgcccctcagctctcagtgaggggccctatggggaccgcaggagcagagccccagcacagggcatgaggaacgatggtgtgacatcacagctcgcggtca

SEQ ID NO: 239655 - DNA, 201 bp, Homo sapiens
tgctctcctgcctggcctgggggtgtctacccacacgtcaccctcagtgcagataccaggtgtccagagtctgtgtctcagctagagttcctttctagacrtgccaagtacctgccttgtgggtgaacggcctcactaatttctctctgcttttctctccccaacccatagtttgcaaaaccagagtggctcatggcacca

SEQ ID NO: 239656 - DNA, 201 bp, Homo sapiens; identical to SEQ ID NO: 46715

SEQ ID NO: 239657 - DNA, 201 bp, Homo sapiens
ccatgagcttggaggctctgcggatgcaaaaagtgagggcggttcggaagcaacgattcacagaggaggccggggtagggtggcgcgcagaatgcaaagcrctaagtacttctgctacagggctgcggggcagggctgaggggcgtggagagctgtggacacaggaggtgaattctcgggtatttaactaaagtacagatt

SEQ ID NO: 239658 - DNA, 201 bp, Homo sapiens
ccttaggtgtggtccccacctcactctcacattcgcctccggggctatttttactcgtgggtgaggctgtgccgcagagattccggccctgtgtcctgtgrgaggatggttattgcagtcagaggacttgtgctgggagaccctggcagcaggttaggggtagccttagctgcccaggcctcatcctcactgtcccttccc

SEQ ID NO: 239659 - DNA, 201 bp, Homo sapiens
cgtttgcagccccgtcgccagggccggccagatctgggtgggcctgggcagcgctcgctgggcggtgccgatttctggcaaggggggcgcagtctggatgkaatgggcgcggcttagcagggcggaatgggcgtggcccgaagaagccccgccccgtcccgcttagacaatgccccggagccgccagaccgtcgcgcccct

SEQ ID NO: 239660 - DNA, 201 bp, Homo sapiens
tgccgggcccatgcctgcaccagacagagagtatggggagccggtatttgggcgcggagctaggcggggtggactttgggacatagacggggaaccgggtsctggagccgggagtagtgccagcgccccggaaccacgccccctgttaccccgcccctcgcatttcgttttagacctctcccagtccttcgggactcggtc

SEQ ID NO: 239661 - DNA, 201 bp, Homo sapiens
ccccgtcgccagggccggccagatctgggtgggcctgggcagcgctcgctgggcggtgccgatttctggcaaggggggcgcagtctggatgtaatgggcgmggcttagcagggcggaatgggcgtggcccgaagaagccccgccccgtcccgcttagacaatgccccggagccgccagaccgtcgcgcccctgccccatcg

SEQ ID NO: 239662 - DNA, 201 bp, Homo sapiens
gccagcgccccggaaccacgccccctgttaccccgcccctcgcatttcgttttagacctctcccagtccttcgggactcggtctggtttatactaggtcgygctaggggcagcgtgaccagccagggcggagagaggatgcttaactccttaggctcgaactcctcccttcctacccacctctctcccttctcgttcgggt

SEQ ID NO: 239663 - DNA, 201 bp, Homo sapiens
cggactcactccctacatcgtcgagtcccgcccccctccagtcccctccccaggttcagggcggggccggtcggtgagtcagcggctctctgatccagccmgggagaggaccgagctggaggagctgggtgtggggtgcgttgggctggtggggaggcctagtttgggtgcaagtaggtctgattgagcttgtgttgtgct

SEQ ID NO: 239664 - DNA, 201 bp, Homo sapiens
ctacccacctctctcccttctcgttcgggtattcaggacttccattccccagcccctgcctctccagctttctccttctgtcccataacccctgcgggtcscgggctggacttccagtccctgcggtagcgagcagctgagggttaagggggcggggctgctgcatttttggggagtgagcgcatcctagtggctgccaag

SEQ ID NO: 239665 - DNA, 201 bp, Homo sapiens
gtccgcaaagccctgcaagacctggggctccgaattgtggaaataggagacgagaacgcgacgctggatggcactgacgttctcttcaccggtgaggctgsggggaggcataggtcttggcacagggaagtagagtttgggagactcggccgtctggagccttgtttctaactcactcccgccctcaaacctccgcggcct

SEQ ID NO: 239666 - DNA, 201 bp, Homo sapiens
ttttactcgtgggtgaggctgtgccgcagagattccggccctgtgtcctgtgagaggatggttattgcagtcagaggacttgtgctgggagaccctggcarcaggttaggggtagccttagctgcccaggcctcatcctcactgtcccttcccccacatccttgacaggaaggaagccggagacagagagatgaatcaccc

SEQ ID NO: 239667 - DNA, 201 bp, Homo sapiens
cgggaggagagaaaaaggccctcccacaagcaggagaaaacccacagaagaggaagcacaagaggaaaccaccaactgctggtttccagcagcacatcacrtcactccaccccactcctcccccaagtctctccctttctttaagtttcaagctctgttttagttctgtgttcttgcactccaccatggttttctggaact

SEQ ID NO: 239668 - DNA, 201 bp, Homo sapiens
ctacccaatggacacactccaaaatggccagtgggcagggaatcctggagcacttgttccgggatggtgtggtggaagaggggatgagggaaagaaatggrgggcctgggtcagatttttattgtggggtgggatgagtaggacaacatatttcagtaataaaatacagaataaaaatcaagtgtttttacgcaatggggg

SEQ ID NO: 239669 - DNA, 201 bp, Homo sapiens
atgcctgcaccagacagagagtatggggagccggtatttgggcgcggagctaggcggggtggactttgggacatagacggggaaccgggtcctggagccgsgagtagtgccagcgccccggaaccacgccccctgttaccccgcccctcgcatttcgttttagacctctcccagtccttcgggactcggtctggtttatac

SEQ ID NO: 239670 - DNA, 201 bp, Homo sapiens
gattctggctatccccttcccatccccatgcccttaccggttcctggtccaggtcccctggaatcttgggctcttcctcctttactggcctctggggctcrgttttcacaagtggagctatgtgggggggacagagctgaaggatggagagaaggtgaccaacgtgtctgctcccagcaagggctcagactcaggaattga

SEQ ID NO: 239671 - DNA, 201 bp, Homo sapiens
gaaggtgtctctcagaggaagtttttggatggcaacgagctcaccctggctgactgcaacctgttgccaaagttacacatagtacaggtgtgtggttattkcgggaggagaggatgaccactggagtggccctttaaggagctcccacatgggcttcccctgacaaccactctaaagacgatttctttcttagggtggttt

SEQ ID NO: 239672 - DNA, 201 bp, Homo sapiens
aagaagccccgccccgtcccgcttagacaatgccccggagccgccagaccgtcgcgcccctgccccatcgtagtatatgagctcgcctacacaaggacccscgctaaaagccagagctcccagtccccgaggcttgaagacggggactcccttctccaccaactctgtcctcggggggtggggccccagccgagatcacag

SEQ ID NO: 239673 - DNA, 201 bp, Homo sapiens; identical to SEQ ID NO: 46750

SEQ ID NO: 239674 - DNA, 201 bp, Homo sapiens
ccagctaatttttgtatttttagtagagacagggtttcaccatgttggccaggctggtcttgaactcccgacctcaggtgatccacctgcctcggcctccmaaagtgctgggattacaggagtgagccactgcacccggcgatataaatgagtttgtaaaatgtaaagtgttcactttgggaggccgaggctagcgcacca

SEQ ID NO: 239675 - DNA, 201 bp, Homo sapiens
tgtttcgtgccggtccgccggtccgccgttgcgctgttctgaggtctacgaagcgtttgcagccccgtcgccagggccggccagatctgggtgggcctggrcagcgctcgctgggcggtgccgatttctggcaaggggggcgcagtctggatgtaatgggcgcggcttagcagggcggaatgggcgtggcccgaagaagcc

SEQ ID NO: 239676 - DNA, 201 bp, Homo sapiens
tgtttgaagataccccatcacccctcccgcgcccctgaatacctcccttcgctctccctaggacttcgccgtctccactgtgccagtctcgggtccctcccacctgcgcggtctctgcggcatggggggacctcgcactgttgtggcaggcagcagcgacgctgcccaaaaggctgtccgggtgaggagggggcggggcca

SEQ ID NO: 239677 - DNA, 201 bp, Homo sapiens; identical to SEQ ID NO: 46763

SEQ ID NO: 239678 - DNA, 201 bp, Homo sapiens
gcatgtgtgccgtgtgttcctgcctcactttccccttttcatgccttattctgaccatgctacgttttcttctcagttgaacagacacggtagaagactckcccattttggaatgtgaccgtctgtccttcaggagaggacaccagggtgggggtgaaggagacactactgcccccacccctgacagcccccaccccatgg

SEQ ID NO: 239679 - DNA, 201 bp, Homo sapiens
ataaatacttttgaataaattaaatgatacttgggaaaataccttctatgacaccattcttgaattagttacttcatttgtcactgaagacaagcttactkcaccaagaatttgaaccaataaggtaacctgcagtgtatttactaaccagattctttgagcagggaggcagaatacaatagagaatgagagatgtttgca

SEQ ID NO: 239680 - DNA, 201 bp, Homo sapiens
acccggcagacagatgtggaggcttcttcctctggaacctggggggaggggttactcatcagacctgcccccgcccccccaagtacccccagagccgtagscccaaggcctgtgtttaagaagctcggagacgggaggcgggaagggcggagacactccaggctggaggaaatggcgcaagcagagacgcaggtggaggac

SEQ ID NO: 239681 - DNA, 201 bp, Homo sapiens
ctggctgtaacctcaccagccgtactgcttgagatatgttgctttgcttcgcttctgtcaataagatgagaataacggtacctactccttagtattaaatsattaagtatgttaacagggagagggccaaacgtttgttgttttattacacagcaggacatcaggtcttacttttgtggctccccatctcaaagacgggga

SEQ ID NO: 239682 - DNA, 201 bp, Homo sapiens
ggctggtccttctccctccatctctgacatcccctgttgtttctccctttggttccgtctttttttaatatcttcagcaagagatgaggcctaacctaacyctgatcctttatcagatgatagatttgaaaaaaaattttttttgaggggggtgataggatcagaggtttaatttttttaatgtaaaattcgagaaaaggg

SEQ ID NO: 239683 - DNA, 201 bp, Homo sapiens
ggctgtaacctcaccagccgtactgcttgagatatgttgctttgcttcgcttctgtcaataagatgagaataacggtacctactccttagtattaaatgaktaagtatgttaacagggagagggccaaacgtttgttgttttattacacagcaggacatcaggtcttacttttgtggctccccatctcaaagacggggata

SEQ ID NO: 239684 - DNA, 201 bp, Homo sapiens
agaattcaggactcagagccccacagtggcatccagcttgctcttctgtaacagactgaaggctttaagcaaactagctggttaacaccatgatagacagscttgctgttaagttgccttcttaggaactagattttcagccaccgtggcgcttatatgtaacataaccttgcttggctgtagcccagtagcgtgctttat

SEQ ID NO: 239685 - DNA, 201 bp, Homo sapiens
ctatgttggtcaggctggtctcgaactcctgacctcgtgatctgactgccttggcctcccaaagtgctgggattacaggcatgacccaccgcacctggccyccaccactattataatatcaccaggttccccatttgaatccttcagtgccaaaggttttgcagaattcaaatgtttttgggacttgatagggctgaccta

SEQ ID NO: 239686 - DNA, 201 bp, Homo sapiens
ctcaccagccgtactgcttgagatatgttgctttgcttcgcttctgtcaataagatgagaataacggtacctactccttagtattaaatgattaagtatgytaacagggagagggccaaacgtttgttgttttattacacagcaggacatcaggtcttacttttgtggctccccatctcaaagacggggatagcaaatgtt

SEQ ID NO: 239687 - DNA, 201 bp, Homo sapiens
ttaacagtattaatgggccgggcgcggtggctcacgcctgtaatcccagcactctgggaggccgaagtgggtggatcacctgaggtcatacatgggtgaarccccgtctctactaaaaaaacaaaaatttgctgggcgtggtggcgggcgcctgtaatcctagctactcgggaggctgaggcaggagaatcgcttgaaccc

SEQ ID NO: 239688 - DNA, 201 bp, Homo sapiens; identical to SEQ ID NO: 46788

SEQ ID NO: 239689 - DNA, 201 bp, Homo sapiens
aagaaacaaatctgaatatgctagcctatctcaggtacgttaaaggaaatttttaaatagggggttttttgaccatttgggggagttttgggggaggggcyttctgtctatacttgagctgggggatgttagggttgttcatctggatctagaggttttcctgtaatgttcttactccagaaggaaatctctagatgggga

SEQ ID NO: 239690 - DNA, 201 bp, Homo sapiens
agtaaaaacaacaagaaacaaatctgaatatgctagcctatctcaggtacgttaaaggaaatttttaaatagggggttttttgaccatttgggggagtttygggggaggggccttctgtctatacttgagctgggggatgttagggttgttcatctggatctagaggttttcctgtaatgttcttactccagaaggaaatc

SEQ ID NO: 239691 - DNA, 201 bp, Homo sapiens
gtgggggatgttctgtcgcaagcgtggggttcatgatttagatcacagaattgaagtcatttattatcggcccaggtgtgtttttgtgacagtcacttccytagaggggataatgaagagctacatttaccatatgtctccgtatacttcctgcctaaggtgtctgtgctggtgatgtgtcacactcgggagttggctttt

SEQ ID NO: 239692 - DNA, 201 bp, Homo sapiens
agttgtggtaatttctgtctttgttactttcctccccttcagggggttttttaattttaaagatgaatgcagtgaggtataatggtgtgtgcctgtagtcycagctattcaggagactgaagcaggaggatcacttgagcccaggaatttgaggctatagtgtgctatgattgtgccagtgaatagccactgcactccagc

SEQ ID NO: 239693 - DNA, 201 bp, Homo sapiens
tgggctttggagttgtggtaatttctgtctttgttactttcctccccttcagggggttttttaattttaaagatgaatgcagtgaggtataatggtgtgtrcctgtagtcccagctattcaggagactgaagcaggaggatcacttgagcccaggaatttgaggctatagtgtgctatgattgtgccagtgaatagccact

SEQ ID NO: 239694 - DNA, 201 bp, Homo sapiens; identical to SEQ ID NO: 46759

SEQ ID NO: 239695 - DNA, 201 bp, Homo sapiens
agcaggaatatcagttacccctccagatcttaattctagttttttatcactttttcatgaggtgatctcatcctcatctcctagcatgtctggcaattttratttctgaactctgtgctacctcagaggccagcttccttagggaaaaatcagtgctgaaataaagttatatttccttttctgctctaaatatatagtggg

SEQ ID NO: 239696 - DNA, 201 bp, Homo sapiens
catttaaaactgctttctagaattaggatagctcccttaggtttaatgttttggtgagcaggaatatcagttacccctccagatcttaattctagtttttwatcactttttcatgaggtgatctcatcctcatctcctagcatgtctggcaattttgatttctgaactctgtgctacctcagaggccagcttccttaggga

SEQ ID NO: 239697 - DNA, 201 bp, Homo sapiens
ttcttctcatattggaggcctcagcatcaatgagaggcggtgctcggcgtcccttggtcttggtatttgcggagggcggggctcttctcaccttccttgtyctttcttgagctctttttcggccctcggtgggactgggaggaggagctggtttctgggcccagttggatttttctcaccttgacttgcccaacttaattt

SEQ ID NO: 239698 - DNA, 201 bp, Homo sapiens
ttttgaaggccttgagagcctctgcactgggctttatccccatttcatagttgggaactttggggttttaccttatttcttgcttggttaaaacaaacagmtggaatctgatcccacttcttgattccaagtccattgctctttccattgtgttgttactatttccagcaatcttcacctcactgggaagtctacctctaa

SEQ ID NO: 239699 - DNA, 201 bp, Homo sapiens
agtgtgccaggtggggttaatggaagatttttctgtaagaattgaatcttggtgaatgagagtggggttggacataggccccataagtcattacaaatgayctttggcaattctatatggtgagctataaaggtgggctccaggtagggatgtcatatttgcctgacttgatagaaaagtaatccagagagtcatagatgg

SEQ ID NO: 239700 - DNA, 201 bp, Homo sapiens
aagtgctgggattacaggagtgagccactgcacctggcctcattaatgattttagatttaccataggattagcgtcgtgacagtctgattccacagttgttcttttcccccttgaaaccagaaagtagtttctggtgttatttgatactgtaccaaggcccagatccccaaacaactattcacctaatggttttaacatga

SEQ ID NO: 239701 - DNA, 201 bp, Homo sapiens
tgataatatttagcccgaagcagtaatttcatggggtttgtgtgaaaagagtttgagattctgggtttatttaggaaaccttaatgttccatgtgttttttgtggtactttacactaatctggtgatttcttgctgtcctttatttatttattttttattttttgagatggagtctcgctctgtcatccaggctggagtac

SEQ ID NO: 239702 - DNA, 201 bp, Homo sapiens
aaagtgctgggattacaggagtgagccactgcacctggcctcattaatgattttagatttaccataggattagcgtcgtgacagtctgattccacagttgttcttttcccccttgaaaccagaaagtagtttctggtgttatttgatactgtaccaaggcccagatccccaaacaactattcacctaatggttttaacatg

SEQ ID NO: 239703 - DNA, 201 bp, Homo sapiens
ggcagaacttgctttagagcactggtgcccagcctaccacaggtctgtgattttttttttttgatctagtgtttattaggtatgaattttacaaacattascggtagctgtggagctggagagtattgcaccttctccaagctgcatggcgagaaccaccaatagtgtggtagaacttacagccctttccaaggccgtggc

SEQ ID NO: 239704 - DNA, 201 bp, Homo sapiens
caaagtgctgggattacaggagtgagccactgcacctggcctcattaatgattttagatttaccataggattagcgtcgtgacagtctgattccacagttgttcttttcccccttgaaaccagaaagtagtttctggtgttatttgatactgtaccaaggcccagatccccaaacaactattcacctaatggttttaacat

SEQ ID NO: 239705 - DNA, 201 bp, Homo sapiens
gccagtttaggcagaacttgctttagagcactggtgcccagcctaccacaggtctgtgattttttttttttgatctagtgtttattaggtatgaattttasaaacattagcggtagctgtggagctggagagtattgcaccttctccaagctgcatggcgagaaccaccaatagtgtggtagaacttacagccctttccaa

SEQ ID NO: 239706 - DNA, 201 bp, Homo sapiens
tcggcctcccaaagtgctgggattacaggagtgagccactgcacctggcctcattaatgattttagatttaccataggattagcgtcgtgacagtctgatyccacagttgttcttttcccccttgaaaccagaaagtagtttctggtgttatttgatactgtaccaaggcccagatccccaaacaactattcacctaatgg

SEQ ID NO: 239707 - DNA, 201 bp, Homo sapiens
attagccgtgcatggtggcacacacctatagtcccacctgcttgggaggctgaggcaggggaatcgcttgaacccaggaagcagaggttgtagtgagctgrgattgtgccattacactccagcctgggtggcagagtgagactcccatctcaaaaaaaaagaaaaaatctgattgaagttaagcatttttggcaagaatcc

SEQ ID NO: 239708 - DNA, 201 bp, Homo sapiens
ggaggggattttggttaggactataagggaagggtgtttttgtcctaactacatgatgcttgcagagccatgagcacatgacctctgttacccttgacaayctgacagctgtgggggatgttctgtcgcaagcgtggggttcatgatttagatcacagaattgaagtcatttattatcggcccaggtgtgtttttgtgaca

SEQ ID NO: 239709 - DNA, 201 bp, Homo sapiens
actgcaacagctggagccagttactgggcaggtatatttggggagagtgctggggaggggattttggttaggactataagggaagggtgtttttgtcctarctacatgatgcttgcagagccatgagcacatgacctctgttacccttgacaacctgacagctgtgggggatgttctgtcgcaagcgtggggttcatgatt

SEQ ID NO: 239710 - DNA, 201 bp, Homo sapiens
cacagaattgaagtcatttattatcggcccaggtgtgtttttgtgacagtcacttccctagaggggataatgaagagctacatttaccatatgtctccgtmtacttcctgcctaaggtgtctgtgctggtgatgtgtcacactcgggagttggcttttcagatcagcaaggaatatgagcgcttctctaaatacatgccca

SEQ ID NO: 239711 - DNA, 201 bp, Homo sapiens
cggcccaggtgtgtttttgtgacagtcacttccctagaggggataatgaagagctacatttaccatatgtctccgtatacttcctgcctaaggtgtctgtrctggtgatgtgtcacactcgggagttggcttttcagatcagcaaggaatatgagcgcttctctaaatacatgcccaatgtcaaggtaagccaaggtaaag

SEQ ID NO: 239712 - DNA, 201 bp, Homo sapiens
ctcttgttgcccaggctggagtacaacggtgggatcttggctcaccacaacctctgcctcccaggttctcgtgcctcagcctcctgagtagctggaattayaggcgtgtgccaccacacctggctcctttattttttaaatgaagcctggcctcataaatgaaggaagttggttagattaagtcagtagaactgaattatt

SEQ ID NO: 239713 - DNA, 201 bp, Homo sapiens
actttaggcaatcaccctcagtgtttggtgggggggacataaaatttttaaattaggtgacctctaaagttagttttagtttggaaacatgctaaaaattkgtttagctcaaacagagtgggaaccctggggggattggactctttccttcctctgttttgagactctttgcttctggctcggcaggttgctgtttttttt

SEQ ID NO: 239714 - DNA, 201 bp, Homo sapiens
actccagctgtagcagaaacctggatattaagtacacttttattgaggaaatcacatgtgtgatgtgggagagaataatgagggtataaatatcttagggrctgagcatgagtaaggtgggagctgcttttctattctatggctggcacgggtatgtcctcaataacctcaaggaaaataaacttcaaaaattaagatcct

SEQ ID NO: 239715 - DNA, 201 bp, Homo sapiens
tgtttttaacctttgagaataggggactttgataattttaggcataagtcatcaccaccaccaccgttttcattatagattcatatactgggagtcatagsggagattctaaactgaaagagaagacagtacccttctggcatctccagcacagcatttacagtcagaatttatagctgaataagtgtctagactcaggtc

SEQ ID NO: 239716 - DNA, 201 bp, Homo sapiens
ggaagatttttctgtaagaattgaatcttggtgaatgagagtggggttggacataggccccataagtcattacaaatgatctttggcaattctatatggtragctataaaggtgggctccaggtagggatgtcatatttgcctgacttgatagaaaagtaatccagagagtcatagatggactctgatatctggaatataa

SEQ ID NO: 239717 - DNA, 201 bp, Homo sapiens
gtagaacttacagccctttccaaggccgtggctctcttggcctgcagatagcctacgcatctccctatgcttgttgtggaccactgggtgtcaggtttccytctgatagtgttatggaatggatcaactaggatagcctcaaaaactttgtatgtggaatctttaaccagcccagtgagaattcaggactcagagccccac

SEQ ID NO: 239718 - DNA, 201 bp, Homo sapiens
atttttctgtaagaattgaatcttggtgaatgagagtggggttggacataggccccataagtcattacaaatgatctttggcaattctatatggtgagctrtaaaggtgggctccaggtagggatgtcatatttgcctgacttgatagaaaagtaatccagagagtcatagatggactctgatatctggaatataatatgt

SEQ ID NO: 239719 - DNA, 201 bp, Homo sapiens; identical to SEQ ID NO: 46774

SEQ ID NO: 239720 - DNA, 201 bp, Homo sapiens
aatactagactttgagaattgagtggtaagaaatgggcttggcatggtgaaaaaggtagagttatctggagactgaagtctaatttatcttcctccccccscaacttttagtccagcatgagtgcatccctcaggccattctgggaatggatgtcctgtgccaggccaagtcgggcatgggaaagacagcagtgtttgtct

SEQ ID NO: 239721 - DNA, 201 bp, Homo sapiens
atatctggaatataatatgtgcttgatatttgtagtctgctgaaggctggctggggcttgggcaggaaagggttgggagaaggtcccataaagcatgtttwgaaggccttgagagcctctgcactgggctttatccccatttcatagttgggaactttggggttttaccttatttcttgcttggttaaaacaaacagctgg

SEQ ID NO: 239722 - DNA, 201 bp, Homo sapiens
aatccagagagtcatagatggactctgatatctggaatataatatgtgcttgatatttgtagtctgctgaaggctggctggggcttgggcaggaaagggtygggagaaggtcccataaagcatgttttgaaggccttgagagcctctgcactgggctttatccccatttcatagttgggaactttggggttttaccttatt

SEQ ID NO: 239723 - DNA, 201 bp, Homo sapiens
ggtttgcacctgaggaaactggctcagatggtttcattcagcattcactggggaagtgtctgttgggggcagctctaggctggatgtgctcgaaggtccayagctggttgttggtagggcctggagggttcatgtctaggtccacctgacttgaaagctcatcctgaccttgcttaagtgctgattcccctttgcagatgt

SEQ ID NO: 239724 - DNA, 201 bp, Homo sapiens
tctgttgggccaggccaactgtggtctctggaaacctctatgactggtttagagatgactggcttctgggtcaggtaccaagtccttcattttgtccaggrttgtagtagttacgtgacccgaagtatagcaacctaagcaggagaagtggtctgtggcaggtattcaaatgtcatgaattgttacagattaagaaaaata

SEQ ID NO: 239725 - DNA, 201 bp, Homo sapiens; identical to SEQ ID NO: 46755

SEQ ID NO: 239726 - DNA, 201 bp, Homo sapiens
ccaggtgcagtggctcacgcctgtaatcccagcactttgggaggccgaggcaggagggtggccacttgagctcaaaagtgcaagagaagcctgggcaacayagcgagactcctgtctctacaaaacgttcagaaattaagcaggtgaaggttgaggcttcagtgagccgtgattgcaccactgtgcaccagccggggcgac

SEQ ID NO: 239727 - DNA, 201 bp, Homo sapiens
gtgtttgtcgttgctcaggtggtggtaagggtttatacttaaggctagatcagggccaggtgcagtggctcacgcctgtaatcccagcactttgggaggcygaggcaggagggtggccacttgagctcaaaagtgcaagagaagcctgggcaacatagcgagactcctgtctctacaaaacgttcagaaattaagcaggtg

SEQ ID NO: 239728 - DNA, 201 bp, Homo sapiens
ataacggtgggattataatagggaaagcggagtcttcctttgaggacttttcaggactctacttgtcatctccattttccactttactaagttattagtcrtattttaccttttattatctattctatttcctcactgttactttcagatcaagaatttataagttggtcttccccttccaacttttctggtttccgctac

SEQ ID NO: 239729 - DNA, 201 bp, Homo sapiens
gcctcagcatcaatgagaggcggtgctcggcgtcccttggtcttggtatttgcggagggcggggctcttctcaccttccttgttctttcttgagctctttytcggccctcggtgggactgggaggaggagctggtttctgggcccagttggatttttctcaccttgacttgcccaacttaatttggagtgccttccaagtg

SEQ ID NO: 239730 - DNA, 201 bp, Homo sapiens
gctgagaagcgggcagctgagaaggtggcagatgccagaaagagtgagtctcctctttcctcccttaggagtttggaaagaaaattgggggtgggggacarcaaacattttgggaaaacccaaggctggcgggaagacagctagggtctggaggctggttaggagggaagaaatggatggatattagaatctggcacctgg

SEQ ID NO: 239731 - DNA, 201 bp, Homo sapiens; identical to SEQ ID NO: 46771

SEQ ID NO: 239732 - DNA, 201 bp, Homo sapiens; identical to SEQ ID NO: 46773

SEQ ID NO: 239733 - DNA, 201 bp, Homo sapiens
ccaatccaagatggtgtcctcggcgccattgtgttcgttttgctcccttcttccaatgggttcttctcatattggaggcctcagcatcaatgagaggcggygctcggcgtcccttggtcttggtatttgcggagggcggggctcttctcaccttccttgttctttcttgagctctttttcggccctcggtgggactgggag

SEQ ID NO: 239734 - DNA, 201 bp, Homo sapiens; identical to SEQ ID NO: 46769

SEQ ID NO: 239735 - DNA, 201 bp, Homo sapiens
ctccagcctgggtgatagagtgagaccctgtatcaaaacaaaacaaaaaacaaaacctgccttctgggattgggcttctggtttttttcccatgacacacrcatcctttcctattttgtcctctgggtcttcatattaactatcttcccccaggatagtataaaaagtgttaggaaagttgggctttggagttgtggtaat

SEQ ID NO: 239736 - DNA, 201 bp, Homo sapiens
taaaactatcctgttgtggtctgacggcaagtaactcatcttgagtaatttttgtttctccttaagtggcattttgactgtccattgcagcattctgatcwtaaaagacatccactttgctaatgcacacgagattctcttagttgaagtaggagaatcaaatggagcagttgtcctccccccaccccatgttcttagaag

SEQ ID NO: 239737 - DNA, 201 bp, Homo sapiens; identical to SEQ ID NO: 46758

SEQ ID NO: 239738 - DNA, 201 bp, Homo sapiens
agcatgttttgaaggccttgagagcctctgcactgggctttatccccatttcatagttgggaactttggggttttaccttatttcttgcttggttaaaacmaacagctggaatctgatcccacttcttgattccaagtccattgctctttccattgtgttgttactatttccagcaatcttcacctcactgggaagtctac

SEQ ID NO: 239739 - DNA, 201 bp, Homo sapiens
gtacctactccttagtattaaatgattaagtatgttaacagggagagggccaaacgtttgttgttttattacacagcaggacatcaggtcttacttttgtrgctccccatctcaaagacggggatagcaaatgtttcattcaggaaaaaaatccaggttgaacaatggggctgttggggcggggccaagaacattctgctc

SEQ ID NO: 239740 - DNA, 201 bp, Homo sapiens
gtatcaataaaataattattggcaaataaattggtgagttgaagcagcctccttttgcctcatcatttctcattttcagtcactttgttttttttttttttgagatggagttttgctcttgttgcccaggctggaatacaatggcgtgatctcagctcattgcaacctctgcctcccaggttcaagcgattctcctgcctc

SEQ ID NO: 239741 - DNA, 201 bp, Homo sapiens; identical to SEQ ID NO: 46775

SEQ ID NO: 239742 - DNA, 201 bp, Homo sapiens
tgacctcaagtgatccacctgccttggcctcccaaagtgctgagattagaggtgtgagccactgtgcctggccttcagtcactttcttgttttttgtttayatattccctaaacagcccaaatggctatcctttgaaacttcttggagaaacaagaacaagtagtactttattatttctctaaagtgagaaacatggttcc

SEQ ID NO: 239743 - DNA, 201 bp, Homo sapiens; identical to SEQ ID NO: 46756

SEQ ID NO: 239744 - DNA, 201 bp, Homo sapiens
tgggatatttctgtgggatgggggtggtttctgagagggcctttcttctaggctttgtttcaggatctttcccctcatatgcctggacccttgtctgtttytgcttttccctttctctcttccacccctctccctaccccccaggccatgggctcccaggggaacctgtctgctgaggtggagcaggctacaaggcgccag

SEQ ID NO: 239745 - DNA, 201 bp, Homo sapiens
agagccgtaggcccaaggcctgtgtttaagaagctcggagacgggaggcgggaagggcggagacactccaggctggaggaaatggcgcaagcagagacgcwggtggaggacggaagtgaactgtgaggggcgttaccggatgtcgttccgccccgaccgggtagttcttggccagatctcccaggggaaactagggaactt

SEQ ID NO: 239746 - DNA, 201 bp, Homo sapiens; identical to SEQ ID NO: 46757

SEQ ID NO: 239747 - DNA, 201 bp, Homo sapiens
agtataacatctatgtggagtatgattaacatttgtggtggagggtagagttttatggtcatggatggtgaggtggtggggatattacggtctgttttagkatgaagttgcatgttaggtctaaggggaaaggggactgtgttgatctctttggtgttgggatatttctgtgggatgggggtggtttctgagagggccttt

SEQ ID NO: 239748 - DNA, 201 bp, Homo sapiens; identical to SEQ ID NO: 46778

SEQ ID NO: 239749 - DNA, 201 bp, Homo sapiens; identical to SEQ ID NO: 46761

SEQ ID NO: 239750 - DNA, 201 bp, Homo sapiens; identical to SEQ ID NO: 46762

SEQ ID NO: 239751 - DNA, 201 bp, Homo sapiens
cggcagacagatgtggaggcttcttcctctggaacctggggggaggggttactcatcagacctgcccccgcccccccaagtacccccagagccgtaggccmaaggcctgtgtttaagaagctcggagacgggaggcgggaagggcggagacactccaggctggaggaaatggcgcaagcagagacgcaggtggaggacgga

SEQ ID NO: 239752 - DNA, 201 bp, Homo sapiens
tgcatcgggtaaacctcacaggctgaaaaaatcccactctcccattcccttgttttctgtttgtacatcttcattcctgcctctgggtctctttcctcttyggtcttccagtgctaccctctgtctccctccaggtggccagagcaggccggtttggcaccaagggcttggctatcacatttgtgtccgatgagaatgatg

SEQ ID NO: 239753 - DNA, 201 bp, Homo sapiens; identical to SEQ ID NO: 46826

SEQ ID NO: 239754 - DNA, 201 bp, Homo sapiens
gcttgcagagccatgagcacatgacctctgttacccttgacaacctgacagctgtgggggatgttctgtcgcaagcgtggggttcatgatttagatcacakaattgaagtcatttattatcggcccaggtgtgtttttgtgacagtcacttccctagaggggataatgaagagctacatttaccatatgtctccgtatact

SEQ ID NO: 239755 - DNA, 201 bp, Homo sapiens
aggatctcttaaacccaggagggtggaggctgcagtgacttgcgattgcaccactgcactccagtctgggggacagagtgagaccccatctcaaaaaagtstttaattaatatacttgtgagtggtctatttgcatttaaaactgctttctagaattaggatagctcccttaggtttaatgttttggtgagcaggaatatc

SEQ ID NO: 239756 - DNA, 201 bp, Homo sapiens
tacaaaacgttcagaaattaagcaggtgaaggttgaggcttcagtgagccgtgattgcaccactgtgcaccagccggggcgacagtgaggaagaaaaaatygggataagtatcaaaaacaattttggatagaggaggcttatacaggcttattctttctttcgtgatagcaccaaagtgctaatgatccaaaagtgacttc

SEQ ID NO: 239757 - DNA, 201 bp, Homo sapiens
caccttccttgttctttcttgagctctttttcggccctcggtgggactgggaggaggagctggtttctgggcccagttggatttttctcaccttgacttgsccaacttaatttggagtgccttccaagtgtttacgatacgattggtgtcattgtatgtttctccaaaaggagtctcaccttcgtagcgtaacagtgatgt

SEQ ID NO: 239758 - DNA, 201 bp, Homo sapiens; identical to SEQ ID NO: 46767

SEQ ID NO: 239759 - DNA, 201 bp, Homo sapiens
cagaatggtagggccaagcctagctccagacaccccagagccctggagaagccaagactgagggagaaagcctgagggaggagcgccccagtccccagggrccggcctggtgcagagctgcagctgatgttcccctctgtgcagccccaccctctgcctcgctgagctccctgctgcgagggcctcgggtgcaagggggag

SEQ ID NO: 239760 - DNA, 201 bp, Homo sapiens
catggaggcctggtgggggaggggaggggaggcgtgtgtgtcggccggggccactaggcgctcactgttctctccctccgcgcagccgagccacatcgctsagacaccatggggaaggtgaaggtcggagtcaacgggtgagttcgcgggtggctggggggccctgggctgcgaccgcccccgaaccgcgtctacgagcct

SEQ ID NO: 239761 - DNA, 201 bp, Homo sapiens; identical to SEQ ID NO: 46860

SEQ ID NO: 239762 - DNA, 201 bp, Homo sapiens; identical to SEQ ID NO: 46862

SEQ ID NO: 239763 - DNA, 201 bp, Homo sapiens
cccgcagaggtgtggtggctgtggcatggtgccaagccgggagaagctgagtcatgggtagttggaaaaggacatttccaccgcaaaatggcccctctggyggtggccccttcctgcagcgccggctcacctcacggccccgcccttcccctgccagcctagcgttgacccgaccccaaaggccaggctgtaaatgtcacc

SEQ ID NO: 239764 - DNA, 201 bp, Homo sapiens
tgcaaaggcaggacccgggttcataactgtctgcttctctgctgtaggctcatttgcaggggggagccaaaagggtcatcatctctgccccctctgctgaygcccccatgttcgtcatgggtgtgaaccatgagaagtatgacaacagcctcaagatcatcaggtgaggaaggcagggcccgtggagaagcggccagcctg

SEQ ID NO: 239765 - DNA, 201 bp, Homo sapiens
tcgtggagtccactggcgtcttcaccaccatggagaaggctggggtgagtgcaggagggcccgcgggaggggaagctgactcagccctgcaaaggcaggasccgggttcataactgtctgcttctctgctgtaggctcatttgcaggggggagccaaaagggtcatcatctctgccccctctgctgatgcccccatgttcg

SEQ ID NO: 239766 - DNA, 201 bp, Homo sapiens
cagggtctggcgccctctggtggctggctcagaaaaagggccctgacaactcttttcatcttctaggtatgacaacgaatttggctacagcaacagggtgrtggacctcatggcccacatggcctccaaggagtaagacccctggaccaccagccccagcaagagcacaagaggaagagagagaccctcactgctggggag

SEQ ID NO: 239767 - DNA, 201 bp, Homo sapiens
cctgacaactcttttcatcttctaggtatgacaacgaatttggctacagcaacagggtggtggacctcatggcccacatggcctccaaggagtaagacccytggaccaccagccccagcaagagcacaagaggaagagagagaccctcactgctggggagtccctgccacactcagtcccccaccacactgaatctcccct

SEQ ID NO: 239768 - DNA, 201 bp, Homo sapiens
aggaagagagagaccctcactgctggggagtccctgccacactcagtcccccaccacactgaatctcccctcctcacagttgccatgtagaccccttgaaraggggaggggcctagggagccgcaccttgtcatgtaccatcaataaagtaccctgtgctcaaccagttacttgtcctgtcttattctagggtctggggca

SEQ ID NO: 239769 - DNA, 201 bp, Homo sapiens
gtggtgaagcaggcgtcggagggccccctcaagggcatcctgggctacactgagcaccaggtggtctcctctgacttcaacagcgacacccactcctccayctttgacgctggggctggcattgccctcaacgaccactttgtcaagctcatttcctggtatgtggctggggccagagactggctcttaaaaagtgcaggg

SEQ ID NO: 239770 - DNA, 201 bp, Homo sapiens
gccctctggtggctggctcagaaaaagggccctgacaactcttttcatcttctaggtatgacaacgaatttggctacagcaacagggtggtggacctcatkgcccacatggcctccaaggagtaagacccctggaccaccagccccagcaagagcacaagaggaagagagagaccctcactgctggggagtccctgccaca

SEQ ID NO: 239771 - DNA, 201 bp, Homo sapiens
ccacaaggtgagaggcagagaggcactgagggctggctgcagagggaatctgtaggtcacctcatctccttaacatggctctctctgtcttacagggcaaygcaatctataatctccttccagatatcatcagccgcctgtcagaccccgagctgggggtggaggaagagcctttccacaccatcatgaagtattgctccc

SEQ ID NO: 239772 - DNA, 201 bp, Homo sapiens
ctagcctccgggaccctgctcagcaagtgcggaaaacagcggggctggtgatgacccacctgatcctcaaggacatggtgaaggtgaaggggcaggtcagygagatggcggtgctgctcatcgaccccgagcctcagattgctgccctggccaagaacttcttcaatgagctctcccacaaggtgagaggcagagaggcac

SEQ ID NO: 239773 - DNA, 201 bp, Homo sapiens
tgcttgacaattttgactgttttggagacaaactgtcagatgagtccatcttcagtgcttttttgtcagttgtgggcaagctgcgacgtggggccaagcckgagggcaaggtgagcagcacaggacacttcaatgcctgttgggttctgggctggctaagacatctgccggccctgggcagcatacggctcttgcagtcac

SEQ ID NO: 239774 - DNA, 201 bp, Homo sapiens
agaggcagagaggcactgagggctggctgcagagggaatctgtaggtcacctcatctccttaacatggctctctctgtcttacagggcaatgcaatctatratctccttccagatatcatcagccgcctgtcagaccccgagctgggggtggaggaagagcctttccacaccatcatgaagtattgctccccgggccctgg

SEQ ID NO: 239775 - DNA, 201 bp, Homo sapiens
ctcatcttcccttcctgcagacagctcctctcctacatcaccaaggacaagcagacagagagcctggtggaaaagctgtgtcagcggttccgcacatccckgtatgctgccctccctgagggttctttgtgctgagcggggccctgcaggggagaaaggcccatccctcaccccttcaatgcccccactgtggcatccctg

SEQ ID NO: 239776 - DNA, 201 bp, Homo sapiens
ccctcacagagcgaggcctccgtaagatgcttgacaattttgactgttttggagacaaactgtcagatgagtccatcttcagtgcttttttgtcagttgtrggcaagctgcgacgtggggccaagcctgagggcaaggtgagcagcacaggacacttcaatgcctgttgggttctgggctggctaagacatctgccggccc

SEQ ID NO: 239777 - DNA, 201 bp, Homo sapiens
  misc_feature (1)...(201): n = A,T,C or G
ccttcagttgcagccatgccttaagccaggccagcctggcagggaagctcaagggagataaaattcaacctcttgggccctcctgggggtaaggagatgcngcattcgccctcttaatggggaggtggcctagggctgctcacatattctggaggagcctcccctcctcatgccttcttgcctcttgtctcttagatttgg

SEQ ID NO: 239778 - DNA, 201 bp, Homo sapiens
aagcttcgggcctgtcataccagaggtttggatggaatcaaggagcttgagattggccaagcaggtagccagagagcgccatcagccaagaaaccatccastggtacgtaaggcagcctgtgcgggcgagaccagactgggccctcccctcctgcagtgatttgtttcttcttcttttttaaatcacgttttcctgccttt

SEQ ID NO: 239779 - DNA, 201 bp, Homo sapiens
atttctcctccgggtgatgcttttcctagattattctctggtaaatcaaagaagtgggtttatggaggtcctcttgtgtcccctccccgcagaggtgtggkggctgtggcatggtgccaagccgggagaagctgagtcatgggtagttggaaaaggacatttccaccgcaaaatggcccctctggtggtggccccttcctg

SEQ ID NO: 239780 - DNA, 201 bp, Homo sapiens
ggggagtccctgccacactcagtcccccaccacactgaatctcccctcctcacagttgccatgtagaccccttgaagaggggaggggcctagggagccgcmccttgtcatgtaccatcaataaagtaccctgtgctcaaccagttacttgtcctgtcttattctagggtctggggcagaggggagggaagctgggcttgtg

SEQ ID NO: 239781 - DNA, 201 bp, Homo sapiens
tagattattctctggtaaatcaaagaagtgggtttatggaggtcctcttgtgtcccctccccgcagaggtgtggtggctgtggcatggtgccaagccgggrgaagctgagtcatgggtagttggaaaaggacatttccaccgcaaaatggcccctctggtggtggccccttcctgcagcgccggctcacctcacggccccg

SEQ ID NO: 239782 - DNA, 201 bp, Homo sapiens
aggtcagcgctcggacctggcggagccccgcacccaggctgtggcgccctgtgcagctccgcccttgcggcgccatctgcccggagcctccttcccctagwccccagaaacaggaggtccctactcccgcccgagatcccgacccggacccctaggtgggggacgctttctttcctttcgcgctctgcggggtcacgtgtc

SEQ ID NO: 239783 - DNA, 201 bp, Homo sapiens
cagagcatgggataattgattcctgctgagggccttttctaccagtgttagggtgtagcccggaggtctcggtccccatgacccgcaattccattcctagyctccgggaccctgctcagcaagtgcggaaaacagcggggctggtgatgacccacctgatcctcaaggacatggtgaaggtgaaggggcaggtcagcgaga

SEQ ID NO: 239784 - DNA, 201 bp, Homo sapiens
acctgccaaatatgatgacatcaagaaggtggtgaagcaggcgtcggagggccccctcaagggcatcctgggctacactgagcaccaggtggtctcctctkacttcaacagcgacacccactcctccacctttgacgctggggctggcattgccctcaacgaccactttgtcaagctcatttcctggtatgtggctggggc

SEQ ID NO: 239785 - DNA, 201 bp, Homo sapiens
ggtgggcccgggcggcctccgcattgcaggggcgggcggaggacgtgatgcggcgcgggctgggcatggaggcctggtgggggaggggaggggaggcgtgkgtgtcggccggggccactaggcgctcactgttctctccctccgcgcagccgagccacatcgctcagacaccatggggaaggtgaaggtcggagtcaacgg

SEQ ID NO: 239786 - DNA, 201 bp, Homo sapiens
ggtggctggggggccctgggctgcgaccgcccccgaaccgcgtctacgagccttgcgggctccgggtctttgcagtcgtatgggggcagggtagctgttcyccgcaaggagagctcaaggtcagcgctcggacctggcggagccccgcacccaggctgtggcgccctgtgcagctccgcccttgcggcgccatctgcccgg

SEQ ID NO: 239787 - DNA, 201 bp, Homo sapiens
tgaagcaggcgtcggagggccccctcaagggcatcctgggctacactgagcaccaggtggtctcctctgacttcaacagcgacacccactcctccaccttygacgctggggctggcattgccctcaacgaccactttgtcaagctcatttcctggtatgtggctggggccagagactggctcttaaaaagtgcagggtctg

SEQ ID NO: 239788 - DNA, 201 bp, Homo sapiens
gccccagcaagagcacaagaggaagagagagaccctcactgctggggagtccctgccacactcagtcccccaccacactgaatctcccctcctcacagttkccatgtagaccccttgaagaggggaggggcctagggagccgcaccttgtcatgtaccatcaataaagtaccctgtgctcaaccagttacttgtcctgtct

SEQ ID NO: 239789 - DNA, 201 bp, Homo sapiens; identical to SEQ ID NO: 46870

SEQ ID NO: 239790 - DNA, 201 bp, Homo sapiens; identical to SEQ ID NO: 46871

SEQ ID NO: 239791 - DNA, 201 bp, Homo sapiens
gccctctgtctcctattcatcaactcttggcctacagtctcttccttgcggttggcgctttaccatctcaaatttctcactgtaaaaaagtaacttcaacsttaaacctgttcttctacccctgcctgcaggagctactgtctgttgcctttcctcagtcagccttactggaaaaatggcttatattcttgccatttacct

SEQ ID NO: 239792 - DNA, 201 bp, Homo sapiens
agaaactgagcagctgaaatgaggcctgtgcttcagtgccataggggtaacttctgagggaactagaggaccaaattttgggtcaccatccccattgtcakcattgagtaaatgtcagctgaaatgaatgtatgtcgagtcctgtggaaggaagagcagctccttcacttaggcattcctaaatcaattccgaagagaaat

SEQ ID NO: 239793 - DNA, 201 bp, Homo sapiens
tgatttcatgtcctttgtagggacatggatgaaattggaaatcatcattctcagtaaactatcgcaagaacaaaaaaccaaacaccgcatattctcactcmtaggtgggaattgaacagtgagatcacatggacaccagaaggggaatatcacactctggggactgttgtggggtggggggagtggggagggatagcattg

SEQ ID NO: 239794 - DNA, 201 bp, Homo sapiens
taaagttttactgggtcatagcaatgcctatttggttgtgtttatggcaacagagatcatatgacctgcaaagcctaaactatttactatctggccctttkcggaaagtttgccagcccctgagttggaacatcctattcatgtattttacctgaaataagggttttatttagaaagggactttgaacttttccaaacatg

SEQ ID NO: 239795 - DNA, 201 bp, Homo sapiens
ttccccaaaagcccgtctggctgtttccacagagcttctttgatactattgccttcctctacccacttccacacgttctcgtagcactttctcaccagagsttctacgtatttgtgtcccgcacagtgacctaaatgaaaaggattttatctgaatgtcacctttcttacctacctcatttgcagtcccagtgtcctgaca

SEQ ID NO: 239796 - DNA, 201 bp, Homo sapiens
aaccaaacaccgcatattctcactcataggtgggaattgaacagtgagatcacatggacaccagaaggggaatatcacactctggggactgttgtggggtkgggggagtggggagggatagcattgggagatatacctaatgctagatgacaagttagtgggtgcagcgcaccagcatggcatatgtatacatatgtaact

SEQ ID NO: 239797 - DNA, 201 bp, Homo sapiens; identical to SEQ ID NO: 46906

SEQ ID NO: 239798 - DNA, 201 bp, Homo sapiens; identical to SEQ ID NO: 46907

SEQ ID NO: 239799 - DNA, 201 bp, Homo sapiens
attcctgaagtcgactggattgttcagtatgaccctccggatgaccctaaggtaactggcatctttggaatatcttcagaatgactctgcattaaaagttmacttattctcccagttccctgacggaaactgcattccacattcaaggtaaagatccctactatacagtgactgcagtatttctctggtattgaaaagtac

SEQ ID NO: 239800 - DNA, 201 bp, Homo sapiens
tctagggatatgttgtttgtccttctgaaaagagattccttctgctctttacattccttaagaagaaccgaaagaagaagcttatggtcttcttttcatcytgtatgtctgtgaaataccactatgagttgctgaactacattgatttgcccgtcttggccattcatgtaagtgatgatgatgagctcattgaaaacaggg

SEQ ID NO: 239801 - DNA, 201 bp, Homo sapiens
tgacagtttacacactgtgtttatcagtgctcttgatgaaattacacaagttaggaaatggaaaatgtccacttggttcatttgtatctgtctgcttaaaygctttctagggatatgttgtttgtccttctgaaaagagattccttctgctctttacattccttaagaagaaccgaaagaagaagcttatggtcttctttt

SEQ ID NO: 239802 - DNA, 201 bp, Homo sapiens; identical to SEQ ID NO: 46912

SEQ ID NO: 239803 - DNA, 201 bp, Homo sapiens
atgaatgtgggcttatcagaaactcaaaatggaggcatgtctcaagaagcagtgggaaatataaaagttacaaagtctccccagaaatccactgtattaascaatggagaagcagcaatgcagtcttccaattcagaatcaaaaaagaaaaagaagaaaaagagaaaaatggtgaatgatgctgagcctggtaggtattta

SEQ ID NO: 239804 - DNA, 201 bp, Homo sapiens
tggatgtttttatttaattctagggaaagcaaaagcaaaataagcgtacaaccacattcttccagttctgcaatgcagattcgggaacactattgtgtacrgatgtggcagcgagaggactagacattcctgaagtcgactggattgttcagtatgaccctccggatgaccctaaggtaactggcatctttggaatatctt

SEQ ID NO: 239805 - DNA, 201 bp, Homo sapiens; identical to SEQ ID NO: 46914

SEQ ID NO: 239806 - DNA, 201 bp, Homo sapiens
ctagtcatctctgcttctgctccccttctttcctcttacctcatgtgaagcagtggggaatccttgttcgctctagcctctgcctcctcccctgccctctrtctcctattcatcaactcttggcctacagtctcttccttgcggttggcgctttaccatctcaaatttctcactgtaaaaaagtaacttcaaccttaaacc

SEQ ID NO: 239807 - DNA, 201 bp, Homo sapiens
caaagggctaatatccagaatctacaggttgacatttcattacttatctttctccccctcaagacggcaagctctctgagggcagagtccatgagttaggyacctattttctctctagcacctggcacaggcctgttgcttttctagttatctaatgagtgataactgatggcagatccatcctgtaggagtttgtggtca

SEQ ID NO: 239808 - DNA, 201 bp, Homo sapiens
tttttttatcaaaaattaagtcatctacctactacttgtaaccagcttgtttcataacatgttattttcctgtgtcattaaataattacttcaatgttgtwtttcgtttatggatgctttgttgacccttgtttggtctgccaggatttaggttcaagatacctacctgaatgtgccaaactggctgtccctatctcagta

SEQ ID NO: 239809 - DNA, 201 bp, Homo sapiens
attatagagattcttacagaaaagtgctttactgactgtgtccctatccagttccttgcctttcagaaagaaagaagtgcagattgcctaactcagcagarcaaagatgtaactttcccatcaacattgggagactagaaaaagcagattttcctttctgtcctgagggaatttcataggccggttcatccttccctgtct

SEQ ID NO: 239810 - DNA, 201 bp, Homo sapiens; identical to SEQ ID NO: 46903

SEQ ID NO: 239811 - DNA, 201 bp, Homo sapiens; identical to SEQ ID NO: 46902

SEQ ID NO: 239812 - DNA, 201 bp, Homo sapiens
tttgtacataatctaatttttatatgcatgtttatgctttttaatttttttatcaaaaattaagtcatctacctactacttgtaaccagcttgtttcatarcatgttattttcctgtgtcattaaataattacttcaatgttgtatttcgtttatggatgctttgttgacccttgtttggtctgccaggatttaggttcaa

SEQ ID NO: 239813 - DNA, 201 bp, Homo sapiens; identical to SEQ ID NO: 46904

SEQ ID NO: 239814 - DNA, 201 bp, Homo sapiens
tgccgagactactaaagaaacagaaaataatgtggagaagccagataatgatgaagatgagagtgaggtgcccagtctgcccctgggactgacaggtaacrtccaggaagttttctagaggtaacttctttaaaatgtgcctctcttagaggattataggtttgaaggttcagttgtgactttcagtttacctgaaaaaag

SEQ ID NO: 239815 - DNA, 201 bp, Homo sapiens
ttctattactattgtgtgcacatgacatgagaattccctgtactcaccagtatgttagagattagcctggtagctaatggaaacattttattggcagaagyggggagtccatttcaacttttctcaaaatattgaggaatatatttttaatttcactaaccttgaagaaaacctctctcagaaaagactctccttagaatt

SEQ ID NO: 239816 - DNA, 201 bp, Homo sapiens
caacatcctgtatactttaaatcatttctaaatgacttataataccttatacaacctaaatgctatgaaagtagttatcacactgtattatttttaattgttttttttttaatgttttcaatgggggagttggttgaatccacagacagggaattcaggtacagggagggccaactctagttctgcacccacagaggatag

SEQ ID NO: 239817 - DNA, 201 bp, Homo sapiens
actacaaacatgagtaatatgttgcactacgacattgcagttactgatggcactaggtgataggaattttttagctccgttataatcttatggagccactrtatatgttgtccttaattcacagaaatgtcattgtgcacgcattactgtatttgcatatgataaatattggagcaaataagtggtcttatcaactgaatt

SEQ ID NO: 239818 - DNA, 201 bp, Homo sapiens
atttctgacattcagtctcaggtatgtgctttttaaacgtttgtgagtaaacaggaaccttgtcccagcactctgtttgtagtgattcactgggcaatcactgtcctttgaagtctaccctgtcctaaagtgaggatcaggctgtgtagtgtataaggtttcttgctattctagttatcaccactctgtgccctctttaaa

SEQ ID NO: 239819 - DNA, 201 bp, Homo sapiens
agaaaaggtacagtaaaaagactatgacatgagagatttagaaaatggtacctctgtatacagtacttaccatgaatggagtttgcaggactggaagttaycctgagcgagtcagtgagcggtgagtgaatgtgaaggcctagaacattactgtacactatagactttataaacactgtacacttgggctacactgttgag

SEQ ID NO: 239820 - DNA, 201 bp, Homo sapiens
atatgtaagtaaatttgaacaaaagatggtgttttatctttttcagtaaacaaacagggaacctttggtaaggacattctcaggtacagtcatgcatcgcrtaacaggaggggggatacattgtgagaaatgtgtcattaggggcttttgtcgttttgcgaactttatctagttacacaaacctaaatctactacacaccc

SEQ ID NO: 239821 - DNA, 201 bp, Homo sapiens
caaaggaatatattcatcgtgtgggtagaacagccagaggcctaaatgggagagggcatgccttgctcattttgcgcccagaagaattgggttttcttcgytacttgaaacaatccaaggtaaagatctgtacttggagaaagatttctcttggtgtagggattgttagcaagcaacatttctacatgtgtcagaggagtc

SEQ ID NO: 239822 - DNA, 201 bp, Homo sapiens
ctcgagcagggaaattcgccccccgagtaagaagagtaactcttcctggtttgcccagaactttaacagttttagcactgaaagttctgaatcccaagaayctcctctgtccctagcctactgagaagattggtcatcctaagcctaggagacatttttggttctcagagctaggagcagtctgctgggatctggtgagta

SEQ ID NO: 239823 - DNA, 201 bp, Homo sapiens
gaaactcctgcgtaagaagatcgagaagcggaacctcaaattgcggcagcggaacctaaagtttcagggtgagatgcgttgactcgcggtggctcagaagmcccacgcgcgagccctggcgcgttcgggcggccgggggcccagctgctctgtgtgacggaggcagcttcccctgcagcgtgtgtgattggggagagtgaa

SEQ ID NO: 239824 - DNA, 201 bp, Homo sapiens
tgtccatcacagtcaaaggtttcctcctgccccttttcaatttctccctcccacccctccttacacgtataccttgtccccaggtgagtattgatctgttttctgctgctagattaggttgcattttctggaaataaagttgctgtgaacagtcatctacaactctttgtagaggcatatatctccttttctcttaagtaa

SEQ ID NO: 239825 - DNA, 201 bp, Homo sapiens
gtccatcacagtcaaaggtttcctcctgccccttttcaatttctccctcccacccctccttacacgtataccttgtccccaggtgagtattgatctgttttctgctgctagattaggttgcattttctggaaataaagttgctgtgaacagtcatctacaactctttgtagaggcatatatctccttttctcttaagtaaa

SEQ ID NO: 239826 - DNA, 201 bp, Homo sapiens
tgtgccacttgctaacctcagggcctgattcatgagtgaagcaaaagtaatacctccttcagaaggcagtgctcaggacagtgccctggtgctgagtgctytgtccatggtaccggcctccgtgcatcctacgtgaaaaacttgctgccatacagcagcaggtacagaggctcatcccaaaccgtgagccagtctgggctt

SEQ ID NO: 239827 - DNA, 201 bp, Homo sapiens
tccatcacagtcaaaggtttcctcctgccccttttcaatttctccctcccacccctccttacacgtataccttgtccccaggtgagtattgatctgttttctgctgctagattaggttgcattttctggaaataaagttgctgtgaacagtcatctacaactctttgtagaggcatatatctccttttctcttaagtaaac

SEQ ID NO: 239828 - DNA, 201 bp, Homo sapiens
acagtttcacctctttatttaatttttttttcctgcctgattgccctggccagaacctccagtatggtgctgaatagaagtggtgagagcagacatccttrtcttggttctgatcttaggggaaagcattcagtcttttaccattaactacatatgaagttagctgcaggttttatatagatgccttttatcagattgagg

SEQ ID NO: 239829 - DNA, 201 bp, Homo sapiens; identical to SEQ ID NO: 46908

SEQ ID NO: 239830 - DNA, 201 bp, Homo sapiens
gcagctgcaaaaacaggcagtggtaaaaccctggcttttctcatccctgcagttgaactcattgttaagttaaggttcatgcccaggaatggtaagcgttsatctgcttgtttctgccattatttcactagaggtttattgtagctgttacggactcagtggtgacagccacatttagacttctaccatatatcattttta

SEQ ID NO: 239831 - DNA, 201 bp, Homo sapiens
caccaaacagaattcttaacaaattaatacagcatatacttagcttttgaaaatatacgtctttatatcagagatcttctgtttgttgatctcatttggawttctattttaaggaaaaattttttcggattttgtcttttaaaaccaaagatacgaaaaaagcaaaaactgaaaacaaagggaaatctgaagaagaaagtg

SEQ ID NO: 239832 - DNA, 201 bp, Homo sapiens
gttcgggcggccgggggcccagctgctctgtgtgacggaggcagcttcccctgcagcgtgtgtgattggggagagtgaaaaggcagcttccactcgggacdcgcgctgctgcccactcgtcgcgtggctccagcgctgctcctgacctttctgagcaatcagtgtcttcttacaacgttagagcgggaggactccccgttc

SEQ ID NO: 239833 - DNA, 201 bp, Homo sapiens
acacataaacaagtaacatagtttattatcacgtattatgtattgtacataattatgtgtgctgtactttatacgactggcattacagtagatttgtttayactagcatcactacaaacatgagtaatatgttgcactacgacattgcagttactgatggcactaggtgataggaattttttagctccgttataatcttat

SEQ ID NO: 239834 - DNA, 201 bp, Homo sapiens
tttgcttgatttccttaatgtttgcctccagacgtcaacagtaatgaaggcaagcagaaaaagcgaggaggtggtggtggatttggctaccagaaaaccargaaagttgagaaatccaaaatctttaaacacattagcaagaaatcatctgacagcaggcagttctctcactgaacacatgccttcctttcatcttgaata

SEQ ID NO: 239835 - DNA, 201 bp, Homo sapiens
cttgaaacaatccaaggtaaagatctgtacttggagaaagatttctcttggtgtagggattgttagcaagcaacatttctacatgtgtcagaggagtctcragtctggccagtgctgttacaaccattcttatggcaattaagcaagtaaggttttatgtacttctagcccaagaagtgagcacagaaggaactgcccaca

SEQ ID NO: 239836 - DNA, 201 bp, Homo sapiens
tacgagcctatgattcccattctctgaaacagatctttaatgttaataacctaaatttgcctcaggttgctctgtcatttggtttcaaggtgcctcccttygttgatctgagtatccttttctttaatgaagttatcctgtgactaaggaacaaaagcttgacagaggggcatttggggctttgcagtggattggtatgtg

SEQ ID NO: 239837 - DNA, 201 bp, Homo sapiens
agtggctttgctctaggatatttaaaatctggtgttttggaggtttttgtttgtttttgtttattaaaaccagtgtttctttctatttcagcttgagaaaytgattgaaaagaattactttcttcataagtcagcccaggaagcatataagtcatacatacgagcctatgattcccattctctgaaacagatctttaatgt

SEQ ID NO: 239838 - DNA, 201 bp, Homo sapiens
cagtatgaccctccggatgaccctaaggtaactggcatctttggaatatcttcagaatgactctgcattaaaagttcacttattctcccagttccctgacrgaaactgcattccacattcaaggtaaagatccctactatacagtgactgcagtatttctctggtattgaaaagtacttaaggcttttcagggctcaaacg

SEQ ID NO: 239839 - DNA, 201 bp, Homo sapiens
tgcattactgtcttcatgatgcctacacacagaagtcattgtaatcctgttctaaaattattgccttcacaattcttgttttgagtatgccccaggaagtrgtattatttctgctcccaagcattgaatcacaatgctgggcgttttaaccttatgggttttttgtttgtttgtttgtttgtttgttttattatgagatgg

SEQ ID NO: 239840 - DNA, 201 bp, Homo sapiens
aatcctgttctaaaattattgccttcacaattcttgttttgagtatgccccaggaagtggtattatttctgctcccaagcattgaatcacaatgctgggcrttttaaccttatgggttttttgtttgtttgtttgtttgtttgttttattatgagatggggtctcactgtgttgtccaagctggtcttgaactcctgggct

SEQ ID NO: 239841 - DNA, 201 bp, Homo sapiens
actgtgttgtccaagctggtcttgaactcctgggctcaagtgatcctcccacctcggcttcccaaagtgctgggattacaggcagaagccaccacacccarccaccttatgggtacattttaggaactattccagggaaaacaaaataagccatggagaccagctgaagatatctgtggcttttgaacatgtaggtcctac

SEQ ID NO: 239842 - DNA, 201 bp, Homo sapiens
gtcatcctaagcctaggagacatttttggttctcagagctaggagcagtctgctgggatctggtgagtagaggtcagaaacactgcataatatcttataakgcacaggatagtgtttcacagcaaagaattattcagcccagatgtcagcaatgccaaggtcaagagtgattggtttacaccctgggcatgtggagtatgg

SEQ ID NO: 239843 - DNA, 201 bp, Homo sapiens
ttgatgccttctgctgaaccaccactgtattacttgatacgtaggctcagcctaacattctgtggctgtatctgactcttctgtgtcttgttggagtgagrttaacaggttttttttttattattgacttcacactcagtttttattaatgctcaatgttttcacttttatatcagatttcttaaacatttcatttatctc

SEQ ID NO: 239844 - DNA, 201 bp, Homo sapiens
gcaggaggaacccgccagcgcctgagagcctggcccgaaccaggcctggaggtgctggggcgaagacacagaggatgtggcctccatccctggtaacagayggttaccagggcggctttgggtgaggacattgaaaaaggtcagactccctgggagcagcgccctggactccattctgatcacaggtatatttgtgtggct

SEQ ID NO: 239845 - DNA, 201 bp, Homo sapiens
aatactgttggtattttgtacataatctaatttttatatgcatgtttatgctttttaatttttttatcaaaaattaagtcatctacctactacttgtaacyagcttgtttcataacatgttattttcctgtgtcattaaataattacttcaatgttgtatttcgtttatggatgctttgttgacccttgtttggtctgcca

SEQ ID NO: 239846 - DNA, 201 bp, Homo sapiens
acatcccccaagaagccgcagattttttgccttacttgtacataccttggttatagtacttgcaacattatgaactggttataactaagaccatggtttcsttcattatataatttatttttaaaagctttgtcaaagtataattatatctacccatttataatgtacaatttgatgttctttgatttgtttaccactgtg

SEQ ID NO: 239847 - DNA, 201 bp, Homo sapiens
tgtttcactagggtatacatcggcttccagcttacttccctgttagagttaagattcattgcatttggccgggcgcggtggctcacacctgtaatcccagygttttgggaggccgaggcaggcggatcacgaggtcaggagatccagaccatcctggctaacacggtgaaaccctgtctctactaaaaatacaaaaattag

SEQ ID NO: 239848 - DNA, 201 bp, Homo sapiens; identical to SEQ ID NO: 46934

SEQ ID NO: 239849 - DNA, 201 bp, Homo sapiens
ctttggccacagtctgaaagtcttgtgtgtcctggatctcctactcaggacttttgtccttctaggtctgtgcttttaataggactgtctccaaagttgaygatttcttggccaatgaggcaaagggaaccaaagtggtgggtgcccagtccctgaaagagatggtctccaagctgaagaagccccggcggatcatcctcc

SEQ ID NO: 239850 - DNA, 201 bp, Homo sapiens
tttgctaatgtgctctgttgctgctcgtggcatttttgtatggaaaggagaagcaccctgtaggcgtgggcgggccgatcccgaacttagtcctgcggagygtgcctgtgggtccgtgaggttcacagcccgaatgaacgaattagtgtcttaagtagagaagaagggtgcgggaggagaacccttgctggctgtgtagag

SEQ ID NO: 239851 - DNA, 201 bp, Homo sapiens
acgggtctcctggccgtgctttgctaatgtgctctgttgctgctcgtggcatttttgtatggaaaggagaagcaccctgtaggcgtgggcgggccgatccmgaacttagtcctgcggagtgtgcctgtgggtccgtgaggttcacagcccgaatgaacgaattagtgtcttaagtagagaagaagggtgcgggaggagaac

SEQ ID NO: 239852 - DNA, 201 bp, Homo sapiens
cgctgatcggattggccgtcatgggccagaacttaattctgaacatgaatgaccacggctttgtggtaagcggcgtgggcgcgttgtcttctctctggttyccgggcgctttagccgaggccggcgataggtttgggagcttacgggtctcctggccgtgctttgctaatgtgctctgttgctgctcgtggcatttttgta

SEQ ID NO: 239853 - DNA, 201 bp, Homo sapiens
tgtcagtctataactggtttagaaccactcctctaatggtatcaaatgctgagggaattcctgtgtgctctgaagtgctgaatggcattaagttgtattamacctactcttcgttgagtcttattcaaggtcttttccagtaaaatgccaatgtgtgtttggcttaattattttactttggggatgaggtaggtatcgtga

SEQ ID NO: 239854 - DNA, 201 bp, Homo sapiens
tcctgtgttctgcatgtaggcctttgaggattggaataagacagagctagactcattcctgattgaaatcacagccaatattctcaagttccaagacaccratggcaaacacctgctgccaaagatcagggacagcgcggggcagaagggcacagggaagtggaccgccatctccgccctggaatacggcgtacccgtcac
